United States Patent Application Publication US 2024/0398993 A1 - sequence listing, part 15

SEQ ID NO: 51900 - protein, 176 aa, Homo sapiens
MDAGEFVFLLSEQWCLEKSVSYQAVEILERFMVKQAENICRQATIQPRDNKRESQNWRALKQQLVNKFTLRLVSCVQLASKLSFRNKIISNITVLNFLQALGYLHTKEELLESELDVLKSLNFRINLPTPLAYVETLLEVLGYNGCLVPAMRLHATCLTLLDLVYLLHEPIYESLL

SEQ ID NO: 51901 - protein, 541 aa, Homo sapiens
MYGTVSCAQDWVPSRCCSSAGHGNFPYLCGNLNDVVVSPLLYTCYQNSQSVSRAYEQYGASAIQPISEEMQLLLTVYYLVQLAADQVPLMEDLEQIFLRSWRESHLTEIRQYQQAPPQPFPPAPSAAAPVTSAQLPWLASLAASSCNDSVHVIECAYSLAEGLSEMFRLLVEGKLAKTNYVVIICACRSAAIDSCIAVTGKYQARILSESLLTPAEYQKEVNYELVTGKVDSLGAFFSTLCPEGDIDILLDKFHQENQGHISSSLAASSVTKAASLDVSGTPVCTSYNLEPHSIRPFQLAVAQKLLSHVCSIADSSTQNLDLGSFEKVDFLICIPPSEVTYQQTLLHVWHSGVLLELGLKKEHMTKQRVEQYVLKLDTEAQTKFKAFLQNSFQNPHTLFVLIHDHAHWDLVSSTVHNLYSQSDPSVGLVDRLLNCREVKEAPNIVTLHVTSFPYALQTQHTLISPYNEIHWPASCSNGVDLYHENKKYFGLSEFIESTLSGHSLPLLRYDSSFEAMVTALGKRFPRLHSAVIRTFVLVQHY

SEQ ID NO: 51902 - protein, 706 aa, Homo sapiens
MRELKRTLDAKGHGVLEMPSGTGKTVSLLALIMAYQRAYPLEVTKLIYCSRTVPEIEKVIEELRKLLNFYEKQEGEKLPFLGLALSSRKNLCIHPEVTPLRFGKDVDGKCHSLTASYVRAQYQHDTSLPHCRFYEEFDAHGREVPLPAGIYNLDDLKALGRRQGWCPYFLARYSILHANVVVYSYHYLLDPKIADLVSKELARKAVVVFDEAHNIDNVCIDSMSVNLTRRTLDRCQGNLETLQKTVLRIKETDEQRLRDEYRRLVEGLREASAARETDAHLANPVLPDEVLQEAVPGSIRTAEHFLGFLRRLLEYVKWRLRVQHVVQESPPAFLSGLAQRVCIQRKPLRFCAERLRSLLHTLEITDLADFSPLTLLANFATLVSTYAKGFTIIIEPFDDRTPTIANPILHFSCMDASLAIKPVFERFQSVIITSGTLSPLDIYPKILDFHPVTMATFTMTLARVCLCPMIIGRGNDQVAISSKFETREDIAVIRNYGNLLLEMSAVVPDGIVAFFTSYQYMESTVASWYEQGILENIQRNKLLFIETQDGAETSVALEKYQEACENGRGAILLSVARGKVSEGIDFVHHYGRAVIMFGVPYVYTQSRILKARLEYLRDQFQIRENDFLTFDAMRHAAQCVGRAIRGKTDYGLMVFADKRFARGDKRGKLPRWIQEHLTDANLNLTVDEGVQVAKYFLRQMAQPFHR

SEQ ID NO: 51903 - protein, 279 aa, Homo sapiens
  MOD_RES (1)..(1): Any amino acid
XSQPPGGGGPGIRKDAFADAVQRARQIAAKIGGDAATTVNNSTPDFGFGGQKRQLEDGDQPESKKLASQGDSISSQLGPIHPPPRTSMTEEYRVPDGMVGLNSGGLPERSVSLTGAPESVQKAKMMLDDIVSRGRGGPPGQFHDNANGGQNGTVQEIMIPAGKAGLVIGKGGETIKQLQERAGVKMILIQDGSQNTNVDKPLRIIGDPYKVQQACEMVMDILRERDQGGFGDRNEYGSRIGGGIDVPVPRHSVGVVIGRSGEMIKKIQNDAGVRIQFKQ

SEQ ID NO: 51904 - protein, 149 aa, Homo sapiens
MPHSYPALSAEQKKELSDIALRIVAPGKGILAADESVGSMAKRLSQIGVENTEENRRLYRQVLFSADDRVKKCIGGVIFFHETLYQKDDNGVPFVRTIQDKGIVVGIKVDKGVVPLAGTDGETTTQGLDGLSERCAQYKKDGADFAKWR

SEQ ID NO: 51905 - protein, 1877 aa, Homo sapiens
MSDTDSDEDSAGGGPFSLAGFLFGNINGAGQLEGESVLDDECKKHLAGLGALGLGSLITELTANEELTGTDGALVNDEGWVRSTEDAVDYSDINEVAEDESRRYQQTMGSLQPLCHSDYDEDDYDADCEDIDCKLMPPPPPPPGPMKKDKDQDSITGVSENGEGIILPSIIAPSSLASEKVDFSSSSDSESEMGPQEATQAESEDGKLTLPLAGIMQHDATKLLPSVTELFPEFRPGKVLRFLRLFGPGKNVPSVWRSARRKRKKKHRELIQEEQIQEVECSVESEVSQKSLWNYDYAPPPPPEQCLSDDEITMMAPVESKFSQSTGDIDKVTDTKPRVAEWRYGPARLWYDMLGVPEDGSGFDYGFKLRKTEHEPVIKSRMIEEFRKLEENNGTDLLADENFLMVTQLHWEDDIIWDGEDVKHKGTKPQRASLAGWLPSSMTRNAMAYNVQQGFAATLDDDKPWYSIFPIDNEDLVYGRWEDNIIWDAQAMPRLLEPPVLTLDPNDENLILEIPDEKEEATSNSPSKESKKESSLKKSRILLGKTGVIKEEPQQNMSQPEVKDPWNLSNDEYYYPKQQGLRGTFGGNIIQHSIPAVELRQPFFPTHMGPIKLRQFHRPPLKKYSFGALSQPGPHSVQPLLKHIKKKAKMREQERQASGGGEMFFMRTPQDLTGKDGDLILAEYSEENGPLMMQVGMATKIKNYYKRKPGKDPGAPDCKYGETVYCHTSPFLGSLHPGQLLQAFENNLFRAPIYLHKMPETDFLIIRTRQGYYIRELVDIFVVGQQCPLFEVPGPNSKRANTHIRDFLQVFIYRLFWKSKDRPRRIRMEDIKKAFPSHSESSIRKRLKLCADFKRTGMDSNWWVLKSDFRLPTEEEIRAMVSPEQCCAYYSMIAAEQRLKDAGYGEKSFFAPEEENEEDFQMKIDDEVRTAPWNTTRAFIAAMKGKCLLEVTGVADPTGCGEGFSYVKIPNKPTQQKDDKEPQPVKKTVTGTDADLRRLSLKNAKQLLRKFGVPEEEIKKLSRWEVIDVVRTMSTEQARSGEGPMSKFARGSRFSVAEHQERYKEECQRIFDLQNKVLSSTEVLSTDTDSSSAEDSDFEEMGKNIENMLQNKKTSSQLSREREEQERKELQRMLLAAGSAASGNNHRDDDTASVTSLNSSATGRCLKIYRTFRDEEGKEYVRCETVRKPAVIDAYVRIRTTKDEEFIRKFALFDEQHREEMRKERRRIQEQLRRLKRNQEKEKLKGPPEKKPKKMKERPDLKLKCGACGAIGHMRTNKFCPLYYQTNAPPSNPVAMTEEQEEELEKTVIHNDNEELIKVEGTKIVLGKQLIESADEVRRKSLVLKFPKQQLPPKKKRRVGTTVHCDYLNRPHKSIHRRRTDPMVTLSSILESIINDMRDLPNTYPFHTPVNAKVVKDYYKIITRPMDLQTLRENVRKRLYPSREEFREHLELIVKNSATYNGPKHSLTQISQSMLDLCDEKLKEKEDKLARLEKAINPLLDDDDQVAFSFILDNIVTQKMMAVPDSWPFHHPVNKKFVPDYYKVIVNPMDLETIRKNISKHKYQSRESFLDDVNLILANSVKYNGPESQYTKTAQEIVNVCYQTLTEYDEHLTQLEKDICTAKEAALEEAELESLDPMTPGPYTPQPPDLYDTNTSLSMSRDASVFQDESNMSVLDIPSATPEKQMRQGRGRLGEEDSDVDIEGYDDEEEDGKPKTPAPEGEDGDGDLADEEEGTVQQPQASVLYEDLLMSEGEDDEEDAGSDEEGDNPFSAIQLSESGSDSDVGSGGIRPKQPRMLQENTRMDMENEESMMSYEGDGGEASHGLEDSNISYGSYEEPDPKSNTQDTSFSSIGNFRPGVVAHTCNLSTLGGRGGQIT

SEQ ID NO: 51906 - protein, 77 aa, Homo sapiens
RGQGQETSGPPRACPPEPPPEHWEEDASWGPHRLAVLVPFRERFEELLVFVPHMRRFLSRKKIRHHIYVLNQVDHFR

SEQ ID NO: 51907 - protein, 216 aa, Homo sapiens
GDHRVELYKVLSSLGYHVVTFDYRGWGDSVGTPSERGMTYDALHVFDWIKARSGDNPVYIWGHSLGTGVATNLVRRLCERETPPDALILESPFTNIREEAKSHPFSVIYRYFPGFDWFFLDPITSSGIKFANDENVKHISCPLLILHAEDDPVVPFQLGRKLYSIAAPARSFRDFKVQFVPFHSDLGYRHKYIYKSPELPRILREFLGKSEPEHQH

SEQ ID NO: 51908 - protein, 242 aa, Homo sapiens
  MOD_RES (1)..(1): Any amino acid
XFFNALSDATMKIVQIIMCYMPLGILFLIAGKIIEVEDWEIFRKLGLYMATVLTGLAIHSIVILPLIYFIVVRKNPFRFAMGMAQALLTALMISSSSATLPVTFRCAEENNQVDKRITRFVLPVGATINMDGTALYEAVAAVFIAQLNDLDLGIGQIITIRDRFRTMVNVLGDAFGTGIVEKLSKKELEQMDVSSEVNIVNPFALESTILDNEDSDTKKSYVNGGFAVDKSDTISFTQTSQF

SEQ ID NO: 51909 - protein, 147 aa, Homo sapiens
MAFELATGDYLFEPHSGEDYSRDEDHIAHIIELLGSIPRHFALSGKYSREFFNRRDHIALIIELLGKVPRKYAMLGKYSKEFFTRKGELRHITKLKPWSLFDVLVEKYGWPHEDAAQFTDFLIPMLEMVPEKRASAGECLRHPWLNS

SEQ ID NO: 51910 - protein, 361 aa, Homo sapiens
MDQDYERRLLRQIVIQNENTMPRVTEMRRTLTPASSPVSSPSKHGDRFIPSRAGANWSVNFHRINENEKSPSQNRKAKDATSDNGKDGLAYSALLKNELLGAGIEKVQDPQTEDRRLQPSTPEKKGLFTYSLSTKRSSPDDGNDVSPYSLSPVSNKSQKLLRSPRKPTRKISKIPFKVLDAPELQDDFYLNLVDWSSLNVLSVGLGTCVYLWSACTSQVTRLCDLSVEGDSVTSVGWSERGNLVAVGTHKGFVQIWDAAAGKKLSMLEGHTARVGALAWNAEQLSSGSRDRMILQRDIRTPPLQSERRLQGHRQEVCGLKWSTDHQLLASGGNDNKDNHCSVSTRAPKCAIWPGPSTPTSW

SEQ ID NO: 51911 - protein, 452 aa, Homo sapiens
MKGGNLDLNGLDHLTTARVTTAFVAGFPLDKAVAYAKLRNPFVINDLNMQYLIQDRREVYSILQAEGILLPRYAILNRDPNNPKECNLIEGEDHVEVNGEVFQKPFVEKPVSAEDHNVYIYYPTSAGGGSQRLFRKIGSRSSVYSPESNVRKTGSYIYEEFMPTDGTDVKVYTVGPDYAHAEARKSPALDGKVERDSEGKEVRYPVILNAREKLIAWKVCLAFKQTVCGFDLLRANGQSYVCDVNGFSFVKNSMKYYDDCAKILGNIVMRELAPQFHIPWSIPLEAEDIPIVPTTSGTMMELRCVIAVIRHGDRTPKQKMKMEVRHQKFFDLFEKCDGYKSGKLKLKKPKQLQEVLDIARQLLMELGQNNDSEIEENKPKLEQLKTVLEMYGHFSGINRKVQLTYLPHGCPKTSSEEEDSRREEPSLLLVLKWGGELTPAGRVQAEELGRAF

SEQ ID NO: 51912 - protein, 83 aa, Homo sapiens
MNAGPGCEPCTKRPRWGAATTSPAASDARSFPSRQRRVLDPKDAHVQFRVPPSSPACVPGRAGQHRGSATSLVWIVKKTTIQE

SEQ ID NO: 51913 - protein, 27 aa, Homo sapiens
HYLSTKNGAGLSKSKGSRIGFDSTQWK

SEQ ID NO: 51914 - protein, 679 aa, Homo sapiens
  MOD_RES (1)..(1): Any amino acid
XEELRTQLTKAEGDRKGLQHQVSQISKQQSNYQDEQGEDWRFRRGVEREKQDLEKQMSDLRVQLNFSAMASELEEVKRCMERKDKEKAHLASQVENLTRELENGEKQQLQMLDRLKEIQNHFDTCEAERKHADLQISELTRHAEDATKQAERYLSELQQSEALKEEAEKRREDLKLKAQESIRQWKLKHKKLERALEKQSETVDELTGKNNQILKEKDELKTQLYAALQQIENLRKELNDVLTKRALQEEELHSKEEKLRDIKSHQADLELEVKNSLDTIHRLESELKKQSKIQSQMKVEKAHLEEEIAELKKSQAQDKAKLLEMQESIKDLSAIRADLANKLAEEERAKKAVLKDLSDLTAQAKSRDEETATIITQLKLERDVHQRELKDLTSSLQSVKTKHEQNIQELMKHFKKEKSEAENHIRTLKAESLEEKNMAKIHRGQLEKLKSQCDRLTEELTQNENENKKLKLKYQCLKDQLEEREKHISIEEEHLRRMEEARLQLKDQLLCLETEQESILGVIGKEIDAACKTFSKDSVEKLKVFSSGPDIHYDPHRWLAESKTKLQWLCEELKERENREKNLRHQLMLCRQQLRNLTENKESELQCLFQQIERQEQLLDEIHREKRDLLEETQRKDEEMGSLQDRVIALETSTQVALDHLESVPEKLSLLEDFKDFRR

SEQ ID NO: 51915 - protein, 62 aa, Homo sapiens
MVYRDDYFIRHSISVSAVIVRAWITHKYSGRDWNVKWEENLLHAVAKNYTLLQTIPPFERPF

SEQ ID NO: 51916 - protein, 198 aa, Homo sapiens
MFFERHLENLLKHFIPGTTDPAVILDLLPLCRNYVRRVHVDQFLPPVQLPAQLRPGDQSDSGSEGEMEEPTVDHYQLGDLVAGLSHLEELDLVYDVKDCGMNFEWNLFLFTYRDCLSLAAAIKACHTLKDGGKQLLEGMSDNKTLLEFDLRLSDVAQESEYLIGQALYANREAARQRALNPSHFMSTITANGPENSVG

SEQ ID NO: 51917 - protein, 374 aa, Homo sapiens
MASVLAKKEEEKKRESHKQSLLKEKKRLTINNVARQWDLQQQRVANIATNEDRKDSDSPQDPCQIDGSTLSAFPEETGPLDSGLNNALQGLSVIDTYLVEVDGDTLSLYGSGALESLDRNWSVQTAGMITTVSFTFIEFDEIVQVLPKLKIKFPNSLHLKFKETNLVMLQQFNALAQLRRIDQLTIDPQGNPVVNFTLWKYYVLFRLSHFSMQKINGTEVTQNDMIMAERLFGILAHVASSELPQYRLISILGDARKKQFRYLLESKGKKPGIINEENNDSKRLVGENTNRATLNYTTRDFYNEKLEEIKEKKKFCKTYIEDLVKEATEINMKNEALQKLWPQMFIELVRDAVIEIRNKNSYMKLCLQQITDQK

SEQ ID NO: 51918 - protein, 54 aa, Homo sapiens
  MOD_RES (1)..(1): Any amino acid
XELVPQDLWAAKAWLITARSLYPADFNIQYEMYTIERNAERTATAGRLLYDMFI

SEQ ID NO: 51919 - protein, 210 aa, Homo sapiens
MNLSLVLAAFCLGIASAVPKFDQNLDTKWYQWKATHRRLYGANEEGWRRAVWEKNMKMIELHNGEYSQGKHGFTMAMNAFGDMDEICKYRPENSVANDTGFTVVAPGKEKALMKAVATVGPISVAMDAGHSSFQFYKSGIYFEPDCSSKNLDHGVLVVGYGFEGANSNNSKYWLVKNSWGPEWGSNGYVKIAKDKNNHCGIATAASYPNV

SEQ ID NO: 51920 - protein, 120 aa, Homo sapiens
  MOD_RES (1)..(1): Any amino acid
XYVGLPGPPEQTSCLWGDPNVTVLAGLTPGNSPIFYREVLPLNQAHRVEVVLLHGKAFNSHTWEQLGTLQLLSQRGYRAVALDLPAHHAQRHDQQGSRGGAPIGDALPPVPAYPHCPAQA

SEQ ID NO: 51921 - protein, 158 aa, Homo sapiens
MLLPVFTLKLRHKISPRMVAIGRYDGTHPCLAAATQTGKVFIHNPHTRNQHVSASRVFQSPLESDVSLLSINQAVSCLTAGVLNPELGYDALLVGTQTNLLAYDVYNNSDLFYREVADGANAIVLGTLGDISSPLAIIGGNCALQGFNHEGSDLFWTV

SEQ ID NO: 51922 - protein, 38 aa, Homo sapiens
NPFLLKIQKLARRRRLQSPVIEKMNKISESSSTSSEKK

SEQ ID NO: 51923 - protein, 134 aa, Homo sapiens
MSTVHEILCKLSLEGDHSTPPSAYGSVKAYTNFDAERDALNIETAIKTKGVDEVTIVNILTNRSNAQRQDIAFAYQRRTKKELASALKSALSGHLETVILGLLKTPAQYDASELKASMKGLGTDEDSLIEIICS

SEQ ID NO: 51924 - protein, 448 aa, Homo sapiens
  MOD_RES (1)..(1): Any amino acid
XVVTTAIKEETEKVAAVKQLEESKTKIENLLDWLSNVDKDSERAGTKHKQVIEQNGTHFQEGDGKSAIGEEDEVNGNLLETDVDGQVGTTQENLNQQYQKVKAQHEKIISQHQAVIIATQSAQVLLEKQGQYLSPEEKEKLQKNMKELKVHYETALAESEKKMKLTHSLQEELEKFDADYTEFEHWLQQSEQELENLEAGADDINGLMTKLKRQKSFSEDVISHKGDLRYITISGNRVLEAAKSCSKRDGGKVDTSATHREVQRKLDHATDRFRSLYSKCNVLGNNLKDLVDKYQHYEDASCGLLAGLQACEATASKHLSEPIAVDPKNLQRQLEETKALQGQISSQQVAVEKLKKTAEVLLDARGSLLPAKNDIQKTLDDIVGRYEDLSKSVNERNEKLQITLTRSLSVQDGLDEMLDWMGNVESSLKEQDVGTGYCRSSEQYKCHE

SEQ ID NO: 51925 - protein, 116 aa, Homo sapiens
MNRLRNAKIYVERAVKQKKIFTIQGCYPVIRCLLRRRGWVEKKMVHRSGPTLLPPQKDLDSSAMGDSDTTEDEDEDEDEEFQPSQLFDFDDLLKFDDLDGTHALMASCAWTTWRRC

SEQ ID NO: 51926 - protein, 163 aa, Homo sapiens
MAAAAVTRGTPGENSHHLKIFLPKKLLECLPRCPLLPPERLRWNTNEEIASYLITFEKHDEWLSCAPKTRPQNGSIILYNRKKVKYRKDGYLWKKRKDGKTTREDHMKLKVQGMEGLNRGRVGEQTSPPPTPACLLAVSLWLLRSLFHRPHIPSALLLAAPEP

SEQ ID NO: 51927 - protein, 274 aa, Homo sapiens
MTSHKSGRDQRHVTQSGCNRKFKCTECGKAFKYKHHLKEHLRIHSGEKPYECPNCKKRFSHSGSYSSHISSKKCISLIPVNGRPRTGLKTSQCSSPSLSASPGSPTRPQIRQKIENKPLQEQLSVNQIKTEPVDYEFKPIVVASGINCSTPLQNGVFTGGGPLQATSSPQGMVQAVVLPTVGLVSPISINLSDIQNVLKVAVDGNVIRQVLENNQANLASKEQETINASPIQQGGHSVISAISLPLVDQDGTTKIIINYSLEQPSQLQVVPQNL

SEQ ID NO: 51928 - protein, 236 aa, Homo sapiens
MAALTIATGTGNWFSALALGVTLLKCLLIPTYHSTDFEVHRNWLAITHSLPISQWYYEATSEWTLDYPPFFAWFEYILSHVAKYFDQEMLNVHNLNYSSSRTLLFQRFSVIFMDVLFVYAVRECCKCIDGKKVGKELTEKPKFILSVLLLWNFGLLIVDHIHFQYNGFLFGLMLLSIARLFQRQGLPILSRLVLNSWGQAILPRRLTKVLGLQVKGIWKEHFSLLFSYISSISTSM

SEQ ID NO: 51929 - protein, 81 aa, Homo sapiens
MKGSRIELGDVTPHNIKQLKRLNQVIFPVSYNDKFYKKFGFEIIETKKNYYKRIEPADAHVLQKNLKVPSGQNADVQKTDN

SEQ ID NO: 51930 - protein, 545 aa, Homo sapiens
  MOD_RES (1)..(1): Any amino acid
XYQNHTVVFLGSEKGIILKFLARIGNSGFLNDSLFLEEMSVYNSEKCSYDGVEDKRIMGMQLDRASSSLYVAFSTCVIKVPLGRCERHGKCKKTCIASRDPYCGWIKEGGACSHLSPNSRLTFEQDIERGNTDGLGDCHNSFVALNGVIRESYLKGHDQLVPVTLLAIAVILAFVMGAVFSGITVYCVCDHRRKDVAVVQRKEKELTHSRRGSMSSVTKLSGLFGDTQSKDPKPEAILTPLMHNGKLATPGNTAKMLIKADQHHLDLTALPTPESTPTLQQKRKPSRGSREWERNQNLINACTKDMPPMGSPVIPTDLPLRASPSHIPSVVVLPITQQGYQHEYVDQPKMSEVAQMALEDQAATLEYKTIKEHLSSKSPNHGVNLVENLDSLPPKVPQREASLGPPGASLSQTGLSKRLEMHHSSSYGVDYKRSYPTNSLTRSHQATTLKRNNTNSSNSSHLSRNQSFGRGDNPPPAPQRVDSIQVHSSQPSGQAVTVSRQPSLNAYNSLTRSGLKRTPSLKPDVPPKPSFAPLSTSMKPNDACT

SEQ ID NO: 51931 - protein, 68 aa, Homo sapiens
MSEDEEKVKLRRLEPAIQKFIKIVIPTDLERLRKHQINIEKYQRCRIWDKLHEEHINAGRTVQFRNYI

SEQ ID NO: 51932 - protein, 228 aa, Homo sapiens
MKIPWGSIPVLMLLLLLGLIDISQAQLSCTGPPAIPGIPGIPGTPGPDGQPGTPGIKGEKGLPGLAGDHGEFGEKGDPGIPGNPGKVGPKGPMGPKGGPGAPGAPGPKGESGDYKATQKIAFSATRTINVPLRRDQTIRFDHVITNMNNNYEPRSGKFTCKVPGLYYFTYHASSRGNLCVNLMRGRERAQKVVTFCDYAYNTFQVTTGGMVLKLEQGENVFLQATDKN

SEQ ID NO: 51933 - protein, 58 aa, Homo sapiens
MNPQQQRMAAIGTDKELSDLLDFSAMFSPPVNSGKTRPTTLGSSQFSGSGFYRQPSLQ

SEQ ID NO: 51934 - protein, 384 aa, Homo sapiens
  MOD_RES (1)..(1): Any amino acid
XPKAEVWDQEFDPVMVILRTVYRRDVQSAMDRYTAFLKQSGKFPGNPWPPYKKRTSLHPSYKGLMRLLHCKTLHIVLFTLLYKILMDHQNLSEHVLCMVLYLIELGLENSAEEESDEEASVGGPERCHDSWFPGSNLVSNMRHFINYVRVRVPETAPEVKRDSPASTSSDNLGSLQNSGTAQVFSLVAERRKKFQEIINRSSSEANQVVRPKTSSKWSAPGSAPQLTTAILEIKESILSLLIKLHHKLSGKQNSYYPPWLDDIEILIQPEIPKYSHGDGITAVERILLKAASQSRMNKRIIEEICRKVTPPVPPKKVTAAEKKTLDKEERRQKARERQQKLLAEFASRQKSFMETAMDVVRQNKNNFLRNQLSNVPRADWVVLP

SEQ ID NO: 51935 - protein, 128 aa, Homo sapiens
MPRTKQIHPRNLRDKIEEAQKELNGAEVSKKEILQAGVKGTSESLKGVKRKKIVAENHLKKIPKSPLRNPLQAKHKQNTEESSFAVLHSASESHKKQNYIPVKNGKQFTKQNGETPGIIAEASKSEES

SEQ ID NO: 51936 - protein, 127 aa, Homo sapiens
MAESSSESDHFRCRDRLSPWAARSTHRGTRSLPTVEVTEKVNTITSTLQDTSRNLRQVDQMLGRYREYSNGQAGAIEHLKESLEQSIDQLRSQRLLRNSGGRSISVTSLSASDLDGGTGSELHHFPP

SEQ ID NO: 51937 - protein, 151 aa, Homo sapiens
  MOD_RES (1)..(1): Any amino acid
XLLLAVGSLIGYSRSPNDKSINALLMTVTGFFIGGPSNMISSAISADLGRQELIQRSSEALATVTGIVDGSGSIGAAVGQYLVSLIRDKLGWMWVFYFFILMTGSHIEGVTGARETERTMSATSGPLGLRVCPNLGLSRSSSLILDCQASL

SEQ ID NO: 51938 - protein, 146 aa, Homo sapiens
MGLGPRSLPFSRKRKRKMTKFQEMVTFKDVAVVFTEEELGLLDSVQRKLYRDVMLENFRNLLLVAHQPFKPDLISQLEREEKLLMVETETPRDGCSGRKNQQKMESIQEVTVSYFSPKELSSRQTWQQSAGGLIRCQDFLKVFQGK

SEQ ID NO: 51939 - protein, 93 aa, Homo sapiens
  MOD_RES (1)..(1): Any amino acid
XASEGKTVEVPFKGDVEHTIRDILGGIRSTCTYVGAAKLKELSRRTTFIRVTQQVNPIFSEGSCSNSVLLYLHTQNAQGTHWGGSKEANSLRK

SEQ ID NO: 51940 - protein, 609 aa, Homo sapiens
MGEPAGVAGTMESPFSPGLFHRLDEDWDSALFAELGYFTDTDELQLEAANETYENNFDNLDFDLDLMPWESDIWDINNQICTVKDIKAEPQPLSPASSSYSVSSPRSVDSYSSTQHVPEELDLSSSSQMSPLSLYGENSNSLSSAEPLKEDKPVTGPRNKTENGLTPKKKIQVNSKPSIQPKPLLLPAAPKTQTNSSVPAKTIIIQTVPTLMPLAKQQPIISLQPAPTKGQTVLLSQPTVVQLQAPGVLPSAQPVLAVAGGVTQLPNHVVNVVPAPSANSPVNGKLSVTKPVLQSTMRNVGSDIAVLRRQQRMIKNRESACQSRKKKKEYMLGLEARLKAALSENEQLKKENGTLKRQLDEVVSENQRLKVPSPKRRVVCVMIVLAFIILNYGPMSMLEQDSRRMNPSVSPANQRRHLLGFSAKEAQDTSDGIIQKNSYRYDHSVSNDKALMVLTEEPLLYIPPPPCQPLINTTESLRLNHELRGWVHRHEVERTKSRRMTNNQQKTRILQGALEQGSNSQLMAVQYTETTSSISRNSGSELQVYYASPRSYQDFFEAIRRRGDTFYVVSFRRDQPQSFFSAARGQLRTMFPARLQLYWSMKTKYFPYY

SEQ ID NO: 51941 - protein, 44 aa, Homo sapiens
MEKAHEDSEKLREIVLPMEKEIEELKAKLLRAEELIQEIQRRPR

SEQ ID NO: 51942 - protein, 221 aa, Homo sapiens
  MOD_RES (1)..(1): Any amino acid
XSNLQMRAAFVSEQQQKLSRLQYSRDVRKLLLSINVTNTRTSERSGEDAHEALLTLVVPPALLLSSVRPPGACQANETIFCELGNPFKRNQRMELLIAFEVIGVTLHTRDLQVQLQLSTSSHQDNLWPMILTLLVDYTLQTSLSMVNHRLQSFFGGTVMGESGMKTVEDVGSPLKYEFQPDPTLTMRQGPRGGVLSYPWLSEPAWLCPLPHGLCPKAHLRS

SEQ ID NO: 51943 - protein, 117 aa, Homo sapiens
MNQEDLDPDSTTDVGDVTNTEEELIRECEEMWKDMEECQNKLSLIGTETLTDSNAQLSLLIMQVKCLTAELSQWQKKTPETIPLTEDVLITLGKEEILQMMILSYKPVGCPLNSLQF

SEQ ID NO: 51944 - protein, 259 aa, Homo sapiens
MVSKRIAQETFDAAVRENIEEFAMGPEEAVKEAVEQFESQGVDLSNIVKTAPKVSADGSQEPTHDILQMLSDLQESVASSRPQEVSAYLTRFCDQCKQDKACRFLAAQKGAYPIIFTAWKLATAGDQGLLLQSLNALSVLTDGQPDLLDAQGLQLLVATLTQNADEADLTCSGIRCVRHACLKHEQNRQDLVKAGVLPLLTGAITHHGHHTDVVREACWALRVMTFDDDIRVPFGHAHNHAKMIVQENKGLKVLIEATK

SEQ ID NO: 51945 - protein, 154 aa, Homo sapiens
MSGLAATTFHWKKCRLDLPGHVALQACKRLPDEHNDVQKKTFTKWINARFSKSGKPPINDMFTDLKDGRKLLDLLEGLTGTSLPKERGSTRVHALNNVNRVLQVLHQNNVELVNIGGTDIVDGNHKLTLGLLWSIILHWQVKDVMKDVMSDLQQ

SEQ ID NO: 51946 - protein, 208 aa, Homo sapiens
  MOD_RES (1)..(1): Any amino acid
XNPYCAGIQGIVDAYRQALPQVRLYGPTNFAPIINHVARFAAQAAHQGTASQYFMLLLLTDGAVTDVEATREAVVRASNLPMSVIIVGVGGADFEAMEQLDADGGPLHTRSGQAAARDIVQFVPYRRFQNVSPSGGIGTDRARRSAHTTGLILQGPGLGPAQATSTLSQGSCTGPPGLGSLGGCGKSSILCPRGPSGPQPNPSHSPQC

SEQ ID NO: 51947 - protein, 451 aa, Homo sapiens
MAATEISVLSEQFTKIKELELMPEKGLKEEEKDGVCREKDHRSPSELEAERTSGAFQDSVLEEEVELVLAPSEESEKYILTLQTVHFTSEAVELQDMSLLSIQQQEGVQVVVQQPGPGLLWLEEGPRQSLQQCVAISIQQELYSPQEMEVLQFHALEENVMVASEDSKLAVSLAETTGLIKLEEEQEKNQLLAERTKEQLFFVETMSGDERSDEIVLTVSNSNVEEQEDQPTAGQADAEKAKSTKNQRKTKGAKGTFHCDVCMFTSSRMSSFNRHMKTHTSEKPHLCHLCLKTFRTVTLLRNHVNTHTGTRPYKCNDCNMAFVTSGELVRHRRYKHTHEKPFKCSMCKYASVEASKLKRHVRSHTGERPFQCCQCSYASRDTYKLKRHMRTHSGEKPYECHICHTRFTQSGTMKIHILQKHGENVPKYQCPHCATIIARKSDLRFLGLPFP

SEQ ID NO: 51948 - protein, 45 aa, Homo sapiens
MISSCTTRKMAEQDRRKEKGSGLSDWNHSYMIPGGRNVTRCVSDD

SEQ ID NO: 51949 - protein, 337 aa, Homo sapiens
MPALEPAPPLLADLGPALEPESPAALGPPGYLHSAPGPAPAPGEGPPPGTVLEPQSAPESSCPCRGSVKNQPSEELPDMTTFPPRLLAEQLTLMDAELFKKVVLHECLGCIWGQGHLKGNEHMAPTVRATIAHFNRLTNCITTSCLGDHSMRARDRARVVEHWIKVARECLSLNNFSSVHVIVSALCSNPIGQLHKTWAGVSSKSMKELKELCKKDTAVKRDLLIKAGSFKVATQERNPQRVQMRLRRQKKGVVPFLGDFLTELQRLDSAIPDDLDGNTNKRSKEVRVLQEMQLLQVAAMNYRLRPLEKFVTYFTRMEQLSDKESYKLSCQLEPENP

SEQ ID NO: 51950 - protein, 2099 aa, Homo sapiens
MTLHATRGAALLSWVNSLHVADPVEAVLQLQDCSIFIKIIDRIHGTEEGQQILKQPVSERLDFVCSFLQKNRKHPSSPECLVSAQKVLEGSELELAKMTMLLLYHSTMSSKSPRDWEQFEYKIQAELAVILKFVLDHEDGLNLNEDLENFLQKAPVPSTCSSTFPEELSPPSHQAKREIRFLELQKVASSSSGNNFLSGSPASPMGDILQTPQFQMRRLKKQLADERSNRDELELELAENRKLLTEKDAQIAMMQQRIDRLALLNEKQAASPLEPKELEELRDKNESLTMRLHETLKQCQDLKTEKSQMDRKINQLSEENGDLSFKLREFASHLQQLQDALNELTEEHSKATQEWLEKQAQLEKELSAALQDKKCLEEKNEILQGKLSQLEEHLSQLQDNPPQEKGEVLGDVLQLETLKQEAATLAANNTQLQARVEMLETERGQQEAKLLAERGHFEEEKQQLSSLITDLQSSISNLSQAKEELEQASQAHGARLTAQVASLTSELTTLNATIQQQDQELAGLKQQAKEKQAQLAQTLQQQEQASQGLRHQVEQLSSSLKQKEQQLKEVAEKQEATRQDHAQQLATAAEEREASLRERDAALKQLEALEKEKAAKLEILQQQLQVANEARDSAQTSVTQAQREKAELSRKVEELQACVETARQEQHEAQAQVAELELQLRSEQQKATEKERVAQEKDQLQEQLQALKESLKVTKGSLEEEKRRAADALEEQQRCISELKAETRSLVEQHKRERKELEEERAGRKGLEARLQQLGEAHQAETEVLRRELAEAMAAQHTAESECEQLVKEVAAWRERYEDSQQEEAQYGAMFQEQLMTLKEECEKARQELQEAKEKVAGIESHSELQISRQQNELAELHANLARALQQVQEKEVRAQKLADDLSTLQEKMAATSKEVARLETLVRKAGEQQETASRELVKEPARAGDRQPEWLEEQQGRQFCSTQAALQAMEREAEQMGNELERLRAALMESQGQQQEERGQQEREVARLTQERGRAQADLALEKAARAELEMRLQNALNEQRVEFATLQEALAHALTEKEGKDQELAKLRGLEAAQIKELEELRQTVKQLKEQLAKKEKEHASGSGAQSEAAGRTEPTGPKLEALRAEVSKLEQQCQKQQEQADSLERSLEAERASRAERDSALETLQGQLEEKAQELGHSQSALASAQRELAAFRTKVQDHSKAEDEWKAQVARGRQEAERKNSLISSLEEEVSILNRQVLEKEGESKELKRLVMAESEKSQKLEEGCACCRQRQPATVPELQNAALLCGRRCRASGREKQRVASENLRQELTSQAERAEELGQELKAWQEKFFQKEQALSTLQLEHTSTQALVSELLPAKHLCQQLQAEQAAAEKRHREELEQSKQAAGGLRAELLRAQRELGELIPLRQKVAEQERTAQQLRAEKASYAEQLSMLKKAHGLLAEENRGLGERANLGRQFLEVELDQAREKYVQELAAVRADAETRLAEVQREAQSTARELEVMTAKYEGAKVKVLEERQRFQEERQKLTAQVEELSKKLADSDQASKVQQQKLKAVQAQGGESQQEAQRLQAQLNELQAQLSQKEQAAEHYKLQMEKAKTHYDAKKQQNQELQEQLRSLEQLQKENKELRAEAERLGHELQQAGLKTKEAEQTCRHLTAQVRSLEAQVAHADQQLRDLGKFQVATDALKSREPQAKPQLDLSIDSLDLSCEEGTPLSITSKLPRTQPDGTSVPGEPASPISQRLPPKVESLESLYFTPIPARSQAPLESSLDSLGDVFLDSGRKTRSARRRTTQIINITMTKKLDVEEPDSANSSFYSTRSAPASQASLRATSSTQSLARLGSPDYGNSALLSLPGYRPTTRSSARRSQAGVSSGAPPGRNSFYMGTCQDEPEQLDDWNRIAELQQRNRVCPPHLKTCYPLESRPSLSLGTITDEEMKTGDPQETLRRASMQPIQIAEGTGITTRQQRKRVSLEPHQGPGTPESKKATSCFPRPMTPRDRHEGRKQSTTEAQKKAAPASTKQADRRQSMAFSILNTPKKLGNSLLRRGASKKALSKASPNTRSGTRRSPRIATTTASAATAAAIGATPRAKGKAKH

SEQ ID NO: 51951 - protein, 93 aa, Homo sapiens
METELPSLLLPNHLAMMETLEDAPDPFFGMMSVDPRLPSPFDIPQIRHLLEAAIPERVEEIPPEVPTEPREPERIPVTVLPPEAITILEAEPI

SEQ ID NO: 51952 - protein, 124 aa, Homo sapiens
MGMWASLDALWEMPAEKRIFGAVLLFSWTVYLWETFLAQRQRRIYKTTTHVPPELGQIMDSETFEKSRLYQLDKSTFSFWSGLYSETEGTGLSLLPCWSAVSQSRLTGALTSQAQAILSPQSPK

SEQ ID NO: 51953 - protein, 80 aa, Homo sapiens
LQQQQQQQQQQQQQQQQQQQQQQQQQQQQQQQQQQQQQQQQHPVQQQQQQQQQQQQQLAAQQLVFQQQLLQMQQLQQQQH

SEQ ID NO: 51954 - protein, 237 aa, Homo sapiens
  MOD_RES (1)..(1): Any amino acid
XPAGQQTVEIDLRHRIQLPDLENQRNFNELSRIVLEVRERVRQEQQEGGHEAGEGRGRQGPRESQPSPAQPRAEAPSKGPDGTPGEDGGEPGDAVAAAEQPAQCGQGQPFVLPVGVSSRNEDYPRTCRMWNSTFQTYKKEVCLPRHSMHPGPWAICCECQTRFGGRLPVSRVEAALPYWVPLSLRPRKQHPCWMHAAGTTAGGSAVMSACCPSSSSSRPPTRTSYRLLQRVCCPSAS

SEQ ID NO: 51955 - protein, 1024 aa, Homo sapiens
MARHGPPWSRLDAQQERDVRELVRGVAGLQDEADPNFQLALNFAWSNFRFHRFLDVNSHKIEKTIEGIYEKFVIHSDLSKAASWKRLTEEFLNAPLPSIKEIKTDAHYSILSLLLCLSDSPSNSSYVETPRNKEVEKKDDFDWGKYLMEDEEMDIGPYMDTPNWSEESEEENDQQPLSREDSGIQVDRTPLEEQDQNRKLDPCISWKDEPDDRSWLEHHVVHQYWTARPSHFPHSLHLHSNLAAVWDQHLYSSDPLYVPDDRVLVTETQVIRETLWLLSGVKKLFIFQLIDGKVTVRNNIIVTHLTHSCLRSVLEQIAAYGQVVFRLQEFIDEVMGHSSESMLPGSGSVPKKSTEAPFRTYQAFMWALYKYFISFKEELAEIEKCIINNDTTITLAIVVDKLAPRLSQLKVLHKVFSTGVAEVPPDTRNVVRASHLLNTLYKAILEYDNVGEASEQTVSLLFSLWVETVRPYLQTVDEWIVHGHLWDGAREFIIQRNKNVPVNHRDFWYATYTLYSVSEKTENEEKMSDNASASSGSDQGPSSRQHTMVSFLKPVLKQIIMAGKSMQLLKNLQCAESTTCQAGARDAERKSLYTLFLESVQSRLRHGEDSTPQVLTEQQATKENLMKMQSIAESHLELDDVHDPLLAINFARMYLEQSDFHEKFAGGDVCVDRSSESVTCQTFELTLRSCLYPHIDKQYLDCCGNLMQTLKKDYRLVEYLQAMRNFFLMEGGDTMYDFYTSIFDKIREKETWQNVSFLNVQLQEAVGQRYPEDSSRLSISFENVDTAKKKLPVHILDGLTLSYKVPWPVDIVISLECQKIYNQVFLLLLQIKWAKYSLDVLLFGELVSTAEKPRLKEGLIHEQDTVAQFGPQKEPVRQQIHRMFLLRVKLMHFVNSLHNYIMTRILHSTGLEFQHQVEEAKDLDQLIKIHYRYLSTIHDRCLLREKVSFVKEAIMKVLNLALMFADGWQAGLGTWRMESIEKMESDFKNCHMFLVTILNKAVCRGSFPHLESLALSLMAGMEQS

SEQ ID NO: 51956 - protein, 113 aa, Homo sapiens
MWGRLLLWPLVLGFSLSGGTQTPSVYDESGSTGGGDARPQSCLPPAATQAKSVPMTVTPWSSRTAHGHCFWAGCPPGWCPPSMGWSWWWGCRPMGWRCGCWPRRHLGCPPPCC

SEQ ID NO: 51957 - protein, 136 aa, Homo sapiens
  MOD_RES (1)..(1): Any amino acid
XGLSKGNKYSAQGERQIPVLQTNNGPSLTGLTTIAAHLVKQANKEYLLGSTAEEKAIVQQWLEYRVTQVDGHSSKNDIHTLLKDLNSYLEDKVYLTGYNFTLADILLYYGLHRFIANHDCFVYKKMRIVTGPHVCL

SEQ ID NO: 51958 - protein, 65 aa, Homo sapiens
MQRRGALFGMPGGSGGRKMAAGDIGELLVPHMPTIRVPRSGDRVYKNECAFSYDSPVCRKPSQNI

SEQ ID NO: 51959 - protein, 113 aa, Homo sapiens
MLVHSFSAMDRHDGTSNGTARLPQLGTPEPPARPAAAAAPRLARPEAEPGVWAPAHAPGAASPAVGPGSSQGLQAARGPPARPTRAQLRTRRPLDPLLTSRHRGGPACRRPGY

SEQ ID NO: 51960 - protein, 2038 aa, Homo sapiens
MINESKGDAIYSAVYDVVRNRGNFGDVSVSWVVSPDFTQDVFPVQGTVVFGDQEFSKNITIYSLPDEIPEEMEEFTVILLNGTGGAKVGNRTTATLRIRRNDDPIYFAEPRVVRVQEGETANFTVLRNGSVDVTCMVQYATKDGKATARERDFIPVEKGETLIFEVGSRQQSISIFVNEDGIPETDEPFYIILLNSTGDTVVYQYGVATVIIEANDDPNGIFSLEPIDKAVEEGKTNAFWILRHRGYFGSVSVSWQLFQNDSALQPGQEFYETSGTVNFMDGEEAKPIILHAFPDKIPEFNEFYFLKLVNISGPGGQLAETNLQVTVMVPFNDDPFGVFILDPECLEREVAEDVLSEDDMSYITNFTILRQQGVFGDVQLGWEILSSEFPAGLPPMIDFLLVGIFPTTVHLQQHMRRHHSGTDALYFTGLEGAFGTVNPKYHPSRNNTIANFTFSAWVMPNANTNGFIIAKDDGNGSIYYGVKIQTNESHVTLSLHYKTLGSNATYIAKTTVMKYLEESVWLHLLIILEDGIIEFYLDGNAMPRGIKSLKGEAITDGPGILRIGAGINGNDRFTGLMQDVRSYERKLTLEEIYELHAMPAKSDLHPISGYLEFRQGETNKSFIISARDDNDEEGEELFILKLVSVYGGARISEENTTARLTIQKSDNANGLFGFTGACIPEIAEEGSTISCVVERTRGALDYVHVFYTISQIETDGINYLVDDFANASGTITFLPWQRSEVLNIYVLDDDIPELNEYFRVTLVSAIPGDGKLGSTPTSGASIDPEKETTDITIKASDHPYGLLQFSTGLPPQPKDAMTLPASSVPHITVEEEDGEIRLLVIRAQGLLGRVTAEFRTVSLTAFSPEDYQNVAGTLEFQPGERYKYIFINITDNSIPELEKSFKVELLNLEGGVAELFRVDGSGSGDGDMEFFLPTIHKRASLGVASQILVTIAASDHAHGVFEFSPESLFVSGTEPEDGYSTVTLNVIRHHGTLSPVTLHWNIDSDPDGDLAFTSGNITFEIGQTSANITVEILPDEDPELDKAFSVSVLSVSSGSLGAHINATLTVLASDDPYGIFIFSEKNRPVKVEEATQNITLSIIRLKGLMGKVLVSYATLDDMEKPPYFPPNLARATQGRDYIPASGFALFGANQSEATIAISILDDDEPERSESVFIELLNSTLVAKVQSRSIPNSPRLGPKVETIAQLIIIANDDAFGTLQLSAPIVRVAENHVGPIINVTRTGGAFADVSVKFKAVPITAIAGEDYSIASSDVVLLEGETSKAVPIYVINDIYPELEESFLVQLMNETTGGARLGALTEAVIIIEASDDPYGLFGFQITKLIVEEPEFNSVKVNLPIIRNSGTLGNVTVQWVATINGQLATGDLRVVSGNVTFAPGETIQTLLLEVLADDVPEIEEVIQVQLTDASGGGTIGLDRIANIIIPANDDPYGTVAFAQMVYRVQEPLERSSCANITVRRSGGHFGRLLLFYSTSDIDVVALAMEEGQDLLSYYESPIQGVPDPLWRTWMNVSAVGEPLYTCATLCLKEQACSAFSFFSASEGPQCFWMTSWISPAVNNSDFWTYRKNMTRVASLFSGQAVAGSDYEPVTRQWAIMQEGDEFANLTVSILPDDFPEMDESFLISLLEVHLMNISASLKNQPTIGQPNISTVVIALNGDAFGVFVIYNISPNTSEDGLFVEVQEQPQTLVELMIHRTGGSLGQVAVEWRVVGGTATEGLDFIGAGEILTFAEGETKKTVILTILDDSEPEDDESIIVSLVYTEGGSRILPSSDTVRVNILANDNVAGIVSFQTASRSVIGHEGEILQFHVIRTFPGRGNVTVNWKIIGQNLELNFANFSGQLFFPEGSLNTTLFVHLLDDNIPEEKEVYQVILYDVRTQGVPPAGIALLDAQGYAAVLTVEASDEPHGVLNFALSSRFVLLQEANITIQLFINREFGSLGAINVTYTTVPGMLSLKNQTVGNLAEPEVDFVPIIGFLILEEGETAAAINITILEDDVPELEEYFLVNLTYVGLTMAASTSFPPRL

SEQ ID NO: 51961 - protein, 208 aa, Homo sapiens
MAASVEQREGTIQVQGQALFFREALPGSGQARFSVLLLHGIRFSSETWQNLGTLHRLAQAGYRAVAIDLPGLKGEPPAQEPLLSQSRASFLAAVVDALELGPPVVISPSLSGMYSLPFLTAPGSQLPGFVPVAPICTDKINAANYASVKTPALIVYGDQDPMGQTSFEHLKQLPNHRVLIMKGAGHPCYLDKPEEWHTGLLDFLQGLQ

SEQ ID NO: 51962 - protein, 180 aa, Homo sapiens
MAAMAVGGAGGSRVSSGRDLNCVPEIADTLGAVAKQGFDFLCMPVFHPRFKREFIQEPAKNRPGPQTRSDLLLSGRDWNTLIVGKLSPWIRPDSKVEKIRRNSEAFWMRVPLVAPEDLRDDIIENAPTTHTEEYSGEEKTWMWWHNFRTLCDYSKRIAVALEIGADLPSNHVIDRWLGEP

SEQ ID NO: 51963 - protein, 335 aa, Homo sapiens
MLKPSLPFTSLLFLQLPLLGVGLNTTILTPNGNEDTTADFFLTTMPTDSLSVSTLPLPEVQCFVFNVEYMNCTWNSSSEPQPTNLTLHYWYKNSDNDKVQKCSHYLFSEEITSGCQLQKKEIHLYQTFVVQLQDPREPRRQATQMLKLQNLVIPWAPENLTLHKLSESQLELNWNNRFLNHCLEHLVQYRTDWDHSWTEQSVDYRHKFSLPSVDGQKRYTFRVRSRFNPLCGSAQHWSEWSHPIHWGSNTSKENPFLFALEAVVISVGSMGLIISLLCVYFWLERTMPRIPTLKNLEDLVTEYHGNFSSTNPIGLFAPHKASRTPSFCMTHQGTL

SEQ ID NO: 51964 - protein, 99 aa, Homo sapiens
MSNLRTWLARIESELSKPVVYDVCDDQEIQKRLAEQQDLQRDIEQHSAGVESVFNICDVLLHDSDACANETECDSIQQTTRSLDRRWRNICAMSMERRM

SEQ ID NO: 51965 - protein, 45 aa, Homo sapiens
MKKMSRNVLLQMEEEEDDDDGDIGLKCSSGVAQSWLTVALTPRLN

SEQ ID NO: 51966 - protein, 53 aa, Homo sapiens
MASMLLAQRLACSFQHSYRLLVPGVNETAEYNSECRGCAFFLQLRREPRQLPG

SEQ ID NO: 51967 - protein, 82 aa, Homo sapiens
MKSHRCYDLIPTSSKLVVFDTSLQVKKAFFALVTNGVRAAPLWDSKKQSFVGMLTITDFINILHRYYKSALVQIYELEEHKI

SEQ ID NO: 51968 - protein, 54 aa, Homo sapiens
  MOD_RES (1)..(1): Any amino acid
XTDLENNSETGELQPVLPEGASAAPEEDTHSSFPDGEQIGPEDLSFNTDENSGR

SEQ ID NO: 51969 - protein, 65 aa, Homo sapiens
MKKLKILYMSNNLVKDWAEFVKLAELPCLEDLVFVGNPLEEKHSAENNWIEEATKRVPKLKKLDG

SEQ ID NO: 51970 - protein, 44 aa, Homo sapiens
MMAVEQMPKKDWYSILGADPSANISDLKQKYQKLILMDLFLYVI

SEQ ID NO: 51971 - protein, 247 aa, Homo sapiens
MVALENPECGPEAAEGTPGGRRLLRKQHFINQAVRNSDLVPKAKGRKSLQRLENTQYLLTLLETDGGLPGLEDGDLAPPASPGIFAEACNNATYVEVWNDFMNRSGEEQERVLRYLEDEGRSKARRRGPGRGEDRRREDPAYTPRECFQRISRRLRAVLKRSRIPMETLETWEERLLRFFSVSPQAVYTAMLDNSFERLLLHAVCQYMDLISASADLEGKRQMKVSNRHLDFLPPGLLLSAYLEQHS

SEQ ID NO: 51972 - protein, 138 aa, Homo sapiens
MMAEREEDDDTEEAWMQLRPTEPLPSQCCGSGCSPCVFDLYHRDLARWEAAQASKDRSLLRGPESQSCPSKLNPETFVAFCIIAMDRLTKDTYRVRFALPGNSQLGLRPGQHLILRYTQVAGGPKLHSPALLFASCWP

SEQ ID NO: 51973 - protein, 170 aa, Homo sapiens
MCNTNMSVPTDGAVTTSQIPASEQETLVRPKPLLLKLLKSVGAQKDTYTMKEVLFYLGQYIMTKRLYDEKQQHIVYCSNDLLGDLFGVPSFSVKEHRKIYTMIYRNLVVVNQQESSDSGTSVSENRCHLEGGSDQKDLVQELQEEKPSSSHLVSRPSTSSRRRAISETGS

SEQ ID NO: 51974 - protein, 67 aa, Homo sapiens
MDTQKDVQPPKQQPMIYICGECHTENEIKSRDPIRCRECGYRIMYKKRTKRCILLTMLSKYELGGNE

SEQ ID NO: 51975 - protein, 448 aa, Homo sapiens
MAAAAAATAAAAASIRERQTVALKRMLNFNVPHIKNSTGEPVWKVLIYDRFGQDIISPLLSVKELRDMGITLHLLLHSDRDPIPDVPAVYFVMPTEENIDRMCQDLRNQLYESYYLNFISAISRSKLEDIANAALAASAVTQVAKVFDQYLNFITLEDDMFVLCNQNKELVSYRAINRPDITDTEMETVMDTIVDSLFCFFVTLGAVPIIRCSRGTAAEMVAVKLDKKLRENLRDARNSLFTGDTLGAGQFSFQRPLLVLVDRNIDLATPLHHTWTYQALVHDVLDFHLNRVNLEESSGVENSPAGARPKRKNKKSYDLTPVDKFWQKHKGSPFPEVAESVQQELESYRAQEDEVKRLKSIMGLEGEDEGAISMLSDNTAKLTSAVSSLPELLEKKRLIDLHTNVATAVLEHIKVNLTFSPPQYDLHLHRVLYFVRCFSIHYLIESPL

SEQ ID NO: 51976 - protein, 173 aa, Homo sapiens
MRIPEWVAGSPVFTPQMHRSTPVCPLGLQRCPGHWRGRGAFSVVRRCVKLCTGHEYAAKIINTKKLSARDHQKLEREARICRLLKHSNIVRLHDSISEEGFHYLVFDLVTGGELFEDIVAREYYSEADASHCIQQILEAVLHCHQMGVVHRDLKPENLLLASKCKGAAVKLAD

SEQ ID NO: 51977 - protein, 573 aa, Homo sapiens
MGWESHLTAASADIDLGAGREVFDYSHRQKEQDVEKELRDGGEQDTWAGEGAEALARNLLVDGETGESFPAQFPADISSITEAVPSESEPPALQNNLLSPLLTGTESPFDLEQQWQDLMSIMEMQAMEVNTSASEILYSAPPGDPLSTNYSLAPNTPINQNVSLHQASLGGCSQDFLLFSPEVESLPVASSSTLLPLAPSNSTSLNSTFGSTNLTGLFFPPQLNGTANDTAGPELPDPLGGLLDEAMLDEISLMDLAIEEGFNPVQASQLEEEFDSDSGLSLDSSHSPSSLSSSEGSSSSSSSSSSSSSSASSSASSSFSEEGAVGYSSDSETLDLEEAEGAVGYQPEYSKFCRMSYQDPAQLSCLPYLEHVGHNHTYNMAPSALDSADLPPPSALKKGSKEKQADFLDKQMSRDEHRARAMKIPFTNDKIINLPVEEFNELLSKYQLSEAQLSLIRDIRRRGKNKMAAQNCRKRKLDTILNLERDVEDLQRDKARLLREKVEFLRSLRQMKQKVQSLYQEVFGRLRDENGRPYSPSQYALQYAGDGSVLLIPRTMADQQARRQERKPKDRRK

SEQ ID NO: 51978 - protein, 59 aa, Homo sapiens
MNCCIGLGEKARGSHRASYPSLSALFTEASILGFGSFAVKAQWTEDCRKSTYPPSGPTL

SEQ ID NO: 51979 - protein, 179 aa, Homo sapiens
MENLPAVTTEEPTPMGRGPVGPSGGGSTRDQVRTVVMRPSVSWEKAGPEEAKAPVRGDEAPPARVAGPAAGTPPCQMGVYPTDLTLQLLAVRRKSRLRDPGLQQTLRGQLRLLENDSREMARVLGELSARLLSIHSDQDRIVVTFKTFEEIWKFSTYHALELEGSCRPVASVLTGKAVI

SEQ ID NO: 51980 - protein, 821 aa, Homo sapiens
MRKPRRKSRQNAEGRRSPSPYSLKCSPTRETLTYAQAQRIVEVDIDGRLHRISIYDPLKIITEDELTAQDITECNSNKENSEQPQFPGKSKKPSSKGKKKESCSKHASGTSFHLPQPSFRMVDSGIQPEAPPLPAAYYRYIEKPPEDLDAEVEYDMDEEDLAWLDMVNEKRRVDGHSLVSADTFELLVDRLEKESYLESRSSGAQQSLIDEDAFCCVCLDDECHNSNVILFCDICNLAVHQECYGVPYIPEGQWLCRCCLQSPSRPVDCILCPNKGGAFKQTSDGHWAHVVCAIWIPEVCFANTVFLEPIEGIDNIPPARWKLTCYICKQKGLGAAIQCHKVNCYTAFHVTCAQRAGLFMKIEPMRETSLNGTIFTVRKTAYCEAHSPPGAATARRKGDSPRSISETGDEEGLKEGDGEEEEEEEVEEEEQEAQGGVSGSLKGVPKKSKMSLKQKIKKEPEEAGQDTPSTLPMLAVPQIPSYRLNKICSGLSFQRKNQFMQRLHNYWLLKRQARNGVPLIRRLHSHLQSQRNAEQREQDEKTSAVKEELKYWQKLRHDLERARLLIELIRKREKLKREQVKVQQAAMELELMPFNVLLRTTLDLLQEKDPAHIFAEPVNLSEVPDYLEFISKPMDFSTMRRKLESHLYRTLEEFEEDFNLIVTNCMKYNAKDTIFHRAAVRLRDLGGAILRHARRQAENIGYDPERGTHLPESPKLEDFYRFSWEDGMTNGFGKHTESGSDSECSLGLSGGLAFEACSGLTPPKRSRGKPALSRVPFLEGVNGDSDYNGSEASCCPLKTAETWSPWSWCGPSAEATPPTLP

SEQ ID NO: 51981 - protein, 1088 aa, Homo sapiens
MRDPGRKSLAQLENLCKQLYETTDTTTRLQAEKALVEFTNSPDCLSKCQLLLERGSSSYSQLLAATCLTKLVSRTNNPLPLEQRIDIRNYVLNYLATRPKLATFVTQALIQLYARITKLGWFDCQKDDYVFRNAITDVTRFLQDSVEYCIIGVTILSQLTNEINQADTTHPLTKHRKIASSFRDSSLFDIFTLSCNLLKQASGKNLNLNDESQHGLLMQLLKLTHNCLNFDFIGTSTDESSDDLCTVQIPTSWRSAFLDSSTLQLFFDLYHSIPPSFSPLVLSCLVQIASVRRSLFNNAERAKFLSHLVDGVKRILENPQSLSDPNNYHEFCRLLARLKSNYQLGELVKVENYPEVIRLIANFTVTSLQHWEFAPNSVHYLLSLWQRLAASVPYVKATEPHMLETYTPEVTKAYITSRLESVHIILRDGLEDPLEDTGLVQQQLDQLSTIGRCEYEKTCALLVQLFDQSAQSYQELLQSASASPMDIAVQEGRLTWLVYIIGAVIGGRVSFASTDEQDAMDGELVCRVLQLMNLTDSRLAQAGNEKLELAMLSFFEQFRKIYIGDQVQKSSKLYRRLSEVLGLNDETMVLSVFIGKIITNLKYWGRCEPITSKTLQLLNDLSIGYSSVRKLVKLSAVQFMLNNHTSEHFSFLGINNQSNLTDMRCRTTFYTALGRLLMVDLGEDEDQYEQFMLPLTAAFEAVAQMFSTNSFNEQEAKRTLVGLVRDLRGIAFAFNAKTSFMMLFEWIYPSYMPILQRAIELWYHDPACTTPVLKLMAELVHNRSQRLQFDVSSPNGILLFRETSKMITMYGNRILTLGEVPKDQVYALKLKGISICFSMLKAALSGSYVNFGVFRLYGDDALDNALQTFIKLLLSIPHSDLLDYPKLSQSYYSLLEVLTQDHMNFIASLEPHVIMYILSSISEGLTALDTMVCTGCCSCLDHIVTYLFKQLSRSTKKRTTPLNQESDRFLHIMQQHPEMIQQMLSTVLNIIIFEDCRNQWSMSRPLLGLILLNEKYFSDLRNSIVNSQPPEKQQAMHLCFENLMEGIERNLLTKNRDRFTQNLSAFRREVNDSMKNSTYGVNSNDMMS

SEQ ID NO: 51982 - protein, 48 aa, Homo sapiens
  MOD_RES (1)..(1): Any amino acid
XHARLRCMCTCNRCTFCICQNFLNSDLLQSVKNKIFTAVLNRCMLSAL

SEQ ID NO: 51983 - protein, 17 aa, Homo sapiens
QFWGQKPWSQHYHQGYY

SEQ ID NO: 51984 - protein, 157 aa, Homo sapiens
MSRVAGTRTDVNELLQRWTPRCVRWHTGGARRVALDRPLVTACLPPAGDVVDVYQREFLALRDRLHAAEQESLKRSKELNLVLDEIKRAVSERQALRDGDGNRTWGRLTEDPRLKPWNGSHRHVLHLPTVFHHLPHLLAKESSLQPAVRVGQGRTGD

SEQ ID NO: 51985 - protein, 44 aa, Homo sapiens
MLENYRILVSLGLCFSKPSVILLLEQGKAPWMVKRELTKGLCSG

SEQ ID NO: 51986 - protein, 186 aa, Homo sapiens
MKFLIFAFFGGVHLLSLCSGKAICKNGISKRTFEEIKEEIASCGDVAKAIINLAVYGKAQNRSYERLALLVDTVGPRLSGSKNLEKAIQIMYQNLQQDGLEKVHLEPVRIPHWERGEESAVMLEPRIHKIAILGLGSSIGTPPEGITAEVLVVTSFDELQRRASEARGKIVVYNQPYINYSRTVQY

SEQ ID NO: 51987 - protein, 83 aa, Homo sapiens
  MOD_RES (1)..(1): Any amino acid
XRHVSVRRFESFNLFSVTEGKERETEEEVGAWVQYTSIFCPEYSISLRHNSGSLNVEDVLTSFDNTGNVYTGSHSVAQAGVQW

SEQ ID NO: 51988 - protein, 318 aa, Homo sapiens
  MOD_RES (1)..(1): Any amino acid
XLYLQDVIMQVADVPEKPRVPAFACQVAGCCQVFDALDDYEHHYHTLHGNVCSFCKRAFPSGHLLDAHILEWHDSLFQILSERQDMYQCLVEGCTEKFKTSRDRKDHMVRMHLYPADFRFDKPKKSRSPASAEAPGDSGERSEGEAMEICSEPVAASPAPAGERRIYRHRLLLVTSLVVVLLWEAGAVPAPKVPIKMQVKHWPSEQDPEKAWGARVVEPPEKDDQLVVLFPVQKPKLLTTEEKPRGQGRGPILPGTKAWMETEDTLGHVLSPEPDHDSLYHPPPEEDQGEERPRLWVMPNHQVLLGPEEDQDHIYHPQ

SEQ ID NO: 51989 - protein, 57 aa, Homo sapiens
AAAQPPAAAVPGPSVPQPAPGQPSPVLQLQQKQSRISPIQKPQGLDPVEILQEREYR

SEQ ID NO: 51990 - protein, 98 aa, Homo sapiens
EVQLVESGGGLVQPGGSLRLSCAASGFTFSNHYTSWVRQAPGKGLEWVSYSSGNSGYTNYADSVKGRFTISRDNAKNSLYLQMNSLRAEDTAVYYCVK

SEQ ID NO: 51991 - protein, 571 aa, Homo sapiens
MASWGGEKRGGAEGSPKPAVYATRKTPSVGSQGDQWYLGYPGDQWSSGFPYSWWKNSVGSESKHGEGALDQPQHDVRLEDLGELHRAARSGDVPGVEHILAPGDTGVDKRDRKKSIQQLVPEYKEKQTPESLPQNNNPDWHPTNLTLSDETCQRSKNLKVDDKCPSVSPSMPENQSATKELGQMNLTEREKMDTGVVLLSGNDTLHDLCQSQLPENKESKEEQDSELTSEEEQERLKGCENKQPQKTSQEPEMAKDCDREDIPIYPVLPHVQKSEEMWIEQGKLEWKNQLKLVINELKQRFGEIYEKYKIPACPEEEPLLDNSTRGTDVKDIPFNLTNNIPGCEEEDASEISVSVVFETFPEQKEPSLKNIIHPYYHPYSGSQEHVCQSSSKFHLHENKLDCDNDNKPGIGHIFSTDKNFHNDASTKKARNPEVVMVEMKEDQEFDLQMTKNMNQNSDSGSTNNYKSLKPKLENLSSLPPDSDRTSEVYLHEELQQDMQKFKNEVNTLEEEFLALKKEDVQLHKDVEEEMEKHRSNSTELSGTLTDGTTVGNDDDGLNQQIPRKENGEHDR

SEQ ID NO: 51992 - protein, 132 aa, Homo sapiens
MEFQNMYIQLFGFSFFIVIIVRMLLLGLCVSARQPVMPRATLWGHLSPAWVLVPWTPRACGQAAPGQGHVASDHKSGAALAQALQLPAPPGFAALLVFSEQQQNSVHSDSKGGIGLDVLGTSQPSPTLYVNV

SEQ ID NO: 51993 - protein, 383 aa, Homo sapiens
MARSLCPGAWLRKPYYLQCDKYKTGVIDGPACNSLCVTETLYFGKCLSTKPNNQMYLGIWDNLPGVVKCQMEQALHLDFGTELEPRKEIVLFDKPTRGTTVQKFKEMVYSLFKAKLGDQGNLSELVNLILTVADGDKDGQVSLGEAKSAWALLQLNEFLLMVILQDKEHTPKLMGFCGDLYVMESVEYTSLYGISLPWVIELFIPSGFRRSMDQLFTPSWPRKAKIAIGLLEFVEDVFHGPYGNFLMCDTSAKNLGYNDKYDLKMVDMRKIVPETNLKELIKDRHCESDLDCVYGTDCRTSCDQSTMKCTSEVIQPNLAKACQLLKDYLLRGAPSEIREELEKQLYSCIALKVTANQMEMEHSLILNNLKTLLWKKISYTNDS

SEQ ID NO: 51994 - protein, 44 aa, Homo sapiens
  MOD_RES (1)..(1): Any amino acid
XYTEDLLPEQCMQDSFQKVILRRYGSCGLEDLHLRKDGENVVSV

SEQ ID NO: 51995 - protein, 61 aa, Homo sapiens
MPYEVNAGYDFTNMVRKKNPPLRNVASEGEGQILEPIGTESKVSGKNKEFSADQMSENTDQ

SEQ ID NO: 51996 - protein, 88 aa, Homo sapiens
MMWQKYAGSRRSMPLGARILFHGVFYAGGFAIVYYLIQKFHSRALYYKLAVEQLQSHPEAQEALGPPLNIHYLKLIDRENFVDIVDAK

SEQ ID NO: 51997 - protein, 115 aa, Homo sapiens
  MOD_RES (1)..(1): Any amino acid
XNNQGSNMGGGMNFGAFSINPAMMAAAQAALQSSWGMMGMLASQQNQSGPSGNNQNQGNMQREPNQAFGSGNNSYSGSNSGAAIGWGSASNAGSGSGFNGGFGSSMDSKSSGWGM

SEQ ID NO: 51998 - protein, 187 aa, Homo sapiens
MSAERGPWQAPTRGRLLGGVLRSLVEASSSGVSVLSLCEKGDAMIMEETGKIFKKEKEMKKGIAFPTSISVNNCVCHFSPLKSDQDYILKEGDLVKIDLGVHVDGFIANVAHTFVVDVAQGTQVTGRKADVIKAAHLCAEAALRLVKPGNQNTQVTEAWNKVAHSFNCTPIEGMLSHQLKQHVIDGE

SEQ ID NO: 51999 - protein, 404 aa, Homo sapiens
MAEAQNRHTEVAKTMRNLENRLEKAQMKAQEAEHITSVYLQLKAYLMDESLNLENRLDSMEAEVVRTKHELEALHVVNQEALNARDIAKNQLQYLEETLVRERKKRERYISECKKRAEEKKLENERMERKTHREHLLLQSDDTIQDSLHAKEEELRQRWSMYQMEVIFGKVKDATGTDETHSLVRRFLAQGDTFAQLETLKSENEQTLVRLKQEKQQLQRELEDLKYSGEATLVSQQKLQAEAQERLKKEERRHAEAKDQLERALRAMQVAKDSLEHLASKLIHITVEDGRFAGKELDPQADNYVPNLLGLVEEKLLKLQAQLQGHDVQEMLCHIANREFLASLEGRLPEYNTRIALPLATSKDKFFDEESEEEDNEVVTRASLKIRSQKLIESHKKHRRSRRS

SEQ ID NO: 52000 - protein, 190 aa, Homo sapiens
MDAELAEVRALQAEIAALRRACEDPPAPWEEKSRVQKSFQAIHQFNLEGWKSSKDLKNQLGHLESELSFLSTLTGINIRNHSKQTEDLTSTEMTEKSIRKVLQRHRLSGNCHMVTFQLEFQILEIQNKERLSSAVTDLNIIMEPTECSELSEFVSRAEERKDLFMFFRSLHFFVEWFEYRKRTFKHLKVK

SEQ ID NO: 52001 - protein, 96 aa, Homo sapiens
MEASALTSSAVTSVAKVVRVASGSAVVLPLARIATVVIGGVVAMAAVPMVLSAMGFTAAGIASSSIAAKMMSAAAIANGGGVASGSLVATLQSLGA

SEQ ID NO: 52002 - protein, 43 aa, Homo sapiens
  MOD_RES (1)..(1): Any amino acid
XKKSKEVGQQLQDDLMKVLNELYSHQCSEQTKGGGEAGGEANW

SEQ ID NO: 52003 - protein, 176 aa, Homo sapiens
NILCEHPNQVSPVKICDFDLGSGIKLNGDCSPISTPELLTPCGSAEYMAPEVVEAFSEEASIYDKRCDLWSLGVILYILLSGYPPFVGRCGSDCGWDRGEACPACQNMLFESIQEGKYEFPDKDWAHISCAAKDLISKLLVRDAKQRLSAAQVLQHPWVQGCAPENTLPTPMVLQR

SEQ ID NO: 52004 - protein, 172 aa, Homo sapiens
MEALIPVINKLQDVFNTVGADIIQLPQIVVVGTQSSGKSSVLESLVGRDLLPRDPATWKNSRHLSKGVEAEEWGKFLHTKNKLYTDFDEIRQEIENETERISGNNKGVSPEPIHLKIFSPNVVNLTLVDLPGMTKVPVGDQPKDIELQIRELILRFISNPNSIILAVTAANT

SEQ ID NO: 52005 - protein, 47 aa, Homo sapiens
MSDTLTADVIGRRVEVNGEHATVRFAGVVPPVADGVLLCHPGWSAVA

SEQ ID NO: 52006 - protein, 225 aa, Homo sapiens
MRIISRQIVLLFSGFWGLAMGAFPSSVQIGGLFIRNTDQEYTAFRLAIFLHNTSPNASEAPFNLVPHVDNIETANSFAVTNAFCSQYSRGVFAIFGLYDKRSVHTLTSFCSALHISLITPSFPTEGESQFVLQLRPSLRGALLSLLDHYEWNCFVFLYDTDRGLVISTTPLASNCMPSSVVHSWLYVLYNKSINSITACLLGPSTELNVFNYLIADSNLNNGNYI

SEQ ID NO: 52007 - protein, 36 aa, Homo sapiens
  MOD_RES (1)..(1): Any amino acid
XANGHSFVHMEHEKAVLLLKSFQNTVDLVIQRKHLL

SEQ ID NO: 52008 - protein, 332 aa, Homo sapiens
  MOD_RES (1)..(1): Any amino acid
XGREGLLGQRRPQDGQARSSCSPGGRTPAARDSIVREVIQNSKEVLSLLQEKNPAFKPVLAIIQAGDDNLMQEINQNLAEEAGLNITHICLPPDSSEAEIIDEILKINEDTRVHGLALQISENLFSNKVLNALKPEKDVDGVTDINLGKLVRGDAHECFVSPVAKAVIELLEKSVGVNLDGKKILVVGAHGSLEAALQCLFQRKGSMTMSIQWKTRQLQSKLHEADIVVLGSPKPEEIPLTWIQPGTTVLNCSHDFLSGKVGCGSPRIHFGGLIEEDDVILLAAALRIQNMVSSGRRWLREQQHRRWRLHCLKLQPLSPVPSDIEISRGQTP

SEQ ID NO: 52009 - protein, 357 aa, Homo sapiens
MAAPMLRWGCRGRRWAFARVDGGSCHRRGAPTGSTSNQIRGESSVAQQPLHTAQKTRKGEHKWAAVVGLEIHAQISSNSKLFSGSQVRFSAPPNSLVSFFDASLPGTLPVLNRRCVEAAVMTGLALNCHINKKSLFDRKHYFYADLPAGYQITQQRLPIAVNGSLIYGVCAGKKQSQVIPKTVRIKQIQLEQDSGKSLHDNLRSQTLIDLNRAGVGLLEVVLEPDMSCGEEAATAVRELQLILQALGTSQANMAEGQLRVDANISVHHPGEPLGVRTEVKNLNSIRFLAKAIDYEIQRQINELENGGEILNETRSFHHKLGCTMSMRDKEGKQDYRWLLLMAKYRYISGAGAYFKFI

SEQ ID NO: 52010 - protein, 15 aa, Homo sapiens
YFDYWGQGTLVTVSS

SEQ ID NO: 52011 - protein, 112 aa, Homo sapiens
  MOD_RES (1)..(1): Any amino acid
XELATLQDIGKCVEEILGYLKSCFSREPMMATVCVQQLLKTLFGTNLASQFDGLSSNPSKSQGRAQRLGSSSVRPGLYHYCFMAPYTHFTQALADASLRNMVQAEQENDTSG

SEQ ID NO: 52012 - protein, 1398 aa, Homo sapiens
MQDYNKDDMSYRRISAVEPKTALPFNRFLPNKSRQPSYVPAPLRKKKPDKHEDNRRSWASPVYTEADGTFSSNQRRIWGTNVENWPTVQGTSKSSCYLEEEKAKTRSIPNIVKDDLYVRKLSPVMPNPGNAFDQFLPKCWTPEDVNWKRIKRETYKPWYKEFQGFSQFLLLQALQTYSDDILSSETHTKIDPTSGPRLITRRKNLSYAPGYRRDDLEMAALDPDLENDDFFVRKTGAFHANPYVLRAFEDFRKFSEQDDSVERDIILQCREGELVLPDLEKDDMIVRRIPAQKKEVPLSGAPDRYHPVPFPEPWTLPPEIQAKFLCVLERTCPSKEKSNSCRILVPSYRQKKDDMLTRKIQSWKLGTTVPPISFTPGPCSEADLKRWEAIREASRLRHKKRLMVERLFQKIYGENGSKSMSDVSAEDVQNLRQLRYEEMQKIKSQLKEQDQKWQDDLAKWKDRRKSYTSDLQKKKEEREEIEKQALEKSKRSSKTFKEMLQDRESQNQKSTVPSRRRMYSFDDVLEEGKRPPTMTVSEASYQSERVEEKGATYPSEIPKEDSTTFAKREDRVTTEIQLPSQSPVEEQSPASLSSLRSRSTQMESTRVSASLPRSYRKTDTVRLTSVVTPRPFGSQTRGISSLPRSYTMDDAWKYNGDVEDIKRTPNNVVSTPAPSPDASQLASSLSSQKEVAATEEDVTRLPSPTSPFSSLSQDQAATSKATLSSTSGLDLMSESGEGEISPQREVSRSQDQFSDMRISINQTPGKSLDFGFTIKWDIPGIFVASVEAGSPAEFSQLQVDDEIIAINNTKFSYNDSKEWEEAMAKAQETGHLVMDVRRYGKAGSPETKWIDATSGIYNSEKSSNLSVTTDFSESLQSSNIESKEINGIHDESNAFESKASESISLKNLKRRSQFFEQGSSDSVVPDLPVPTISAPSRWVWDQEEERKRQERWQKEQDRLLQEKYQREQEKLREEWQRAKQEAERENSKYLDEELMVLSSNSMSLTTREPSLATWEATWSEGSKSSDREGTRAGEEERRQPQEEVVHEDQGKKPQDQLVIERERKWEQQLQEEQEQKRLQAEAEEQKRPAEEQKRQAEIERETSVRIYQYRRPVDSYDIPKTEEASSGFLPGDRNKSRSTTELDDYSTNKNGNNKYLDQIGNMTSSQRRSKKEQVPSGAELERQQILQEMRKRTPLHNDNSWIRQRSASVNKEPVSLPGIMRRGESLDNLDSPRSNSWRQPPWLNQPTGFYASSSVQDFSRPPPQLVSTSNRAYMRNPSSSVPPPSAGSVKTSTTGVATTQSPTPRSHSPSASQSGSQLRNRSVSGKRICSYCNNILGKGAAMIIESLGLCYHLHCFKCVACECDLGGSSSGAEVRIRNHQLYCNDCYLRFKSGRPTAM

SEQ ID NO: 52013 - protein, 246 aa, Homo sapiens
MASVGRREGTAGGGAGPGEPRREEGRAGLSPSSPPGSHSMRYFYTAMSRPGRGEPRFITVGYVDDTLFVRFDSDATSPRKEPRAPWIEQEGPEYWDRETQISKTNTQTYRENLRTALRYYNQSEAGSHIIQRMYGCDVGPDGRLLRGYDQDAYDGKDYIALNEDLSSWTAADTAAQITQRKWEAARVAEQDRAYLEGLCVESLRRYLENGKETLQRADPPKTHVTHHPISDHEVTLRCWALGFYPA

SEQ ID NO: 52014 - protein, 74 aa, Homo sapiens
MMVRWALLCEFWGDIAKEFYWKTPCPGPFLRYNFDVTKGKIFIEWMKGATTNICYNVLDRNVHEKKLGDKVAFY

SEQ ID NO: 52015 - protein, 141 aa, Homo sapiens
MEFHNGGHVSGIGGFLVSLTSRMKPHTLAVTPALIFAITVATIGSFQFGYNTGVINAPETIIKEFINKTLTDKANAPPSEVLLTNLWSLSVAIFSVGGMIGSFSVGLFVNRFGRRNSMLIVNLLAATGGCLMGLCKIAESV

SEQ ID NO: 52016 - protein, 182 aa, Homo sapiens
  MOD_RES (1)..(1): Any amino acid
XWKPAPPSPVPSSHWMLTKCFPFSFPLSFFPPECGDRSIFEGRTRYSRITGGMEAEVGEFPWQVSIQARSEPFCGGSILNKWWILTAAHCLYSEELFPEELSVVLGTNDLTSPSMEIKEVASIILHKDFKRANMDNDIALLLLASPIKLDDLKVPICLPTQPGPATWRECWVAGWGQTNAGM

SEQ ID NO: 52017 - protein, 11 aa, Homo sapiens
MELQTLQEALK

SEQ ID NO: 52018 - protein, 74 aa, Homo sapiens
IREMEKQFQKEALAEYEARMKGLEAEVKESVRACLRTCFPSEAKDKPERACECPPELCEQDPLIAKADAQESRL

SEQ ID NO: 52019 - protein, 214 aa, Homo sapiens
AVLDFVKQKASQSPQKQHPLLDGVDGECPFPSRRSQHTDDSALCMSDDRPNALLSSPATETGHASPLPPSAAPTTDSTDSITGQNSRQREEELELIDQLRKHIEYRLKVSLPCDLGAALTDGVVLCHLANHVRPRSVPSIHVPSPAVPKLTMAKCRRNVENFLEACRKIGVPQEQLCLPLHILEEKGLSQVAVTVQALLELAPPKQQQHQLSAV

SEQ ID NO: 52020 - protein, 230 aa, Homo sapiens
PVKKKKIKREVKILENLRGGTNIIKLIDTVKDPVSKTPALVFEYINNTDFKLRLIDWGLAEFYHPAQEYNVRVASRYFKGPELLVDYQMYDYSLDMWSLGCMLASMIFRREPFFHGQDNYDQLVRIAKVLGTEELYGYLKKYHIDLDPHFNDILGQHSRKRWENFIHSENRHLVSPEALDLLDKLLRYDHQQRLTAKEAMEHPYFYPVVKEQSQPCADNAVLSSGLTAAR

SEQ ID NO: 52021 - protein, 426 aa, Homo sapiens
MAATDLERFSNAEPEPRSLSLGGHVGFDSLPDQLVSKSVTQGFSFNILCVGETGIGKSTLMNTLFNTTFETEEASHHEACVRLRPQTYDLQESNVQLKLTIVDAVSGEGVSCLYRPIVDYIDAQFENYLQEELKIRRSLFDYHDTRIHVCLYFITPTGHSLKSLDLVTMKKLDSKVNIIPIIAKADTISKSELHKFKIKIMGELVSNGVQIYQFPTDDEAVAEINAVMNAHLPFAVVGSTEEVKVGNKLVRARQYPWGVVQVENENHCDFVKLREMLIRVNMEDLREQTHSRHYELYRRCKLEEMGFQDSDGDSQPFSLQETYEAKRKEFLSELQRKEEEMRQMFVNKVKETELELKEKERELHEKFEHLKRVHQEEKRKVEEKRRELEEETNAFNRRKAAVEALQSQALHATSQQPLRKDKDKKN

SEQ ID NO: 52022 - protein, 104 aa, Homo sapiens
MGIKVQRPRCFFDIAINNQPAGRVVFELFSDVCPKTCENFRCLCTELSRILWFKVVTSVKEMDEEGNLSMEDFLKTRVSLLNTTKNFSCQWPTEGRIQMVHSSS

SEQ ID NO: 52023 - protein, 367 aa, Homo sapiens
MALPRCTWPNYVWRAVMACLVHRGLGAPLTLCMLGCLLQAGHVLSQKLDDVDPLVATNFGKIRGIKKELNNEILGPVIQFLGVPYAAPPTGERRFQPPEPPSPWSDIRNATQFAPVCPQNIIDGRLPEVMLPVWFTNNLDVVSSYVQDQSEDCLYLNIYVPTEDVKRISKECARKPGKKICRKGGPLTKKQTDDLGDNDGAEDEDIRDSGGPKPVMVYIHGGSYMEGTGNLYDGSVLASYGNVIVITVNYRLGVLGFLSTGDQAAKGNYGLLDLIQALRWTSENIGFFGGDPLRITVFGSGAGGSCVNLLTLSHYSEGNRWSNSTKGLFQRAIAQSGTALSSWAVSFQPAKYARMLATKVGCNVSDT

SEQ ID NO: 52024 - protein, 296 aa, Homo sapiens
MVEADRPGKLFIGGLNTETNEKALEAVFGKYGRIVEVLLMKDRETNKSRGFAFVTFESPADAKDAARDMNGKSLDGKAIKVEQATKPSFESGRRGPPPPPRSRGPPRGLRGGRGGSGGTRGPPSRGGHMDDGGYSMNFNMSSSRGPLPVKRGPPPRSGGPPPKRSAPSGPVRSSSGMGGRAPVSRGRDSYGGPPRREPLPSRRDVYLSPRDDGYSTKDSYSSRDYPSSRDTRDYAPPPRDYTYRDYGHSSSRDDYPSRGYSDRDGYGRDRDYSDHPSGGSYRDSYESYGKILVKGL

SEQ ID NO: 52025 - protein, 189 aa, Homo sapiens
  MOD_RES (1)..(1): Any amino acid
XEVWGAAPVCHWPPGDTGPDASGGLLRGVPRAQPRHLLHLPRKPRTASLRAATKLCQVVGTDYVFHNDTKVVFLSPAVPEEPEAYNLTVLIEMDGHRALLRTEAGAFEYVPDPTFENFTGGVKKQVNKLIHARGTNLNKAMTLQEAEAFVGAERCTMKTLTETDLYCEPPEVQPPPKRRQKRDTTHNLP

SEQ ID NO: 52026 - protein, 164 aa, Homo sapiens
MGSSKKHRGEKEAAGTTAAAGTGGATEQPPRHREHKKHKHRSGGSGGSGGERRKRSRERGGERGSGRRGAEAEARSSTHGRERSQAEPSERRVKREKRDDGYEAAASSKTSSGDASSLSIEETNKLRAKLGLKPLEVNAIKKAMGGHSLTSGPPFQRRAPRRSP

SEQ ID NO: 52027 - protein, 374 aa, Homo sapiens
MASPALAAALAVAAAAGPNASGAGERGSGGVANASGASWGPPRGQYSAGAVAGLAAVVGFLIVFTVVGNVLVVIAVLTSRALRAPQNLFLVSLASADILVATLVMPFSLANELMAYWYFGQVWCGVYLALDVLFCTSSIVHLCAISLDRYWSVTQAVEYNLKRTPRRVKATIVAVWLISAVISFPPLVSLYRQPDGAAYPQCGLNDETWYILSSCIGSFFAPCLIMGLVYARIYRVAKLRTRTLSEKRAPVGPDGASPTTENGLGAAAGAGENGHCAPPPADVEPDESSAAAERRRRRGALRRGGRRRAGAEGGAGGADGQGAGPGAAESGALTASREWGGERGRPLCLPPSARGCFWGSLPGSSSGSPAEVWL

SEQ ID NO: 52028 - protein, 407 aa, Homo sapiens
MKPILLQGHERSITQIKYNREGDLLFTVAKDPIVNVWYSVNGERLGTYMGHTGAVWCVDADWDTKHVLTGSADNSCRLWDCETGKQLALLKTNSAVRTCGFDFGGNIIMFSTDKQMGYQCFVSFFDLRDPSQIDNNEPYMKIPCNDSKITSAVWGPLGECIIAGHESGELNQYSAKSGEVLVNVKEHSRQINDIQLSRDMTMFVTASKDNTAKLFDSTTLEHQKTFRTERPVNSAALSPNYDHVVLGGGQEAMDVTTTSTRIGKFEARGRCQKRRHRRAQTAPTVALPQTPMTVGTGSPAATRSPGRGESQRQPSSRLSQLSMLCSESPQASTRRMKLSCRGRPLGGGSLVIFSSSSPCQVQPGSKCSRPMRETQNPVKSPSDKRDTEPFRESSLTAHTTHRGVPNL

SEQ ID NO: 52029 - protein, 47 aa, Homo sapiens
MATHHTLWMGLALLGVLGDLQAAPEAQVSVQPNFQQDKFLGRWFSAG

SEQ ID NO: 52030 - protein, 243 aa, Homo sapiens
MPEVLLLRSASSILRTAFLSRWLPGGPRCVHKLSFVRNLQCRQGVRLNVRSSSLTDRQPLSKESLNHALELSVPEKVNNAQWDAPEEALWTTRADGRVRLRIDPSCPQLPYTVHRMFYEALDKYGDLIALGFKRQDKWEHISYSQYYLLARRAAKGFLKLGLKQAHSVAILGFNSPEWFFSAVGTVFAGGIVTGIYTTSSPEACQYIAYDCCANVIMVDTQKQLEKILKIWKQLPHLKAVVIY

SEQ ID NO: 52031 - protein, 188 aa, Homo sapiens
VHCCFYFISPFGHGLKPLDVAFMKAIHNKVNIVPVIAKADTLTLKERERLKKRILDEIEEHNIKIYHLPDAESDEDEDFKEQTRLLKASIPFSVVGSNQLIEAKGKKVRGRLYPWGVVEVENPEHNDFLKLRTMLMKVENEDMNKDQILLEKEAELRRMQEMIARMQAQMQMQMQGGDGDGGALGHHV

SEQ ID NO: 52032 - protein, 164 aa, Homo sapiens
MLLNQVDKVVINPYFGLGAPDYSKIQIPKQEKWQRSMSSVTEDKERQWVDDFPLHRSACEGDSELLSRLLSERFSVNQLDSDHWAPIHYACWYGKVEATRILLEKGKCNPNLLNGQLSSPLHFAAGGGHAEIVQILLNHPETDRHITDQQGRSPLNICEENKQN

SEQ ID NO: 52033 - protein, 81 aa, Homo sapiens
MEAEGLDWLLVPLHQLVSWGAAAAMVFGGVVPYVPQYRDIRRTQNADGFSTYVCLVLLVANILRILFWLECSGTISAHCSL

SEQ ID NO: 52034 - protein, 13 aa, Homo sapiens
MAAETQTLNFGPE

SEQ ID NO: 52035 - protein, 79 aa, Homo sapiens
MSGREPSLEILPRTSLHSIPVTVEVKPVLPRAMPSSMGGGGGGSPSPVELRGALVGSVDPTLREQQLQQELLALKQQQQ

SEQ ID NO: 52036 - protein, 111 aa, Homo sapiens
MPYKLKKEKEPPKVAKCTAKPSSSGKDGGGENTEEVTCLTRPSRSPSPSPSPKPSLSHRHPTSVPAIARRPPRSSAKSSTQGGPRLSRRSDGKAPPASTSARIGSCRSFLP

SEQ ID NO: 52037 - protein, 97 aa, Homo sapiens
MLTPLGRLDKYAASENIFNRQMVARSLLDTLREVCDDERDCIAVLERISRLADDSEPTVRAELMEQVPHIALFCQENRPSIPYAFSKFLLPIVVRYL

SEQ ID NO: 52038 - protein, 208 aa, Homo sapiens
MEVEVKEGLVPVSEDPVAIKIAELLENVTLIHKPVSLQPRGLINKGNWCYINATLQALVACPPMYHLMKFIPLYSKVQRPCTSTPMIDSFVRLMNEFTNMPVPPKPRQALGDKIVRDIRPGAAFEPTYIYRLLTVNKSSLSEKGRQEDAEEYLGFILNGLHEEMLNLKKLLSPSNEKLTISNGPKNHSVNEEEQEEQAIFHVAVGYPV

SEQ ID NO: 52039 - protein, 111 aa, Homo sapiens
MRSLGANMAAALRAAGVLLRDPLASSSWRVCQPWRWKSGAAAAAVTTETAQHAQGAKPQVQPQKRKPKTGILMLNMGGPETLGDVHDFLLRLFLDRDLMTLPIQKKHFSGC

SEQ ID NO: 52040 - protein, 129 aa, Homo sapiens
MTEEPIKEILGAPKAHMAATMEKSPKSEVVITTVPLVSEIQLMAATGGTELSCYRCIIPFAVVVFIAGIVVTAVAYSFNSHGSIISIFGLVVLSSGLFLLASSALCWKVRQRSKKAKRRESQTALVANQ

SEQ ID NO: 52041 - protein, 129 aa, Homo sapiens
EQRNEILTAILASLTARQNLRREWHARAERSVGASHELPEHYLLIRSQNVGHTGKRMMLRCLCRLTSQTSFQNSEVSFWKQNPRRSTSLRRRRKRDRLFSSNVVMGLSKSSGDFSWPLDCSTRVPIQNS

SEQ ID NO: 52042 - protein, 558 aa, Homo sapiens
MPLAFCGSENHSAAYRVDQGVLNNGCFVDALNVVPHVFLLFITFPILFIGWGSQSSKVHIHHSTWLHFPGHNLRWILTFMLLFVLVCEIAEGILSDGVTESHHLHLYMPAGMAFMAAVTSVVYYHNIETSNFPKLLIALLVYWTLAFITKTIKFVKFLDHAIGFSQLRFCLTGLLVILYGMLLLVEVNVIRVRRYIFFKTPREVKPPEDLQDLGVRFLQPFVNLLSKGTYWWMNAFIKTAHKKPIDLRAIGKLPIAMRALTNYQRLCEAFDAQVRKDIQGTQGARAIWQALSHAFGRRLVLSSTFRILADLLGFAGPLCIFGIVDHLGKENDVFQPKTQFLGVYFVSSQEFLANAYVLAVLLFLALLLQRTFLQASYYVAIETGINLRGAIQTKIYNKIMHLSTSNLSMGEMTAGQICNLVAIDTNQLMWFFFLCPNLWAMPVQIIVGVILLYYILGVSALIGAAVIILLAPVQYFVATKLSQAQRSTLEYSNERLKQTNEMLRGIKLLKLYAWENIFRTRVETTRRKEMTSLRAFAIYTSISIFMNTAIPIAAVLIG

SEQ ID NO: 52043 - protein, 89 aa, Homo sapiens
MEDRHVSLPSFNQLFGLSDPVNRAYFAVFDGHGGVDAARYAAVHVHTNAARQPELPTDPEGALREAFRRTDQMFLRKAKRERLQSGTTG

SEQ ID NO: 52044 - protein, 3891 aa, Homo sapiens
MMNEDAAQKSDSGEKFNGSSQRRKRPKKSDSNASFLRAARAGNLDKVVEYLKGGIDINTCNQNGLNALHLAAKEGHVGLVQELLGRGSSVDSATKKGNTALHIASLAGQAEVVKVLVKEGANINAQSQNGFTPLYMAAQENHIDVVKYLLENGANQSTATEDGFTPLAVALQQGHNQAVAILLENDTKGKVRLPALHIAARKDDTKSAALLLQNDHNADVQSKMMVNRTTESGFTPLHIAAHYGNVNVATLLLNRGAAVDFTARNGITPLHVASKRGNTNMVKLLLDRGGQIDAKTRDGLTPLHCAARSGHDQVVELLLERGAPLLARTKNGLSPLHMAAQGDHVECVKHLLQHKAPVDDVTLDYLTALHVAAHCGHYRVTKLLLDKRANPNARALNGFTPLHIACKKNRIKVMELLVKYGASIQAITESGLTPIHVAAFMGHLNIVLLLLQNGASPDVTNIRGETALHMAARAGQVEVVRCLLRNGALVDARAREEQTPLHIASRLGKTEIVQLLLQHMAHPDAATTNGYTPLHISAREGQVDVASVLLEAGAAHSLATKKGFTPLHVAAKYGSLDVAKLLLQRRAAADSAGKNGYTPLHIAAKKNQMQIASTLLNYGAETNIVTKQGVTPLHLASQEGHTDMVTLLLDKGANIHMSTKSGLTSLHLAAQEDKVNVADILTKHGADQDAHTKLGYTPLIVACHYGNVKMVNFLLKQGANVNAKTKNGYTPLHQAAQQGHTHIINVLLQHGAKPNATTANGNTALAIAKRLGYISVVDTLKVVTEEVTTTTTTITEKHKLNVPETMTEVLDVSDEEGDDTMTGDGGEYLRPEDLKELGDDSLPSSQFLDGMNYLRYSLEGGRSDSLRSFSSDRSHTLSHASYLRDSAVMDDSVVIPSHQVSTLAKEAERNSYRLSWGTENLDNVALSSSPIHSGFLVSFMVDARGGAMRGCRHNGLRIIIPPRKCTAPTRVTCRLVKRHRLATMPPMVEGEGLASRLIEVGPSGAQFLGPVIVEIPHFAALRGKERELVVLRSENGDSWKEHFCDYTEDELNEILNGMDEVLDSPEDLEKKRICRIITRDFPQYFAVVSRIKQDSNLIGPEGGVLSSTVVPQVQAVFPEGALTKRIRVGLQAQPMHSELVKKILGNKATFSPIVTLEPRRRKFHKPITMTIPVPKASSDVMLNGFGGDAPTLRLLCSITGGTTPAQWEDITGTTPLTFVNECVSFTTNVSARFWLIDCRQIQESVTFASQVYREIICVPYMAKFVVFAKSHDPIEARLRCFCMTDDKVDKTLEQQENFAEVARSRDVEVLEGKPIYVDCFGNLVPLTKSGQHHIFSFFAFKENRLPLFVKVRDTTQEPCGRLSFMKEPKSTRGLVHQAICNLNITLPIYTKESESDQEQEEEIDMTSEKNDETESTETSVLKSHLVNEVPVLASPDLLSEVSEMKQDLIKMTAILTTDVSDKAGSIKVKELVKAAEEEPGEPFEIVERVKEDLEKVNEILRSGTCTRDESSVQSSRSERGLVEEEWVIVSDEEIEEARQKAPLEITEYPCVEVRIDKEIKGKVEKDSTGLVNYLTDDLNTCVPLPKEQLQTVQDKAGKKCEALAVGRSSEKEGKDIPPDETQSTQKQHKPSLGIKKPVRRKLKEKQKQKEEGLQASAEKAELKKGSSEESLGEDPGLAPEPLPTVKATSPLIEETPIGSIKDKVKALQKRVEDEQKGRSKLPIRVKGKEDVPKKTTHRPHPAASPSLKSERHAPGSPSPKTERHSTLSSSAKTERHPPVSPSSKTEKHSPVSPSAKTERHSPASSSSKTEKHSPVSPSTKTERHSPVSSTKTERHPPVSPSGKTDKRPPVSPSGRTEKHPPVSPGRTEKRLPVSPSGRTDKHQPVSTAGKTEKHLPVSPSGKTEKQPPVSPTSKTERIEETMSVRELMKAFQSGQDPSKHKTGLFEHKSAKQKQPQEKGKVRVEKEKGPILTQREAQKTENQTIKRGQRLPVTGTAESKRGVRVSSIGVKKEDAAGGKEKVLSHKIPEPVQSVPEEESHRESEVPKEKMADEQGDMDLQISPDRKTSTDFSEVIKQELEDNDKYQQFRLSEETEKAQLHLDQVLTSPFNTTFPLDYMKDEFLPALSLQSGALDGSSESLKNEGVAGSPCGSLMEGTPQISSEESYKHEGLAETPETSPESLSFSPKKSEEQTGETKESTKTETTTEIRSEKEHPTTKDITGGSEERGATVTEDSETSTESFQKEATLGSPKDTSPKRQDDCTGSCSVALAKETPTGLTEEAACDEGQRTFGSSAHKTQTDSEVQESTATSDETKALPLPEASVKTDTGTESKPQGVIRSPQGLELALPSRDSEVLSAVADDSLAVSHKDSLEASPVLEDNSSHKTPDSLEPSPLKESPCRDSLESSPVEPKMKAGIFPSHFPLPAAVAKTELLTEVASVRSRLLRDPDGSAEDDSLEQTSLMESSGKSPLSPDTPSSEEVSYEVTPKTTDVSTPKPAVIHECAEEDDSENGEKKRFTPEEEMFKMVTKIKMFDELEQEAKQKRDYKKEPKQEESSSSSDPDADCSVDVDEPKHTGSGEDESGVPVLVTSESRKVSSSSESEPELAQLKKGADSGLLPEPVIRVQPPSPLPSSMDSNSSPEEVQFQPVVSKQYTFKMNEDTQEEPGKSEEEKDSESHLAEDRHAVSTEAEDRSYDKLNRDTDQPKICDGHGCEAMSPSSSAAPVSSGLQSPTGDDVDEQPVIYKESLALQGTHEKDTEGEELDVSRAESPQADCPSESFSSSSSLPHCLVSEGKELDEDISATSSIQKTEVTKTDETFENLPKDCPSQDSSITTQTDRFSMDVPVSDLAENDEIYDPQITSPYENVPSQSFFSSEESKTQTDANHTTSFHSSEVYSVTITSPVEDVVVASSSSGTVLSKESNFEGQDIKMESQQESTLWEMQSDSVSSSFEPTMSATTTVVGEQISKVIITKTDVDSDSWSEIREDDEAFEARVKEEEQKIFGLMVDRQSQGTTPDTTPARTPTEEGTPTSEQNPFLFQEGKLFEMTRSGAIDMTKRSYADESFHFFQIGQESREETLSEDVKEGATGADPLPLETSAESLALSESKETVDDEADLLPDDVSEEVEEIPASDAQLNSQMGISASTETPTKEAVSVGTKDLPTVQTGDIPPLSGVKQISCPDSSEPAVQVQLDFSTLTRSVYSDRGDDSPDSSPEEQKSVIEIPTAPMENVPFTESKSKIPVRTMPTSTPAPPSAEYESSVSEDFLSSVDEENKADEAKPKSKLPVKVPLQRVEQQLSDLDTSVQKTVAPQGQDMASIAPDNRSKSESDASSLDSKTKCPVKTRSYTETETESRERAEELELESEEGATRPKILTSRLPVKSRSTTSSCRGGTSPTKESKEHFFDLYRNSIEFFEEISDEASKLVDRLTQSEREQEIVSDDESSSALEVSVIENLPPVETEHSVPEDIFDTRPIWDESIETLIERIPDENGHDHAEDPQDEQERIEERLAYIADHLGFSWTELARELDFTEEQIHQIRIENPNSLQDQSHALLKYWLERDGKHATDTNLVECLTKINRMDIVHLMETNTEPLQERISHSYAEIEQTITLDHSEGFSVLQEELCTAQHKQKEEQAVSKESETCDHPPIVSEEDISVGYSTFQDGVPKTEGDSSATALFPQTHKEQVQQDFSGKMQDLPEESSLEYQQEYFVTTPGTETSETQKAMIVPSSPSKTPEEVSTPAEEEKLYLQTPTSSERGGSPIIQEPEEPSEHREESSPRKTSLVIVESADNQPETCERLDEDAAFEKGDDMPEIPPETVTEEEYIDEHGHTVVKKVTRKIIRRYVSSEGTEKEEIMVQGMPQEPVNIEEGDGYSKVIKRVVLKSDTEQSEDNNE

SEQ ID NO: 52045 - protein, 254 aa, Homo sapiens
MASRLTLLTLLLLLLAGDRASSNPNATSSSSQDPESLQDRGEGKVATTVISKMLFVEPILEVSSLPTTNSTTNSATKITANTTDEPTTQPTTEPTTQPTIQPTQPTTQLPTDSPTQPTTGSFCPGPVTLCSDLESHSTEAVLGDALVDFSLKLYHAFSAMKKVETNMAFSPFSIASLLTQVLLGAGENTKTNLESILSYPKDFTCVHQALKGFTTKGVTSVSQIFHSPESRSVAQAGMQWHHLSSLQPPSPRFK

SEQ ID NO: 52046 - protein, 129 aa, Homo sapiens
MSLLATLGLELDRALLPASGLGWLVDYGKLPPAPAPLAPYEVLGGALEGGLPVGGEPLAGDGFSDWMTERVDFTALLPLEPPLPPGTLPQPSPTPPDLEAMASLLKKELEQMEDFFLDAPPLPPPSPPP

SEQ ID NO: 52047 - protein, 406 aa, Homo sapiens
MQPSSLLPLALCLLAAPASALVRIPLHKFTSIRRTMSEVGGSVEDLIAKGPVSKYSQAVPAVTEGPIPEVLKNYMDAQYYGEIGIGTPPQCFTVVFDTGSSNLWVPSIHCKLLDIACWIHHKYNSDKSSTYVKNGTSFDIHYGSGSLSGYLSQDTVSVPCQSASSASALGGVKVERQVFGEATKQPGITFIAAKFDGILGMAYPRISVNNVLPVFDNLMQQKLVDQNIFSFYLSRDPDAQPGGELMLGGTDSKYYKGSLSYLNVTRKAYWVEVASGLTLCKEGCEAIVDTGTSLMVGPVDEVRELQKAIGAVPLIQGEYMIPCEKVSTLPAITLKLGGKGYKLSPEDYTLKVSQAGKTLCLSGFMGMDIPPPSGPLWILGDVFIGRYYTVFDRDNNRVGFAEAARL

SEQ ID NO: 52048 - protein, 196 aa, Homo sapiens
RRRRKRRTPMSRRSLCRPTHSSSETLRPPSRVRTPVPLSVTCPKSWPPCGTAWERNRSRTSRTSLSSPAARDPAHLAHPTPPAAGTGTAATPVGSVASAPAACSPGTNRSTSPNPASLPSLRLAGRHCSEPEGLTAEKRPWPEAGWPIGESSDTPIARGLSLFLNLPPDSAEAAHCPPPAQRTCRNLPPADLLAPG

SEQ ID NO: 52049 - protein, 351 aa, Homo sapiens
MSASAVYVLDLKGKVLRVFSEYFKELEEESIRDNFVIIYELLDELMDFGYPQTTDSKILQEYITQEGHKLETGAPRPPATVTNAVSWRSEGIKYRKNEVFLDVIESVNLLVSANGNVLRSEIVGSIKMRVFLSGMPELRLGLNDKVLFDNTGRGKSKSVELEDVKFHQCVRLSRFENDRTISFIPPDGEFELMSYRLNTHVKPLIWIESVIEKHSHSRIEYMIKAKSQFKRRSTANNVEIHIPVPNDADSPKFKTTVGSVKWVPENSEIVWSIKSFPGGKEYLMRAHFGLPSVEAEDKEGKPPISVKFEIPYFTTSGIQVRYLKIIEKSGYQALPWVRYITQNGDYQLRTQ

SEQ ID NO: 52050 - protein, 52 aa, Homo sapiens
MIQAQESITLEDVAVDFTWEEWQLLGAAQKDLYRDVMLENYSNLVAVGYQAS

SEQ ID NO: 52051 - protein, 125 aa, Homo sapiens
MADGELNVDSLITRLLEVRGCRPGKIVQMTEAEVRGLCIKSREIFLSQPILLELEAPLKICGDIHGQYTDLLRLFEYGGFPPEANYLFLGDYVDRGKQSLETICLLLAYKIKYPENFFLLRGNHE

SEQ ID NO: 52052 - protein, 195 aa, Homo sapiens
MAPPAAPGRDRVGREDEDGWETRGDRKVQAKLENAEVLELTVRRVQGVLRGRAREREQLQAEASERFAAGYIQCMHEVHTFVSTCQAIDATVAAELLNHLLESMPLREGSSFQDLLGDALAGPPRAPGRSGWPAGGAPGSPIPSPPGPGDDLCSDLEEAPEAELSQAPAEGPDLVPAALGSLTTAQIARSVWRPW

SEQ ID NO: 52053 - protein, 227 aa, Homo sapiens
MNGPADGEVDYKKKYRNLKRKLKFLIYEHECFQEELRKAQRKLLKVSRDKSFLLDRLLQYENVDEDSSDSDATASSDNSETEGTPKLSDTPAPKRKRSPPLGGAPSPSSLSLPPSTGFPLQASGVPSPYLSSLPEPSPLRPKREKRPRLPRKLKMAVGPPDCPVGGPLTFPGRGSGAGVGTTLTPLPPPKMPPPTILSTVPRQMFSDAGSGDDALDGDDDLVIDIPE

SEQ ID NO: 52054 - protein, 69 aa, Homo sapiens
MEDLTDEEEVPASQSTENRVLPAPAPRREKTNEELQEELRNLQEQMKALQEQLKVTTIKQTASPARLQK

SEQ ID NO: 52055 - protein, 72 aa, Homo sapiens
MFHWQATIMGPNDSPYQGGVFFLTIHFPTDYPFKPPKVAFTTRIYHPNINSNGSICLDILRSQWSPALTISK

SEQ ID NO: 52056 - protein, 47 aa, Homo sapiens
MAAGVDCGDGVGARQHVFLVSEYLKDASKKMKNGLMFVKLVNPCSAV

SEQ ID NO: 52057 - protein, 544 aa, Homo sapiens
MHCKVSLLDDTVYECVVEKHAKGQDLLKRVCEHLNLLEEDYFGLAIWDNATSKTWLDSAKEIKKQVRGVPWNFTFNVKFYPPDPAQLTEDITRYYLCLQLRQDIVAGRLPCSFATLALLGSYTIQSELGDYDPELHGVDYVSDFKLAPNQTKELEEKVMELHKSYRSMTPAQADLEFLENAKKLSMYGVDLHKAKDLEGVDIILGVCSSGLLVYKDKLRINRFPWPKVLKISYKRSSFFIKIRPGEQEQYESTIGFKLPSYRAAKKLWKVCVEHHTFFRLTSTDTIPKSKFLALGSKFRYSGRTQAQTRQASALIDRPAPHFERTASKRASRSLDGAAAVDSADRSPRPTSAPAITQGQVAEGGVLDASAKKTVVPKAQKETVKAEVKKEDEPPEQAEPEPTEAWKVEKTHIEVTVPTSNGDQTQKLAEKTEDLIRMRKKKRERLDGENIYIRHSNLMLEDLDKSQEEIKKHHASISELKKNFMESVPEPRPSEWDKRLSTHSPFRTLNINGQIPTGEGKNYGLGTMAHACNPSTLGGQDRQIT

SEQ ID NO: 52058 - protein, 237 aa, Homo sapiens
  MOD_RES (1)..(1): Any amino acid
XYNAEREFLQGATITEACDGSDDIFGLSTDSLSRLRSPSVLEVREKGYERLKEELAKAQRELKLKDEECERLSKVRDQLGQELEELTASLFEEAHKMVREANIKQATAEKQLKEAQGKIDVLQAEVAALKTLVLSSSPTSPTQEPLPGGKTPFKKGHTRNKSTSSAMSGSHQDLSVIQPIVKDCKEADLSLYNEFRLWKDEPTMDRTCPFLDKIYQEDIFPCLTFSKSEKMCSHWPE

SEQ ID NO: 52059 - protein, 250 aa, Homo sapiens
MAGSEELGLREDTLRVLAAFLRRGEAAGSPVPTPPRSPAQEEPTDFLSRLRRCLPCSLGRGAAPSESPRPCSLPIRPCYGLEPGPATPDFYALVAQRLEQLVQEQLKSPPSPELQGPPSTEKEAILRRLVALLEEEAEVINQKLASDPALRSKLVRLSSDSFARLVELFCSRDDSSRPSRACPGPPPPSPEPLARLALAMELSRRVAGLGGTLAGLSVEHVHSFTPWIQAHGGWEGILAVSPVDLNLPLD

SEQ ID NO: 52060 - protein, 310 aa, Homo sapiens
  MOD_RES (1)..(1): Any amino acid
XEPVPAARSEDRYRNPKGFSTLAQLKQRNTLKDGIIMIQTLLIILFIIVPIFLLLDKDDSKAGMEEDHTYEGLDIDQTATYEDIVTLRTGEVKWSVGSRTSLLLAFGLLCLPWLQEGSAFPTIPLSRLFDNAMLRAHRLHQLAFDTYQEFEEAYIPKEQKYSFLQNPQTSLCFSESIPTPSNREETQQKSNLELLRISLLLIQSWLEPVQFLRSVFANSLVYGASDSNVYDLLKDLEEGIQTLMGRLEDGSPRTGQIFKQTYSKFDTNSHNDDALLKNYGLLYCFRKDMDKVETFLRIVQCRSVEGSCGF

SEQ ID NO: 52061 - protein, 146 aa, Homo sapiens
MWLLVSVILISRISSVGGEVSAEKCGPPPPIDNGDITSFLLSVYAPGSSVEYQCQNLYQLEGNNQITCRNGQWSEPPKCLDPCVISQEIMEKYNIKLKWTNQQKLYSRTGDIVEFVCKSGYHPTKSHSFRAMCQNGKLVYPSCEEK

SEQ ID NO: 52062 - protein, 862 aa, Homo sapiens
MAGNVKKSSGAGGGSGSGGSGSGGLIGLMKDAFQPHHHHHHHLSPHPPGTVDKKMVEKCWKLMDKVVRLCQNPKLALKNSPPYILDLLPDTYQHLRTILSRYEGKMETLGENEYFRVFMENLMKKTKQTISLFKEGKERMYEENSQPRRNLTKLSLIFSHMLAELKGIFPSGLFQGDTFRITKADAAEFWRKAFGEKTIVPWKSFRQALHEVHPISSGLEAMALKSTIDLTCNDYISVFEFDIFTRLFQPWSSLLRNWNSLAVTHPGYMAFLTYDEVKARLQKFIHKPGSYIFRLSCTRLGQWAIGYVTADGNILQTIPHNKPLFQALIDGFREGFYLFPDGRNQNPDLTGLCEPTPQDHIKVTQEQYELYCEMGSTFQLCKICAENDKDVKIEPCGHLMCTSCLTSWQESEGQGCPFCRCEIKGTEPIVVDPFDPRGSGSLLRQGAEGAPSPNYDDDDDERADDTLFMMKELAGAKAASGSLHKDKPLPVPPTLRDLPPPPPPDRPYSVGAESRPQRRPLPCTPGDCPSRDKLPPVPSSRLGDSWLPRPIPKVPVSAPSSSDPWTGRELTNRHSLPFSLPSQMEPRPDVPRLGSTFSLDTSMSMNSSPLVGPECDHPKIKPSSSANAIYSLAARPLPVPKLPPGEQCEGEEDTEYMTPSSRPLRPLDTSQSSRACDCDQQIDSCTYEAMYNIQSQAPSITESSTFGEGNLAAAHANTGPEESENEDDGYDVPKPPVPAVLARRTLSDISNASSSFGWLSLDGDPTTNVTEGSQVPERPPKPFPRRINSERKAGSCQQGSGPAASAATASPQLSSEIENLMSQGYSYQDIQKALVIAQNNIEMAKNILREFVSISSPAHVAT

SEQ ID NO: 52063 - protein, 979 aa, Homo sapiens
MGFVRQIQLLLWKNWTLRKRQKIRFVVELVWPLSLFLVLIWLRNANPLYSHHECHFPNKAMPSAGMLPWLQGIFCNVNNPCFQSPTPGESPGIVSNYNNSILARVYRDFQELLMNAPESQHLGRIWTELHILSQFMDTLRTHPERIAGRGIRIRDILKDEETLTLFLIKNIGLSDSVVYLLINSQVRPEQFAHGVPDLALKDIACSEALLERFIIFSQRRGAKTVRYALCSLSQGTLQWIEDTLYANVDFFKLFRVLPTLLDSRSQGINLRSWGGILSDMSPRIQEFIHRPSMQDLLWVTRPLMQNGGPETFTKLMGILSDLLCGYPEGGGSRVLSFNWYEDNNYKAFLGIDSTRKDPIYSYDRRTTSFCNALIQSLESNPLTKIAWRAAKPLLMGKILYTPDSPAARRILKNANSTFEELEHVRKLVKAWEEVGPQIWYFFDNSTQMNMIRDTLGNPTVKDFLNRQLGEEGITAEAILNFLYKGPRESQADDMANFDWRDIFNITDRTLRLVNQYLECLVLDKFESYNDETQLTQRALSLLEENMFWAGVVFPDMYPWTSSLPPHVKYKIRMDIDVVEKTNKIKDRYWDSGPRADPVEDFRYIWGGFAYLQDMVEQGITRSQVQAEAPVGIYLQQMPYPCFVDDSFMIILNRCFPIFMVLAWIYSVSMTVKSIVLEKELRLKETLKNQGVSNAVIWCTWFLDSFSIMSMSIFLLTIFIMSLLSPVAFGFGTEYLVRFEEQGLGLQWSNIGNSPTEGDEFSFLLSMQMMLLDAAVYGLLAWYLDQVFPGDYGTPLPWYFLLQESYWLGGEGCSTREERALEKTEPLTEETEDPEHPEGIHDSFFEREHPGWVPGVCVKNLVKIFEPCGRPAVDRLNITFYENQITAFLGHNGAGKTTTFSAGAPLSSKGPERHLLRGEHGPPWFPKEQQTRTSQGAANPRDTVFKSFGEPQEGTTACTPCDGMFSRAVQCEWNVGPVPF

SEQ ID NO: 52064 - protein, 24 aa, Homo sapiens
QRGFLYEPVSQHWVFGEGTELTVL

SEQ ID NO: 52065 - protein, 24 aa, Homo sapiens
  MOD_RES (1)..(1): Any amino acid
XVGTDQKSCDPGLEDPCGLNRARS

SEQ ID NO: 52066 - protein, 117 aa, Homo sapiens
KNLANRVHSPHKRLSHRHLKVSTASLTSVDPAGHIIDLVNDQLPDISISEEDKKKNLALLEEAKLVSERFLTRRGRKSRSSPGDSPSAVSPNLSPSASPTSSRSNSLTVPTPPAEGG

SEQ ID NO: 52067 - protein, 96 aa, Homo sapiens
MMQLRQLDMKRITEEERRMASVLAKKEEEKKRESHKQSLLKEKKRLTINNVARQWDLQQQRVANIATNEDRKDSDSPQDPCQIDGSTLSAFPEETG

SEQ ID NO: 52068 - protein, 563 aa, Homo sapiens
MKSPALQPLSMAGLQLMTPASSPMGPFFGLPWQQEAIHDNIYTPRKYQVELLEAALDHNTIVCLNTGSGKTFIAVLLTKELSYQIRGDFSRNGKRTVFLVNSANQVAQQVSAVRTHSDLKVGEYSNLEVNASWTKERWNQEFTKHQVLIMTCYVALNVLKNGYLSLSDINLLVFDECHLAILDHPYREIMKLCENCPSCPRILGLTASILNGKCDPEELEEKIQKLEKILKSNAETATDLVVLDRYTSQPCEIVVDCGPFTDRSGLYERLLMELEEALNFINDCNISVHSKERDSTLISKQILSDCRAVLVVLGPWCADKVAGMMVRELQKYIKHEQEELHRKFLLFTDTFLRKIHALCEEHFSPASLDLKFVTPKVIKLLEILRKYKPYERQQFESVEWYNNRNQDNYVSWSDSEDDDEDEEIEEKEKPETNFPSPFTNILCGIIFVERRYTAVVLNRLIKEAGKQDPELAYISSNFITGHGIGKNQPRNKQMEAEFRKQEEVLRKFRAHETNLLIATSIVEEGVDIPKCNLVVRFDLPTEYRSYVQSKGRARAPISNYIML

SEQ ID NO: 52069 - protein, 62 aa, Homo sapiens
MDEQSQGMQGPPVPQFQPQKALRPDMGYNTLANFRIEKKIGRGQFSEVYRAACLLDGVPVAL

SEQ ID NO: 52070 - protein, 115 aa, Homo sapiens
MAKYQGEVQSLKLDDDSVIEGVSDQVLVAVVVSFALIATLVYALFRNVHQNIHPENQELVRVLREQLQTEQDAPAATRQQFYTDMYCPICLHQASFPVETNCGHLFCGACIIAYW

SEQ ID NO: 52071 - protein, 462 aa, Homo sapiens
MGLLLPFSDCFREPCNQNAQTNAASFDQDQLYTWAAVSQPTHSLDYSEGQFPRRVPSMGPPSKPPDEEHRLEDAETESQSAVSETPQKRSDAVQKVVKLLSNKRSQAVGILMSSLHLDMKDIQHAVVNLDNSVVDLETLQALYENRAQSDELEKIEKHGRSSKDKENAKSLDKPEQFLYELSLIPNFSERVFCILFQSTFSESICSIRRKLELLQKLCETLKNGPGVMQVLGLVLAFGNYMNGGNKTRGQADGFGLDILPKLKDVKSSDNSRSLLSYIVSYYLRNFDEDAGKEQCLFPLPEPQDLFQASQMKFEDFQKDLRKLKKDLKACEVEAGKVYQVSSKEHMQPFKENMEQFIIQAKIDQEAEENSLTETHKCFLETTAYFFMKPKLGEKEVSPNAFFSIWHEFSSDFKDFWKKENKLLLQERVKEAEEVCRQKKGKSLYKIKPRHDSGIKAKISMKT

SEQ ID NO: 52072 - protein, 1266 aa, Homo sapiens
RLKELKQREFARNVASKSWKDEKKQEKALKRLHQLAELRQQSECVSGNGPAYKAPRVAIEKQLQQGIFPIKNGRKVSCMKSALLLKGKNLPRIISDKQRSTMPNRHQLQSDRRCLFGNQVLQTSSDLSNANHRTGVSFTFSKKVHLKLESSASVFSENTEETHDCNKSPIYKTKQTADKCKCCRFANKDTHLTKEKEVNISPSHLESVLHNTISINSKILQDKHDSIDETLEDSIGIHASFSKSNIHLSDVDFTPTSREKETRNTLKNTLENCVNHPCQANASFSPPNIYNHSDARISECLDEFSSLEPSEQKSTVHLNPNSRIENREKSLDKTERVSKNVQRLVKEACTHNVASKPLPFLHVQSKDGHTTLQWPTELLLFTKTEPCISYGCNPLYFDFKLSRNTKEDHNLEDLKTELGKKPLELKTKRESQVSGLTEDQQKLIQEDYQYPKPKTMIANPDWEKFQRKYNLDYSDSEPNKSEYTFSANDLEMKNPKVPLYLNTSLKDCAGKNNSSENKLKEASRAHWQGCRKAVLNDIDEDLSFPSYISRFKKHKLIPCSPHLEFEDERQFNCKSSPCTVGGHSDHGKDFSVILKSNHISMTSKVSGCGNQRYKRYSPQSCLSRYSSSLDTSPSSMSSLRSTCSSHRFNGNSRGNLLCFHKREHHSVERHKRKCLKHNCFYLSDDITKSSQMQSEPQKERNCKLWESFKNEKYSKRRYCHCRERQKLGKNQQQFSGLKSTRIIYCDSNSQISCTGSSKKPPNCQGTQHDRLDSYSIEKMYYLNKSKRNQESLGSPHICDLGKVRPMKCNSGNISCLLKNCSSGPSETTESNTAEGERTPLTAKILLERVQAKKCQEQSSNVEISSNSCKSELEAPSQVPCTIQLAPSGCNRQALPLSEKIQYASESRNDQDSAIPRTTEKDKSKSSHTNNFTILADTDCDNHLSKGIIHLVTESQSLNIKRDATTKEQSKPLISEIQPFIQSCDPVPNEFPGAFPSNKYTGVTDSTETQEDQINLDLQDVSMHINHVEGNINSYYDRTMQKPDKVEDGLEMCHKSISPPLIQQPITFSPDEIDKYKILQLQAQQHMQKQLLSKHLRVLPAAGPTAFSPASTVQTVPVHQHTSITTIHHTFLQHFAVSASLSSHSSHLPIAHLHPLSQAHFSPISFSTLTPTIIPAHPTFLAGHPLHLVAATPFHPSHITLQPLPPTAFIPTLFGPHLNPATTSIIHLNPLIQPVFQGQDFCHHSCSSQMQQLNEVKEALNVSTHLN

SEQ ID NO: 52073 - protein, 92 aa, Homo sapiens
MSYFGEHFWGEKNHGFEVLYHSVKQGPISTKELADFIRERATIEETYSKAMAKLSKLASNGTPMGTFAPLWEVFRVSSDKLALCHLELTRKL

SEQ ID NO: 52074 - protein, 171 aa, Homo sapiens
  MOD_RES (1)..(1): Any amino acid
XTHLDVSDEKQRKACMSKITKELLNKRGFPAIRDYHFVNATEESDALAKLRKTIINESLNFKIRDQLVVGQLIPDCYVELEKIILSERKNVPIEFPVIDRKRLLQLVRENQLQLDENELPHAVHFLNESGVLLHFQDPALQLSDLYFVEPKWLCKIMAQEKKEAIVKRELS

SEQ ID NO: 52075 - protein, 380 aa, Homo sapiens
MLNVHNLNYSSSRTLLFQRFSVIFMDVLFVYAVRECCKCIDGKKVGKELTEKPKFILSVLLLWNFGLLIVDHIHFQYNGFLFGLMLLSIARLFQKRHMEGAFLFAVLLHFKHIYLYVAPAYGVYLLRSYCFTANKPDGSIRWKSFSFVRVISLGLVVFLVSALSLGPFLALNQLPQVFSRLFPFKRGLCHAYWAPNFWALYNALDKVLSVIGPRGFLRCLTLCALSSFMFGWHVHEKAILLAILPMSLLSVGKAGDASIFLILTTTGHYSLFPLLFTAPELPIKILLMLLFTIYSISSLKTLFRKEKPLFNWMETFYLLGLGPLEVCCEFVFPFTSWKVKYPFIPLLLTSVYCAVGITYAWFKLYVSVLIDSAIGKTKKQ

SEQ ID NO: 52076 - protein, 218 aa, Homo sapiens
MKQIFFLDDSGPPFGHMVLALGGYLGGFDGNFLWNRIGAEYSSNVPVWSLRLLPALAGALSVPMAYQIVLELHFSHCAAMGAALLMLIENALITQSRLMLLESVLIFFNLLAVLSYLKFFNCQKHSPFSLSWWFWLTLTGVACSCAVGIKYMGVFTYVLVLGVAAVHAWHLLGDQTLSNVGADVQCCMRPACMGQMQMSQGVCVFCHLLARAVALLVI

SEQ ID NO: 52077 - protein, 178 aa, Homo sapiens
MILGSLSRAGPLPLLRQPPIMQPPLDLKQILPFPLEPAPTLGLFSNYSTSQAEAHYKGNRHARRVKGIEAAKTRGREPGVREPGDPAPPGSTPTNGDGVAPRPVSMENGLGPAPGSPEKQPGSPSPPSIPETGQGVTKGEGGTPAPASLPGGSKEEEEKAKRLLYCALCKVAVNSLSQ

SEQ ID NO: 52078 - protein, 220 aa, Homo sapiens
MVSPRMSGLLSQTVILALIFLPQTRPAGVFELQIHSFGPGPGPGAPRSPCSARLPCRLFFRVCLKPGLSEEAAESPCALGAALSARGPVYTEQPGAPAPDLPLPDGLLQVPFRDAWPGTFSFIIETWREELGDQIGGGLCLDLGHALRCRCRAGFAGPRCEHDLDDCAGRACANGGTCVEGGGAHRCSCALGFGGRDCRERADPCAARPCAHGGRCYAHF

SEQ ID NO: 52079 - protein, 149 aa, Homo sapiens
MQEAIILLALLGAMSGGEALHLILLPATGNVAENSPPGTSVHKFSVKLSASLSPVIPGFPQIVNSNPLTEAFRVNWLSGTYFEVVTTGMEQLDFETGPNIFDLQIYVKDEVGVTDLQVLTVQVTDVNEPPQFQGNLAEARHECTQSWRN

SEQ ID NO: 52080 - protein, 234 aa, Homo sapiens
MDSNTAPLGPSCPQPPPAPQPQARSRLNATASLEQERSERPRAPGPQAGPGPGVRDAAAPAEPQAQHTRSRERADGTGPTKGDMEIPFEEVLERAKAGDPKAQTEVGKHYLQLAGDTDEELNSCTAVDWLVLAAKQGRREAVKLLRRCLADRRGITSENEREVRQLSSETDLERAVRKAALVMYWKLNPKKKKQVAVAELLENVGQVNEHGARIHPGHQPSLGASLPTGARTFP

SEQ ID NO: 52081 - protein, 204 aa, Homo sapiens
  MOD_RES (1)..(1): Any amino acid
XEVGSGFKVAMHILNNGRFGMAAALAGTMRGIIAKAVDHATNRTQFGEKIHNFGLIQEKLARMVMLQYVTESMAYMVSANMDQGATDFQIEAAISKIFGSEAAWKVTDECIQIMGGMGFMKEPGVERVLRDLRIFRIFEGTNDILRLFVALQGCMAGRAGQRPESQRTCPPGVESEWRAGSTGSGAVCHCGGGQADKTQEGDCQ

SEQ ID NO: 52082 - protein, 82 aa, Homo sapiens
MALYDEDLLKNPFYLALQKCRPDLCSKVAQIHGIVLVPCKGSLSSSIQSTCQFESYILIPVEEHFQTLNGKKSLWHPQIPFP

SEQ ID NO: 52083 - protein, 252 aa, Homo sapiens
IVFLHNDRYIEFHSQSGFYYKTRIPKFGRDFSYHYPSCDLYFVGASSEVYRLNLEQGRYLNPLQTDAAENNVCDINSVHGLFATGTIEGRVECWDPRTRNRVGLLDCALNSVTADSEINSLPTISALKFNGALTMAVGTTTGQVLLYDLRSDKPLLVKDHQYGLPIKSVHFQDSLDLILSADSRIVKMWNKNSGKIFTSLEPEHDLNDVCLYPNSGMLLTANETPKMGIYYIPFSKPVLSSSLNQSLPPAFL

SEQ ID NO: 52084 - protein, 233 aa, Homo sapiens
MAPARCFSARLRTVFQGVGHWALSTWAGLKPSRLLPQRASPRLLSVGRADLAKHQELPGKKLLSEKKLKRYFVDYRRVLVCGGNGGAGASCFHSEPRKEFGGPDGGDGGNGGHVILRVDQQVKSLSSVLSRYQGFSGEDGGSKNCFGRSGAVLYIRVPVGTLVKEGGRVVADLSCVGDEYIAALGGAGGKGNRFFLANNNRAPVTCTPGQPGQQRVLHLELKTVAHAGMVGFP

SEQ ID NO: 52085 - protein, 539 aa, Homo sapiens
MSAAIAALAASYGSGSGSESDSDSESSRCPLPAADSLMHLTKSPSSKPSLAVAVDSAPEVAVKEDLETGVHLDPAVKEVQYNPTYETMFAPEFGPENPFRTQQMAAPRNMLSGYAEPAHINDFMFEQQRRTFATYGYALDPSLDNHQVSAKYIGSVEEAEKNQGLTVFETGQKKTEKRKKFKENDASNIDGFLGPWAKYVDEKDVAKPSEEEQKELDEITAKRQKKGKQEEEKPGEEKTILHVKEMYDYQGRSYLHIPQDVGVNLRSTMPPEKCYLPKKQIHVWSGHTKGVSAVRLFPLSGHLLLSCSMDCKIKLWEVYGERRCLRTFIGHSKAVRDICFNTAGTQFLSAAYDRYLKLWDTETGQCISRFTNRKVPYCVKFNPDEDKQNLFVAGMSDKKIVQWDIRSGEIVQEYDRHLGAVNTIVFVDENRRFVSTSDDKSLRVWEWDIPVDFKYIAEPSMHSMPAVTLSPNGKWLACQSMDNQILIFGAQNRFRLNKKKIFKGHMVAGYACQVDFSPDMRVPQSFQNLKEVTAGPQEG

SEQ ID NO: 52086 - protein, 188 aa, Homo sapiens
MQAKYSSTRDMLDDDGDTTMSLHSQGSATTRHPEPRRTAHRCSPCTEQWKWHGDNCYQFYKDSKSWEDCKYFCLSENSTMLKINKQEDLEFAASQSYSEFFYSYWTGLLRPDSGKAWLWMDGTPFTSELFHIIIDVTSPRSRDCVAILNGMIFSKDCKELKRCVCERRAGMVKPESLHVPPETLGEGD

SEQ ID NO: 52087 - protein, 312 aa, Homo sapiens
  MOD_RES (1)..(1): Any amino acid
XSDEEEDEEKGGRRIMGPRKKFQWNDEIRTLFKESRRGHGHLTSILAKKKVMAPSKIKVKESSTKPDKKVSVPSGQIGGPIALPSDHQTGGLSIGASSRELPSQASGGLANPPPVNLEDSLDEDLIRNPASSVEAVSKELAALNSRAAGNSEFTLPAPSKAPAEKVGGVLCTEEKRNFAKPSPSAPPPASSLQSPLNFLAEQALALGQSSQEKKPESSGYKELSCQAPLNKGLPEVHQSKAKHHSLPRTSHGPQVAVPVPGPQVKVFHAGTQQQKNFTPPSPFANKLQGPKASPTQCHRSLLQLVKTAAKGQ

SEQ ID NO: 52088 - protein, 135 aa, Homo sapiens
MADDAGLETPLCSEQFGSGEARGCRAAADGSLQWEVGGWRWWGLSRAFTVKPEGRDAGEVGASGAPSPPLSGLQAVFLPQGFPDSVSPDYLPYQLWDSVQIQLACWAASSLPGGKGANWTAMPSSGGFLRTSSMT

SEQ ID NO: 52089 - protein, 239 aa, Homo sapiens
  MOD_RES (1)..(1): Any amino acid
XAQDLCKVAGIAKVLVAQHDVYKGLLPEELTPLILATQKQFNYTHICAGASAFGKNLLPRVAAKLEVAPISDIIAIKSPDTFVRTIYAGNALCTVKCDEKVKVFSVRGTSFDAAATSGGSASSEKASSTSPVEISEWLDQKLTKSDRPELTGAKVVVSGVETEVLHVGQAGLEILTSGDPPTSASQSVGITGRGLKSGENFKLLYDLADQLHAAVGASRAAVDAGFVPNDMQVGQTGKI

SEQ ID NO: 52090 - protein, 234 aa, Homo sapiens
MVSESDFSKDVAVQVLPLDKIEENNKQKANDIFISQYTMGQKDALRTVLKQKAQSMPVFKEVKVHLLEDAGIEKDAVTQETRISPSGIDSATTVAAATAAAIATAAPLIKVQSDLEAKVNSVTELLSKLQETDKHLQRVTEQQTSIQRKQEKLHCHDHEKQMNVFMEQHIRHLEKLQQQQIDIQTHFISAALKTSSFQPVSMPSSRAVEKYSVKPEHPNLGSCNPSLYNTFASK

SEQ ID NO: 52091 - protein, 80 aa, Homo sapiens
MVFSNNDEGLINKKLPKELLLRMLFSLLLNFTWSNPECTKYVHSIGLDSFCNVHSMGFLKDCCLYFLLSVVPAALYTRAS

SEQ ID NO: 52092 - protein, 91 aa, Homo sapiens
MSAFDMSHGFFPREPICPFEEKTKIGTMVEDHRSNSYQDSVTFDDVAVEFTPEEWALLDTTQKYLYRDVMLENYMNLASVADKKLQWMETL

SEQ ID NO: 52093 - protein, 82 aa, Homo sapiens
MTSALTQGLERIPDQLGYLVLSEGAVLASSGDLENDEQAASAISELVSTACGFRLHRGMNVPFKRLSGVSLLQWSLENTHCW

SEQ ID NO: 52094 - protein, 92 aa, Homo sapiens
EDELLADALLLEDERDELEDPEFDIKCLLQEAEDDVDPGHSSSVKELDTDADKLKKKTAEDRTQAFHLRQNLSALDKMHEEQELFTEKMSVS

SEQ ID NO: 52095 - protein, 986 aa, Homo sapiens
  MOD_RES (1)..(1): Any amino acid
XRFPPLNLQRPVHHVVPPSTVTEDYLRSFRPYHTTDDLRMSSLPPLGLDPATAAAYYHPSYLAPHPFPHPAFRMDDSYCLSALRSPFYPIPTPGSLPPLHPSAMHLHLSGVRYPPELSHSSLAALHSERMSGLSAERLQMDEELRREREREREREREREADREREKEREREREKEREQEKEREREKERERELERQREQRAREKELLAAKALEPSFLPVAELHGLRGHATEERGKPSEQLTPTRAEKLKDAGLQAPKPVQHPLHPVPTPHHTVPSLISNHGIFSLPSSSAATALLIQRTNEEEKWLARQRRLRQEKEDRQSQVSEFRQQVLEQHLDMGRPPVPAEAEHRPESTTRPGPNRHEPGGRDPPQHFGGPPPLISPKPQLHAAPTALWNPVSLMDNTLETRRAESHSLHSHPAAFEPSRQAAVPLVKVERVFCPEKAEEGPRKREPAPLDKYQPPPPPPREGGSLEHQPFLPGPGPFLAELEKSTQTILGQQRASLPQAATFGELSGPLKPGSPYRPPVPRAPDPAYIYDEFLQQRRRLVSKLDLEERRRREAQEKGYYYDLDDSYDESDEEEVRAHLRCVAEQPPLKLDTSSEKLEFLQLFGLTTQQQKEELVAQKRRKRRRMLRERSPSPPTIQSKRQTPSPRLALSTRYSPDEMNNSPNFEEKKKFLTIFNLTHISAEKRKEPATQQASLDVEKPVGVAASLSDIPKAAEPGKLEQVRPQELSRVQELAPASGEKARLSEAPGGKKSLSMLHYIRGAAPKDIPVPLSHSTNGKSKPWEPFVAEEFAHQFHESVLQSTQKALQKHKGSVAVLSAEQNHKVDTSVHYNIPELQSSSRAPPPQHNGQQEPPTARKGPPTQELDRDSEEEEEEDDEDGEDEEEVPKRKWQGIEAVFEAYQEHIEEQNLERQVLQTQCRRLEARHYSLSLTAEQLSHSVAELRSQKQKMVSERERLQAELDHLRKCLALPAMHWPRGYLKGYPR

SEQ ID NO: 52096 - protein, 34 aa, Homo sapiens
MAGRLPACVVDCGTGYTKLGYAGNTEPQFIIPSY

SEQ ID NO: 52097 - protein, 76 aa, Homo sapiens
MLWSGCRRFGARLGCLPGGLRVLVQTGHRSLTSCIDPSMGLNEEQKEFQKVAFDFAAREMAPNMAEWDQKHVCLDD

SEQ ID NO: 52098 - protein, 384 aa, Homo sapiens
MAGNAEPPPAGAACPQDRRSCSGRAGGDRVWEDGEHPAKKLKSGGDEERREKPPKRKIVLLMAYSGKGYHGMQRNVGSSQFKTIEDDLVSALVRSGCIPENHGEDMRKMSFQRCARTDKGVSAAGQVVSLKVWLIDDILEKINSHLPSHIRILGLKRVTGGFNSKNRCDARTYCYLLPTFAFAHKDRDVQDETYRLSAETLQQVNRLLACYKGTHNFHNFTSQKGPQDPSACRYILEMYCEEPFVREGLEFAVIRVKGQSFMMHQIRKMVGLVVAIVKGYAPESVLERSWGTEKVDVPKAPGLGLVLERVHFEKYNQRFGNDGLHEPLDWAQEEGKVAAFKEEHIYPTIIGTERDERSMAQWLSTLPIHNFSATALTAGGTGAK

SEQ ID NO: 52099 - protein, 150 aa, Homo sapiens
MEYDEKLARFRQAHLNPFNKQSGPRQHEQGPGEEVPDVTPEEALPELPPGEPEFRCPERVMDLGLSEDHFSRPVGLFLASDVQQLRQAIEECKQVILELPEQSEKQKDAVVRLIHLRLKLQELKDPNEDEPNIRVLLEHRFYKEKSKSVK

SEQ ID NO: 52100 - protein, 76 aa, Homo sapiens
MSKAIAFEIIQKYEPIEEVRKAHQMSLEGFTRYMDSRECLLFKNECRKVYQDMTHPLNDYFISSSHNTYLVSDQLL

SEQ ID NO: 52101 - protein, 210 aa, Homo sapiens
MCFGLAFMLAGVILGGAYLYKYFALQPDDVYYCGIKYIKDDVILNEPSADAPAALYQTIEENIKIFEEEEVEFISVPVPEFADSDPANIVHDFNKKLTAYLDLNLDKCYVIPLNTSIVMPPRNLLELLINIKAGTYLPQSYLIHEHMVITDRIENIDHLGFFIYRLCHDKETYKLQRRETIKGIQKREASNCFAIRHFENKFAVETLICS

SEQ ID NO: 52102 - protein, 128 aa, Homo sapiens
MVQNVILVFFRRRLSQRPAVEELERRNILKQRNDQTEQEERREIKQRLTRKLNQRPTVDELRDRKILIRFSDYVEVAKAQDYDRRADKPWTRLSAADKAAIRKELNEYKSNEMEVHASSKHLTRFHRP

SEQ ID NO: 52103 - protein, 99 aa, Homo sapiens
MTELPAPLSYFQNAQMSEDNHLSNTVRSQNDNRERQEHNDRRSLGHPEPLSNGRPQGNSRQVVEQDEEEDEELTLKYGAKHVIMLFVPVTLCMVVVVAT

SEQ ID NO: 52104 - protein, 19 aa, Homo sapiens
MRRFVYCKVVLATSLMWVL

SEQ ID NO: 52105 - protein, 338 aa, Homo sapiens
AVEAYGEFLCMFEENYPETLKRLFVVKAPKLFPVAYNLIKPFLSEDTRKKIMVLGANWKEVLLKHISPDQVPVEYGGTMTDPDGNPKCKSKINYGGDIPRKYYVRDQVKQQYEHSVQISRGSSHQVEYEILFPGCVLRWQFMSDGADVGFGIFLKTKMGERQRAGEMTEVLPNQRYNSHLVPEDGTLTCSDPGICYANEVGEAFRSLVPAAVVWLSYGVASSYVLADAIDKGKKAGEVPSPEAGRSARVTVAVVDTFVWQALASVAIPGFTINRVCAASLYVLGTATRWPLAVRKWTTTALGLLTIPIIIHPIDRSVDFLLDSSLRKLYPTVGKPSSS

SEQ ID NO: 52106 - protein, 106 aa, Homo sapiens
KDQMDKEWDEFQKAMRQVNTISEAIVAEEDEEGRLDRQIGEIDEQIECYRRVEKLRNRQDEIKNKLKEILTIKELQKKEEENADSDDEGELQDLLSQDWRVKGALL

SEQ ID NO: 52107 - protein, 101 aa, Homo sapiens
MSIMMLPMEQKIQWVPTSLQDITAVLGTEAYTEEDKSMVSHAQKSQHSCLSHSRWLRSPQVTGGSWDLRIRPSKDSSSFRQVNPAASQNRPSMGWDGSVSA

SEQ ID NO: 52108 - protein, 607 aa, Homo sapiens
MGKGRAGRVGTTALPPRLKEMKSQESAAGSKLVLRCETSSEYSSLRFKWFKNGNELNRKNKPQNIKIQKKPGKSELRINKASLADSGEYMCKVISKLGNDSASANITIVESNEIITGMPASTEGAYVSSATSTSTTGTSHLVKCAEKEKTFCVNGGECFMVKDLSNPSRYLCKCPNEFTGDRCQNYVMASFYKHLGIEFMEAEELYQKRVLTITGICIALLVVGIMCVVAYCKTKKQRKKLHDRLRQSLRSERNNMMNIANGPHHPNPPPENVQLVNQYVSKNVISSEHIVEREAETSFSTSHYTSTAHHSTTVTQTPSHSWSNGHTESILSESHSVIVMSSVENSRHSSPTGGPRGRLNGTGGPRECNSFLRHARETPDSYRDSPHSERYVSAMTTPARMSPVDFHTPSSPKSPPSEMSPPVSSMTVSMPSMAVSPFMEEERPLLLVTPPRLREKKFDHHPQQFSSFHHNPAHDSNSLPASPLRIVEDEEYETTQEYEPAQEPVKKLANSRRAKRTKPNGHIANRLEVDSNTSSQSSNSESETEDERVGEDTPFLGIQNPLAASLEATPAFRLADSRTNPAGRFSTQEEIQARLSSVIANQDPIAV

SEQ ID NO: 52109 - protein, 101 aa, Homo sapiens
MALKKSSPSLDSGDSDSEELPTFAFLKKEPSSTKRRQPEREEKIVVVDISDCEASCPPAPELFSPPVPEIAETVTQTQPVRLLSSESEDEEEFIPLAQRLT

SEQ ID NO: 52110 - protein, 414 aa, Homo sapiens
MPCCSHRSCREDPGTSESREMDPVACEDVAVNFTQEEWALLDISQRKLYREVMLETFRNLTSIGKKWKDQNIEYEYQNPRRNFRSLIEGNVNEIKEDSHCGETFTQVPDDRLNFQEKKASPEAKSCDNFVCGEVGIGNSSFNMNIRGDIGHKAYEYQDYAPKPYKCQQPKKAFRYHPSFRTQERNHTGEKPYACKECGKTFISHSGIRRRMVMHSGDGPYKCKFCGKAVHCLRLYLIHERTHTGEKPYECKQCVKSFSYSATHRIHERTHTGEKPYECQQCGKAFHSSSSFQAHKRTHTGGKPYECKQCGKSFSWCHSFQIHERTHTGEKPCECSKCNKAFRSYRSYLRHKRSHTGEKPYQCKECRKAFTYPSSLRRHERTHSAKKPYECKQCGKALSYKFSNTPKNALWRKTL

SEQ ID NO: 52111 - protein, 149 aa, Homo sapiens
MNGFSAGTEYMDLQNDLGQTALHLAAILGETSTVEKLYAAGAGLCVAERRGHTALHLACRVGAHACARALLQPRPRRPREAPDTYLAQGPDRTPDTNHTPVALYPDSDLEKEEEESEEDWKLQLEAENYEGHTPLHVAVIHKDVEMVRL

SEQ ID NO: 52112 - protein, 110 aa, Homo sapiens
  MOD_RES (1)..(1): Any amino acid
XKGRCFERTFGNCRCDAACVELGNCCLDYQETCIEPEHIWTCNKFRCGEKRLTRSLCACSDDCKDKGDCCINYSSVCQGLKRLLPSYFLWMDSGQNIYTLGVDFFLLLAN

SEQ ID NO: 52113 - protein, 36 aa, Homo sapiens
MQMYLPFCGIAISNAQLFAASRKEYERSRSYVRDVY

SEQ ID NO: 52114 - protein, 1112 aa, Homo sapiens
  MOD_RES (1)..(1): Any amino acid
XYYLNAQDGAGGEEEKAEGGAGEEHDLFAGLKPLEQESRMEVLFACAEALHAHGYSSEASRLTVELAQDLLANPPDLKVEPPPAKGKKNKVSTSRQTWVATNTLSKAAFLLTVLSERPEHHNLAFRVGMFALELQRPPASTKALEVKLAYQESEVAALLKKIPLGPSEMSTMRCRAEELREGTLCDYRPVLPLMLASFIFDVLCAPVVSPTGSRPPSRNWNSETPGDEELGFEAAVAALGMKTTVSEAEHPLLCEGTRREKGDLALALMITYKDDQAKLKKILDKLLDRESQTHKPQTLSSFYSSSRPTTASQRSPSKHGGPSAPGALQPLTSGSAGPAQPGSVAGAGPGPTEGFTEKNVPESSPHSPCEGLPSEAALTPRPEGKVPSRLALGSRGGYNGRGWGSPGRPKKKHTGMASIDSSAPETTSDSSPTLSRRPLRGGWAPTSWGRGQDSDSISSSSSDSLGSSSSSGSRRASASGGARAKTVEVGRYKGRRPESHAPHVPNQPSEAAAHFYFELAKTVLIKAGGNSSTSIFTHPSSSGGHQGPHRNLHLCAFEIGLYALGLHNFVSPNWLSRTYSSHVSWITGQAMEIGSAALTILVECWDGHLTPPEVASLADRASRARDSNMVRAAAELALSCLPHAHALNPNEIQRALVQCKEQDNLMLEKACMAVEEAAKGGGVYPEVLFEVAHQWFWLYEQTAGGSSTAREGATSCSASGIRAGGEAGRGMPEGRGGPGTEPVTVAAAAVTAAATVVPVISVGSSLYPGPGLGHGHSPGLHPYTALQPHLPCSPQYLTHPAHPAHPMPHMPRPAVFPVPSSAYPQGVHPAFLGAQYPYSVTPPSLAATAVSFPVPSMAPITVHPYHTEPGLPLPTSVACELWGQGTVSSVHPASTFPAIQGASLPALTTQPSPLVSGGFPPPEEETHSQPVNPHSLHHLHAAYRVGMLALEMLGRRAHNDHPNNFSRSPPYTDDVKWLLGLAAKLGVNYVHQFCVGAAKGVLSPFVLQEIVMETLQRLSPAHAHNHLRAPAFHQLVQRCQQAYMQYIHHRLIHLTPADYDDFVNAIRSARSAFCLTPMGMMQFNDILQNLKRSKQTKELWQRVSLEMATFSP

SEQ ID NO: 52115 - protein, 249 aa, Homo sapiens
MQLFEQPCPGEDPRPGGQIGEVELSSYTPPAGVPGKPAAPHFLPVLCSVSPSGSRVPHDLLGGSGGFTLEDALFGLLFGADATLLQSPVVLCGLPDGQLCCVILKALVTSRSAPGDPNALVKILHHLEEPVIFIGALKTEPQAAEAAENFLPDEDVHCDCLVAFGHHGRMLAIKASWDESGKLVPELREYCLPGPVLCAACGGGGRVYHSTPSDLCVVDLSRGSTPLGPEQPEEGPGGLPPMLCPASLN

SEQ ID NO: 52116 - protein, 159 aa, Homo sapiens
MHSPGAGCPRPCADTPGPQPQPMDLRVGQRPPVEPPPEPTLLALQRPQRLHHHLFLAGLQQQRSVEPMRLSMDTPMPELQVGPQEQELRQLLHKDKSKRSAVASSVVKQKLAEVILKKQQAALERTVHPNSPGIPYSLPSDPPEHFPLRKTVSEPNLKL

SEQ ID NO: 52117 - protein, 38 aa, Homo sapiens
MEKTKWLDIKGNHDAFNIPSLDSIKNYYRKYSAVRRDG

SEQ ID NO: 52118 - protein, 66 aa, Homo sapiens
MDVFMKGLSKAKEGVVAAAEKTKQGVAEAAGKTKEGVLYVGSKTKEGVVHGVATVAEKTKEQVTNV

SEQ ID NO: 52119 - protein, 831 aa, Homo sapiens
VQGVQLLRAQVAAILARRLRRTLRAGKSTLADLLLPVLFVALAMGLFMVRPLATEYPPLRLTPGHYQRAETYFFRKNSSCWRTDPFSHPEFQDSCGCLKCPNRSASAPYLTNHLGHTLLNLSGFNMEEYLLAPSEKPRLGGWSFGLKIPSEAGGANGNISKPPTLAKVWYNQKGFHSLPSYLNHLNNLILWQHLPPTVDWRQYGITLYSHPYGGALLNEDKILESIRQCGVALCIVLGFSILSASIGSSVVRDRVIGAKRLQHISGLGYRMYWFTNFLYDMLFYLVSVCLCVAVIVAFQLTAFTFRKNLAATALLLSLFGYATLPWMYLMSRIFSSSDVAFISYVSLNFIFGLCTMLITIMPRLLAIISKAKNLQNIYDVLKWVFTIFPQFCLGQGLVELCYNQIKYDLTHNFGIDSYVSPFEMNFLGWIFVQLASQGTVLLLLRVLLHWDLLRWPRGHSTLQGTVKSSKDTDVEKEEKRVFEGRTNGDILVLYNLSKHYRRFFQNIIAVQDISLGIPKGECFGLLGVNGAGKSTTFKMLNGEVSLTSGHAIIRTPMGDAVDLSSAGTAGVLIGYCPQQDALDELLTGWEHLYYYCSLRGIPRQCIPEVAGDLIRRLHLEAHADKPVATYSGGTKRKLSTALALVGKPDILLLDEPSSGMDPCSKRYLWQTIMKEVREGCAAVLTSHSMEECEALCTRLAIMVNGSFKCLGSPQHIKNRFGDGYTVKVWLCKEANQHCTVSDHLKLYFPGIQFKGQHLNLLEYHVPKRWGCLADLFKVIENNKTFLNIKHYSINQTTLEQVFINFASEQQQTLQSTLDPSTDSHHTHHLPI

SEQ ID NO: 52120 - protein, 82 aa, Homo sapiens
MGLLTFRDVAIEFSREEWEHLDSDQKLLYGDVMLENYGNLVSLGLAVSKPDLITFLEQRKEPWNVKSAETVAIQPEVKVNTH

SEQ ID NO: 52121 - protein, 287 aa, Homo sapiens
MGNKAKIAKCPLRTKTGHILKSTQDTCIGSEKLLQKKPVGSETSQAKGEKNGMTFSSTKDLCKQCIDKDCLHIQKEISPATPNMQKTRNTVNTSLVGKQKPHKKHITAENMKSSLVCLTQDQLQQILMTVNQGNRSLSLTENGKEAKSQYSLYLNSISNQPKDENIMGLFKKTEMVSSVPAENKSVLNEHQETSKQCEQKIAIENEWKPADIFSTLGERECDRSSLEAKKAQWRKELDEQVALKKKEKEVSEKWNDPWKKSESDKIIWEKHQILDQSRLFKHSITVS

SEQ ID NO: 52122 - protein, 157 aa, Homo sapiens
MASIFSKLLTGRNASLLFATMGTSVLTTGYLLNRQKVCAEVREQPRLFPPSADYPDLRKHNNCMAECLTPAIYAKLRNKVTPNGYTLDQCIQTGVDNPGHPFIKTVGMVAGDEESYEVFADLFDPVIKLRHNGYDPRVMKHTTDLDASKDHFLFDKP

SEQ ID NO: 52123 - protein, 112 aa, Homo sapiens
MEIQLSVPWAIESLYLTLKTTNLTRCPWPLGTTSSAWGCPRMAASLSSSMKGAMRCWSAWSAGLCCTTSTSRALCTVCPSPLMAGSLLSQRVTLPRCIMPLGRSGSSTPSFW

SEQ ID NO: 52124 - protein, 466 aa, Homo sapiens
TVYSALGLRDACRSLPQSIQLFRDIAQEFSDDLHHIASLIGKVVDFEGSLAENRFTVLPNIDPEIDEKKRRLMGLPSFLTEVARKELENLDSRIPSCSVIYIPLIGFLLSIPRLPSMVEASDFEINGLDFMFLSEEKLHYRSARTKELDALLGDLHCEIRDQETLLMYQLQCQVLARAAVLTRVLDLASRLDVLLALASAARDYGYSRPRYSPQVLGVRIQNGRHPLMELCARTFVPNSTECGGDKGRVKVITGPNSSGKSIYLKQVGLITFMALVGSFVPAEEAEIGAVDAIFTRIHSCESISLGLSTFMIDLNQVAKAVNNATAQSLVLIDEFGKGTNTVDGLALLAAVLRHWLARGPTCPHIFVATNFLSLVQLQLLPQGPLVQYLTMETCEDGNDLVFFYQVSDLIRSGKPIKPVKDLLKKNQMENCQTLVDKFMKLDLEDPNLDLNVFMSQEVLPAATSIL

SEQ ID NO: 52125 - protein, 37 aa, Homo sapiens
MPSEYTYVKLRSDCSRPSLQWYTRAQSKMRRPSLLLK

SEQ ID NO: 52126 - protein, 46 aa, Homo sapiens
MSHPSWLPPKSTGEPLGHVPARMETTHSFGNPSISVSTQQPPKKFA

SEQ ID NO: 52127 - protein, 129 aa, Homo sapiens
MSSAFQASLEGGLARITQGQPLEVAFGSQVTLRNVFGKPVPCWLHSHQDTYPMIYENGRGSSHQQQVTCYPFKDVNNWWIVKDPRRHQLVVSSPPRPVRHGDMVQLVHGMTTRSLNTHDVAAPLSPHSQ

SEQ ID NO: 52128 - protein, 86 aa, Homo sapiens
MGLPEPGPLRLLALLLLLLLLLLLQLQHLAAAAADPLLGGQGPAKDCEKDQFQCRNERCIPSVWRCDEDDDCLDHSDEDDCRLTWH

SEQ ID NO: 52129 - protein, 245 aa, Homo sapiens
MSQAVQTNGTQPLSKTWELSLYELQRTPQEAITDGLEIVVSPRSLHSELMCPICLDMLKNTMTTKECLHRFCADCIITALRSGNKECPTCRKKLVSKRSLRPDPNFDALISKIYPSRDEYEAHQERVLARINKHNNQQALSHSIEEGLKIQAMNRLQRGKKQQIENGSGAEDNGDSSHCSNASTHSNQEAGPSNKRTKTSDDSGLELDNNNAAMAIDPVMDGASEIELVFRPHPTLMEKDDSAQT

SEQ ID NO: 52130 - protein, 632 aa, Homo sapiens
MAEETQHNKLAAAKKKLKEYWQKNRPRVPAGVNRNRKTNGSIPETATSGGCQPPGDSATGFHREGPTSSATLKDLESPCQERAVVLDSTSVKISRLKNTIKSLKQQKKQVEHQLEEEKKANNERQKAERELEVQIQTLIIQKEELNTDLYHMERSLRYFEEESKDLAVRLQHSLQCKGELERALSAVIATEKKKANQLSSCSKAHTEWELEQSLQDQALLKAQLTQLKESFQQLQLERDECAEHIEGERARWHQRMSKMLQEICTLKKEKQQDMRRVEELERSLSKLKNQMAEPLPPEPPAVPSEVELQHLRKELERVAGELQSQVKNNQHISLLNRRQEERIREQEERLRKQEERLQEQHEKLRQLAKPQSVFEELNNENKSTLQLEQQVKELQEKLGEEHLEAASQQNQQLTAQLNLMALPGEGHGGEHLDSEGEEAPQPMPSVPEDPESREAMSSFMDHLKEKADLSELVKKQELRFIQYWQERCHQKIHHLLSEPGGRAKDAALGGGHHQAGAQGGDEGEAAGAAADGIAAYSNYNNGHRKFLAAAHNSADEPGPGAPAPQELGAADKHGDLREVTLTSSAQGEAREDPLLDKPTAQPIVQDHQEHPGLGSNCCVPLFCWAWLPRRRR

SEQ ID NO: 52131 - protein, 136 aa, Homo sapiens
MAAFAVEPQGPALGSEPMMLGSPTSPKPGVNAQFLPGFLMGDLPAPVTPQPRSISGPSVGVMEMRSPLLAGGSPPQPVVPAHKDKSGAPPVRSIYDDISSPGLGSTPLTSRRQGPQQGPDQLPRLECSGTVITLQP

SEQ ID NO: 52132 - protein, 529 aa, Homo sapiens
MHETHRLLQAGCPLWMKDVSWNEPEQWRWISRAAAAAAATSVPPETLGRDPVVSAGAVLRPCTAHGRACWFWDLLLFSWPTRASPPEAGFDDLQVCADPGIPENGFRTPSGGVFFEGSVARFHCQDGFKLKGATKRLCLKHFNGTLGWIPSDNSICVQEDCRIPQIEDAEIHNKTYRHGEKLIITCHEGFKIRYPDLHNMVSLCRDDGTWNNLPICQGCLRPLASSNGYVNISELQTSFPVGTVISYRCFPGFKLDGSAYLECLQNLIWSSSPPRCLALEVCPLPPMVSHGDFVCHPRPCERYNHGTVVEFYCDPGYSLTSDYKYITCQYGEWFPSYQVYCIKSEQTWPSTHETLLTTWKIVAFTATSVLLVLLLVILARMFQTKFKAHFPPRGPPRSSSSDPDFVVVDGVPVMLPSYDEAVSGGLSALGPGYMASVGQGCPLPVDDQSPPAYPGSGDTDTGPGESETCDSVSGSSELLQSLYSPPRCQESTHPASDNPDIIASTAEEVASTSPGIDIADEIPLMEEDP

SEQ ID NO: 52133 - protein, 64 aa, Homo sapiens
  MOD_RES (1)..(1): Any amino acid
XSPLIPTTTPARPLLPFSTGPGSPLFQPLSFQSQGSPPKGPELSLASIHVPLESIKPRVSPRTT

SEQ ID NO: 52134 - protein, 51 aa, Homo sapiens
MNFQQRLQSLWTLASKLRITSRVPGCCSRRFCRTSRMLRAVTLSTPCWSST

SEQ ID NO: 52135 - protein, 198 aa, Homo sapiens
MESYFFKETSHESVDSSKEEPQTLPETQDGDLHLQEQGSGIDWCLSPADVEAQTTNDQKGNIPDESQVEKLNVFLSPPDVINYLALTEATGRICVSQWEGPPRLGCIFCHGDHLLAVNDLKPQSLEEVSLFLTRSIQKEKLKLTIGRIPNSETFHAASCMCPSKCQSAAPSQLDKPRLNRAPKRSPAIKKSQQKGARE

SEQ ID NO: 52136 - protein, 147 aa, Homo sapiens
MVKLFIGNLPREATEQEIRSLFEQYGKVLECDIIKNYGFVHIEDKTAAEDAIRNLHHYKLHGVNINVEASKNKSKASTKLHVGNISPTCTNQELRAKFEEYGPVIECDIVKDYAFVHMERAEDAVEAIRGLDNTEFQGWWSTRLPLA

SEQ ID NO: 52137 - protein, 161 aa, Homo sapiens
MPRVKAAQAGRQSSAKRHLAEQFAVGEIITDMAKKEWKVGLPIGQGGFGCIYLADMNSSESVGSDAPCVVKVEPSDNGPLFTELKFYQRAAKPEQIQKWIRTRKLKYLGVPKYWGSGLHDKNGKRILSILKPLTGKDKVITAIHVEKDGMPEPNWCSVRKD

SEQ ID NO: 52138 - protein, 814 aa, Homo sapiens
MFKNEYQGGAFVEIFSAQGKNPGAKWKILGSPSVIWKEFDKEVKSFVFVLEGSSQTNKIQLPKENKQSLGLIQRFLVLQIYVPLGQDFSTELLITDLGNIKRRLYLSTVHKELSSTPLHAKIPLFMIKRKIWCNLCIDLVAFTSEIFKGAVFQSLDGIVVSANCKLRKIFTLKSKPQDTADKDAVYGVPFSTDEPTDIIPRSCQLMTDVPHVTQLLNMTKLRQTEIKFGGHPLRSAESDQFINRGTSITRNSKNQDVCHIAFGSKVLGPPPLSGRRNNMKISSETVRSVGSKNNRSCQPSTVEKCVNGTEMSALLIPESEEQGNKENIHQIKQTVPIHAANLHIMHPHPPQEPSADKNNNRRRLRLKSTSRERTETPSGSSSGNNRIEDKASTILTTVSQQGAELLNSGTLGPQSPDQSDEWIFPENADHISYLASSRQSLLLGDDSCNPSHLWLEASKESEHDQQAEESQSVPKDIFTFSSRPRSAPHGKTQTMSPEELSFILDLKEDNSVTSRDTQSEDDFYGGDSSEEGNHSIQGSRGPTTGPSELTQLTLESLLGKAAKRTSKEYLRSAYTEAGATESQDSSMEQIDRNNFEMSLLPTTCLSPTGRRCGSCQKTPEPVIKAKDLSAQQVPASLNKTSLKEISGERLSSIPEASEYDWRNYQPSQMSESELQMLASLRWQQNEELEDAGTSHGLSASQVDNCNVSISTSSDDTTTWNSCLPPPVNQGRHYQKEMNPPSPSNPRDWLNMLSPPIVPPSQQPAEQRPDSCESLSVQGEEDLSVEEDEEVLTLLYDPCLNCYFDPQTGKYYELV

SEQ ID NO: 52139 - protein, 281 aa, Homo sapiens
  MOD_RES (1)..(1): Any amino acid
XFLHNWSKGNFSNEELSDLELLFRFYLFGLTREIQDHASQDYSKYPFEVQVKAGCELHSGKSPEGFFQVAFNGLDLLSFQNTTWVPSPGCGSLAQSVCHLLNHQYEGVTETVYNLIRSTCPRFLLGLLDAGKMYVHRQVRPEAWLSSRPSLGSGQLLLVCHASGFYPKPVWVTWMRNEQEQLGTKHGDILPNADGTWYLQVILEVASEEPAGLSCRVRHSSLGGQDIILYWAHIRTSCETLPPDSPIVLRTQQPRSLVQYSDAIPSTLHLNCFSFCIINIC

SEQ ID NO: 52140 - protein, 66 aa, Homo sapiens
MSSAFFQESEDGIEGDAVLSDYESAEDSEGEEGEYSEEENSKVELKSEANDAVNSSTKEEKGEEKP

SEQ ID NO: 52141 - protein, 81 aa, Homo sapiens
IACTEHNLKSRNGEDRLLSKQSSTAPNVVNAARAKFRTVAIIARSLGTFTPQHHISLKESTAKQTGMKYRNMGDIWRSNFR

SEQ ID NO: 52142 - protein, 182 aa, Homo sapiens
LQALRHPKAVAFGEMGLDYSYKCTTPVPEQHKVFERQLQLAVSLKKPLVIHCREADEDLLEIMKKFVPPDYKIHRHCFTGSYPVIEPLLKYFPNMSVGFTAVLTYSSAWEAREALRQIPLERIIVETDAPYFLPRQVPKSLCQYAHPGLALHTVREIARVKDQPLSLTLAALRENTSRLYSL

SEQ ID NO: 52143 - protein, 122 aa, Homo sapiens
MWDLVLSIALSVGCTGAVPLIQSRIVGGWECEKHSQPWQVAVYSHGWAHCGGVLVHPQWVLTAAHCLKKACQDHRCCEGPGPAHPGASTGDHLLRLRLGQHRTRGVLAPQESSVCEPPSPVQ

SEQ ID NO: 52144 - protein, 1399 aa, Homo sapiens
MKSCAVSLTTAAVAFGDEAKKMAEGKASRESEEESVSLTVEEREALGGMDSRLFGFVRLHEDGARTKTLLGKAVRCYESLILKAEGKVESDFFCQLGHFNLLLEDYSKALSAYQRYYSLQADYWKNAAFLYGLGLVYFYYNAFHWAIKAFQDVLYVDPSFCRAKEIHLRLGLMFKVNTDYKSSLKHFQLALIDCNPCTLSNAEIQFHIAHLYETQRKYHSAKEAYEQLLQTENLPAQVKATVLQQLGWMHHNMDLVGDKATKESYAIQYLQKSLEADPNSGQSWYFLGRCYSSIGKVQDAFISYRQSIDKSEASADTWCSIGVLYQQQNQPMDALQAYICAVQLDHGHAAAWMDLGTLYESCNQPQDAIKCYLNAARSKRCSNTSTLAARIKFLQAYRAHDPNTEHVLNHSQTPILQQSLSLHMITSSQVEGLSSPAKKKRTSSPTKNGSDNWNGGQSLSHHPVQQVYSLCLTPQKLQHLEQLRANRDNLNPAQKHQLEQLESQFVLMQQMRHKEVAQVRTTGIHNGAITDSSLPTNSVSNRQPHGALTRVSSVSQPGVRPACVEKLLSSGAFSAGCIPCGTSKILGSTDTILLGSNCIAGSESNGNVPYLQQNTHTLPHNHTDLNSSTEEPWRKQLSNSAQGLHKSQSSCLSGPNEEQPLFSTGSAQYHQATSTGIKKANEHLTLPSNSVPQGDADSHLSCHTATSGGQQGIMFTKESKPSKNRSLVPETSRHTGDTSNGCADVKGLSNHVHQLIADAVSSPNHGDSPNLLIADNPQLSALLIGKANGNVGTGTCDKVNNIHPAVHTKTDHSVASSPSSAISTATPSPKSTEQRSINSVTSLNSPHSGLHTVNGEGLGKSQSSTKVDLPLASHRSTSQILPSMSVSICPSSTEVLKACRNPGKNGLSNSCILLDKCPPPRPPTSPYPPLPKDKLNPPTPSIYLENKRDAFFPPLHQFCTNPKNPVTVIRGLAGALKLDLGLFSTKTLVEANNEHMVEVRTQLLQPADENWDPTGTKKIWRCESNRSHTTIAKYAQYQASSFQESLREENEKRTQHKDHSDNESTSSENSGRRRKGPFKTIKFGTNIDLSDNKKWKLQLHELTKLPAFARVVSAGNLLTHVGHTILGMNTVQLYMKVPGSRTPGHQENNNFCSVNINIGPGDCEWFVVPEDYWGVLNDFCEKNNLNFLMSSWWPNLEDLYEANVPVYRFIQRPGDLVWINAGTVHWVQAVGWCNNIAWNVGPLTACQYKLAVERYEWNKLKSVKSPVPMVHLSWNMARNIKVSDPKLFEMIKYCLLKILKQYQTLREALVAAGKEVIWHGRTNDEPAHYCSICEVEVFNLLFVTNESNTQKTYIVHCHDCARKTSKSLENFVVLEQYKMEDLIQVYDQFTLALSLSSSS

SEQ ID NO: 52145 - protein, 161 aa, Homo sapiens
KYIPSVLHDVEMVFDAKLLSQLLYEFYTCIPPVKLQKQKVQSMNEIVQSNLFKKQECRDILLPVITKELKELLEQKDDMQHQVLERKYCVELLNSILEVLSYQDAAFTYHHIQEIMVQLLRTVNRTVITMGRDHILIDAADDRTEPIGCYGVLNVIVSAKG

SEQ ID NO: 52146 - protein, 42 aa, Homo sapiens
MITVSNQEGDTIRQTQVRSEPSNMQFFLMKMDDRTSAAESMV

SEQ ID NO: 52147 - protein, 159 aa, Homo sapiens
MRGQRLPLDIQIFYCARPDEEPFVKIITVEEAKRRKSTCSYYEDEDEEVLPVLRPHSALLENMHIEQLARRLPARVQGYPWRLAYSTLEHGTSLKTLYRKSASLDSPVLLVIKDMDNQIFGAYATHPFKFSDHYYGTGETFLYTFSPHFKGTIWFMARC

SEQ ID NO: 52148 - protein, 345 aa, Homo sapiens
MQVVPLELARGHQVALSSISYVGCSLSVLCLVATLVTFAVLSSVSTIRNQRYHIHANLSFAVLVAQVLLLISFRLEPGTTPCQVMAVLLHYFFLSAFAWMLVEGLHLYSMVIKVFGSEDSKHRYYYGMGWGFPLLICIISLSFAMDSYGTSNNCWLSLASGAIWAFVAPALFVIVVNIGILIAVTRVISQISADNYKIHGDPSAFKLTAKAVAVLLPILGTSWVFGVLAVNGCAVVFQYMFATLNSLQGLFIFLFHCLLNSEARWAKEGRAESLSRMVAGQKGCMITKPSDPLIATPSDPLQGLRWIPVAGRQCSHGSPPAHPPACPPRICLFASLSHSPRDIHC

SEQ ID NO: 52149 - protein, 845 aa, Homo sapiens
MGAPVKLTVSQGQPVKLNCSVEGMEEPDIQWVKDGAVVQNLDQLYIPVSEQHWIGFLSLKSVERSDAGRYWCQVEDGGETEISQPVWLTVEGVPFFTVEPKDLAVPPNAPFQLSCEAVGPPEPVTIVWWRGTTKIGGPAPSPSVLNVTGVTQSTMFSCEAHNLKGLASSRTATVHLQALPAAPFNITVTKLSSSNASVAWMPGADGRALLQSCTVQVTQAPGGWEVLAVVVPVPPFTCLLRDLVPATNYSLRVRCANALGPSPYADWVPFQTKGLAPASAPQNLHAIRTDSGLILEWEEVIPEAPLEGPLGPYKLSWVQDNGTQDELTVEGTRANLTGWDPQKDLIVRVCVSNAVGCGPWSQPLVVSSHDRAGQQGPPHSRTSWVPVVLGVLTALVTAAALALILLRKRRKETRFGQAFDSVMARGEPAVHFRAARSFNRERPERIEATLDSLGISDELKEKLEDVLIPEQQFTLGRMLGKGEFGSVREAQLKQEDGSFVKVAVKMLKADIIASSDIEEFLREAACMKEFDHPHVAKLVGVSLRSRAKGRLPIPMVILPFMKHGDLHAFLLASRIGENPFNLPLQTLIRFMVDIACGMEYLSSRNFIHRDLAARNCMLAEDMTVCVADFGLSRKIYSGDYYRQGCASKLPVKWLALESLADNLYTVQSDVWAFGVTMWEIMTRGQTPYAGIENAEIYNYLIGGNRLKQPPECMEDVYDLMYQCWSADPKQRPSFTCLRMELENILGQLSVLSASQDPLYINIERAEEPTAGGSLELPGRDQPYSGAGDGSGMGAVGGTPSDCRYILTPGGLAEQPGQAEHQPESPLNETQRLLLLQQGLLPHSSC

SEQ ID NO: 52150 - protein, 103 aa, Homo sapiens
MLEYALKQERAKYHKLKFGTDLNQGEKKADVSEQVSNGPVESVTLENSPLVWKEGRQLLRQYLEEVGYTDTILDMRSKRVRSLLGRSLELNGAVEPSEGAPRA

SEQ ID NO: 52151 - protein, 36 aa, Homo sapiens
MKLKSLLLRYYPPVFGEPNHMQVSKILLNSRNYVGI

SEQ ID NO: 52152 - protein, 410 aa, Homo sapiens
MMPQRAGNDPPGVSNASEMEMEISNMREKFLMSVTKLVESKSYNSKVFSKEKYFQTIKEVKEAKEKGKKSSRDYRRAAKYDVISVQGTEKLIEATHGERDRIRYYVHKEELFDILHDTHLSIGHGGRTRMLKELQGKYGNVTKEVIVLYLTLCKQCHQKNPVPKRGLAPKPMTFKDIDSTCQVEILDMQSSADGEFKFILYYQDHSTKFIILRPLRTKQAHEVVSVLLDIFTILGTPSVLDSDSGVEFTNQVVHELNELWPDLKIVSGKYHPGQSQGSLEGASRDVKNMISTWMQSNHSCHWAKGLRFMQMVRNQAFDVSLQQSPFEAMFGYKAKFGLYSSNLPRETVATLQTEEELEIAEEQLENSLWIRQEERAEIGADRSDMDDDMDPTPEASEPSTSQGTSGLLCW

SEQ ID NO: 52153 - protein, 644 aa, Homo sapiens
MAAAALGSSSGSASPAVAELCQNTPETFLEASKLLLTYADNILRNPNDEKYRSIRIGNTAFSTRLLPVRGAVECLFEMGFEEGETHLIFPKKASVEQLQKIRDLIAIERSSRLDGSNKSHKVKSSQQPAASTQLPTTPSSNPSGLNQHTRNRQGQSSDPPSASTVAADSAILEVLQSNIQHVLVYENPALQEKALACIPVQELKRKSQEKLSRARKLDKGINISDEDFLLLELLHWFKEEFFHWVNNVLCSKCGGQTRSRDRSLLPSDDELKWGAKEVEDHYCDACQFSNRFPRVTAHIKPKTDHVKGDWKNIFKDFKETEINTDHVWTEVYSPSQQRWLHCDACEDVCDKPLLYEIGWGKKLSYVIAFSKDEVVDVTWRYSCKHEEVIARRTKVKEALLRDTINGLNKQRQLFLSENRRKELLQRIIVELVEFISPKTPKPGELGGRISGSVAWRVARGEMGLQRKETLFIPCENEKISKQLHLCYNIVKDRYVRVSNNNQTISGWENGVWKMESIFRKVETDWHMVYLARKEGSSFAYISWKFECGSVGLKVDSISIRTSSQTFQTGTVEWKLRSDTAQVELTGDNSLHSYADFSGATEVILEAELSRGDGDVAWQHTQLFRQSLNDHEENCLEIIIKFSDL

SEQ ID NO: 52154 - protein, 135 aa, Homo sapiens
  MOD_RES (1)..(1): Any amino acid
XENSAAIDFEKSKVLTFKLLAVEVNTPEKFSSTADVVIQLLDTNDNVPKFDSLYYVARIPENAPGGSSVVAVTAVDPDTGPWGEVKYSTYGTGADLFLIHPSTGLIYTQPWASLDAEATARYNFYVKAEDMEGKP

SEQ ID NO: 52155 - protein, 245 aa, Homo sapiens
MPRRICVSAEKVFASLPQVERGVSKIIGGDPKGNNFLYTNGKCVILRNIDNPALADIYTEHAHQVVVAKYAPSGFYIASGDVSGKLRIWDTTQKEHLLKYEYQPFAGKIKDIAWTEDSKRIAVVGEGREKFGAVFLWDSGSSVGEITGHNKVINSVDIKQSRPYRLATGSDDNCAAFFEGPPFKFKFTIGDHSRFVNCVRFSPDGNRFATASADGQIYIYDGKTGEKVCALGGSKAHDGGIYAVS

SEQ ID NO: 52156 - protein, 244 aa, Homo sapiens
MDNRFATAFVIACVLSLISTIYMAASIGTDFWYEYRSPVQENSSDLNKSIWDEFISDEADEKTYNDALFRYNGTVGLWRRCITIPKNMHWYSPPERTESFDVVTKCVSFTLTEQFMEKFVDPGNHNSGIDLLRTYLWRCQFLLPFVSLGLMCFGALIGLCACICRSLYPTIATGILHLLAGLCTLGSVSCYVAGIELLHQKLELPDNVSGEFGWSFCLACVSAPLQFMASALFIWAAHTNRKEY

SEQ ID NO: 52157 - protein, 98 aa, Homo sapiens
MASLLCCGPKLAACGIVLSAWGVIMLIMLGIFFNVHSAVLIEDVPFTEKDFENGPQNIYNLYEQVSYNCFIAAGLYLLLGGFSFCQVRLNKRKEYMVR

SEQ ID NO: 52158 - protein, 232 aa, Homo sapiens
MDHTSPTYMLANLTHLHSEQLLQGLNLLRQHHELCDIILRVGDVKIHAHKVVLASVSPYFKAMFTGNLSEKENSEVEFQCIDETALQAIVEYAYTGTVFISQDTVESLLPAANLLQIKLVLKECCAFLESQLDPGNCIGISRFAETYGCRDLYLAATKYICQNFEAVCQTEEFFELTHADLDEIVSNDCLNVATEETVFYALESWIKYDVQERQKYLAQLLNSVRLPLLSVK

SEQ ID NO: 52159 - protein, 137 aa, Homo sapiens
MASGSGDSVTRRSVASQFFTQEEGPGIDGMTTSERVVDLLNQAALITNDSKITVLKQVQELIINKDPTLLDNFLDEIIAFQADKSIEVRKFVIGFIEEACKRDIELLLKLIANLNMLLRDENVNVVKKAILTMTQLY

SEQ ID NO: 52160 - protein, 89 aa, Homo sapiens
MASSSGSKAEFIVGGKYKLVRKIGSGSFGDIYLAINITNGEEVAVKLESQKARHPQLLYESKLYKILQGGVGIPHIRSPEWIKPLKSQE

SEQ ID NO: 52161 - protein, 636 aa, Homo sapiens
MARADLVPKARPWGEHQHQFRGRANLHVFEDWCGSSIQQLRRNLHFPLYPHIRTTLRKLAVSPKWTNYGLRIFGYLHPFTDGKIQFAIAADDNAEFWLSLDDQVSGLQLLASVGKTGKEWTAPGEFGKFRSQISKPVSLSASHRYYFEVLHKQNEEGTDHVEVAWRRNDPGAKFTIIDSLSLSLFTNETFLQMDEVGHIPQTAASHVDSSNALPRDEQPPADMLRPDPRDTLYRVPLIPKSHLRHVLPDCPYKPSYLVDGLPLQRYQGLRFVHLSFVYPNDYTRLSHMETHNKCFYQENAYYQDRFSFQEYIKIDQPEKQGLEQPAGFEENLLEESQYGEVAEETPASNNQNARMLEGRQTPASTLEQDATDYRLRSLRKLLAQPREGLLAPFSKRNSTASFPGRTSHIPVQQPEKRKQKPSPEPSQDSPHSDKWPPGHPVKNLPQMRGPRPRPAGDSPRKTQWLNQVESYIAEQRRGDRMRPQAPGRGWHGEEEVVAAAGQEGQVEGEEEGEEEEEEEDMSEVFEYVPVFDPVVNWDQTFSARNLDFQALRTDWIDLSCNTSGNLLLPEQEALEVTRVFLKKLNQRSRGSVDFPIPDILCKWNHVMCGLYIGLFAEYSLSTSFIRVVESIKHFIP

SEQ ID NO: 52162 - protein, 208 aa, Homo sapiens
MAEAASPHLSLPSGLLELCALLGAPRDSLRSLEQVAYKKGVKHLSALLDPEVLSIFVPPFISKEDSQMAGANCGTLGKTRMRSLRKKREKPRPEQWKGLPGPPRAPEPEDVAVPGGVDLLTLPQLCFPGGVCVATEPKEDCVHFLVLTDVCGNRTYGVVAQYYRPLHDEYCFYNGKTHRECPGCFVPFAVCVVSRFPYYNSLKDCLSW

SEQ ID NO: 52163 - protein, 348 aa, Homo sapiens
MENQAHNTMGTSPCEAELQELMEQIDIMVSNKKMDWERKMRALETRLDLRDQELANAQTCLDQKGQEVGLLRQKLDSLEKCNLAMTQNYEGQLQSLKAQFSKLTNNFEKLRLHQMKQNKVPRKELPHLKEEIPFELSNLNQKLEEFRAKSREWDKQEILYQTHLISLDAQQKLLSEKCNQFQKQAQSYQTQLNGKKQCLEDSSSEIPRLICDPDPNCEINERDEFIIEKLKSAVNEIALSRNKLQDENQKLLQELKMYQRQCQAMEAGLSEVKSELQSRDDLLRIIEMERLQLHRELLKIGECQNAQGNKTRLESSYLPSIKEPERKIKELFSVMQDQPNHEKELNKR

SEQ ID NO: 52164 - protein, 100 aa, Homo sapiens
MAAVDSDVESLPRGGFRCCLCHVTTANRPSLDAHLGGRKHRHLVELRAARKAQGLRSVFVSGFPRDVDSAQLSEYFLAFGPVASVVMDKDKGLAVSQAGV

SEQ ID NO: 52165 - protein, 177 aa, Homo sapiens
VKELLRCELCLGIMGGKPRHSLYFIGYQGRPTPSSLLPPPTAPPLTPAPPADDFLLYLDPHYCQPTVDVSQADFPLESFHCTSPRKMAFAKMDPSCTVGFYAGDRKEFETLCSELTRVLSSSSATERYPMFTLAEGHAQDHSLDDLCSQLAQPTLRLPRTGRLLRAKRPSSEDFVFL

SEQ ID NO: 52166 - protein, 101 aa, Homo sapiens
MINMGDSHVDTSSTVSEAVAEEVSLFSMTDMILFSLIVGLLTYWFLFRKKKEEVPEFTKIQTLTSSVRESSFVEKMKKTVSFLHVFTLLRKPRPRWACNQV

SEQ ID NO: 52167 - protein, 343 aa, Homo sapiens
MQPSCWQTQPRGCCLLPAHIYSLFFSPAIRLLPIPCGCAKVLDDPNEDHLYMVFELVNQGPVMEVPTLKPLSEDQARFYFQDLIKGIEYLHYQKIIHRDIKPSNLLVGEDGHIKIADFGVSNEFKGSDALLSNTVGTPAFMAPESLSETRKIFSGKALDVWAMGVTLYCFVFGQCPFMDERIMCLHSKIKSQALEFPDQPDIAEDLKDLITRMLDKNPESRIVVPEIKLHPWVTRHGAEPLPSEDENCTLVEVTEEEVENSVKHIPSLATVILVKTMIRKRSFGNPFEGSRREERSLSAPGNLLTKKPTRECESLSELKGTKKKKGLDSMTSTVAAGWLDRRV

SEQ ID NO: 52168 - protein, 126 aa, Homo sapiens
  MOD_RES (1)..(1): Any amino acid
XVLQSLQLPFALIPILTFTSLRPVMSDFANGLGWRIAGGILVLIICSINMYFVVVYVRDLGHVALYVVAAVVSVAYLGFVFYLGWQCLIALGMSFLDCGHTCHLGLTAQPELYLLNTMDADSLVSR

SEQ ID NO: 52169 - protein, 873 aa, Homo sapiens
MVPWVRTMGQKLKQRLRLDVGREICRQYPLFCFLLLCLSAASLLLNRYIHILMIFWSFVAGVVTFYCSLGPDSLLPNIFFTIKYKPKQLGLQELFPQGHSCAVCGKVKCKRHRPSLLLENYQPWLDLKISSKVDASLSEVLELVLENFVYPWYRDVTDDESFVDELRITLRFFASVLIRRIHKVDIPSIITKKLLKAAMKHIEVIVKARQKVKNTEFLQQAALEEYGPELHVALRSRRDELHYLRKLTELLFPYILPPKATDCRSLTLLIREILSGSVFLPSLDFLADPDTVNHLLIIFIDDSPPEKATEPASPLVPFLQKFAEPRNKKPSVLKLELKQIREQQDLLFRFMNFLKQEGAVHVLQFCLTVEEFNDRILRPELSNDEMLSLHEELQKIYKTYCLDESIDKIRFDPFIVEEIQRIAEGPYIDVVKLQTMRCLFEAYEHVLSLLENVFTPMFCHSDEIEEGIVVMEDDSPVEAVSTPNTPRNLAAWKISIPYVDFFEDPSSERKEKKERIPVFCIDVERNDRRAVGHEPEHWSVYRRYLEFYVLESKLTEFHGAFPDAQLPSKRIIGPKNYEFLKSKREEFQEYLQKLLQHPELSNSQLLADFLSPNGGETQFLDKILPDVNLGKIIKSVPGKLMKEKGQHLEPFIMNFINSCESPKPKPSRPELTILSPTSENNKKLFNDLFKNNANRAENTERKQNQNYFMEVMTVEGVYDYLMYVGRVVFQVPDWLHHLLMGTRILFKNTLEMYTDYYLQCKLEQLFQEHRLVSLITLLRDAIFCENTEPRSLQDKQKGAKQTFEEMMNYIPDLLVKCIGEETKYESIRLLFDGLQQPVLNKQLTYVLLDIVIQELFPELNKVQKEVTSVTSWM

SEQ ID NO: 52170 - protein, 725 aa, Homo sapiens
MDASSDPYLPYDGGGDSIPLRELHKRGTHYTMTNGGSINSSTHLLDLLDEPIPGVGTYDDFHTIDWVREKCKDRERHRRINSKKKESAWEMTKSLYDAWSGWLVVTLTGLASGALAGLIDIAADWMTDLKEGICLSALWYNHEQCCWGSNETTFEERDKCPQWKTWAELIIGQAEGPGSYIMNYIMYIFWALSFAFLAVSLVKVFAPYACGSGIPEIKTILSGFIIRGYLGKWTLMIKTITLVLAVASGLSLGKEGPLVHVACCCGNIFSYLFPKYSTNEAKKREVLSAASAAGVSVAFGAPIGGVLFSLEEVSYYFPLKTLWRSFFAALVAAFVLRSINPFGNSRLVLFYVEYHTPWYLFELFPFILLGVFGGLWGAFFIRANIAWCRRRKSTKFGKYPVLEVIIVAAITAVIAFPNPYTRLNTSELIKELFTDCGPLESSSLCDYRNDMNASKIVDDIPDRPAGIGVYSAIWQLCLALIFKIIMTVFTFGIKVPSGLFIPSMAIGAIAGRIVGIAVEQLAYYHHDWFIFKEWCEVGADCITPGLYAMVGAAACLGGVTRMTVSLVVIVFELTGGLEYIVPLMAAVMTSKWVGDAFGREGIYEAHIRLNGYPFLDAKEEFTHTTLAADVMRPRRNDPPLAVLTQDNMTVDDIENMINETSYNGFPVIMSKESQRLVGFALRRDLTIAIESARKKQEGIVGSSRVCFAQHTPSLPAESPRPLKLR

SEQ ID NO: 52171 - protein, 154 aa, Homo sapiens
MFHCIPLWRCNRHVESIDKRHCSLVYVPEEIYRYARSLEELLLDANQLRELPEQFFQLVKLRKLGLSDNEIQRLPPEIANFMQLVELDVSRNEIPEIPESISFCKALQVADFSGNPLTRLPESFPELQNLTCLSVNDISLQSLPENIGKQKTTS

SEQ ID NO: 52172 - protein, 51 aa, Homo sapiens
  MOD_RES (1)..(1): Any amino acid
XEECPETAEAKCAAPRPPSSSPEQSASDACLLLLRTGQPSAPGDTSVNGPV

SEQ ID NO: 52173 - protein, 128 aa, Homo sapiens
MANGTLTRRHQNGRFVGDADLERQKFSDLKLNGPQDHSHLLYSTIPRMQEPGQIVETYTEEDPEGAMSVVSVETSDDGTTRRTETTVKKVVKTVTTRTVQPVAMGPDGLPVDASSVSNNYIQTLGRDF

SEQ ID NO: 52174 - protein, 70 aa, Homo sapiens
MTTMQGMEQTTPGAGPDVPQLGNIDVIHSYLCKGLQEKFFKRKPKVLGVLCGHKFSTHSGCADSDCLDEP

SEQ ID NO: 52175 - protein, 199 aa, Homo sapiens
MGGQITRSTLHDSIGGPFPVTSHRCHHKQKHCPAVLPSGGLPATPLLFHPHTKGSQILMDLSHKAVKRQASFCNAITFSNRPVLIYEQVRLKITKKQCCWSGALRLGFTSKDPSRIHPDSLPKYACPDLVSQSGFWAKALPEEFANEGNIIAFWVDKKGRVFHRINDSAVMLFFSGVRTADPLWALVDVYGLTRGVQLL

SEQ ID NO: 52176 - protein, 1868 aa, Homo sapiens
MARLADYFIVVGYDHEKPGSGEGLGKIIQRFPQKDWDDTPFPQGIELFCQPGGWQLSRERKQPTFFVVVLTDIDSDRHYCSCLTFYEAEINLQGTKKEEIEGEAKVSGLIQPAEVFAPKSLVLVSRLYYPEIFRACLGLIYTVYVDSLNVSLESLIANLCACLVPAAGGSQKLFSLGAGDRQLIQTPLHDSLPITGTSVALLFQQLGIQNVLSLFCAVLTENKVLFHSASFQRLSDACRALESLMFPLKYSYPYIPILPAQLLEVLSSPTPFIIGVHSVFKTDVHELILHPDLEVADHAFPPPRTALSHSKMLDKEVRAVFLRLFAQLFQGYRSCLQLIRIHAEPVIHFHKTAFLGQRGLVENDFLTKVLSGMAFAGFVSERGPPYRSCDLFDELVAFEVERIKVEENNPVKMIKHVRELAEQLFKNENPNPHMAFQKVPRPTEGSHLRVHILPFPEINEARVQELIQENVAKNQNAPPATRIEKKCVVPAGPPVVSIMDKVTTVFNSAQRLEVVRNCISFIFENKILETEKTLPAALRALKGKAARQCLTDELGLHVQQNRAILDHQQFDYIIRMMNCTLQDCSSLEEYNIAAALLPLTSAFYRKLAPGVSQFAYTCVQDHPIWTNQQFWETTFYNAVQEQVRSLYLSAKEDNHAPHLKQKDKLPDDHYQEKTAMDLAAEQLRLWPTLSKSTQQELVQHEESTVFSQAIHFANLMVNLLVPLDTSKNKLLRTSAPGDWESGSNSIVTNSIAGSVAESYDTESGFEDSENTDIANSVVRFITRFIDKVCTESGVTQDHIKSLHCMIPGIVAMHIETLEAVHRESRRLPPIQKPKILRPALLPGEEIVCEGLRVLLDPDGREEATGGLLGGPQLLPAEGALFLTTYRILFRGTPHDQLVGEQTVVRSFPIASITKEKKITMQNQLQQNMQEGLQITSASFQLIKVAFDEEVSPEVVEIFKKQLMKFRYPQSIFSTFAFAAGQTTPQIILPKQKEKNTSFRTFSKTIVKGAKRAGKMTIGRQYLLKKKTGTIVEERVNRPGWNEDDDVSVSDESELPTSTTLKASEKSTMEQLVEKACFRDYQRLGLGTISGSSSRSRPEYFRITASNRMYSLCRSYPGLLVVPQAVQDSSLPRVARCYRHNRLPVVCWKNSRSGTLLLRSGGFHGKGVVGLFKSQNSPQAAPTSSLESSSSIEQEKYLQALLNAVSVHQKLRGNSTLTVRPAFALSPGTERRTSRMSTVLKQVVPGHLDVNPSNSFAQGVHGYRDKCFTQSNPKSSAKGRVHNQGVWASLRSSTRLISSPTSFIDVGARLAGKDHSASFSNSSYLQNQLLKRQAALYIFGEKSQLRNFKVEFALNCEFVPVEFHEIRQVKASFKKLMRACIPSTIPTDSEVTFLKALGDSEWFPQLHRIMQLAVVVSEVLENGSSVLVCLEEGWDITAQVTSLVQLLSDPFYRTLEGFQMLVEKEWLSFGHKFSQRSSLTLNCQGSGFAPVFLQFLDCVHQVHNQYPTEFEFNLYYLKFLAFHYVSNRFKTFLLDSDYERLEHGTLFDDKGEKHAKKGVCIWECIDRMHKRSPIFFNYLYSPLEIEALKPNVNVSSLKKWDYYIEETLSTGPSYDWMMLTPKHFPSEDSDLAGEAGPRSQRRTVWPCYDDVSCTQPDALTSLFSEIEKLEHKLNQAPEKWQQLWERVTVDLKEEPRTDRSQRHLSRSPGIVSTNLPSYQKRSLLHLPDSSMGEEQNSSISPSNGVERRAATLYSQYTSKNDENRSFEGTLYKRGALLKGWKPRWFVLDVTKHQLRYYDSGEDTSCKGHIDLAEVEMVIPAGPSMGAPKHTSDKAFFDLKTSKRVYNFCAQDGQSAQQWMDKIQSCISDA

SEQ ID NO: 52177 - protein, 312 aa, Homo sapiens
MECDLMETDILESLEDLGYKGPLLEDGALSQAVSAGASSPEFTKLCAWLVSELRVLCKLEENVQATNSPSEAEEFQLEVSGLLGEMNCPYLSLTSGDVTKRLLIQKNCLLLLTYLISELEAARMLCVNAPPKKAQEGGGSEVFQELKGICIALGMSKPPANITMFQFFSGIEKKLKETLAKVPPNHVGKPLLKKPMGPAHWEKIEAINQAIANEYEVRRKLLIKRLDVTVQSFGWSDRAKSQTEKLAKVYQPKRSVLSPKTTISVAHLLAARQDLSKILRTSSGSIREKTACAINKVIRVPLIFSKCIYFCS

SEQ ID NO: 52178 - protein, 527 aa, Homo sapiens
MGTARIAPGLALLLCCPVLSSAYALVDADDVMTKEEQIFLLHRAQAQCEKRLKEVLQRPASIMESDKGWTSASTSGKPRKDKASGKLYPESEEDKEAPTGSRYRGRPCLPEWDHILCWPLGAPGEVVAVPCPDYIYDFNHKGHAYRRCDRNGSWELVPGHNRTWANYSECVKFLTNETREREVFDRLGMIYTVGYSVSLASLTVAVLILAYFRRLHCTRNYIHMHLFLSFMLRAVSIFVKDAVLYSGATLDEAERLTEEELRAIAQAPPPPATAAAGYAGCRVAVTFFLYFLATNYYWILVEGLYLHSLIFMAFFSEKKYLWGFTVFGWGLPAVFVAVWVSVRATLANTGCWDLSSGNKKWIIQVPILASIVLNFILFINIVRVLATKLRETNAGRCDTRQQYRKLLKSTLVLMPLFGVHYIVFMATPYTEVSGTLWQVQMHYEMLFNSFQGFFVAIIYCFCNGEVQAEIKKSWSRWTLALDFKRKARSGSSSYSYGPMVSHTSVTNVGPRVGLGLPLSPRLLPTAT

SEQ ID NO: 52179 - protein, 260 aa, Homo sapiens [sequence omitted]

SEQ ID NO: 52180 - protein, 178 aa, Homo sapiens
MAGVEEVAASGSHLNGDLDPDDREEGAASTAEEAAKKKRRKKKKSKGPSAALEDKERDEDDEDGDGDGDGATGKKKKKKKKKRGPKVQTDPPSVPICDLYPNGVFPKGQECEYPPTQDGRTAAWRTTSEEKKALDQASEEIWNDFREAAEAHRQVRKYVMSWIKPGMTMIEICEKLED

SEQ ID NO: 52181 - protein, 2517 aa, Homo sapiens
MPPLLAPLLCLALLPALAARGPRCSQPGETCLNGGKCEAANGTEACVCGGAFVGPRCQDPNPCLSTPCKNAGTCHVVDRRGVADYACSCALGFSGPLCLTPLDNACLTNPCRNGGTCDLLTLTEYKCRCPPGWSGKSCQQADPCASNPCANGGQCLPFEASYICHCPPSFHGPTCRQDVNECGQKPGLCRHGGTCHNEVGSYRCVCRATHTGPNCERPYVPCSPSPCQNGGTCRPTGDVTHECACLPGFTGQNCEENIDDCPGNNCKNGGACVDGVNTYNCRCPPEWTGQYCTEDVDECQLMPNACQNGGTCHNTHGGYNCVCVNGWTGEDCSENIDDCASAACFHGATCHDRVASFYCECPHGRTGLLCHLNDACISNPCNEGSNCDTNPVNGKAICTCPSGYTGPACSQDVDECSLGANPCEHAGKCINTLGSFECQCLQGYTGPRCEIDVNECVSNPCQNDATCLDQIGEFQCICMPGFTGHLCQYDVDECASTPCKNGAKCLDGPNTYTCVCTEGYTGTHCEVDIDECDPDPCHYGSCKDGVATFTCLCRPGYTGHHCETNINECSSQPCRHGGTCQDRDNAYLCFCLKGTTGPNCEINLDDCASSPCDSGTCLDKIDGYECACEPGYTGSMCNINIDECAGNPCHNGGTCEDGINGFTCRCPEGYHDPTCLSEVNECNSNPCVHGACRDSLNGYKCDCDPGWSGTNCDINNNECESNPCVNGGTCKDMTSGYVCTCREGFSGPNCQTNINECASNPCLNQGTCIDDVAGYKCNCLLPYTGATCEVVLAPCAPSPCRNGGECRQSEDYESFSCVCPTGWQGQTCEVDINECVLSPCRHGASCQNTHGGYRCHCQAGYSGRNCETDIDDCRPNPCHNGGSCTDGINTAFCDCLPGFRGTFCEEDINECASDPCRNGANCTDCVDSYTCTCPAGFSGIHCENNTPDCTESSCFNGGTCVDGINSFTCLCPPGFTGSYCQHDVNECDSQPCLHGGTCQDGCGSYRCTCPQGYTGPNCQNLVHWCDSSPCKNGGKCWQTHTQYRCECPSGWTGLYCDVPSVSCEVAAQRQGVDVARLCQHGGLCVDAGNTHHCRCQAGYTGSYCEDLVDECSPSPCQNGATCTDYLGGYSCKCVAGYHGVNCSEEIDECLSHPCQNGGTCLDLPNTYKCSCPRGTQGVHCEINVDDCNPPVDPVSRSPKCFNNGTCVDQVGGYSCTCPPGFVGERCEGDVNECLSNPCDARGTQNCVQRVNDFHCECRAGHTGRRCESVINGCKGKPCKNGGTCAVASNTARGFICKCPAGFEGATCENDARTCGSLRCLNGGTCISGPRSPTCLCLGPFTGPECQFPASSPCLGGNPCYNQGTCEPTSESPFYRCLCPAKFNGLLCHILDYSFGGGAGRDIPPPLIEEACELPECQEDAGNKVCSLQCNNHACGWDGGDCSLNFNDPWKNCTQSLQCWKYFSDGHCDSQCNSAGCLFDGFDCQRAEGQCNPLYDQYCKDHFSDGHCDQGCNSAECEWDGLDCAEHVPERLAAGTLVVVVLMPPEQLRNSSFHFLRELSRVLHTNVVFKRDAHGQQMIFPYYGREEELRKHPIKRAAEGWAAPDALLGQVKASLLPGGSEGGRRRRELDPMDVRGSIVYLEIDNRQCVQASSQCFQSATDVAAFLGALASLGSLNIPYKIEAVQSETVEPPPPAQLHFMYVAAAAFVLLFFVGCGVLLSRKRRRQHGQLWFPEGFKVSEASKKKRREPLGEDSVGLKPLKNASDGALMDDNQNEWGDEDLETKKFRFEEPVVLPDLDDQTDHRQWTQQHLDAADLRMSAMAPTPPQGEVDADCMDVNVRGPDGFTPLMIASCSGGGLETGNSEEEEDAPAVISDFIYQGASLHNQTDRTGETALHLAARYSRSDAAKRLLEASADANIQDNMGRTPLHAAVSADAQGVFQILIRNRATDLDARMHDGTTPLILAARLAVEGMLEDLINSHADVNAVDDLGKSALHWAAAVNNVDAAVVLLKNGANKDMQNNREETPLFLAAREGSYETAKVLLDHFANRDITDHMDRLPRDIAQERMHHDIVRLLDEYNLVRSPQLHGAPLGGTPTLSPPLCSPNGYLGSLKPGVQGKKVRKPSSKGLACGSKEAKDLKARRKKSQDGKGCLLDSSGMLSPVDSLESPHGYLSDVASPPLLPSPFQQSPSVPLNHLPGMPDTHLGIGHLNVAAKPEMAALGGGGRLAFETGPPRLSHLPVASGTSTVLGSSSGGALNFTVGGSTSLNGQCEWLSRLQSGMVPNQYNPLRGSVAPGPLSTQAPSLQHGMVGPLHSSLAASALSQMMSYQGLPSTRLATQPHLVQTQQVQPQNLQMQQQNLQPANIQQQQSLQPPPPPPQPHLGVSSAASGHLGRSFLSGEPSQADVQPLGPSSLAVHTILPQESPALPTSLPSSLVPPVTAAQFLTPPSQHSYSSPVDNTPSHQLQVPEHPFLTPSPESPDQWSSSSPHSNVSDWSEGVSSPPTSMQSQIARIPEAFK

SEQ ID NO: 52182 - protein, 1048 aa, Homo sapiens
MRSAAKPWNPAIRAGGHGPDRVRPLPAASSGMKSSKSSTSLAFESRLSRLKRASSEDTLNKPGSTAASGVVRLKKTATAGAISELTESRLRSGTGAFTTTKRTGIPAPREFSVTVSRERSVPRGPSNPRKSVSSPTSSNTPTPTKHLRTPSTKPKQENEGGEKAALESQVRELLAEAKAKDSEINRLRSELKKYKEKRTLNAEGTDALGPNVDGTSVSPGDTEPMIRALEEKNKNFQKELSDLEEENRVLKEKLIYLEHSPNSEGAASHTGDSSCPTSITQESSFGSPTGNQMSSDIDEYKKNIHGNALRTSGSSSSDVTKASLSPDASDFEHITAETPSRPLSSTSNPFKSSKCSTAGSSPNSVSELSLASLTEKIQKMEENHHSTAEELQATLQELSDQQQMVQELTAENEKLVDEKTILETSFHQHRERAEQLSQENEKLMNLLQERVKNEEPTTQEGKIIELEQKCTGILEQGRFEREKLLNIQQQLTCSLRKVEEENQGALEMIKRLKEENEKLNEFLELERHNNNMMAKTLEECRVTLEGLKMENGSLKSHLQGEKQKATEASAVEQTAESCEVQEMLKVARAEKDLLELSCNELRQELLKANGEIKHVSSLLAKVEKDYSYLKEICDHQAEQLSRTSLKLQEKASESDAEIKDMKETIFELEDQVEQHRAVKLHNNQLISELESSVIKLEEQKSDLERQLKTLTKQMKEETEEWRRFQADLQTAVVVANDIKCEAQQELRTVKRKLLEEEEKNARLQKELGDVQGHGRVVTSRAAPPPVDEEPESSEVDAAGRWPGVCVSRTSPTPPESATTVKSLIKSFDLGRPGGAGQNISVHKTPRSPLSGIPVRTAPAAAVSPMQRHSTYSSVRPASRGVTQRLDLPDLPLSDILKGRTETLKPDPHLRKSPSLESLSRPPSLGFGDTRLLSASTRAWKPQSKLSVERKDPLAALAREYGGSKRNALLKWCQKKTQGYANIDITNFSSSWSDGLAFCALLHTYLPAHIPYQELNSQEKELSEMLYTDRPDWQSVMQYVAQIYKYFET

SEQ ID NO: 52183 - protein, 57 aa, Homo sapiens
MALITLRKNLYRLSDFQMHRALAALKNKPLNHVHKVVKERLCPWLCDTRTHYKSTSR

SEQ ID NO: 52184 - protein, 137 aa, Homo sapiens
ACYTKLLEFQLALKDCEECIQLEPTFIKGYTRKAAALEAMKDYTKAMDVYQKALDLDSSCKEAADGYQRCMMAQYNRHDSPEDVKRRAMADPEVQQIMSDPAMRLILEQMQKDPQALSEYVESERRPCWKWRTKAGR

SEQ ID NO: 52185 - protein, 190 aa, Homo sapiens
YFVYGAACSEVEIDCLTGDHKNIRTDIVMDVGCSINPAIDIGQIEGAFIQGMGLYTIEELNYSPQGILHTRGPDQYKIPAICDMPTELHIALLPPSQNSNTLYSSKGLGESGVFLGCSVFFAIHDAVSAARQERGLHGPLTLNSPLTPEKIRMACEDKFTKMGAHGKPVRRTQEQVLLIQLHKIQPMLVA

SEQ ID NO: 52186 - protein, 76 aa, Homo sapiens
MAMTVVTKEKNKKVPTIFLSKKPREKEVDSKSQVIEGISRLICSAKQQQTMLRVSIDGVEWSDIKFFQLAAQWPTH

SEQ ID NO: 52187 - protein, 801 aa, Homo sapiens
MGEIEQRPTPGSRLGAPENSGISTLERGQKPPPTPSGKLVSIKIQMLDDTQEAFEVPQRAPGKVLLDAVCNHLNLVEGDYFGLEFPDHKKITVWLDLLKPIVKQIRRPKHVVVKFVVKFFPPDHTQLQEELTRYLFALQVKQDLAQGRLTCNDTSAALLISHIVQSEIGDFDEALDREHLAKNKYIPQQDALEDKIVEFHHNHIGQTPAESDFQLLEIARRLEMYGIRLHPAKDREGTKINLAVANTGILVFQGFTKINAFNWAKVRKLSFKRKRFLIKLRPDANSAYQDTLEFLMASRDFCKSFWKICVEHHAFFRLFEEPKPKPKPVLFSRGSSFRFSGRTQKQVLDYVKEGGHKKVQFERKHSKIHSIRSLASQPTELNSEVLEQSQQSTSLTFGEGAESPGGQSCRRGKEPKVSAGEPGSHPSPAPRRSPAGNKQADGAASAPTEEEEEVVKDRTQQSKPQPPQPSTGPASRAARGSSTSIPFIDCSDVDSEYDLLREQASRSRSRSRSRSQTNDNYEGDLTSGVYLLSREEGRREAGRRASPHSAKSSRPPSGEFLDDDSADITFDMSGSPRLPRHSSLIDEMFKGSAGHSPLATPLSPSSSSSSPNMSWDRTGSQGYVSENGHDHREGSMGEDTLPDQGPPYERWSPTSPRPYMRNLPGRCNKSETDPLILSQVAFTPEAMDGLGGRGKWGQASAAAPEGRSLANGTPPMGAASKVPAVQSVCARGMAGQLAPLQVTEGSTSSGTESSESDSEMLIPGSQPLIFGNPAVLRSPSLLRSRGSLGGLRLSEEQEEDE

SEQ ID NO: 52188 - protein, 252 aa, Homo sapiens
MNIHRSTPITIARYGRSRNKTQDFEELSSIRSAEPSQSFSPNLGSPSPPETPNLSHCVSCIGKYLLLEPLEGDHVFRAVHLHSGEELVCKVFDISCYQESLAPCFCLSAHSNINQITEIILGETKAYVFFERSYGDMHSFVRTCKKLREEEAARLFYQIASAVAHCHDGGLVLRDLKLRKFIFKDEERCLCPWSLEMFPLVLPSIPSVILDWSFVCFHPPPTSLIFLLLLPSVCCIGSKVFSINNKLVYVLL

SEQ ID NO: 52189 - protein, 502 aa, Homo sapiens
MEPEPVEDCVQSTLAALYPPFEATAPTLLGQVFQVVERTYREDALRYTLDFLVPAKHLLAKVQQEACAQYSGFLFFHEGWPLCLHEQVVVQLAALPWQLLRPGDFYLQVVPSAAQAPRLALKCLAPGGGRVQEVPVPNEACAYLFTPEWLQGINKDRPTGRLSTCLLSAPSGIQRLPWAELICPRFVHKEGLMVGHQPSTLPPELPSGPPGLPSPPLPEEALGTRSPGDGHNAPVEGPEGEYVELLEVTLPVRGSPTDAEGSPGLSRVRTVPTRKGAGGKGRHRRHRAWMHQKGLGPRGQDGARPPGEGSSTGASPESPPGAEAVPEAAVLEVSEPPAEAVGEASGSCPLRPGELRGGGGGGQGAEGPPGTPRRTGKGNRRKKRAAGRGALSRGGDSAPLSPGDKEDASHQEALGNLPSPRHTGPEGPLSDTPTPPLETVQEGKGDNIPEEALAVSVSDHPDVAWDLMASGFLILTAWPFCVFRRGGPEWASSADHYPTVPS

SEQ ID NO: 52190 - protein, 126 aa, Homo sapiens
MPPQLQETRMNRSIPVEVDESEPYPSQLLKPIPEYSPEEESEPPAPNIRNMAPNSLSAPTMLHNSSGDFSQAHSTLKLANHQRPVSRQVTCLRTQVLEDSEDSFCRRHPGLGKAFPSGCSAVSEPA

SEQ ID NO: 52191 - protein, 958 aa, Homo sapiens
MPVRRGHVAPQNTYLDTIIRKFEGQSRKFLIANAQMENCAIIYCNDGFCELFGYSRVEVMQQPCTCDFLTGPNTPSSAVSRLAQALLGAEECKVDILYYRKDASSFRCLVDVVPVKNEDGAVIMFILNFEDLAQLLAKCSSRSLSQRLLSQSFLGSEGSHGRPGGPGPGTGRGKYRTISQIPQFTLNFVEFNLEKHRSSSTTEIEIIAPHKVVERTQNVTEKVTQVLSLGADVLPEYKLQAPRIHRWTILHYSPFKAVWDWLILLLVIYTAVFTPYSAAFLLSDQDESRRGACSYTCSPLTVVDLIVDIMFVVDIVINFRTTYVNTNDEVVSHPRRIAVHYFKGWFLIDMVAAIPFDLLIFRTGSDETTTLIGLLKTARLLRLVRVARKLDRYSEYGAAVLFLLMCTFALIAHWLACIWYAIGNVERPYLEHKIGWLDSLGVQLGKRYNGSDPASGPSVQDKYVTALYFTFSSLTSVGFGNVSPNTNSEKVFSICVMLIGSLMYASIFGNVSAIIQRLYSGTARYHTQMLRVKEFIRFHQIPNPLRQRLEEYFQHAWSYTNGIDMNAVLKGFPECLQADICLHLHRALLQHCPAFSGAGKGCLRALAVKFKTTHAPPGDTLVHLGDVLSTLYFISRGSIEILRDDVVVAILGKNDIFGEPVSLHAQPGKSSADVRALTYCDLHKIQRADLLEVLDMYPAFAESFWSKLEVTFNLRDAAGGLHSSPRQAPGSQDHQGFFLSDNQSDAAPPLSISDASGLWPELLQEMPPRHSPQSPQEDPDCWPLKLGSRLEQLQAQMNRLESRVSSDLSRILQLLQKPMPQGHASYILEAPASNDLALVPIASETTSPGPRLPQGFLPPAQTPSYGDLDDCSPKHRNSSPRMPHLAVATDKTLAPSSEQEQPEGLWPPLASPLHPLEVQGLICGPCFSSLPEHLGSVPKQLDFQRHGSDPGFAGSWGH

SEQ ID NO: 52192 - protein, 228 aa, Homo sapiens
  MOD_RES (1)..(1): Any amino acid
XVNAMHQVTDSHTPCHKDVASSEPFSGQVNSQLNCSVNGSSSYHSDDDDDDDDDDDDDNIDDDDGDNDHEALGVGDNSIPTIYFSHTVEPKRVRINTGKNTTLKFSEKKEEAKRKRKNSTGSGHSAQELPTIRTPADIYRAFVDVVNGEYVPRKSILKSRSRENSVCSDTSESSAAEFDDRRGVLRSISCEEATCSDTSESILEEEPQENQKKLLPLSVTPEVCVCIF

SEQ ID NO: 52193 - protein, 689 aa, Homo sapiens
MNAVEENQGPGESQKVEEASPPAVQQPTDPASPTVATTPEPVGSDAGDKNATKAGDDEPEYEDGRGFGIGELVWGKLRGFSWWPGRIVSWWMTGRSRAAEGTRWVMWFGDGKFSVVCVEKLMPLSSFCSAFHQATYNKQPMYRKAIYEVLQVASSRAGKLFPVCHDSDESDTAKAVEVQNKPMIEWALGGFQPSGPKGLEPPEEEKNPYKEVYTDMWVEPEAAAYAPPPPAKKPRKSTAEKPKVKEIIDERTRERLVYEVRQKCRNIEDICISCGSLNVTLEHPLFVGGMCQNCKNCFLECAYQYDDDGYQSYCTICCGGREVLMCGNNNCCRCFCVECVDLLVGPGAAQAAIKEDPWNCYMCGHKGTYGLLRRREDWPSRLQMFFANNHDQEFDPPKVYPPVPAEKRKPIRVLSLFDGIATGLLVLKDLGIQVDRYIASEVCEDSITVGMVRHQGKIMYVGDVRSVTQKHIQEWGPFDLVIGGSPCNDLSIVNPARKGLYEGTGRLFFEFYRLLHDARPKEGDDRPFFWLFENVVAMGVSDKRDISRFLESNPVMIDAKEVSAAHRARYFWGNLPGMNRPLASTVNDKLELQECLEHGRIAKFSKVRTITTRSNSIKQGKDQHFPVFMNEKEDILWCTEMERVFGFPVHYTDVSNMSRLARQRLLGRSWSVPVIRHLFAPLKEYFACV

SEQ ID NO: 52194 - protein, 45 aa, Homo sapiens
MQLPRWWELGDPCAWTGQGRGTRRMSPATTGTFLLTDNCLQQAHL

SEQ ID NO: 52195 - protein, 210 aa, Homo sapiens
  MOD_RES (1)..(1): Any amino acid
XFISVQPGPTVASGENVTLLCQSWRQFHTFLLTKAGAADAPLRLRSIHEYPKYQAEFPMSPVTSAHAGTYRCYGSLNSDPYLLSHPSEPLELVVSGPSMGSSPPPTGPISTPAGPEDQPLTPTGSDPQSGLGRHLGVVIGILVAVVLLLLLLLLLFLILRHRRQGKHWTSTQRKADFQHPAGAVGPEPTDRGLQWRSSPAADAQEENLCE

SEQ ID NO: 52196 - protein, 73 aa, Homo sapiens
MNPAAEAEFNILLATDSYKVTHYKQYPPNTSKVYSYFECREKKTENSKLRKVKYEETVFYGLQYILNKYLKEV

SEQ ID NO: 52197 - protein, 123 aa, Homo sapiens
MGTGDFICISMTGGAPWGFRLQGGKEQKQPLQVAKIRNQSKASGSGLCEGDEVVSINGNPCADLTYPEVIKLMESITDSLQMLIKRRVGAPFLFLEDQSHPPFLHLLGYTSLLIVTLVNQPMD

SEQ ID NO: 52198 - protein, 109 aa, Homo sapiens
MTAPCSQPAQLPGRRQLGLVPFPPPPPRTPLLWLLLLLLAAVAPARGWESGDLELFDLVEEVQLNFYQFLGVQQDASSADIRKAYRKLSLTLHPDKNKDENAETQFRQV

SEQ ID NO: 52199 - protein, 50 aa, Homo sapiens
MAALLRSARWLLRAGAAPRLPLSLRLLPGGPGRLHAASYLPAARAGPVAG

SEQ ID NO: 52200 - protein, 475 aa, Homo sapiens
MEEPINKRLFEKYLKDESGFKDPSSDWEMSQSSIKSSICLLRGKIYDALDNRTLATYSYKEALKLDVYCFEAFDLLTSHHMLTAQEEKELLESLPLSKLCNEEQELLRFLFENKLKKYNKPSETVIPESVDGLQENLDVVVSLAERHYYNCDFKMCYKLTSVVMEKDPFHASCLPVHIGTLVELNKANELFYLSHKLVDLYPSNPVSWFAVGCYYLMVGHKNEHARRYLSKATTLEKTYGPAWIAYGHSFAVESEHDQAMAAYFTAAQLMKGWKTAEKWFLDALEKIKAIGNEVTVDKWEPLLNNLGHVCRKLKKYAEALDYHRQALVLIPQNASTYSAIGYIHSLMGNFENAVDYFHTALGLRRDDTFSVTMLGHCIEMYIGDSEAYIGADIKDKLKCYDFDVHTMKTLKNIISPPWDFREFEVEKQTAEETGLTPLETSRKTPDSRPSLEETFEIEMNESDMMLETSMSDHST

SEQ ID NO: 52201 - protein, 174 aa, Homo sapiens
MAAGTSSYWEDLRKQARQLENELDLKLVSFSKLCTSYSHSSTRDGRRDSSDTTPLLNGSSQDRMFETMAIEIEQLLARLTGVNDKMAEYTNSAGVPSLNAALMHTLQRHRDILQDYTHEFHKTKANFMAIRERENLMGSVRKDIESYKSGSGVNNRRTELFLKEHDHLRKGFQW

SEQ ID NO: 52202 - protein, 44 aa, Homo sapiens
MDNLSSEEIQQRAHQITDESLESTRRILGLAIEYWNMTGKMNSL

SEQ ID NO: 52203 - protein, 100 aa, Homo sapiens
MESPLIYVSVLLLNIFEFSSGIVYNKDDTEKRFACSNKGFPQENEIIKLYLFLENLKIQCFFQTENEIASKAMLSVFTSGGLAPSLGIMNSTYNGIFHFN

SEQ ID NO: 52204 - protein, 295 aa, Homo sapiens
MEDDRICSPPFMELTSLCGDDTMRLLEKNGLTFPFICKTRVAHGTNSHEMAIVFNQEGLNAIQPPCVVQNFINHNAVLYKVFVVGESYTVVQRPSLKNFSAGTSDRESIFFNSHNVSKPESSSVLTELDKIEGVFERPSDEVIRELSRALRQALGVSLFGIDIIINNQTGQHAVIDINAFPGYEGVSEFFTDLLNHIATVLQGQSTAMAATGDVALLRHSKLLAEPAGGLVGERTCSASPGCCGSMMGQDAPWKAEADAGGTAKLPHQRLGCNAGVSPSFQQHCVASLATKASSQ

SEQ ID NO: 52205 - protein, 51 aa, Homo sapiens
MANSGCKDVTGPDEESFLYFAYGSNLLTERIHLRNPSAAFFCVARLQARRG

SEQ ID NO: 52206 - protein, 82 aa, Homo sapiens
MFILSDGEGKNGTIELMEPLDEEISGIVEVVGRVTAKATILCTSYVQFKEDSHPFDLGLYNEAVKIIHDFPQFYPLGIVQHD

SEQ ID NO: 52207 - protein, 59 aa, Homo sapiens
LQMSLEKKEKKKKKEKKKKHKKHKHRSSSSDRSSSEDEHSAGRHEHLPCAGSCQVLGIQ

SEQ ID NO: 52208 - protein, 172 aa, Homo sapiens
MATVVLGGDTMGPERIFPNQTEELGHQGPSEGTGDWSSEEPEEEQEETGSGPAGYSYQPLNQDPEQEEVELAPVGDGDVVADIQDRIQALGLHLPDPPLESEDEDEEGATALNNHSSIPMDPEHVELVKRTMAGVSLPAPGVPAWAREISDAQWEDVVQKALQARQASPAWK

SEQ ID NO: 52209 - protein, 127 aa, Homo sapiens
MGRPLLLPLLLLLQPPAFLQPGGSTGSGPSYLYGVTQPKHLSASMGGSVEIPFSFYYPWELAIVPNVRISWRRGHFHGQSFYSTRPPSIHKDYVNRLFLNWTEGQESGFLRISNLRKEDQSVYFCRV

SEQ ID NO: 52210 - protein, 38 aa, Homo sapiens
MDDREDLVYQAKLAEQAERYDGEEQNKEALQDVEDENQ

SEQ ID NO: 52211 - protein, 458 aa, Homo sapiens
MAKATSGAAGLRLLLLLLLPLLGKVALGLYFSRDAYWEKLYVDQAAGTPLLYVHALRDAPEEVPSFRLGQHLYGTYRTRLHENNWICIQEDTGLLYLNRSLDHSSWEKLSVRNRGFPLLTVYLKVFLSPTSLREGECQWPGCARVYFSFFNTSFPACSSLKPRELCFPETRPSFRIRENRPPGTFHQFRLLPVQFLCPNISVAYRLLEGEGLPFRCAPDSLEVSTRWALDREQREKYELVAVCTVHAGAREEVVMVPFPVTVYDEDDSAPTFPAGVDTASAVVEFKRKEDTVVATLRVFDADVVPASGELVRRYTSTLLPGDTWAQQTFRVEHWPNETSVQANGSFVRATVHDYRLVLNRNLSISENRTMQLAVLVNDSDFQGPGAGVLLLHFNVSVLPVSLHLPSTYSLSVSRRARRFAQIGKVCVENCLADLTGDAVSGRDEARSSGLGSQKHPGS

SEQ ID NO: 52212 - protein, 95 aa, Homo sapiens
MVQIIKDTNEFKTFLTAAGHKLAVVQFSSKRCGPCKRMFPVFHELAETCHIKTIPTFQMFKKSQKVTLFSRIKRIICCYRSGFMSNLCLADDGNE

SEQ ID NO: 52213 - protein, 194 aa, Homo sapiens
MPRNLLYSLLSSHLSPHFSTSVTSAKVAVNGVQLHYQQTGEGDHAVLLLPGMLGSGETDFGPQLKNLNKKLFTVVAWDPRGYGHSRPPDRDFPADFFERDAKDAVDLMKALKFKKVSLLGWSDGGITALIAAAKYPSYIHKMVIWGANAYVTDEDSMIYEGIRDVSKWSERTRKPLEALYGWSLTLSPGWNAMA

SEQ ID NO: 52214 - protein, 265 aa, Homo sapiens
MTREQYILATQQNNLPRTENAQLYPVGIYGWRKRCLYFFVLLLLVTMIVNLAMTIWILKVMNFTVDSPLVLQSDRNVTVNARNHMGQLTGQLTIGADAVEAQCKRFEVRASEDGRVLFSADEDEITIGAEKLKVTGTEGAVFGHSVETPHIRAEPSQDLRLESPTRSLIMEAPRGVQVSAAAGDFKATCRKELHLQSTEGEIFLNAETIKLGNLPTGSFSSSSPSSSSSRQTVYELCVCPNGKLYLSPAGVGSTCQSSSNICLWS

SEQ ID NO: 52215 - protein, 168 aa, Homo sapiens
MATNFLAHEKIWFDKFKYDDAERRFYEQMNGPVAGASRQENGASVILRDIARARENIQKSLAGSSGPGASSGTSGDHGELVVRIASLEVENQSLRGVVQELQQAISKLEARLNVLEKSSPGHRATAPQTQHVSPMRQVEPPAKKPATPAEDDEDDDIDLFGSDNEEED

SEQ ID NO: 52216 - protein, 337 aa, Homo sapiens
MPSEYTYVKLRSDCSRPSLQWYTRAQSKMRRPSLLLKDILKCTLLVFGVWILYILKLNYTTEECDMKKMHYVDPDHVKRAQKYAQQVLQKECRPKFAKTSMALLFEHRYSVDLLPFVQKAPKDSEAESKYDPPFGFRKFSSKVQTLLELLPEHDLPEHLKAKTCRRCVVIGSGGILHGLELGHTLNQFDVVIRLNSAPVEGYSEHVGNKTTIRMTYPEGAPLSDLEYYSNDLFVAVLFKSVDFNWLQAMVKKETLNVPTIGVIAVVLATHLCDEVSLAGFGYDLNQPRTPLHYFDSQCMAAMNFQTMHNVTTETKFLLKLVKEGVVKDLSGGIDREF

SEQ ID NO: 52217 - protein, 60 aa, Homo sapiens
MLSVQPDTKPKGCAGCNRKIKDRYLLKALDKYWHEDCLKCACCDCRLGEALWCNGKLRCL

SEQ ID NO: 52218 - protein, 74 aa, Homo sapiens
MATQGHLTFKDVAIEFSQEEWKCLEPVQKALYKDVMLENYRNLVFLGWRIMARSHLTATSVSQVQAILLPQPPE

SEQ ID NO: 52219 - protein, 220 aa, Homo sapiens
MWVPVVFLTLSVTWIGAAPLILSRIVGGWECEKHSQPWQVLVASRGRAVCGGVLVHPQWVLTAAHCIRNKSVILLGRHSLFHPEDTGQVFQVSHSFPHPLYDMSLLKNRFLRPGDDSSIEPEEFLTPKKLQCVDLHVISNDVCAQVHPQKVTKFMLCAGRWTGGKSTCSGDSGGPLVCNGVLQGITSWGSEPCALPERPSLYTKVVHYRKWIKDTIVANP

SEQ ID NO: 52220 - protein, 594 aa, Homo sapiens
MVSHILQSELGDFHEETDRKHLAQTRYLPNQDCLEGKIMHFHQKHIGRSPAESDILLLDIARKLDMYGIRPHPASDGEGMQIHLAVAHMGVLVLRGNTKINTFNWAKIRKLSFKRKHFLIKLHANILVLCKDTLEFTMASRDACKAFWKTCVEYHAFFRLSEEPKSKPKTLLCSKGSSFRYSGRTQRQLLEYGRKGRLKSLPFERKHYPSQYHERQCRSSPDLLSDVSKQVEDLRLAYGGGYYQNVNGVHASEPVLESRRRNSALEVTFATELEHSKPEADPTLLHQSQSSSSFPFIYMDPVFNTEPNPNPDPRDIFSERSSLSSFQTSCKFSGNHMSIYSGLTSKVRPAKQLTYTDVPYIPCTGQQVGIMPPQVFFYVDKPPQVPRWSPIRAEERTSPHSYVEPTAMKPAERSPRNIRMKSFQQDLQVLQEAIARTSGRSNINVGLEEEDPNLEDAFVCNIQEQTPKRSQSQSDMKTIRFPFGSEFRPLGPCPALSHKADLFTDMFAEQELPAVLMDQSTAERYVASESSDSESEILKPDYYALYGKEIRSPMARIRLSSGSLQLDEEDEDAYFNTPTAEDRTSLKPCNYFLA

SEQ ID NO: 52221 - protein, 576 aa, Homo sapiens
MMTPQVITPQQMQQILQQQVLSPQQLQVLLQQQQALMLQQQQLQEFYKKQQEQLQLQLLQQQHAGKQPKEQQQVATQQLAFQQQLLQMQQLQQQHLLSLQRQGLLTIQPGQPALPLQPLAQGMIPTELQQLWKEVTSAHTAEETTGNNHSSLDLTTTCVSSSAPSKTSLIMNPHASTNGQLSVHTPKRESLSHEEHPHSHPLYGHGVCKWPGCEAVCEDFQSFLKHLNSEHALDDRSTAQCRVQMQVVQQLELQLAKDKERLQAMMTHLHVKSTEPKAAPQPLNLVSSVTLSKSASEASPQSLPHTPTTPTAPLTPVTQGPSVITTTSMHTVGPIRRRYSDKYNVPISSDIAQNQEFYKNAEVRPPFTYASLIRQAILESPEKQLTLNEIYNWFTRMFAYFRRNAATWKNAVRHNLSLHKCFVRVENVKGAVWTVDEVEFQKRRPQKISGNPSLIKNMQSSHAYCTPLNAALQASMAENSIPLYTTASMGNPTLGNLASAIREELNGAMEHTNSNESDSSPGRSPMQAVHPVHVKEEPLDPEEAEGPLSLVTTANHSPDFDHDRDYEDEPVNEDME

SEQ ID NO: 52222 - protein, 435 aa, Homo sapiens
MLCGFQEDATPPPPPRPRRLHRRLPRPEEVGMLSLPPGLLTVSGSAAAADAVPLRPGDWAGVSTADRGERAPLGPAFCDLAVSPTSPAWRGEEDEGAKASSGDIGSLDYQEFVVDIESRLRMEGVELKEEWQDEDFPIPLPEDDSIEADILAITGPEDQPGSLEVNGNKVRKKLMAPDISLTLDPSDGSVLSDDLDESGEIDLDGLDTPSENSNEFEWEDDLPKPKTTEVIRKGSITEYTAAEEKEDGRRWRMFRIGEQDHRVDMKAIEPYKKVISHGGYYGDGLNAIVVFAVCFMPESSQPNYRYLMDNLFKYVIGTLELLVAENYMIVYLNGATTRRKMPSLGWLRKCYQQIDRRLRKNLKSLIIVHPSWFIRTLLAVTRPFISSKFSQKIRYVFNLAELAELVPMEYVGIPECIKQVDQELNGKQDEPKNEQ

SEQ ID NO: 52223 - protein, 91 aa, Homo sapiens
MEKSSSCESLGSQPAAARPPSVDSLSSASTSHSENSVHTKSASVVSSDSISTSADNFSPDLRPMQSSSGAKSLKHCVIVPTHLIIVCPEGV

SEQ ID NO: 52224 - protein, 238 aa, Homo sapiens
MSSPMPDCTSKCRSLKHALDVLSVVTKGSENQIKAFLSSHCYNAATIKDVFGRNALHLVSSCGKKGVLDWLIQKGVDLLVKDKESGWTALHRSIFYGHIDCVWSLLKHGVSLYIQDKEGLSALDLVMKDRPTHVVFKNTDPTDVYTWGDNTNFTLGHGSQNSKHHPELVDLFSRSGIYIKQVVLCKFHSVFLSQKGQVYTCGHGPGGRLGHGDEQTCLVIEMSLHYLGPSACGRTEWS

SEQ ID NO: 52225 - protein, 156 aa, Homo sapiens
MLGMAQLLHLDYDLNSNAFPHPSDGSNLIVATNFMLAFDTCLYLALAIYFEKILPNEYGHRRPPLFFLKSSFWSQTQKTDHVALEDEMDADPSFHDSFEQAPPEFQGKEAIRIRNVTKEYKGKPDKIEALKDLVFDIYEGQITAILVTVELESQHC

SEQ ID NO: 52226 - protein, 172 aa, Homo sapiens
MLVRVVLSLTPSFPEPSALYTACKMVRWLSAKLGPTVASRHVARNLLRLLTSCYVGPTRQQFTVSSGESPPLSAGNIYQKRPVLGDIVSGPVLSCLLHIARLYGEPVLTYQYLPYISYLVAPGSASGPSRLNSRKEAGLLAAVTLTQKIIVYLSDTTLMDILPRISHEVLLP

SEQ ID NO: 52227 - protein, 626 aa, Homo sapiens
MPLLLLLLLLPSPLHPHPICEVSKVASHLEVNCDKRNLTALPPDLPKDTTILHLSENLLYTFSLATLMPYTRLTQLNLDRCELTKLQVDGTLPVLGTLDLSHNQLQSLPLLGQTLPALTVLDVSFNRLTSLPLGALRGLGELQELYLKGNELKTLPPGLLTPTPKLEKLSLANNNLTELPAGLLNGLENLDTLLLQENSLYTIPKGFFGSHLLPFAFLHGNPWLCNCEILYFRRWLQDNAENVYVWKQGVDVKAMTSNVASVQCDNSDKFPVYKYPGKGCPTLGDEGDTDLYDYYPEEDTEGDKVRATRTVVKFPTKAHTTPWGLFYSWSTASLDSQMPSSLHPTQESTKEQTTFPPRWTPNFTLHMESITFSKTPKSTTEPTPSPTTSEPVPEPAPNMTTLEPTPSPTTPEPTSEPAPSPTTPEPTPIPTIATSPTILVSATSLITPKSTFLTTTKPVSLLESTKKTIPELDQPPKLRGVLQGHLESSRNDPFLHPDFCCLLPLGFYVLGLFWLLFASVVLILLLSWVGHVKPQALDSGQGAALTTATQTTHLELQRGRQVTVPRAWLLFLRGSLPTFRSSLFLWVRPNGRVGPLVAGRRPSALSQGRGQDLLSTVSIRYSGHSL

SEQ ID NO: 52228 - protein, 544 aa, Homo sapiens
MASSEVARHLLFQSHMATKTTCMSSQGSDDEQIKRENIRSLTMSGHVGFESLPDQLVNRSIQQGFCFNILCVGETGIGKSTLIDTLFNTNFEDYESSHFCPNVKLKAQTYELQESNVQLKLTIVNTVGFGDQINKEESYQPIVDYIDAQFEAYLQEELKIKRSLFTYHDSRIHVCLYFISPTGHSLKTLDLLTMKNLDSKVNIIPVIAKADTVSKTELQKFKIKLMSELVSNGVQIYQFPTDDDTIAKVNAAMNGQLPFAVVGSMDEVKVGNKMVKARQYPWGVVQVENENHCDFVKLREMLICTNMEDLREQTHTRHYELYRRCKLEEMGFTDVGPENKPVSVQETYEAKRHEFHGERQRKEEEMKQMFVQRVKEKEAILKEAERELQAKFEHLKRLHQEERMKLEEKRRLLEEEIIAFSKKKATSEIFHSQSFLATGSNLRKDKDRKKEPGCRFELLCIDVRACETNGGRKDAEKAPIFCKTEVPEHRRSSSQANFIKKKLEVCFDFAVICFITSIFGEQPQLLIFMEKYFQVQGQYISQSE

SEQ ID NO: 52229 - protein, 167 aa, Homo sapiens
MKEVGRPREVRGRPGKSRIQKELADITLDPPPNCSAGPKGDNIYEWRSTILGPPGSVYEGGVFFLDITFTPEYPFKPPKVTFRTRIYHCNINSQGVICLDILKDNWSPALTISKVLLSICSLLTDCNPGKVHNSLPCFILPYLKNTCFQKLSKDKTNFSAQVCEYKN

SEQ ID NO: 52230 - protein, 298 aa, Homo sapiens
MSSPPQIVIDDATILILGGCGGPNALFKDAWLLHMHSGPWAWQPLKVENEEHGAPELWCHPACRVGQCVVVFSQAPSGRAPLSPSLNSRPSPISATPPALVPETREYRSQSPVRSMDEAPCVNGRWGTLRPRAQRQTPSGSREGSLSPARGDGSPILNGGSLSPGTAAVGGSSLDSPVQAISPSTPSAPEGYDLKIGLSLAPRRGSLPDQKDLRLGSIDLNWDLKPASSSNPMDGMDNRTVGGSMRHPPEQTNGVHTPPHVASALAGAVSPGALRRSLEAIKAMSSKGPSASAALSPP

SEQ ID NO: 52231 - protein, 215 aa, Homo sapiens
MASLQMRGNPGSHFCGGTLIHPSFVLTAAHCLRDIPQRLVNVVLGAHNVRTQEPTQQHFSVAQVFLNNYDAENKLNDVLLIQLSSPANLSASVATVQLPQQDQPVPHGTQCLAMGWGRVGAHDPPAQVLQELNVTVVTFFCRPHNICTFVPRRKAGICFGDSGGPLICDGIIQGIDSFVIWGCATRLFPDFFTRVALYVDWIRSTLRRVEAKGRP

SEQ ID NO: 52232 - protein, 155 aa, Homo sapiens
MLNMQGAEERDIRRETCPGWVNKNKPALEQDVCKIDSSGIVVKRFQEDEYQDSTFEEKYACEGMKENSPREIAESCLFQEGGFGRITFIHKEAPPEIISQGYNFEKSLLLTSSLVTRLRVSTEESLHQWETSNIQTNDISDQSKCPTLCTQKKSW

SEQ ID NO: 52233 - protein, 157 aa, Homo sapiens
MATSAPLRSLEEEVTCSICLDYLRDPVTIDCGHVFCRSCTTDVRPISGSRPVCPLCKKPFKKENIRPVWQLASLVENIERLKVDKGRQPGEVTREQQDAKLCERHREKLHYYCEDDGKLLCVMCRESREHRPHTAVLMEKAAQPHREKILNHLSTLR

SEQ ID NO: 52234 - protein, 62 aa, Homo sapiens
MRQNPTETLRRVLPKVRCLPRSMRMHTYLSREYGSHICLSRGCDSVEENTYWKPCMLQEWKC

SEQ ID NO: 52235 - protein, 284 aa, Homo sapiens
MDAIKKKMQMLKLDKENAIDRAEQAEADKKQAEDRCKQLEEEQQALQKKLKGTEDEVEKYSESVKEAQEKLEQAEKKATDAEADVASLNRRIQLVEEELDRAQERLATALQKLEEAEKAADESERGMKVIENRAMKDEEKMELQEMQLKEAKHIAEDSDRKYEEVARKLVILEGELERSEERAEVAESRARQLEEELRTMDQALKSLMASEEEYSTKEDKYEEEIKLLEEKLKEAETRAEFAERSVAKLEKTIDDLEDEVYAQKMKYKAISEELDNALNDITSL

SEQ ID NO: 52236 - protein, 418 aa, Homo sapiens
MPTTHQIHVEQSISLLLNFLLAAFDPEGHGKISVFAVKMALATLCGGKIMDKLRYIFSMISDSSGVMVYGRYDQFLREVLKLPTAVFEGPSFGYTEQSARSCFSQQKKVTLNGFLDTLMSDPPPQCLVWLPLLHRLANVENVFHPVECSYCHSESMMGFRYRCQQCHNYQLCQDCFWRGHAGGSHSNQHQMKEYTSWKSPAKKLTNALSKSLSCASSREPLHPMFPDQPEKPLNLAHIVDTWPPRPVTSMNDTLFSHSVPSSGSPFITRSMLESSNRLDEEHRLIARYAARLAAESSSSQPPQQRSAPDISFTIDANKQQRQLIAELENKNREILQEIQRLRLEHEQASQPTPEKAQQNPTLLAELRLLRQRKDELEQRMSALQESRRELMVQLEGLMKLLKEEELKQGVSYVPYCRS

SEQ ID NO: 52237 - protein, 185 aa, Homo sapiens
MTKYKPESEELTAERITEFCHRFLEGKIKPHLMSQELPEDWDKQPVKVLVGKNFEDVAFDEKKNVFVEFYAPWCGHCKQLAPIWDKLGETYKDHENIVIAKMDSTANEVEAVKVHSFPTLKFFPASADRTVIDYNGERTLDGFKKFLESGGQDGAGDDDDLEDLEEAEEPDMEEDDDQKAVKDEL

SEQ ID NO: 52238 - protein, 79 aa, Homo sapiens
MLKVSAVLCVCAAAWCSQSLAAAAAVAAAGGRSDGGNFLDDKQWLTTISQYDKEVGQWNKFRDDDYFRTWSPGKPFDQG

SEQ ID NO: 52239 - protein, 69 aa, Homo sapiens
MQKRQGYCSYCRVQYNNLEQQTLTKGKTKKEFFRQKENDSRWKLRDTGSNEEQWKAFVQCSAQEFDQTE

SEQ ID NO: 52240 - protein, 1163 aa, Homo sapiens
MAQQANVGELLAMLDSPMLGVRDDVTAVFKENLNSDRGPMLVNTLVDYYLETSSQPALHILTTLQEPHDKHLLDRINEYVGKAATRLSILSLLGHVIRLQPSWKHKLSQAPLLPSLLKCLKMDTDVVVLTTGVLVLITMLPMIPQSGKQHLLDFFDIFGRLSSWCLKKPGHVAEVYLVHLHASVYALFHRLYGMYPCNFVSFLRSHYSMKENLETFEEVVKPMMEHVRIHPELVTGSKDHELDPRRWKRLETHDVVIECAKISLDPTEASYEDGYSVSHQISARFPHRSADVTTSPYADTQNSYGCATSTPYSTSRLMLLNMPGQLPQTLSSPSTRLITEPPQATLWSPSMVCGMTTPPTSPGNVPPDLSHPYSKVFGTTGGKGTPLGTPATSPPPAPLCHSDDYVHISLPQATVTPPRKEERMDSARPCLHRQHHLLNDRGSEEPPGSKGSVTLSDLPGFLGDLASEEDSIEKDKEEAAISRELSEITTAEAEPVVPRGGFDSPFYRDSLPGSQRKTHSAASSSQGASVNPEPLHSSLDKLGPDTPKQAFTPIDLPCGSADESPAGDRECQTSLETSIFTPSPCKIPPPTRVGFGSGQPPPYDHLFEVALPKTAHHFVIRKTEELLKKAKGNTEEDGVPSTSPMEVLDRLIQQGADAHSKELNKLPLPSKSVDWTHFGGSPPSDEIRTLRDQLLLLHNQLLYERFKRQQHALRNRRLLRKVIKAAALEEHNAAMKDQLKLQEKDIQMWKVSLQKEQARYNQLQEQRDTMVTKLHSQIRQLQHDREEFYNQSQELQTKLEDCRNMIAELRIELKKANNKVCHTELLLSQVSQKLSNSESVQQQMEFLNRQLLVLGEVNELYLEQLQNKHSDTTKEVEMMKAAYRKELEKNRSHVLQQTQRLDTSQKRILELESHLAKKDHLLLEQKKYLEDVKLQARGQLQAAESRYEAQKRITQVFELEILDLYGRLEKDGLLKKLEEEKAEAAEAAEERLDCCNDGCSDSMVGHNEEASGHNGETKTPRPSSARGSSGSRGGGGSSSSSSELSTPEKPPHQRAGPFSSRWETTMGEASASIPTTVGSLPSSKSFLGMKARELFRNKSESQCDEDGMTSSLSESLKTELGKDLGVEAKIPLNLDGPHPSPPTPDSVGQLHIMDYNETHHEHS

SEQ ID NO: 52241 - protein, 184 aa, Homo sapiens
MEGGDQSEEEPRERSQAGGMGTLWSQESTPEERLPVEGSRPWAVARRVLTAILILGLLLCFSVLLFYNFQNCGPRPCETSVCLDLRDHYLASGNTSVAPCTDFFSFACGRAKETNNSFQELATKNKNRLRRILEVQNSWHPGSGEEKAFQFYNSCMDTLAIEAAGTGPLRQVIEEIFREYLTYL

SEQ ID NO: 52242 - protein, 238 aa, Homo sapiens
MAENDVDNELLDYEDDEVETAAGGDGAEAPAKKDVKGSYVSIHSSGFRDFLLKPELLRAIVDCGFEHPSEVQHECIPQAILGMDVLCQAKSGMGKTAVFVLATLQQLEPVTGQVSVLVMCHTRELAFQISKEYERFSKYMPNVKVAVFFGGLSIKKDEEVLKKNCPHIVVGTPGRILALARNKSLNLKHIKHFILDECDKMLEQLDMRRDVQEIFRMTPHEKQVMMFSATLSKEIRPV

SEQ ID NO: 52243 - protein, 301 aa, Homo sapiens
MEREKEQFRKLFIGGLSFETTEESLRNYYEQWGKLTDCVVMRDPASKRSRGFGFVTFSSMAEVDAAMAARPHSIDGRVVEPKRAVAREESGKPGAHVTVKKLFVGGIKEDTEEHHLRDYFEEYGKIDTIEIITDRQSGKKRGFGFVTFDDHDPVDKIVLQKYHTINGHNAEVRKALSRQEMQEVQSSRSGRGGNFGFGDSRGGGGNFGPGPGSNFRGGSDGYGSGRGFGDGYNGYGGGPGGNYGSGNYNDFGNYNQQPSNYGPMKSGNFGGSRNMGGPYGGGNYGPGGSGGSGGYGGRSRY

SEQ ID NO: 52244 - protein, 238 aa, Homo sapiens
MRPWWSPVKIQGQNKEMLAAACQMFLGKTEAEIAHIALETLEGHQRAIMAHMTVEEIYKDRQKFSEQVFKVASSDLVNMGISVVSYTLKDIHDDQDYLHSLGKARTAQVQKDARIGEAEAKRDAGIREAKAKQEKVSAQYLSEIEMAKAQRDYELKKAAYDIEVNTRRAQADLAYQLQVAKTKQQIEEQRVQVQVVERAQQVAVQEQEIARREKELEARVRKPAEAERYKLERLAEAE

SEQ ID NO: 52245 - protein, 217 aa, Homo sapiens
MSSEQKSQHCKPEEGVEAQEEALGLVGAQAPTTEEQEAAVSSSSPLVPGTLEEVPAAESAGPPQSPQGASALPTTISFTCWRQPNEGSSSQEEEGPSTSPDAESLFREALSNKVDELAHFLLRKYRAKELVTKAEMLERVIKNYKRCFPVIFGKASESLKMIFGIDVKEVDPASNTYTLVTCLGLSYDGLLGNNQIFPKTGLLIIVLGTIAMEGDSA

SEQ ID NO: 52246 - protein, 89 aa, Homo sapiens
MQEQEIGFISKYNEGLCVNTDPVSILTSILDMSLHRQMGSDRDLQSSASSVSLPSVKKAPKKRRISIGSLFRRKKDNKRKSRELNGGVD

SEQ ID NO: 52247 - protein, 867 aa, Homo sapiens
MGRNRSWGTLGSGRTSTPGHQSGPLTRRRAVSQLYRRYLLFSISASDPSLRSGTQAPDIHLGEPARGTGCVRGKQTSIRVQDCGRREEARAASRELRREKAQEHPRESWAHPQPYPAPQPLALRPETQPCPACRSSPPGRLLLRPALPGHPFLLPIMAVYRLCVTTGPYLRAGTLDNISVTLVGTCGESPKQRLDRMGRDFAPGSVQKYKVRCTAELGELLLLRVHKERYAFFRKDSWYCSRICVTEPDGSVSHFPCYQWIEGYCTVELRPGTARTICQDSLPLLLDHRTRELRARQECYRWKIYAPGFPCMVDVNSFQEMESDKKFALTKTTTCVDQGDSSGNRYLPGFPMKIDIPSLMYMEPNVRYSATKTISLLFNAIPASLGMKLRGLLDRKGSWKKLDDMQNIFWCHKTFTTKYVTEHWCEDHFFGYQYLNGVNPVMLHCISSLPSKLPVTNDMVAPLLGQDTCLQTELERGNIFLADYWILAEAPTHCLNGRQQYVAAPLCLLWLSPQGALVPLAIQLSQTPGPDSPIFLPTDSEWDWLLAKTWVRNSEFLVHENNTHFLCTHLLCEAFAMATLRQLPLCHPIYKLLLPHTRYTLQVNTIARATLLNPEGLVDQVTSIGRQGLIYLMSTGLAHFTYTNFCLPDSLRARGVLAIPNYHYRDDGLKIWAAIESFVSEIVGYYYPSDASVQQDSELQAWTGEIFAQAFLGRESSGFPSRLCTPGEMVKFLTAIIFNCSAQHAAVNSGQHDFGAWMPNAPSSMRQPPPQTKGTTTLKTYLDTLPEVNISCNNLLLFWLVSQEPKDQRPLGTYPDEHFTEEAPRRSIAAFQSRLAQISRDIQERNQGLALPYTYLDPPLIENSVSI

SEQ ID NO: 52248 - protein, 85 aa, Homo sapiens
MLKRFTWTDSKPKASLKIDLRVTSKSKESGLSDVSRPSFCHSSCGHVSEGKRRFTYDHAELERKIACCSPPPDYNSVVLYSTPPI

SEQ ID NO: 52249 - protein, 95 aa, Homo sapiens
MPLHVKWPFPAVPPLTWTLASSVVMGLVGTYSCFWTKYMNHLTVHNREVLYELIEKRGPATPLITVSNHQSCMDDPHLWGILKLRHIWNLKLMRW

SEQ ID NO: 52250 - protein, 1061 aa, Homo sapiens
MPHLPLASFRPPFWGLRHSRGLPRFHSVSTQSEPHGSPISRRNREAKQKRLREKQATLEAEIAGESKSPAESIKAWRPKELVLYEIPTKPGEKKDVSGPLPPAYSPRYVEAAWYPWWVREGFFKPEYQARLPQATGETFSMCIPPPNVTGSLHIGHALTVAIQDALVRWHRMRGDQVLWVPGSDHAGIATQAVVEKQLWKERGVRRHELSREAFLREVWQWKEAKGGEICEQLRALGASLDWDRECFTMDVGSSVAVTEAFVRLYKAGLLYRNHQLVNWSCALRSAISDIEVENRPLPGHTQLRLPGCPTPVSFGLLFSVAFPVDGEPDAEVVVGTTRPETLPGDVAVAVHPDDSRYTHLHGRQLRHPLMGQPLPLITDYAVQPHVGTVKVTPAHSPADAEMGARHGLSPLNVIAEDGTMTSLCGDWLQGLHRFVAREKIMSVLSERGLFRGLQNHPMVLPICSRSGDVIEYLLKNQWFVRCQEMGARAAKAVESGALELSPSFHQKNWQHWFSHIGDWCVSRQLWWGHQIPAYLVVEDHAQGEEDCWVVGRSEAEAREVAAELTGRPGAELTLERDPDVLDTWFSSALFPFSALGWPQETPDLARFYPLSLLETGSDLLLFWVGRMVMLGTQLTGQLPFSKVLLHPMVRDRQGRKMSKSLGNVLDPRDIISGVEMQLLQEKLRSGNLDPAELAIVAAAQKKDFPHGIPECGTDALRFTLCSHGVQAGDLHLSVSEVQSCRHFCNKIWNALRFILNALGEKFVPQPAEELSPSSPMDAWILSRLALAAQECERGFLTRELSLVTHALHHFWLHNLCDVYLEAVKPVLWHSPRPLGPPQVLFSCADLGLRLLAPLMPFLAEELWQRLPPRPGCPPAPSISVAPYPSACSLEHWRQPELERRFSRVQEVVQVLRALRATYQLTKARPRVLLQSSEPGDQGLFEAFLEPLGTLGYCGAVGLLPPGTAAPSGWAQAPLSDTAQVYMELQGLVDPQIQLPLLAARRYKLQKQLDSLTARTPSEGEAGTQRQQKLSSLQLELSKLDKAASHLRQLMDEPPAPGSPEL

SEQ ID NO: 52251 - protein, 117 aa, Homo sapiens
MMCTPANTPATPPNFPDALTMFSRLKASESFHSGGSGSPMAATATSPPPHFPHAATSSSAASSWPTAASPPGGPQHHQPQPPLWTPTPPSPASDWPPLAPQQATSEPRAHPAMEAER

SEQ ID NO: 52252 - protein, 566 aa, Homo sapiens
MMQESGTETKSNGSAIQNGSGGSNHLLECGGLREGRSNGETPAVDIGAADLAHAQQQQQQALQVARQLLLQQQQQQQVSGLKSPKRNDKQPALQVPVSVAMMTPQVITPQQMQQILQQQVLSPQQLQVLLQQQQALMLQQQQLQEFYKKQQEQLQLQLLQQQHAGKQPKEQQQVATQQLAFQQQLLQMQQLQQQHLLSLQRQGLLTIQPGQPALPLQPLAQGMIPTELQQLWKEVTSAHTAEETTGNNHSSLDLTTTCVSSSAPSKTSLIMNPHASTNGQLSVHTPKRESLSHEEHPHSHPLYGHGVCKWPGCEAVCEDFQSFLKHLNSEHALDDRSTAQCRVQMQVVQQLELQLAKDKERLQAMMTHLHVKSTEPKAAPQPLNLVSSVTLSKSASEASPQSLPHTPTTPTAPLTPVTQGPSVITTTSMHTVGPIRRRYSDKYNVPISSADIAQNQEFYKNAEVRPPFTYASLIRQAILESPEKQLTLNEIYNWFTRMFAYFRRNAATWKNAVRHNLSLHKCFVRVENVKGAVWTVDEVEFQKRRPQKISGVPFAPTSHCISALSE

SEQ ID NO: 52253 - protein, 203 aa, Homo sapiens
MDPQRSPLLEVKGNIELKRPLIKAPSQLPLSGSRLKRRPDQMEDGLEPEKKRTRGLGATTKITTSHPRVPSLTTVPQTQGQTTGPSSHPLPWQCHHQPFLETDPGGRSWGPGQKWHRLHLWCTSAQKVSKKTGPRCSTAIATGLKNQKPVPAVPVQKSGTSGVPPMAGGKKPSKRPAWDLKGQLCDLNAELKRCRERTQTLDQ

SEQ ID NO: 52254 - protein, 285 aa, Homo sapiens
MLKMAMKLKARAAESEKKTAAAAAEVAAEAAAAAAALAEPREPLAPRKSGDPEKLAKNPKNPAREALPEKFLTDKERKKLEKKLLEQRRKEEKKKEKERKKMEKMLKKKKKKVPEAQEEARCPEAAAAAAAADDDEGAEEGAVGGAEEGAAAGGTSRAWADWDTDSSDEDDAYYAAPRVGGIVWRPGPLKAGALSAHLPLVVFLVFSVRSPSWVLNFLLQKRTEQGRGCGFVFGATCCFRVFLGCAFFSYLGGRAKRRGRGRSGARGAFGSGHGARRRGREERLI

SEQ ID NO: 52255 - protein, 259 aa, Homo sapiens
MAFTLEERLQLGIHGLIPPCFLSQDVQLLRIMRYYERQQSDLDKYIILMTLQDRNEKLFYRVLTSDVEKFMPIVYTPTVGLACQHYGLTFRRPRGLFITIHDKGHLATMLNSWPEDNIKAVVVTDGERILGLGDLGCYGMGIPVGKLALYTACGGVNPQQCLPVLLDVGTNNEELLRDPLYIGLKHQRVHGKAYDDLLDEFMQAVTDKFGINCLIQFEDFANANAFRLLNKYRNKYCMFNDDIQDDFSRGPKRSQLFFK

SEQ ID NO: 52256 - protein, 38 aa, Homo sapiens
  MOD_RES (1)..(1): Any amino acid
XGAVASMFWVDAELGSDIYLDGIITIVDSKYGLKVKYH

SEQ ID NO: 52257 - protein, 455 aa, Homo sapiens
MVDFPGYNLSGAVASFLFILLTMKQSEDFRVIGPAHPILAGVGEDALLTCQLLPKRTTMHVEVRWYRSEPSTPVFVHRDGVEVTEMQMEEYRGWVEWIENGIAKGNVALKIHNIQPSDNGQYWCHFQDGNYCGETSLLLKVAGLGSAPSIHMEGPGESGVQLVCTARGWFPEPQVYWEDIRGEKLLAVSEHRIQDKDGLFYAEATLVVRNASAESVSCLVHNPVLTEEKGSVISLPEKLQTELASLKVNGPSQPILVRVGEDIQLTCYLSPKANAQSMEVRWDRSHRYPAVHVYMDGDHVAGEQMAEYRGRTVLVSDAIDEGRLTLQILSARPSDDGQYRCLFEKDDVYQEASLDLKVVGLGSSPLITVEGQEDGEMQLICSSDGWFPQPHVQWRDMEGKTIPSSSQALTQGSHGLFHVQTLLRVTNISAVDVTCSISIPFLGEEKIATFSLSGW

SEQ ID NO: 52258 - protein, 146 aa, Homo sapiens
MTSELDIFVGNTTLIDEDVYRLWLDGYSVTDAVALRVRSGILEQTGATAAVLQSDTMDHYRTFHMLERLLHAPPKLLHQLIFQIPPSRQALLIERYYAFDEAFVREVLGKKLSKGTKKDLDDISTKTGITLKSCRRQGLCSHRLLC

SEQ ID NO: 52259 - protein, 374 aa, Homo sapiens
MSRRSSRLQAKQQPQPSQTESPQEAQIIQAKKRKTTQDVKKRREEVTKKHQYEIRNCWPPVLSGGISPCIIIETPHKEIGTSDFSRFTNYRFKNLFINPSPLPDLSWGCSKEVWLNMLKKESRYVHDKHFEVLHSDLEPQMRSILLDWLLEVCEVYTLHRETFYLAQDFFDRFMLTQKDINKNMLQLIGITSLFIASKLEEIYAPKLQEFAYVTDGACSEEDILRMELIILKALKWELCPVTIISWLNLFLQVDALKDAPKVLLPQYSQETFIQIAQLLDLCILAIDSLEFQYRILTAAALCHFTSIEVVKKASGLEWDSISECVDWMVPFVNVVKSTSPVKLKTFKKIPMEDRHNIQTHTNYLAMLCMISSHV

SEQ ID NO: 52260 - protein, 657 aa, Homo sapiens
MDSKKRSSTEAEGSKERGLVHIWQAGSFPITPERLPGWGGKTVLQAALGVKHGVLLTEDGEVYSFGTLPWRSGPVEICPSSPILENALVGQYVITVATGSFHSGAVTDNGVAYMWGENSAGQCAVANQQYVPEPNPVSIADSEASPLLAVRILQLACGEEHTLALSISREIWAWGTGCQLGLITTAFPVTKPQKVEHLAGRVVLQVACGAFHSLALVQCLPSQDLKPVPERCNQCSQLLITMTDKEDHVIISDSHCCPLGVTLTESQAENHASTALSPSTETLDRQEEVFENTLVANDQSVATELNAVSAQITSSDAMSSQQNVMGTTEISSARNIPSYPDTQAVNEYLRKLSDHSVREDSEHGEKPVPSQPLLEEAIPNLHSPPTTSTSALNSLVVSCASAVGVRVAATYEAGALSLKKVMNFYSTTPCETGAQAGSSAIGPEGLKDSREEQVKQESMQGKKSSSLVDIREEETEGGSRRLSLPGLLSQVSPRLLRKAARVKTRTVVLTPTYSGEADALLPSLRTEVWTWGKGKEGQLGHGDVLPRLQPLCVKCLDGKEVIHLEAGGYHSLALTAKSQVYSWGSNTFGQLGHSDFPTTVPRLAKISSENGVWSIAAGRDYSLFLVDTEDFQPGLYYSGRQDPTEAWIYKQSDSRKR

SEQ ID NO: 52261 - protein, 88 aa, Homo sapiens
MDAATLTYDTLRFAEFEDFPETSEPVWILGRKYSIFTEKDEILSDVASRLWFTYRKNFPAIAIHHCCIPWSWKEMGTGSQPCLSPAEN

SEQ ID NO: 52262 - protein, 302 aa, Homo sapiens
MLGLWGQRLPAAWVLLLLPFLPLLLLAAPAPHRESYKPVIVVHGLFDSSYSFRHLLEYINETHPGTVVTVLDLFDGRESLRPLWEQVQGFREAVVPIMAKAPQGVHLICYSQGGLVCRALLSVMDDHNVDSFISLSSPQMGQYGDTDYLKWLFPTSMRSNLYRICYSPWGQEFSICNYWHDPHHDDLYLNASSFLALINGERDHPNATVWRKNFLRVGHLVLIGGPDDGVITPWQSSFFGFYDANETVLEMEEQLVYLRDSFGLKTLLARGAIVRCPMAGISHTAWHSNRTLYETCIEPWLS

SEQ ID NO: 52263 - protein, 138 aa, Homo sapiens
MESTPSRGLNRVHLQCRNLQEFLGGLSPGVLDRLYGHPATCLAVFRELPSLAKNWVMRMLFLEQPLPQAAVALWVKKEFSKAQEESTGLLSGLRIWHTQLLPGGLQGLILNPIFRQNLRIALLGGTGITGVSHCAWPG

SEQ ID NO: 52264 - protein, 864 aa, Homo sapiens
MVRSGARPGQVLSSGRHTGPAKLTNGKKATYLRKIPRFNADSGYSIHSDSESQAETVHGLDGCASLLRDILRNEDSASSDNKKQIPNEASARSERDTSDLEQNWSLQDHYRMYSPIIYQALCEHVQTQMSLMNDLTSKNIPNGIPAVPCHAPSHSESQATPHSSYGLCTSTPVWSLQRPPCPPKVHSEVQTDGNSQFASQGKTVSATCTDVLRNSFNTSPGVPCSLPKTDISAIPTLQQLGLVNGILPQQGIHKETDLLKCIQTYLSLFRSHGKETHLDSQTHRSPTQSQPAFLATNEEKCAREQIREATSERKDLNIHVRDTKTVKDVQKAKNVNKTAEKVRIIKYLLGELKALVAEQEDSEIQRLITEMEACISVLPTVSGNTDIQVEIALAMQPLRSENAQLRRQLRILNQQLREQQKTQKPSGAVDCNLELFSLQSLNMSLQNQLEESLKSQELLQSKNEELLKVIENQKDENKKFSSIFKDKDQTILENKQQYDIEITRIKIELEEALVNVKSSQFKLETAEKENQILGITLRQRDAEVTRLRELTRTLQTSMAKLLSDLSVDSARCKPGNNLTKSLLNIHDKQLQHDPAPAHTSIMSYLNKLETNYSFTHSEPLSTIKNEETIEPDKTYENVLSSRGPQNSNTRGMEEASAPGIISALSKQDSDEGSETMALIEDEHNLDNTIYIPFARSTPEKKSPLSKRLSPQPQIRAATTQLVSNSGLAVSGKENKLCTPVICSSSTKEAEDAPEKLSRASDMKDTQLLKKIKEAIGKIPAATKEPEEQTACHGPSGCLSNSLQVKGNTVCDGSVFTSDLMSDWSISSFSTFTSRDEQDFRNGLAALDANIARLQKSLRTGLLEK

SEQ ID NO: 52265 - protein, 507 aa, Homo sapiens
PLANEKTTLSPAEPTENGERTPFTNEKTTPSSAEPTEHGERTPLANEITTPSRAEPTEHGERIANEKATPSPAKPTEHGETTVNEDTTPSSAEPTENGERTPLANENTTTSPTESTEHGERTANEKTTPSPAEPTEHGERTPSANEKTIPSPAKPTEHEEMTPSANENTTPSPVKPTEHGEKTTLANEKITLSPEGPTEHGAKTTSANEKITPSLAKPTEHGERTTSPNDKITSSAAESTEHRDRATSANVITPAPAEPIKHAKRTTLAHEKMTQVTEKSTEHPEKTTSTTEKTTRTPEKPTLYSEKTICTKGKNTPVPEKPTENLGNTTLTTETIKAPVKSTENPEKTAAVTKTIKPSVKVTGDKSLTTTSSHLNKTEVTHQVPTGSFTLITSRTKLSSITSEATGNESHPYLNKDGSQKGIHAGQMGENDSFPAWAIVIVVLVAVILLLVFLGLIFLVSYMMRTRRTLTQNTQYNDAEDEGGPNSYPVYLMEQQNLGMGQIPSPR

SEQ ID NO: 52266 - protein, 134 aa, Homo sapiens
MFGFHKPKMYRSIEGCCICRAKSSSSRFTDSKRYEKDFQSCFGLHETRSGDICNACVLLVKRWKKLPAGSKKNWNHVVDARAGPSLKTTLKPKKVKTLSGNRIKSNQISKLQKEFKRHNSDAHSTTSSASPAQS

SEQ ID NO: 52267 - protein, 246 aa, Homo sapiens
MYQGEFGLNMKLGYGKFSWPTGESYHGQFYRDHCHGLGTYMWPDGSSFTGTFYLSHREGYGTMYMKTRLFQGLYKADQRFGPGVETYPDGSQDVGLWFREQLIKLCTQIPSGFSLLRYPEFSSFITHSPARISLSEEEKTEWGLQEGQDPFFYDYKRFLLNDNLTLPPEMYVYSTNSDHLPMTSSFRKELDARIFLNEIPPFVEDGEPWFIINETPLLVKIQKQTYKFRLTATTTLSTFSWTVGPT

SEQ ID NO: 52268 - protein, 107 aa, Homo sapiens
MATSGAASAELVIGWCIFGLLLLAILAFCWIYVRKYQSRRESEVVSTITAIFSLAIALITSALLPVDIFLVSYMKNQNGTFKDWANANVSRQIEDTVLYGYYMPLFH

SEQ ID NO: 52269 - protein, 114 aa, Homo sapiens
MGLELYLDLLSQPCRAVYIFAKKNDIPFELRIVDLIKDGVSLCRPGWSAVAGSQLTATSAARNLVLCLLFLLGRSALKRCLCPGEPPQEGASLEGRGLHLDGECGHPALPDAQI

SEQ ID NO: 52270 - protein, 102 aa, Homo sapiens
MKNLLTEKCISSHNFHQKVIKQRMEKKVDSRYFKDGAVKKPYSAKTLSNKKSSASFGIRRELPSTSHLVQYRGTHTCTRQGRLRELRIRGSQCRGNDRHPVS

SEQ ID NO: 52271 - protein, 72 aa, Homo sapiens
MISFCPDCGKSIQAAFKFCPYCGNSLPVEEHVGSQTFVNPHVSSFQASLDSPAWRRYMCSLPAWHLQAQREG

SEQ ID NO: 52272 - protein, 825 aa, Homo sapiens
MASYPSGSGKPKAKYPFKKRASLQASTAAPEARGGLGAPPLQSARSLPGPAPCLKHFPLDLRTSMDGKCKEIAEELFTRSLAESELRSAPYEFPEESPIEQLEERRQRLERQISQDVKLEPDILLRAKQDFLKTDSDSDLQLYKEQGEGQGDRSLRERDVLEREFQRVTISGEEKCGVPFTDLLDAAKSVVRALFIREKYMALSLQSFCPTTRRYLQQLAEKPLETRTYEQGPDTPVSADAPVHPPALEQHPYEHCEPSTMPGDLGLGLRMVRGVVHVYTRREPDEHCSEVELPYPDLQEFVADVNVLMALIINGPIKSFCYRRLQYLSSKFQMHVLLNEMKELAAQKKVPHRDFYNIRKVDTHIHASSCMNQKHLLRFIKRAMKRHLEEIVHVEQGREQTLREVFESMNLTAYDLSVDTLDVHADRNTFHRFDKFNAKYNPIGESVLREIFIKTDNRVSGKYFAHIIKEVMSDLEESKYQNAELRLSIYGRSRDEWDKLARWAVMHRVHSPNVRWLVQVPRLFDVYRTKGQLANFQEMLENIFLPLFEATVHPASHPELHLFLEHVDGFDSVDDESKPENHVFNLESPLPEAWVEEDNPPYAYYLYYTFANMAMLNHLRRQRGFHTFVLRPHCGEAGPIHHLVSAFMLAENISHGLLLRKAPVLQYLYYLAQIGIAMSPLSNNSLFLSYHRNPLPEYLSRGLMVSLSTDDPLQFHFTKEPLMEEYSIATQVWKLSSCDMCELARNSVLMSGFSHKVKSHWLGPNYTKEGPEGNDIRRTNVPDIRVGYRYETLCQELALITQAVQSEMLETIPEEAGITMSPGPQ

SEQ ID NO: 52273 - protein, 363 aa, Homo sapiens
MDRPAAAAAAGCEGGGGPNPGPAGGRRPPRAAGGATAGSRQPSVETLDSPTGSHVEWCKQLIAATISSQISGSVTSENVSRDYKALRDGNKLAQMEEAPLFPGESIKAIVKDVMYICPFMGAVSGTLTVTDFKLYFKNVERDPHFILDVPLGVISRVEKIGAQSHGDNSCGIEIVCKDMRNLRLAYKQEEQSKLGIFENLNKHAFPLSNGQALFAFSYKEKFPINGWKVYDPVSEYKRQGLPNESWKISKINSNYEFCDTYPAIIVVPTSVKDDDLSKVAAFRAKGRVPVLSWIHPESQATITRCSQPLVGPNDKRCKEDEKYLQTIMDANAQSHKLIIFDARQNSVADTNKLWYQDTASLME

SEQ ID NO: 52274 - protein, 66 aa, Homo sapiens
MGTSSIFLCVLFLCGALGLTMSPARGRLRCYICGFTKPCHPVPTECRDDEACGISIGTSDQSEITE

SEQ ID NO: 52275 - protein, 53 aa, Homo sapiens
SSQARHVNHSATEALGELRERAPGQGTNGFQLLRHAVKRDLLPPRTPPYQEMK

SEQ ID NO: 52276 - protein, 42 aa, Homo sapiens
MALKRIQKAVQEAWCQHLLLVRPQEAYNHGRKQRRSRRVTWN

SEQ ID NO: 52277 - protein, 163 aa, Homo sapiens
  MOD_RES (1)..(1): Any amino acid
XPRGPSRPSGRRLLLEPRAPPAPRAPDAMKQLCLCAAASFASQDWGKSDERLLQAVENNDAPRVAALIARKGLVPTKLDPEGKSAFHLAAMRGAASCLEVMIAHGSNVMSADGAGYNALHLAAKYGHPQCLKQLLQRQGLTVLAQRLVAVSPAQRCSAPLRHI

SEQ ID NO: 52278 - protein, 305 aa, Homo sapiens
LTCQAHLETPDFQLFKNGVAQEPVHLDSPAIKHQFLLTGDTQGRYRCRSGLSTGWTQLSKLLELTGPKSLPAPWLSMAPVSWITPGLKTTAVCRGVLRGVTFLLRREGDHEFLEVPEAQEDVEATFPVHQPGNYSCSYRTDGEGALSEPSATVTIEELGPGPGSWPHGCLGLMVAKEFGQRMPKEWKAAPPPPVLMHHGESSQVLHPGNKVTLTCVAPLSGVDFQLRRGEKELLVPRSSTSPDRIFFHLNAVALGDGGHYTCRYRLHDNQNGWSGDSAPVELILSDETLPAPEFSPEPESGRALR

SEQ ID NO: 52279 - protein, 160 aa, Homo sapiens
  MOD_RES (1)..(1): Any amino acid
XWYRQCNIIPYSKDVDLGIFIQDYKSDIILAFQDAGLPLKHKFGKVEDSLELSFQGKDDVKLDVFFFYEETDHMWNGGTQAKTGKKFKYLFPKFTLCWTEFVDMKVHVPCETLEYIEANYGKEAESYILSMLFRTTFWSLADFPLTPENNSSLKNGNLNV

SEQ ID NO: 52280 - protein, 211 aa, Homo sapiens
MEEKEDKHQQHKIEDAAITYGDWWSHGKALEPVFLPPYDSKSTQRSDFQKPSCPLVLPVKHSKMQKPSCGIVPLASPGTSAELQNNFIEYISFIHQYDARKTPNEPLQGKRHGAFVQREIKPGSRPTVPKGAEVLLNTPGSRSSEQSKKTEKGNSAESRMISPGLCQQNSQELLEPKTHLSETDVRQAAKACPSTPESREKTSGATQTTVG

SEQ ID NO: 52281 - protein, 80 aa, Homo sapiens
MIESQEPVTFEDVAVDFTQEEWQQLNPAQKTLHRDVMLETYNHLVSVGCSGIKPDVIFKLEHGKDPWIIESELSRWIYPE

SEQ ID NO: 52282 - protein, 99 aa, Homo sapiens
MVQIVISSARAGGLAEWVLMELQGEIEARYSTGLAGNLLGDLHYTTEVRGLFFPCLMPQESKLHQGGAPRTQSEDCLRFVIQGLANLRCSLLVLPLPLQ

SEQ ID NO: 52283 - protein, 85 aa, Homo sapiens
MTEAGKLPLPLPPRLDWFVHTQMGQLAQDGVPEWFHGAISREDAENLLESQPLGSFLIRVSHSHVGYTLSYNVSAEPKAAAAISW

SEQ ID NO: 52284 - protein, 158 aa, Homo sapiens
MGSKAKKRVLLPTRPAPPTVEQILEDVRGAPAEDPVFTILAPEGRGSPVPGKSGPETPAARGRERSTPLTPDPTPWEPPQHGHDPPVPFRMMEDAEAPGEQLYQQSRAYVAANQRLQQAGNVLRQRCELLQRAGEDLEREVAQMKQAALPAAEAASSG

SEQ ID NO: 52285 - protein, 258 aa, Homo sapiens
MADAEVIILPKKHKKKKERKSLPEEDVAEIQHAEEFLIKPESKVAKLDTSQWPLLLKNFDKLNVRTTHYTPLACGSNPLKREIGDYIRTGFINLDKPSNPSSHEVVAWIRRILRVEKTGHSGTLDPKVTGCLIVCIERATRLVKSQQSAGKEYVGIVRLHNAIEGGTQLSRALETLTGALFQRPPLIAAVKRQLRVRTIYESKMIEYDPERRLGIFWDHMVTMHDVLDAQWLYDNHKDESYLRRVVYPLEKLLTSHKR

SEQ ID NO: 52286 - protein, 168 aa, Homo sapiens
EFDQGSDEENIQVLKIAKVFKNPKFSILTVNNDITLLKLATPARFSQTVSAVCLPSADDDFPAGTLCATTGWGKTKYNANKTPDKLQQAALPLLSNAECKKSWGRRITDVMICAGGDSGGPLVCQKDGAWTLVGIVSWGSRTCSTTTPAVYARVAKLIPWVQKILAAN

SEQ ID NO: 52287 - protein, 163 aa, Homo sapiens
MAPWPELGDAQPNPDKYLEGAAGQQPTAPDKSKETNKNNTEAPVTKIELLPSYSTATLIDEPTEVDDPWNLPTLQDSGIKWSERDTKGKILCFFQGIGRLILLLGFLYFFVCSLDILSSAFQLVGGKMAGQFFSNSSIMSNPLLGLVIGVLVTVLVQSSSTST

SEQ ID NO: 52288 - protein, 173 aa, Homo sapiens
  MOD_RES (1)..(1): Any amino acid
XAEVALANLKNKYENEKAMVTETMTKLRNELKALKEDAATFSSLRAMFATRCDEYVTQLDEMQRQLAAAEDEKKTLNTLLRMAIQQKLALTQRLEDLEFDHEQSRRSKGKLGKSKIGSPKVSGEASVTVPTIDTYLLHSQGPQTPNIRVSSGTQRKRYACSDLHSTVQWPDFS

SEQ ID NO: 52289 - protein, 47 aa, Homo sapiens
MDNRQNVTPALIFAITVATIGSFQFGYNTGVINAPETIIKEFINKTL

SEQ ID NO: 52290 - protein, 76 aa, Homo sapiens
MAGGKAGKDSGKAKAKAVSRSQRAGLQVLELAGNASKDLKVKRITPRHLQLAIRGDEELDSLIKATIAGGEKRRCS

SEQ ID NO: 52291 - protein, 130 aa, Homo sapiens
MSSKSRKRIMPDPVTEPPVTDPVYEALLYCNIPSVAERSMEGHAPHHFKLVSVHVFIRHGDRYPLYVIPKTKRPEIDCTLVANRKPYHPKLEAFISHMSKGSGASFESPLNSLPLYPNHPLCEMGELTQT

SEQ ID NO: 52292 - protein, 30 aa, Homo sapiens
MTEGSMGVTLEASAEADLKAGNSCPELVPS

SEQ ID NO: 52293 - protein, 540 aa, Homo sapiens
METPSQRRATRSGAQASSTPLSPTRITRLQEKEDLQELNDRLAVYIDRVRSLETENAGLRLRITESEEVVSREVSGIKAAYEAELGDARKTLDSVAKERARLQLELSKVREEFKELKARNTKKEGDLIAAQARLKDLEALLNSKEAALSTALSEKRTLEGELHDLRGQVAKLEAALGEAKKQLQDEMLRRVDAENRLQTMKEELDFQKNIYSEELRETKRRHETRLVEIDNGKQREFESRLADALQELRAQHEDQVEQYKKELEKTYSAKLDNARQSAERNSNLVGAAHEELQQSRIRIDSLSAQLSQLQKQLAAKEAKLRDLEDSLARERDTSRRLLAEKEREMAEMRARMQQQLDEYQELLDIKLALDMEIHAYRKLLEGEEERLRLSPSPTSQRSRGRASSHSSQTQGGGSVTKKRKLESTESRSSFSQHARTSGRVAVEEVDEEGKFVRLRNKSNEDQSMGNWQIKRQNGDDPLLTYRFPPKFTLKAGQVVTIWAAGAGATHSPPTDLVWKAQNTWGCGNSLRSGHAQAGALSDCG

SEQ ID NO: 52294 - protein, 144 aa, Homo sapiens
  MOD_RES (1)..(1): Any amino acid
XVEAYGEFLCMFEENYPETLKRLFVVKAPKLFPVAYNLIKPFLSEDTRKKIMVLGGRWISSWTPACASSTQQWGSPAPPDHTLVPGLCIGLLLHVNLLLLPGNVDTWLPGVQRPWHLGGFELDRSLETKASRSSGCRESQKGRT

SEQ ID NO: 52295 - protein, 281 aa, Homo sapiens
MALDYLLLLLLASAVAAMEETLMDTRTATAELGWTANPASGWEEVSGYDENLNTIRTYQVCNVFEPNQNNWLLTTFINRRGAHRIYTEMRFTVRDCSSLPNVPGSCKETFNLYYYETDSVIATKKSAFWSEAPYLKVDTIAADESFSQVDFGGRLMKVNTEVRSFGPLTRNGFYLAFQDYGACMSLLSVRVFFKKCPSIVQNFAVFPETMTGAESTSLVIARGTCIPNAEEVDVPIKLYCNGDGEWMVPIGRCTCKPGYEPENSVACKVSRPFWRILRQQD

SEQ ID NO: 52296 - protein, 984 aa, Homo sapiens
MAPGMSGRGGAALLCLSALLAHASGRSHPASPSPPGPQASPVLPVSYRLSHTRLAFFLREARPPSPAVANSSLQRSEPFVVFQTKELPVLNVSLGPFSTSQVVARELLQPSSTLDIPERLTVNWKVRAFIVRSHVPASQPVVQVLFYVAGRDWDDFGVTERLPCVRLHAFRDAREHPLLRIGSISLFRPPPRRTLQEHRLDSNLMIRLPDRPLKPGEVLSILLYLAPNSSSPSSPSVEHFTLRVKAKKGVTLLGTKSRSGQWHVTSELLTGAKHSTATVDVAWAQSTPLPPREGQGPLEILQLDFEMENFTSQSVKRRIMWHIDYRGHGALPDLERAVTELTVIQRDVQAILPLAMDTEIINTAILTGRTVAIPVKVIAIEVNGLVLDISALVECESDNEDIIKVSSSCDYVFVSGKESRGSMNARVTFRYDVLNAPLEMTVWVPKLPLHIELSDARLSQVKGWRVPILPDRRSVRESEDEDEEEEERRQSASRGCTLQYQHATLQVFTQFHTTSSEGTDQVVTMLGPDWLVEVTDLVSDFMRVGDPRVAHMVDSSTLAGLEPGTTPFKVVSPLTEAVLGETLLTVTEEKVSITQLQAQVVASLALSLRPSPGSSHTILATTAAQQTLSFLKQEALLSLWLSYSDGTTAPLSLYSPRDYGLLVSSLDEHVATVTQDRAFPLVVAEAEGSGELLRAELTIAESCQKTKRKSVLATTPVGLRVHFGRDEEDPTYDYPGPSQPGPGGGEDEARGAGPPGSALPAPEAPGPGTASPVVPPTEDFLPLPTGFLQVPRGLTDLEIGMYALLGVFCLAILVFLINCIVFVLRYRHKRIPPEGQTSMDHSHHWVFLGNGQPLRVQGELSPPAGNPLETVPAFCHGDHHSSGSSQTSVQSQVHGRGDGSSGGSARDQAEDPASSPTSKRKRVKFTTFTTLPSEELAYDSVPAGEEDEEEEEDLGWGCPDVAGPTRPTAPPDLHNYMRRIKEIA

SEQ ID NO: 52297 - protein, 49 aa, Homo sapiens
MDELFPLIFPADQWLHRTRDSAHLPGHQGPSSPASPPRACRKGLPGWLL

SEQ ID NO: 52298 - protein, 604 aa, Homo sapiens
MAHAVREKADIEAKSKLSLFQSRISLQKASVKLKARRSECNSKATHARNDYLLTLAAANAHQDRYYQTDLVNIMKALDGNVYDHLKDYLIAFSRTELETCQAVQNTFQFLLENSSKVVRDYNLQLFLQENAVFHKPQPFQFQPCDSDTSLKAAQLVDIELSPVSALRMTIAESRQLESETGTTEEHSLNKEARKWATRVAREHKNIVHQQRVLNDLECHGAAVSEQSRAELEQKIDEARENIRKAEIIKLKAEARLDLLKQIGVSVDTWLKSAMNQVMEELENERWARPPAVTSNGTLHSLNADTEREEGEEFEDNMDVFDDSSSSPSGTLRNYPLTCKVVYSYKASQPDELTIEEHEVLEVIEDGDMEDWVKARNKVGQVGYVPEKYLQFPTSNSLLSMLQSLAALDSRSHTSSNSTEAELVSGSLNGDASVCFVKALYDYEGQTDDELSFPEGAIIRILNKENQDDDGFWEGEFNGRIGVFPSVLVEELSASENGDTPWMREIQISPSPKPHASLPPLPLYDQPPSSPYPSPDKRSSLYFPRSPSANEKSLHAESPGFSQASRHTPETSYGKLRPVRAAPPPPTQNHRRPAEKIEDVEITLV

SEQ ID NO: 52299 - protein, 344 aa, Homo sapiens
MSPVRRCVYFSEDICDCFDLVSVFFRLWYLNGNYLVLLVSLVVILPLSLFRNLGYLGYTSGLSLLCMVFFLIVVICKKFQVPCPVEAALIINETINTTLTQPTALVPALSHNVTENDSCRPHYFIFNSQTVYAVPILIFSFVCHPAVLPIYEELKDRSRRRMMNVSKISFFAMFLMYLLAALFGYLTFYEHVESELLHTYSSILGTDILLLIVRLAVLMAVTLTVPVVIFPIRSSVTHLLCASKDFSWWRHSLITVSILAFTNLLVIFVPTIRDIFGFIGASAASMLIFILPSAFYIKLVKKEPMKSVQKIGALFFLLSGVLVMTGSMALIVLDWVHNAPGGGH

SEQ ID NO: 52300 - protein, 57 aa, Homo sapiens
MAALLMPRRNKGMRTRLGCLSHKSDSCSDFTAILPDKPNRALKRLSTEEATRWADSF

SEQ ID NO: 52301 - protein, 111 aa, Homo sapiens
MAQQRALPQSKETLLQSYNKRLKDDIKSIMDNFTEIIKTAKIEDETQVSRATQGEQDNYEMHVRAANIVRAGESLMKLVSDLKQFLILNDFPSVNEAIDQRNQQLRTLQEE

SEQ ID NO: 52302 - protein, 187 aa, Homo sapiens
  MOD_RES (1)..(1): Any amino acid
XNGKQIYVGRAQKKVERQTELKRKFEQMKQDRITRYQRMASVRAVPNPVINPYQPAPPSGYFMAAIPQTQNRAAYYPPSQIAQLRPSPRWTAQGARPHPFQNMPGAIRPAAPRPPFSTMRPASSQVPRVMSTQRVANTSTQTMGPRPAAAAAAATPAVRTVPQYKYAAGVRNPQQHLNAQPQVTMQQ

SEQ ID NO: 52303 - protein, 827 aa, Homo sapiens
SNDNQFLWELIGGPPKTRNMSACWQDGRFFAENETWVVDSCTTCTCKKFKTICHQITCPPATCASPSFVEGECCPSCLHSVDGEEGWSPWAEWTQCSVTCGSGTQQRGRSCDVTSNTCLGPSIQTRACSLSKCDTRIRQDGGWSHWSPWSSCSVTCGVGNITRIRLCNSPVPQMGGKNCKGSGRETKACQGAPCPIDGRWSPWSPWSACTVTCAGGIRERTRVCNSPEPQYGGKACVGDVQERQMCNKRSCPVDGCLSNPCFPGAQCSSFPDGSWSCGSCPVGFLGNGTHCEDLDECALVPDICFSTSKVPRCVNTQPGFHCLPCPPRYRGNQPVGVGLEAAKTEKQVCEPENPCKDKTHNCHKHAECIYLGHFSDPMYKCECQTGYAGDGLICGEDSDLDGWPNLNLVCATNATYHCIKDNCPHLPNSGQEDFDKDGIGDACDDDDDNDGVTDEKDNCQLLFNPRQADYDKDEVGDRCDNCPYVHNPAQIDTDNNGEGDACSVDIDGDDVFNERDNCPYVYNTDQRDTDGDGVGDHCDNCPLVHNPDQTDVDNDLVGDQCDNNEDIDDDGHQNNQDNCPYISNANQADHDRDGQGDACDPDDDNDGVPDDRDNCRLVFNPDQEDLDGDGRGDICKDDFDNDNIPDIDDVCPENNAISETDFRNFQMVPLDPKGTTQIDPNWVIRHQGKELVQTANSDPGIAVGFDEFGSVDFSGTFYVNTDRDDDYAGFVFGYQSSSRFYVVMWKQVTQTYWEDQPTRAYGYSGVSLKVVNSTTGTGEHLRNALWHTGNTPGQVRTLWHDPRNIGWKDYTAYRWHLTHRPKTGYIR

SEQ ID NO: 52304 - protein, 391 aa, Homo sapiens
MSFTTRSTFSTNYRSLGSVQAPSYGARPVSSAASVYAGAGGSGSRISVSRSTSFRGGMGSGGLATGIAGGLAGMGGIQNEKETMQSLNDRLASYLDRVRSLETENRRLESKIREHLEKKGPQVRDWSHYFKIIEDLRAQIFANTVDNARIVLQIDNARLAADDFRVKYETELAMRQSVENDIHGLRKVIDDTNITRLQLETEIEALKEELLFMKKNHEEEVKGLQAQIASSGLTVEVDAPKSQDLAKIMADIRAQYDELARKNREELDKYWSQQIEESTTVVTTQSAEVGAAETTLTELRRTVQSLEIDLDSMRNLKASLENSLREVEARYALQMEQLNGILLHLESELAQTRAEGQRQAQEYEALLNIKVKLEAEIATYRRLLEDGEDFK

SEQ ID NO: 52305 - protein, 141 aa, Homo sapiens
  MOD_RES (1)..(1): Any amino acid
XEVLARHGSKGTKDTPLEHHLYVVSYEAAGEIVRLTTPGFSHSCSMSQNFDMFVSHYSSVSTPPCVHVYKLSGPDDDPLHKQPRFWASMMEAASCPPDYVPPEIFHFHTRSDVRLYGMIYKPHALQPGKKHPTVLFVYGGP

SEQ ID NO: 52306 - protein, 151 aa, Homo sapiens
KSPVWPTFPFHREGSRVWERGGVPPRDLPSPLPTKRTRTYSATARASAGPVFKGVCKQFSRSQGHGFITPENGSEDIFVHVSEPRPNSSEVTTHRCGPRSRLMSCLWEENLPASLHRVLRRHHAVANSPGVGKDLKVVPTLHTEDGQRRDI

SEQ ID NO: 52307 - protein, 665 aa, Homo sapiens
  MOD_RES (1)..(1): Any amino acid
XDFLLLVLKDIVSQRPGLQVILMSATLNAELFSDYFNSCPVITIPGRTFPVDQFFLEDAIAVTRYVLQDGSPYMRSMKQISKEKLKARRNRTAFEEVEEDLRLSLHLQDQDSVKDAVPDQQLDFKQLLARYKGVSKSVIKTMSIMDFEKVNLELIEALLEWIVDGKHSYPPGAILVFLPGLAEIKMLYEQLQSNSLFNNRRSNRCVIHPLHSSLSSEEQQAVFVKPPAGVTKIIISTNIAETSITIDDVVYVIDSGKMKEKRYDASKGMESLEDTFVSQANALQRKGRAGRVASGVCFHLFTSHHYNHQLLKQQLPEIQRVPLEQLCLRIKILEMFSAHNLQSVFSRLIEPPHTDSLRASKIRLRDLGALTPDERLTPLGYHLASLPVDVRIGKLMLFGSIFRCLDPALTIAASLAFKSPFVSPWDKKEEANQKKLEFAFANSDYLALLQAYKGWQLSTKEGVRASYNYCRQNFLSGRVLQEMASLKRQFTELLSDIGFAREGLRAREIEKRAQGGDGVLDATGEEANSNAENPKLISAMLCAALYPNVVQVRHFDSPYLLYHEKIKTSRVFIRDCSMVSVYPLVLFGGGQVNVQLQRGEFVVSLDDGWIRFVAASHQVAELVKELRCELDQLLQDKIKNPSIDLCTCPRGSRIISTIVKLVTTQ

SEQ ID NO: 52308 - protein, 567 aa, Homo sapiens
MDLYSTPAAALDRFVARRLQPRKEFVEKARRALGALAAALRERGGRLGAAAPRVLKTVKGGSSGRGTALKGGCDSELVIFLDCFKSYVDQRARRAEILSEMRASLESWWQNPVPGLRLTFPEQSVPGALQFRLTSVDLEDWMDVSLVPAFNVLGQAGSGVKPKPQVYSTLLNSGCQGGEHAACFTELRRNFVNIRPAKLKNLILLVKHWYHQVCLQGLWKETLPPVYALELLTIFAWEQGCKKDAFSLAEGLRTVLGLIQQHQHLCVFWTVNYGFEDPAVGQFLQRQLKRPRPVILDPADPTWDLGNGAAWHWDLLAQEAASCYDHPCFLRGMGDPVQSWKGPGLPRAGCSGLGHPIQLDPNQKTPENSKSLNAVYPRAGSKPPSCPAPGPTGAASIVPSVPGMALDLSQIPTKELDRFIQDHLKPSPQFQEQVKKAIDIILRCLHENCVHKASRVSKGGSFGRGTDLRDGCDVELIIFLNCFTDYKDQGPRRAEILDEMRAQLESWWQDQVPSLSLQFPEQNVPEALQFQLVSTALKSWTDVSLLPAFDAVGLLEAPHQWLPGGRA

SEQ ID NO: 52309 - protein, 445 aa, Homo sapiens
MVLADLGRKITSALRSLSNATIINEELVDPGVKAWTPTKGKQNVIMFVGLQGSGKTTTCSKLAYYYQRKGWKTCLICADTFRAGAFDQLKQNATKARIPFYGSYTEMDPVIIASEGVEKFKNENFEIIIVDTSGRHKQEDSLFEEMLQVANAIQPDNIVYVMDASIGQACEAQAKAFKDKVDVASVIVTKLDGHAKGGGALSAVAATKSPIIFIGTGEHIDDFEPFKTQPFISKLLGMGDIEGLIDKVNELKLDDNEALIEKLKHGQFTLRDMYEQFQNIMKMGPFSQILGMIPGFGTDFMSKGNEQESMARLKKLMTIMDSMNDQELDSTDGAKVFSKQPGRIQRVARGSGVSTRDVQELLTQYTKFAQMVKKMGGIKGLFKGGDMSKNVSQSQMAKLNQQMAKMMDPRVLHHMGGMAGLQSMMRQFQQGAAGNMKGMMGFNNM

SEQ ID NO: 52310 - protein, 1158 aa, Homo sapiens
  MOD_RES (1)..(1): Any amino acid
XLRYQQPGPGSSPSSFLLKQIEFLKGQLPEAPVIGKQTPSLPPSLPGLRPRFPVLLASSTRGRQVDIRGVPRGVHLRSQGLQRGFQHPSPRGRSLPQRGVDCLSSHFQELSIYQDQEQRILKFLEELGEGKATTAHDLSGKLGTPKKEINRVLYSLAKKGKLQKEAGTPPLWKIAVSTQAWNQHSGVVRPDGHSQGAPNSDPSLEPEDRNSTSVSEDLLEPFIAVSAQAWNQHSGVVRPDSHSQGSPNSDPGLEPEDSNSTSALEDPLEFLDMAEIKEKICDYLFNVSDSSALNLAKNIGLTKARDINAVLIDMERQGDVYRQGTTPPIWHLTDKKRERMQIKRNTNSVPETAPAAIPETKRNAEFLTCNIPTSNASNNMVTTEKVENGQEPVIKLENRQEARPEPARLKPPVHYNGPSKAGYVDFENGQWATDDIPDDLNSIRAAPGEFRAIMEMPSFYSHGLPRCSPYKKLTECQLKNPISGLLEYAQFASQTCEFNMIEQSGPPHEPRFKFQVVINGREFPPAEAGSKKVAKQDAAMKAMTILLEEAKAKDSGKSEESSHYSTEKESEKTAESQTPTPSATSFFSGKSPVTTLLECMHKLGNSCEFRLLSKEGPAHEPKFQYCVAVGAQTFPSVSAPSKKVAKQMAAEEAMKALHGEATNSMASDNQVRKIGELVRYLNTNPVGGLLEYARSHGFAAEFKLVDQSGPPHEPKFVYQAKVGGRWFPAVCAHSKKQGKQEAADAALRVLIGENEKAERMGFTELPLTGSTFHDQIAMLSHRCFNTLTNSFQPSLLGRKILAAIIMKKDSEDMGVVVSLGTGNRCVKGDSLSLKGETVNDCHAEIISRRGFIRFLYSELMKYNSQTAKDSIFEPAKGGEKLQIKKTVSFHLYISTAPCGDGALFDKSCSDRAMESTESRHYPVFENPKQGKLRTKVENGEGTIPVESSDIVPTWDGIRLGERLRTMSCSDKILRWNVLGLQGALLTHFLQPIYLKSVTLGYLFSQGHLTRAICCRVTRDGSAFEDGLRHPFIVNHPKVGRVSIYDSKRQSGKTKETSVNWCLADGYDLEILDGTRGTVDGPRNELSRVSKKNIFLLFKKLCSFRYRRDLLRLSYGEAKKAARDYETAKNYFKKGLKDMGYGNWISKPQEEKNFYLCPV

SEQ ID NO: 52311 - protein, 194 aa, Homo sapiens
MEESGYESVLCVKPDVHVYRIPPRATNRGYRAAEWQLDQPSWSGRLRITAKGQMAYIKLEDRTSGELFAQAPVDQFPGTAVESVTDSSRYFVIRIEDGNGRRAFIGIGFGDRGDAFDFNVALQDHFKWVKQQCEFAKQAQNPDQGPKLDLGFKEGQTIKLNIALASWPLREKCKSNPVDWLGCDSFSRLEETNI

SEQ ID NO: 52312 - protein, 397 aa, Homo sapiens [sequence omitted]

SEQ ID NO: 52313 - protein, 158 aa, Homo sapiens
MCNTPTYCDLGKAAKDVFNKGYGFGMVKIDLKTKSCSGVEFSTSGHAYTDTGKASGNLETKYKVCNYGLTFTQKWNTDNTLGTEISWENKLAEGLKLTLDTIFVPNTGKKSGKLKASYKRDCFSVGSNVDIDFSGPTIYGWAVLAFEGWLAGYQMSFD

SEQ ID NO: 52314 - protein, 145 aa, Homo sapiens
MASCRDFTAHTGYEVLLQRLLDGRKMCKDMEELLRQRAQAEERYGKELVQIARKAGGQTEINSLRASFDSLKQQMENVGSSHIQLALTLREELRSLEEFRERQKEQRKKYEAVMDRVQKSKLSLYKKAMESKKTYEQKCRDADDA

SEQ ID NO: 52315 - protein, 133 aa, Homo sapiens
MRMESRRQATVSWDSGGSDEAPPKPSRPGYPSPRSSEGFYPSPQHMVQTNHYQVSGYPGSHGITAMAGSIYPGQASLLDQTDSWNHRPQEIAMWQPNVEDSTVLDLRGIGQVLPTHLMEERLIRQQQEMEEDQ

SEQ ID NO: 52316 - protein, 457 aa, Homo sapiens
MEPYLPAHLTAFVQGFYLCFLKKSMVVFFGPRWASWNIGVFICIRCAGIHRNLGVHISRVKSVNLDQWTAEQIQCMQDMGNTKARLLYEANLPENFRRPQTDQAVEFFIRDKYEKKKYYDKNAIAITNISSSDAPLQPLVSSPSLQAAVDKNKLEKEKEKKKEEKKREKEPEKPAKPLTAEKLQKKDQQLEPKKSTSPKKAAEPTVDLLGLDGPAVAPVTNGNTTVPPLNDDLDIFGPMISNPLPATVMPPAQGTPSAPAAATLSTVTSGDLDLFTEQTTKSEEVAKKQLSKDSILSLYGTGTIQQQSTPGVFMGPTNIPFTSQAPAAFQGFPSMGVPVPAAPGLIGNVMGQSPSMMVGMPMPNGFMGNAQTGVMPLPQNVVGPQGGMVGQMGAPQSKFGLPQAQQPQWSLSQMNQQMAGMSISSATPTAGFGQPSSTTAGWSGSSSGQTLSTQLWK

SEQ ID NO: 52317 - protein, 27 aa, Homo sapiens
PNYNPFTWMFFLVSCPNYTYELEFLHF

SEQ ID NO: 52318 - protein, 174 aa, Homo sapiens
  MOD_RES (1)..(1): Any amino acid
XKGRIVTFLTCKTFDPEDTSQEIGMVANGTKCGDNKVCINAECVDIEKAYKSTNCSSKCKGHAVCDHELQCQCEEGWIPPDCDDSSVVFHFSIVVGVLFPMAVIFVVVAMVIRHQSSREKQKKDQRPLSTTGTRPHKQKRKPQMVKAVQPQEVNYIVWAVITMAPLCVSLTLLS

SEQ ID NO: 52319 - protein, 128 aa, Homo sapiens
MQEITKHFVVCHVDAPGQQVGASQFPQGYQFPSMEQLAAMLPSVVQHFGFKYVIGIGVGAGAYVLAKFALIFPDLVEGLVLVNIDPNGKGWIDWAATKLSGLTSTLPDTVLSHLFSQEELVNNTELVQ

SEQ ID NO: 52320 - protein, 3953 aa, Homo sapiens
MPGERPRGAPPPTMTGDLQPRQVASSPGHPSQPPLEDNTPATRTTKGAREAGGQAQAMELPEAQPRQARDGELKPPSLRGQAPSSTPGKRGSPQTPPGRSPLQAPSRLAGRAEGSPPQRYILGIASSRTKPTLDETPENPQLEAAQLPEVDTPQGPGTGAPLRPGLPRTEAQPAAEELGFHRCFQEPPSSFTSTNYTSPSATPRPPAPGPPQSRGTSPLQPGSYPEYQASGADSWPPAAENSFPGANFGVPPAEPEPIPKGSRPGGSPRGVSFQFPFPALHGASTKPFPADVAGHAFTNGPLVFAFHQPQGAWPEEAVGTGPAYPLPTQPAPSPLPCYQGQPGGLNRHSDLSGALSSPGAAHSAPRPFSDSLHKSLTKILPERPPSAQDGLGSTRGPPSSLPQRHFPGQAYRASGVDTSPGPPDTELAAPGPPPARLPQLWDPTAAPYPTPPGGPLAATRSMFFNGQPSPGQRLCLPQSAPLPWPQVLPTARPSPHGMEMLSRLPFPAGGPEWQGGSQGALGTAGKTPGPREKLPAVRSSQGGSPALFTYNGMTDPGAQPLFFGVAQPQVSPHGTPSLPPPRVVGASPSESPLPSPATNTAGSTCSSLSPMSSSPANPSSEESQLPGPLGPSAFFHPPTHPQETGSPFPSPEPPHSLPTHYQPEPAKAFPFPADGLGAEGAFQCLEETPFPHEGPEVGRGGLQGFPRAPPPYPTHHFSLSSASLDQLDVLLTCRQCDRNYSSLAAFLAHRQFCGLLLARAKDGHQRSPGPPGLPSPPAAPRVPADAHAGLLSHAKTFLLAGDAQAEGKDDPLRTGFLPSLAATPFPLPASDLDMEDDAKLDSLITEALNGMEYQSDNPEIDSSFIDVFADEEPSGPRGPSSGHPLKSKAGVTPESKAPPPLPAATPDPQTPRPGDRGCPARGRPKTRSLGLAPTEADAPSQGRQQRRGKQLKLFRKDLDSGGAAEGSGSGGGGRASGLRPRRNDGLGERPPPRPRRPRTQAPGSRADPAPRVPRAAALPEETRSSRRRRLPPRKDPRKRKARGGAWGKELILKIVQQKNRRHRRLGRRAGRCGSLAAGRPRPGAEDRRLREYDFASESEEDEQPPPRGPGFRGRRGRGEKRKEVELTQGPREDEPQKPRKAARQEAGGDGAPANPEEPGGSRPGPGRSPQARGPSRSLETGAAAREGGPKCADRPSVAPKDPLQVPTNTETSEETRPSLDFPQEAKEPETAEESAPDSTEFTEALRSPPAACAGEMGASPGLLIPEQPPPSRHDTGTPKPSGSLANTAPHGSSPTPGVGSLLGGPGGTQAPVSHNSKDPPARQPGEFLAPVANPSSTACPKPSVLSSKISSFGCDPAGFNRDPLGVPVAKKGPQPYSSPHSELFLGPKDLAGCFLEELHPKPSARDAPPASSSCLCQDGEDAGSLEPQLPRSPPGTAETEPGRAASPPTLESSSLFPDLPVDRFDPPLYGSLSANRDSGLPFACADPPQKTVPSDPPYPSFLLLEEVSPMLPSHFPDLSGGKVLSKTCPPERTVVPGAAPSLPGKGSGCSVALMSHLSEDELEIQKLVTELESQLQRSKDTRGAPRELAEAESVGRVELGTGTEPPSQRRTCQATVPHEDTFSAADLTRVGESTAHREGAESAVATVEAVQGRPGGTWPCPASFHPGHAALLPCAQEDLVSGAPFSPRGANFHFQPVQKAGASKTGLCQAEGDSRPPQDVCLPEPSKQPGPQLDAGSLAKCSPDQELSFPKNKEAASSQESEDSLRLLPCEQRGGFLPEPGTADQPHRGAPAPEAFGSPAVHLAPDLAFQGDGAPPLDATWPFGASPSHAAQGHSAGRAGGHLHPTAGRPGFEGNEFAPAGASSLTAPRGREAWLVPVPSPACVSNTHPSRRSQDPALSPPIRQLQLPGPGVAKSKDGILGLQELTPAAQSPPRVNPSGLEGGTVEGGKVACGPAQGSPGGVQVTTLPAVAGHQLGLEADGHWGLLGQAEKTQGQGTANQLQPENGVSPGGTDNHASVNASPKTALTGPTEGAVLLEKCKGSRAAMSLQEEAEPTPSPPSPNRESLALALTAAHSRSGSEGRTPERASSPGLNKPLLATGDSPAPSVGDLAACAPSPTSAAHMPCSLGPLPREDPLTSPSRAQGGLGGQLPASPSCRDPPGPQQLLACSPAWAPLEEADGVQATTDTGAEDSPVAPPSLTTSPCDPKEALAGCLLQGEGSPLEDPSSWPPGSVSAVTCTHSGDTPKDSTLRIPEDSRKEKLWESPGRATSPPLAGAVSPSVAVRATGLSSTPTGDEAQAGRGLPGPDPQSRGAPPHTNPDRMPRGHSSYSPSNTARLGHREGQAVTAVPTEPPTLQGAGPDSPACLEGEMGTSSKEPEDPGTPETGRSGATKMPRVTCPSTGLGLGRTTAPSSTASDFQSDSPQSHRNASHQTPQGDPLGPQDLKQRSRGYKKKPASTENGQWKGQAPHGPVTCEVCAASFRSGPGLSRHKARKHRPHPGAPAEPSPAALPAQQPLEPLAQKCQPPRKKSHRVSGKERPNHSRGDPSHVTQPPPAQGSKEVLRAPGSPHSQQLHPPSPTEHEVDVKTPASKPRPDQAREDELHPKQAEKREGRRWRREPTVDSPSHSEGKSNKKRGKLRGRRLREESILPVSADVISDGRGSRPSPAMASYAASPSHCLSVEGGPEADGEQPPRLATLGPGVMEGAAETDQEALCAGETGAQKPPGDRMLCPGRMDGAALGEQPTGQKGASARGFWGPRETKALGVCKESGSEPAEDSSRAHSRSEEGVWEENTPPLGPLGFPETSSSPADSTTSSCLQGLPDNPDTQGGVQGPEGPTPDASGSSAKDPPSLFDDEVSFSQLFPPGGRLTRKRNPHVYGKRCEKPVLPLPTQPSFEEGGDPTLGPARLPTDLSDSSSLCLCHEDPWEDEDPAGLPESFLLDGFLNSRVPGIDPWAPGLSLWALEPSREAGAEKLPSHCPEDDRPEAIPELHMVPAAWRGLEMPAPADDSSSSLGDVSPEPPSLERERCDGGLPGNTHLLPLRATDFEVLSTKFEMQDLCFLGPFEDPVGLPGPSFLDFEGTASSQGPQSRRTEEAAGAGRAQGRGRPAKGRRASYKCKVCFQRFRSLGELDLHKLAHTPAPPPTCYMCVERRFGSRELLRGHLQERHAQSKAGPWACGMCLKEVADVWMYNEHLREHAVRFARRGQARRSLGDLPGGLEGSSAVAHLLNSITEPAPKHHRGKRSAGKAAGSPGDPWGQEGEAKKDSPGERAKPRARSTPSNPDGAATPDSASATALADAGSPGPPRTTPSPSPDPWAGGEPLLQATPVHEACKDPSRDCHHCGKRFPKPFKLQRHLAVHSPQRVYLCPRCPRVYPEHGELLAHLGGAHGLLERPELQHTPLYACELCATVMRIIKKSFACSSCNYTFAKKEQFDRHMNKHLRGGRQPFAFRGVRRPGAPGQKARALEGTLPSKRRRVAMPGSAPGPGEDRPPPRGSSPILSEGSLPALLHLCSEVAPSTTKGWPETLERPVDPVTHPIRGCELPSNHQECPPPSLSPFPAALADGRGDCALDGALERPENEASPGSPGPLLQQALPLGASLPRPGARGQDAEGKRAPLVFSGKRRAPGARGRCAPDHFQEDHLLQKEKEVSSSHMVSEGGPRGAFHKGSATKPAGCQSSSKDRSAASTPSKALKFPVHPRKAVGSLAPGELARGTENGMKPATPKAKPGPSSQGSGSPRPGTKTGGGSQPQPASGQLQSETATTPAKPSFPSRSPAPERLPARAQAKSCTKGPREAGEQGPHGSLGPKEKGESSTKRKKGQVPGPARSESVGSFGRAPSAPDKPPRTPRKQATPSRVLPTKPKPNSQNKPRPPPSEQRKAEPGHTQRKDRLGKAFPQGRPLLRPPKRGTAVHGAEPAEPHTHRTAEAQSDLLSQLFGQRLTGFKIPLKKDASE

SEQ ID NO: 52321 - protein, 10 aa, Homo sapiens
MSNNGADLTF

SEQ ID NO: 52322 - protein, 74 aa, Homo sapiens
  MOD_RES (1)..(1): Any amino acid
XKPAVEAYGEFLCMFEENYPETLKRLFVVKAPKLFPVAYNLIKPFLSEDTRKKIMVLGGGSLCQMERMLVLGFS

SEQ ID NO: 52323 - protein, 134 aa, Homo sapiens
  MOD_RES (1)..(1): Any amino acid
XDGGVLREVVKHPSVESVVQCEIDEVSAGVEPGLSPGSPSGQLCPEMAAHPRARQDVIQVSKKFLPGMAIGYSSSKLTLHVGDGFEFMKQNQDAFDVIITDSSDPMGPAESLFKESYYQLMKTALKEDGVLCCQ

SEQ ID NO: 52324 - protein, 320 aa, Homo sapiens
MRILHVNGFNGDEKATKVQDIKNNLKEAIETIVAAMSNLVPPVELANPENQFRVDYILSVMNVPDFDFPPEFYEHAKALWEDEGVRACYERSNEYQLIDCAQYFLDKIDVIKQADYVPSDQDLLRCRVLTSGIFETKFQVDKVNFHMFDVGGQRDERRKWIQCFNDVTAIIFVVASSSYNMVIREDNQTNRLQEALNLFKSIWNNRWLRTISVILFLNKQDLLAEKVLAGKSKIEDYFPEFARYTTPEDATPEPGEDPRVTRAKYFIRDEFLRISTASGDGRHYCYPHFTCAVDTENIRRVFNDCRDIIQRMHLRQYELL

SEQ ID NO: 52325 - protein, 47 aa, Homo sapiens
MGCRHSRLSSCKPPKKAIPPSLLQPPLHCLLKNRGWCGGLQVLTQAS

SEQ ID NO: 52326 - protein, 30 aa, Homo sapiens
MEEIKPASASCVSKEKPSKVSDLISRFEGG

SEQ ID NO: 52327 - protein, 140 aa, Homo sapiens
MEAAVKEEISLEDEAVDKNIFRDCNKIAFYRRQKQWLSKKSTYQALLDSVTTDEDSTRFQIINEASKVPLLAEIYGIEGNIFRLKINEETPLKPRFEVPDVLTSKPSTVRLISCSGDTGSLILADGKGDLKCHITANPFK

SEQ ID NO: 52328 - protein, 52 aa, Homo sapiens
GGRAKKVREPTAVNSFYREASLPSVWASLRRREMVRSGARPGQDLFKKNTTF

SEQ ID NO: 52329 - protein, 264 aa, Homo sapiens
  MOD_RES (1)..(1): Any amino acid
XCDMKSSFSKYWKPRIPLDVGHRGAGNSTTTAQLAKVQENTIASLRNAASHGAAFVEFDVHLSKDFVPVVYHDLTCCLTMKKNLWFRRKIPFQKISHFLLLRWVRQKQNKYPILFLTQGKSEIYPELMDLRSRTTPIAMSFAQFENLLGINVHTEDLLRNPSYIQEAKAKGLVIFCWGDDTNDPENRRKLKELGVNGLIYDRIYDWMPEQPNIFQVEQLERLKQELPELKSCLCPTVSRFVPSSLCGESDIHVDANGIDNVENA

SEQ ID NO: 52330 - protein, 186 aa, Homo sapiens
MVELMFPLLLLLLPFLLYMAAPQIRKMLSSGVCTSTVQLPGKVVVVTGANTGIGKETAKELAQREEKHLHVLINNAGVMMCPYSKTADGFEMHIGVNHLGHFLLTHLLLEKLKESAPSRIVNVSSLAHHLGRIHFHNLQGEKFYNAGLAYCHSKLANILFTQELARRLKGSGVTTYSVHPGTVQSE

SEQ ID NO: 52331 - protein, 342 aa, Homo sapiens
MAERQEEQRGSPPLRAEGKADAEVRLVIAEKALKCEEHDVSLPLSEHNEPWFMRLNSTGEVPVLIHGENIICEATQIIDYLEQTFLDERTPRLMPDKESMYYPRVQHYRELLDSLPMDAYTHGCILHPELTVDSMIPAYATTRIRSQIGNTESELKKLAEENPDLQEAYIAKQKRLKSKLLDHDNVKYLKKILDELEKVLDQVETELQRRNEETPEEGQQPWLCGESFTLADVSLAVTLHRLKFLGFARRNWGNGKRPNLETYYERVLKRKTFNKVLGHVNNILISAVLPTAFRVAKKRAPKVLGTTLVVGLLAGVGYFAFMLFRKRLGSMILAFRPRPNYF

SEQ ID NO: 52332 - protein, 164 aa, Homo sapiens
MASDTPESLMALCTDFCLRNLDGTLGYLLDKETLRLHPDIFLPSEICDRLVNEYVELVNAACNFEPHESFFSLFSDPRSTRLTRIHLREDLVQDQDLEAIRKQDLVELYLTNCEKLSAKSLQTLRSFSHTLVSLSLFGCTNIFYEEENPGGCEDEYLVNPTCQV

SEQ ID NO: 52333 - protein, 87 aa, Homo sapiens
MSKSFQQSSLSRDSQGHGRDLSAAGIGLLAAATQSLSMPASLGRMNQGTARLASLMNLGMSSSLNQQGAHSALSSASTSSHNLQSIF

SEQ ID NO: 52334 - protein, 141 aa, Homo sapiens
ALPEVRHPLCLQQHPQDSLPTASVILCFHDEAWSTLLRTVHSILDTVPRAFLKEIILVDDLSQQGSHGFPPGSSGTTQVCSQRICGQAGGGEVTQEQQEAGCHQGPDAGGHQSHRGCARLHGCPLRVPPRLAGAPPQQNSW

SEQ ID NO: 52335 - protein, 50 aa, Homo sapiens
MSSSPVKRQRMESALDQLKQFTTVVADTGDFHVEMGFHRVSQDGLDLLTS

SEQ ID NO: 52336 - protein, 78 aa, Homo sapiens
MDLRVGQRPPVEPPPEPTLLALQRPQRLHHHLFLAGLQQQRSVEPMRLSMDTPMPELQVGPQEQELRQLLHKDKSKRS

SEQ ID NO: 52337 - protein, 137 aa, Homo sapiens
  MOD_RES (1)..(1): Any amino acid
XSYYEISVDDGPWEKQKSSGLNLCTGTGSKAWSFNINRVATQAVEDVLNIVTNEYNESLLYSPEEPKILFSIREPIANRVFSSSRQRCFSSKVCVRSRCWDACMVVDGGTSFEFNDGAIASMMINKEDELRTVLLEQ

SEQ ID NO: 52338 - protein, 93 aa, Homo sapiens
SESDVPIDVETVTSTPMPLYDNQKARSVMNECERHVIFARTDADAPPPPEDWEEHVNRVSLCHPDCSAVARSQLTTSLDLQDSVSLWTTTLLL

SEQ ID NO: 52339 - protein, 108 aa, Homo sapiens
MQLFVRAQELHTFEVTGQETVAQIKAHVASLEGIAPEDQVVLLAGAPLEDEATLGQCGVEALTTLEVAGRMLGGKVHGSLARAGKVRGQTPKVAKQEKKKKKTGRAKR

SEQ ID NO: 52340 - protein, 479 aa, Homo sapiens
MDSPSLRELQQPLLEGTECETPAQKPGRHELGSPLREIAFAESLRGLQFLSPPLPSVSAGLGEPRPPDVEHPPRQQQQFSSLDDKPQFPGASAEFIDKLEFIQPNVISGIPIYRVMDRQGQIINPSEDPHLPKEKVLKLYKSMTLLNTMDRILYESQRQGRISFYMTNYGEEGTHVGSAAALDNTDLVFGQYREAGVLMYRDYPLELFMAQCYGNISDLGKGRQMPVHYGCKERHFVTISSPLATQIPQAVGAAYAAKRANANRVVICYFGEGAASEGDAHAGFNFAATLECPIIFFCRNNGYAISTPTSEQYRGDGIAARGPGYGIMSIRVDGNDVFAVYNATKEARRRAVAENQPFLIEAMTYRIGHHSTSDDSSAYRSVDEVNYWDKQDHPISRLRHYLLSQGWWDEEQEKAWRKQSRRKVMEAFEQAERKPKPNPNLLFSDVYQEMPAQLRKQQESLARHLQTYGEHYPLDHFDK

SEQ ID NO: 52341 - protein, 109 aa, Homo sapiens
MAQPGPASQPDGEGKGSIFGGLSERGNWDVFRLHFNDHLLHLVSGKKTLFFHNPTLLLHTEARYRELVVLNRSVSLQQRVAELEKINAEFLRAQQQLEQEFNQKRAKFK

SEQ ID NO: 52342 - protein, 45 aa, Homo sapiens
MIHTNLKKKFSCCVLVFLLFAVICVWKEKKKGSYYDSFKLQTKEF

SEQ ID NO: 52343 - protein, 71 aa, Homo sapiens
  MOD_RES (1)..(1): Any amino acid
XVNPFPVPRDLPQDPVELAMFGLRHMEPDLSARVTIYQAPCAAPDAARLPPQRFLCPKTQQVQQIPPSPTS

SEQ ID NO: 52344 - protein, 347 aa, Homo sapiens
MKRSLNENSARSTAGCLPVPLFNQKKRNRQPLTSNPLKDDSDWAWEAVNPELAPVMKTVDTGQIPHSVSRPLRSQDSVFNSIQSNTGRSQGGWSYRDGNKNTSLKTWNKNDFKPQCKRTNLVANDGKNSCPVSSGAQQQKQLRIPEPPNLSRNKETELLRQTHSSKISGCTMRGLDKNSALQTLKPNFQQNQYKKQMLDDIPEDNTLKETSLYQLQFKEKASSLRIISAVIESMKYWREHAQKTVLLFEVLAVLDSAVTPGPYYSKTFLMRDGKNTLPCVFYEIDRELPRLIRGRVHRCVGNYDQKKNIFQCVSVRPASVSEQKTFQAFVKIADVEMQYYINVMNET

SEQ ID NO: 52345 - protein, 190 aa, Homo sapiens
MTDTRRRVKVYTLNEDRQWDDRGTGHVSSGYVERLKGMSLLVRAESDGSLLLESKINPNTAYQKQQEDEKFLTDLFAQLTDEATDEEKRQELVNFLKEFCAFSQTLQPQNRDAFFKTLSNMGILPALEVILGMDDTQVRSAATDIFSYLVEYNPSMVREFVMQEAQQNDDVSKKLTEQKITSKDILLINL

SEQ ID NO: 52346 - protein, 56 aa, Homo sapiens
MGSMAPGDTMAAGSMAAGFFQPFMSPRFPGGPRPTLRMPSQPPAGLPGSQPLLPGA

SEQ ID NO: 52347 - protein, 110 aa, Homo sapiens
MWMGLIQLVEGVKRKDQGFLEKEFYHKTNIKMRCEFLACWPAFTVLGEAWRDQVDWSRLLRDTGLVKMSRKPRASSPLSNNHPPTPKRFPRQPGREKGPIKEVPGTKGSP

SEQ ID NO: 52348 - protein, 203 aa, Homo sapiens
MADMQNLVERLERAVGRLEAVSHTSDMHRGYADSPSKAGAAPYVQAFDSLLAGPVAEYLKISKEIGGDVQKHAEMVHTGLKLERALLVTASQCQQPAENKLSDLLAPISEQIKEVITFREKNRGSKLFNHLSAVSESIQALGWVAMAPKPGPYVKEMNDAAMFYTNRVLKEYKDVDKKHVDWVKAYLSIWTELQAYIKEFHTT

SEQ ID NO: 52349 - protein, 117 aa, Homo sapiens
MVWKVAVFLSVALGIGAVPIDDPEDGGKHWVVIVAGSNGWYNYRHQADACHAYQIIHRNGIPDEQIVVMMYDDIAYSEDNPTPGIVINRPNGTDVYQGVPKDYTGEWPPGSRVHLLH

SEQ ID NO: 52350 - protein, 48 aa, Homo sapiens
MSMLRLQKRLASSVLRCGKKKVWLDPNETNEIANANSRDRSGSSSKMG

SEQ ID NO: 52351 - protein, 57 aa, Homo sapiens
  MOD_RES (1)..(1): Any amino acid
XPAVSKGDGMRGLAVFISDIRNCKSKEAEIKRINKELANIRSKFKGDKALDGYKEPR

SEQ ID NO: 52352 - protein, 206 aa, Homo sapiens
  MOD_RES (1)..(1): Any amino acid
XGMTAVGLAILWYVFRLAGMTGREGGFSAFNQLKMARFTIVDGKMGKGVSFKDVAGMHEAKLEVREFVDYLKSPERFLQLGAKVPKGALLLGPPGCGKTLLAKAVATEAQVPFLAMAGPEFVEVIGGLGAARVRSLFKEARARAPCIVYIDEIDAVGKKRSTTMSGFSNTEEEQTLNQLLVEMDVFYAEIEELKLVYPYHGVLHSD

SEQ ID NO: 52353 - protein, 462 aa, Homo sapiens
MKETDREAVATAVQRVAGMLQRPDQLDKVEQYRRREARKKASVEARLKAAIQSQLDGVRTGLSQLHNALNDVKDIQQSLADVSKDWRQSINTIESLKDVKDAVVQHSQLAAAVENLKNIFSVPEIVRETQDLIEQGALLQAHRKLMDLECSRDGLMYEQYRMDSGNTRDMTLIHGYFGSTQGLSDELAKQLWMVLQRSLVTVRRDPTLLVSVVRIIEREEKIDRRILDRKKQTGFVPPGRPKNWKEKMFTILERTVTTRIEGTQADTRESDKMWLVRHLEIIRKYVLDDLIVAKNLMVQCFPPHYEIFKNLLNMYHQALSTRMQDLASEDLEANEIVSLLTWVLNTYTRYKDEAQLYKEEHLRNRQHPHCYVQYMIAIINNCQTFKESIVSLKRKYLKNEVEEGVSPSQPSMDGILDAIAKEGCSGLLEEVFLDLEVGLALSSCRFLGRSPVLPHCPLGHRL

SEQ ID NO: 52354 - protein, 136 aa, Homo sapiens
MILQQPLQRGPQGGAQRLPRAALGVTWGLDARLPPVSVSQPASLPSLPREPLRKQFLSEENMATHFSQLSLHNDHPYCSPPMTFSPALPPLRSPCSELLLWRYPGSLIPEALRLLRLGDTPSPPYPATPAGDIMEL

SEQ ID NO: 52355 - protein, 63 aa, Homo sapiens
MSLRLQSSSASYGGGFGGGSCQLGGGRGVSTCSTRSPCRTSTTAWLPTWRRCAPWRRPTLTWR

SEQ ID NO: 52356 - protein, 90 aa, Homo sapiens
  MOD_RES (1)..(1): Any amino acid
XDQLYELNVLPPTARRSRLGVLFCPRPDGTADMHIIINGEDMGPSARGLPAAQPLYAVVDVFASTKSVRLVQLEYGFFFPQCHPCRLCAA

SEQ ID NO: 52357 - protein, 245 aa, Homo sapiens
MKRLAARCFAGLLILSPLTVISDSRPADSGKAIEDGNLEEMEEEVRLKKRKRRRNVDKDPAKEDVEKAKKRRGRPPAEKLSPNPPKLTKQMNAIIDTVINYKDRCNVEKVPSNSQLEIEGNSSGRQLSEVFIQLPSRKELPEYYELIRKPVDFKKIKERIRNHKYRSLGDLEKDVMLLCHNAQTFNLEGSQIYEDSIVLQSVFKSARQKIAKEEESEDESNEEEEEEDEEESESEAKSVKVKIKL

SEQ ID NO: 52358 - protein, 275 aa, Homo sapiens
MVNHGDLWGSEDDADTVDDYGADSNSEDEEEGEALLPIERAARKQKAREAAAGIQWSEEETEDEEEEKEVTPESGPPKVEEADGGLQINVDEEPFVLPPAGEMEQDAQAPDLQRVHKRIQDIVGILRDFGAQREEGRSRSEYLNRLKKDLAIYYSYGDFLLGKLMDLFPLSELVEFLEANEVPRPVTLRTNTLKTRRRDLAQALINRGVNLDPLGKWSKTGLVVYDSSVPIGATPEYLAGHYMLQGASSMLPVMALAPQEHERILDMCCAPGGKT

SEQ ID NO: 52359 - protein, 300 aa, Homo sapiens
  MOD_RES (1)..(1): Any amino acid
XNFENMSNDDAVRVLRDIVHKPGPIVLTVAKCWDPSPQAYFTLPRTYPGSSSMSTITSGSSLPDGCEGRGLSVHTDMASVTKAMAAPESGLEVRDRMWLKITIPNAFLGSDVVDWLYHHVEGFPERREARKYASGLLKAGLIRHTVNKITFSEQCYYVFGDLSGGCESYLVNLSLNDNDGSSGASDQDTLAPLPGATPWPLLPTFSYQYPAPHPYSPQPPPYHELSSYTYGGGSASSQHSEGSRSSGSTRSDGGAGRTGRPEERAPESKSGSGSESEPSSRGGSLRRGGEASGTSDGGPP

SEQ ID NO: 52360 - protein, 152 aa, Homo sapiens
  MOD_RES (1)..(1): Any amino acid
XSPYTTSTPNINSVRNADSRGSLISTDSGNSLPERNSEKSNSLDKREKLLRRHSACVIRSAEEEEESCQSARKNRVTVDFSLLMIPPLPEETLNATPSLPLPEVLSSPVALIKWHQQSSTLGNSVVRCDKLDQSEIKSLLMCFLYILKSMSD

SEQ ID NO: 52361 - protein, 343 aa, Homo sapiens
MLAPGGTRIDDGDKTKMTNHCVFSANEDHETIRNYAQVFNKLIRRYKYLEKAFEDEMKKLLLFLKAFSETEQTKLAMLSGILLGNGTLPATILTSLFTDSLVKEGIAASFAVKLFKAWMAEKDANSVTSSLRKANLDKRLLELFPVNRQSVDHFAKYFTDAGLKELSDFLRVQQSLGTRKELQKELQERLSQECPIKEVVLYVKEEMKRNDLPETAVIGLLWTCIMNAVEWNKKEELVAEQALKHLKQYAPLLAVFSSQGQSELILLQKVQEYCYDNIHFMKAFQKIVVLFYKADVLSEEAILKWYKEAHVAKGKSVFLDQMKKFVEWLQNAEEESESEGEEN

SEQ ID NO: 52362 - protein, 84 aa, Homo sapiens
  MOD_RES (1)..(1): Any amino acid
XAMSQAVGLPPWLQDPELMLVEMFLLAYAVRHTIQVYRLSKYNTEEFITVYPTDPPKDWPVVTLIAEDDRHYNIPVRVCEETSL

SEQ ID NO: 52363 - protein, 75 aa, Homo sapiens
MGSKKLKRVGLSQELCDRLSRHQILTCQDFLCLSPLELMKVTGLSYRGVHELLCMVSRACAPKMQTAYGIKAQRS

SEQ ID NO: 52364 - protein, 153 aa, Homo sapiens
MCGVERRLWQSAQQARRGWRPFSQEYCQMLILTPPVTDVELKRLKDAFKRTCGLSYYMGQHCFIREVLGDGVPPKVAEVIYCSFGGTSKGLHFNNLIVGLVLLTRGKDEEKAKYIFSLFSSESGNYVIREEMERMLHVVDGKVPDTLRKCFSE

SEQ ID NO: 52365 - protein, 177 aa, Homo sapiens
MGELPLDINIQEPRWDQSTFLGRARHFFTVTDPRNLLLSGAQLEASRNIVQNYRAGVVTPGITEDQLWRAKYVYDSAFHPDTGEKVVLIGRMSAQVPMNMTITGCMLTFYRKTPTVVFWQWVNQSFNAIVNYSNRSGDTPITVRQLGTAYVSATTGAVATALGLKSLTKSPSPPHGP

SEQ ID NO: 52366 - protein, 1035 aa, Homo sapiens
MIAHKQKKTKKKRAWASGQLSTDITTSEMGLKSLSSNSIFDPDYIKELVNDIRKFSHMLLYLKEAIFSDCFKEVIHIRLEELLRVLKSIMNKHQNLNSVDLQNAAEMLTAKVKAVNFTEVNEENKNDLFQEVFSSIETLAFTFGNILTNFLMGDVGNDSLLRLPVSRETKSFENVSVESVDSSSEKGNFSPLELDNVLLKNTDSIELALSYAKTWSKYTKNIVSWVEKKLNLELESTRNMVKLAEATRTNIGIQEFMPLQSLFTNALLNDIESSHLLQQTIAALQANKFVQPLLGRKNEMEKQRKEIKELWKQEQNKMLEAENALKKAKLLCMQRQDEYEKAKSSMFRAEEEHLSSSGGLAKNLNKQLEKKRRLEEEALQKVEEANELYKVCVTNVEERRNDLENTKREILAQLRTLVFQCDLTLKAVTVNLFHMQHLQAASLADSLQSLCDSAKLYDPGQEYSEFVKATNSTEEEKVDGNVNKHLNSSQPSGFGPANSLEDVVRLPDSSNKIEEDRCSNSADITGPSFIRSWTFGMFSDSESTGGSSESRSLDSESISPGDFHRKLPRTPSSGTMSSADDLDEREPPSPSETGPNSLGTFKKTLMSKAALTHKFRKLRSPTKCRDCEGIVVFQGVECEECLLVCHRKCLENLVIICGHQKLPGKIHLFGAEFTQVAKKEPDGIPFILKICASEIENRALCLQGIYRVCGNKIKTEKLCQALENGMHLVDISEFSSHDICDVLKLYLRQLPEPFILFRLYKEFIDLAKEIQHVNEEQETKKNSLEDKKWPNMCIEINRILLKSKDLLRQLPASNFNSLHFLIVHLKRVVDHAEENKMNSKNLGVIFGPSLIRPRPTTAPITISSLAEYSNQARLVEFLITYSQKIFDGSLQPQDVMCSIGVVDQGCFPKPLLSPEERDIERSMKSLFFSSKEDIHTSESESKIFERATSFEESERKQNALGKCDACLSDKAQLLLDQEAESASQKIEDGKTPKPLSLKSDRSTNNVERHTPRTKIRPETLIQNYRVLHLQYVFCC

SEQ ID NO: 52367 - protein, 452 aa, Homo sapiens
MIWPKVECCHFKTAVEAPLGMKLDKKMEVFIPLSTSAASSGPWAHSLFAFIPSWPKKNLFKRESPITHRLYGDISREVQGTSENGVIFQKCALVSGSSEAQTARIWLLVNNTKTTSSANLSELLLLDSIAGLTIWDSVGNRTSEGFQAFSKKFLQVGDAFAVSYAATLQAGDLGNGESLKLPAQLTFQSSSRNRTQLKVLFSITAEENVTVLPHHGLHAAGFFIAFLLSLVLTWAALFLMVRYQCLKGNMLTRHRVWQYESKLEPLPFTSADGVNEDLSLNDQMIDILSSEDPGSMLQALEELEIATLNRADADLEACRTQISKDIIALLLKNLTSSGHLSPQVERKMSAVFKKQFLLLENEIQEEYDRKMVALTAECDLETRKKMENQYQREMMAMEEAEELLKRAVCCRVQQPSADPPWPGTGALEEVSRFATRRRLCQSSQTAGCFPEK

SEQ ID NO: 52368 - protein, 48 aa, Homo sapiens
MKLSRRDLPAHLQHDCPKRRLKCEFCGCDFSGEAYESHEGMCPQESVY

SEQ ID NO: 52369 - protein, 1317 aa, Homo sapiens
MDRQCSERPYSCTPTGRVSSAVSQNSRISPPVSTSMKDSSCMKVHQDSARRDRWSHPTTILLHKSQSSQATLMLQEHRMFMGEAYSAATGFKMLQDMNSADPFHLKYIIKKIKNMAHGSPKLVMETIHDYFIDNPEISSRHKFRLFQTLEMVIGASDVLEETWEKTFTRLALENMTKATELEDIYQDAASNMLVAICRHSWRVVAQHLETELLTGVFPHRSLLYVMGVLSSSEELFSQEDKACWEEQLIQMAIKSVPFLSTDVWSKELLWTLTTPSWTQQEQSPEKAFLFTYYGLILQAEKNGATVRRHLQALLETSHQWPKQREGMALTLGLAATRHLDDVWAVLDQFGRSRPIRWSLPSSSPKNSEDLRWKWASSTILLAYGQVAAKARAHILPWVDNIVSRMVFYFHYSSWDETLKQSFLTATLMLMGAVSRSEGAHSYEFFQTSELLQCLMVLMEKEPQDTLCTRSRQQAMHIASSLCKLRPPIDLERKSQLLSTCFRSVFALPLLDALEKHTCLFLEPPNIQLWPVARERAGWTHQGWGPRAVLHCSEHLQSLYSRTMEALDFMLQSLIMQNPTADELHFLLSHLYIWLASEKAHERQRAVHSCMILLKFLNHNGYLDPKEDFKRIGQLVGILGMLCQDPDRATQRCSLEGASHLYQLLMCHKTGEALQAESQAPKELSQAHSDGAPLWNSRDQKATPLGPQEMAKNHIFQLCSFQVIKDIMQQLTLAELSDLIWTAIDGLGSTSPFRVQAASEMLLTAVQEHGAKLEIVSSMAQAIRLRLCSVHIPQAKEKTLHAITLLARSHTCELVATFLNISIPLDSHTFQLWRALGAGQPTSHLVLTTLLACLQERPLPTGASDSSPCPKEKTYLRLLAAMNMLHELQFAREFKQAVQEGYPKLFLALLTQMHYVLELNLPSEPPKQQAQEAAVPSPQSCSTSLEALKSLLSTTGHWHDFAHLELQGSWELFTTIHTYPKGVGLLARAMVQNHCRQIPAVLRQLLPSLQSPQERERKVAILILTKFLYSPVLLEVLPKQAALTVLAQGLHDPSPEVRVLSLQGLSNILFHPDKGSLLQGQLRPLLDGFFQSSDQVIVCIMGTVSDTLHRLGAQGTGSQSLGVAISTRSFFNDERDGIRAAAMALFGDLVAAMADRELSGLRTQVHQSMVPLLLHLKDQCPAVATQAKFTFYRCAVLLRWRLLHTLFCTLAWERGLSARHFLWTCLMTRSQEEFSIHLSQALSYLHSHSCHIKTWVTLFIGHTICYHPQAVFQMLNAVDTNLLFRTFEHLRSDPEPSIREFATSQLSFLQKVSARPKQ

SEQ ID NO: 52370 - protein, 166 aa, Homo sapiens
MTLNMKNYKGYEKKPYCNAHYPKQSFTMVADTPENLRLKQQSELQSQVRYKEEFEKNKGKGFSVVADTPELQRIKKTQDQISNIKYHEEFEKSRMGPSGGEGMEPERRDSQDGSSYRRPLEQQQPHHIPTSAPVYQQPQQQPVAQSYGGYKEPAAPVSIQRSAPGG

SEQ ID NO: 52371 - protein, 67 aa, Homo sapiens
GLPDSVVSILKNSQSGNALTAYALFKAGVQWRDLGSPQPLPPGFKQFSCFSLPSSWDYRLQHLLGIP

SEQ ID NO: 52372 - protein, 320 aa, Homo sapiens
MAEQVALSRTQVCGILREELFQGDAFHQSDTHIFIIMGASGDLAKKKIYPTIWWLFRDGLLPENTFIVGYARSRLTVADIRKQSEPFFKATPEEKLKLEDFFARNSYVAGQYDDAASYQRLNSHMNALHLGSQANRLFYLALPPTVYEAVTKNIHESCMSQIRGWNRIIVEKPFGRDLQSSDRLSNHISSLFREDQIYRIDHYLGKEMVQNLMVLRFANRIFGPIWNRDNIACVILTFKEPFGTEGRGGYFDEFGIIRDVMQNHLLQMLCLVAMEKPASTNSDDVRDEKVKVLKCISEVQANNVVLGQYVGNPDGEGEAT

SEQ ID NO: 52373 - protein, 58 aa, Homo sapiens
MLGRCSRENCKYLHPPPHLKTQLEINGRNNLIQQKNMAMLAQQMQLANAMMPGAPLQP

SEQ ID NO: 52374 - protein, 559 aa, Homo sapiens
MLKSKTFLKKTRAGGVMKIVREHYLRDDIGCGAPGCAACGGAHEGPALEPQPQDPASSVCPQPHYLLPDTNVLLHQIDVLEDPAIRNVIVLQTVLQEVRNRSAPVYKRIRDVTNNQEKHFYTFTNEHHRETYVEQEQGENANDRNDRAIRVAAKWYNEHLKKMSADNQLQVIFITNDRRNKEKAIEEGIPAFTCEEYVKSLTANPELIDRLACLSEEGNEIESGKIIFSEHLPLSKLQQGIKSGTYLQGTFRASRENYLEATVWIHGDNEENKEIILQGLKHLNRAVHEDIVAVELLPKSQWVAPSSVVLHDEGQNEEDVEKEEETERMLKTAVSEKMLKPTGRVVGIIKRNWRPYCGMLSKSDIKESRRHLFTPADKRIPRIRIETRQASTLEGRRIIVAIDGWPRNSRYPNGHFVRNLGDVGEKETETEVLLLEHDVPHQPFSQAVLSFLPKMPWSITEKDMKNREDLRHLCICSVDPPGCTDIDDALHCRELENGNLEVGVHIADVSHFIRPGNALDQESARRGTTVYLCEKRIDMVPELLSSNLCSLKCDVDRHL

SEQ ID NO: 52375 - protein, 1682 aa, Homo sapiens
MGLLQLLAFSFLALCRARVRAQEPEFSYGCAEGSCYPATGDLLIGRAQKLSVTSTCGLHKPEPYCIVSHLQEDKKCFICNSQDPYHETLNPDSHLIENVVTTFAPNRLKIWWQSENGVENVTIQLDLEAEFHFTHLIMTFKTFRPAAMLIERSSDFGKTWGVYRYFAYDCEASFPGISTGPMKKVDDIICDSRYSDIEPSTEGEVIFRALDPAFKIEDPYSPRIQNLLKITNLRIKFVKLHTLGDNLLDSRMEIREKYYYAVYDMVVRGNCFCYGHASECAPVDGFNEEVEGMVHGHCMCRHNTKGLNCELCMDFYHDLPWRPAEGRNSNACKKCNCNEHSISCHFDMAVYLATGNVSGGVCDDCQHNTMGRNCEQCKPFYYQHPERDIRDPNFCERCTCDPAGSQNEGICDSYTDFSTGLIAGQCRCKLNVEGEHCDVCKEGFYDLSSEDPFGCKSCACNPLGTIPGGNPCDSETGHCYCKRLVTGQHCDQCLPEHWGLSNDLDGCRPCDCDLGGALNNSCFAESGQCSCRPHMIGRQCNEVEPGYYFATLDHYLYEAEEANLGPGVSIVERQYIQDRIPSWTGAGFVRVPEGAYLEFFIDNIPYSMEYDILIRYEPQLPDHWEKAVITVQRPGRIPTSSRCGNTIPDDDNQVVSLSPGSRYVVLPRPVCFEKGTNYTVRLELPQYTSSDSDVESPYTLIDSLVLMPYCKSLDIFTVGGSGDGVVTNSAWETFQRYRCLENSRSVVKTPMTDVCRNIIFSISALLHQTGLACECDPQGSLSSVCDPNGGQCQCRPNVVGRTCNRCAPGTFGFGPSGCKPCECHLQGSVNAFCNPVTGQCHCFQGVYARQCDRCLPGHWGFPSCQPCQCNGHADDCDPVTGECLNCQDYTMGHNCERCLAGYYGDPIIGSGDHCRPCPCPDGPDSGRQFARSCYQDPVTLQLACVCDPGYIGSRCDDCASGYFGNPSEVGGSCQPCQCHNNIDTTDPEACDKETGRCLKCLYHTEGEHCQFCRFGYYGDALQQDCRTCDCDPRGIETPQCDQSTGQCVCVEGVEGPRCDKCTRGYSGVFPDCTPCHQCFALWDVIIAELTNRTHRFLEKAKALKISGVIGPYRETVDSVERKVSEIKDILAQSPAAEPLKNIGNLFEEAEKLIKDVTEMMAQVEVKLSDTTSQSNSTAKELDSLQTEAESLDNTVKELAEQLEFIKNSDIRGALDSITKYFQMSLEAEERVNASTTEPNSTVEQSALMRDRVEDVMMERESQFKEKQEEQARLLDELAGKLQSLDLSAAAEMTCGTPPGASCSETECGGPNCRTDEGERKCGGPGCGGLVTVAHNAWQKAMDLDQDVLSALAEVEQLSKMVSEAKLRADEAKQSAEDILLKTNATKEKMDKSNEELRNLIKQIRNFLTQDSADLDSIEAVANEVLKMEMPSTPQQLQNLTEDIRERVESLSQVEVILQHSAADIARAEMLLEEAKRASKSATDVKVTADMVKEALEEAEKAQVAAEKAIKQADEDIQGTQNLLTSIESETAASEETLFNASQRISELERNVEELKRKAAQNSGEAEYIEKVVYTVKQSAEDVKKTLDGELDEKYKKVENLIAKKTEESADARRKAEMLQNEAKTLLAQANSKLQLLKDLERKYEDNQRYLEDKAQELARLEGEVRSLLKDISQKVAVYSTCL

SEQ ID NO: 52376 - protein, 143 aa, Homo sapiens
MKPHSRKGDYFAEDDGEMVPRTSHTAAFLSDTKDRGPPVQSQIWRSGEKVPFVQTYSLRAFEKPPQVQTQALRDFEKHLNDLKKENFSLKLRIYFLEERMQQKYEASREDIYKRNIELKVEVESLKRELQDKKQHLDKTWADV

SEQ ID NO: 52377 - protein, 110 aa, Homo sapiens
  MOD_RES (1)..(1): Any amino acid
XRNIHGRKLKEINKMADHWETAPRHMMRLDIRSLLQDAAIEEVEMEDFDANIEEQKEEKKDAEEEESELEGSESLPAETALKNSCNVKLAISKKQSGTCISKETHKKEKT

SEQ ID NO: 52378 - protein, 79 aa, Homo sapiens
MADHNPDSDSTPRTLLRRVLDTADPRTPRRPRSARAGARRALLETASPRKLSGQTRTIARGRSHGARADGQTGCLVLCR

SEQ ID NO: 52379 - protein, 687 aa, Homo sapiens
MDGGALTDTSLTDSYFSTSFIGVNGFGSPVETKYPLMQRMTNSSSSPSLLNDSAKPYSAHDPLTSPASSLFNDFGALNISQRRKTPNPTASEFIPKGGSTSRLSNVSQSNMSAFSQVFSHPSMGSPATAGLAPGMSLSAGSSPLHSPKITPHTSPAPRRRSHTPNPASYMVPSSASTSVNNPVSQTPSSGQVIQKETVGGTTYFYTDTTPAPLTGMVFPNYHIYPPTAPHVAYMQPKANAPSFFMADELRQELINRHLITMAQIDQADMPAVPTEVDSYHSLFPLEPLPPPNRIQKSSNFGYITSCYKAVNSKDDLPYCLRRIHGFRLVNTKCMVLVDMWKKIQHSNIVTLREVFTTKAFAEPSLVFAYDFHAGGETMMSRHFNDPNADAYFTKRKWGQHEGPLPRQHAGLLPESLIWAYIVQLSSALRTIHTAGLACRVMDPTKILITGKTRLRVNCVGVFDVLTFDNSQNNNPLALMAQYQQADLISLGKVVLALACNSLAGIQRENLQKAMELVTINYSSDLKNLILYLLTDQNRMRSVNDIMPMIGARFYTQLDAAQMRNDVIEEDLAKEVQNGRLFRLLAKLGTINERPEFQKDPTWSETGDRYLLKLFRDHLFHQVTEAGAPWIDLSHIISCLNKLDAGVPEKISLISRDEKSVLVVTYSDLKRCFENTFQELIAAANGQL

SEQ ID NO: 52380 - protein, 64 aa, Homo sapiens
  MOD_RES (1)..(1): Any amino acid
XSLTCVTSSHWDRPYSREVAAFPLTESRSVAQAGVQWHDPGFTPFSYLSLPLGLQAPATMPGPS

SEQ ID NO: 52381 - protein, 505 aa, Homo sapiens
  MOD_RES (1)..(1): Any amino acid
XAQNDGQVLFALSSAVFGQRLDETVAYEQKFGPHLVPILVEKCAEFILEHGRNEEGIFRLPGQDNLVKQLRDAFDAGERPSFDRDTDVHTVASLLKLYLRDLPEPVVPWSQYEGFLLCGQLTNADEAKAQQELMKQLSILPRDNYSLLSYICRFLHEIQLNCAVNKMSVDNLATVIGVNLIRSKVEDPAVIMRGTPQIQRVMTMMIRDHEVLFPKSKDIPLSPPAQKNDPKKAPVARSSVGWDATEDLRISRTDSFSSMTSDSDTTSPTGQQPSDAFPEDSSKVPREKPGDWKMQSRKRTQTLPNRKCFLTSAFQGANSSKMEIFKNEFWSPSSEAKAGEGHRRTMSQDLRQLSDSQRTSTYDNVPSLPGSPGEEASALSSQACDSKGDTLASPNSETGPGKKNSGEEEIDSLQRMVQELRKEIETQKQMYEEQIKNLEKENYDVWAKVVRLNEELEKEKKKSAALEISLRNMERSREDVEKRNKALEEEVKEFVKSMKEPKTEA

SEQ ID NO: 52382 - protein, 1477 aa, Homo sapiens
  MOD_RES (1)..(1): Any amino acid
XELFGNSSQVGINLPTGECSIFGYFVDIEQCEFIPWSDLVPNDQTLIQRGTSLLTNLQRSGGNFLKITECGECINYTATRDTTCLSFLMSLLLKNSCPVLLTGESGVGKTAAINQMLEKLEGPGAFDIKHGSILGDTLLYSEIKKSSSLKQNITILIPETHKTATGSSDNPTKKPEVRTNKKLLKNNDHKGVVVSTINFSTNVTAAKTKEMILKKLIRRTKDTLGAPKNNRILIFIDDMNMPVSDMYGAQPPLELIRQLLDLGGVYDTEKNTWKNIQDLSIVAACVPVVNDISPRLLKHFSMLVLPHPSQDILCTIFQLLLGLLQADRTVVNSKEMAALLFVHEATRVFHDRLIDFTDKSLFYRLLSRELENCFQIQWTQENLMNHSTVFLDFLDINKTHRKKIYQNTSDYNKLASVLDEFQMKLGSISLELSHSMVFFKEAIEHIIRATRVLRQPGSHMLLIGIDGCGKKTCATLACYLTDNKLYRVPISHKCAYIEFKEVFKKVFIHAGLKGKPTVLMVPNLNIEQDSFLEDLNYIISSGRIPDLFENVELDSIAMKIRYLTEQSGHMDNRQSLLSFFQKRIYKNLHIFVIMSPEGPSFRQNCRVYPSMISSCTIDWYERWPEEALLIVANSFLKEKVNFENRENLKEKLAPTCVQIHKSMKDLNRKYFEETGRFYYTTPNSYLQFMETFAHILRAREEEMQTKRDRFHMGLSTILEATTLVTEMQEELLILGPQVEQKTKETETLMEKLRKDSQVVEKVQMLVKQDEEIVAEEVRIVEDYAQKTANELKSVLPAFDKAIVALNALDKADVAELRVYTRPPFLVLTVMNAVCILLQKKPNWATAKLLLSETGFLKKLINLDKDSIPDKVFVKLKKIVTLPDFNPHKISLVSVACCSLCQWVIALNNYHEVQKVVGPKQIQVAEAQNVLKIARQRLAEKQRGLQLVEEHLLFLQAAYKDTVAEKQLLANRKTMASRRFQCASVLLTVLEDEKISRWHNQGLPHGQYSVENAILIKNGQQWPLLIDPHRQAHKWIRQMEGSRLQKLSIEDSNYTKKIENAMKTGGSVLLQNLLETLAPGLKAILKKDIYQKKGHYFIRVGDAEFEYNSNFRLYLSTEIDNPHFLPSVYNFVTMINFTVTFQGLQDQLLSTVVTHEVPHLEDQRSKLLESISLDAITLEELEEKTLNLLQKALGSILDDDKIVDTLRKSKMTSNEISKRIEATKKAESEIQAIRKNYLPIATRGALLYFLVADLTQINYMYQFSLDWFHQVFVSSVVSKSKEQEHSFKREKVSPKEVHEFISISKEPNLENEKNLLDKHIKSAIDMLTKSIFKVVSSALFNEDKLCFSFRLCTVIMQNNANGNLIQDDIGFLPEEEWNIFLYSGILINIKSALSQSRLTSTFEIGESQHLQWLSDSRWRQCQYVSTHLEPFSLLCKSLLSNVSQWDTFKNSKAVYSLISTPFSSENASLEENTKPPEE

SEQ ID NO: 52383 - protein, 636 aa, Homo sapiens
MNPTETKAVKTEPEKKSQSTKLSVVHEKKSQEGKPKEHTEPKSLPKQASDTGSNDAHNKKAVSRSAEQQPSEKSTEPKSGMDAALDDLIDTLGGPEETEEENTTYTGPEVSDPMSSTYIEELGKREVTIPPKYRELLAKKEGITGPPADSSKPIGPDDAIDALSSDFTCGSPTAAGKKTEKEESTEVLKAQSAGTVRSAAPPQEKKRKVEKDTMSDQALEALSASLGTRQAEPELDLRSIKEVDEAKAKEEKLEKCGEDDETIPSEYRLKPATDKDGKPLLPEPEEKPKPRSESELIDELSEDFDRSECKEKPSKPTEKTEESKAAAPAPVSEAVCRTSMCSIQSAPPEPATLKGTVPDDAVEALADSLGKKEADPEDGKPVMDKVKEKAKEEDREKLGEKEETIPPDYRLEEVKDKDGKPLLPKESKEQLPPMSEDFLLDALSEDFSGPQNASSLKFEDAKLAAAISEVVSQTPASTTQAGAPPRDTSQSDKDLDDALDKLSDSLGQRQPDPDENKPMEDKVKEKAKAEHRDKLGERDDTIPPEYRHLLDDNGQDKPVKPPTKKSEDSKKPADDQDPIDALSGDLDSCPSTTETSQNTAKDKCKKAASSSKAPKNGGKAKDSAKTTEETSKPKDD

SEQ ID NO: 52384 - protein, 60 aa, Homo sapiens
MGDYLLRGYRMLGETCADCGTILLQDKQRKIYCVACQELDSDVDKDNPALRDVVPQPLPF

SEQ ID NO: 52385 - protein, 185 aa, Homo sapiens
MDHRSRLRGTGLNRIPGTQSRAPRVPLPFHVQQEAREGEDWEREPPRQRPPIYEPPESEELPDNVMVSKPAPYWEGTAVIDGEFKELKLTDYRGKYLVFFFYPLDFTFVCPTEIIAFGDRLEEFRSINTEVVACSVDSQFTHLAWINTPRRQGGLGPIRIPLLSDLTHQISKDYGVYLEDSGHTL

SEQ ID NO: 52386 - protein, 177 aa, Homo sapiens
MPVPASWPHPPCPFLLLTLLLGLTGVAGEDELQVIQPEKSVSVAAGESATLRCAMTSLIPVGPIMWFRGAGAGRELIYNQKEGHFPRVTTVSELTKRNNLDFSISISNITPADAGTYYCVKFRKGSPDDVEFKSGAGTELSVRGVTHVFHVQQTEMSQTVSTGESIILSCSVPNTLP

SEQ ID NO: 52387 - protein, 150 aa, Homo sapiens
MDLASPEAAPAAPTALPSFSTFMDGYTGEFDTFLYQLPGTVQPCSSASSSASSTSSSSATSPASASFKFEDFQVYGCYPGPLSGPVDEALSSSGSDYYGSPCSAPSPSTPSFQPPQLSPWDGSFGHFSPSQTYEGLRAWTEQLPKASGPP

SEQ ID NO: 52388 - protein, 270 aa, Homo sapiens
MFAKAFRVKSNTAIKGSDRRKLRADVTTAFPTLGTDQVSELVPGKEELNIVKLYAHKGDAVTVYVSGGNPILFELEKNLYPTDLMLPGLVMPPAGLPQVQKGDLCAISLVGNRAPVAIGVAAMSTAEMLTSGLKGRGFSVLHTYQDHLWRSGNKSSPPSIAPLALDSADLSEEKGSVQMDSTLQGDMRHMTLEGEEENGEVHQAREDKSLSEAPEDTSTRGLNQDSTDSKTLQEQMDELLQQCFLHALKCRVKKADLPLLTSTFLGSHMF

SEQ ID NO: 52389 - protein, 122 aa, Homo sapiens
MPDGEAALAAKVAVLETQLKKALQELQAAQARQADPQPQAWPPPDSPVRVDTVRVVEGPREVEVVASTAAGAPAQRAQSLEPYGTGLRALAMPGRPESPPVFRSQEVVETMCPVPAAATSNV

SEQ ID NO: 52390 - protein, 447 aa, Homo sapiens
MIPTFTALLCLGLSLGPRTHMQAGPLPKPTLWAEPGSVISWGNSVTIWCQGTLEAREYRLDKEESPAPWDRQNPLEPKNKARFSIPSMTEDYAGRYRCYYRSPVGWSQPSDPLELVMTGAYSKPTLSALPSPLVTSGKSVTLLCQSRSPMDTFLLIKERAAHPLLHLRSEHGAQQHQAEFPMSPVTSVHGGTYRCFSSHGFSHYLLSHPSDPLELIVSGSLEGPRPSPTRSVSTAAGPEDQPLMPTGSVPHSGLRRHWEVLIGVLVVSILLLSLLLFLLLQHWRQGKHRTLAQRQADFQRPPGAAEPEPKDGGLQRRSSPAADVQGENFCAAVKDTQPEDGVEMDTRSPHDEDPQAVTYAKVKHSRPRREMASPPSPLSGEFLDTKDRQAEEDRQMDTEAAASEAPQDVTYAQLHSFTLRQKATEPPPSQEGASPAEPSVYATLAIH

SEQ ID NO: 52391 - protein, 519 aa, Homo sapiens
MAEDEPSGALLKPLVFRVDETTPAVVQSVLLERGWNKFDKQEQNAEDWNLYWRTSSFRMTEHNSVKPWQQLNHHPGTTKLTRKDCLAKHLKHMRRMYGTSLYQFIPLTFVMPNDYTKFVAEYFQERQMLGTKHSYWICKPAELSRGRGILIFSDFKDFIFDDMYIVQKYISNPLLIGRYKCDLRIYVCVTGFKPLTIYVYQEGLVRFATEKFDLSNLQNNYAHLTNSSINKSGASYEKIKEVIGHGCKWTLSRFFSYLRSWDVDDLLLWKKIHRMVILTILAIAPSVPFAANCFELFGFDILIDDNLKPWLLEVNYSPALTLDCSTDVLVKRKLVHDIIDLIYLNGLRNEGREASNATHGNSNIDAAKSDRGGLDAPDCLPYDSLSFTSRMYNEDDSVVEKAVSVRPEAAPASQLEGEMSGQDFHLSTREMPQSKPKLRSRHTPHKTLMPYASLFQSHSCKTKTSPCVLSDRGKAPDPQAGNFVLVFPFNEATLGASRNGLNVKRIIQELQKLMNKQHS

SEQ ID NO: 52392 - protein, 212 aa, Homo sapiens
  MOD_RES (1)..(1): Any amino acid
XVHRLPVFKRYMGNTPQKKAVFGQCRGLPCVAPLLTTVEEAPRGISARVWGHFPKWLNGSLLRIGPGKFEFGKDKYNHWFDGMALLHQFRMAKGTVTYRSKFLQSDTYKANSAKNRIVISEFGTLALPDPCKNVFERFMSRFELPGKAAGFSYKVIRVPPEKVDLGETIHGVQVICSIASTEKGKPSYYHSFGMTRNYIIFIEQPLKMNLWK

SEQ ID NO: 52393 - protein, 101 aa, Homo sapiens
LYMVRTMLESLIADKSGSKKTLRSSLDGPIVLAIEDFHKQSFFFTHLLNISDGVLLCCPGWSAVALSQLTATSASQVQAGVQSCDLSSPQPLPPRSPAAVL

SEQ ID NO: 52394 - protein, 1055 aa, Homo sapiens
MSALRKVLPGILQKHCCILPDRNTESQCTLCGEPEEEEAGDLVQPGISFPGPAEEDLDPQYSWSPTQHFNEERYSPAPRSMKGLSGSRTQPPLCSGHTCGLAPPEDCEHLHHGPDARPPYLLSPADSCPGGRHRCSPRSSVHSECVMMPVVLGDHVSSSTFPRMHYSSHYDTRDDCAVAHAGAKINRIPANLLDQFEKQLPLHRDGFHTLQYQRTSAAAEQRSESPGRIRHLVHSVQKLFTKSHSLEGSSKSNANGTKADGRADDHHHAHHAKHSKRSKSKERKPEGKPRPGMSSWWSSDDNLDSDSTYRTPSVLNRHHLGPVAHCYPDALQSPFGDLSLKTSKSNNDVKCSACEGLALTPDAKYLKRSSWSTLTVSQAKEAYRKSSLNLDKPLLHQDAKPALRPCHYLQVPQDEWGGYPTGGKDEEIPCRRMRSGSYIKAMGDEESGESDSSPKTSPKSAILPEPLLKSIGQRPLGEHQTQTYLQAASDVPVGHSLDPAANYNSPKFRSRNQSYMRAVSTLSQASCVSQVSEAEINGQFESVCESVFSEVESQAMDALDLPGCFRTRSHSYLRAIQAGYSQDDECIPMMTPSDITSTIRSTAAVSYTNYKKTPPPVPPRTTSKPLISVTAQSSTESTQDAYQDSRAQRMSPWPQDSRGLYNSTDSLDSNKAMNLALETAAAQRHLPESQSSSVRTSDKAILVSKAEELLKSRCSSIGIQDSEFPEHQPYPRSDVETATDSDTESRGLREYHSVGVQVEDEKRHGRFKRSNSVTAAVQADLELEGFPGHITTEDKGLQFGSSFQRHSEPSTPTQYSAVRTVRTQGLFSYREDYRTQVDTSTLPPPDPWLEPAIDTVETGRMSPCRRDGSWFLKLLHAETKRMEGWCKEMEREAEENDLSEEILGKIRSAVGSAQLLMSQKFQQFYWLCQQNMDPSAMPRPTSQDLAGYWDMLQLSIEDVSMKFDELQRLRLNDWKMMESPERKEERKVPPPIPKKPPKGKFPITREKSLDLPDRQRQEARRRLMAAKRAASFRQNSASERADSIEIYIPEAQTRL

SEQ ID NO: 52395 - protein, 596 aa, Homo sapiens
MWRCGGRQGLCVLRRLSGGHAHHRAWRWNSNRACERALQYKLGDKIHGFTVNQVTSVPELFLTAVKLTHDDTGARYLHLAREDTNNLFSVQFRTTPMDSTGVPHILEHTVLCGSQKYPCRDPFFKMLNRSLSTFMNAFTASDYTLYPFSTQNPKDFQNLLSVYLDATFFPCLRELDFWQEGWRLEHENPSDPQTPLVFKGVVFNEMKGAFTDNERIFSQHLQNRLLPDHTYSVVSGGDPLCIPELTWEQLKQFHATHYHPSNARFFTYGNFPLEQHLKQIHEEALSKFQKIEPSTVVPAQTPWDKPREFQITCGPDSFATDPSKQTTISVSFLLPDITDTFEAFTLSLLSSLLTSGPNSPFYKALIESGLGTDFSPDVGYNGYTREAYFSVGLQGIAEKDIETVRSLIDRTIDEVVEKGFEDDRIEALLHKIEIQMKHQSTSFGLMLTSYIASCWNHDGDPVELLKLGNQLAKFRQCLQENPKFLQEKVKQYFKNNQHKLTLSMRPDDKYHEKQAQVEATKLKQKVEALSPGDRQQIYEKGLELRSQQSKPQDASCLPALKVSDIEPTIPVTELDVVLTGHCERYAFPGSRVPWGN

SEQ ID NO: 52396 - protein, 138 aa, Homo sapiens
MDNTSTVLREWLVAVKSLYHSVEWRPAEEPRSYPDEEGPKHWSDSRYEHVMKLRQAALKSARDMWADYILFVDADNLILNPDTLSLLIAENKTVVAPMLDSRAAYSNFWCGMTSQGYYKRTPAYIPIRKRDRRGCFAV

SEQ ID NO: 52397 - protein, 208 aa, Homo sapiens
MGEKLELRLKSPVGAEPAVYPWPLPVYDKHHDAAHEIIETIRWVCEEIPDLKLAMENYVLIDYDTKSFESMQRLCDKYNRAIDSIHQLQVYNHSVTDPEKLNNYEPFSPEVYGETSFDLVAQMIDEIKMTDDDLFVDLGSGVGQVVLQVAAATNCKHHYGVEKADIPAKYAETMDREFRKWMKWYGKKHAEYTLERGDFLSEEWRERI

SEQ ID NO: 52398 - protein, 828 aa, Homo sapiens
MSLSDKQTASLTAAYGQLSKGKPAECRMDSPKEISQAGFEWQRTEGKLNEIGLNVSMDGQPKDGLVKNASFLEQNKLCFFEGKLDKELSIEMQDKDCQEASGHLESRYVISETCHPLEGNSVHQKTSEFHLGLIEGPDKNKTIPVQGKVAGKNGLETKSQSDLDFPGAADIPTRYVKEQETSVWNPSFHPVAQGSLGSREATPGEMENSITPGCPVIGVVNDNSEQLKCESPLLVSLAHPAPIIEHSPTTIPPITMVFTQEHLNASCHIRDHDKELEKLSSTEEAVLNQAPQQKKAVRRALSECSHLSVPPAVNLADKYPELPAREEPSSGLLPPPSSPMPSPTPGKLGAPAMKRSMTVGEEQTASYKLSPGKLPILSTKEIPPFICEEPVAKKREELAHFSNSSSNSGKKELGTAGLYLHSKLEQIPEGSSKEKGQEDFSETRIDSCSQVCQRGEKQPGQTALAGKKEIEVTATQSTPSFLFEKPPRDGIARPEEGRPVVSGTGNDITTPPNKELPPSPEKKTKPIADAKAPEKRASPSKPASAPASRSGSKSTQTVAKTTTAAAVASTGPSSRSPSTLLPKKPTADLSRPKSTSTSSMKKTTTLSGTAPAAGVVPSRVKATPMPSRPSTTPFIDKKPTSAKPSSTTPRLSRLATNTSAPDLKNVRSKVGSTENIKHQPGGGRVQIVSKKVSYSHIQSKCGSKDNIKHVPGGGNVQIQNKKVDISKVSSKCGSKANIKHKPGGGDVKIESQKLNFKEKAQAKVGSLDNVGHLPAGGAVKIETYRLTFRANARARTDHGADIVSRPPHFPGGPNSGSRVLGPLSRAVH

SEQ ID NO: 52399 - protein, 954 aa, Homo sapiens
  MOD_RES (1)..(1): Any amino acid
XDDDDDEAPKRQTRRRAAKNVSYKEDDDFETDSDDLIEMTGEGVDEQQDNSETIEKVLDSRLGKKGATGASTTVYAIEANGDPSGDFDTEKDEGEIQYLIKWKGWSYIHSTWESEESLQQQKVKGLKKLENFKKKEDEIKQWLGKVSPEDVEYFNCQQELASELNKQYQIVERVIAVKTSKSTLGQTDFPAHSRKPAPSNEPEYLCKWMGLPYSECSWEDEALIGKKFQNCIDSFHSRNNSKTIPTRECKALKQRPRFVALKKQPAYLGGENLELRDYQLEGLNWLAHSWCKNNSVILADEMGLGKTIQTISFLSYLFHQHQLYGPFLIVVPLSTLTSWQREFEIWAPEINVVVYIGDLMSRNTIREYEWIHSQTKRLKFNALITTYEILLKDKTVLGSINWAFLGVDEAHRLKNDDSLLYKTLIDFKSNHRLLITGTPLQNSLKELWSLLHFIMPEKFEFWEDFEEDHGKGRENGYQSLHKVLEPFLLRRVKKDVEKSLPAKVEQILRVEMSALQKQYYKWILTRNYKALAKGTRGSTSGFLNIVMELKKCCNHCYLIKPPEENERENGQEILLSLIRSSGKLILLDKLLTRLRERGNRVLIFSQMVRMLDILAEYLTIKHYPFQRLDGSIKGEIRKQALDHFNADGSEDFCFLLSTRAGGLGINLASADTVVIFDSDWNPQNDLQAQARAHRIGQKKQVNIYRLVTKGTVEEEIIERAKKKMVLDHLVIQRMDTTGRTILENNSGRSNSNPFNKEELTAILKFGAEDLFKELEGEESEPQEMDIDEILRLAETRENEVSTSATDELLSQFKVANFATMEDEEELEERPHKDWDEIIPEEQRKKVEEEERQKELEEIYMLPRIRSSTKKAQTNDSDSDTESKRQAQRSSASESETEDSDDDKKPKRRGRPRSVRKDLVEGFTDAEIRSARIESTLFLTICMAHMSSQDMLAST

SEQ ID NO: 52400 - protein, 437 aa, Homo sapiens
  MOD_RES (1)..(1): Any amino acid
XWSYFRRRKFQLCADLCTQMLEKSPYDQAAWILKARALTEMVYIDEIDVDQEGIAEMMLDENAIAQVPRPGTSLKLPGTNQTGGPSQAVRPITQAGRPITGFLRPSTQSGRPGTMEQAIRTPRTAYTARPITSSSGRFVRLGTALFEYIFHHENDVKTALDLAALSTEHSQYKDWWWKVQIGKCYYRLGMYREAEKQFKSALKQQEMVDTFLYLAKVYVSLDQPVTALNLFKQGLDKFPGEVTLLCGIARIYEEMNNMSSAAEYYKEVLKQDNTHVEAIACIGSNHFYSDQPEIALRFYRRLLQMGIYNGQLFNNLGLCCFYAQQYDMTLTSFERALSLAENEEEAADVWYNLGHVAVGIGDTNLAHQCFRLALVNNNNHAEAYNNLAVLEMRKGHVEQIGDLQRSYVAAQKSEAAFPDHVDTQHLIKQLRQHFAML

SEQ ID NO: 52401 - protein, 76 aa, Homo sapiens
  MOD_RES (1)..(1): Any amino acid
XINFNKGDWIRVGLCYPRGTTFSILSDVHNRLLKQTSKTGVFVRTLQMDKVEQSYPGRSHYYWDEDSGKQRTISWR

SEQ ID NO: 52402 - protein, 63 aa, Homo sapiens
MSGNGNAAATALARIQTDSVVATLKASYPGLQFEISEFSGKEWKLMGSPVPREERTQHFWLCL

SEQ ID NO: 52403 - protein, 165 aa, Homo sapiens
  MOD_RES (1)..(1): Any amino acid
XVCCTALLVAVVARKLEFNKAEKHVHNFMMDIQYTKEEGVSCCPQASAQAAGRHQRVRAALYAHVSMCTHVQVTSLHGCVCACPCLSRFRQVRLKHRKLREQVNSMVDISKMHMILYDLQQNLSSSHRALEKQIDTLAGKLDALTELLSTALGPRQLPEPSQQSK

SEQ ID NO: 52404 - protein, 98 aa, Homo sapiens
  MOD_RES (1)..(1): Any amino acid
XILPQAPANAHLKDLDEEIFDDDDFYHQLLRELIERKTSSLDPNDQVAMGRQWLAIQKLRSKIHKKVDRKASKGRKLRTELYRSLFGQLHPPDEGHGD

SEQ ID NO: 52405 - protein, 529 aa, Homo sapiens
MQCCGLVHRRRVRVSYGSADSYTSRPSDSDVSLEEDREAVRREAERQAQAQLEKAKTKPVAFAVRTNVSYSAAHEDDVPVPGMAISFEAKDFLHVKEKFNNDWWIGRLVKEGCEIGFIPSPVKLENMRLQHEQRAKQGKFYSSKSGGNSSSSLGDIVPSSRKSTPPSSAKQKQKSTEHTPPYDVVPSMRPVVLVGPSLKGYEVTDMMQKALFDFLKHRFEGRISITRVTADISLAKRSVLNNPSKHAIIERSNTRSSLAEVQSEIERIFELARTLQLVVLDADTINHPAQLSKTSLAPIIVYVKISSPKELFDVILDENQLEDACEHLADYLEAYWKATHPPSSSLPNPLLSRTLATSSLPLSPTLASNSQGSQGDQRTDRSAPIRSASQAEEEPSVEPVKKSQHRSSSSAPHHNHRSGTSRGLSRQETFDSETQESRDSAYVEPKEDYSHDHVDHYASHRDHNHRDETHGSSDHRHRESRHRSRDVDREQDHNECNKQRSRHKSKDRYCEKDGEVISKKRNEAGEWNR

SEQ ID NO: 52406 - protein, 92 aa, Homo sapiens
MHCTLTMETEAIDGYITCDNELSPEREHSNMAIDLTSSTPNGQHASPSHMTSSKSSFYDFFLCVCVSPATDFNLLGLWGPLTLWYSYCYRFC

SEQ ID NO: 52407 - protein, 695 aa, Homo sapiens
MNNHVSSKPSTMKLKHTINPILLYFIHFLISLYTILTYIPFYFFSESRQEKSNRIKAKPVNSKPDSAYRSVNSLDGLASVLYPGCDTLDKVFTYAKNKFKNKRLLGTREVLNEEDEVQPNGKIFKKVILGQYNWLSYEDVFVRAFNFGNGLQMLGQKPKTNIAIFCETRAEWMIAAQACFMYNFQLVTLYATLGGPAIVHALNETEVTNIITSKELLQTKLKDIVSLVPRLRHIITVDGKPPTWSEFPKGIIVHTMAAVEALGAKASMENQPHSKPLPSDIAVIMYTSGSTGLPKGVMISHSNIIAGITGMAERIPELGEEDVYIGYLPLAHVLELSAELVCLSHGCRIGYSSPQTLADQSSKIKKGSKGDTSMLKPTLMAAVPEIMDRIYKNVMNKVSEMSSFQRNLFILAYNYKMEQISKGRNTPLCDSFVFRKVRSLLGGNIRLLLCGGAPLSATTQRFMNICFCCPVGQGYGLTESAGAGTISEGGYFNTDKPHPRGEILIGGQSVTMGYYKNEAKTKADFFEDENGQRWLCTGDIGEFEPDGCLKIIDRKKDLVKLQAGEYVSLGKVEAALKNLPLVDNICAYANSYHSYVIGFVVPNQKELTELARKKGLKGTWEELCNSCEMENEVLKVLSEAAISASLEKFEIPVKIRLSPEPWTPETGLVTDAFKLKRKELKTHYQADIERMYGRK

SEQ ID NO: 52408 - protein, 210 aa, Homo sapiens
QQMQLANAMMPGAPLQPVPMFSVAPSLATNASAAAFNPYLGPVSPSLVPAEILPTAPMLVTGNPGVPVPAAAAAAAQKLMRTDRLEVCREYQRGNCNRGENDCRFAHPADSTMIDTNDNTVTVCMDYIKGRCSREKCKYFHPPAHLQAKIKAAQYQVNQAAAAQAAATAAAMALANMQLQQHTAFLPPGSILCMTPATSVDTHNICRTSD

SEQ ID NO: 52409 - protein, 72 aa, Homo sapiens
MKLKKQVTVCGAAIFCVAVFSLYLMLDRVQHDPTRHQNGGNFPRSQISVLQNRIEQLEQLLEENHEIISHIK

SEQ ID NO: 52410 - protein, 252 aa, Homo sapiens
MEELVVEVRGSNGAFYKAFVKDVHEDSITVAFENNWQPDRQIPFHDVRFPPPVGYNKDINESDEVEFYVIEYAACDATYNEIVTIERLRSVNPNKPATKDTFHKIKLDVPEDLRQMCAKEAAHKDFKKAVGAFSVTYDPENYQLVILSINEVTSKRAHMLIDMHFRSLRTKLSLIMRNEEASKQLESSRQLASRFHEQFIVREDLMGLAIGTHGANIQQARKVPGVTAIDLDEDTCTFHIYGEDQDAVKKAR

SEQ ID NO: 52411 - protein, 90 aa, Homo sapiens
NRELQIMRKLDHCNIVRLRYFFYSSGEKVFRPRTPPEAIALCSRLLEYTPTARLTPLEACAHSFFDELRDPNVKLPNGRDTPALFNFTTQ

SEQ ID NO: 52412 - protein, 71 aa, Homo sapiens
MAAERQEALREFVAVTGAEEDRARFFLESAGWDLQIALASFYEDGGDEDIVTISQATPSSVSRGTAPREKR

SEQ ID NO: 52413 - protein, 124 aa, Homo sapiens
  MOD_RES (1)..(1): Any amino acid
XFLKSTQEMYFYDGVSRDAASAALADAAEELLDRLASHSMLPSDVSILYHMKTLLLLQDTERLKHALEMFPEHCTMPPGGKSEAQRAWANGTGHTAHQWLHVSSDLGLLLSVFPISMTLTDAGV

SEQ ID NO: 52414 - protein, 213 aa, Homo sapiens
MREWWVQVGLLAVPLLAAYLHIPPPQLSPALHSWKSSGKFFTYKGLRIFYQDSVGVVGSPEIVVLLHGFPTSSYDWYKIWEGLTLRFHRVIALDFLGFGFSDKPRPHHYSIFEQASIVEALLRHLGLQNRRINLLSHDYGDIVAQELLYRYKQNRSGRLTIKSLCLSNGGIFPETHRPLLLQKLLKDGGVLSPILTRLMNFFVFSRGLTPVFG

SEQ ID NO: 52415 - protein, 213 aa, Homo sapiens
  MOD_RES (1)..(1): Any amino acid
XEINQARSKLSQLHESRQEAHRSLEQYDQVLDGAHGASLTDLANLSEGVSLAERGSFGAMDDPFKNKALLFSNNTQELHPDPFQTEDPFKSDPFKGADPFKGDPFQNDPFAEQQTTSTDPFGGDPFKESDPFRGSATDDFFKKQTKNDPFTSDPFTKNPSLPSKLDPFESSDPFSSSSVSSKGSDPFGTLDPFGSGSFNSAEGFADFSQMSKE

SEQ ID NO: 52416 - protein, 124 aa, Homo sapiens
MSPTQWDFPVELCCRPMAFVTLTGLDVVYNAVHRAVWDAFCANRRADRVPISFKQAAYYAQERKQLAKTLCNHEASVMYPNPDPLETQTGVLDFYGQRSWRQGILSFDLSDPEKEKVFQALCQL

SEQ ID NO: 52417 - protein, 59 aa, Homo sapiens
LYMYQLFRSLAYIHSFGICHRDIKPQNLLLDPDTAVLKLCDFGRAPELIFGATDYTSSI

SEQ ID NO: 52418 - protein, 439 aa, Homo sapiens
  MOD_RES (1)..(1): Any amino acid
XERPSQENGIQKHRTSLPAPMFSRSDFSVWTILKKCVGLELSKITMPIAFNEPLSFLQRITEYMEHVYLIHRASCQPQPLERMQSVAAFAVSAVASQWERTGKPFNPLLGETYELIREDLGFRFISEQVSHHPPISAFHSEGLNHDFLFHGSIYPKLKFWGKSVEAEPRGTITLELLKHNEAYTWTNPTCCVHNVIIGKLWIEQYGTVEILNHRTGHKCVLHFKPCGLFGKELHKVEGHIQDKNKKKLFMIYGKWTECLWGIDPVSYESFKKQERRGDHLRKAKLDEDSGKADSDVADDVPVAQETVQVIPGSKLLWRINTRPPNSAQMYNFTSFTVSLNELETGMEKTLPPTDCRLRPDIRGMENGNMECVPSPSQKPHGSYPGRSRLKGARLWEMGSELHRSGQPGEGAAGGEAERSTEGAGQGGGRVADEVVLPRQ

SEQ ID NO: 52419 - protein, 111 aa, Homo sapiens
MGSPAAPEGALGYVREFTRHSSDVLGNLNELRLRGILTDVTLLVGGQPLRAHKAVLIACSGFFYSIFRGRAGVGVDVLSLPGGPEARGFAPLLDFMYTSRLRLSPATAPAV

SEQ ID NO: 52420 - protein, 363 aa, Homo sapiens
MQLRNPELHLGCALALRFLALVSWDIPGARALDNGLARTPTMGWLHWERFMCNLDCQEEPDSCISEKLFMEMAELMVSEGWKDAGYEYLCIDDCWMAPQRDSEGRLQADPQRFPHGIRQLANYVHSKGLKLGIYADVGNKTCAGFPGSFGYYDIDAQTFADWGVDLLKFDGCYCDSLENLADGYKHMSLALNRTGRSIVYSCEWPLYMWPFQKPNYTEIRQYCNHWRNFADIDDSWKSIKSILDWTSFNQERIVDVAGPGGWNDPDMGDNFEVWERPLSGLAWAVAMINRQEIGGPRSYTIAVASLGKGVACNPACFITQLLPVKRKLGFYEWTSRLRSHINPTGTVLLQLENTMQMSLKDLL

SEQ ID NO: 52421 - protein, 109 aa, Homo sapiens
MFKGPEKDIEFIYTAPSSAVCGVSLDVGGKKEYLIAGKAEGDGKMHITLCDFIVPWDTLSTTQKKSLNHRYQMGCECKVSRSCLCWSIASSQCLQMDGRDFDPWLSRTR

SEQ ID NO: 52422 - protein, 218 aa, Homo sapiens
  MOD_RES (1)..(1): Any amino acid
XPGQRQSQESGLLHTHRGLPHQLSGLDPRRDYRRHEDLLHGPHALSSGLGDLSIHSLPHAIEEVPHVEDPGINIPDQTVIKKGPVSLSKSNSNAVSAIPINKDNLFGGVVNPNEVFCSVPGRLSLLSSTSKYKVTVAEVQRRLSPPECLNASLLGGVLRRAKSKNGGRSLREKLDKIGLNLPAGRRKAANVTLLTSLVEGEVVIFPDKCIHQILQRRK

SEQ ID NO: 52423 - protein, 132 aa, Homo sapiens
AVQFTGWSSSCILHFPEVLHDFHSLQTLPSLLQRIGNPNETQNNSTSWPVFKSTEQKYLTLNTESTRIMTKLRAQQCRFWTSFFPKVLEMTGNIDEAEWEWKAGFHRWNNYMMDWKNQFNDYTSKKESCVGL

SEQ ID NO: 52424 - protein, 1088 aa, Homo sapiens
MSAAPAYSEDKGGSAGPGEPEYGHDPASGGIFSSDYKRHDDLKEMLDTNKDSLKLEAMKRIVAMIARGKNASDLFPAVVKNVACKNIEVKKLVYVYLVRYAEEQQDLALLSISTFQRGLKDPNQLIRASALRVLSSIRVPIIVPIMMLAIKEAASDMSPYVRKTAAHAIPKLYSLDSDQKDQLIEVIEKLLADKTTLVAGSVVMAFEEVCPERIDLIHKNYRKLCNLLIDVEEWGQVVIISMLTRYARTQFLSPTQNESLLEENAEKAFYGSEEDEAKGAGSEETAAAAAPSRKPYVMDPDHRLLLRNTKPLLQSRSAAVVMAVAQLYFHLAPKAEVGVIAKALVRLLRSHSEVQYVVLQNVATMSIKRRGMFEPYLKSFYIRSTDPTQIKILKLEVLTNLANETNIPTVLREFQTYIRSMDKDFVAATIQAIGRCATNIGRVRDTCLNGLVQLLSNRDELVVAESVVVIKKLLQMQPAQHGEIIKHLAKLTDNIQVPMARASILWLIGEYCEHVPRIAPDVLRKMAKSFTAEEDIVKLQVINLAAKLYLTNSKQTKLLTQYVLSLAKYDQNYDIRDRARFTRQLIVPSEQGGALSRHAKKLFLAPKPAPVLESSFKDRDHFQLGSLSHLLNAKATGYQELPDWPEEAPDPSVRNVEVPEWTKCSNREKRKEKEKPFYSDSEGESGPTESADSDPESESESDSKSSSESGSGESSSESDNEDQDEDEEKGRGSESEQSEEDGKRKTKKKVPERKGEASSSDEGSDSSSSSSESEMTSESEEEQLEPASWSRKTPPSSKSAPATKEISLLDLEDFLSTPTVTPPSVQPVSPPAIVSTSLAADLEGLTLTDSTLVPSLLSPVSGVGRQELLHRVAGEGLAVDYTFSRQPFSGDPHMVSVHIHFSNSSDTPIKGLHVGTPKLPAGISIQEFPEIESLAPGESATAVMGINFCDSTQAANFQLCTQTRQFYVSIQPPVGELMAPVFMSENEFKKEQGKLMGMNEITEKLMLPDTCRSDHIVVQKVTATANLGRVPCGTSDEYRFAGRTLTGGSLVLLTLDARPAGAAQLTVNSEKMVIGTMLVKDVIQALTQ

SEQ ID NO: 52425 - protein, 223 aa, Homo sapiens
MPRVVPDQRSKFENEEFFRKLSRECEIKYTGFRDRPHEERQARFQNACRDGRSEIAFVATGTNLSLQFFPASWQGEQRQTPSREYVDLEREAGKVYLKAPMILNGVCVIWKGWIDLQRLDGMGCLEFDEERAQQEDALAQQAFEEARRRTREFEDRDRSHREEMEVRVSQLLAVTEWRSTRKFSSFWIPPPRGCFCIALTSRENSSCWCVFFRLIWSHLMTAS

SEQ ID NO: 52426 - protein, 194 aa, Homo sapiens
MGGFFSSIFSSLFGTREMRILILGLDGAGKTTILYRLQVGEVVTTIPTIGFNVETVTYKNLKFQVWDLGGQTSIRPYWRCYYSNTDAVIYVVDSCDRDRIGISKSELVAMLEEEELRKAILVVFANKQDMEQAMTSSEMANSLGLPALKDRKWQIFKTSATKGTGLDEAMEWQVSCFQKPSVHLCVLAAMHVHV

SEQ ID NO: 52427 - protein, 313 aa, Homo sapiens
MPLSMRYLFIISVSSVIIFIVFSVFNFGGDPSFQRLNISDPLRLTQVCTSFINGKTRFLWKNKLMIHEKSSCKEYLTQSHYITAPLSKEEADFPLAYIMVIHHHFDTFARLFRAIYMPQNIYCVHVDEKATTEFKDAVEQLLSCFPNAFLASKMEPVVYGGISRLQADLNCIRDLSAFEVSWKYVINTCGQDFPLKTNKEIVQYLKGFKGKNITPGVLPPAHAIGRTKYVHQEHLGKELSYVIRTTALKPPPPHNLTIYFGSAYVALSREFANFVLHDPRAVDLLQWSKDTFSPDEHFWVTLNRIPGTPGSLP

SEQ ID NO: 52428 - protein, 903 aa, Homo sapiens
MSDEGGSNFRRVAIRRKSNPSYLPPGVPRPWSRPASHLGRVGTAAFKGQVPSGATGSSTCPKIALVPPCSTSSTTTLVGENVSEEEAQGINGNRPAKHSAASPKPQVPPKPLHLQNSPSSNIHQTPRHKALPSAKPRMEEIKPASASCVSKEKPSKVSDLISRFEGGSSLSNYSDLKKESAVNLNAPRTPGRHGLTTTPQQKLLSQHLPQRQGNDTDKTQGAQTCVANGVMAAQNQMECEEEKAATLSSDTSIQASEPLLDTHIVNGERDETATAPASPTTDSCDGNASDSSYRTPGIGPVLPLEERGAETETKVQERENGESPLELEQLDQHHEMKETNEQKLHKIANELLLTERAYVNRLDLLDQVFYCKLLEEANRGSFPAEMVNKIFSNISSINAFHSKFLLPELEKRMQEWETTPRIGDILQKLAPFLKMYGEYVKGFDNAMELVKNMTERIPQFKSVVEEIQKQKICGSLTLQHHMLEPVQRIPRYEMLLKDYLRKLPPDSLDWNDAKKSLEIISTAASHSNSAIRKMENLKKLLEIYEMLGEEEDIVNPSNELIKEGQILKLAARNTSAQERYLFLFNNMLLYCVPKFSLVGSKFTVRTRVGIDGMKIVETQNEEYPHTFQVSGKERTLELQASSAQDKEEWIKALQETIDAFHQRHETFRNAIAKDNDIHSEVSTAELGKRAPRWIRDNEVTMCMKCKEPFNALTRRRHHCRACGYVVCWKCSDYKAQLEYDGGKLSKVCKDCYQIISGFTDSEEKKRKGILEIESAEVSGNSVVCSFLQYMEKSKPWQKAWCVIPKQDPLVLYMYGAPQDVRAQATIPLLGYVVDEMPRSADLPHSFKLTQSKSVHSFAADSEELKQKWLKVILLAVTGETPGGPNEHPATLDDHPEPKKKSEC

SEQ ID NO: 52429 - protein, 96 aa, Homo sapiens
ICRKMLHRHMLIFRLPNLQMLDGSPVNSDDRAKAEFHLAELQAKKNSLIPVTHSPMDGRSFGQVKTPPIEITNVLLPSGFSHYLGSDVTLTPEVEV

SEQ ID NO: 52430 - protein, 260 aa, Homo sapiens
LGGEDKATPCPSILELEELLRAGKSSCSRVDEVWPNLFIGDAQGPGALCGGREPLCHAGPGLPHAAPAAVPAPGGDHREAAPMGLPQPRLPAPALQAGPATAGCRPELRGQSWSLLPAMGLCHFATLALILLVLLEALAQADTQKMKQHQVCGDRRLKASSTNCPSEKCTAWARYSHRMDSLQKQDLRRPKIHGAVQASPYQPPTLASLQRLLWVRQAATLNHIDEVWPSLFLGDAYAARDKSKLIQLGITHVVNAAAGK

SEQ ID NO: 52431 - protein, 909 aa, Homo sapiens
  MOD_RES (1)..(1): Any amino acid
XEKQEQNDQYTPSNRFIWNQGKWLPNSTTTCSLSPDSAILKLKAAANAVLQDKSLTRTEETMRFESFSSPFSSQSASSTLAALSKKVSERSLTPGQEHPPPASSFLSLASMTSSAALLKEVAARAAGSLLAEKSSLLPEDPLPPPPSEKKPEKVTPPPPPPPPPPPPPPPQSLELLLLPVPKGRVSKPSNSEEESGKPFQCPICGLVIKRKSYWKRHMVIHTGLKSHQCPLCPFRCARKDNLKSHMKVHQHQDRGETFQCQLCPFTSSRHFSLKLHMRCHQHFLRTEAKVKEEIPDPDVKGSPHLSDSACLGQQREGGGTELVGTMMTSNTPERTSQGGAGVSPLLVKEEPKEDNGLPTSFTLNAADRPANHTKLKDPSEYVANSASALFSQDISVKMASDFLMKLSAANQKEPMNLNFKVKEEPKEGESLSTTLPRSSYVFSPESEVSAPGVSEDALKPQEGKGSVLRRDVSVKAASELLMKLSAESYKETQMVKIKEEPMEVDIQDSHVSISPSRNVGYSTLIGREKTEPLQKMPEGRVPPERNLFSQDISVKMASELLFQLSEKVSKEHNHTKENTIRTTTSPFFSEDTFRQSPFTSNSKELLPSDSVLHGRISAPETEKIVLEAGNGLPSWKFNDQLFPCDVCGKVFGRQQTLSRHLSLHTEERKYKCHLCPYAAKCRANLNQHLTVHSVKLVSTDTEDIVSAVTSEGSDGKKHPYYYSCHVCGFETELNVQFVSHMSLHVDKEQWMFSICCTACDFVTMEEAEIKTHIGTKHTGEDRKTPSESNSPSSSSLSALSDSANSKDDSDGSQKNKGGNNLLVISVMPGSQPSLNSEEKPEKGFECVFCNFVCKTKNMFERHLQIHLITRMFECDVCHKFMKTPEQLLEHKKCHTVPTGGLNLCSRMTK

SEQ ID NO: 52432 - protein, 102 aa, Homo sapiens
MKEAGQMQNLESARAGRSVSTQTGSMTGQIPRLSKVNLFTLLSLWMELFPAEAQRQKSQKNEEGKHGPLGDNEERTRVSTDKRQKTMFCLFENDCKWITGSS

SEQ ID NO: 52433 - protein, 197 aa, Homo sapiens
MKGLYFQQSSTDEEITFVFQEKEDLPVTEDNFVKLQVKACALSQINTKLLAEMKMKKDLFPVGREIAGIVLDVHKPEKVTWTEAAGSIRDGVRAYTALHYLSHLSPGKSVLIMDGASAFGTIAIQLAHHRGAKVISTACSLEDKQCLERFRPPIDLSWMNPFHCMRQKFPWKLFRKIKEEKSKLFNFNFLLSQTSVG

SEQ ID NO: 52434 - protein, 33 aa, Homo sapiens
  MOD_RES (1)..(1): Any amino acid
XIGKCCCLFLGLQEVRSNAPRPDEFLLGYGFRS

SEQ ID NO: 52435 - protein, 34 aa, Homo sapiens
MLKKQSAGLVLWGAILFVAWNALLLLFFWTRPAP

SEQ ID NO: 52436 - protein, 40 aa, Homo sapiens
MMGHRPVLVLNYCRYHPNMFGTQVHDEDAFGPNGRHCDDQ

SEQ ID NO: 52437 - protein, 101 aa, Homo sapiens
MSSDSADPFYWMRVILASNRGTLMELGISPIVTSGLIMQLLAGAKIIEVGDTPKDRALFNGAQKLFGMIITIGQSIVYVMTGMYGDPSEMGAGICLLITIQ

SEQ ID NO: 52438 - protein, 112 aa, Homo sapiens
MAANKSKGQSSLALHKVIMVGSGGVGKSALTLQFMYDEFVEDYEPTKADSYRKKVVLDGEEVQIDILDTAGQEDYAAIRDNYFRSGEGFLLVFSITEHESFTATAEFREQIL

SEQ ID NO: 52439 - protein, 149 aa, Homo sapiens
  MOD_RES (1)..(1): Any amino acid
XENLQLRQPPGPVPTPPLPSERAEHTPMAPGGSTHRRDRQAFSMYEPGSALKPFGGPPGDELTTRLQPFHSTELEDDAIYSVHVPAGLYRAGREEVSRAGQRGRLPPRAGKPGWRPRSWASQHRGCHLEDRAGHQEHSGTVAGSPGVQA

SEQ ID NO: 52440 - protein, 102 aa, Homo sapiens
  MOD_RES (1)..(1): Any amino acid
XLDEDGKVLTPEELLYRAVQSVNVTHDAVHAQMDVKLRSLICVGLNPGWVQIKCELRVLCCFAFSLSQDWELPAKREAQQPLKEGVRDMLVKHHLFSWDVDG

SEQ ID NO: 52441 - protein, 75 aa, Homo sapiens
MPGPPRSLEMMESRSVGQAGVQRRNLSSLQALSPGFTPFSASRAAGTTDGVSLCHPGWSQWHNLGSLQPLPPGFK

SEQ ID NO: 52442 - protein, 224 aa, Homo sapiens
MEFPDLGAHCSEPSCQRLDFLPLKCDACSGIFCADHVAYAQHHCGSAYQKDIQVPVCPLCNVPVPVARGEPPDRAVGEHIDRDCRSDPAQQKRKIFTNKCERAGCRQREMMKLTCERCSRNFCIKHRHPLDHDCSGEGHPTSRAGLAAISRAQAVASTSTVPSPSQTMPSCTSPSRATTRSPSWTAPPVIALQNGLSEDEALQRALEMSLAETKPQVPRYLTLL

SEQ ID NO: 52443 - protein, 142 aa, Homo sapiens
MRLPLSHSPEHVEMALLSNILAAYSFVSENPERAALYFVSGVCIGLVLTLAALVIRISCHTDCRRRPGKKFLQDRESSSDSSDSEDGSEDTVSDLSVRRHRRFERTLNKNVFTSAEELERAQRLEERERIIREIWMNGQPEV

SEQ ID NO: 52444 - protein, 182 aa, Homo sapiens
  MOD_RES (1)..(1): Any amino acid
XCKPPGERNIHGLKVNTRAGPSQHSSPAVSDSLPSNSLKKSSAELKKILANGQMNEQDIRYRDTLGHGNGGTVYKAYHVPSGKILAVKVILLDITLELQKQIMSELEILYKCDSSYIIGFYGAFFVENRISICTEFMDGGSLDVYRKMPEHVLGRIAVAVVKGLTYLWSLKILHRANKDLCT

SEQ ID NO: 52445 - protein, 136 aa, Homo sapiens
METFPLLLLSLGLVLAEASESTMKIIKEEFTDEEMQYDMAKSGQEKQTIEILMNPILLVKNTSLSMSKDDMSSTLLTFRSLHYNDPKGNSSGNDKECCNDMTVWRKVSEANGSCKWSNNFIRSSTEVMRRVHRAPS

SEQ ID NO: 52446 - protein, 238 aa, Homo sapiens
MTPHRLLPPLLLLLALLLAASPGGALARCPGCGQGVQAGCPGGCVEEEDGGSPAEGCAEAEGCLRREGQECGVYTPNCAPGLQCHPPKDDEAPLRALLLGRGRCLPARAPAEENPKESKPQAGTARPQDVNRRDQQRNPGTSTTPSQPNSAGVQDTEMGPCRRHLDSVLQQLQTEVYRGAQTLYVPNCDHRGFYRKRQCRSSQGQRRGPCWCVDRMGKSLPGSPDGNGSSSCPTGSSG

SEQ ID NO: 52447 - protein, 212 aa, Homo sapiens
MTQLLTLILSYNRLRCIPPRTFDGLKSLRLLSLHGNDISVVPEGAFNDLSALSHLAIGANPLYCDCNMQWLSDWVKSEYKEPGIARCAGPGEMADKLLLTTPSKKFTCQGLPGPCGFLIPGPVDVNILAKCNPCLSNPCKNDGTCNSDPVDFYRCTCPYGFKGQDCDVPIHACISNPCKHGGTCHLKEGEEDGFWCICADGFEGENCEVNVD

SEQ ID NO: 52448 - protein, 155 aa, Homo sapiens
RVENVCKRLNLQPLAYLWQRNQEDLLREMISSNIQAMIIKVAALGLDPDKHLGKTLDQMEPYLIELSKKYGVHVCGEGGEYETFTLDCPLFKKKIIVDSSEVVIHSADAFAPVAYLRFLELHLEDKCLTTTEHLIIYIIFEKCFGTLFIKPPFLY

SEQ ID NO: 52449 - protein, 191 aa, Homo sapiens
TLGSTIDKATGILLYGLASRLRDTRRLSFLVSYIASKKIHTEPQLSAALEYVRSHPLDPIDTVDFERECGVGVIVTPEQIEEAVEAAINRHRPQLLVERYHFNMGLLMEVGGVLFFAFLQLLVPMLLGEARAVLKWADGKMIKNEVDMQVLHLLGPKLEADLEKKFKVAKARLEETDRRTAKDVVENGETA

SEQ ID NO: 52450 - protein, 145 aa, Homo sapiens
MELTQPAEDLIQTQQTPASELGDPEDPGEEAADGSDTVVLSLFPCTPEPVNPEPDASVSSPQGSSLKHSTTLTNRQRGNEVSALPATLDSLSIHQLAAQGELDQLKEHLRKGDNLVNKPDERGFTPLIWASAFGEIETVRFLLEW

SEQ ID NO: 52451 - protein, 174 aa, Homo sapiens
MGNAQERPSETIDRERKRLVETLQADSGLLLDALLARGVLTGPEYEALDALPDAERRVRRLLLLVQGKGEAACQELLRCAQRTAGAPDPAWDWQHVGPGYRDRSYDPPCPGHWTPEAPGSGTTCPGLPRASDPDEAGGPEGSEAVQSGTPEEPEPELEAEASKEAEPEPEPEPE

SEQ ID NO: 52452 - protein, 19 aa, Homo sapiens
MGPSCPVFLSFTKLSLWWL

SEQ ID NO: 52453 - protein, 33 aa, Homo sapiens
MERKRREKIERRQQEVETELKMWDPHNDPNAQG

SEQ ID NO: 52454 - protein, 287 aa, Homo sapiens
TEAARTLQTAAQATLRQTEPLTKLHQEARAALTQASSSVQAATVTVMGARTLLADLEASAGFAGMKLQFPRPKDQAALQRKADSVSDRLLADTRKKTKQAERMLGNAAPLSSSAKKKGREAELAKALLRERKQAHRRASRLTSQTQATLQQASQQVLASEARRQELEEAERVGAGLSEMEQQIRESRISLEKDIETLSELLARLGSLDTHQAPAQALNETQWALERLRLQLGSPGSLQRKLSLLEQESQQQELQIQGFESDLAEIRADKQNLEAILHSLPENCASWQ

SEQ ID NO: 52455 - protein, 304 aa, Homo sapiens
MAHYSLNLPSSGDPLASASRVAGTTECDVKDYGDLPFADIPNDSPFQIVKNPRSVGKASEQLAGKVAEVKKNGRISLVLGGDHSLAIGSISGHARVHPDLGVIWVDAHTDINTPLTTTSGNLHGQPVSFLLKELKGKIPDVPGFSWVTPCISAKDIVYIGLRDVDPGEHYILKTLGIKYFSMTEVDRLGIGKVMEETLSYLLGRKKRPIHLSFDVDGLDPSFTPATGTPVVGGLTYREGLYITEEIYKTGLLSGLDIMEVNPSLGKTPEEVTRTVNTAVAITLACFGLAREGNHKPIDYLNPPK

SEQ ID NO: 52456 - protein, 311 aa, Homo sapiens
MAEAVFHAPKRKRRVYETYESPLPIPFGQDHGPLKEFKIFRAEMINNNVIVRNAEDIEQLYGKGYFGKGILSRSRPSFTISDPKLVAKWKDMKTNMPIITSKRYQHSVEWAAELMRRQGQDESTVRRILKDYTKPLEHPPVKRNEEAQVHDKLNSGMVSNMEGTAGGERPSVVNGDSGKSGGVGDPREPLGCLQEGSGCHPTTESFEKSVREDASPLPHVCCCKQDALILQRGLHHEDGSQHIGLLHPGDRGPDHEYVLVEEAECAMSEREAAPNEELVQRNRLICRRNPYRIFEYLQLSLEELFCHYRAS

SEQ ID NO: 52457 - protein, 425 aa, Homo sapiens
MKETRGYGGDAPFCTRLNHSYTGMWAPERSAEARGNLTRPPGSGEDCGSVSVAFPITMLLTGFVGNALAMLLVSRSYRRRESKRKKSFLLCIGWLALTDLVGQLLTTPVVIVVYLSKQRWEHIDPSGRLCTFFGLTMTVFGLSSLFIASAMAVERALAIRAPHWYASHMKTRATRAVLLGVWLAVLAFALLPVLGVGQYTVQWPGTWCFISTGRGGNGTSSSHNWGNLFFASAFAFLGLLALTVTFSCNLATIKALVSRCRAKATASQSSAQWGRITTETAIQLMGIMCVLSVCWSPLLIMMLKMIFNQTSVEHCKTHTEKQKECNFFLIAVRLASLNQILDPWVYLLLRKILLRKFCQMRKRRLREQAPLLPTSTVIDPSRFCAQPFRWFLDLSFPAMSSSHPQLPLTLASFKLLREPCSVQLS

SEQ ID NO: 52458 - protein, 354 aa, Homo sapiens
MVARGSRDDSSPQESCCLLRNMVSKSRWKLLAMLALVLVVMVWYSISREDRYIELFYFPIPEKKEPCLQGEAESKASKLFGNYSRDQPIFLRLEDYFWVKTPSAYELPYGTKGSEDLLLRVLAITSSSIPKNIQSLRCRRCVVVGNGHRLRNSSLGDAINKYDVVIRLNNAPVAGYEGDVGSKTTMRLFYPESAHFDPKVENNPDTLLVLVAFKAMDFHWIETILSDKKRVRKGFWKQPPLIWDVNPKQIRILNPFFMEIAADKLLSLPMQQPRKIKQKPTTGLLAITLALHLCDLVHIAGFGYPDAYNKKQTIHYYEQITLKSMAGSGHNVSQEALAIKRMLEMGAIKNLTSF

SEQ ID NO: 52459 - protein, 209 aa, Homo sapiens
  MOD_RES (1)..(1): Any amino acid
XKELTADARELKGELYCLPCHDKMGVPICGACRRPIEGRVVNAMGKQWHVEHFVCAKCEKPFLGHRHYERKGLAYCETHYNQLFGDVCFHCNRVIEGDVVSALNKAWCVNCFACSTCNTKLTLKDKFVEIDLKPVCKHCYEKMPEEFKRRLAKREREAKDKDKQKKKKPVCLNKFVEFDMKPVCKKCYEKFPLELKKRLKKLAETLGRK

SEQ ID NO: 52460 - protein, 12 aa, Homo sapiens
MSSKRTKTKTKK

SEQ ID NO: 52461 - protein, 479 aa, Homo sapiens
MLRRKGTNISETSLIGTAACTSTSSQNDPEVIIVGAGVLGSALAAVLSRDGRKVTVIERDLKEPDRIVGEFLQPGGYHVLKDLGLGDTVEGLDAQVVNGYMIHDQESKSEVQIPYPLSENNQVQSGRAFHHGRFIMSLRKAAMAEPNAKFIEGVVLQLLEEDDVVMGVQYKDKETGDIKELHAPLTVVADGLFSKFRKSLVSNKVSVSSHFVGFLMKNAPQFKANHAELILANPSPVLIYQISSSETRVLVDIRGEMPRNLREYMVEKIYPQIPDHLKEPFLEATDNSHLRSMPASFLPPSSVKKRGVLLLGDAYNMRHPLTGGGMTVAFKDIKLWRKLLKGIPDLYDDAAIFEAKKSFYWARKTSHSFVVNILAQALYELFSATDDSLHQLRKACFLYFKLGGECVAGPVGLLSVLSPNPLVLIGHFFAVAIYAVYFCFKSEPWITKPRALLSSGAVLYKACSVIFPLIYSEMKYMVH

SEQ ID NO: 52462 - protein, 1943 aa, Homo sapiens
MEDRRAEKSCEQACESLKRQDYEMALKHCTEALLSLGQYSMADFTGPCPLEIERIKIESLLYRIASFLQLKNYVQADEDCRHVLGEGLAKGEDAFRAVLCCMQLKGKLQPVSTILAKSLTGESLNGMVTKDLTRLKTLLSETETATSNALSGYHVEDLDEGSCNGWHFRPPPRGITSSEEYTLCKRFLEQGICRYGAQCTSAHSQEELAEWQKRYASRLIKLKQQNENKQLSGSYMETLIEKWMNSLSPEKVLSECIEGVKVEHNPDLSVTVSTKKSHQTWTFALTCKPARMLYRVALLYDAHRPHFSIIAISAGDSTTQVSQEVPENCQEWIGGKMAQNGLDHYVYKVGIAFNTEIFGTFRQTIVFDFGLEPVLMQRVMIDAASTEDLEYLMHAKQQLVTTAKRWDSSSKTIIDFEPNETTDLEKSLLIRYQIPLSADQLFTQSVLDKSLTKSNYQSRLHDLLYIEEIAQYKEISKFNLKVQLQILASFMLTGVSGGAKYAQNGQLFGRFKLTETLSEDTLAGRLVMTKVNAVYLLPVPKQKLVQTQGTKEKVYEATIEEKTKEYIFLRLSRECCEELNLRPDCDTQVELQFQLNRLPLCEMHYALDRIKDNGVLFPDISMTPTIPWSPNRQWDEQLDPRLNAKQKEAVLAITTPLAIQLPPVLIIGPYGTGKTFTLAQAVKHILQQQETSRILICTHSNSAADLYIKDYLHPYVEAGNPQARPLRVYFRNRWVKTVHPVVHQYCLISSAHSTFQMPQKEDILKHRVVVVTLNTSQYLCQLDLEPGFFTHILLDEAAQAMECETIMPLALATQNTRIVLAGDHMQLSPFVYSEFARERNLHVSLLDRLYEHYPAEFPCRILLCENYRSHEAIINYTSELFYEGKLMASGKQPAHKDFYPLTFFTARGEDVQEKNSTAFYNNAEVFEVVERVEELRRKWPVAWGKLDDGSIGVVTPYADQVFRIRAELRKKRLSDVNVERVLNVQGKQFRVLFLSTVRTRHTCKHKQTPIKKKEQLLEDSTEDLDYGFLSNYKLLNTAITRAQSLVAVVGDPIALCSIGRCRKFWERFIALCHENSSLHGITFEQIKAQLEALELKKTYVLNPLAPEFIPRALRLQHSGSTNKQQQSPPKGKSLHHTQNDHFQNDGIVQPNPSVLIGNPIRAYTPPPPLGPHPNLGKSPSPVQRIDPHTGTSILYVPAVYGGNVVMSVPLPVPWTGYQGRFAVDPRIITHQAAMAYNMNLLQTHGRGSPIPYGLGHHPPVTIGQPQNQHQEKDQHEQNRNGKSDTNNSGPEINKIRTPEKKPTEPKQVDLESNPQNRSPESRPSVVYPSTKFPRKDNLNPRHINLPLPAPHAQYAIPNRHFHPLPQLPRPPFPIPQQHTLLNQQQNNLPEQPNQIPPQPNQVVQQQSQLNQQPQQPPPQLSPAYQAGPNNAFFNSAVAHRPQSPPAEAVIPEQQPPPMLQEGHSPLRAIAQPGPILPSHLNSFIDENPSGLPIGEALDRIHGSVALETLRQQQARFQQWSEHHAFLSQGSAPYPHHHHPHLQHLPQPPLGLHQPPVRADWKLTSSAEDEVETTYSRFQDLIRELSHRDQSETRELAEMPPPQSRLLQYRQVQSRSPPAVPSPPSSTDHSSHFSNFNDNSRDIEVASNPAFPQRLPPQIFNSPFSLPSEHLAPPPLKYLAPDGAWTFANLQQNHLMGPGFPYGLPPLPHRPPQNPFVQIQNHQHAIGQEPFHPLSSRTVSSSSLPSLEEYEPRGPGRPLYQRRISSSSVQPCSEEVSTPQDSLAQCKELQDHSNQSSFNFSSPESWVNTTSSTPYQNIPCNGSSRTAQPRELIAPPKTVKPPEDQLKSENLEVSSSFNYSVLQHLGQFPPLMPNKQIAESANSSSPQSSAGGKPAMSYASALRAPPKPRPPPEQAKKSSDPLSLFQELSLGSSSGSNGFYSYFK

SEQ ID NO: 52463 - protein, 279 aa, Homo sapiens
MAPRRVRSFLRGLPALLLLLLFLGPWPAASHGGKYSREKNQPKPSPKRESGEEFRMEKLNQLWEKAQRLHLPPVRLAELHADLKIQERDELAWKKLKLDGLDEDGEKEARLIRNLNVILAKYGLDGKKDARQVTSNSLSGTQEDGLDDPRLEKLWHKAKTSGKFSGEELDKLWREFLHHKEKVHEYNVLLETLSRTEEIHENVISPSDLSDIKGSVLHSRHTELKEKLRSINQGLDRLRRVSHQGYSTEAGSRSRLGLFGSSQEPECLTFTSTTSCWRP

SEQ ID NO: 52464 - protein, 164 aa, Homo sapiens
MVQPEYRIYEMNKRLQSRTEDSDNLWWDAFATEFFEDDATLTLSFCLEDGPKRYTIGRTLIPRYFSTVFEGGVTDLYYILKHSKESYHNSSITVDCDQCTMVTQHGKPMFTKVCTEGRLILEFTFDDLMRIKTWHFTIRQYRELVPRSILAMHAQDPQVLDQLS

SEQ ID NO: 52465 - protein, 995 aa, Homo sapiens
MWRCGGRQGLCVLRRLSGGHAHHRAWRWNSNRACERALQYKLGDKIHGFTVNQVTSVPELFLTAVKLTHDDTGARYLHLAREDTNNLFSVQFRTTPMDSTGVPHILEHTVLCGSQKYPCRDPFFKMLNRSLSTFMNAFTASDYTLYPFSTQNPKDFQNLLSVYLDATFFPCLRELDFWQEGWRLEHENPSDPQTPLVFKGVVFNEMKGAFTDNERIFSQHLQNRLLPDHTYSVVSGGDPLCIPELTWEQLKQFHATHYHPSNARFFTYGNFPLEQHLKQIHEEALSKFQKIEPSTVVPAQTPWDKPREFQITCGPDSFATDPSKQTTISVSFLLPDITDTFEAFTLSLLSSLLTSGPNSPFYKALIESGLGTDFSPDVGYNGYTREAYFSVGLQGIAEKDIETVRSLIDRTIDEVVEKGFEDDRIEALLHKIEIQMKHQSTSFGLMLTSYIASCWNHDGDPVELLKLGNQLAKFRQCLQENPKFLQEKVKQYFKNNQHKLTLSMRPDDKYHEKQAQVEATKLKQKVEALSPGDRQQIYEKGLELRSQQSKPQDASCLPALKVSDIEPTIPVTELDVVLTAGDIPVQYCAQPTNGMVYFRAFSSLNTLPEELRPYVPLFCSVLTKLGCGLLDYREQAQQIELKTGGMSASPHVLPDDSHMDTYEQGVLFSSLCLDRNLPDMMQLWSEIFNNPCFEEEEHFKVLVKMTAQELANGIPDSGHLYASIRAGRTLTPAGDLQETFSGMDQVRLMKRIAEMTDIKPILRKLPRIKKHLLNGDNMRCSVNATPQQMPQTEKAVEDFLRSIGRSKKERRPVRPHTVEKPVPSSSGGDAHVPHGSQVIRKLVMEPTFKPWQMKTHFLMPFPVNYVGECIRTVPYTDPDHARDPNTIETLQSFGKAVDWAKSGKFTQQDIDEAKLSVFSTVDAPVAPSDKGMDHFLYGLSDEMKQAHREQLFAVSHDKLLAVSDRYLGTGKSTHGLAILGPENPKIAKDPSWIIQ

SEQ ID NO: 52466 - protein, 140 aa, Homo sapiens
DVFLMIRRHKTTIFTDAKESSTVFELKRIVEGILKRPPDEQRLYKLLVRSLWDLPHVGPLPRSCFSPQDDQLLDDGKTLGECGFTSQTARPQAPATVGLAFRADDTFEALCIEPFSSPPELPDVMKPQDSGSSANEQAVQ

SEQ ID NO: 52467 - protein, 81 aa, Homo sapiens
MTPCTTAARGTPSALQDTRPPRLSICFEGPPLRRRGGVVDHRDVILAHQAHKIHSTPQARRKEWDHHHSELHRPRTGAASA

SEQ ID NO: 52468 - protein, 453 aa, Homo sapiens
MRFVVALVLLNVAAAGAVPLLATESVKQEEAGVRPSAGNVSTHPSLSQRPGGSTKSHPEPQTPKDSPSKSSAEAQTPEDTPNKSGAEAKTQKDSSNKSGAEAKTQKGSTSKSGSEAQTTKDSTSKSHPELQTPKDSTGKSGAEAQTPEDSPNRSGAEAKTQKDSPSKSGSEAQTTKDVPNKSGADGQTPKDGSSKSGAEDQTPKDVPNKSGAEKQTPKDGSNKSGAEEQGPIDGPSKSGAEEQTSKDSPNKVVPEQPSRKDHSKPISNPSDNKELPKADTNQLADKGKLSPHAFKTESGEETDLISPPQEEVKSSEPTEDVEPKEAEDDDTGPEEGSPPKEEKEKMSGSASSENREGTLSDSTGSEKDDLYPNGSGNGSAESSHFFAYLVTAAILVAVLYIAHHNKRKIIAFVLEGKRSKVTRRPKASDYQRLDQKIFFPLSPNRMVYSSGKR

SEQ ID NO: 52469 - protein, 202 aa, Homo sapiens
MAAAAARVVLSSAARRRLWGFSESLLIRGAAGRSLYFGENRLRSTQAATQVVLNVPETRVTCLESGLRVASEDSGLSTCTVGLWIDAGSRYENEKNNGTAHFLEHMAFKGTKKRSQLDLELEIENMGAHLNAYTSREQTVYYAKAFSKDLPRAYQNTALGRTILGPTENIKSISRKDLVDYITTHYKGPRIVLAAAGDSCEG

SEQ ID NO: 52470 - protein, 621 aa, Homo sapiens
  MOD_RES (1)..(1): Any amino acid
XSIDQDYERAYHRAYDPDYERAYSPEYRRGARHDARSRGPRSRSREHPHSRSPSPEPRGRPGPIGVLLMKSRANEEYGLRLGSQIFVKEMTRTGLATKDGNLHEGDIILKINGTVTENMSLTDARKLIEKSRGKLQLVVLRDSQQTLINIPSLNDSDSEIEDISEIESNRSFSPEERRHQYSDYDYHSSSEKLKERPSSREDTPSRLSRMGATPTPFKSTGDIAGTVVPETNKEPRYQEDPPAPQPKAAPRTFLRPSPEDEAIYGPNTKMVRFKKGDSVGLRLAGGNDVGIFVAGIQEGTSAEQEGLQEGDQILKVNTQDFRGLVREDAVLYLLEIPKGEMVTILAQSRADVYRDILACGRGDSFFIRSHFECEKETPQSLAFTRGEVFRVVDTLYDGKLGNWLAVRIGNELEKGLIPNKSRAEQMASVQNAQRDNAGDRADFWRMRGQRSGVKKNLRKSREDLTAVVSVSTKFPAYERVLLREAGFKRPVVLFGPIADIAMEKLANELPDWFQTAKTEPKDAGSEKSTGVVRLNTVRQIIEQDKHALLDVTPKAVDLLNYTQWFPIVIFFNPDSRQGVKTMRQRLNPTSNKSSRKLFDQANKLKKTCAHLFTDRNCPEAS

SEQ ID NO: 52471 - protein, 1748 aa, Homo sapiens
MPPLLAPLLCLALLPALAARGPRCSQPGETCLNGGKCEAANGTEACVCGGAFVGPRCQDPNPCLSTPCKNAGTCHVVDRRGVADYACSCALGFSGPLCLTPLDNACLTNPCRNGGTCDLLTLTEYKCRCPPGWSGKSCQQADPCASNPCANGGQCLPFEASYICHCPPSFHGPTCRQDVNECGQKPGLCRHGGTCHNEVGSYRCVCRATHTGPNCERPYVPCSPSPCQNGGTCRPTGDVTHECACLPGFTGQNCEENIDDCPGNNCKNGGACVDGVNTYNCRCPPEWTGQYCTEDVDECQLMPNACQNGGTCHNTHGGYNCVCVNGWTGEDCSENIDDCASAACFHGATCHDRVASFYCECPHGRTGLLCHLNDACISNPCNEGSNCDTNPVNGKAICTCPSGYTGPACSQDVDECSLGANPCEHAGKCINTLGSFECQCLQGYTGPRCEIDVNECVSNPCQNDATCLDQIGEFQCICMPGYEGVHCEVNTDECASSPCLHNGRCLDKINEFQCECPTGFTGHLCQYDVDECASTPCKNGAKCLDGPNTYTCVCTEGYTGTHCEVDIDECDPDPCHYGSCKDGVATFTCLCRPGYTGHHCETNINECSSQPCRHGGTCQDRDNAYLCFCLKGTTGPNCEINLDDCASSPCDSGTCLDKIDGYECACEPGYTGSMCNINIDECAGNPCHNGGTCEDGINGFTCRCPEGYHDPTCLSEVNECNSNPCVHGACRDSLNGYKCDCDPGWSGTNCDINNNECESNPCVNGGTCKDMTSGYVCTCREGFSGPNCQTNINECASNPCLNQGTCIDDVAGYKCNCLLPYTGATCEVVLAPCAPSPCRNGGECRQSEDYESFSCVCPTGWQGQTCEVDINECVLSPCRHGASCQNTHGGYRCHCQAGYSGRNCETDIDDCRPNPCHNGGSCTDGINTAFCDCLPGFRGTFCEEDINECASDPCRNGANCTDCVDSYTCTCPAGFSGIHCENNTPDCTESSCFNGGTCVDGINSFTCLCPPGFTGSYCQHDVNECDSQPCLHGGTCQDGCGSYRCTCPQGYTGPNCQNLVHWCDSSPCKNGGKCWQTHTQYRCECPSGWTGLYCDVPSVSCEVAAQRQGVDVARLCQHGGLCVDAGNTHHCRCQAGYTGSYCEDLVDECSPSPCQNGATCTDYLGGYSCKCVAGYHGVNCSEEIDECLSHPCQNGGTCLDLPNTYKCSCPRGTQGVHCEINVDDCNPPVDPVSRSPKCFNNGTCVDQVGGYSCTCPPGFVGERCEGDVNECLSNPCDARGTQNCVQRVNDFHCECRAGHTGRRCESVINGCKGKPCKNGGTCAVASNTARGFICKCPAGFEGATCENDARTCGSLRCLNGGTCISGPRSPTCLCLGPFTGPECQFPASSPCLGGNPCYNQGTCEPTSESPFYRCLCPAKFNGLLCHILDYSFGGGAGRDIPPPLIEEACELPECQEDAGNKVCSLQCNNHACGWDGGDCSLNFNDPWKNCTQSLQCWKYFSDGHCDSQCNSAGCLFDGFDCQRAEGQCNPLYDQYCKDHFSDGHCDQGCNSAECEWDGLDCAEHVPERLAAGTLVVVVLMPPEQLRNSSFHFLRELSRVLHTNVVFKRDAHGQQMIFPYYGREEELRKHPIKRAAEGWAAPDALLGQVKASLLPGGSEGGRRRRELDPMDVRGSIVYLEIDNRQCVQASSQCFQSATDVAAFLGALASLGSLNIPYKIEAVQTQCECSDLKLTNPPSLKEKKVKAVSR

SEQ ID NO: 52472 - protein, 58 aa, Homo sapiens
MAKVAKDLNPGVKKMSLGQLQSARGVACLGCKGTCSGFEPHSWRDCSTWSSSPRRSSQ

SEQ ID NO: 52473 - protein, 98 aa, Homo sapiens
  MOD_RES (1)..(1): Any amino acid
XLALRECFSNHPLGMNQLQALHVKALSRAMLLTSYLPPPLLRHRLKTHTTVIHQLDKALAKLGIGQLTAQEVKSKLSCLSCCTTWSCSPPTTLGQGAE

SEQ ID NO: 52474 - protein, 387 aa, Homo sapiens
MGCVYSCCLEVCCGEDEIVYPRMPGESTVCHREREKPITYHWYHWHPGHIYPRIASMEDYDEDLVQEASSEDVLGVHMVDKDTERDIEMKRQLRRLRELHLYSTWKKYQEAMKTSLGVPQCERDEGSLGKPLCPPEILSETLPGSVKKRVCFPSEDHLEEFIAEHLPEASNQSLLTVAHADAGTQTNGDLEDLEEHGPGQTVSEEATEVHTMEGDPDTLAEFLIRDVLQELSSYNGEEEDPEEVKTSLGVPQRGDLEDLEEHVPGQTVSEEATGVHMMQVDPATLAKSDLEDLEEHVPEQTVSEEATGVHMMQVDPATLAKQLEDSTITGSHQQMSASPSSAPAEEATEKTKVEEEVKTRKPKKKTRKPSKKSRWNVLKCWDIFNIF

SEQ ID NO: 52475 - protein, 178 aa, Homo sapiens
MKILILGIFLFLCSTPAWAKEKHYYIGIIETTWDYASDHGEKKLISVDTGFQNKWYSEDVTISRPNDQEEITAQILTKKLDNKEHSTLREHSNIYLQNGPDRIGRLYKKALYLQYTDETFRTTIEKPVWLGFLGPIIKAETGDKVYVHLKNLASRPYTFHSHGITYYKEHEGAIYPDN

SEQ ID NO: 52476 - protein, 169 aa, Homo sapiens
MAKDNSTVRCFQGLLIFGNVIIGCCGIALTAECIFFVSDQHSLYPLLEATDNDDIYGAAWIGIFVGICLFCLSVLGIVGIMKSSRKILLAYFILMFIVYAFEVASCITAATQQDFFTPNLFLKQMLERYQNNSPPNNDDQWKNNGVTKTWDRLMLQDNCCGVNGPSDWQ

SEQ ID NO: 52477 - protein, 122 aa, Homo sapiens
MLGTLRAMEGEDVEDDQLLQKLRASRRRFQRRMQRLIEKYNQPFEDTPVVQMATLTYETPQGLRIWGGRLIKERNEGEIQDSSMKPADRTDGSVQAAAWGPELPSHRTVLGAACSASKPFEK

SEQ ID NO: 52478 - protein, 742 aa, Homo sapiens
  MOD_RES (1)..(1): Any amino acid
XKEDGCHERDDDTTSVNSDRSEEVFDMTKGNLTLLEKAIALETERAKAMREKMAMEAGRRDNMRSYEDQSPRQLPGEDRKPKSSDSHVKKPYYDPSRTEKKESKCPTPGCDGTGHVTGLYPHHRSLSGCPHKDRVPPEILAMHESVLKCPTPGCTGRGHVNSNRNSHRSLSGCPIAAAEKLAKAQEKHQSCDVSKSSQASDRVLRPMCFVKQLEIPQYGYRNNVPTTTPRSNLAKELEKYSKTSFEYNSYDNHTYGKRAIAPKVQTRDISPKGYDDAKRYCKDPSPSSSSTSSYAPSSSSNLSCGGGSSASSTCSKSSFDYTHDMEAAHMAATAILNLSTRCREMPQNLSTKPQDLCATRNPDMEVDENGTLDLSMNKQRPRDSCCPILTPLEPMSPQQQAVMNNRCFQLGEGDCWDLPVDYTKMKPRRIDEDESKDITPEDLDPFQEALEERRYPGEVTIPSPKPKYPQCKESKKDLITLSGCPLADKSIRSMLATSSQELKCPTPGCDGSGHITGNYASHRSLSGCPRAKKSGIRIAQSKEDKEDQEPIRCPVPGCDGQGHITGKYASHRSASGCPLAAKRQKDGYLNGSQFSWKSVKTEGMSCPTPGCDGSGHVSGSFLTHRSLSGCPRATSAMKKAKLSGEQMLTIKQRASNGIENDEEIKQLDEEIKELNESNSQMEADMIKLRTQITTMESNLKTIEEENKVIEQQNESLLHELANLSQSLIHSLANIQLPHMVSD

SEQ ID NO: 52479 - protein, 172 aa, Homo sapiens
MAKKGCRHLVCSSGGNAGIAAAYAARKLGIPATIVLPESTSLQVVQRLQGEGAEVQLTGKVWDEANLRAQELAKRDGWENVPPFDHPLIWKGHASLVQELKAVLRTPPGALVLAVGGGGLLAGVVAGLLEVGWQHVPIIAMETHGAHCFNAAITAGKLVTLPDITSVAKSLG

SEQ ID NO: 52480 - protein, 32 aa, Homo sapiens
MASQKRPSQRHGSKYLATASTMDHARHGFLPR

SEQ ID NO: 52481 - protein, 719 aa, Homo sapiens
MYLETRRAIFVFWIFLQVQGTKVCQEAVWEAYRIFLDRIPDTGEYQDWVSICQQETFCLFDIGKNFSNSQEHLDLLQQRIKQRSFPDRKDEISAEKTLGEPGETIVISTDVANVSLGPFPLTPDDTLLNEILDNTLNDTKMPTTERETEFAVLEEQRVELSVSLVNQKFKAELADSQSPYYQELAGKSQLQMQKIFKKLPGFKKIHVLGFRPKKEKDGSSSTEMQLTAIFKRHSAEAKSPASDLLSFDSNKIESEEVYHGTMEEDKQPEIYLTATDLKRLISKALEEEQSLDVGTIQFTDEIAGSLPAFGPDTQSELPTSFAVITEDATLSPELPPVEPQLETVDGAEHGLPDTSWSPPAMASTSLSEAPPFFMASSIFSLTDQGTTDTMATDQTMLVPGLTIPTSDYSAISQLALGISHPPASSDDSRSSAGGEDMVRHLDEMDLSDTPAPSEVPELSEYVSVPDHFLEDTTPVSALQYITTSSMTIAPKGRELVVFFSLRVANMAFSNDLFNKSSLEYRALEQQFTQLLVPYLRSNLTGFKQLEILNFRNGSVIVNSKMKFAKSVPYNLTKAVHGVLEDFRSAAAQQLHLEIDSYSLNIEPADQADPCKFLACGEFAQCVKNERTEEAECRCKPGYDSQGSLDGLEPGLCGPGTKECEVLQGKGAPCRLPDHSENQAYKTSVKKFQNQQNNKVISKRNSELLTVEYEEFNHQDWEGN

SEQ ID NO: 52482 - protein, 1326 aa, Homo sapiens
MNKMALASFMKGRTVIGTPDEETMDIELPKKYHEMVGVIFSDTFSYRLKFNWGYRIPVIKEHSEYTEHCWAMHGEIFCYLAKYWLKGFVAFQAAINAAIIEVTTNHSVMEELTSVIGINMKIPPFISKGEIMNEWFHFTCLVSFSSFIYFASLNVARERGKFKKLMTVMGLRESAFWLSWGLTYICFIFIMSIFMALVITSIPIVFHTGFMVIFTLYSLYGLSLIALAFLMSVLIRKPMLAGLAGFLFTVFWGCLGFTVLYRQLPLSLGWVLSLLSPFAFTAGMAQITHLDNYLSGVIFPDPSGDSYKMIATFFILAFDTLFYLIFTLYFERVLPDKDGHGDSPLFFLKSSFWSKHQNTHHEIFENEINPEHSSDDSFEPVSPEFHGKEAIRIRNVIKEYNGKTGKVEALQGIFFDIYEGQITAILGHNGAGKSTLLNILSGLSVSTEGSATIYNTQLSEITDMEEIRKNIGFCPQFNFQFDFLTVRENLRVFAKIKGIQPKEVEQEVKRIIMELDMQSIQDIIAKKLSGGQKRKLTLGIAILGDPQVLLLDEPTAGLDPFSRHRVWSLLKEHKVDRLILFSTQFMDEADILADRKVFLSNGKLKCAGSSLFLKRKWGIGYHLSLHRNEMCDTEKITSLIKQHIPDAKLTTESEEKLVYSLPLEKTNKFPDLYSDLDKCSDQGIRNYAVSVTSLNEVFLNLEGKSAIDEPDFDIGKQEKIHVTRNTGDESEMEQVLCSLPETRKAVSSAALWRRQIYAVATLRFLKLRRERRALLCLLLVLGIAFIPIILEKIMYKVTRETHCWEFSPSMYFLSLEQIPKTPLTSLLIVNNTGSNIEDLVHSLKCQDIVLEIDDFRNRNGSDDPSYNGAIIVSGDQKDYRFSVACNTKKLNCFPVLMGIVSNALMGIFNFTELIQMESTSFSRDDIVLDLGFIDGSIFLLLITNCVSPFIGMSSISDYKKNVQSQLWISGLWPSAYWCGQALVDIPLYFLILFSIHLIYYFIFLGFQLSWELMFVLVVCIIGCAVSLIFLTYVLSFIFRKWRKNNGFWSFGFFIILICVSTIMVSTQYEKLNLILCMIFIPSFTLLGYVMLLIQLDFMRNLDSLDNRINEVNKTILLTTLIPYLQSVIFLFVIRCLEMKYGNEIMNKDPVFRISPRSRETHPNPEEPEEEDEDVQAERVQAANALTAPNLEEEPVITASCLHKEYYETKKSCFSTRKKKIAIRNVSFCVKKGEVLGLLGHNGAGKSTSIKMITGCTKPTAGVVVLQGSRASVRQQHDNSLKFLGYCPQENSLWPKLTMKEHLELYAAVKGLGKEDAALSISRCALC

SEQ ID NO: 52483 - protein, 119 aa, Homo sapiens
MVWNAVIFGPEGTPFEDGTFKLTIEFTEEYPNKPPTVRFVSKMFHPNVYADGSICLDILQNRWSPTYDVSSILTSIQSLLDEPNPNSPANSQAAQLYQENKREYEKRVSAIVEQSWRDC

SEQ ID NO: 52484 - protein, 189 aa, Homo sapiens
MAAPSGGWNGVGASLWAALLLGAVALRPAEAVSEPTTVAFDVRPGGVVHSFSHNVGPGDKYTCMFTYASQGGTNEQWQMSLGTSEDHQHFTCTIWRPQGKSYLYFTQFKAEVRGAEIEYAMAYSKAAFERESDVPLKTEEFEVTKTAGTERWGWGRGDATPIQGWAIGAVWRGGSAIGVLETVDQASTN

SEQ ID NO: 52485 - protein, 319 aa, Homo sapiens
MITFLPIIFSILIVVIFVIGNFANGFIALVNSIEWVKRQKISFVDQILTALAVSRVGLLWVLLLHWYATQLNPAFYSVEVRITAYNVWAVTNHFSSWLATSLSMFYLLRIANFSNLIFLRIKRRVKSVVLVILLGPLLFLVCHLFVINMDETVWTKEYEGNVTWKIKLRSAMYHSNMTLTMLANFVPLTLTLISFLLLICSLCKHLKKMQLHGKGSQDPSTKVHIKALQTVTSFLLLCAIYFLSMIISVCNLGRLEKQPVFMFCQAIIFSYPSTHPFILILGNKKLKQIFLSVLRHVRYWVKDRSLRLHRFTRGALCVF

SEQ ID NO: 52486 - protein, 171 aa, Homo sapiens
MSLKLQASNVTNKNDPKSINSRVFIGNLNTALVKKSDVETIFSNGYIFDYDYYRDDFYDRLFDYRGRLSPVPVPRAVPVKRPRVTVPLVRRVKTNVPVKLFARSTAVTTSSAKIKLKSSELQAIKTELTQIKSNIDALLSRLEQIAAEQKANPDGKKKGDGGGAGGGGGGG

SEQ ID NO: 52487 - protein, 293 aa, Homo sapiens
  MOD_RES (1)..(1): Any amino acid
XMPVVIKEVPSSEAAEDVMVAAPLVCSGKVLEVQVVNQTSVHVDLGSQPKENEAEPSTASSVPLQDEQEPPAYDQAPEVTLQADIEVMSTVHISSVYNDVPVTEGVVYIEQLPEQIVIPFTDQVACLKENEQSKENEQSPRVSPKSVVEKTTSGMSKKSVESVKLAQLEENAKYSSVYMEAEATALLSDTSLKGQPEVPAQLLDAEGAIKIGSEKSLHLEVEITSIVSDNTGQEESGENSVPQEMEGKPVLSGEAAEAVHSGTSVKSSSGPFPPAPEGLTAPEIEPEGESTAE

SEQ ID NO: 52488 - protein, 77 aa, Homo sapiens
MLASLYNGSVCVWNHETQTLVKTFEVCDLPVRAAKFVARKNWVVTGADDMQIRVFNYNTLERVHMFEAHSDYIRCIA

SEQ ID NO: 52489 - protein, 1784 aa, Homo sapiens
MQESQTKSMFVSRALEKILADKEVKRPQHSQLRRACQVALDEIKAEIEKQRLGTAAPPKANFIEADKYFLPFELACQSKSPRVVSTSLDCLQKLIAYGHITGNAPDSGAPGKRLIDRIVETICSCFQGPQTDEGVQLQIIKALLTAVTSPHIEIHEGTILQTVRTCYNIYLASKNLINQTTAKATLTQMLNVIFTRMENQVLQEARELEKPIQSKPQSPVIQAAAVSPKFVRLKHSQAQSKPTTPEKTDLTNGEHARSDSGKVSTENGDAPRERGSSLSGTDDGAQEVVKDILEDVVTSAIKAAEKHGLTEPERVLGELECQECAIPPGVDENSQTNGIADDRQSLSSADNLESDAQGHQVAARFSHVLQKDAFLVFRSLCKLSMKPLGEGPPDPKSHELRSKVVSLQLLLSVLQNAGPVFRTHEMFINAIKQYLCVALSKNGVSSVPDVFELSLAIFLTLLSNFKMHLKMQIEVFFKEIFLNILETSTSSFEHRWMVIQTLTRICADAQCVVDIYVNYDCDLNAANIFERLVNDLSKIAQGRSGHELGMTPLQELSLRKKGLECLVSILKCMVEWSKDLYVNPNHQTSLGQERLTDQEIGDGKGLDMARRCSVTSMESTVSSGTQTTVQDDPEQFEVIKQQKEIIEHGIELFNKKPKRGIQFLQEQGMLGTSVEDIAQFLHQEERLDSTQVGDFLGDSARFNKEVMYAYVDQLDFCEKEFVSALRTFLEGFRLPGEAQKIDRLMEKFAARYIECNQGQTLFASADTAYVLAYSIIMLTTDLHSPQVKNKMTKEQYIKMNRGINDSKDLPEEYLSSIYEEIEGKKIAMKETKELTIATKSTKQNVASEKQRRLLYNLEMEQMAKTAKALMEAVSHAKAPFTSATHLDHVRPMFKLVWTPLLAAYSIGLQNCDDTEVASLCLEGIRCAIRIACIFGMQLERDAYVQALARFSLLTASSSITEMKQKNIDTIKTLITVAHTDGNYLGNSWHEILKCISQLELAQLIGTGVKTRYLSGSGREREGSLKGHTLAGEEFMGLGLGNLVSGGVDKRQMASFQESVGETSSQSVVVAVDRIFTGSTRLDGNAIVDFVRWLCAVSMDELASPHHPRMFSLQKIVEISYYNMNRIRLQWSRIWHVIGDHFNKVGCNPNEDVAIFAVDSLRQLSMKFLEKGELANFRFQKDFLRPFEHIMKKNRSPTIRDMAIRCIAQMVNSQAANIRSGWKNIFAVFHQAASDHDGNIVELAFQTTCHIVTTIFQHHFPAAIDSFQDAVKCLSEFACNAAFPDTSMEAIRLIRFCGKYVSERPRVLQEYTSDDMNVAPGDRVWVRGWFPILFELSCIINRCKLDVRTRGLTVMFEIMKSYGHTFEKHWWQDLFRIVFRIFDNMKLPEQLSEKSEWMTTTCNHALYAICDVFTQFYEALNEVLLSDVFAQLQWCVKQDNEQLARSGTNCLENLVISNGEKFSPEVWDETCNCMLDIFKTTIPHVLLTWRPVGMEEDSSEKHLDVDLDRQSLSSIDKNPSERGQSQLSNPTDDSWKGRPYANQKLFASLLIKCVVQLELIQTIDNIVFYPATSKKEDAEHMVAAQQDTLDADIHIETEDQGMYKYMSSQHLFKLLDCLQESHSFSKAFNSNYEQRTVLWRAGFKGKSKPNLLKQETSSLACCLRILFRMYVDENRRDSWEEIQQRLLTVCSEALAYFITVNSESHREAWTSLLLLLLTKTLKINDEKFKAHASMYYPYLCEIMQFDLIPELRAVLRKFFLRIGVVYKIWIPEEPSQVPAALSPVW

SEQ ID NO: 52490 - protein, 313 aa, Homo sapiens
MDVRALPWLPWLLWLLCRGGGDADSRAPFTPTWPRSREREAAAFRESLNRHRYLNSLFPSENSTAFYGINQFSYLFPEEFKAIYLRSKPSKFPRYSAEVHMSIPNVSLPLRFDWRDKQVVTQVRNQQMCGGCWAFSVVGAVESAYAIKGKPLEDLSVQQVIDCSYNNYGCNGGSTLNALNWLNKMQVKLVKDSEYPFKAQNGLCHYFSGSHSGFSIKGYSAYDFSDQEDEMAKALLTFGPLVVIVDAVSWQDYLGGIIQHHCSSGEANHAVLITGFDKTGSTPYWIVRNSWGSSWGVDGYAHVKMGSNVCGKS

SEQ ID NO: 52491 - protein, 128 aa, Homo sapiens
MKLKLNVLTIILLPVHLLITIYSALIFIPWYFLTNAKKKNAMAKRIKAKPTSDKPGSPYRSVTHFDSLAVIDIPGADTLDKLFDHAVSKFGKKDSLGTREILSEENEMQPNGKVFKKLILGNYKWMNY

SEQ ID NO: 52492 - protein, 7 aa, Homo sapiens
MKPAQRN

SEQ ID NO: 52493 - protein, 161 aa, Homo sapiens
  MOD_RES (1)..(1): Any amino acid
XVGGGGVGGGLLENANPLIYQRSGERPVTAGEEDEQVPDSIDAREIFDLIRSINDPEHPLTLEELNVVEQVRVQVSDPESTVAVAFTPTIPHCSMATLIGLSIKVKLLRSLPQRFKMDVHITPGTHASEHAGPECVRLQQRRRQPGGGILRRQISEQATCR

SEQ ID NO: 52494 - protein, 151 aa, Homo sapiens
MPILLFLIDTSASMNQRSHLGTTYLDTAKGAVETFMKLRARDPASRGDRYMLVTFEEPPYAIKAGWKENHATFMNELKNLQAEGLTTLGQSLRTAFDLLNLNRLVTGIDNYGQGRNPFFLEPAIIITITDGSKLTTTSGVQDEVLGTHRWN

SEQ ID NO: 52495 - protein, 201 aa, Homo sapiens
RINAYIEEEVQRRLQDLHRVISEGCSTSADTMKDNEKLHNGTIQRKLKYERMVSRSLGANPDDLKDPIKISIPRYVLCGQGKDAHFEFEVKITVLDETWTVFRRYSRFREMHKTLKLKYAELAALEFPPKKLFGNKDERVIAERRSHLEKYLRDFFSVMLQSATSPLHINKVGLTLSKHTICEFSPFFKKGVFDYSSHGTG

SEQ ID NO: 52496 - protein, 276 aa, Homo sapiens
MCNEETEIKEAQSYQNSPVSSATNQDAGYGSPFSESSDQLAHFKGSSSREEKEDPQCPDSVSYPQDSLAQIKAVYANLFSESCWSSLALDLKKSGSTTSTNDASQKESSAPTPTPPTCPVSTTGPTTSTPSTSCSSSTSHSSTTSTSSSSGYDWHQAALAKTLQQTSSYGLLPEPSLFSTVQLYRQNNKLYGSVFTGASKFRCKDCSAAYDTLVELTVHMNETGHYRDDNRDKDSEKTKRWSKPRKRSLMEMEGKEDAQKVLKCMYCGHSFESLQD

SEQ ID NO: 52497 - protein, 91 aa, Homo sapiens
MPVSLEEQILNSTFEACDPQRTGTVAVAQVLAYLEAVTGQGPQDARLQTLANSLDPNGEGPKATVDLDTFLVVMRDWIAACQLHGGLELEE

SEQ ID NO: 52498 - protein, 977 aa, Homo sapiens
MDSTLTASEIRQRFIDFFKRNEHTYVHSSATIPLDDPTLLFANAGMNQFKPIFLNTIDPSHPMAKLSRAANTQKCIRAGGKHNDLDDVGKDVYHHTFFEMLGSWSFGDYFKELACKMALELLTQEFGIPIERLYVTYFGGDEAAGLEADLECKQIWQNLGLDDTKILPGNMKDNFWEMGDTGPCGPCSEIHYDRIGGRDAAHLVNQDDPNVLEIWNLVFIQYNREADGILKPLPKKSIDTGMGLERLVSVLQNKMSNYDTDLFVPYFEAIQKGTGARPYTGKVGAEDADGIDMAYRVLADHARTITVALADGGRPDNTGRGYVLRRILRRAVRYAHEKLNASRGFFATLVDVVVQSLGDAFPELKKDPDMVKDIINEEEVQFLKTLSRGRRILDRKIQSLGDSKTIPGDTAWLLYDTYGFPVDLTGLIAEEKGLVVDMDGFEEERKLAQLKSQGKGAGGEDLIMLDIYAIEELRARGLEVTDDSPKYNYHLDSSGSYVFENTVATVMALRREKMFVEEVSTGQECGVVLDKTCFYAEQGGQIYDEGYLVKVDDSSEDKTEFTVKNAQVRGGYVLHIGTIYGDLKVGDQVWLFIDEPRRRPIMSNHTATHILNFALRSVLGEADQKGSLVAPDRLRFDFTAKGAMSTQQIKKAEEIANEMIEAAKLFSVFLVWQAVYTQDCPLAAAKAIQGLRAVFDETYPDPVRVVSIGVPVSELLDDPSGPAGSLTSVEFCGGTHLRNSSHAGAFVIVTEEAIAKGIRRIVAVTGAEAQKALRKAESLKKCLSVMEAKVKAQTAPNKDVQREIADLGEALATAVIPQWQKDELRETLKSLKKVMDDLDRASKADVQKRVLEKTKQFIDSNPNQPLVILEMESGASAKALNEALKLFKMHSPQTSAMLFTVDNEAGKITCLCQVPQNAANRGLKASEWVQQVSGLMDGKGGGKDVSAQATGKNVGCLQEALQLATSFAQLRLGDVKN

SEQ ID NO: 52499 - protein, 217 aa, Homo sapiens
MANYTLAPEDEYDVLIEGELESDEAEQCDKYDAQALSAQLVPSLCSAVFVIGVLDNLLVVLILVKYKGLKRVENIYLLNLAVSNLCFLLTLPFWAHAGGDPMCKILIGLYFVGLYSETFFNCLLTVQRYLVFLHKGNFFSARRRVPCGIITSVLAWVTAILATLPEFVVYKPQMEDQKYKCAFSRTPFLPADETFWKHFLTLKMNISVLVLPLFIFT

SEQ ID NO: 52500 - protein, 260 aa, Homo sapiens
WALRPVLPTQSAHDPPAVHLSNGPGQEPIAVMTFDLTKITKTSSSFEVRTWDPEGVIFYGDTNPKDDWFMLGLRDGRPEIQLHNHWAQLTVGAGPRLDDGRWHQVEVKMEGDSVLLEVDGEEVLRLRQVSGPLTSKRHPIMRIALGGLLFPASNLRLPLVPALDGCLRRDSWLDKQAEISASAPTSLRSCDVESNPGIFLPPGTQAEFNLRGEDSSTSFCLNGLWAQGQRLDVDQALNRSHEIWTHSCPQSPGNGTDASH

SEQ ID NO: 52501 - protein, 906 aa, Homo sapiens
QQDIVGSWGIPPATGKPPGTGWLGGPIPAPAKEEEPTGWEEPSPESIRRKMEIDDGTSAWGDPSKYNYKNVNMWNKNVPNGNSRSDQQAQVHQLLTPASAISNKEASSGSGPKSMQDGWCGDDMPLPGNRPTGWEEEEDVEIGMWNSNSSQELNSSLNWPPYTKKMSSKGLSGKKRRRERGMMKGGNKQEEAWINPFVKQFSNISFSRDSPEENVQSNKMDLSGGMLQDKRMEIDKHSLNIGDYNRTVGKGPGSRPQISKESSMERNPYFDKNGNPSMFGVGNTAAQPRGMQQPPAQPLSSSQPNLRAQVPPPLLSPQVPVSLLKYAPNNGGLNPLFGPQQVAMLNQLSQLNQLSQISQLQRLLAQQQRAQSQRSVPSGNRPQQDQQGRPLSVQQQMMQQSRQLDPNLLVKQQTPPSQQQPLHQPAMKSFLDNVMPHTTPELQKGPSPINAFSNFPIGLNSNLNVNMDMNSIKEPQSRLRKWTTVDSISVNTSLDQNSSKHGAISSGFRLEESPFVPYDFMNSSTSPASPPGSIGDGWPRAKSPNGSSSVNWPPEFRPGEPWKGYPNIDPETDPYVTPGSVINNLSINTVREVDHLRDRNSGSSSSLNTTLPSTSAWSSIRASNYNVPLSSTAQSTSARNSDSKLTWSPGSVTNTSLAHELWKVPLPPKNITAPSRPPPGLTGQKPPLSTWDNSPLRIGGGWGNSDARYTPGSSWGESSSGRITNWLVLKNLTPQIDGSTLRTLCMQHGPLITFHLNLPHGNALVRYSSKEEVVKAQKSLHMCVLGNTTILAEFASEEEISRFFAQSQSLTPSPGWQSLGSSQSRLGSLDCSHSFSSRTDLNHWNGAGLSGTNCGDLHGTSLWGTPHYSTSLWGPPSSSDPRGISSPSPINAFLSVDHLGGGGESM

SEQ ID NO: 52502 - protein, 126 aa, Homo sapiens
MPVAATNSETAMQQVLDNLGSLPSATGAAELDLIFLRGIMESPIVRSLAKAHERLEETKLEAVRDNNLELVQEILRDLAQLAEQSSTAAELAHILQEPHFQSLLETHDSVASKTYETPPPSPGLDP

SEQ ID NO: 52503 - protein, 118 aa, Homo sapiens
MAASKKAVLGPLVGAVDQGTSSTRFLVFNSKTAELLSHHQVEIKQEFPREGWVEQDPKEILHSVYECIEKTCEKLGQLNIDISNIKAIGVSNQRETTVVWDKITGEPLYNAVDCLTNE

SEQ ID NO: 52504 - protein, 47 aa, Homo sapiens
MTRGFAPILPVEFHKMGSFRRPRPRFMSSPVLSDLPRFQAARQALQL

SEQ ID NO: 52505 - protein, 219 aa, Homo sapiens
MEEEGGSSGGAAGTSADGGDGGEQLLTVKHELRTANLTGHAEKVGIENFELLKVLGTGAYGKVFLVRKISGHDTGKLYAMKVLKKATIVQKAKTTEHTRTERQVLEHIRQSPFLVTLHYAFQTETKLHLILDYINGGELFTHLSQRERFTEHEVQIYVGEIVLALEHLHKLGIIYRDIKLENILLDSNGHVVLTDFGLSKEFVADELEIKSLFCLFVQD

SEQ ID NO: 52506 - protein, 111 aa, Homo sapiens
MSRARAETMQRRLVQQWSVAVFLLSYAVPSCGRSVEGLSRRLKRAVSEHQLLHDKGKSIQDLRRRFFLHHLIAEIHTAEIRATSEVSPNSKPSPNTKNHPVRFGSDDEGRY

SEQ ID NO: 52507 - protein, 371 aa, Homo sapiens
MAAASAGATRLLLLLLMAVAAPSRARGSGCRAGTGARGAGAEGREGEACGTVGLLLEHSFEIDDSANFRKRGSLLWNQQDGTLSLSQRQLSEEERGRLRDVAALNGLYRVRIPRRPGALDGLEAGGYVSSFVPACSLVESHLSDQLTLHVDVAGNVVGVSVVTHPGGCRGHEVEDVDLELFNTSVQLQPPTTAPGPETAAFIERLEMEQAQKAKNPQEQKSFFAKYWMYIIPVVLFLMMSGAPDTGGQGGGGGGGGGGGSGRPLSSAFCWQRSSWTGAFGTAAGVSCARLPHGPMQPQGLPPCPWSRARDPGHYASSDLASPYPEPMQSGNMPPSLQPLCLCSRWSHPPVPGWARWSCPGSCSAPLTLTLD

SEQ ID NO: 52508 - protein, 407 aa, Homo sapiens
MGDEKDSWKVKTLDEILQEKKRRKEQEEKAEIKRLKNSDDRDSKRDSLEEGELRDHCMEITIRNSPYRREDSMEDRGEEDDSLAIKPPQQMSRKEKVHHRKDEKRKEKCRHHSHSAEGGKHARVKEREHERRKRHREEQDKARREWERQKRREMAREHSRRERDRLEQLERKRERERKMREQQKEQREQKERERRAEERRKEREARREVSAHHRTMREDYSDKVKASHWSRSPPRPPRERFELGDGRKPVKEEKMEERDLLSDLQDISDSERKTSSAESSSAESGSGSEEEEEEEEEEEEEGSTSEESEEEEEEEEEEEEETGSNSEEASEQSAEEVSEEEMSEDEERENENHLLVVPESRFDRDSGESEEAEEEVGLPERRGVPVPEQDRGGHLWSGLQSKRQENR

SEQ ID NO: 52509 - protein, 72 aa, Homo sapiens
LINNQDSDFPGLFDPPYAGSGAGGTDPASPDTSSPGSLSPPPATLSSSLEAFLSGPQAAPSPLSRVWSPSSY

SEQ ID NO: 52510 - protein, 587 aa, Homo sapiens
LSRRERSKDASPINRWSPTRRRSRSPIRRRSRSPLRRSRSPRRRSRSPRRRDRGRRSRSRLRRRSRSRGGRRRRSRSKVKEDKFKGSLSEGMKVEQESSSDDNLEDFDVEEEDEEALIEQRRIQRQAIVQKYKYLAEDSNMSVPSEPSSPQSSTRTRSPSPDDILERVAADVKEYERENVDTFEASVKAKHNLMTVEQNNGSSQKKLLAPDMFTESDDMFAAYFDSARLRAAGIGKDFKENPNLRDNWTDAEGYYRVNIGEVLDKRYNVYGYTGQGVFSNVVRARDNARANQEVAVKIIRNNELMQKTGLKELEFLKKLNDADPDDKFHCLRLFRHFYHKQHLCLVFEPLSMNLREVLKKYGKDVGLHIKAVRSYSQQLFLALKLLKRCNILHADIKPDNILVNESKTILKLCDFGSASHVADNDITPYLVSRFYRAPEIIIGKSYDYGIDMWSVGCTLYELYTGKILFPGKTNNHMLKLAMDLKGKMPNKMIRKGVFKDQHFDQNLNFMYIEVDKVTEREKVTVMSTINPTKDLLADLIGCQRLPEDQRKKVHQLKDLLDQILMLDPAKRISINQALQHAFIQEKI

SEQ ID NO: 52511 - protein, 745 aa, Homo sapiens
MASVAWAVLKVLLLLPTQTWSPVGAGNPPDCDSPLASALPRSSFSSSSELSSSHGPGFSRLNRRDGAGGWTPLVSNKYQWLQIDLGERMEVTAVATQGGYGSSDWVTSYLLMFSDGGRNWKQYRREESIWGFPGNTNADSVVHYRLQPPFEARFLRFLPLAWNPRGRIGMRIEVYGCAYKSEVVYFDGQSALLYTLDKKPLKPIRDVISLKFKAMQSNGILLHREGQHGNHITLELIKGKLVFFLNSGNAKLPSTIAPVTLTLGSLLDDQHWHSVLIELLDTQVNFTVDKHTHHFQAKGDSSNLDLNFEISFGGILSPGRSRAFTRKSFHGCLENLYYNGVDVTELAKKHKPQILMMGNVSFSCPQPQTVPVTFLSSRSYLALPGNSGEDKVSVTFQFRTWNRAGHLLFGELQRGSGSFVLFLKDGKLKLSLFQAGQSPRNVTAGAGLNDGQWHSVSFSAKWSHMNVVVDDDTAVQPLVAVLIDSGDTYYFGGCLGNSSGSGCKSPLGGFQGCLRLITIGDKAVDPILVQQGALGSFRDLQIDSCGITDRCLPSYCEHGGECSQSWDTFSCDCLGTGYTGETCHSSLYEQSCEAHKHRGNPSGLYYIDADGSGPLGPFLVYCNMTDSAWTVVRHGGPDAVTLRGAPSGHPLSAVSFAYAAGAGQLRAAVNLAERCEQRLALRCGTARRPDSRDGTPLSWWVGRTNETHTSWGGSLPDAQKCTCGLEGNCIDSQYYCNCDAGQNEW

SEQ ID NO: 52512 - protein, 132 aa, Homo sapiens
MMAENNLKMLKIQQCVVANKLPRNRPYVCNICFKHFETPSKLARHYLIHTGQKPFECDVCHKTFRQLVHLERHQLTHSLPFKCSICQRHFKNLKTFVKHQQLHNETYQNNVKQVRRLLEAKQEKSMYGVYNT

SEQ ID NO: 52513 - protein, 112 aa, Homo sapiens
CVGYAIGLGNVWRFPYLCGKNGGGAFLIPYFLTLIFAGVPLFLLECSLGQYTSIGGLGVWKLAPMFKGVGLAAAVLSFWLNIYYIVIISWAIYYLYNSFTTAQHASDDGRAG

SEQ ID NO: 52514 - protein, 54 aa, Homo sapiens
RPLQDAAEDLKDIKDALRRYEPSLSWRGGRREWGGTQLLAMATTPGLSPLGSRM

SEQ ID NO: 52515 - protein, 44 aa, Homo sapiens
MAEMDPTQGRVVFEDVAIYFSQEEWGHLDEAQRLLYRDVMLENL

SEQ ID NO: 52516 - protein, 325 aa, Homo sapiens
MAVMAPRTLLLLLSGALALTQTWAGSHSMRYFFTSVSRPGRGEPRFIAVGYVDDTQFVRFDSDAASQRMEPRAPWIEQEGPEYWDQETRNVKAQSQTDRVDLGTLRGYYNQSEAGSHTIQIMYGCDVGSDGRFLRGYRQDAYDGKDYIALNEDLRSWTAADMAAQITKRKWEAAHEAEQLRAYLDGTCVEWLRRYLENGKETLQRTDPPKTHMTHHPISDHEATLRCWALGFYPAEITLTWQRDGEDQTQDTELVETRPAGDGTFQKWAAVVVPSGEEQRYTCHVQHEGLPKPLTLRWDRKGGSYTQAASSDSAQGSDVSLTACK

SEQ ID NO: 52517 - protein, 162 aa, Homo sapiens [sequence omitted]

SEQ ID NO: 52518 - protein, 191 aa, Homo sapiens
MLIFWTITLFLLGAAKGKEVCYEDLGCFSDTEPWGGTAIRPLKILPWSPEKIGTRFLLYTNENPNNFQILLLSDPSTIEASNFQMDRKTRFIIHGFIDKGDESWVTDMCKKLFEVEEVNCICVDWKKGSQATYTQAANNVRVVGAQVAQMLDILLTEYSYPPSKVHLIGHSLGAHVAGEAGSKTPGLSRIT

SEQ ID NO: 52519 - protein, 192 aa, Homo sapiens
MYQGPSRVLKEAPGAEAYGYECLGGLHRTSTGCWGVIPNCQFRSKTARLKTFTANQIDEIKDPSGLFYILPFQKGYLVNWDVQRQVWDYLFGKEMYQVDFLDTNIIITEPYFNFTSIQESMNEILFEEYQFQAVLRVNAGALSAHRYFRDNPSELCCIIVDSGYSFTHIVPYCRSKKKKEAIIRINVGGKLL

SEQ ID NO: 52520 - protein, 221 aa, Homo sapiens
MAKGGEALPQGSPAPVQDPHLIKVTVKTPKDKEDFSVTDTCTIQQLKEEISQRFKAHPDQLVLIFAGKILKDPDSLAQCGVRDGLTVHLVIKRQHRAMGNECPAASVPTQGPSPGSLPQPSSIYPADGPPAFSLGLLTGLSRLGLAYRGFPDQPSSLMRQHVSVPEFVTQLIDDPFIPGLLSNTGLVRQLVLDNPHMQQLIQHNPEIGHILNNPEIMRQTL

SEQ ID NO: 52521 - protein, 131 aa, Homo sapiens
MAGVGPGGYAAEFVPPPECPVFEPSWEEFTDPLSFIGRIRPLAEKTGICKIRPPKFWQISSVSKDWQPPFACEVKSFRFTPRVQRLNELEAMTRVRLDFLDQLAKFWELQGSTLKIPVVERKILDLYALSK

SEQ ID NO: 52522 - protein, 247 aa, Homo sapiens
MPREDRATWKSNYFLKIIQLLDDYPKCFIVGADNVGSKQMQQIRMSLRGKAVVLMGKNTMMRKAIRGHLENNPALEKLLPHIRGNVGFVFTKEDLTEIRDMLLANKVPAAARAGAIAPCEVTVPAQNTGLGPEKTSFFQALGITTKISRGTIEILSDVQLIKTGDKVGASEATLLNMLNISPFSFGLVIQQVFDNGSIYNPEVLDITEETLHSRFLEGVRNVASVCLQIGYPTVASVPHSIINGYKR

SEQ ID NO: 52523 - protein, 100 aa, Homo sapiens
MAESSDKLYRVEYAKSGRASCKKCSESIPKDSLRMAIMVQSPMFDGKVPHWYHFSCFWKVGHSIRHPDVEVDGFSELRWDDQQKVKKTAEAGGVTEKKLY

SEQ ID NO: 52524 - protein, 161 aa, Homo sapiens
TPMNQASTRSHCIFTIHLSSKEPGSATVRHAKLHLVDLAGSERVAKTGVGGHLLTEAKYINLSLHYLEQVIIALSEKHRSHIPYRNSMMTSVLRDSLGGNCMTTMIATLSLEKRNLDESISTCRFAQRVALIKNEAVLNEEINPRLKAPSSSDGVLFCRNQ

SEQ ID NO: 52525 - protein, 80 aa, Homo sapiens
  MOD_RES (1)..(1): Any amino acid
XARALCSGSPAERRQLLPRAREQEELLAPADGTPWLRVHRDGPALSGPQSRALQEALVLSDRAPFAAPSPFAELVLPPQQ

SEQ ID NO: 52526 - protein, 3196 aa, Homo sapiens
VAKEEWSQTLWINLNVQILQEGIEGFLRALRKLPRPVRGLSVTYYLEAKMKAFKDSIPLLLDLKNEALRDRHWKELMEKTSVFFEMTETFTLENMFAMELHKHTDVLNEIVTAAIKEVAIEKAVKEILDTWENMKFTVVKYCKGTQERGYILGSVDEIIQSLDDNTFNLQSISGSRFVGPFLQTVHKWEKTLSLIGEVIEIWMLVQRKWMYLESIFIGGDIRSQLPEEAKKFDNIDKVFKRIMGETLKDPVIKRCCEAPNRLSDLQNVSEGLEKCQKSLNDYLDSKRNAFPRFFFISDDELLSILGSSDPLCVQEHMIKMYDNIASLRFNDGDSGEKLVSAMISAEGEVMEFRKILRAEGRVEDWMTAVLNEMRRTNRLITKEAIFRYCEDRSRVDWMLLYQGMVVLAASQVWWTWEVEDVFHKAQKGEKQAMKNYGRKMHRQIDELVTRITMPLSKNDRKKYNTVLIIDVHARDIVDSFIRGSILEAREFDWESQLRFYWDREPDELNIRQCTGTFGYGYEYMGLNGRLVITPLTDRIYLTLTQALSMYLGGAPAGPAGTGKTETTKDLAKALGLLCVVTNCGEGMDYRAVGKIFSGLAQCGAWGCFDEFNRIDASVLSVISSQIQTIRNALIHQLTTFQFEGQEISLDSRMGIFITMNPGYAGRTELPESVKALFRPVVVIVPDLQQICEIMLFSEGFLEAKTLAKKMTVLYKLAREQLSKQYHYDFGLRALKSVLVMAGELKRGSSDLREDVVLMRALRDMNLPKFVFEDVPLFLGLISDLFPGLDCPRVRYPDFNDAVEQVLEENGYAVLPIQVDKVVQMFETMLTRHTTMVVGPTRGGKSVVINTLCQAQTKLGLTTKLYILNPKAVSVIELYGILDPTTRDWTDGVLSNIFREINKPTDKKERKYILFDGDVDALWVENMNSVMDDNRLLTLANGERIRLQAHCALLFEVGDLQYASPATVSRCGMVYVDPKNLKYRPYWKKWVNQIPNKVEQYNLNSLFEKYVPYLMDVIVEGIVDGRQAEKLKTIVPQTDLNMVTQLAKMLDALLEGEIEDLDLLECYFLEALYCSLGASLLEDGRMKFDEYIKRLASLSTVDTEGVWANPGELPGQLPTLYDFHFDNKRNQWVPWSKLVPEYIHAPERKFINILVHTVDTTRTTWILEQMVKIKQPVIFVGESGTSKTATTQNFLKNLSEETNIVLMVNFSSRTTSMDIQRNLEANVEKRTKDTYGPPMGKRLLVFMDDMNMPRVDEYGTQQPIALLKLLLEKGYLYDRGKELNCKSIRDLGFIAAMGKAGGGRNEVDPRFISLFSVFNVPFPSEESLHLIYSSILKGHTSTFHESIVAVSGKLTFCTLALYKNIVQDLPPTPSKFHYIFNLRDLSRVFNGLVLTNPERFQTVAQMVRVWRNECLRVFHDRLISETDKQLVQQHIGSLVVEHFKDDVEVVMRDPILFGDFQMALHEGEPRIYEDIQDYEAAKALFQEILEEYNESNTKMNLVLFDDALEHLTRVHRIIRMDRGHALLVGVGGSGKQSLSRLAAFTASCEVFEILLSRGYSENSFREDLKSLYLKLGIENKAMIFLFTDAHVAEEGFLELINNMLTSGIVPALFSEEEKESILSQIGQEALKQGMGPAKESVWQYFVNKSANNLHIVLGMSPVGDTLRTWCRNFPGMVNNTGIDWFMPWPPQALHAVAKSFLGYNPMIPAENIENVVKHVVLVHQSVDHYSQQFLQKLRRSNYVTPKNYLDFINTYSKLLDEKTQCNIAQCKRLDGGLDKLKEATIQLDELNQKLAEQKIVLAEKSAACEALLEEIAVNTAVAEEKKKLAEEKAMEIEEQNKVIAMEKAEAETTLAEVMPILEAAKLELQKLDKSDVTEIRSFAKPPKQVQTVCECILIMKGYKELNWKTAKGVMSDPNFLRSLMEIDFDSITQSQVKNIKGLLKTLNTTTEEMEAVSKAGLGMLKFVEAVMGYCDVFREIKPKREKVARLERNFYLTKRELERIQNELAAIQKELETLGAKYEAAILEKQKLQEEAEIMERRLIAADKLISGLGSENIRWLNDLDELMHRRVKLLGDCLLCAAFLSYEGAFTWEFRDEMVNRIWQNDILEREIPLSQPFRLESLLTDDVEISRWGSQGLPPDELSVQNGILTTRASRFPLCIDPQQQALNWIKRKEEKNNLRVASFNDPDFLKQLEMSIKYGTPFLFRDVDEYIDPVIDNVLEKNIKVSQGRQFIILGDKEVDYDSNFRLYLNTKLANPRYSPSVFGKAMVINYTVTLKGLEDQLLSVLVAYERRELEEQREHLIQETSENKNLLKDLEDSLLRELATSTGNMLDNVDLVHTLEETKSKATEVSEKLKLAEKTALDIDRLRDGYRPAARRGAILFFVLSEMALVNSMYQYSLIAFLEVFRLSLKKSLPDSILMKRLRNIMDTLTFSIYNHGCTGLFERHKLLFSFNMTIKIEQAEGRVPQEELDFFLKGNISLEKSKRKKPCAWLSDQGWEDIILLSEMFSDNFGQLPDDVENNQTVWQEWYDLDSLEQFPVPLGYDNNITPFQKLLILRCFRVDRVYRAVTDYVTVTMGEKYVQPPMISFEAIFEQSTPHSPIVFILSPGSDPATDLMKLAERSGFGGNRLKFLAMGQGQEKVALQLLETAVARGQWLMLQNCHLLVKWLKDLEKSLERITKPHPDFRLWLTTDPTKGFPIGILQKSLKVVTEPPNGLKLNMRATYFKISHEMLDQCPHPAFKPLVYVLAFFHAVVQERRKFGKIGWNVYYDFNESDFQVCMEILNTYLTKAFQQRDPRIPWGSLKYLIGEVMYGGRAIDSFDRRILTIYMDEYLGDFIFDTFQPFHFFRNKEVDYKIPVGDEKEKFVEAIEALPLANTPEVFGLHPNAEIGYYTQAARDMWAHLLELQPQTGESSSGISRDDYIGQVAKEIENKMPKVFDLDQVRKRLGTGLSPTSVVLLQELERFNKLVVRMTKSLAELQRALAGEVGMSNELDDVARSLFIGHIPNIWRRLAPDTLKSLGNWMVYFLRRFSQYMLWVTESEPSVMWLSGLHIPESYLTALVQATCRKNGWPLDRSTLFTQVTKFQDADEVNERAGQGCFVSGLYLEGADWDIEKGCLIKSKPKVLVVDLPILKIIPIEAHRLKLQNTFRTPVYTTSMRRNAMGVGLVFEADLFTTRHISHWVLQGVCLTLNSD

SEQ ID NO: 52527 - protein, 128 aa, Homo sapiens
NLYLVATSKKNACVSLVFSFLYKVVQVFSEYFKELEEESIRDNFVIIYELLDELMDFGYPQTTDSKILQEYITQEGHKLETGAPRPPATVTNAVSWRSEGIKYRKNEVFLDVIESVNLLVGLFSFLLL

SEQ ID NO: 52528 - protein, 463 aa, Homo sapiens
MASSPAVLRASRLYQWSLKSSAQFLGSPQLRQVGQIIRVPARMAATLILEPAGRCCWDEPVRIAVRGLAPEQPVTLRASLRDEKGALFQAHARYRADTLGELDLERAPALGGSFAGLEPMGLLWALEPEKPLVRLVKRDVRTPLAVELEVLDGHDPDPGRLLCQTRHERYFLPPGVRREPVRVGRVRGTLFLPPEPGPFPGIVDMFGTGGGLLEYRASLLAGKGFAVMALAYYNYEDLPKTMETLHLEYFEEAMNYLLSHPEVKGPGVGLLGISKGGELCLSMASFLKGITAAVVINGSVANVGGTLHYKGETLPPVGVNRNRIKVTKDGYADIVDVLNSPLEGPDQKSFIPVERAESTFLFLVGQDDHNWKSEFYANEACKRLQAHGRRKPQIICYPETGHYIEPPYFPLCRASLHALVGSPIIWGGEPRAHAMAQVDAWKQLQTFFHKHLGGHEGTIPSKV

SEQ ID NO: 52529 - protein, 91 aa, Homo sapiens
DPSQSSDAMYVVVPLLGVALLIVIALFIIWRCQLQKATRHHPSYAQNRRCFAVRLAAPSFASKYSNVGAFPFRLWAASLSLARIYLTNIPK

SEQ ID NO: 52530 - protein, 215 aa, Homo sapiens
MPKGRAGSLPTTSIGWRFQLWFLGLTCPERHLARRLKNNSFYPFVQQEPNGAEARDLGLPRVRRGRGPVARDLVAAAAPPGAEPHARRVPLLHPGPHRVPGPLASGLRAPGAQLRCPRKVLLPPGPRRPQVGAPGAGAAVGALRANGILGPLHRPETQHQLLRLPGHLLPARGSPLATPWRWHCDGQEPHGSQAQLLSVQPGGVTLRASPTSGLC

SEQ ID NO: 52531 - protein, 128 aa, Homo sapiens
YLSVTFYTGVSGTIFKETKKEVELAPGASDRVTMPVAYKEYRPHLVDQGAMLLNVSGHVKESGQVLAKQHTFRLRTPDLSLTLLGAAVVGQECEVQIVFKNPLPVTLTNVVFRLEGSGLQRPKILNVG

SEQ ID NO: 52532 - protein, 169 aa, Homo sapiens
MRRSVLVRNPGHKGLRPVYEELDSDSEDLDPNPEDLDPVSEDPEPDPEDLNTVPEDVDPSYEDLEPVSEDLDPDAEAPGSEPQDPDPMSSSFDLDPDVIGPVPLILDPNSDTLSPGDPKVDPISSGLTATPQVLATSPAVLPAPASPPRPFSCPDCGRAFRRSSGLSQH

SEQ ID NO: 52533 - protein, 92 aa, Homo sapiens
MFNPQLMIQTPKEEGANVLTTEALLQHLDSALQASRVHVYMYNRQWKLEHLCYKSGELITETGYMDQIIEYLYPCLIITPLDCFWEGAKLQS

SEQ ID NO: 52534 - protein, 200 aa, Homo sapiens
MKVKVIPVLEDNYMYLVIEELTREAVAVDVAVPKRLLEIVGREGVSLTAVLTTHHHWDHARGNPELARLRPGLAVLGADERIFSLTRRLAHGEELRFGAIHVRCLLTPGHTAGHMSYFLWEDDCPDPPALFSGDALSVAGCGSCLEGSAQQMYQSLAELGTLPPETKVFCGHEHTLSNLEFAQKVEPCNDHVRAKLSWAK

SEQ ID NO: 52535 - protein, 47 aa, Homo sapiens
MELCSTNAGVQWISAPCNLHFMGSSDSPVSPSQVAGTTDHTHKFGVS

SEQ ID NO: 52536 - protein, 1589 aa, Homo sapiens
MRTTKVYKLVIHKKGFGGSDDELVVNPKVFPHIKLGDIVEIAHPNDEYSPLLLQVKSLKEDLQKETISVDQTVTQVFRLRPYQDVYVNVVDPKDVTLDLVELTFKDQYIGRGDMWRLKKSLVSTCAYITQKVEFAGIRAQAGELWVKNEKVMCGYISEDTRVVFRSTSAMVYIFIQMSCEMWDFDIYGDLYFEKAVNGFLADLFTKWKEKNCSHEVTVVLFSRTFYDAKSVDEFPEINRASIRQDHKGRFYEDFYKVVVQNERREEWTSLLVTIKKLFIQYPVLVRLEQAEGFPQGDNSTSAQGNYLEAINLSFNVFDKHYINRNFDRTGQMSVVITPGVGVFEVDRLLMILTKQRMIDNGIGVDLVCMGEQPLHAVPLFKLHNRSAPRDSRLGDDYNIPHWINHSFYTSKSQLFCNSFTPRIKLAGKKPASEKAKNGRDTSLGSPKESENALPIQVDYDAYDAQVFRLPGPSRAQCLTTCRFSARFTWGSVRERESHSRKSASSCDVSSSPSLPSRTLPTEEVRSQASDDSSLGKSANILMIPHPHLHQYEVSSSLGYTSTRDVLENMMEPPQRDSSAPGRFHVGSAESMLHVRPGGYTPQRALINPFAPSRMPMKLTSNRRRWMHTFPVGPSGEAIQIHHQTRQNMAELQGSGQRDPTHSSAELLELAYHEAAGRHSNSRQPGDGMSFLNFSGTEELSVGLLSNSGAGMNPRTQNKDSLEDSVSTSPDPILTLSAPPVVPGFCCTVGVDWKSLTTPACLPLTTDYFPDRQGLQNDYTEGCYDLLPEADIDRRDEDGVQMTAQQVFEEFICQRLMQGYQIIVQPKTQKPNPAVPPPLSSSPLYSRGLVSRNRPEEEDQYWLSMGRTFHKVTLKDKMITVTRYLPKYPYESAQIHYTYSLCPSHSDSEFVSCWVEFSHERLEEYKWNYLDQYICSAGSEDFSLIESLKFWRTRFLLLPACVTATKRITEGEAHCDIYGDRPRADEDEWQLLDGFVRFVEGLNRIRRRHRSDRMMRKGTAMKGLQMTGPISTHSLESTAPPVGKKGTSALSALLEMEASQKCLGEQQAAVHGGKSSAQSAESSSVAMTPTYMDSPRKVSVDQTATPMLDGTSLGICTGQSMDRGNSQTFGNSQNIGEQGYSSTNSSDSSSQQLVASSLTSSSTLTEILEAMKHPSTGVQLLSEQKGLSPYCFISAEVVHWLVNHVEGIQTQAMAIDIMQKMLEEQLITHASGEAWRTFIYGFYFYKIVTDKEPDRVAMQQPATTWHTAGVDDFASFQRKWFEVAFVAEELVHSEIPAFLLPWLPSRPASYASRHSSFSRSFGGRSQAAALLAATVPEQRTVTLDVDVNNRTDRLEWCSCYYHGNFSLNAAFEIKLHWMAVTAAVLFEMVQGWHRKATSCGFLLVPVLEGPFALPSYLYGDPLRAQLFIPLNISCLLKEGSEHLFDSFEPETYWDRMHLFQEAIAHRFGFVQDKYSASAFNFPAENKPQYIHVTGTVFLQLPYSKRKFSGQQRRRRNSTSSTNQNMFCEERVGYNWAYNTMLTKTWRSSATGDEKFADRLLKDFTDFCINRDNRLVTFWTSCLEKMHASAP

SEQ ID NO: 52537 - protein, 164 aa, Homo sapiens
  MOD_RES (1)..(1): Any amino acid
XVGGPENPYLIDPENQNVTLNGPGGCGTREDCVLSLGRTRTEAHTALSRLRASMWIDRSTRAVSVHFTLYNPPTQLFTSVSLRVEILPTGSLVPSSLVESFSIFRSDSALQYHLMLPQLVFLALSLIHLCVQLYRMMDKGVLSYWRKPRNWLEVASLVSFSFEK

SEQ ID NO: 52538 - protein, 46 aa, Homo sapiens
MSSPRAVVQLGKAQPAGEECESQRQRKDAGKAGDWARGRVHRRHMC

SEQ ID NO: 52539 - protein, 225 aa, Homo sapiens
MELRVGNKYRLGRKIGSGSFGDIYLGANIASGEEVAIKLECVKTKHPQLHIESKFYKMMQGGVGIPSIKWCGAEGDYNVMVMELLGPSLEDLFNFCSRKFSLKTVLLLADQMISRIEYIHSKNFIHRDVKPDNFLMGLGKKGNLVYIIDFGLAKKYRDARTHQHIPYRENKNLTGTARYASINTHLGIEQSRRDDLESLGYVLMYFNLGSLPWQGLKAATKRQKY

SEQ ID NO: 52540 - protein, 38 aa, Homo sapiens
MDPLQKRNPASPSKSSPMTAAETSQEGPAPSQPSYSEQ

SEQ ID NO: 52541 - protein, 544 aa, Homo sapiens
MSGSTPFQMRLVHLDLKGAPPKVSYLSEIFPLFRALGANGLLIEYEDMFPYEGPLRLLRAKYAYSPSEIKEILHLAGLNELEVIPLVQTFGHMEFVLKHTAFAHLREVGSFPCTLNPHEAESLALVGAMIDQVLELHPGAQRLHIGCDEVYYLGEGEASRRWLQQEQNSTGKLCLSHMRAVASGVKARRPSVTPLVWDDMLRDLPEDQLAASGVPQLVEPVLWDYTADLDVHGKVLLMQKYRRCGFPQLWAASAFKGATGPSQAVPPVEHHLRNHVQWLQVAGSGPTDSLQGIILTGWQRYDHYSVLCELLPAGVPSLAACLQLLLRGGFDEDVKAKVENLLGISSLEKTDPGSPQGGGRLLPWQQHPCPCHTSQPPSAQLCGCAAGGQQVCHWLVQPLPPPAEAHPPGHGSAHPARSAQPPGTVEHPRAGAGGCPAAGFLPGCRGGVAGGKRAPQPAAAASSAAGPQRGVCPPAATHQPWQGRCSGPLRGELMPGGSCWRLGGLCTAKWPGQYGPTWASCPLAQQCLAHTQFLRALGSPWGRD

SEQ ID NO: 52542 - protein, 249 aa, Homo sapiens
  MOD_RES (1)..(1): Any amino acid
XLAPSTQFPAPGMGGHPGGAGEDAQCPPAPCPPTGLQHEGIFRVSGAQLRVSEIRDAFERGEDPLVEGCTAHDLDSVAGVLKLYFRSLEPPLFPPDLFGELLASSELEATAERVEHVSRLLWRLPAPVLVVLRYLFTFLNQDAQLESLGADNEPELEAEMPAQEDDLEGVVEAVACFAYTGRTAQELSFRRGDVLRLHERASSDWWRGEHNGMRGLIPHKYITLPAGTEKQVVGAGLQTAGESGSSPEG

SEQ ID NO: 52543 - protein, 206 aa, Homo sapiens
MNHLPEDMENALTGSQSSHASLRNIHSINPTQLMARIESYEGREKKGISDVRRTFCLFVTFDLLFVTLLWIIELNVNGGIENTLEKEVMQYDYYSSYFDIFLLAVFRFKVLILAYAVCRLRHWWAIALTTAVTSAFLLAKVILSKLFSQGAFGYVLPIISFILAWIETWFLDFKVLPQEAEEENRLLIVQDASERAALIPGGLSDG

SEQ ID NO: 52544 - protein, 103 aa, Homo sapiens
  MOD_RES (1)..(1): Any amino acid
XVLLLGGCSGRIHQLALTGEKRADIQLNSFGFYTNGSLEVELSVLRLGLREAEEKSLLVGFSLSRVRSGRVRSYSTRDFQDCPLQKNSSSFLVLFLINTKDLQ

SEQ ID NO: 52545 - protein, 38 aa, Homo sapiens
MASKGLQDLKQQVEGTAQEAAMDQLAKTTQETIDKTAN

SEQ ID NO: 52546 - protein, 33 aa, Homo sapiens
MQLTVKALQGRECSLQMGNDSRIIASGPTPSST

SEQ ID NO: 52547 - protein, 109 aa, Homo sapiens
MELQTYRYHGHSMSDPGVSYRTREEIQEVRSKSDPIMLLKDRMVNSNLASVEELKEIDVEVRKEIEDAAQFATADPEPPLEELGYHIYSSDPPFEVRGANQWIKFKSVS

SEQ ID NO: 52548 - protein, 169 aa, Homo sapiens
MEAVPRMPMIWLDLKEAGDFHFQPAVKKNAVRVPRDFEGCSVLRKYLGQLHYLQSRVPMGSGQEAAVPVTWTEIFSGKSVAHEDIKYEQACILYNLGALHSMLGAMDKRVSEECAAGAFAYLREHFPQAYSVDMSRQILTLNVNLMLGQAQECLLEKSMLDNRKSFLVA

SEQ ID NO: 52549 - protein, 98 aa, Homo sapiens
MVARSTDSLDGPGEGSVQPLPTAGGPSVKGKPGKRLSAPRGPFPRLADCAHFHYENVDFGHIQLLLSPDREGPSLSGENELVFGVQVTCQCEIIKAAG

SEQ ID NO: 52550 - protein, 16 aa, Homo sapiens
MSLKDSGSDLSHRPKR

SEQ ID NO: 52551 - protein, 47 aa, Homo sapiens
MATLVELPDSVLLEIFSYLPGLSPLEEAGGRPVAVATCRPDALHDAT

SEQ ID NO: 52552 - protein, 166 aa, Homo sapiens
EKFDTPHPEGYLFGENMDLNFLGSRPVQFPYVTPAPHEPVKTLRSLVNIRKDSLRLVRYKDDADSPTEDGDKPRVLYSLEFTFDADARVAITIYCQASEEFLNGRAVYSPKSPSLQSETVHYKRGVSQHYLLQEIYGIENKNNQETKPSDDENSDNSNECVVCLSD

SEQ ID NO: 52553 - protein, 90 aa, Homo sapiens
MANATRRESEVDQKFQGSVSFKDVTVGFTQEEWQHLDPSQRALYRDVMLENYSNLVSVGYCAHKPEVIFRLEQGEEPWRLEEEFPSQSFP

SEQ ID NO: 52554 - protein, 35 aa, Homo sapiens
MAKRLQAELSCPVCLDFFSCSISLSCTHVFCFDCI

SEQ ID NO: 52555 - protein, 1004 aa, Homo sapiens
MRGSGPRGAGRRRPPSGGGDTPITPASLAGCYSAPRRAPLWTCLLLCAALRTLLASPSNEVNLLDSRTVMGDLGWIAFPKNGWEEIGEVDENYAPIHTYQVCKVMEQNQNNWLLTSWISNEGASRIFIELKFTLRDCNSLPGGLGTCKETFNMYYFESDDQNGRNIKENQYIKIDTIAADESFTELDLGDRVMKLNTEVRDVGPLSKKGFYLAFQDVGACIALVSVRVYYKKCPSVVRHLAVFPDTITGADSSQLLEVSGSCVNHSVTDEPPKMHCSAEGEWLVPIGKCMCKAGYEEKNGTCQVCRPGFFKASPHIQSCGKCPPHSYTHEEASTSCVCEKDYFRRESDPPTMACTRPPSAPRNAISNVNETSVFLEWIPPADTGGRKDVSYYIACKKCNSHAGVCEECGGHVRYLPRQSGLKNTSVMMVDLLAHTNYTFEIEAVNGVSDLSPGARQYVSVNVTTNQAAPSPVTNVKKGKIAKNSISLSWQEPDRPNGIILEYEIKYFEKDQETSYTIIKSKETTITAEGLKPASVYVFQIRARTAAGYGVFSRRFEFETTPVSVAASSDQSQIPVIAVSVTVGVILLAVVIGVLLSGSCCECGCGRASSLCAVAHPSLIWRCGYSKAKQDPEEEKMHFHNGHIKLPGVRTYIDPHTYEDPNQAVHEFAKEIEASCITIERVIGAGEFGEVCSGRLKLPGKRELPVAIKTLKVGYTEKQRRDFLGEASIMGQFDHPNIIHLEGVVTKSKPVMIVTEYMENGSLDTFLKKNDGQFTVIQLVGMLRGISAGMKYLSDMGYVHRDLAARNILINSNLVCKVSDFGLSRVLEDDPEAAYTTRGGKIPIRWTAPEAIAFRKFTSASDVWSYGIVMWEVVSYGERPYWEMTNQDVIKAVEEGYRLPSPMDCPAALYQLMLDCWQKERNSRPKFDEIVNMLDKLIRNPSSLKTLVNASCRVSNLLAEHSPLGSGAYRSVGEWLEAIKMGRYTEIFMENGYSSMDAVAQVTLE

SEQ ID NO: 52556 - protein, 151 aa, Homo sapiens
MSDTEEQEYEEEQPEEEAAEEEEEEEERPKPSRPVVPPLIPPKIPEGERVDFDDIHRKRMEKDLLELQTLIDVHFEQRKKEEEELVALKERIERRRSERAEQQRFRTEKERERQAKLAEEKMRKEEEEAKKRAEDDAKKKKVLSNMGAHFG

SEQ ID NO: 52557 - protein, 590 aa, Homo sapiens
MEGKWLLCMLLVLGTAIVEAHDGHDDDVIDIEDDLDDVIEEVEDSKPDTTAPPSSPKVTYKAPVPTGEVYFADSFDRGTLSGWILSKAKKDDTDDEIAKYDGKWEVEEMKESKLPGDKGLVLMSRAKHHAISAKLNKPFLFDTKPLIVQYEVNFQNGIECGGAYVKLLSKTPELNLDQFHDKTPYTIMFGPDKCGEDYKLHFIFRHKNPKTGIYEEKHAKRPDADLKTYFTDKKTHLYTLILNPDNSFEILVDQSVVNSGNLLNDMTPPVNPSREIEDPEDRKPEDWDERPKIPDPEAVKPDDWDEDAPAKIPDEEATKPEGWLDDEPEYVPDPDAEKPEDWDEDMDGEWEAPQIANPRCESAPGCGVWQRPVIDNPNYKGKWKPPMIDNPSYQGIWKPRKIPNPDFFEDLEPFRMTPFSAIGLELWSMTSDIFFDNFIICADRRIVDDWANDGWGLKKAADGAAEPGVVGQMIEAAEERPWLWVVYILTVALPVFLVILFCCSGKTSGMEYKKTDAPQPDVKEEEEEKEEEKDKGDEEEEGEEKLEEKQKSDAEEDGGTVSQEEEDRKPKAEEDEILNRSPRNRKPRRE

SEQ ID NO: 52558 - protein, 472 aa, Homo sapiens [sequence omitted]

SEQ ID NO: 52559 - protein, 73 aa, Homo sapiens
  MOD_RES (1)..(1): Any amino acid
XSETLRGGDRYSLRQDGTRCELQIHGLSVADTGEYSCVCGQERTSATLTVRDNQVASLRSSRGFDGFCPCDPS

SEQ ID NO: 52560 - protein, 165 aa, Homo sapiens
MHKDEFHLKFFMCVIQSRQLVRTPQRTAGEASTSSMLIPKPPPKTDILKSLDTMDDPDTVGSIPVFKTECAEVEIQVSKRKRAVVKARGDPTVETMKQREEWIMTHEEHHAAKTLGIGKAIAVLTSGGDAQGMNAAVRAVVRVGIFTGARVFFVHEGYQGLVDGG

SEQ ID NO: 52561 - protein, 135 aa, Homo sapiens
MIPNGYLMFEDENFIESSVAKLNALRKSGQFCDVRLQVCGHEMLAHRAVLACCSPYLFEIFNSDSDPHGISHVKFDDLNPEAVEVLLNYAYTAQLKADKELVKDVYSAAKKLKMDRVKQHLLYFCLHSTSTSSLL

SEQ ID NO: 52562 - protein, 89 aa, Homo sapiens
MMQESGTETKSNGSAIQNGSGGSNHLLECGGLREGRSNGETPAVDIGAADLAHAQQQQQQALQVARQLLLQQQQQQQVSGLKSPKRNDK

SEQ ID NO: 52563 - protein, 187 aa, Homo sapiens
MSCPVPACCALLLVLGLCRARPRNALLLLADDGGFESGAYNNSAIATPHLDALARRSLLFRNAFTSVSSCSPSRASLLTGLPQHQNGMYGLHQDVHHFNSFDKVRSLPLLLSQAGVRTGLSSRPGIIGKKHVGPETVYPFDFAYTEENGSVLQVGRNITRIKLLVRKFLQTQDDRPFFLYVAFHDPH

SEQ ID NO: 52564 - protein, 562 aa, Homo sapiens
MGDSPGRGAPERRHKAQPGRARKYEWRPEGPTSMGSLGQREDLQDEDRNSAFTWKVQANNRAYNGQFKEKVILCWQRKKYKTNVIRTAKYNFYSFLPLNLYEQFHRVSNLFFLIIIILQSIPDISTLPWFSLSTPMVCLLFIRATRDLVDDMGRHKSDRAINNRPCQILMGKSFKQKKWQDLCVGDVVCLRKDNIVPADMLLLASTEPSSLCYVETVDIDGETNLKFRQALMVTHKELATIKKMASFQGTVTCEAPNSRMHHFVGCLEWNDKKYSLDIGNLLLRGCRIRNTDTCYGLVIYAGFDTKIMKNCGKIHLKRTKLDLLMNKLVVVIFISVVLVCLVLAFGFGFSVKEFKDHHYYLSGVHGSSVAAESFFVFWSFLILLSVTIPMSMFILSEFIYLGNSVFIDWDVQMYYKPQDVPAKARSTSLNDHLGQVEYIFSDKTGTLTQNILTFNKCCISGRVYGAAPTPELPAGSSIFKGLRVPENQSHVWPHAQHLRPNLNQGTVARWPGFLWRGPGKFFFFFEAESHSVYPGRNAVVQSWLTAISTSQVQAILLAQPPE

SEQ ID NO: 52565 - protein, 67 aa, Homo sapiens
  MOD_RES (1)..(1): Any amino acid
XVSSSIVDKYIGESARLIREMFNYARDHQPCIIFMDEIDAIGGRRFSEGTSADREIQRTLMEIMKQL

SEQ ID NO: 52566 - protein, 193 aa, Homo sapiens
MGGRRGPNRTSYCRNPLCEPGSSGGSSGSHTSSASVTSVRSRTRSSSGTGLSSPPLATQTVVPLQHCKIPELPVQASILFELQLFFCQLIALFVHYINIYKTVWWYPPSHPPSHTSLVWDVHSVPAAELRPPQDKPLQPHGLHGAPGGGQWPGKEPGLPPDTAGDVEAAHKTAVWPGRHAHPCLLPVTQPHPQ

SEQ ID NO: 52567 - protein, 163 aa, Homo sapiens
MLGKDYMLAIILVNCDDDLWGDHSLEVEAGLPPGWRKIHDAAGTYYWHVPSGSTQWQRPTWELGDAEDPGTCFAVRSLGWVEVPEEDLAPGKSSIAVNNCIQQLAQTRSRSQPPDGAWGEGQNMLMILKKDAMSLVNPLDHSLIHCQPLVHIRVWGVGSSKGR

SEQ ID NO: 52568 - protein, 214 aa, Homo sapiens
  MOD_RES (1)..(1): Any amino acid
XKSLCLSWKLAWPPELPGVGTGGFVLYAPTPGKFRWSIDQLAVINPVEIDPEDIHRQALYLSHSRIDKDVEDKRQKAIEEFFTKDVIVPSPWTDHEGKQLSQCHSSKCTNINSDSPVGKKLTIHSEKSDAACQTLLSLPVDFNLENILGDYFRADEFADQSPGNLSSSSLRRKLFLDGNGSISDSLPSASPGSPHSGVQTSLEMFYSIDLSPVK

SEQ ID NO: 52569 - protein, 53 aa, Homo sapiens
MAAPCEGQAFAVGVEKNWGAVVRSPEGTPQKIRQLIDEGIAPEEGGVDATTPA

SEQ ID NO: 52570 - protein, 103 aa, Homo sapiens
  MOD_RES (1)..(1): Any amino acid
XGVLTELKLPCEMDFSGKDVSGVLFQYPDTEGKVEDFTELVERAHQSGRCHWERSVSSCSSNQGATHSERQGYQQHLYSSGPLGEYGCHVCNLPWFPWAGAYC

SEQ ID NO: 52571 - protein, 39 aa, Homo sapiens
MASETHNVKKRNFCNKIEDHFIDLPRKKISNFTNKNMKE

SEQ ID NO: 52572 - protein, 54 aa, Homo sapiens
MRAHALEKGFTINEYTIRPLGVTGVAGEPLPVDSEKDIFDYIQWKYREPKDRSE

SEQ ID NO: 52573 - protein, 677 aa, Homo sapiens
WTEEPEECGPASCPESAPFRLQGSSSSHRARGEVDVFSPFPAPTAGELALEQGPGSPPQPSDLSQTHPLPSEPVGSQEDGPRLRAVFDALDGDGDGFVRIEDFIQFATVYGAEQVKDLTKYLDPSGLGVISFEDFYQGITAIRNGDPDGQCYGGVASAQDEEPLACPDEFDDFVTYEANEVTDSAYMGSESTYSECETFTDEDTSTLVHPELQPEGDADSAGGSAVPSECLDAMEEPDHGALLLLPGRPHPHGQSVITVIGGEEHFEDYGEGSEAELSPETLCNGQLGCSDPAFLTPSTDPLAAKLHSILTDEAFEFYCSQCHKQINRLEDLSARLSDLEMNSPTKRLSSKKVARYLHQSGALTMEALEDPSPELMEGPEEDIADKVVFLERRVLELEKDTAATGEQHSRLRQENLQLVHRANALEEQLKEQELRACEMVLEETRRQKELLCKMEREKSIEIENLQTRLQQLDEENSELRSCTPCLKANIERLEEEKQKLLDEIESLTLRLSEEQENKRRMGDRLSHERHQFQRDKEATQELIEDLRKQLEHLQLLKLEAEQRRGRSSSMGLQEYHSRARESELEQEVRRLKQDNRNLKEQNEELNGQIITLSIQGAKSLFSTAFSESLAAEISSVSRDELMEAIQKQEEINFRLQDYIDRIIVAIMETNPSILEVK

SEQ ID NO: 52574 - protein, 107 aa, Homo sapiens
MSPADFQRAVDERFPGCMQGRTMYVLPFSMGPVGSPLSRIGVQLTDSAYVVASMRIMTRLGTPVLQALGDGDFVKCLHSVGQPLTGQGEPVSQWPCNPEKTLIGHVP

SEQ ID NO: 52575 - protein, 12 aa, Homo sapiens
MDAEAEDKTLRT

SEQ ID NO: 52576 - protein, 196 aa, Homo sapiens
MLPSVQEASGKLVFSAGRREHLRRGPRCEEISEMGTGKLKAQEINFAWVTTRTLRFAFTKILRPVATLDEVVSFSRWRTVREHGKPTRDPASCGAVSYGNREEAWFEDPAPVQLIVQFLEQASKPSVNEQNQVQPPPDNKRNRILKLLALKVAAHLKWDLDILEKSLSVPVLNMLLNELLCISKVPPGTKHVDMDL

SEQ ID NO: 52577 - protein, 79 aa, Homo sapiens
MKYQEVRCLTSFNISVSFPAETDDYAEIIDEEDTYTMPSTRDYEIQRERIELGRCIGEGQFGDVHQGIYMSPVCVCGRY

SEQ ID NO: 52578 - protein, 865 aa, Homo sapiens
MSLWGLVSKMPPEKVQRLYVDFPQHLRHLLGDWLESQPWEFLVGSDAFCCNLASALLSDTVQHLQASVGEQGEGSTILQHISTLESIYQRDPLKLVATFRQILQGEKKAVMEQFRHLPMPFHWKQEELKFKTGLRRLQHRVGEIHLLREALQKGAEAGQVSLHSLIETPANGTGPSEALAMLLQETTGELEAAKALVLKRIQIWKRQQQLAGNGAPFEESLAPLQERCESLVDIYSQLQQEVGAAGGELEPKTRASLTGRLDEVLRTLVTSCFLVEKQPPQVLKTQTKFQAGVRFLLGLRFLGAPAKPPLVRADMVTEKQARELSVPQGPGAGAESTGEIINNTVPLENSIPGNCCSALFKNLLLKKIKRCERKGTESVTEEKCAVLFSASFTLGPGKLPIQLQALSLPLVVIVHGNQDNNAKATILWDNAFSEMDRVPFVVAERVPWEKMCETLNLKFMAEVGTNRGLLPEHFLFLAQKIFNDNSLSMEAFQHRSVSWSQFNKMRNLMLRGLCSLFKFPKQEILLGRGFTFWQWFDGVLDLTKRCLRSYWSDRLIIGFISKQYVTSLLLNEPDGTFLLRFSDSEIGGITIAHVIRGQDGSPQIENIQPFSAKDLSIRSLGDRIRDLAQLKNLYPKKPKDEAFRSHYKPEQMGKDGRGYVPATIKMTVERDQPLPTPELQMPTMVPSYDLGMAPDSSMSMQLGPDMVPQVYPPHSHSIPPYQGLSPEESVNVLSAFQEPHLQMPPSLGQMSLPFDQPHPQGLLPCQPQEHAVSSPDPLLCSDVTMVEDSCLSQPVTAFPQGTWIGEDIFPPLLPPTEQDLTKLLLEGQGESGGGSLGAQPLLQPSHYGQSGISMSHMDLRANPSW

SEQ ID NO: 52579 - protein, 52 aa, Homo sapiens
MEDLDRVWGVFRSLGGQGPPVQHGMQASVPKACSPGGPSILLFQRCLGYRAL

SEQ ID NO: 52580 - protein, 154 aa, Homo sapiens
MSLCEDMLLCNYRKCRIKLSGYAWVTACSHIFCDQHGSGEFSRSPAICPACNSTLSGKLDIVRTELSPSEEYKAMVLAGLRPEIVLDISSRALAFWTYQVHQERLYQEYNFSKAEGHLKQMEKIYTQQIQSKDVELTSMKGEVTSMKKVLEEYK

SEQ ID NO: 52581 - protein, 63 aa, Homo sapiens
MYDFAAEPGNNELTVNEGEIITITNPDVGGGWLEGRNIKGERGLVPTDYVEILPSDGKDQFSC

SEQ ID NO: 52582 - protein, 75 aa, Homo sapiens
MKIYGEVVFKCENVATLDPINFETPEAYISLPKWNTKRMGSISFDFRTTEPNGLILFTHGKPQERKDARSQKNTK

SEQ ID NO: 52583 - protein, 257 aa, Homo sapiens
MWVEETVARFQSPNIRMCFITYSTDGQTVLPLTSDKNRIKNGLDQLQKIVPDGHTFMQAGFRKAIQQIESFNSGNKVPSMIIAMTDGELVAHAFQDTLREAQKARKLGANVYTLGVADYNLDQITAIADSPGHVFAVENGFKALRSTIDALTSKVCLDVTSVEPSSECVGEPYHVVIHGNGFQNLKKRDEVICRFIFNESTIIDEKPTSIDNNSMNCPGPKLEKPGEEYSIEVSLNKGKTFFKSNVSITSTTCPSLK

SEQ ID NO: 52584 - protein, 123 aa, Homo sapiens
MSVKGCFTDFHIDFGGTSVWYHVFRGGKIFWLIPPTLHNLALYEEWVLSGKQSDIFLGDRVERCQRIELKQGYTFFIPSGWIHAVYTPVDSLVFGGNILHSFNVPMQLRIYEIEDRTREKNKL

SEQ ID NO: 52585 - protein, 580 aa, Homo sapiens
MGAALGTGTRLAPWPGRACGALPRWTPTAPAQGCHSKPGPARPVPLKKRGYDVTRNPHLNKGMAFTLEERLQLGIHGLIPPCFLSQDVQLLRIMRYYERQQSDLDKYIILMTLQDRNEKLFYRVLTSDVEKFMPIVYTPTVGLACQHYGLTFRRPRGLFITIHDKGHLATMLNSWPEDNIKAVVVTDGERILGLGDLGCYGMGIPVGKLALYTACGGVNPQQCLPVLLDVGTNNEELLRDPLYIGLKHQRVHGKAYDDLLDEFMQAVTDKFGINCLIQFEDFANANAFRLLNKYRNKYCMFNDDIQGTASVAVAGILAALRITKNKLSNHVFVFQGAGEAAMGIAHLLVMALEKEGVPKAEATRKIWMVDSKGLIVKGRSHLNHEKEMFAQDHPEVNSLEEVVRLVKPTAIIGVAAIAGAFTEQILRDMASFHERPIIFALSNPTSKAECTAEKCYRVTEGRGIFASGSPFKSVTLEDGKTFIPGQGNNAYVFPGVALGVIAGGIRHIPDEIFLLTAEQIAQEVSEQHLSQGRLYPPLSTIRDVSLRIAIKVLDYAYKHNLASYYPEPKDKEAFVRSLVY

SEQ ID NO: 52586 - protein, 741 aa, Homo sapiens
MASNGAYPVLGPGVTVNPGTSLSVFTALPFATPAPGPAHRPPLVTAVVPPAGPLVLSAFPSTPLVAGQDGRGPSGAGASNVFVQMRTEVGPVKPPQAQTLILTQAPLVWQAPGTLCGGVMCPPPLLLAAAPGVPVTSAQVVGGTQACEGGWSHGLPLPPPPPAAQVAPIVSPGNARPWPQGAHGEGSLAPSQAKARPDDSCKPKSVYENFRLWQHYKPLARRHLPQSPDTEALSCFLIPVLRSLARRKPTMTLEEGLWQAMREWQHTSNFDRMIFYEMAEKFLEFEAEEEMQIQKSQWMKGPQSLPPPAPPRLEPRGPPAPEVVKQPVYLPSKDGPKAPTACLPPPRPQRPAETKAHLPPPRPQRPAETKVPEEIPPEVVQEYVDIMEELLGSHPGDTGEPEGQREKGKVEQPQEEDGITSDPGLLSYIDKLCSQEDFVTKVEAVIHPRFLEELLSPDPQMDFLALSQELEQEEGLTLAQLVEKRLLSLKEKGCGRAAPRHGTARLDSSPSEFAAGQEAAREVPDPQQRVSVETSPPQTAAQDPQGQGRVRTGMARSEDPAVLLGCQDSPRLKAVRPTSPPQDHRPTCPGLGTKDALGLPGESPVKESHGLAKGSSEETELPGMVYVVGSHHRLRPWRLSQSPVPSSGLLSPGGRGPQGALQSPSAQKRGLSPSPSPASKSKKRPLFGSPSPAEKTPHPGPGLRVSGEQSLAWGLGGPSQSQKRKGDPLASRRKKKRHCSQ

SEQ ID NO: 52587 - protein, 184 aa, Homo sapiens
  MOD_RES (1)..(1): Any amino acid
XYLVIWCIDLEVEEKCALMEQVAHQTIVMQFILELAKSLKVDPRACFRQFFTKIKTADRQYMEGFNDELEAFKERVRGRAKLRIEKAMKEYEEEERKKRLGPGGLDPVEELQKCFDVKDVQMLQDAISKMDPTDAKYHMQRCIDSGLWVPNSKASEAKEGEEAGPGDPLLEAVPKTGDEKDVSV

SEQ ID NO: 52588 - protein, 766 aa, Homo sapiens
MKPFQLDLLFVCFFLFSQELGLQKRGCCLVLGYMAKDKFRRMNEGQVYSFSQQPQDQVVVSGQPVTLLCAIPEYDGFVLWIKDGLALGVGRDLSSYPQYLVVGNHLSGEHHLKILRAELQDDAVYECQAIQAAIRSRPARLTVLVPPDDPVILGGPVISLRAGDPLNLTCHADNAKPAASIIWLRKGEVINGATYSKTLLRDGKRESIVSTLFISPGDVENGQSIVCRATNKAIPGGKETSVTIDIQHPPLVNLSVEPQPVLEDNVVTFHCSAKANPAVTQYRWAKRGQIIKEASGEVYRTTVDYTYFSEPVSCEVTNALGSTNLSRTVDVYFGPRMTTEPQSLLVDLGSDAIFSCAWTGNPSLTIVWMKRGSGVVLSNEKTLTLKSVRQEDAGKYVCRAVVPRVGAGEREVTLTVNGPPIISSTQTQHALHGEKGQIKCFIRSTPPPDRIAWSWKENVLESGTSGRYTVETISTEEGVISTLTISNIVRADFQTIYNCTAWNSFGSDTEIIRLKEQESVPMAVIIGVAVGAGVAFLVLMATIVAFCCARSQRNLKGVVSAKNDIRVEIVHKEPASGREGEEHSTIKQLMMDRGEFQQDSVLKQLEVLKEEEKEFQNLKDPTNGYYSVNTFKEHHSTPTISLSSCQPDLRPAGKQRVPTGMSFTNIYSTLSGQGRLYDYGQRFVLGMGSSSIELCEREFQRGSLSDSSSFLDTQCDSSVSSSGKQDGYVQFDKASKASASSSHHSQSSSQNSDPSRPLQRRMQTHV

SEQ ID NO: 52589 - protein, 104 aa, Homo sapiens
  MOD_RES (1)..(1): Any amino acid
XVARVRKSKGKFAFLLESTMNEYIEQRKPCDTMKVGGNLDSKGYGVATPKGSSLRNAVNLAVLKLNEQGLLDKLKNKWWYDKGECGSGGGDSKNSCKPCRFETQ

SEQ ID NO: 52590 - protein, 125 aa, Homo sapiens
  MOD_RES (1)..(1): Any amino acid
XNISIGSDHCSEYSCQTNNKYSKQPFRRVTFSVVSQPQDPHQGSLQSCYDSGLEESETPSSKSSSGPRLGALPLPEDNYERTTPDGSVGEAEHMENGVAAITTFPFLPFPHGKTHGRRVLLRPLH

SEQ ID NO: 52591 - protein, 172 aa, Homo sapiens
MGAYARASGVCARGCLDSAGPWTMSRALRPPLPPLCFFLLLLAAAGARAGGYEVCVFGVPVQTCPTVQPNMLNVHLLPHTHDDVGWLKTVDQYFYGIKNDIQHAGVQYILDSVISALLADPTRRFIYVEIAFFSRWWHQQTNATQEVVRDLVRQGRLEFANGGWVMNDEAAT

SEQ ID NO: 52592 - protein, 580 aa, Homo sapiens
MALHFQSLAELEVLCTHLYIGTDLTQRIEAEKALLELIDSPECLSKCQLLLEQGTTSYAQLLAATCLSKLVSRVSPLPVEQRMDIRNYILNYVASQPKLAPFVIQALIQVIAKITKLGWFEVQKDQFVFREIIADVKKFLQGTVEHCIIGVIILSELTQEMNLVDYSRPSAKHRKIATSFRDTSLKDVLVLACSLLKEVFAKPLNLQDQCQQNLVMQVLKLVLNCLNFDFIGSSADESADDLCTVQIPTTWRTIFLEPETLDLFFNLYHSLPPLLSQLALSCLVQFASTRRSLFNSPERAKYLGNLIKGVKRILENPQGLSDPGNYHEFCRFLARLKTNYQLGELVMVKEYPEVIRLIANFTITSLQHWEFAPNSVHYLLTLWQRMVASVPFVKSTEPHLLDTYAPEITKAFITSRLDSVAIVVRDHLDDPLDDTATVFQQLEQLCTVSRCEYEKTCALLVQLFDQNAQNYQKLLHPYSGVTVDITIQEGRLAWLVYLVGTVVGGRLTYTSTDEHDAMDGELSCRVFQLISLMDTGLPRCCNEKIELAILWFLDQFRKTYVGDQLQRTSKEVAGDCILLN

SEQ ID NO: 52593 - protein, 197 aa, Homo sapiens
MAQEVDTAQGAEMRRGAGAARGRASWCWALALLWLAVVPGWSRVSGIPSRRHWPVPYKRFDFRPKPDPYCQAKYTFCPTGSPIPVMEGDDDIEVFRLQAPVWEFKYGDLLGHLKIMHDAIGFRSTLTGKNYTMEWYELFQLGNCTFPHLRPEMDAPFWCNQGAACFFEGIDDVHWKENGTLVQVATISDGETEAQRG

SEQ ID NO: 52594 - protein, 547 aa, Homo sapiens
MPGGGPQGAPAAAGGGGVSHRAGSRDCLPPAACFRRRRLARRPGYMRSSTGPGIGFLSPAVGTLFRFPGGVSGEESHHSESRARQCGLDSRGLLVRSPVSKSAAAPTVTSVRGTSAHFGIQLRGGTRLPDRLSWPCGPGSAGWQQEFAAMDSSETLDASWEAACSDGARRVRAAGSLPSAELSSNSCSPGCGPEVPPTPPGSHSAFTSSFSFIRLSLGSAGERGEAEGCPPSREAESHCQSPQEMGAKAASLDGPHEDPRCLSRPFSLLATRVSADLAQAARNSSRPERDMHSLPDMDPGSSSSLDPSLAGCGGDGSSGSGDAHSWDTLLRKWEPVLRDCLLRNRRQMEVISLRLKLQKLQEDAVENDDYDKAETLQQRLEDLEQEKISLHFQLPSRQPALSSFLGHLAAQVQAALRRGATQQASGDDTHTPLRMEPRLLEPTAQDSLHVSITRRDWLLQEKQQLQKEIEALQARMFVLEAKDQQLRREIEEQEQQLQWQGCDLTPLVGQLSLGQLQEVSKALQDTLASAGQIPFHAEPPETIRRCV

SEQ ID NO: 52595 - protein, 561 aa, Homo sapiens
MTVLEITLAVILTLLGLAILAILLTRWARRKQSEMYISRYSSEQSARLLDYEDGRGSRHAYSTQSDTSYDNRERSKRDYTPSTNSLALSRSSIALPQGSMSSIKCLQTTEEPPSRTAGAMMQFTAPIPGATGPIKLSQKTIVQTLGPIVQYPGSNAGPPSAPRGPPMAPIIISQRTASQLAAPIIISQRTARIPQVHTMDSSGKITLTPVVILTGYMDEELAKKSCSKIQILKCGGTARSQNSREENKEALKNDIIFTNSVESLKSAHIKEPEREGKGTDLEKDKIGMEVKVDSDAGIPKRQETQLKISEMSVPQGQGAQIKKSVSDVPRGQESQVKKSESGVPKGQEAQVTKSGLVVLKGQEAQVEKSEMGVPRRQESQVKKSQSGVSKGQEAQVKKRESVVLKGQEAQVEKSELKVPKGQEGQVEKTEADVPKEQEVQEKKSEAGVLKGPESQVKNTEVSVPETLESQVKKSESGVLKGQEAQEKKESFEDKGNNDKEKERDAEKDPNKKEKGDKNTKGDKGKDKVKGKRESEINGEKSKGSKRAKANTGRKYNKKVEE

SEQ ID NO: 52596 - protein, 49 aa, Homo sapiens
MSSRRGSFLSTKLHCSSCLPCPLSFEKFKPSEKLQEHDMRKEPQLTLKM

SEQ ID NO: 52597 - protein, 179 aa, Homo sapiens
MAAPCGSELPANSPLKIPKMEVLSPASPGGLSDGNPSLSDPSTPRGASPLGPGSAAGSGAAASGGLGLGLGGRSAASSSVSFSPGGGGGGAAAAAAAACRGMSWTPAETNALIAVWGNERLVEARYQQLEGAGTVFGSKAPGPAMYERVSRALAELGYERTPSQCRERIKMKYLSQREH

SEQ ID NO: 52598 - protein, 58 aa, Homo sapiens
MELSQLLNEIRANYEKILTRNQIETVLSTRIQVMISYRQAPSRIRRQSMSTQFLSRPL

SEQ ID NO: 52599 - protein, 121 aa, Homo sapiens
MVRVRAVVMARDDSSGGWLPVGGGGLSQTTLECTLKPGLVYNKVNPIFHHWSLGDCKFGLTFQSPAEADEFQKSLLAALAALGRGSLTPSSSSSSSSPSQDTAETPCPLTLSQYFRHMLCP

SEQ ID NO: 52600 - protein, 581 aa, Homo sapiens
MEEHSYIQKELDLQNGSLEEDSVVHSVENDSQNMMESLSPKKYSSSLRFKANGDYSGSYLTLSQPVPAKRSPSPLGTSVRSSPSLAKIQGSKQFSYDGTDKNIPMKPPTPLLNTTSSLSGYPLGRADFDHYTGRDSERALRLSEKPPYSKYSSRHKSHDNVYSLGGLEGRKASGSLLAMWNGSSLSDAGPPPISRSGAASMPSSPKQARKMSIQDSLALQPKLTRHKELASENINLRTRKYSSSSLSHMGAYSRSLPRLYRATENQLTPLSLPPRNSLGNSKRTKLGEKDLPHSVIDNDNYLNFSSLSSGALPYKTSASEGNPYVSSTLSVPASPRVARKMLLASTSSCASDDFDQASYVGTNPSHSLLAGESDRVFATRRNFSCGSVEFDEADLESLRQASGTPQPALRERKSSISSISGRDDLMDYHRRQREERLREQEMERLERQRLETILSLCAEYTKPDSRLSTGTTVEDVQKINKELEKLQLSDEESVFEEALMSPDTRYRCHRKDSLPDADLASCGSLSQSSASFFTPRSTRNDELLSDLTRTPPPPSSTFPKASSESSYLSILPKVMLAQQRY

SEQ ID NO: 52601 - protein, 114 aa, Homo sapiens
MALSLGWKAHRNHCGLLLQALRSSGLLLFPCGQCPWRGAGSFLDPEIKAFLEENTEVTSSGSLTPEIQLRLLTPRCKFWWERADLWPHSDPYWAIYWPGGQALSSCRNGYYTKL

SEQ ID NO: 52602 - protein, 54 aa, Homo sapiens
MRHSKRTHCPDWDSRESWGHESYRGSHKRKRRSHSSTQENRHCKPHHQFKESDW

SEQ ID NO: 52603 - protein, 724 aa, Homo sapiens
MLSGVWFLSVLTVAGILQTESRKTAKDICKIRCLCEEKENVLNINCENKGFTTVSLLQPPQYRIYQLFLNGNLLTRLYPNEFVNYSNAVTLHLGNNGLQEIRTGAFSGLKTLKRLHLNNNKLEILREDTFLGLESLEYLQADYNYISAIEAGAFSKLNKLKVLILNDNLLLSLPSNVFRFVLLTHLDLRGNRLKVMPFAGVLEHIGGIMEIQLEENPWNCTCDLLPLKAWLDTITVFVGEIVCETPFRLHGKDVTQLTRQDLCPRKSASDSSQRGSHADTHVQRLSPTMNPALNPTRAPKASRPPKMRNRPTPRVTVSKDRQSFGPIMVYQTKSPVPLTCPSSCVCTSQSSDNGLNVNCQERKFTNISDLQPKPTSPKKLYLTGNYLQTVYKNDLLEYSSLDLLHLGNNRIAVIQEGAFTNLTSLRRLYLNGNYLEVLYPSMFDGLQSLQYLYLEYNVIKEIKPLTFDALINLQLLFLNNNLLRSLPDNIFGGTALTRLNLRNNHFSHLPVKGVLDQLPAFIQIDLQENPWDCTCDIMGLKDWTEHANSPVIINEVTCESPAKHAGEILKFLGREAICPDSPNLSDGTVLSMNHNTDTPRSLSVSPSSYPELHTEVPLSVLILGLLVVFILSVCFGAGLFVFVLKRRKGVPSVPRNTNNLDVSSFQLQYGSYNTETHDKTDGHVYNYIPPPVGQMCQNPIYMQKEGDPVAYYRNLQEFSYSNLE

SEQ ID NO: 52604 - protein, 448 aa, Homo sapiens
MEKCCRGKEQSLLCIQQGIPDTPFSKDRNGHVKRPMNAFMVWARIHRPALAKANPAANNAEISVQLGLEWNKLSEEQKKPYYDEAQKIKEKHREEFPGWVYQPRPGKRKRFPLSVSNVFSGTTQNIISTNPTTVYPYRSPTYSVVIPSLQNPITHPVGETSPAIQLPTPAVQSPSPVTLFQPSVSSAAQVAVQDPSLPVYPALPPQRFTGPSQTDTHQLHSEATHTVKQPTPVSLESANRISSSASTAHARFATSTIQPPREYSSVSPCPRSAPIPQASPIPHPHVYQPPPLGHPATLFGTPPRFSFHHPYFLPGPHYFPSSTCPYSRPPFGYGNFPSSMPECLSYYEDRYPKHEGIFSTLNRDYSFRDYSSECTHSENSRSCENMNGTSYYNSHSHSGEENLNPVPQLDIGTLENVFTAPTSTPSSIQQVNVTDSDEEEEEKVLRDL

SEQ ID NO: 52605 - protein, 388 aa, Homo sapiens
MDELQDVQLTEIKPLLNDKNGTRNFQDFDCQEHDIETTHGVVHVTIRGLPKGNRPVILTYHDIGLNHKSCFNAFFNFEDMQEITQHFAVCHVDAPGQQEGAPSFPTGYQYPTMDELAEMLPPVLTHLSLKSIIGIGVGAGAYILSRFALNHPELVEGLVLINVDPCAKGWIDWAASKLSGLTTNVVDIILAHHFGQEELQANLDLIQTYRMHIAQDINQDNLQLFLNSYNGRRDLEIERPILGQNDNKSKTLKCSTLLVVGDNSPAVEAVVECNSRLNPINTTLLKMADCGGLPQVVQPGKLTEAFKYFLQGMGYIPYVQLSHLSTESVPSASMTRLARSRTHSTSSSLGSGESPFSRSVTSNQSDGTQESCESPDVLDRHQTMEVSC

SEQ ID NO: 52606 - protein, 131 aa, Homo sapiens
MAAVSMSVVLRQTLWRRRAVAVAALSVSRVPTRSLRTSTWRLAQDQTQDTQLITVDEKLVYLVPLCFTFCGLATPSLELATLFPASRHLEFLFTLPGCILTNPEDFIRSPSTYSSNGYHYFNWSSRRAYKN

SEQ ID NO: 52607 - protein, 375 aa, Homo sapiens
MEDSEALGFEHMGLDPRLLQAVTDLGWSRPTLIQEKAIPLALEGKDLLARARTGSGKTAAYAIPMLQLLLHRKATGPVVEQAVRGLVLVPTKELARQAQSMIQQLATYCARDVRVANVSAAEDSVSQRAVLMEKPDVVVGTPSRILSHLQQDSLKLRDSLELLVVDEADLLFSFGFEEELKSLLCHLPRIYQAFLMSATFNEDVQALKELILHNPVTLKLQESQLPGPDQLQQFQVVCETEEDKFLLLYALLKLSLIRGKSLLFVNTLERSYRLRLFLEQFSIPTCVLNGELPLRSRCHIISQFNQGFYDCVIATDAEVLGAPVKGKRRGRGPKGDKASDPEAGVARGIDFHHVSAVLNFDLPPTPEAYIHRAGR

SEQ ID NO: 52608 - protein, 257 aa, Homo sapiens
MITFLPLLLGLSLGCTGAGGFVAHVESTCLLDDAGTPKDFTYCISFNKDLLTCWDPEENKMAPCEFGVLNSLANVLSQHLNQKDTLMQRLRNGLQNCATHTQPFWGSLTNRTRPPSVQVAKTTPFNTREPVMLACYVWGFYPAEVTITWRKNGKLVMPHSSAHKTAQPNGDWTYQTLSHLALTPSYGDTYTCVVEHTGAPEPILRDWTPGLSPMQTLKVSVSAVTLGLGLIIFSLGVISWRRAGHSSDLIISLLFIL

SEQ ID NO: 52609 - protein, 114 aa, Homo sapiens
MSSSRVGLRLAACLLNVSEAGRKYIVENIAKAALLDKNGKKHPQVSVLNIFSDQDYKRSVITIATSVDKLGSSVLAACLEAFQAIDMEVQEGIHPCLGAVDLIPIYPLSGVTVE

SEQ ID NO: 52610 - protein, 161 aa, Homo sapiens
MSSSEEVSWISWFCGLRGNEFFCEVDEDYIQDKFNLTGLNEQVPHYRQALDMILDLEPDEELEDNPNQSDLIEQAAEMLYGLIHALPLSDSQIQWFYQALNLSLPLPNFHAGTEPDGLDPMVTLSLNLGLSFAELCRMYLFLNSSGLLVLPQAGLLTPHPS

SEQ ID NO: 52611 - protein, 775 aa, Homo sapiens
MGCNMCVVQKPEEQYKVMLQVNGKELSKLSQEQTLQALRSSKEPLVIQVLRRSPRLRGDSSCHDLQLVDSGTQTDITFEHIMALGKLRPPTPPMVILEPYVLSELPPISHEYYDPAEFMEGGPQEADRLDELEYEEVELYKSSHRDKLGLMVCYRTDDEEDLGIYVGEVNPNSIAAKDGRIREGDRIIQINGVDVQNREEAVAILSQEENTNISLLVARPESQLAKRWKDSDRDDFLDDFGSENEGELRARKLKSPPAQQPGNEEEKGAPDAGPGLSNSQELDSGVGRTDESTRNEESSEHDLLGDEPPSSTNTPGSLRKFGLQGDALQSRDFHFSMDSLLAEGAGLGGGDVPGLTDEEYERYRELLEIKCHLENGNQLGLLFPRASGGNSALDVNRNESLGHEMAMLEEELRHLEFKCRNILRAQKMQQLRERCMKAWLLEEESLYDLAASEPKKHELSDISELPEKSDKDSTSAYNTGESCRSTPLLVEPLPESPLRRAMAGNSNLNRTPPGPAVATPAKAAPPPGSPAKFRSLSRDPEAGRRQHAEERGRRNPKTGLTLERVGPESSPYLSRRHRGQGQEGEHYHSCVQLAPTRGLEELGHGPLSLAGGPRVGGVAAAATEAPRMEWKVKVRSDGTRYVAKRPVRDRLLKARALKIREERSGMTTDDDAVSEMKMGRYWSKEERKQHLIRAREQRKRREFMMQSRLECLREQQNGDSKPELNIIALSHRKTMKKRNKKILDNWITIQEMLAHGARSADGKRVYNPLLSVTTV

SEQ ID NO: 52612 - protein, 236 aa, Homo sapiens
MGLEKLHPFDAGKWGKVINFLKEEKLLSDSMLVEAREASEEDLLVVHTRRYLNELKWSFAVATITEIPPVIFLPNFLVQRKVLRPLRTQTGGTIMGVASTTAPATVAGASVPMRTSRSPSSFCLSVWRASPGLPSLILMPIRAMGMSETSWTTSVCTSWMSTTATSTQGTALPSRPSGGRWSWSGAQRMMSTWIRWRGTSRNPSRSTCPTWWYTMQAPTSSRGTALGGCPSAQRAS

SEQ ID NO: 52613 - protein, 95 aa, Homo sapiens
MAENDVDNELLDYEDDEVETAAGGDGAEAPAKKDVKGSYVSIHSSGFRDFLLKPELLRAIVDCGFEHPSEVQHECIPQAILGMDVLCQAKSGMGK

SEQ ID NO: 52614 - protein, 37 aa, Homo sapiens
MYEGKHIHFSEVDNKPLCSYSPKLCKQRRLNGYAFCI

SEQ ID NO: 52615 - protein, 154 aa, Homo sapiens
MAKIAKTHEDIEAQIREIQGKKAALDEAQGVGLDSTGYYDQEIYGGSDSRFAGYVTSIAATELEDDDDDYSSSTSLLGQKKPGYHAPVALLNDIPQSTEQYDPFAEHRPPKIADREDEYKKHRRTMIISPERLDPFADGNSFPLFYKYSEIYLY

SEQ ID NO: 52616 - protein, 413 aa, Homo sapiens
MDTQGAFDSQSTIKDCATVFALSTMTSSVQVYNLSQNIQEDDLQHLQLFTEYGRLAMEEIYQKPFQTLMFLIRDWSYPYEHSYGLEGGKQFLEKRLQVKQNQHEELQNVRKHIHNCFSNLGCFLLPHPGLKVATNPSFDGRLKDIDEDFKRELRNLVPLLLAPENLVEKEISGSKVTCRDLVEYFKAYIKIYQGEELPHPKSMLQATAEANNLAAVAGARDTYCKSMEQVCGGDKPYIAPSDLERKHLDLKEVAIKQFRSVKKMGGDEFCRRYQDQLEAEIEETYANFIKHNDGKNIFYAARTPATLFAVMFAMYIISGLTGFIGLNSIAVLCNLVMGLALIFLCTWAYVKYSGEFREIGTVIDQIAETLWEQRSPRKVFSKLFEVTRRRMVHRALSSAQRQRLSSNNNKKKN

SEQ ID NO: 52617 - protein, 506 aa, Homo sapiens
MAGRGSLVSWRAFHGCDSAEELPRVSPRFLRAWHPPPVSARMPTRRWAPGTQCITKCEHTRPKPGELAFRKGDVVTILEACENKSWYRVKHHTSGQEGLLAAGALREREALSADPKLSLMPWFHGKISGQEAVQQLQPPEDGLFLVRESARHPGDYVLCVSFGRDVIHYRVLHRDGHLTIDEAVFFCNLMDMVEHYSKDKGAICTKLVRPKRKHGTKSAEEELARAGWLLNLQHLTLGAQIGEGEFGAVLQGEYLGQKVAVKNIKCDVTAQAFLDETAVMTKMQHENLVRLLGVILHQGLYIVMEHVSKGNLVNFLRTRGRALVNTAQLLQFSLHVAEGMEYLESKKLVHRDLAARNILVSEDLVAKVSDFGLAKAERKGLDSSRLPVKWTAPEALKHGFTSKSDVWSFGVLLWEVFSYGRAPYPKMSLKEVSEAVEKGYRMEPPEGCPGPVHVLMSSCWEAEPARRPPFRKLAEKLARELRSAGAPASVSGQDADGSTSPRSQEP

SEQ ID NO: 52618 - protein, 132 aa, Homo sapiens
MGDAESCLLRQQTREVRKKPLINYRFLRAAANAEPRGPQAQRTSCAKRECGAFTQRVRERAGRQPPAGGTRHSRAERGRRRSHPRSRTRTTALLRSSQTKQGDGHQGEAAVSERFPQGHPEALTREEPRHAA

SEQ ID NO: 52619 - protein, 263 aa, Homo sapiens
MEQLNLADSGLVGKEARRCRRASPPMGMPSAWWLQNEAGCLFAARQVNGQQGGGSEPAAAAAVVAAGDKWKPPQGTDSIKMENGQSTAAKLGLPPLTPEQQEALQKAKKYAMEQSIKSVLVKQTIAHQQQQLTNLQMAAQRQRALAIMCRVYVGSIYYELGEDTIRQAFAPFGPIKSIDMSWDSVTMKHKGFAFVEYEVPEAAQLALEQMNSVMLGGRNIKVGRPSNIGQAQPIIDQLAEEARAFNRIYVASVHQDLSDDDIK

SEQ ID NO: 52620 - protein, 1012 aa, Homo sapiens
MAGVFPYRGPGNPVPGPLAPLPDYMSEEKLQEKARKWQQLQAKRYAEKRKFGFVDAQKEDMPPEHVRKIIRDHGDMTNRKFRHDKRVYLGSMWIMMRREKRDRRHFKRMRFPPFDDEEPPLDYADNILDVEPLEAIQLELDPEEDAPVLDWFYDHQPLRDSRKYVNGSTYQRWQFTLPMMSTLYRLANQLLTDLVDDNYFYLFDLKAFFTSKALNMAIPGGPKFEPLVRDINLQDEDWNEFNDINKIIIRQPIRTEYKIAFPYLYNNLPHHVHLTWYHTPNVVFIKTEDPDLPAFYFDPLINPISHRHSVKSQEPLPDDDEEFELPEFVEPFLKDTPLYTDNTANGIALLWAPRPFNLRSGRTRRALDIPLVKNWYREHCPAGQPVKVRVSYQKLLKYYVLNALKHRPPKAQKKRYLFRSFKATKFFQSTKLDWVEVGLQVCRQGYNMLNLLIHRKNLNYLHLDYNFNLKPVKTLTTKERKKSRFGNAFHLCREVLRLTKLVVDSHVQYRLGNVDAFQLADGLQYIFAHVGQLTGMYRYKYKLMRQIRMCKDLKHLIYYRFNTGPVGKGPGCGFWAAGWRVWLFFMRGITPLLERWLGNLLARQFEGRHSKGVAKTVTKQRVESHFDLELRAAVMHDILDMMPEGIKQNKARTILQHLSEAWRCWKANIPWKVPGLPTPIENMILRYVKAKADWWTNTAHYNRERIRRGATVDKTVCKKNLGRLTRLYLKAEQERQHNYLKDGPYITAEEAVAVYTTTVHWLESRRFSPIPFPPLSYKHDTKLLILALERLKEAYSVKSRLNQSQREELGLIEQAYDNPHEALSRIKRHLLTQRAFKEVGIEFMDLYSHLVPVYDVEPLEKITDAYLDQYLWYEADKRRLFPPWIKPADTEPPPLLVYKWCQGINNLQDVWETSEGECNVMLESRFEKMYEKIDLTLLNRLLRLIVDHNIADYMTAKNNVVINYKDMNHTNSYGIIRGLQFASFIVQYYGLVMDLLVLGLHRASEMAGPPQM

SEQ ID NO: 52621 - protein, 307 aa, Homo sapiens
MPDNRQPRNRQPRIRSGNEPRSAPAMEPDGRGAWAHSRAALDRLEKLLRCSRCNIFGLRPVDYTDDESMKSLLLLPEKNESSSASHCSVMNTGQRRDGPLVLIGSGLSSEQQKMLSELAVILKAKKYTEFDSTVTHVVVPGDAVQSTLKCMLGILNGCWILKFEWVKACLRRKVCEQEEKYEIPEGPRRSRLNREQLLPKLFDGCYFYLWGTFKHHPKDNLIKLVTAGGGQILSRKPKPDSDVTQTINTVAYHARPDSDQRFCTQYIIYEDLCNYHPERVRQGKVWKAPSSWFIDCVMSFELLPLDS

SEQ ID NO: 52622 - protein, 588 aa, Homo sapiens
MEMQSPIVQRQERQVRDRGVTRSKAEKVRPPTVPVPQVDIVPGRLSEAEWMALTALEEGEDVVGDILADLLARVMDSAFKVYLTQQCIPFTISQAREAMLQITEWRFLARDEGESAVAEDPTWGEDEEPSACTTDSWAQGSVPVLHASTSEGLENFQGEDPGGVDRIPLGRSWMGRGSQEQMESWEPSPQLRVTSAPPPTSELFQEAGPGGPVEEADGQSRGLSSAGSLSASFQLSVEEAPADDADPSLDPYLVASPQASTGRGHPLGFHLSLEDLYCCMPQLDAAGDRLELRSEGVPCIASGVLVSYPSVGGATRPSASCQQQRAGHSDVRLSAHHHRMRRKAAVKRLDPARLPCHWVRPLAEVLVPDSQTRPLEAYRGRQRGEKTKARAEPQALGPGTRVSPAAFFPLRPGIPFRDLDSGPALLFPTLNLGLSSPSLESKLPLPNSRIRFLTTHPVLPDVARSRSPKLWPSVRWPSGWEGKAELLGELWAGRTRVPPQGLELADREGQDPGRWPRTTPPVLEATSQVMWKPVLLPEALKLAPGVSMWNRSTQVLLSSGVPEQEDKEGSTFPPVEQHPIQTGAPKPR

SEQ ID NO: 52623 - protein, 61 aa, Homo sapiens
MKLWDVVAVCLVLLHTASAFPLPAANMPEDYPDQFDDVMDFIQATIKRLKRSPDKQMAVLP

SEQ ID NO: 52624 - protein, 166 aa, Homo sapiens
MLVPLAKLSCLAYQCFHALKIKKNYLPLCATRWSSTSTVPRITTHYTIYPRDKDKRWEGVNMERFAEEADVVIVGAGPAGLSAAVRLKQLAVAHEKDIRVCLVEKAAQIGAHTLSGACLDPGAFKELFPDWKEKGAPLNTPVTEDRFGILTEKYRIPVPILPGPFS

SEQ ID NO: 52625 - protein, 128 aa, Homo sapiens
MSNTTVVPSTAGPGPSGGPGGGGGGGGGGGGTEVIQVTNVSPSASSEQMRTLFGFLGKIDELRLFPPDDSPLPVSSRVCFVKFHDPDSAVVAQHLTNTVFVDRALIVVPYAEVKQPTRVVVHKTAFES

SEQ ID NO: 52626 - protein, 120 aa, Homo sapiens
MDEFSHYDLLDANTQRRVAEGHKASFCLEDTSCDYGYHRRFACTAHTQGLSPGCYDTYGADIDCQWIDITDVKPGNYILKVSVNPSYLVPESDYTNNVVRCDIRYTGHHAYASGCTISPY

SEQ ID NO: 52627 - protein, 773 aa, Homo sapiens
MFSKRLEKIPQVPLLFPFIFIILTNYSKMEGAVESQPSFFKTSQDIVTCTWVENCYSSFSRRPLEQMFCKHQSKNIISWTGMVAHTCNPSTLGGQGLCDFAKMHHQQRMAALGTDKELSDLLDFSAMFSPPVSSGKNGPTSLASGHFTGSNVEDRSSSGSWGNGGHPSPSRNYGDGTPYDHMTSRDLGSHDNLSPPFVNSRIQSKTERGSYSSYGRESNLQGCHQQSLLGGDMDMGNPGTLSPTKPGSQYYQYSSNNPRRRPLHSSAMEVQTKKVRKVPPGLPSSVYAPSASTADYNRDSPGYPSSKPATSTFPSSFFMQDGHHSSDPWSSSSGMNQPGYAGMLGNSSHIPQSSSYCSLHPHERLSYPSHSSADINSSLPPMSTFHRSGTNHYSTSSCTPPANGTDSIMANRGSGAAGSSQTGDALGKALASIYSPDHTNNSFSSNPSTPVGSPPSLSAGTAVWSRNGGQASSSPNYEGPLHSLQSRIEDRLERLDDAIHVLRNHAVGPSTAMPGGHGDMHGIIGPSHNGAMGGLGSGYGTGLLSANRHSLMVGTHREDGVALRGSHSLLPNQVPVPQLPVQSATSPDLNPPQDPYRGMPPGLQGQSVSSGSSEIKSDDEGDENLQDTKSSEDKKLDDDKKDIKSITRSRSSNNDDEDLTPEQKAEREKERRMANNARERLRVRDINEAFKELGRMVQLHLKSDKPQTKLLILHQAVAVILSLEQQVRERNLNPKAACLKRREEEKVSSEPPPLSLAGPHPGMGDASNHMGQM

SEQ ID NO: 52628 - protein, 63 aa, Homo sapiens
MGPEALSSLLLLLLVASGDADMKGHFDPAKCRYALGMQDRTIPDSDISASSSWSDSTAARHSR

SEQ ID NO: 52629 - protein, 145 aa, Homo sapiens
MDSGTVLFEIKKPPVSERLPINRRDLDPNAGRFVRYQFTPAFLRLRQVGATVEFTVGDKPVNNFRMIERHYFRNQLLKSFDFHFGFCIPSSKNTCEHIYDFPPLSEELISEMIRHPYETQSDSFYFVDDRLVMHNKADYSYSGTP

SEQ ID NO: 52630 - protein, 162 aa, Homo sapiens
MTTESGSDSESKPDQEAEPQEAAGAQGRAGAPVPEPPKEEQQQALEQFAAAAAHSTPVRREVTDKEQEFAARAAKQLEYQQLEDDKLSQKSSSSKLSRSPLKIVKKPKSMQCKVILLDGSEYTCDVEKRSRGQVLFDKVCEHLNLLEKDYFGLTYRDAENQK

SEQ ID NO: 52631 - protein, 181 aa, Homo sapiens
MTWPVQAVRWEKIQPRQIDLLTYCNLVHGRNFTSKFPRQIVSNCSHGRWSVIVIPDVTVSDSGLYRCYLQASAGENETFVMRLTVAEGKTDNQYTLFVAGGTVLLLLFVISITTIIVIFLNRRRRRERRDLFTESWDTQKAPNNYRSPISTSQPTNQSMDDTREDIYVNYPTFSRRPKTRV

SEQ ID NO: 52632 - protein, 271 aa, Homo sapiens
MTLHCAFQPTHPIICFRRVACLIHHQDPLFLDLMGTCHSDSTKPAILKPQHLTWYRTHLARGLTLYPPDILDAMLKEKKLAQDQNGALMIPIQDLEDMPAPQYPYIPPMTEFFFDGTSDITIFPPPISVEPVEVDFGACPGPEAPNPVPLCLMNHTKGKIMVVWTRRSDCPFWVTPESCDVPPLKSMAMRLHFQPPHPNCLYTVELEAFAIYKVCARNEREECGVSARSLSGLVGWQEVTEGSFRLHPLRARLSLGWTVTPMSLSPPKLLA

SEQ ID NO: 52633 - protein, 229 aa, Homo sapiens
MSAEVETSEGVDESEKKNSGALEKENQMRMADLSELLKEGTKEAHDRAENTQFVKDFLKGNIKKELFKLATTALYFTYSALEEEMERNKDHPAFAPLYFPMELHRKEALTKDMEYFFGENWEEQVQCPKAAQKYVERIHYIGQNEPELLVAHAYTRYMGDLSGGQVLKKVAQRALKLPSTGEGTQFYLFENVDNAQQFKQLYRARMNALDLNMKTKERIVEEANKAFEY

SEQ ID NO: 52634 - protein, 503 aa, Homo sapiens
MAAKAVANTMRTSLGPNGLDKMMVDKDGDVTVTNDGATILSMMDVDHQIAKLMVELSKSQDDEIGDGTTGVVVLAGALLEEAEQLLDRGIHPIRIADGYEQAARVAIEHLDKISDSVLVDIKDTEPLIQTAKTTLGSKVVNSCHRQMAEIAVNAVLTVADMERRDVDFELIKVEGKVGGRLEDTKLIKGVIVDKDFSHPQMPKKVEDAKIAILTCPFEPPKPKTKHKLDVTSVEDYKALQKYEKEKFEEMIQQIKETGANLAICQWGFDDEANHLLLQNNLPAVRWVGGPEIELIAIATGGRIVPRFSELTAEKLGFAGLVQEISFGTTKDKMLVIEQCKNSRAVTIFIRGGNKMIIEEAKRSLHDALCVIRNLIRDNRVVYGGGAAEISCALAVSQEADKCPTLEQYAMRAFADALEVIPMALSENSGMNPIQTMTEVRARQVKEMNPALGIDCLHKGTNDMKQQHVIETLIGKKQQISLATQMVRMILKIDDIRKPGESEE

SEQ ID NO: 52635 - protein, 2002 aa, Homo sapiens
MQPPSLLLLLLLLLLCVSVVRPRGLLCGSFPEPCANGGTCLSLSLGQGTCQCAPGFLGETCQFPDPCQNAQLCQNGGSCQALLPAPLGLPSSPSPLTPSFLCTCLPGFTGERCQAQLEDPCPPSFCSKRGRCHIQASGRPQCSCMPGWTGEQCQLRDFCSANPCVNGGVCLATYPQIQCHCPPGFEGHACERDVNECFQDPGPCPKGTSCHNTLGSFQCLCPVGQEGPRCELRAGPCPPRGCSNGGTCQLMPEKDSTFHLCLCPPGFIGPDCEVNPDNCVSHQCQNGGTCQDGLDTYTCLCPETWTGWDCSEDVDECETQGPPHCRNGGTCQNSAGSFHCVCVSGWGGTSCEENLDDCIAATCAPGSTCIDRVGSFSCLCPPGRTGLLCHLEDMCLSQPCHGDAQCSTNPLTGSTLCLCQPGYSGPTCHQDLDECLMAQQGPSPCEHGGSCLNTPGSFNCLCPPGYTGSRCEADHNECLSQPCHPGSTCLDLLATFHCLCPPGLEGQLCEVETNECASAPCLNHADCHDLLNGFQCICLPGFSGTRCEEDIDECRSSPCANGGQCQDQPGAFHCKCLPGFEGPRCQTEVDECLSDPCPVGASCLDLPGAFFCLCPSGFTGQLCEVPLCAPNLCQPKQICKDQKDKANCLCPDGSPGCAPPEDNCTCHHGHCQRSSCVCDVGWTGPECEAELGGCISAPCAHGGTCYPQPSGYNCTCPTGYTGPTCSEEMTACHSGPCLNGGSCNPSPGGYYCTCPPSHTGPQCQTSTDYCVSAPCFNGGTCVNRPGTFSCLCAMGFQGPRCEGKLRPSCADSPCRNRATCQDSPQGPRCLCPTGYTGGSCQTLMDLCAQKPCPRNSHCLQTGPSFHCLCLQGWTGPLCNLPLSSCQKAALSQGIDVSSLCHNGGLCVDSGPSYFCHCPPGFQGSLCQDHVNPCESRPCQNGATCMAQPSGYLCQCAPGYDGQNCSKELDACQSQPCHNHGTCTPKPGGFHCACPPGFVGLRCEGDVDECLDQPCHPTGTAACHSLANAFYCQCLPGHTGQWCEVEIDPCHSQPCFHGGTCEATAGSPLGFICHCPKGFEGPTCSHRAPSCGFHHCHHGGLCLPSPKPGFPPRCACLSGYGGPDCLTPPAPKGCGPPSPCLYNGSCSETTGLGGPGFRCSCPHSSPGPRCQKPGAKGCEGRSGDGACDAGCSGPGGNWDGGDCSLGVPDPWKGCPSHSRCWLLFRDGQCHPQCDSEECLFDGYDCETPPACTPAYDQYCHDHFHNGHCEKGCNTAECGWDGGDCRPEDGDPEWGPSLALLVVLSPPALDQQLFALARVLSLTLRVGLWVRKDRDGRDMVYPYPGARAEEKLGGTRDPTYQERAAPQTQPLGKETDSLSAGFVVVMGVDLSRCGPDHPASRCPWDPGLLLRFLAAMAAVGALEPLLPGPLLAVHPHAGTAPPANQLPWPVLCSPVAGVILLALGALLVLQLIRRRRREHGALWLPPGFTRRPRTQSAPHRRRPPLGEDSIGLKALKPKAEVDEDGVVMCSGPEEGEEVGQAEETGPPSTCQLWSLSGGCGALPQAAMLTPPQESEMEAPDLDTRGPDGVTPLMSAVCCGEVQSGTFQGAWLGCPEPWEPLLDGGACPQAHTVGTGETPLHLAARFSRPTAARRLLEAGANPNQPDRAGRTPLHAAVAADAREVCQLLLRSRQTAVDARTEDGTTPLMLAARLAVEDLVEELIAAQADVGARDKWGKTALHWAAAVNNARAARSLLQAGADKDAQDNREQTPLFLAAREGAVEVAQLLLGLGAARELRDQAGLAPADVAHQRNHWDLLTLLEGAGPPEARHKATPGREAGPFPRARTVSVSVPPHGGGALPRCRTLSAGAGPRGGGACLQARTWSVDLAARGGGAYSHCRSLSGVGAGGGPTPRGRRFSAGMRGPRPNPAIMRGRYGVAAGRGGRVSTDDWPCDWVALGACGSASNIPIPPPCLTPSPERGSPQLDCGPPALQEMPINQGGEGKK

SEQ ID NO: 52636 - protein, 75 aa, Homo sapiens
MAAETLLSSLLGLLLLGLLLPASLTGGVGSLNLEELSEMRYGIEILPLPVMGGQPFFASLPPDPPFFPRANLRTW

SEQ ID NO: 52637 - protein, 50 aa, Homo sapiens
MFSCFCFSLQDNSFSSTTVTEPERRGERCAKVCICRPKMRPGLPAPGAQV

SEQ ID NO: 52638 - protein, 173 aa, Homo sapiens
MPRKGTQPSTARRREEGPPPPSPDGASSDAEPEPPSGRTESPATAAETASEELDNRSLEEILNSIPPPPPPAMTNEAGAPRLMITHIVNQNFKSYAGEKILGPFHKRFSCIIGPNGSGKSNVIDSMLFVFGYRAQKIRSKKLSVLIHNSDEHKDIQSCTVEVHFQKIIDKEGD

SEQ ID NO: 52639 - protein, 324 aa, Homo sapiens
MFYFFPPLQILAENLTMVTEFLLLGFSSLGEIQLALFVVFLFLYLVILSGNVTIISVIHLDKSLHTPMYFFLGILSTSETFYTFVILPKMLINLLSVARTISFNCCALQMFFFLGFAITNCLLLGVMGYDRYAAICHPLHYPTLMSWQVCGKLAAACAIGGFLASLTVVNLVFSLPFCSANKVNHYFCDISAVILLACTNTDVNEFVIFICGVLVLVVPFLFICVSYLCILRTILKIPSAEGRRKAFSTCASHLSVVIVHYGCASFIYLRPTANYVSNKDRLVTVTYTIVTPLLNPMVYSLRNKDVQLAIRKVLGKKGSLKLYN

SEQ ID NO: 52640 - protein, 152 aa, Homo sapiens
MAAAAAAGEARRVLVYGGRGALGSRCVQAFRARNWWVASVDVVENEEASASIIVKMTDSFTEQADQVTAEVGKLLGEEKVDAILCVAGGWAGGNAKSKSLFKNCDLMWKQSIWTSTISSHLATKHLKEGGLLTLAGAKAALDGTPGLPWIPR

SEQ ID NO: 52641 - protein, 326 aa, Homo sapiens
MGTLSAPPCTQRIKWKGLLLTASLLNFWNLPTTAQVTIEAEPTKVSEGKDVLLLVHNLPQNLTGYIWYKGQMRDLYHYITSYVVDGEIIIYGPAYSGRETAYSNASLLIQNVTREDAGSYTLHIIKGDDGTRGVTGRFTFTLHPKLPKPYITINNLNPRENKDVLNFTCEPKSENYTYIWWLNGQSLPVSPRVKRPIENRILILPSVTRNETGPYQCEIRDRYGGIRSDPVTLNVLYGPDLPRIYPSFTYYRSGEVLYLSCSADSNPPAQYSWTINEKFQLPGQKLFIRHITTKHSGLYVCSVRNSATGKESSKSMTVEVSDWTVP

SEQ ID NO: 52642 - protein, 652 aa, Homo sapiens
MTPILTVLICLGLSLGPRTHVQAGHLPKPTLWAEPGSVITQGSPVTLRCQGGQETQEYRLYREKKTAPWITRIPQELVKKGQFPIPSITWEHTGRYRCYYGSDTAGRSESSDPLELVVTGAYIKPTLSAQPSPVVNSGGNVTLQCDSQVAFDGFILCKEGEDEHPQCLNSQPHARGSSRAIFSVGPVSPSRRWWYRCYAYDSNSPYEWSLPSDLLELLVLGVSKKPSLSVQPGPIVAPEETLTLQCGSDAGYNRFVLYKDGERDFLQLAGAQPQAGLSQANFTLGPVSRSYGGQYRCYGAHNLSSEWSAPSDPLDILIAGQFYDRVSLSVQPGPTVASGENVTLLCQSQGWMQTFLLTKEGAADDPWRLRSTYQSQKYQAEFPMGPVTSAHAGTYRCYGSQSSKPYLLTHPSDPLELVVSGPSGGPSSPTTGPTSTSAGPEDQPLTPTGSDPQSGLGRHLGVVIGILVAVILLLLLLLLLFLILRHRRQGKHWTSTQRKADFQHPAGAVGPEPTDRGLQWRSSPAADAQEENLYAAVKHTQPEDGVEMDTRQSPHDEDPQAVTYAEVKHSRPRREMASPPSPLSGEFLDTKDRQAEEDRQMDTEAAASEAPQDVTYAQLHSLTLRREATEPPPSQEGPSPAVPSIYATLAIH

SEQ ID NO: 52643 - protein, 115 aa, Homo sapiens
MAKNKLVGTPNPSTPLPNTVPQFIAREPYELTVPALYPSSPEVWAPYPLYPAELAPALPPPAFTYPASLHAQCFSPEAKPNTPVFCPLLQQIRFVSGNVFVTYQPTADQQRELPC

SEQ ID NO: 52644 - protein, 772 aa, Homo sapiens
MAAESALQVVEKLQARLAANPDPKKLLKYLKKLSTLPITVDILAETGVGKTVNSLRKHEHVGSFARDLVAQWKKLVPVERNAEPDEQDFEKSNSRKRPRDALQKEEEMEGDYQETWKATGSRSYSPDHRQKKHRKLSELERPHKVSHGHERRDERKRCHRMSPTYSSDPESSDYGHVQSPPSCTSPHQMYVDHYRSLEEDQEPIVSHQKPGKGHSNAFQDRLGASQERHLGEPHGKGVVSQNKEHKSSHKDKRPVDAKSDEKASVVSREKSHKALSKEENRRPPSGDNAREKPPSSGVKKEKDREGSSLKKKCLPPSEAASDNHLKKPKHRDPEKAKLDKSKQGLDSFDTGKGAGDLLPKVKEKGSNNLKTPEGKVKTNLDRKSLGSLPKVEETDMEDEFEQPTMSFESYLSYDQPRKKKKKIVKTSATALGDKGLKKNDSKSTGKNLDSVQKLPKVNKTKSEKPAGADLAKLRKVPDVLPVLPDLPLPAIQANYRPLPSLELISSFQPKRKAFSSPQEEEEAGFTGRRMNSKMQVYSGSKCAYLPKMMTLHQQCIRVLKNNIDSIFEVGGVPYSVLEPVLERCTPDQLYRIEEYNHVLIEETDQLWKVHCHRDFKEERPEEYESWREMYLRLQDAREQRLRVLTKNIQFAHANKPKGRQAKMAFVNSVAKPPRDVRRRQEKFGTGGAAVPEKIKIKPAPYPMGSSHASASSISFNPSPEEPAYDGPSTSSAHLAPVVSSTVSYDPRKPTVKKIAPMMAKTIKAFKNRFSRR

SEQ ID NO: 52645 - protein, 102 aa, Homo sapiens
MIKFFLMVNKQGQTRLSKYYEHVDINKRTLLETEVIKSCLSRSNEQCSFIEYKDFKLIYRQYAALFIVVGVNDTENEMAIYEFIHNFVEVLDEYFSRVVNNV

SEQ ID NO: 52646 - protein, 197 aa, Homo sapiens
MLGIWTLLPLVLTSVARLSSKSVNAQVTDINSKGLELRKTVTTVETQNLEGLHHDGQFCHKPCPPGERKARDCTVNGDEPDCVPCQEGKEYTDKAHFSSKCRRCRLCDEGHGLEVEINCTRTQNTKCRCKPNFFCNSTVCEHCDPCTKCEHGIIKECTLTSNTKCKEEGSRSNLGWLCLLLLPIPLIVWGNSGNKFI

SEQ ID NO: 52647 - protein, 57 aa, Homo sapiens
MAVARAALGPLVTGLYDVQAFKFGDFVLKSGLSSPIYIDLRGIVSRPRLLSQELSVL

SEQ ID NO: 52648 - protein, 123 aa, Homo sapiens
MGPLQFRDVAIEFSLEEWHCLDTAQRNLYRNVMLENYSNLVFLGIVVSKPDLIAHLEQGKKPLTMKRHEMVANPSGARLLSQHFGRPRWVDPEVRRSRPSGQHGEIPSLLKYKKLARHGGPCL

SEQ ID NO: 52649 - protein, 53 aa, Homo sapiens
MGSELETAMETLINVFHAHSGKEGDKYKLSKKELKELLQTELSGFLDVKELML

SEQ ID NO: 52650 - protein, 102 aa, Homo sapiens
SGGYGGDRSGGGYGGDRGGGYGGDRGGYGGKMGGRSSCSSKRPRTWDGSCCTVVAVSLLDLTRHPSTPGSLVCAHMPHISDPVSFFPELQQFSDSPPAVVPP

SEQ ID NO: 52651 - protein, 190 aa, Homo sapiens
VREVELMRCLRLRQSSLEPVAFRLPRVRKEFFQDDVFPDTAVIWEPVLSAEAWLQGANGQPWLLSLQPPDMSPVSQAPREAPARRAPSSAQYLEEKSDQQKKEELLNAMVAKLGNREDPLPQDSFEGVDEDEWVSSEWPHFPAGSAVPRTCHGACLLPSQALLTPSHLLVFRPRTSLRPRHLHLTCAATS

SEQ ID NO: 52652 - protein, 667 aa, Homo sapiens
MSQRPRAPRSALWLLAPPLLRWAPPLLTVLHSDLFQALLDILDYYEASLSESQKYRYQDEDTPPLEHSPAHLPNQANSPPVIVNTDTLEAPGYELQVNGTEGEMEYEEITLERGNSGLGFSIAGGTDNPHIGDDPSIFITKIIPGGAAAQDGRLRVNDSILFVNEVDVREVTHSAAVEALKEAGSIVRLYVMRRKPPAEKVMEIKLIKGPKGLGFSIAGGVGNQHIPGDNSIYVTKIIEGGAAHKDGRLQIGDKILAVNSVGLEDVMHEDAVAALKNTYDVVYLKVAKPSNAYLSDSYAPPDITTSYSQHLDNEISHSSYLGTDYPTAMTPTSPRRYSPVAKDLLGEEDIPREPRRIVIHRGSTGLGFNIVGGEDGEGIFISFILAGGPADLSGELRKGDQILSVNGVDLRNASHEQAAIALKNAGQTVTIIAQYKPEEYSRFEAKIHDLREQLMNSSLGSGTASLRSNPKRGFYIRALFDYDKTKDCGFLSQALSFRFGDVLHVIDASDEEWWQARRVHSDSETDDIGFIPSKRRVERREWSRLKAKDWGSSSGSQGREDSVLSYETVTQMEVHYARPIIILGPTKDRANDDLLSEFPDKFGSCVPHTTRPKREYEIDGRDYHFVSSREKMEKDIQAHKFIEAGQYNSHLYGTSVQSVREVAEQRD

SEQ ID NO: 52653 - protein, 263 aa, Homo sapiens
MASLWLLSCFSLVGAAFGCGVPAIHPVLSGLSRIVNGEDAVPGSWPWQVSLQDKTGFHFCGGSLISEDWVVTAAHCGVRTSDVVVAGEFDQGSDEENIQVLKIAKVFKNPKFSILTVNNDITLLKLATPARFSQTVSAVCLPSADDDFPAGTLCATTGWGKTKYNANKTPDKLQQAALPLLSNAECKKSWGRRITDVMICAGASGVSSCMGDSGGPLVCQKDGAWTLVGIVSWGSRTCSTTTPAVYARVAKLIPWVQKILAAN

SEQ ID NO: 52654 - protein, 425 aa, Homo sapiens
MPYVDRQNRICGFLDIEEHENSGKFLRRYFILDTQANCLLWYMDNPQNLAMGAGAVGALQLTYISKVSIATPKQKPKTPFCFVINALSQRYFLQANDQKDMKDWVEALNQASKITVPKGGGLPMTTEVLKSLAAPPALEKKPQVAYKTEIIGGVVVHTPISQNGGDGQEGSEPGSHTILRRSQSYIPTSGCRASTGPPLIKSGYCVKQGNVRKSWKRRFFALDDFTICYFKCEQDREPLRTIFLKDVLKTHECLVKSGDLLMRDNLFEIITSSRTFYVQADSPEDMHSWIKEIGAAVQALKCHPRETSFSRSISLTRPGSSSLSSGPNSILCRGRPPLEEKKALCKAPSVASSWQPWTPVPQAGEKLLPPGDTSEDSLFTPRPGEGSAPGVLPSSRIRHRSEPQHPKEKPFMFNLDDENIRTSDV

SEQ ID NO: 52655 - protein, 88 aa, Homo sapiens
MGNIFEKLFKSLLGKKKMRILILSLDTAGKTTILYKLKLGETVPAVPTVGFCVETVEYKNNTFAVWDVGSHFKIRPLWQHFFQNTKGS

SEQ ID NO: 52656 - protein, 450 aa, Homo sapiens
MRPAAGAARRPRCCTSWLTRCPSPAASAPTWTRPLSCASPSATCACTASAPQLELIGHSIFDFIHPCDQEELQDALTPQQTLSRRKVEAPTERCFSLRMKSTLTSRGRTLNLKAATWKVLNCSGHMRAYKPPAQTSPAGSPDSEPPLQCLVLICEAIPHPGSLEPPLGRGAFLSRHSLDMKFTYCDDRIAEVAGYSPDDLIGCSAYEYIHALDSDAVSKSIHTLLSKGQAVTGQYRFLARSGGYLWTQTQATVVSGGRGPQSESIVCVHFLISQVEETGVVLSLEQTEQHSRRPIQRGAPSQKDTPNPGDSLDTPGPRILAFLHPPSLSEAALAADPRRFCSPDLRRLLGPILDGASVAATPSTPLATRHPQSPLSADLPDELPVGTENVHRLFTSGKDTEAVETDLDIAQDPSTPLLNLNEPLGFHFVTQSGVQWHKHSSPQPRPPGLK

SEQ ID NO: 52657 - protein, 746 aa, Homo sapiens
MSQSDDRDSKRDSLEEGELRDHCMEITIRNSPYRREDSMEDRGEEDDSLAIKPPQQMSRKEKVHHRKDEKRKEKCRHHSHSAEGGKHARVKEREHERRKRHREEQDKARREWERQKRREMAREHSRRERDRLEQLERKRERERKMREQQKEQREQKERERRAEERRKEREARREVSAHHRTMREDYSDKVKASHWSRSPPRPPRERFELGDGRKPVKEEKMEERDLLSDLQDISDSERKTSSAESSSAESGSGSEEEEEEEEEEEEEGSTSEESEEEEEEEEEEEEETGSNSEEASEQSAEEVSEEEMSEDEERENENHLLVVPESRFDRDSGESEEAEEEVGEGTPQSSALTEGDYVPDSPALLPIELKQELPKYLPALQGCRSVEEFQCLNRIEEGTYGVVYRAKDKKTDEIVALKRLKMEKEKEGFPITSLREINTILKAQHPNIVTVREIVVGSNMDKIYIVMNYVEHDLKSLMETMKQPFLPGEVKTLMIQLLRGVKHLHDNWILHRDLKTSNLLLSHAGILKVGDFGLAREYGSPLKAYTPVVVTQWYRAPELLLGAKEYSTAVDMWSVGCIFGELLTQKPLFPGNSEIDQINKVFKELGTPSEKIWPGYSELPVVKKMTFSEHPYNNLRKRFGALLSDQGFDLMNKFLTYFPGRRISAEDGLKHEYFRETPLPIDPSMFPTWPAKSEQQRVKRGTSPRPPEGGLGYSQLGDDDLKETGFHLTTTNQGASAAGPGFSLKF

SEQ ID NO: 52658 - protein, 42 aa, Homo sapiens
MELHILEHRVRVLSVARPGLWLYTHPLIKLLFLPRRSRAAPI

SEQ ID NO: 52659 - protein, 97 aa, Homo sapiens
MWRLPRALCVHAAKTSKLSGPWSRPAAFMSTLLINQPQYAWLKELGLREENEGVYNGSWGGRGEFASLDVPKSCHVVRWAVNSFEDWIFSISPLPRA

SEQ ID NO: 52660 - protein, 1556 aa, Homo sapiens
MYVRVSFDTKPDLLLHLMTKEWQLELPKLLISVHGGLQNFELQPKLKQVFGKGLIKAAMTTGAWIFTGGVNTGVIRHVGDALKDHASKSRGKICTIGIAPWGIVENQEDLIGRDVVRPYQTMSNPMSKLTVLNSMHSHFILADNGTTGKYGAEVKLRRQLEKHISLQKINTRIGQGVPVVALIVEGGPNVISIVLEYLRDTPPVPVVVCDGSGRASDILAFGHKYSEEGGLINESLRDQLLVTIQKTFTYTRTQAQHLFIILMECMKKKELITVFRMGSEGHQDIDLAILTALLKGANASAPDQLSLALAWNRVDIARSQIFIYGQQWPVGSLEQAMLDALVLDRVDFVKLLIENGVSMHRFLTISRLEELYNTRHGPSNTLYHLVRDVKKREYPGFGWIYFKGNLPPDYRISLIDIGLVIEYLMGGAYRCNYTRKRFRTLYHNLFGPKRDDIPLRRGRKTTKKREEEVDIDLDDPEINHFPFPFHELMVWAVLMKRQKMALFFWQHGEEAMAKALVACKLCKAMAHEASENDMVDDISQELNHNSRDFGQLAVELLDQSYKQDEQLAMKLLTYELKNWSNATCLQLAVAAKHRDFIAHTCSQMLLTDMWMGRLRMRKNSGLKVILGILLPPSILSLEFKNKDDMPYMSQAQEIHLQEKEAEEPEKPTKEKEEEDMELTAMLGRNNGESSRKKDEEEVQSKHRLIPLGRKIYEFYNAPIVKFWFYTLAYIGYLMLFNYIVLVKMERWPSTQEWIVISYIFTLGIEKMREILMSEPGKLLQKVKVWLQEYWNVTDLIAILLFSVGMILRLQDQPFRSDGRVIYCVNIIYWYIRLLDIFGVNKYLGPYVMMIGKMMIDMMYFVIIMLVVLMSFGVARQAILFPNEEPSWKLAKNIFYMPYWMIYGEVFADQIDPPCGQNETREDGKIIQLPPCKTGAWIVPAIMACYLLVANILLVNLLIAVFNNTFFEVKSISNQVWKFQRYQLIMTFHERPVLPPPLIIFSHMTMIFQHLCCRWRKHESDPDERDYGLKLFITDDELKKVHDFEEQCIEEYFREKDDRFNSSNDERIRVTSERVENMSMRLEEVNEREHSMKASLQTVDIRLAQLEDLIGRMATALERLTGLERAESNKIRSRTSSDCTDAAYIVRQSSFNSQEGNTFKLQESIDPAGEETMSPTSPTLMPRMRSHSFYSVNMKDKGGIEKLESIFKERSLSLHRATSSHSVAKEPKAPAAPANTLAIVPDSRRPSSCIDIYVSAMDELHCDIDPLDNSVNILGLGEPSFSTPVPSTAPSSSAYATLAPTDRPPSRSIDFEDITSMDTRSFSSDYTHLPECQNPWDSEPPMYHTIERSKSSRYLATTPFLLEEAPIVKSHSFMFSPSRSYYANFGVPVKTAEYTSITDCIDTRCVNAPQAIADRAAFPGGLGDKVEDLTCCHPEREAELSHPSSDSEENEAKGRRATIAISSQEGDNSERTLSNNITVPKIERANSYSAEEPSAPYAHTRKSFSISDKLDRQRNTASLRNPFQRSKSSKPEGRGDSLSMRRLSRTSAFQSFESKHN

SEQ ID NO: 52661 - protein, 99 aa, Homo sapiens
MSAAMRERFDRFLHEKNCMTDLLAKLEAKTGVNRSFIALGVIGLVALYLVFGYGASLLCNLIGFGYPAYISVASCCGAWPRALLMGLNCSTSASSVLSS

SEQ ID NO: 52662 - protein, 723 aa, Homo sapiens
MAGLLGAFSPTPAPRACTHPQHHGCARAADSGRPQEPPGLCLRRSANVRLPVGFAQAVRCPAPVSFENGIYTPRLGSYPVGGNVSFECEDGFILRGSPVRQCRPNGMWDGETAVCDNGAGHCPNPGISLGAVRTGFRFGHGDKVRYRCSSNLVLTGSSERECQGNGVWSGTEPICRQPYSYDFPEDVAPALGTSFSHMLGATNPTQKTKESLGRKIQIQRSGHLNLYLLLDCSQSVSENDFLIFKESASLMVDRIFSFEINVSVAIITFASEPKVLMSVLNDNSRDMTEVISSLENANYKDHENGTGTNTYAALNSVYLMMNNQMRLLGMETMAWQEIRHAIILLTDGKSNMGGSPKTAVDHIREILNINQKRNDYLDIYAIGVGKLDVDWRELNELGSKKDGERHAFILQDTKALHQVFEHMLDVSKLTDTICGVGNMSANASDQERTPWHVTIKPKSQETCRGALISDQWVLTAAHCFRDGNDHSLWRVNVGDPKSQWGKEFLIEKAVISPGFDVFAKKNQGILEFYGDDIALLKLAQKVKMSTHARPICLPCTMEANLALRRPQGSTCRDHENELLNKQSVPAHFVALNGSKLNINLKMGVEWTSCAEVVSQEKTMFPNLTDVREVVTDQFLCSGTQEDESPCKGESGGAVFLERRFRFFQVGLVSWGLYNPCLGSADKNSRKRAPRSKVPPPRDFHINLFRMQPWLRQHLGDVLNFLPL

SEQ ID NO: 52663 - protein, 547 aa, Homo sapiens
MEKARPLWANSLQFVFACISYAVGLGNVWRFPYLCQMYGGGSFLVPYIIMLIVEGMPLLYLELAVGQRMRQGSIGAWRTISPYLSGVGVASVVVSFFLSMYYNVINAWAFWYLFHSFQDPLPWSVCPLNGNHTGYDEECEKASSTQYFWYRKTLNISPSLQENGGVQWEPALCLLLAWLVVYLCILRGTESTGKVVYFTASLPYCVLIIYLIRGLTLHGATNGLMYMFTPKIEQLANPKAWINAATQIFFSLGLGFGSLIAFASYNEPSNNCQKHAIIVSLINSFTSIFASIVTFSIYGFKATFNYENCLKKVSLLLTNTFDLEDGFLTASNLEQVKGYLASAYPSKYSEMFPQIKNCSLESELDTAVQGTGLAFIVYTEAIKNMEVSQLWSVLYFFMLLMLGIGSMLGNTAAILTPLTDSKIISSHLPKEAISGLVCLVNCAIGMVFTMEAGNYWFDIFNDYAATLSLLLIVLVETIAVCYVYGLRRFESDLKAMTGRAVSWYWKVMWAGVSPLLIVSLFVFYLSDYILTGTLKYQAWDASQDDKL

SEQ ID NO: 52664 - protein, 86 aa, Homo sapiens
MASLLQSDRVLYLVQGEKKVRAPLSQLYFCRYCSELRSLECVSHEVDSHYCPSCLENMPSAEAKLKKNRLGECILRRRTTEMCQLF

SEQ ID NO: 52665 - protein, 159 aa, Homo sapiens
MAEFSQKRGKRRSDEGLGSMVDFLLANARLVLGVGGAAVLGIATLAVKRFIDRATSPRDEDDTKADSWKELSLLKATPHLQPRPPPAALSQPVLPLAPSSSAPGPAETDPEVTPQLSSPAPLCLTLQERLLAFERDRVTIPAAQVALAKQLAGDIALEL

SEQ ID NO: 52666 - protein, 544 aa, Homo sapiens
MRDNTSPISVILVSSGSRGNKLLFRYPFQRSQEHPASQTSKPRSRYAASNTGDHADEQDGDSRFSDVILATILATKSEMCGQKFELKIDNVRFVGHPTLLQHALGQANADPSVINCLHNLSRRIATVLQHEERRCQYLTREAKLILALQDEVSAMADGNEGPQSPFHHILPKCKLARDLKEAYDSLCTSGVVRLHINSWLEVSFCLPHKIHYAASSLIPPEAIERSLKAIRPYHALLLLSDEKSLLGELPIDCSPALVRVIKTTSAVKNLQQLAQDADLALLQVFQLAAHLVYWGKAIIIYPLCENNVYMLSPNASVCLYSPLAEQFSHQFPSHDLPSVLAKFSLPVSLSEFRNPLAPAVQETQLIQMVVWMLQRRLLIQLHTYVCLMASPSEEEPRPREDDVPFTARVGGRSLSTPNALSFGSPTSSDDMTLTSPSMDNSSAELLPSGDSPLNQRMTENLLASLSEHERAAILSVPAAQNPEDLRMFARLLHYFRGRHHLEEIMYNENTRRSQLLMLFDKFRSVLVVTTHEDPVIAVFQALLP

SEQ ID NO: 52667 - protein, 62 aa, Homo sapiens
MHKEEHEVAVLGPPPSTILPRSTVINIHSETSVPDHVVWSLFNTLFLNWCCLGFIAFAYSVK

SEQ ID NO: 52668 - protein, 154 aa, Homo sapiens
MAHRGGERDFQTSARRMGTSLLFQLSVHERELDLVFLDHSYAKPWSAHPDASSARPTRMLFVTPRRQHESTIESDVPIDVETVTSTPMPLYDNQKARSVMNECERHVIFARTDADAPPPPEDWEEHVNRLVMSQCCAVLLWTSVQGECGRLWQV

SEQ ID NO: 52669 - protein, 82 aa, Homo sapiens
MMNADMDAVDAENQVELEEKTRLINQVLELQHTLEDLSARVDAVKEENLKLKSENQVLGQYIENLMSASSVFQTTDTKSKRK

SEQ ID NO: 52670 - protein, 427 aa, Homo sapiens
MLLMVVSMACVGFFLVQRAGPHVGGQDKPFLSAWPSAVVPRGGHVTLRCHYRHRFNNFMLYKEDRIHVPIFHGRLFQESFNMSPVTTAHAGNYTCRGSHPHSPTGWSAPSNPVVIMVTGNHRKPSLLAHPGPLVKSGERVILQCWSDIMFEHFFLHKEGISKDPSRLVGQIHDGVSKANFSIGPMMLALAGTYRCYGSVTHTPYQLSAPSDPLDIVVTGPYEKPSLSAQPGPKVQAGESVTLSCSSRSSYDMYHLSRERGAHERRLPAVRKVNRTFQADFPLGPATHGGTYRCFGSFRHSPYEWSDPSDPLLVSVTGNPRHLHILIGTSVVIILFILLLFFLLHLWCSNKKNAAVMDQEPAGNRTANSEDSDEQDPEEVTYAQLDHCVFTQRKITRPSQRPKTPPTDTILYTELPNAKPRSKVVSCP

SEQ ID NO: 52671 - protein, 96 aa, Homo sapiens
MEGKWLLCMLLVLGTAIVEAHDGHDDDVIDIEDDLDDVIEEVEDSKPDTTAPPSSPKVTYKAPVPTGEVYFADSFDRGTLSGKVGGRGNEGVKASR

SEQ ID NO: 52672 - protein, 422 aa, Homo sapiens
MESSPESLQPLEHGVAAGPASGTGSSQEGLQETRLAAGDGPGVWAAETSGGNGLGAAAARRSLPDSASPAGSPEVPGPCSSSAGLDLKDSGLESPAAAEAPLRGQYKVTASPETAVAGVGHELGTAGDAGARPDLAGTCQAELTAAGSEEPSSAGGLSSSCSDPSPPGESPSLDSLESFSNLHSFPSSCEFNSEEGAENRVPEEEEGAAVLPGAVPLCKEEEGEETAQVLAASKERFPGQSVYHIKWIQWKEENTPIITQNENGPCPLLAILNVLLLAWKVKLPPMMEIITAEQLMEYLGDYMLDAKPKEISEIQRLNYEQNMSDAMAILHKLQTGLDVNVRFTGVRVFEYTPECIVFDLLDIPLYHGWLVDPQIDDIVKAVGNCSYNQLVEKIISCKQSDNSELVSEGSTVFVGNGPGVSY

SEQ ID NO: 52673 - protein, 761 aa, Homo sapiens
MKELQAVRETLLRQHEAELLRVIKIKDNENQRLQALLSALRDGGPEKVKTVLLSEAKEEAKKGFEVEKVKMQQEISELKGAKRQVEEALTLVIQADKIKAAEIRSVYHLHQEEITRIKKECEREIRRLMEEIKFKDRAVFVLERELGVQAGHAQRLQLQKEALDEQLSQVREADRHPGSPRRELPHAAGAGDASDHSGSPEQQLDEKDARRFQLKIAELSAIIRKLEDRNALLSEERNELLKRVREAESQYKPLLDKNKRLSRKNEDLSHALRRMENKLKFVTQENIEMRQRAGIIRRPSSLNDLDQSQDEREVDFLKLQIVEQQNLIDELSKTLETAGYVKSVLERDKLLRFRKQRKKMAKLPKPVVVETFFGYDEEASLESDGSSVSYQTDRTDQTPCTPDDDLEEGMAKEETELRFRQLTMEYQALQRAYALLQEQVGGTLDAEREVKTREQLQAEVQRAQARIEDLEKALAEQGQDMKWIEEKQALYRRNQELVEKIKQMETEEARLRHEVQDARDQNELLEFRILELEERERKSPAISFHHTPFVDGKSPLQVYCEAEGVTDIVVAELMKKLDILGDNANLTNEEQVVVIQARTVLTLAEKWLQQIEETEAALQRKMVDLESEKELFSKQKGYLDEELDYRKQALDQANKHILELEAMLYDALQQEAGAKVAELLSEEEREKLKVAVEQWKRQVMSELRERDAQILRERMELLQLAQQRIKELEERIEAQKRQIKELEEKFLFLFLFFSLAFILWS

SEQ ID NO: 52674 - protein, 182 aa, Homo sapiens
MLFRNRFLLLLALAALLAFVSLSLQFFHLIPVSTPKNGMSSKSRKRIMPDPVTEPPVTDPVYEALLYCNIPSVAERSMEGHAPHHFKLVSVHVFIRHGDRYPLYVIPKTKRPEIDCTLVANRKPYHPKLEAFISHMSKGSGASFESPLNSLPLYPNHPLCEMGELTQTVRRWLSASQEERPH

SEQ ID NO: 52675 - protein, 129 aa, Homo sapiens
MALSSAWRSVLPLWLLWSAACSRAASGDDNAFPFDIEGSSAVGRQDPPETSEPRVALGRLPPAAEKCNAGFFHTLSGECVPCDCNGNSNECLDGSGYCVTTDGEDPGFSASALSFILSSQGAREARAPT

SEQ ID NO: 52676 - protein, 30 aa, Homo sapiens
MATEAGRWQPPDWADLQADLQQVRHKLTQR

SEQ ID NO: 52677 - protein, 50 aa, Homo sapiens
  MOD_RES (1)..(1): Any amino acid
XPFLEVNDPGEPSGLETLKDTPPPRLIKSHLPLALLPQTLLDQKVKSAIV

SEQ ID NO: 52678 - protein, 151 aa, Homo sapiens
MLLILLSVALLALSSAQNLNEDVSQEESPSLIAGNPQGPSPQGGNKPQGPPPPPGKPQGPPPQGGNKPQGPPPPGKPQGPPPQGDKSRSPRSPPGKPQGPPPQGGNQPQGPPPPPGKPQGPPPQGGNRPQGPPPPGKPQGPPPQGDKSRSP

SEQ ID NO: 52679 - protein, 57 aa, Homo sapiens
MLGFLSARQTGLEDPLRLRRAESTRRVLGLELNKDRDVERIHGGGINTLDIEPVEGR

SEQ ID NO: 52680 - protein, 645 aa, Homo sapiens
MNKYFFYILENCGFDSSKDPREEGHLFQKLVFQQAVLGSLFFAGRGDIQPQLDSALQDVNDKYLLLEETEKQAVRKALIEERGRFCTFISMLRPVIEEEISMLGEITHLQTISEDLKSLTMDPHKLPSSSEQVILDLKGSDYSWSYQTPPSSPSTTMSRKSSVCSSLNSVNSSDSRSSGSHSHSPSSHYRYRSSNLAQQAPVRLSSVSSHDSGFISQDAFQSKSPSPMPPEAPNQLSNGFSHYSLSSESHVGPTGAGLFPHCLPASRLLPRVTSVHLPDYAHYYTIGPGMFPSSQIPSWKDWAKPGPYDQPLVNTLQRRKEKREPDPNGGGPTTASGPPAAAEEAQRPRSMTVSAATRPGEEMEACEELALALSRGLQLDTQRSSRDSLQCSSGYSTQTTTPCCSEDTIPSQVSDYDYFSVSGDQEADQQEFDKSSTIPRNSDISQSYRRMFQAKRPASTAGLPTTLGPAMVTPGVATIRRTPSTKPSVRRGTIGAGPIPIKTPVIPVKTPTVPDLPGVLPAPPDGPEERGEHSPESPSVGEGPQGVTSMPSSMWSGQASVNPPLPGPKPSIPEEHRQAIPESEAEDQEREPPSATVSPGQIPESDPADLSPRDTPQGEDMLNAIRRGVKLKKTTTNDRSAPRFS

SEQ ID NO: 52681 - protein, 300 aa, Homo sapiens
MDNFAEGDFTVADYALLEDCPHVDDCVFAAEFMSNDYVRVTQLYCDGVGVQYKDYIQSERNLEFDICSIWCSKPISVLQDYCDAIKINIFWPLLFQHQNSSVISRLHPCVDANNSRASEINLKKLQHLELMEDIVDLAKKVANDSFLIGGLLRIGCKIENKILAMEEALNWIKYAGDVTILTKLGSIDNCWPMLSIFFTEYKYHITKIVMEDCNLLEELKTQSCMDCIEEGELMKMKGNEEFSKERFDIAIIYYTRAIEYRPENYLLYGNRALCFLRTGQFRTHSHGRKFGKYKSLKRRK

SEQ ID NO: 52682 - protein, 58 aa, Homo sapiens
  MOD_RES (1)..(1): Any amino acid
XHGLIHIRQIPRLNNLICDESDVKDLAFKLKRKLFTIEGFRPTGSPHSLPRKAEAKKC

SEQ ID NO: 52683 - protein, 86 aa, Homo sapiens
  MOD_RES (1)..(1): Any amino acid
XKLNLVQHVRSVKHQQTEGLRKLQLHQQGLAPEEDNLSEIFFVKDCPPNELASSCQIFWSACNFLCTEPNRLISSRRNCLIGSQDL

SEQ ID NO: 52684 - protein, 109 aa, Homo sapiens
  MOD_RES (1)..(1): Any amino acid
XIDECAQGAGILCTFRCLNVPGSYQCACPEQGYTMTANGRSCKDVDECALGTHNCSEAETCHNIQGSFRCLRFECPPNYVQVSKTWCVPTQAPSGSLHGGPRPWRVPCG

SEQ ID NO: 52685 - protein, 67 aa, Homo sapiens
MSLPLNPKPFLNGLTGKPVMVKLKWGMEYKGYLVSVDGYMNMQIFIYILGILKQSKILLFQLSEDLK

SEQ ID NO: 52686 - protein, 196 aa, Homo sapiens
  MOD_RES (1)..(1): Any amino acid
XKDGGKAAQANVRIGDVVLSIDGINAQGMTHLEAQNKIKGCTGSLNMTLQRASAAPKPEPVPVQKPTVTSVCSETSQELAEGQRRGSQGDSKQQNGPPRKHIVERYTEFYHVPTHSDASKKRLIEDTEDWRPRTGTTQSRSFRILAQITGTEHLKESEADNTKKAKEKIPLHVFSPKYTKLRDWHHEVSARALNVQ

SEQ ID NO: 52687 - protein, 66 aa, Homo sapiens
  MOD_RES (1)..(1): Any amino acid
XNPAKVQNHCQEPYYQAAAAGALTCATPGTWKDRQDGEEVLQCMPGCGSYADPITDQPSVRFSPQL

SEQ ID NO: 52688 - protein, 553 aa, Homo sapiens
  MOD_RES (1)..(1): Any amino acid
XFECYPPGMKVQVRYDEWIKADKIVRPADKNVPKIKHRKKIKNKLDKEKDKDEKYSPKNCKLRRLSKPPFQTNPSPEMVSKLDLTDAKNSDTAHIKSIEITSILNGLQASESSAEDSEQEDERGAQDMDNNGKEESKIDHLTNNRNDLISKEEQNSSSLLEENKVHADLVISKPVSKSPERLRKDIEVLSEDTDYEEDEVTKKRKDVKKDTTDKSSKPQIKRGKRRYCNTEECLKTGSPGKKEEKAKNKESLCMENSSNSSSDEDEEETKAKMTPTKKYNGLEEKRKSLRTTGFYSGFSEVAEKRIKLLNNSDERLQNSRAKDRKDVWSSIQGQWPKKTLKELFSDSDTEAAASPPHPAPEEGVAEESLQTVAEEESCSPSVELEKPPPVNVDSKPIEEKTVEVNDRKAEFPSSGSNSVLNTPPTTPESPSSVTVTEGSRQQSSVTVSEPLAPNQEEVRSIKSETDSTIEVDSVAGELQDLQSEGNSSPAGFDASVSSSSSNQPEPEHPEKACTGQKRVKDAQGGGSSSKKQKRSHKATVVNNKKKGKGSKCE

SEQ ID NO: 52689 - protein, 225 aa, Homo sapiens
  MOD_RES (1)..(1): Any amino acid
XKAFRGVDNKIRLFQPNLNMDRMYRSAVRATLPVFDKEELLECIQQLVKLDQEWVPYSTSASLYIRPTFIGTEPSLGVKKPTKALLFVLLSPVGPYFSSGTFNPVSLWANPKYVRAWKGGTGDCKMGGNYGSSLFAQCEAVDNGCQQVLWLYGEDHQITEVGTMNLFLYWINEDGEEELATPPLDGIILPGVTRRCILDLAHQWVGAFDMNNFCKPEIKNNQNKP

SEQ ID NO: 52690 - protein, 906 aa, Homo sapiens
MVVTTSARGGGGDRTPSRRRGCGLAPAGAAALLAGASCLCYGRSLQGEFVHDDVWAIVNNPDVRPGAPLRWGIFTNDFWGKGMAENTSHKSYRPLCVLTFKLNIFLTGMNPFYFHAVNIILHCLVTLVLMYTCDKTVFKNRGLAFVTALLFAVHPIHTEAVAGIVGRADVLACLLFLLAFLSYNRSLDQGCVGGSFPSTVSPFFLLLSLFLGTCAMLVKETGITVFGVCLVYDLFSLSNKQDKSSNGALCPRSPQQPGSPQPSSLPGHPHRENGKQQRFPHKGAWGGCHSPLPPEPKSSGFPVSPRAVWSMMRYLRASSNRNFLLTMRPFLKRAILVLSYVLVILYFRLWIMGGSMPLFSEQDNPASFSPYILTRFLTYSYLLAFNVWLLLAPVTLCYDWQVGSIPLVETIWDMRNLATIFLAVVMALLSLHCLAAFKRLEHKEVLVGLLFLVFPFIPASNLFFRVGFVVAERVLYMPSMGYCILFVHGLSKLCTWLNRCGATTLIVSTVLLLLLFSWKTVKQNEIWLSRESLFRLYPRHASALNNLGTLTRDTAEAKMYYQRALQLHPQHNRALFNLGNLLKSQEKKEEAITLLKDSIKYGPEFADAYSSLASLLAEQERFKEAEEIYQTGIKNCPDSSDLHNNYGVFLVDTGLPEKAVAHYQQAIKLSPSHHVAMVNLGRLYRSLGENSMAEEWYKRALQVAHKAEILSPLGALYYNTGRYEEALQIYQEAAALQPSQRELRLALAQVLAVMGQTKEAEKMTNHIVSEETGCLECYRLLSAIYSKQENHDKALDAIDKALQLKPKDPKVISELFFTKGNQLREQNLLDKAFESYRVAVQLNPDQAQAWMNMGGIQHIKGKYVSARAYYERALQLVPDSKLLKENLAKLDRLEKRLQEVREKDQT

SEQ ID NO: 52691 - protein, 303 aa, Homo sapiens
MGAFLDKPKTEKHNAHGAGNGLRYGLSSMQGWRVEMEDAHTAVVGIPHGLEDWSFFAVYDGHAGSRVANYCSTHLLEHITTNEDFRAAGKSGSALELSVENVKNGIRTGFLKIDEYMRNFSDLRNGMDRSGSTAVGVMISPKHIYFINCGDSRAVLYRNGQVCFSTQDHKPCNPREKERIQNAGGSVMIQRVNGSLAVSRALGDYDYKCVDGKGPTEQLVSPEPEVSDEAVKKDSELDKHLESRVEEIMEKSGEEGMPDLAHVMRILSAENIPNLPPGGGLAGKRNVIEAVYSRLNPHRESDG

SEQ ID NO: 52692 - protein, 35 aa, Homo sapiens
MSIKGSKVLCPKKKAEHTDNPRPQKKIPIPPLPSK

SEQ ID NO: 52693 - protein, 480 aa, Homo sapiens
MEDLRLKHRTLQKDCDLYKHRMATVLAQLEEIEKERDQAIQSRDRIQLQYSQSLIEKDQYRKQVRGLEAERDELLTTLTSLEGTKALLEVQLQRAQGGTCLKACASSHSLCSNLSSTWSLSEFPSPLGGPEATGEAAVMGGPEPHNSEEATDSEKEINRLSILPFPPSAGSILRRQREEDPAPPKRSFSSMSDITGSVTLKPWSPGLSSSSSSDSVWPLGKPEGLLARGCGLDFLNRSLAIRVSGRSPPGGPEPQDKGPDGLSFYGDRWSGAVVRRVLSGPGSARMEPREQRVEAAGLEGACLEAEAQQRTLLWNQGSTLPSLMDSKACQSFHEALEAWAKGPGAEPFYIRANLTLPERADPHALCVKAQEILRLVDSAYKRRQEWFCTRVDPLTLRDLDRGTVPNYQRAQQLLEVQEKCLPSSRHRGPRSNLKKRALDQLRLVRPKPVGAPAGDSPDQLLLEPCAEPERSLRPYSLVRP

SEQ ID NO: 52694 - protein, 278 aa, Homo sapiens
  MOD_RES (1)..(1): Any amino acid
XELEALLGFTLRVGVPNTRPVKKTMEIPKDSLQKYLKDLLGIQTTGPLELLQFDHGQSNPTYYIRLANRDLVLRKKPPGTLLPSAHAIEREFRIMKALANAGVPVPNVLDLCEDSSVIGTPFYVMEYCPGLIYKDPSLPGLEPSHRRAIYTAMNTVLCKIHSVDLQAVGLEDYGKQGQASSTYAEQTGKLTEFVSNLAWDFAVKEGFRVFKEMPFTNPLTRSYHTWARPQSQWCPTGSRSYSSVPEASPAHTSRGGLVISPESLSPPVRELYHRLKHF

SEQ ID NO: 52695 - protein, 81 aa, Homo sapiens
MMCQSEARQGPELRAAKWLHFPQLALRRRLGQLSCMSRPALKLRSWPLTVLYYLLPFGALRPLSRVGWRPVSRVALYKSVP

SEQ ID NO: 52696 - protein, 1071 aa, Homo sapiens
MISAQTLTGRVLVVLVFALSIGALVIYFIDSSNPIESCQNFYKDFTLQIDMAFNVFFLLYFGLRFIAANDKLWFWLEVNSVVDFFTVPPVFVSVYLNRSWLGLRFLRALRLIQFSEILQFLNILKTSNSIKLVNLLSIFISTWLTAAGFIHLVENSGDPWENFQNNQALTYWECVYLLMVTMSTVGYGDVYAKTTLGRLFMVFFILGGLAMFASYVPEIIELIGNRKKYGGSYSAVSGRKHIVVCGHITLESVSNFLKDFLHKDRDDVNVEIVFLHNISPNLELEALFKRHFTQVEFYQGSVLNPHDLARVKIESADACLILANKYCADPDAEDASNIMRVISIKNYHPKIRIITQMLQYHNKAHLLNIPSWNWKEGDDAICLAELKLGFIAQSCLAQGLSTMLANLFSMRSFIKIEEDTWQKYYLEGVSNEMYTEYLSSAFVGLSFPTVCELCFVKLKLLMIAIEYKSANRESRILINPGNHLKIQEGTLGFFIASDAKEVKRAFFYCKACHDDITDPKRIKKCGCKRRWEEHCSLWRLESKGNVRRLNYCRGQQTFSVKVKVAARSRYSKDPFEFKKETPNSRLVTEPVEDEQPSTLSPKKKQRNGGMRNSPNTSPKLMRHDPLLIPGNDQIDNMDSNVKKYDSTGMFHWCAPKEIEKVILTRSEAAMTVLSGHVVVCIFGDVSSALIGLRNLVMPLRASNFHYHELKHIVFVGSIEYLKREWETLHNFPKVSILPGTPLSRADLRAVNINLCDMCVILSANQNNIDDTSLQDKECILASLNIKSMQFDDSIGVLQANSQGFTPPGMDRSSPDNSPVHGMLRQPSITTGVNIPIITELVNDTNVQFLDQDDDDDPDTELYLTQPFACGTAFAVSVLDSLMSATYFNDNILTLIRTLVTGGATPELEALIAEENALRGGYSTPQTLANRDRCRVAQLALLDGPFADLGDGGCYGDLFCKALKTYNMLCFGIYRLRDAHLSTPSQCTKRYVITNPPYEFELVPTDLIFCLMQFDHNAGQSRASLSHSSHSSQSSSKKSSSVHSIPSTANRQNRPKSRESRDKQKYVQEERL

SEQ ID NO: 52697 - protein, 215 aa, Homo sapiens
MSVSVLSPSRLLGDVSGILQAASLLILLLLLIKAVQLYLHRQWLLKALQQFPCPPSHWLFGHIQELQQDQELQRIQKWVETFPSACPHWLWGGKVRVQLYDPDYMKVILGRSDPKSHGSYRFLAPWIGYGLLLLNGQTWFQHRRMLTPAFHYDILKPYVGLMADSVRVMLDKWEELLGQDSPLEVFQHVSLMTLDTIMKCAFRHWQRAQHSRHLP

SEQ ID NO: 52698 - protein, 435 aa, Homo sapiens
MRPEGAGMELGGGEERLPEESRREHWQLLGNLKTTVEGLVSTNSPNVWSKYGGLERLCRDMQSILYHGLIRDQACRRQTDYWQFVKDIRWLSPHSALHVEKFISVHENDQSSADGASERAVAELWLQHSLQYHCLSAQLRPLLGDRQYIRKFYTDAAFLLSDAHVTAMLQCLEAVEQNNPRLLAQIDASMFARKHESPLLVTKSQSLTALPSSTYTPPNSYAQHSYFGSFSSLHQSVPNNGSERRSTSFPLSGPPRKPQESRGHVSPAEDQTIQAPPVSVSALARDSPLTPNEMSSSTLTSPIEASWVSSQNDSPGDASEGPEYLAIGNLDPRGRTASCQSHSSNAESSSSNLFSSSSSQKPDSAASSLGDQEGGGESQLSSVLRRSSFSEGQTLTVTSGAKKSHIRSHSDTSIASRGAPGNEEHRLLVSKMTLN

SEQ ID NO: 52699 - protein, 39 aa, Homo sapiens
MMQHASPAPALTMMATQNVPPPPYQDSPQMTATAQPPSK

SEQ ID NO: 52700 - protein, 75 aa, Homo sapiens
MATPSAAFEALMNGVTSWDVPEDAVPCELLLIGEASFPVMVNDMGQVLIAASSYGRGRLVVVSHEDYLVEAQLTP

SEQ ID NO: 52701 - protein, 101 aa, Homo sapiens
MMSYLKQPPYGMNGLGLAGPAMDLLHPSVGYPVRLSFAKAEIWACQGPARVLYRGSTWPPMTRGAPACPRSHSAEAAAGAHHLHAFTAGRARGALRQDSLP

SEQ ID NO: 52702 - protein, 775 aa, Homo sapiens
MWFFARDPVRDFPFELIPEPPEGGLPGPWALHRGRKKATGSPVSIFVYDVKPGAEEQTQVAKAAFKRFKTLRHPNILAYIDGLETEKCLHVVTEAVTPLGIYLKARVEAGGLKELEISWGLHQIVKALSFLVNDCSLIHNNVCMAAVFVDRAGEWKLGGLDYMYSAQGNGGGPPRKGIPELEQYDPPELADSSGRVVREKWSADMWRLGCLIWEVFNGPLPRAAALRNPGKIPKTLVPHYCELVGANPKVRPNPARFLQNCRAPGGFMSNRFVETNLFLEEIQIKEPAEKQKFFQELSKSLDAFPEDFCRHKVLPQLLTAFEFGNAGAVVLTPLFKVGKFLSAEEYQQKIIPVVVKMFSSTDRAMRIRLLQQMEQFIQYLDEPTVNTQIFPHVVHGFLDTNPAIREQTVKSMLLLAPKLNEANLNVELMKHFARLQAKDEQGPIRCNTTVCLGKIGSYLSASTRHRVLTSAFSRATRDPFAPSRVAGVLGFAATHNLYSMNDCAQKILPVLCGLTVDPEKSVRDQAFKAIRSFLSKLESVSEDPTQLEEVEKDVHAASSPGMGGAAASWAGWAVTGVSSLTSKLIRSHPTTAPTETNIPQRPTPEGVPAPAPTPVPATPTTSGHWETQEEDKDTAEDSSTADRWDDEDWGSLEQEAESVLAQQDDWSTGGQVSRASQVSNSDHKSSKSPESDWSSWEAEGSWEQGWQEPSSQEPPPDGTRLASEYNWGGPESSDKGDPFATLSARPSTQPRPDSWGEDNWEGLETDSRKCFPWVG

SEQ ID NO: 52703 - protein, 125 aa, Homo sapiens
MTTESGSDSESKPDQEAEPQEAAGAQGRAGAPVPEPPKEEQQQALEQFAAAAAHSTPVRREVTDKEQEFAARAAKQLEYQQLEDDKLSQKSSSSKLSRSPLKIVKKPKSMQCKVILLDGSEYTCD

SEQ ID NO: 52704 - protein, 188 aa, Homo sapiens
MESQPAQECLMQMFLPIEPACFVEWLGTSPSQLGVVMVDEAHERTLHTDILFGLIKDVARFRPELKVLVASATMDTARFSTFFDDAPVFRIPGRRFPVDIFYTKAPEADYLEACVVSVLQIHVTQPPGDILVFLTGQEEIEAACEMLQDRCRRLGSKIRELLVLPIYANLPSDMQARIFQPTPPGARK

SEQ ID NO: 52705 - protein, 1452 aa, Homo sapiens
MVPIFSGRQKHVSGITDTEEERIKEAAAYIAQRNLLASEEGITTSKQSTASKQTTASKQSTASKQSTASKQSTASRQSTASRQSVVSKQATSALQQEETSEKKSRKVVIREKAERLSLRKTLEETETYHAKLNEDHLLHAPEFIIKPRSHTVWEKENVKLHCSIAGWPEPRVTWYKNQVPINVHANPGKYIIESRYGMHTLEINGCDFEDTAQYRASAMNVKGELSAYASVVVKRYKGEFDETRFHAGASTMPLSFGVTPYGYASRFEIHFDDKFDVSFGREGETMSLGCRVVITPEIKHFQPEIQWYRNGVPLSPSKWVQTLWSGERATLTFSHLNKEDEGLYTIRVRMGEYYEQYSAYVFVRDADAEIEGAPAAPLDVKCLEANKDYIIISWKQPAVDGGSPILGYFIDKCEVGTDSWSQCNDTPVKFARFPVTGLIEGRSYIFRVRAVNKMGIGFPSRVSEPVAALDPAEKARLKSPLSTLDWTIIVTEEEPSEGIVPGPPTDLSVTEATRSYVVLSWKPPGQRGHEGIMYFVEKCEAGTENWQRVNTELPVKSPRFALFDLAEGKSYCFRVRCSNSAGVGEPSEATEVTVVGDKLDIPKAPGKIIPSRNTDTSVVVSWEESKDAKELVGYYIEASVAGSGKWEPCNNNPVKAHGFTCHGLVTGQSYIFRVRAVNAAGLSEYSQDSEAIEVKAAIAPPSPPCDITCLESFRDSMVLGWKQPDKIGGAEITGYYVNYREVIDGVPGKWREANVKAVSEEAYKISNLKENMVYQFQVAAMNMAGLGAPSAVSECFKCEEWTIAVPGPPHSLKCSEVRKDSLVLQWKPPVHSGRTPVTGYFVDLKEAKAKEDQWRGLNEAAIKNVYLKVRGLKEGVSYVFRVRAINQAGVGKPSDLAGPVVAETRPGTKEVVVNVDDDGVISLNFECDKMTPKSEFSWSKDYVSTEDSPRLEVESKGNKTKMTFKDLGMDDLGIYSCDVTDTDGIASSYLIDEEELKRLLALSHEHKFPTVPVKSELAVEILEKGQVRFWMQAEKLSGNAKVNYIFNEKEIFEGPKYKMHIDRNTGIIEMFMEKLQDEDEGTYTFQLQDGKATNHSTVVLVGDVFKKLQKEAEFQRQEWIRKQGPHFVEYLSWEVTGECNVLLKCKVANIKKETHIVWYKDEREISVDEKHDFKDGICTLLITEFSKKDAGIYEVILKDDRGKDKSRLKLVDEAFKELMMEVCKKIALSATDLKIQSTAEGIQLYSFVTYYVEDLKVNWSHNGSAIRYSDRVKTGVTGEQIWLQINEPTPNDKGKYVMELFDGKTGHQKTVDLSGQAYDEAYAEFQRLKQAAIAEKNRARVLGGLPDVVTIQEGKALNLTCNVWGDPPPEVSWLKNEKALASDDHCNLKFEAGRTAYFTINGVSTADSGKYGLVVKNKYGSETSDFTVSVFIPEEEARMAALESLKGGKKAK

SEQ ID NO: 52706 - protein, 153 aa, Homo sapiens
MVCKKNLDSTTVAVHGEEIYCKSCYGKKYGPKGYGYGQGAGTLSTDKGESLGIKHEEAPGHRPTTNPNASKFAQKIGGSERCPRCSQAVYAAEKVIGAGKSWHKACFRCAKCGKGLESTTLADKDGEIYCKGCYAKNFGPKGFGFGQGAGALV

SEQ ID NO: 52707 - protein, 123 aa, Homo sapiens
  MOD_RES (1)..(1): Any amino acid
XCRQEPQPQGPPPAAGAVASYDYLVIGGGSGGLASARRAAELGARAAVVESHKLGGTCVNVGCVPKKVMWNTAVHSEFMHDHADYGFPSCEGKFNWRVIKEKRDAYVSRLNAIYQNNLTKHCR

SEQ ID NO: 52708 - protein, 207 aa, Homo sapiens
MLRPVIEEEISMLGEITHLQTISEDLKSLTMDPHKLPSSSEQVILDLKGSDYSWSYQTPPSSPSTTMSRKSSVCSSLNSVNSSDSRSSGSHSHSPSSHYRYRSSNLAQQAPVRLSSVSSHDSGFISQDAFQSKSPSPMPPEAPNQLSNGFSHYSLSSESHVGPTGAGLFPHCLPASRLLPRVTSVHLPDYAHYYTIGPGMFPSSQIP

SEQ ID NO: 52709 - protein, 38 aa, Homo sapiens
MADGGSERADGRIVKMEVDYSATVDQRLPECAKLAKVV

SEQ ID NO: 52710 - protein, 255 aa, Homo sapiens
  MOD_RES (1)..(1): Any amino acid
XLPEPVPQEDGVDLLGLHSEVGAGPAVPPQACKAPSSNTDLLSCLLGPPEAASQGPPEDLLSEDPLLLASPAPPLSVQSTPRGGPPAAGNNSQPCSNPDLFGEFLNSDSVTVPPSFPSAHSAPPPSCSADFLHLGDLPGEPSKMTASSSNPDLLGGWAAWTETAASAVAPTPATEGPLFSPGGQPAPCGSQASWTKSQNPDPFADLGDLSSGLQGSPAGFPPGGFIPKTATTPKGSSSWQTSRPPAQGASWPPQA

SEQ ID NO: 52711 - protein, 154 aa, Homo sapiens
MMMKPSCSWCKDYEQFEENKQLSILVNCYKKLCEYITQTTLARDIIEAVDCSSDILALLNDGSLFCEETEKPSDSSFTLCLTHSPLPSTSEPTTDPQASLSPMSESTLSIAIGSSVINGLPTYNGLSIDRFGINIPSPEHSNTIDVCNTVDIKT

SEQ ID NO: 52712 - protein, 240 aa, Homo sapiens
MSGCGLFLRTTAAARACRGLVVSTANRRLLRTSPPVRAFAKELFLGKIKKKEVFPFPEVSQDELNEINQFLGPVEKFFTEEVDSRKIDQEGKIPDETLEKLKSLGLFGLQVPEEYGGLGFSNTMYSRLGEIISMDGSITVTLAAHQAIGLKGIILAGTEEQKAKYLPKLASGEHIAAFCLTEPASGSDAASIRSRATLSEDKKHYILNGSKGPALSPRLECSGTILAHCSLNFLGSGLDY

SEQ ID NO: 52713 - protein, 950 aa, Homo sapiens
MMGNSHHKQPRSKSQSRMHSATGHSNSPAGSVAHSTTSDIRPSHSVPEGVHGRVAVGQDARFPSLTSPVLRTPSSEPDEPHQARSGPNPPGMESMGMVYSVPSSCNGPTESTFSTSWKGDAFTYMTPSATSQSNQVNENGKNPSCGNSWVSLNKVPPLVPKEAATLLVARDNPAGCSGSAGYPERLIQQRHMPERPSKIGLLTSGTSRLETGPGGASRFRERSLSVPTDSGTTDVDYDEEQKANEACALPFASTSSEGSNSADNIASLSAQQEAQHRRQRSKSISLRKAKKKPSPPTRSVSLVKDEPGLLPEGGSALPKDQRPKSLCLSLEHQGHHSSHPDAQGHPAIPNHKDPESTQFSHHWYLTDWKSGDTYQSLSSSSTATGTTVIECTQVQGSSESLASPSTSRATTPSQLSIEVEAREISSPGRPPGLMSPSSGYSSQSETPTPTVSMSLTLGHLPPPSSSVRVRPVVPERKSSLPPTSPMEKFPKSRLSFDLPLTSSPNLDLSGMSISIRSKTKVSRHHSETNFGVKLAQKTNPNQPIMPMVTQSDLRSVRLRSVSKSEPEDDIESPEYAEEPRAEEVFTLPERKTKPPVAEKPPVARRPPSLVHKPPSVPEEYALTSPTLAMPPRSSIQHARPLPQDSYTVVRKPKPSSFPDGRSPGESTAPSSLVFTPFASSSDAFFSGTQQPPQGSVEDEGPKVRVLPERISLQSQEEAEKKKGKIPPPVPKKPSVLYLPLTSPTAQMEAYVAEPRLPLSPIITLEEDTKCPATGDDLQSLGQRVTSTPQADSEREASPLGSSVEPGTEEKSLISDKTAEWIAEDDDDVFVASRTTEDLFTVIHRSKRKLLGWKEPGEAFVGGRTSSHSPIKNTAESPISESTATAGSGSSANLDAGRNDDFKALLQKKGSKATPRSRPSAAELLKTTNPLARRIIAQFSKDYETTDNPST

SEQ ID NO: 52714 - protein, 73 aa, Homo sapiens
VTIACDAVLSSKSPYRKQDPDTWENELPVSKYANNLTQLDNGVRIPPRCWCVYRGRCWRIGRWIRNVSDLVES

SEQ ID NO: 52715 - protein, 64 aa, Homo sapiens
MDLPVGPGAAGPSNVPAFLTKLWTLVSDPDTDALICWSPLPGSRLVYMVRPCKTGQLRFAEVNQ

SEQ ID NO: 52716 - protein, 408 aa, Homo sapiens
MAWRGWAQRGWGCGQAWGASVGGRSCEELTAVLTPPQLLGRRFNFFIQQKCGFRKAPRKVEPRRSDPGTSGEAYKRSALIPPVEETVFYPSPYPIRSLIKPLFFTVGFTGCAFGSAAIWQYESLKSRVQSYFDGIKADWLDSIRPQKEGDFRKEINKWWNNLSDGQRTVTGIIAANVLVFCLWRVPSLQRTMIRYFTSNPASKVLCSPMLLSTFSHFSLFHMAANMYVLWSFSSSIVNILGQEQFMAVYLSAGVISNFVSYVGKVATGRYGPSLGASGAIMTVLAAVCTKIPEGRLAIIFLPMFTFTAGNALKAIIAMDTAGMILGWKFFDHAAHLGGALFGIQEFQAWTGVKPSRSTKTKPARVITTHTSGWDSSPGAGFQVPEVRKKFTPNPSAIFQASAPRILNV

SEQ ID NO: 52717 - protein, 156 aa, Homo sapiens
MIRFILIQNRAGKTRLAKWYMQFDDDEKQKLIEEVHAVVTVRDAKHTNFVEVLAISVADSLSVLQFRNFKIIYRRYAGLYFCICVDVNDNNLAYLEAIHNFVEVLNEYFHNVCELDLVFNFYKVYTVVDEMFLAGEIRETSQTKVLKQLLMLQSLE

SEQ ID NO: 52718 - protein, 180 aa, Homo sapiens
MCGNTMSVPLLTDAATVSGAERETAAVIFLHGLGDTGHSWADALSTIRLPHVKYICPHAPRIPVTLNMKMVMPSWFDLMGLSPDAPEDEAGIKKAAENIKALIEHEMKNGIPANRIVLGGFSQGGALSLYTALTCPHPLAGIVALSCWLPLHRAFPQVNVPTDPPALCVCILVAWGLLQH

SEQ ID NO: 52719 - protein, 731 aa, Homo sapiens
MAQSVLVPPGPDSFRFFTRESLAAIEQRIAEEKAKRPKQERKDEDDENGPKPNSDLEAGKSLPFIYGDIPPEMVSVPLEDLDPYYINKKTFIVLNKGKAISRFSATPALYILTPFNPIRKLAIKILVHSLFNMLIMCTILTNCVFMTMSNPPDWTKNVEYTFTGIYTFESLIKILARGFCLEDFTFLRDPWNWLDFTVITFAYVTEFVDLGNVSALRTFRVLRALKTISVIPGLKTIVGALIQSVKKLSDVMILTVFCLSVFALIGLQLFMGNLRNKCLQWPPDNSSFEINITSFFNNSLDGNGTTFNRTVSIFNWDEYIEDKSHFYFLEGQNDALLCGNSSDAGQCPEGYICVKAGRNPNYGYTSFDTFSWAFLSLFRLMTQDFWENLYQLTLRAAGKTYMIFFVLVIFLGSFYLINLILAVVAMAYEEQNQATLEEAEQKEAEFQQMLEQLKKQQEEAQAAAAAASAESRDFSGAGGIGVFSESSSVASKLSSKSEKELKNRRKKKKQKEQSGEEEKNDRVRKSESEDSIRRKGFRFSLEGSRLTYEKRFSSPHQSLLSIRGSLFSPRRNSRASLFSFRGRAKDIGSENDFADDEHSTFEDNDSRRDSLFVPHRHGERRHSNVSQASRASRVLPILPMNGKMHSAVDCNGVVSLVGGPSTLTSAGQLLPEGTTTETEIRKRRSSSYHVSMDLLEDPTSRQRAMSIASILTNTMEDFFFLYLASRKLLQM

SEQ ID NO: 52720 - protein, 52 aa, Homo sapiens
  MOD_RES (1)..(1): Any amino acid
XNWPFLEGCACTPERMAEAGFIHCPTENEPDLAQCFFCFKELEGWEPDDDPM

SEQ ID NO: 52721 - protein, 1151 aa, Homo sapiens
  MOD_RES (1)..(1): Any amino acid
XDVSPTSRDNLVAKQLARNTVTQALSRFTSPQAGAPSRPGVPPTGDVGTHPPVGRTSLKTHGVARVDRGNPPPIPPKKPGLSQTPSPPHPQLKVIIDSSRASNTGAKVDNKTVASTPSSLPQGNRVINEENLPKSSSPQLPPKPSIDLTVAPAGCAVSALATSQKIQKVKCTREEPSCWSPSLTPLLMSGGPAPLAGRPTLLQQAAAQGNVTLLSMLLNEEGLDINYSCEDGHSALYSAAKNGHTDCVRLLLSAEAQVNAADKNGFTPLCAAAAQGHFECVELLISYDANINHAADGGQTPLYLACKNGNKECIKLLLEAGTNRSVKTTDGWTPVHAAVDTGNVDSLKLLMYHRIPAHGNSFNEEESESSVFDLDGGEESPEGISKPVVPADLINHANREGWTAAHIAASKGFKNCLEILCRHGGLEPERRDKCNRTVHDVATDDCKHLLENLNALKIPLRISVGEIEPSNYGSDDLECENTICALNIRKQTSWDDFSKAVSQALTNHFQAISSDGWWSLEDVTCNNTTDSNIGLSARSIRSITLGNVPWSVGQSFAQSPWDFMRKNKAEHITVLLSGPQEGCLSSVTYASMIPLQMMQNYLRLVEQYHNVIFHGPEGSLQDYIVHQLALCLKHRQMAAGFSCEIVRAEVDAGFSKEQLLDLFISSACLIPVKQSPSKKKIIIILENLEKSSLSELLRDFLAPLENRSTESPCTFQKGNGLSECYYFHENCFLMGTIAKACLQGSDLLVQQHFRWVQLRWDGEPMQGLLQRFLRRKVVNKFKGQAPSPCDPVCKIVDWALSVWRQLNSCLARLGTPEALLGPKYFLSCPVVPGHAQVTVKWMSKLWNGVIAPRVQEAILSRASVKRQPGFGQTTAKRHPSQGQQAVVKAALSILLNKAVLHGCPLPRAELDQHTADFKGGSFPLSIVSSYNTCNKKKGESGAWRKVNTSPRRKSGRFSLPTWNKPDLSTEGMKNKTISQLNCNRNASLSKQKSLENDLSLTLNLDQRLSLGSDDEADLVKELQSMCSSKSESDISKIADSRDDLRMFDSSGNNPVLSATINNLRMPVSQKEVSPLSSHQTTECSNSKSKTELGVSRVKSFLPVPRSKVTQCSQNTKRSSSSSNTRQIEINNNSKEVNWNLHKNEHLEKPNK

SEQ ID NO: 52722 - protein, 590 aa, Homo sapiens
MNPSAPSYPMASLYVGDLHPDVTEAMLYEKFSPAGPILSIRVCRDMITRRSLGYAYVNFQQPADAERALDTMNFDVIKGKPVRIMWSQRDPSLRKSGVGNIFIKNLDKSIDNKALYDTFSAFGNILSCKVVCDENGSKGYGFVHFETQEAAERAIEKMNGMLLNDRKVFVGRFKSRKEREAELGARAKEFTNVYIKNFGEDMDDERLKDLFGKFGPALSVKVMTDESGKSKGFGFVSFERHEDAQKGVNLYVKNLDDGIDDERLRKEFSPFGTITSAKVMMEGGRSKGFGFVCFSSPEEATKAVTEMNGRIVATKPLYVALAQRKEERQAHLTNQYMQRMASVRAVPNPVINPYQPAPPSGYFMAAIPQTQNRAAYYPPSQIAQLRPSPRWTAQGARPHPFQNMPGAIRPAAPRPPFSTMRPASSQVPRVMSTQRVANTSTQTMGPRPAAAAAAATPAVRTVPQYKYAAGVRNPQQHLNAQPQVTMQQPAVHVQGQEPLTASMLASAPPQEQKQMLGERLFPLIQAMHPTLAGKITGMLLEIDNSELLHMLESPESLRSKVDEAVAVLQAHQAKEAAQKAVNSATGVPTV

SEQ ID NO: 52723 - protein, 56 aa, Homo sapiens
MKYSCCALVLAVLGTELLGSLCSTVRSPRFRGRIQQERKNIRPNIILVLTDDQDVE

SEQ ID NO: 52724 - protein, 262 aa, Homo sapiens
MSAEVKVTGQNQEQFLLLAKSAKGAALATLIHQVLEAPGVYVFGELLDMPNVRELAESDFASTFRLLTVFAYGTYADYLAEARNLPPLTEAQKNKLRHLSVVTLAAKVKCIPYAVLLEALALRNVRQLEDLVIEAVYADVLRGSLDQRNQRLEVDYSIGRDIQRQDLSAIARTLQEWCVGCEVVLSGIEEQVSRANQHKEQQLGLKQQIESEAPRERQDLVQVELKGLSFPPWGCGVPAACLPLRSPQRAFCAPGQLIILGS

SEQ ID NO: 52725 - protein, 44 aa, Homo sapiens
  MOD_RES (1)..(1): Any amino acid
XNPKAACLKRREEEKVSAVSAEPPTTLPGTHPGLSETTNPMGHM

SEQ ID NO: 52726 - protein, 224 aa, Homo sapiens
MKSCGVSLATAAAAAAAFGDEEKKMAAGKASGESEEASPSLTAEEREALGGLDSRLFGFVRFHEDGARTKALLGKAVRCYESLILKAEGKVESDFFCQLGHFNLLLEDYPKALSAYQRYYSLQSDYWKNAAFLYGLGLVYFHYNAFQWAIKAFQEVLYVDPSFCRAKEIHLRLGLMFKVNTDYESSLKHFQLALVDCNPCTLSNAEIQFHIAHLYETQVGCITL

SEQ ID NO: 52727 - protein, 167 aa, Homo sapiens
MSTVKEQLIEKLIEDDENSQCKITIVGTGAVGMACAISILLKDLADELALVDVALDKLKGEMMDLQHGSLFFSTSKITSGKDYSVSANSRIVIVTAGARQQEGETRLALVQRNVAIMKSIIPAIVHYSPDCKILVVSNPGIIWNKRRTLSQYPLCLGAEWCLRCCEN

SEQ ID NO: 52728 - protein, 448 aa, Homo sapiens
MPLYSVTVKWGKEKFEGVELNTDEPPMVFKAQLFALTGVQPARQKVMVKGGTLKMELPCGLTNLGNTCYMNATVQCIRSVPELKDALKRYAGALRASGEMASAQYITAALRDLFDSMDKTSSSIPPIILLQFLHMAFPQFAEKGEQGQYLQQDANECWIQMMRVLQQKLEAIEDDSVKETDSSSASAATPSKKKSLIDQFFGVEFETTMKCTESEEEEVTKGKENQLQLSCFINQEVKYLFTGLKLRLQEEITKQSPTLQRNALYIKSSKISRLPAYLTIQMVRFFYKEKESVNAKVLKDVKFPLMLDMYELCTPELQEKMVSFRSKFKDLEDKKVNQQPNTSDKKSSPQKEVKYEPFSFADDIGSNNCGYYDLQAVLTHQGRSSSSGHYVSWVKRKQDEWIKFDDDKVSIVTPEDILRLSGGGDWHIAYVLLYGPRRVEIMEEESEQ

SEQ ID NO: 52729 - protein, 102 aa, Homo sapiens
MATANGAVENGQPDRKPPALPRPIRNLEVKFTKVRRAPLPPDGRGPLRWAARLGAAGAREQRAGGPPGAAETRASLPGRGSPETAPFAGRLGRDRRRRGSAL

SEQ ID NO: 52730 - protein, 260 aa, Homo sapiens
MEPKARCSDSQRGGPCTNHEPPALEEGGRRHRRARAGSSSGALGLQLRPRVRPQRRAAAAAAAAAAAAAAATAASAAASAILGGRAAAAQPIGHPDALERAARANLRARRGDAWRGRGAPQRRAPAEARALGAASRALARRGAAPAAPLRGQPGPALPPPGPEAEPALPGGGQLAVAGPAAPEAPGLGLGGGLDPVRPRGGGRTRGHPRGAGPGVRRGGLLGRGNLPHIGGGHIPLGLVFLVQPAAGGRALLLDQPAVAG

SEQ ID NO: 52731 - protein, 84 aa, Homo sapiens
MNMEGLVMFQDLSIDFSQEEWECLDAAQKDLYRDVMMENYSSLVSLGLSIPKPDVISLLEQGKEPWMVSRDVLGGWCRDRMKKA

SEQ ID NO: 52732 - protein, 989 aa, Homo sapiens
  MOD_RES (1)..(1): Any amino acid
XEHEEDEESRRREAKAPRMGTFIGVYLPCLQNILGVILFLRLTWIVGVAGVLESFLIVAMCCTCTMLTAISMSAIATNGVVPAGGSYYMISRSLGPEFGGAVGLCFYLGTTFAGAMYILGTIEIFLTYISPGAAIFQAEAAGGEAAAMLHNMRVYGTCTLVLMALVVFVGVKYVNKLALVFLACVVLSILAIYAGVIKSAFDPPDIPVCLLGNRTLSRRSFDACVKAYGIHNNSATSALWGLFCNGSQPSAACDEYFIQNNVTEIQGIPGAASGVFLENLWSTYAHAGAFVEKKGVPSVPVAEESRASALPYVLTDIAASFTLLVGIYFPSVTGIMAGSNRSGDLKDAQKSIPTGTILAIVTTSFIYLSCIVLFGACIEGVVLRDKFGEALQGNLVIGMLAWPSPWVIVIGSFFSTCGAGLQSLTGAPRLLQAIARDGIVPFLQVFGHGKANGEPTWALLLTVLICETGILIASLDSVAPILSMFFLMCYLFVNLACAVQTLLRTPNWRPRFKFYHWTLSFLGMSLCLALMFICSWYYALSAMLIAGCIYKYIEYRGAEKEWGDGIRGLSLNAARYALLRVEHGPPHTKNWRPQVLVMLNLDAEQAVKHPRLLSFTSQLKAGKGLTIVGSVLEGTYLDKHMEAQRAEENIRSLMSTEKTKGFCQLVVSSSLRDGMSHLIQSAGLGGLKHNTVLMAWPASWKQEDNPFSWKNFVDTVRDTTAAHQALLVAKNVDSFPQNQERFGGGHIDVWWIVHDGGMLMLLPFLLRQHKVWRKCRMRIFTVAQVDDNSIQMKKDLQMFLYHLRISAEVEVVEMVENDISAFTYERTLMMEQRSQMLKQMQLSKNEQEREAQLIHDRNTASHTAAAARTQAPPTPDKVQMTWTREKLIAEKYRSRDTSLSGFKDLFSMKPEWGNLDQSNVRRMHTAVKLNGVVLNKSQDAQLVLLNMPGPPKNRQGDENYMEFLEVLTEGLNRVLLVRGGGREVITIYS

SEQ ID NO: 52733 - protein, 73 aa, Homo sapiens
  MOD_RES (1)..(1): Any amino acid
XSSPRNLGFETSAFKLTTEFVDVMGGLDGDMFNYYKMLMLQGLIAARKHMDKVLSFLASMAPAPFETSKRGST

SEQ ID NO: 52734 - protein, 386 aa, Homo sapiens
MESPISTSFYTDTKGRKPFLLAAERGHVEMIEKLTFLNLHTSEKDKIQWSTLWTAALTKMKTSRNSIAALTIEGACSPGTGVSTSSVSLLQGGNTALHLAAKHGHSPAVQVLLAQWQDINEMNELNISSLQIATRNGHASLVNFLLSENVDLHQKVEPKESPLHLVVINNHITVVNSLLSAQHDIDILNQKQQTPLHVAADRGNVELVETLLKAGCDLKAVDKQGKTALAVASRSNHSLVVGMLIKAERYYAWREEHHESIRDPSTGFTLTFKQDHSLETRHIRTLLWDLAYHQLKANEWQRLARSWNFTDDQIRAIEEQWSGNESFREHGHRALLIWLHGTLMTQGDPAKQLYEELVHAGFPKLAEKTRHFKSKTDSNSKKCVVS

SEQ ID NO: 52735 - protein, 357 aa, Homo sapiens
MVACRAIGILSRFSAFRILRSRGYICRNFTGSSALLTRTHINYGVKGDVAVVRINSPNSKVNTLSKELHSEFSEVMNEIWASDQIRSAVLISSKPGCFIAGADINMLAACKTLQEVTQLSQEAQRIVEKLEKSTKPIVAAINGSCLGGGLEVAISCQYRIATKDRKTVLGTPEVLLGALPGAGGTQRLPKMVGVPAALDMMLTGRSIRADRAKKMGLVDQLVEPLGPGLKPPEERTIEYLEEVAITFAKGLADKKISPKRDKGLVEKLTAYAMTIPFVRQQVYKKVEEKVRKQTKGLYPAPLKIIDVVKTGIEQGSDAGYLCESQDEESFTMGQWQRQDLSNPRYYAFNHQVETFSP

SEQ ID NO: 52736 - protein, 832 aa, Homo sapiens
MGTSALWALWLLLALCWAPRESGATGTGRKAKCEPSQFQCTNGRCITLLWKCDGDEDCVDGSDEKNCVKKTCAESDFVCNNGQCVPSRWKCDGDPDCEDGSDESPEQCRNITCSPDEFTCSSGRCISRNFVCNGQDDCSDGSDELDCAPPTCGAHEFQCSTSSCIPISWVCDDDADCSDQSDESLEQCGRQPVIHTKCPASEIQCGSGECIHKKWRCDGDPDCKDGSDEVNCPSRTCRPDQFECEDGSCIHGSRQCNGIRDCVDGSDEVNCKNVNQCLGPGKFKCRSGECIDISKVCNQEQDCRDWSDEPLKECHINECLVNNGGCSHICKDLVIGYECDCAAGFELIDRKTCGDIDECQNPGICSQICINLKGGYKCECSRGYQMDLATGVCKAVGKEPSLIFTNRRDIRKIGLERKEYIQLVEQLRNTVALDADIAAQKLFWADLSQKAIFSASIDDKVGRHVKMIDNVYNPAAIAVDWVYKTIYWTDAASKTISVATLDGTKRKFLFNSDLREPASIAVDPLSGFVYWSDWGEPAKIEKAGMNGFDRRPLVTADIQWPNGITLDLIKSRLYWLDSKLHMLSSVDLNGQDRRIVLKSLEFLAHPLALTIFEDRVYWIDGENEAVYGANKFTGSELATLVNNLNDAQDIIVYHELVQPSGKNWCEEDMENGGCEYLCLPAPQINDHSPKYTCSCPSGYNVEENGRDCQSTATTVTYSETKDTNTTEISATSGLVPGGINVTTAVSEVSVPPKGTSAAWAILPLLLLVMAAVGGYLMWRNWQHKNMKSMNFDNPVYLKTTEEDLSIDIGRHSASVGHTYPAISVVSTDDDLA

SEQ ID NO: 52737 - protein, 182 aa, Homo sapiens
MAASSEDDIDRRPIRRVRSKSDTPYLAEARISFNLGAAEEVERLAAMRSDSLVPGTHTPPIRRRSKFANLGRIFKPWKWRKKKSEKFKHTSAALERKISMRQSREELIKRGVLKEIYDKDGELSISNEEDSLENGQSLSSSQLSLPALSEMEPVPMPRDPCSYEVLQPSDIMDGPVSEESPS

SEQ ID NO: 52738 - protein, 701 aa, Homo sapiens
MRRRTQPPIGHTLCVSLSCQHRGLIHPQSRAVGGDAMTPILTVLICLGLSLGPRTHVQAGHLPKPTLWAEPGSVITQGSPVTLRCQGGQETQEYRLYREKKTAPWITRIPQELVKKGQFPIPSITWEHTGRYRCYYGSDTAGRSESSDPLELVVTGAYIKPTLSAQPSPVVNSGGNVTLQCDSQVAFDGFILCKEGEDEHPQCLNSQPHARGSSRAIFSVGPVSPSRRWWYRCYAYDSNSPYEWSLPSDLLELLVLGVSKKPSLSVQPGPIVAPEETLTLQCGSDAGYNRFVLYKDGERDFLQLAGAQPQAGLSQANFTLGPVSRSYGGQYRCYGAHNLSSEWSAPSDPLDILIAGQFYDRVSLSVQPGPTVASGENVTLLCQSQGWMQTFLLTKEGAADDPWRLRSTYQSQKYQAEFPMGPVTSAHAGTYRCYGSQSSKPYLLTHPSDPLELVVSGPSGGPSSPTTGPTSTSAGPEDQPLTPTGSDPQSAPGLGSGAGTRAAGLGRHLGVVIGILVAVILLLLLLLLLFLILRHRRQGKHWTSTQRKADFQHPAGAVGPEPTDRGLQWRSSPAADAQEENLYAAVKHTQPEDGVEMDTRQSPHDEDPQAVTYAEVKHSRPRREMASPPSPLSGEFLDTKDRQAEEDRQMDTEAAASEAPQDVTYAQLHSLTLRREATEPPPSQEGPSPAVPSIYATLAIH

SEQ ID NO: 52739 - protein, 92 aa, Homo sapiens
MKLCVTVLSLLVLVAAFCSLALSAPMGSDPPTACCFSYTARKLPRNFVVDYYETSSLCSQPAVPWDSNLGKQVCADPSESWVQEYVYDLELN

SEQ ID NO: 52740 - protein, 205 aa, Homo sapiens
MESIFHEKQEGSLCAQHCLNNLLQGEYFSPVELSSIAHQLDEEERMRMAEGGVTSEDYRTFLQWFNLNSLLTGPELISDTYLALFLAQLQQEGYSIFVVKGDLPDCEADQLLQMIRVQQMHRPKLIGEELAQLKEQRVHKTDLERVLEANDGSGMLDEDEEDLQRALALSRQEIDMEDEEADLRRAIQLSMQGSSRNISQDMTQT

SEQ ID NO: 52741 - protein, 166 aa, Homo sapiens
MTFKILCISCKRRSETNAETFTEWTFRQKGTEEFVKILRYENEVLQLEEDERFEGRVVWNGSRGTKDLQDLSIFITNVTYNHSGDYECHVYRLLFFENYEHNTSVVKKIHIEVVDKETKSCSVAQAGILWRDHSPLQPRTPEIQRSFCLSLPRSWDYRCGGDGSWW

SEQ ID NO: 52742 - protein, 291 aa, Homo sapiens
MRLLPRLLLLLLLVFPATVLFRGGPRGLLAVAQDLTEDEETVEDSIIEDEDDEAEVEEDEPTDLVEDKEEEDVSGEPEASPSADTTILFVKGEDFPANNIVKFLVGFTNKGTEDFIVESLDASFRYPQDYQFYIQNFTALPLNTVVPPQRQATFEYSFIPAEPMGGRPFGLVINLNYKDLNGNVFQDAVFNQTVTVIEREDGLDGETIFMYMFLAGLGLLVIVGLHQLLESRKRKRPIQKVEMGTSSQNDVDMSWIPQETLNQIMQSRRDKASPRRLPRKRAQKRSVGSDE

SEQ ID NO: 52743 - protein, 1181 aa, Homo sapiens
MPENPATDKLQVLQVLDRLKMKLQEKGDTSQNEKLSMFYETLKSPLFNQILTLQQSIKQLKGQLNHIPSDCSANFDFSRKGLLVFTDGSITNGNVHRPSNNSTVSGLFPWTPKLGNEDFNSVIQQMAQGRQIEYIDIERPSTGGLGFSVVALRSQNLGKVDIFVKDVQPGSVADRDQRLKENDQILAINHTPLDQNISHQQAIALLQQTTGSLRLIVAREPVHTKSSTSSSLNDTTLPETVCWGHVEEVELINDGSGLGFGIVGGKTSGVVVRTIVPGGLADRDGRLQTGDHILKIGGTNVQGMTSEQVAQVLRNCGNSVRMLVARDPAGDISVTPPAPAALPVALPTVASKGPGSDSSLFETYNVELVRKDGQSLGIRIVGYVGTSHTGEASGIYVKSIIPGSAAYHNGHIQVNDKIVAVDGVNIQGFANHDVVEVLRNAGQVVHLTLVRRKTSSSTSPLEPPSDRGTVVEPLKPPALFLTGAVETETNVDGEDEEIKERIDTLKNDNIQALEKLEKVPDSPENELKSRWENLLGPDYEVMVATLDTQIADDAELQKYSKLLPIHTLRLGVEVDSFDGHHYISSIVSGGPVDTLGLLQPEDELLEVNGMQLYGKSRREAVSFLKEVPPPFTLVCCRRLFDDEASVDEPRRTETSLPETEVDHNMDVNTEEDDDGELALWSPEVKIVELVKDCKGLGFSILDYQDPLDPTRSVIVIRSLVADGVAERSGGLLPGDRLVSVNEYCLDNTSLAEAVEILKAVPPGLVHLGICKPLVEDNEEESCYILHSSSNEDKTEFSGTIHDINSSLILEAPKGFRDEPYFKEELVDEPFLDLGKSFHSQQKEIEQSKEAWEMHEFLTPRLQEMDEEREILVDEEYELYQDPSPSMELYPLSHIQEATPVPSVNELHFGTQWLHDNEPSESQEARTGRTVYSQEAQPYGYCPENVMKENFVMESLPSVPSTEGNSQQGRFDDLENLNSLAKTSLDLGMIPNDVQGPSLLIDLPVVAQRREQEDLPLYQHQATRVISKASAYTGMLSSRYATDTCELPEREEGEGEETPNFSHWGPPRIVEIFREPNVSLGISIVGGQTVIKRLKNGEELKGIFIKQVLEDSPAGKTNALKTGDKILEVSGVDLQNASHSEAVEAIKNAGNPVVFIVQSLSSTPPWTTERDSVSKKKKRKER

SEQ ID NO: 52744 - protein, 306 aa, Homo sapiens
  MOD_RES (1)..(1): Any amino acid
XLVGLHNIGQTCCLNSLIQVFVMNVDFARILKRITVPRGADEQRRSVPFQMLLLLEKMQDSRQKAVWPLELAYCLQKYNVPLFVQHDAAQLYLKLWNLIKDQIADVHLVERLQALYMIRMKDSLICLDCAMESSRNSSMLTLRLSFFDVDSKPLKTLEDALHCFFQPRELSSKSKCFCENCGKKTRGKQVLKLTHLPQTLTIHLMRFSIRNSQTRKICHSLYFPQSLDFSQILPMKRESCDAEEQSGGQYELFAVIAHVGMADSGHYCVYIRNAVDGKWFCFNDSNICLVSWEDIQCTYGNPNYHW

SEQ ID NO: 52745 - protein, 187 aa, Homo sapiens
MPAPIRLRELIRTIRTARTQAEEREMIQKECAAIRSSFREEDNTYRCRNVAKLLYMHMLGYPAHFGQLECLKLIASQKFTDKRIGYLGAMLLLDERQDVHLLMTNCIKNDLNHSTQFVQGLALCTLGCMGSSEMCRDLAGEVEKLLKTSNSYLRKKAALCAVHVIRKVPELMEMFLPATKNLLNEKN

SEQ ID NO: 52746 - protein, 66 aa, Homo sapiens
MWWFQQGLSFLPSALVIWTSAAFIFSYITAVTLHHIDPALPYISDTGTVAPEKCLFGAMLNIAAVL

SEQ ID NO: 52747 - protein, 704 aa, Homo sapiens
MSEDSEKEDYSDRTISDEDESDEDMFMKFVSEDLHRCALLTADSFGDPFFPRTTQILLEYQLGRWVPRLREPRDLYGVSSSGPLSPTRWPYHCEVIDEKVQHIDWTPSCPEPVYIPTGLETEPLYPDSKEATVVYLAEDAYKEPCFVYSRVGGNRTPLKQPVDYRDNTLMFEARFESGNLQKVVKVAEYEYQLTVRPDLFTNKHTQWYYFQVTNMRAGIVYRFTIVNFTKPASLYSRGMRPLFYSEKEAKAHHIGWQRIGDQIKYYRNNPGQDGRHYFSLTWTFQFPHNKDTCYFAHCYPYTYTNLQEYLSGINNDPVRSKFCKIRVLCHTLARNMVYILTITTPLKNSDSRKRKAVILTARVHPGETNSSWIMKGFLDYILGNSSDAQLLRDTFVFKVVPMLNPDGVIVGNYRCSLAGRDLNRNYTSLLKESFPSVWYTRNMVHRLMEKREVILYCDLHGHSRKENIFMYGCDGSDRSKTLYLQQRIFPLMLSKNCPDKFSFSACKFNVQKSKEGTGRVVMWKMGIRNSFTMEATFCGSTLGNKRGTHFSTKDLESMGYHFCDSLLDYCDPDRTKYYRCLKELEEMERHITLEKVFEDSDTPVIDITLDVESSSRGSDSSESIDSLTYLLKLTSQKKHLKTKKERNSTIASHQNARGQEVYDRGHLLQRHTQSNSDVKDTRPNEPDDYMVDYFRRQLPNQGLV

SEQ ID NO: 52748 - protein, 28 aa, Homo sapiens
ENREVDRNEGLKFARKHSMLFIGFFRSN

SEQ ID NO: 52749 - protein, 1688 aa, Homo sapiens
MTEAITEAAVASSEEVSEERDDLGPLELHDSGTFQQVVNLLDIIDSESAKTDTTGAGLDMRKTLASVIIMEKATTEPSVVINTLIRCLQVPEISTQRKVNIYNILQDIIQQEGELEEQCVQRLVAIASKEMREIPEMEGYMKAEVASDTLVALSRNHFSLVMYELQHHLKPLNLTDEFVIITLAKLANGNVFEFMPYMGITLATIFTMLRLANEAKIRQAICSAMETFCETVQFYLKHLEESVYPVMTEEEFALKVFPMYRYFVTVWLRHYNPEVKLGVIKSLKPMLGLLLPNDDLREQVYDYIPLLLAEYQGKGHLPPFANPLQVLRQILELSVTTNTPVPQMQLHTIFTELHVQVCNKAPAQHQYSSQNLMEMVHCFVALARSYPKELMKFFFSQMETNKEAVRVGTLNLIRAIVSADEPRMSIRAIYLAIRVVKNTISDTRSKVRMAILHIIGQLALCGYQERIKGWGLKYLSVQLTLSTYKLTNRREKFYQRDLEERMVHKVTMDTVKIITSSVSGMTTEFWVRLLCYIMETDYVEALTPICISLTNLAEHQLHGQDVDVSVAGKSRQVDLPAPQKLLARLLVLMSSPYKGEGRGIAMLNLLRTLSQSIAPSMADMWELEIALLVRYLEEHTEFTWDQKAWEDKLIQFLRNSLKKTRGSSWSLRLSKELNNQIASFDSPSLEKGFLYRALGFTLATGLEASKVEVLLLELLYKTDYSNDFDSEGVIMCFGLCARGQVKTVLNVLHDFEERIQESEQSWQISAWRKDHPWRRETVKSALMVMYSCVASYCHPQLLLNLVDSPITAKIIHHYVSSCQDICLKMAFMKSVVQVTKAINNIKDLEDFHFAQKTTLTSIIVAVIKAEPTDNLVSPVRALAMEALSHLSKLKPFYSTEENSELMDISIHSVISLQLPGEDNESIKTLYANALSSLEQLMESLLQRQLDPKGLQEMVQLLEKWILSEKEWEREKAVSLHLYLMWIYVHSTAVCIHLKLGQFGTMVGLIAPCTCDAHQRTRMASMNVLSSLLDLHASQTCSLWGPSKQKELEKCKGDLQSTDVEKIFCASSRIAKVVCMEFSCDEVVSLIQKLCENTGAMNLQHDKASVTWIAFFLQMRAKELEDKVAEILSAILVHLPVVDHPEVRRLLIDGILLLAHHHQETILTSLLRQPLPMESHLAEVWLAVSENVPFARTMLHSLMGRLQSRLSPRISATSKADIWRLAAVDPLMTLCTIHLLIQKLDENDKLPDFLPDLIYTLLLQLGSSHRPEAAPPVLKMWKLVHTTPLPEEMNLQRCSRGRVTIKSMQLLFKRVKSQHLAHTLDEQAVWDLLQDGGTFLEGVSLLARLCMQHVEGHRQRLAELVLRGMDSEVLSCRISSTAVCVEMRHRFMSGPVLYQEKLLKPAALLLEKGADQEEDEALRVLSLRALGNMALGAPKKVKQYRKVLLEKCLGPLREPVSNSVTAEGMEALTKILAELREGDVGSSFDAMSEQCRIFFDNESELLRLKAFILFGKLARVVGMSKKHFFKGEVKKAWIPLMLHSQDPCSNAAQACMATMFQCVHFWGWKSLEHPSGPSDTATDDKMTVFQTTMCSILTRKKPAVLYRFLLETMAYVKNNLSRIRIAACNLAGIIMKQMSTHYLKKLDFPALRNSLQELQLDPDPGVRRAALETLTVLDSCSQHGFLASPQGMS

SEQ ID NO: 52750 - protein, 1028 aa, Homo sapiens
MLCAENRKEMEDWISSLKSVQTREPYEVAQFNVEHFSGMHNWYACSHARPTFCNVCRESLSGVTSHGLSCEVCKFKAHKRCAVRATNNCKWTTLASIGKDIIEDEDGVAMPHQWLEGNLPVSAKCAVCDKTCGSVLRLQDWKCLWCKTMVHTACKDLYHPICPLGQCKVSIIPPIALNSTDSDGFCRATFSFCVSPLLVFVNSKSGDNQGVKFLRRFKQLLNPAQVFDLMNGGPHLGLRLFQKFDNFRILVCGGDGSVGWVLSEIDKLNLNKQCQLGVLPLGTGNDLARVLGWGGSYDDDTQLPQILEKLERASTKMLDRWSIMTYELKLPPKASLLPGPPEASEEFYMTIYEDSVATHLTKILNSDEHAVVISSAKTLCETVKDFVAKVEKTYDKTLENAVVADAVASKCSVLNEKLEQLLQALHTDSQAAPVLPGLSPLIVEEDAVESSSEESLGESKEQLGDDVTKPSSQKAVKPREIMLRANSLKKAVRQVIEEAGKVMDDPTVHPCEPANQSSDYDSTETDESKEEAKDDGAKESITVKTAPRSPDARASYGHSQTDSVPGPAVAASKENLPVLNTRIICPGLRAGLAASIAGSSIINKMLLANIDPFGATPFIDPDLDSVDGYSEKCVMNNYFGIGLDAKISLEFNNKREEHPEKCRSRTKNLMWYGVLGTRELLQRSYKNLEQRVQLECDGQYIPLPSLQGIAVLNIPSYAGGTNFWGGTKEDDIFAAPSFDDKILEVVAIFDSMQMAVSRVIKLQHHRIAQCRTVKITIFGDEGVPVQVDGEAWVQPPGIIKIVHKNRAQMLTRDRAFESTLKSWEDKQKCDSGKPVLRTHLYIHHAIDLATEEVSQMQLCSQAAEELITRICDAATIHCLLEQELAHAVNACSHALNKANPRCPESLTRDTATEIAINVKALYNETESLLVGRVPLQLESPHEERVSNALHSVEVELQKLTEIPWLYYILHPNEDEEPPMDCTKRNNRSTVFRIVPKFKKEKVQKQKTSSQPALPLHSVLHLLWPTFAL

SEQ ID NO: 52751 - protein, 283 aa, Homo sapiens
  MOD_RES (1)..(1): Any amino acid
XIRFKEAAAVENHVKLGYCGEPKVQPVREVTFREYAIEPATKWHPRGNLAHCYSAEELVHRDCLQAPSAAGVPGDVLAKSSANVYHHPTPAVSSNFYSTVGRNGVLPQAFDQFFETAYGTPENLASSDYPGDKSAEKGPPAATATSAAAAAAATGAPATSSSDSGGGGGCRETAAAAEEKERRRRPESSSSPESSSGHTEDKAGGSSGQRTRKKRCPYTKYQIRELEREFFFSVYINKEKRLQLSRMLNLTDRQVKIWFQNRRMKEKKINRDRLQYYSANPLL

SEQ ID NO: 52752 - protein, 134 aa, Homo sapiens
MAFWGWRAAAALRLWGRVVERVEAGGGVGPFQACGCRLVLGGRDDADVMADRVPRCPVCTGVVKPDIVFFGEPLPQRFLLHVVDFPMADLLLILGTSLEVCQQACAGRRLEGRGREGYRSHLMGPSRAGATLGR

SEQ ID NO: 52753 - protein, 79 aa, Homo sapiens
MTLLTFRDVAIEFSLEEWKCLDLAQQNLYRDVMLENYRNLFSVGLTVCKPGLITCLEQRKEPWNVKRQEAADGHPGQHG

SEQ ID NO: 52754 - protein, 148 aa, Homo sapiens
MAGQGLPLHVATLLTGLLECLGFAGVLFGWPSLVFVFKNEDYFKDLCGPDAGPIGNATGQADCKAQDERFSLIFTLGSFMNNFMTFPTGYIFDRFKTTVARLIAIFFYTTATLIIAFTSAGSAVLLFLAMPMLTIGGILFLITNLQIG

SEQ ID NO: 52755 - protein, 77 aa, Homo sapiens
MRSPRMRVCAKSVLLSHWLFLAYVLMVCCKLMSASSQHLRGHAGHHQIKQGTCEVVAVHRCCNKNRIEERSQTVKCS

SEQ ID NO: 52756 - protein, 90 aa, Homo sapiens
  MOD_RES (1)..(1): Any amino acid
XQLEELLSDMKADVTRLPSMLSRIPPVAARLQMSERSILSRLTNRAGDPTIQQISSRPRDFPVLQRSFPAEPRLPGHLPDPHGREKLPPF

SEQ ID NO: 52757 - protein, 96 aa, Homo sapiens
MIIMVIIFLVLLFWENEVNDEAVMSTLEHLHVDYPQNDVPVPARRDYTTSEMETFPLLLLSLGLVLAEASESTMKIIKEEFTDEEMQYDMAKSGQE

SEQ ID NO: 52758 - protein, 17 aa, Homo sapiens
MKRGRLPSSSEDSDDNG

SEQ ID NO: 52759 - protein, 509 aa, Homo sapiens
MSLVPATNYIYTPLNQLKGGTIVNVYGVVKFFKPPYLSKGTDYCSVVTIVDQTNVKLTCLLFSGNYEALPIIYKNGDIVRFHRLKIQVYKKETQGITSSGFASLTFEGTLGAPIIPRTSSKYFNFTTEDHKMVEALRVWASTHMSPSWTLLKLCDVQPMQYFDLTCQLLGKAEVDGASFLLKVWDGTRTPFPSWRVLIQDLVLEGDLSHIHRLQNLTIDILVYDNHVHVARSLKVGSFLRIYSLHTKLQSMNSENQTMLSLEFHLHGGTSYGRGIRVLPESNSDVDQLKKDLESANLTANQHSDVICQSEPDDSFPSSGSVSLYEVERCQQLSATILTDHQYLERTPLCAILKQKAPQQYRIRAKLRSYKPRRLFQSVKLHCPKCHLLQEVPHEGDLDIIFQDGATKTPDVKLQNTSLYDSKIWTTKNQKGRKVAVHFVKNNGILPLSNECLLLIEGGTLSEICKLSNKFNSVIPVRSGHEDLELLDLSAPFLIQGTIHHYGNQRRRLM

SEQ ID NO: 52760 - protein, 51 aa, Homo sapiens
MDLDVVNMFVIAGGTLAIPILAFVASFLLWPSALIRIYYCMSSVKDVAALS

SEQ ID NO: 52761 - protein, 1130 aa, Homo sapiens
MQFPSPPAARSSPAPQAASSSEAAAPATGQPGPSCPVPGTSRRGRPGTPPAGRVEEEEEEEEEDVDKDPHPTQNTCLRCRHFSLRERKREPRRTMGGCEVREFLLQFGFFLPLLTAWPGDCSHVSNNQVVLLDTTTVLGELGWKTYPLNGWDAITEMDEHNRPIHTYQVCNVMEPNQNNWLRTNWISRDAAQKIYVEMKFTLRDCNSIPWVLGTCKETFNLFYMESDESHGIKFKPNQYTKIDTIAADESFTQMDLGDRILKLNTEIREVGPIERKGFYLAFQDIGACIALVSVRVFYKKCPFTVRNLAMFPDTIPRVDSSSLVEVRGSCVKSAEERDTPKLYCGADGDWLVPLGRCICSTGYEEIEGSCHACRPGFYKAFAGNTKCSKCPPHSLTYMEATSVCQCEKGYFRAEKDPPSMACTRPPSAPRNVVFNINETALILEWSPPSDTGGRKDLTYSVICKKCGLDTSQCEDCGGGLRFIPRHTGLINNSVIVLDFVSHVNYTFEIEAMNGVSELSFSPKPFTAITVTTDQDAPSLIGVVRKDWASQNSIALSWQAPAFSNGAILDYEIKYYEKEHEQLTYSSTRSKAPSVIITGLKPATKYVFHIRVRTATGYSGYSQKFEFETGDETSDMAAEQGQILVIATAAVGGFTLLVILTLFFLITGRCQWYIKAKMKSEEKRRNHLQNGHLRFPGIKTYIDPDTYEDPSLAVHEFAKEIDPSRIRIERVIGAGEFGEVCSGRLKTPGKREIPVAIKTLKGGHMDRQRRDFLREASIMGQFDHPNIIRLEGVVTKRSFPAIGVEAFCPSFLRAGFLNSIQAPHPVPGGGSLPPRIPAGRPVMIVVEYMENGSLDSFLRKHDGHFTVIQLVGMLRGIASGMKYLSDMGYVHRDLAARNILVNSNLVCKVSDFGLSRVLEDDPEAAYTTTGGKIPIRWTAPEAIAYRKFSSASDAWSYGIVMWEVMSYGERPYWEMSNQDVILSIEEGYRLPAPMGCPASLHQLMLHCWQKERNHRPKFTDIVSFLDKLIRNPSALHTLVEDILVMPESPGEVPEYPLFVTVGDWLDSIKMGQYKNNFVAAGFTTFDLISRMSIDDIRRIGVILIGHQRRIVSSIQTLRLHMMHIQEKGFHV

SEQ ID NO: 52762 - protein, 317 aa, Homo sapiens
MRWQLSEQLRCLELQGELRRELLQELAEFMRRRAEVELEYSRGLEKLAERFSSRGGRLGSSREHQSFRKEPSLLSPLHCWAVLLQHTRQQSRESAALSEVLAGPLAQRLSHIAEDVGRLVKKSRDLEQQLQDELLEVVSELQTAKKTYQAYHMESVNAEAKLREAERQEEKRAGRSVPTTTAGATEAGPLRKSSLKKGGRLVEKRQAKFMEHKLKCTKARNEYLLSLASVNAAVSNYYLHDVLDLMDCCDTGFHLALGQVLRSYTAAESRTQASQVQGLGSLEEAVEALDPPGDKAKVLEVHATVFCPPLRFDYHPH

SEQ ID NO: 52763 - protein, 161 aa, Homo sapiens
MMDLRNTPAKSLDKFIEDYLLPDTCFRMQINHAIDIICGFLKERCFRGSSYPVCVSKVVKGGSSGKGTTLRGRSDADLVVFLSPLTTFQDQLNRRGEFIQEIRRQLEACQRERAFSVKFEVQAPRWGNPRALSFVLSSLQLGEGVEFDVLPAFDALVDWRL

SEQ ID NO: 52764 - protein, 917 aa, Homo sapiens
MSTAIREVGVWRQTRTLLLKNYLIKCRTKKSSVQEILFPLFFLFWLILISMMHPNKKYEEVPNIELNPMDKFTLSNLILGYTPVTNITSSIMQKVSTDHLPDVIITEEYTNEKEMLTSSLSKPSNFVGVVFKDSMSYELRFFPDMIPVSSIYMDSRAGCSKSCEAAQYWSSGFTVLQASIDAAIIQLKTNVSLWKELESTKAVIMGETAVVEIDTFPRGVILIYLVIAFSPFGYFLAIHIVAEKEKKIKEFLKIMGLHDTAFWLSWVLLYTSLIFLMSLLMAVIATASLLFPQSSSIVIFLLFFLYGLSSVFFALMLTPLFKKSKHVGIVEFFVTVAFGFIGLMIILIESFPKSLVWLFSPFCHCTFVIGIAQVMHLEDFNEGASFSNLTAGPYPLIITIIMLTLNSIFYVLLAVYLDQVIPGEFGLRRSSLYFLKPSYWSKSKRNYEELSEGNVNGNISFSEIIEPVSSEFVGKEAIRISGIQKTYRKKGENVEALRNLSFDIYEGQITALLGHSGTGKSTLMNILCGLCPPSDGFASIYGHRVSEIDEMFEARKMIGICPQLDIHFDVLTVEENLSILASIKGIPANNIIQEVQKVLLDLDMQTIKDNQAKKLSGGQKRKLSLGIAVLGNPKILLLDEPTAGMDPCSRHIVWNLLKYRKANRVTVFSTHFMDEADILADRKAVISQGMLKCVGSSMFLKSKWGIGYRLSMYIDKYCATESLSSLVKQHIPGATLLQQNDQQLVYSLPFKDMDKFSGLFSALDSHSNLGVISYGVSMTTLEDVFLKLEVEAEIDQADYSVFTQQPLEEEMDSKSFDEMEQSLLILSETKAALVSTMSLWKQQMYTIAKFHFFTLKRESKSVRSVLLLLLIFFTVQIFMFLVHHSFKNAVVPIKLVPDLYFLKPGDKPHKYKTSLLL

SEQ ID NO: 52765 - protein, 297 aa, Homo sapiens
MNGICRVRARGGERRKEGCGGGGGGGGGGGSGGSGGGGGGGGGGDKSPPGSAASKRARTAYTSAQLVELEKEFHFNRYLCRPRRVEMANLLNLSERQIKIWFQNRRMKYKKDQKAKGLASSSGGPSPAGSPPQPMQSTAGFMNALHSMTPSYESPSPPAFGKAHQNAYALPSNYQPPLKGCGAPQKYPPTPAPEYEPHVLQANGGAYGTPTMQGSPVYVGGGGYADPLPPPAGPSLYGLNHLSHHPSGNLDYNGAPPMAPSQHHGPCEPHPTYTDLSSHHAPPPQGRIQEAPKLTHL

SEQ ID NO: 52766 - protein, 76 aa, Homo sapiens
  MOD_RES (1)..(1): Any amino acid
XSDIDESSVMQLAEMGFPLEACRKAVYFTGNMGAEVAFNWIIVHMEEPAYELFAFISHMGTSTMSGHYICHIKKEG

SEQ ID NO: 52767 - protein, 283 aa, Homo sapiens
MSPKRIAKRRSPPADAIPKSKKVKVSHRSHSTEPGLVLTLGQGDVGQLGLGENVMERKKPALVSIPEDVVQAEAGGMHTVCLSKSGQVYSFGCNDEGALGRDTSVEGSEMVPGKVELQEKVVQVSAGDSHTAALTDDGRVFLWGSFRDNNGVIGLLEPMKKSMVPVQVQLDVPVVKVASGNDHLVMLTADGDLYTLGCGEQGQLGRVPELFANRGGRQGLERLLVPKCVMLKSRGSRGHVRFQDAFCGAYFTFAISHEGHVYGFGLSNYHQLGTPGTESCFIP

SEQ ID NO: 52768 - protein, 76 aa, Homo sapiens
MEGSKTSNNSTMQVSFVCQRCSQPLKLDTSFKILDRVTIQELTGQRDPWKEGGQECGSSITYHSPGETRRDPGGRD

SEQ ID NO: 52769 - protein, 68 aa, Homo sapiens
MSSSCSGLSRVLVAVATALVSASSPCPQAWGPPGVQYGQPGRSVKLCCPGVTAGPSSPPCCLLPSSRL

SEQ ID NO: 52770 - protein, 496 aa, Homo sapiens
MVEPHQEPRHSKVGLQDNPWFCDCHISKMIELSKVVDPAIVLLDPLMTCSEPERLTGILFQRAELEHCLKPSVMTSATKIMSALGSNVLLRCDATGFPTPQITWTRSDSSPVNYTVIQESPEEGVRWSIMSLTGISSKDAGDYKCKAKNLAGMSEAVVTVTVLGITTTPIPPDTSERTGDHPEWDVQPGSGRSTSVSSASSYLWSSSFSPTSSFSASTLSPPSTASFSLSPFSSSTVSSTTTLSTSISASTTMANKRSFQLHQGGKRNLKVAKNGSKLPPASTSKKEELALLDQTMLTETNAAIENLRVVSETKESVTLTWNMINTTHNSAVTVLYSKYGGKDLLLLNADSSKNQVTIDGLEPGGQYMACVCPKGVPPQKDQCITFSTERVEGDDSQWSLLLVVTSTACVVILPLICFLLYKVCKLQCKSEPFWEDDLAKETYIQFETLFPRSQSVGELWTRSHRDDSEKLLLCSRSSVESQVTFKSEGSRPEYYC

SEQ ID NO: 52771 - protein, 77 aa, Homo sapiens
MACAAARSPADQDRFICIYPAYLNNKKTIAEGRRIPISKAVENPTATEIQDVCSAVGLNVFLERLGFTMLLRLVSNT

SEQ ID NO: 52772 - protein, 305 aa, Homo sapiens
  MOD_RES (1)..(1): Any amino acid
XFLAPSPHMELLASCPRSRLSPWGGWAPPPSHSRDLRPLPQDDGWEGACGVCLSMEGGAAAATPTALPYYVAFSQLLGLTLVAMTGAWLGLYRGGIAWESDLQFNAHPLCMVIGLIFLQGNALLVYRVFRNEAKRTTKVLHGLLHIFALVIALVGLVAVFDYHRKKGYADLYSLHSWCGILVFVLYFVQWLVGFSFFLFPGASFSLRSRYRPQHIFFGATIFLLSVGTALLGLKEALLFNLGGKYSAFEPEGVLANVLGLLLACFGGAVLYILTRADWKRPSQAEEQALSMDFKTLTEGDSPGSQ

SEQ ID NO: 52773 - protein, 87 aa, Homo sapiens
MTELQQDVEDTKPAKVLGKRESKLGSAHSEAENGVEEKKKACRSPTAQSPTPSVEADSPDQKKIISLCPYLLSKSMLHSGPRVKIQF

SEQ ID NO: 52774 - protein, 170 aa, Homo sapiens
  MOD_RES (1)..(1): Any amino acid
XPGLDPAASATAAAAASHDKGPEAEEGVELQEGGDGPGAEEQTAVAITSVQQAAFGDHNIQYQFRTETNGGQVTYRVVQVTDGQLDGQGDTAGAVSVVSTAAFAGGQQAVTQVGVDGAAQRPGPAAASVPPGPAAPFPLVGALPPLGGGGREWRGDTGSALGEPRGWGRC

SEQ ID NO: 52775 - protein, 38 aa, Homo sapiens
  MOD_RES (1)..(1): Any amino acid
XVWSAGCVLAELLLGQPIFPGDSGVDQLVEIIKFLLQG

SEQ ID NO: 52776 - protein, 57 aa, Homo sapiens
MDPLRRSPSPCLSSQPSSPSTPPCEMLGPVGIEAVLDQLKIKAMKMGFEFNIMVVGE

SEQ ID NO: 52777 - protein, 184 aa, Homo sapiens
MNHLPEDMENALTGSQSSHASLRNIHSINPTQLMARIESYEGREKKGISDVRRTFCLFVTFDLLFVTLLWIIELNVNGGIENTLEKEVMQYDYYSSYFDIFLLAVFRFKVLILAYAVCRLRHWWAIALTTAVTSAFLLAKVILSKLFSQGAFGYVLPIISFILAWIETWFLDFKVLPQEAEEEN

SEQ ID NO: 52778 - protein, 302 aa, Homo sapiens
MSLPPIRLPSPYGSDRLVQLAARLRPALCDTLITVGSQEFPAHSLVLAGVSQQLGRRGQWALGEGISPSTFAQLLNFVYGESVELQPGELRPLQEAARALGVQSLEEACWRARGDRAKKPDPGLKKHQEEPEKPSRNPERELGDPGEKQKPEQVSRTGGREQEMLHKHSPPRGRPEMAGATQEAQQEQTRSKEKRLQAPVGQRGADGKHGVLTWLRENPGGSEESLRKLPGPLPPAGSLQTSVTPRPSWAEAPWLVGGQPALWSILLMPPRYGIPFYHSTPTTGAWQEVWREQRRTCNLCGS

SEQ ID NO: 52779 - protein, 77 aa, Homo sapiens
MVFGGVCPSVTSIIAESLQGWNLVQLSFAATTPVLADKKKYPYFFRTVPSDNAVNPAILKLLKHYQWKRVGTLTQDV

SEQ ID NO: 52780 - protein, 22 aa, Homo sapiens
MLETYNHLVSLEIPSSKPKLIA

SEQ ID NO: 52781 - protein, 113 aa, Homo sapiens
MAEQHGAPEQAAAGKSHGDLGGSYKVILYELENFQGKRCELSAECPSLTDSLLEKVGSIQVESGPWLAFESRAFRGEQFVLEKGDYPRWDAWSNSRDSDSLLSLRPLNIVGWL

SEQ ID NO: 52782 - protein, 783 aa, Homo sapiens [sequence omitted]

SEQ ID NO: 52783 - protein, 273 aa, Homo sapiens
MPGMPGRARPGAASLPGQGPRRPARRGEEPSRRHRLTYPRRGDGARRSPARAPDPRRRGSGAGTLWFNAFKRTNTILHHLRMSKHTDAAEEVLLEKKGCTGVITLNRPKFLNALTLNMIRQIYPQLKKWEQDPETFLIIIKGAGGKAFCAGGDIRVISEAEKAKQKIAPVFFREEYMLNNAVGSCQKPYVALIHGITMGGGVGLSVHGQFRVATEKCLFAMPETAIGLFPDVGGGYFLPRLQGKLGYFLALTGFRLKGRDVYRAGIATHFVDS

SEQ ID NO: 52784 - protein, 164 aa, Homo sapiens
MAGPGVPGAPAARWKRHIVRQLRLRDRTQKALFLELVPAYNHLLEKAELLDKFSKKLQPEPNSVTPTTHQGPWEESELDSDQVPSLVALRVKWQEEEEGLRLVCGEGAPLHPGHPCAGPGHLPEPQPRPTAPAQLFPRQHTQGHRPACQQHPPGVQGRWLQVWF

SEQ ID NO: 52785 - protein, 91 aa, Homo sapiens
MIFWSFVAGVVTFYCSLGPDSLLPNIFFTIKYKPKQLGLQELFPQGHSCAVCGKVKCKRHRPSLLLENYQPWLDLKISSKVDASLSEGCDR

SEQ ID NO: 52786 - protein, 49 aa, Homo sapiens
TIVDILERFTEAEVMVMGDVTYGACCVDDFTARALGADFLVHYGHSCLS

SEQ ID NO: 52787 - protein, 128 aa, Homo sapiens
MSDKSDLKAELERKKQRLAQIREEKKRKEEERKKKEADMQQKKEPVQDDSDLDRKRRETEALLQSIGISPEPPLVPTPMSPSSKSVSTPSEAGSQDSGDLGPLTRTLQWDTDPSVLQLQSDSELGYMS

SEQ ID NO: 52788 - protein, 93 aa, Homo sapiens
MNRLRKHLRAYHRCLYYTRFQLLSWSVCGGNKDPWVQELMSCLDLKECGHAYSGIVAHQKHLLPTSPPISQASEGASSDIHTPAQMLLSTLQS

SEQ ID NO: 52789 - protein, 113 aa, Homo sapiens
MQGSSLWLSLTFRSARVLSRARFFEWQSPGLPNTAAMENGTGPYGEERPREVQETTVTEGAAKIAFPSANEMCCDHRVCSHSAWGQRNPDQGSRREGHAKSGRGLVRARGGKG

SEQ ID NO: 52790 - protein, 179 aa, Homo sapiens
MDQRQRRILGQPLSIPTSQPKQKRTSMISFFSKVSWKLRFQKREPLKNVFFILAERARDPSAKKRHMAMRNLGTMAYEAPDKVRKYKKIVLDLLVYGLYDPVNLEVIHESMKTLTVVLGKIQGKGLGSFFIDITLQTRTLLDDACKTTFQACSPYLKLKEEYSFQSEEDQRNTKLYQQL

SEQ ID NO: 52791 - protein, 148 aa, Homo sapiens
MMQESGTETKSNGSAIQNGSGGSNHLLECGGLREGRSNGETPAVDIGAADLAHAQQQQQQALQVARQLLLQQQQQQQVSGLKSPKRNDKQPALQVPVSVAMMTPQVITPQQMQQILQQQVLSPQQLQVLLQQQQALMLQQQQLQEFYK

SEQ ID NO: 52792 - protein, 22 aa, Homo sapiens
MGLTISSLFSRLFGKKQMRILM

SEQ ID NO: 52793 - protein, 190 aa, Homo sapiens
MAEAPSSVRDDLKDVSSQRASSVNQMRPGEGQAHRELQILPRVPALSRRQGEDFLLHKSIDVTGDPKSLRPKQTLEKDLKENREENPGLTSPEPQLPKSPTDLVRAKEGKDPPKIASVENVDADTPSACVVEREASTHSGNRGDALNLSSPKRSKPDASSISQEEPQGEATPVGNRESPGQAGMNSIHSP

SEQ ID NO: 52794 - protein, 867 aa, Homo sapiens
EKKMETSHNQCQELKARYERATSETKTKHEEILQNLQKTLLDTEDKLKGAREENSGLLQELEELRKQADKAKSLTYLLTSAKKEIELMSEELRGLKSEKQLLSQEGNDLKLENGSLLSKLVELEAKIALLQGDQQKLWSVNETLNLEKEKFLEEKQDAEKYYEQEHLNKEALAVEREKLLKEINVVQEELLKINVENDSLQASKVSMQALIEELQLSKDTLIAKTEKDQEEKDHLEDQIKKLITENFILAKDKDDIIQKLQRSYEELVKDQKALVQETEDLTAEKKSALEKLSNLDNTCIALKVERDNVLQNNRNLQLETDMLLQDQEKLNASLQAALQVKQLLRSEASGLRAQLDDASKALRKAELETVQLEAANTSLTKLLEEIKARRAVTDSECIQLLHEKETLAASERRLLAEKEELLSENRIITEKLHKCLEEAAHTEMSLNEKITYLTSEKEMASQKMTELKKQQDSLLKEKSSLETQNGALLAERENSIKAIGDLKRQCDQESANRSLVVQENMKLLGNIDALKKELQERKKENQELVASKCDLSLMLKEAQNTKKNLEKEHTHILQAKESLDAQLNTCCSEKNILLRDGLNLQEECHKLSKEIQEMQQSLILEQEARAKESESSLYENNQLHGRMVLLEQEVEELRVCIEELQSEKFVLLQEKSKSEQELAEIIEEKELLTAEAAQLAAHIKTLKSDFAALSKSKAELQELHSCLTKILDDLQRNHEVTLAEKAQVMQDNQNLLAEKSEMMLEKDELLKEKETLAESYFILQKEISQLAKTNSHISANLLESQNENRTLRKDKNKLTLKIRELETLQSFTAAQTAEDAMQIMEQMTKEKTETLASLEDTKQTNAKLQNE

SEQ ID NO: 52795 - protein, 224 aa, Homo sapiens
MASLSRPSLPSCLCSFLLLLLLQVSSSYAGQFRVIGPRHPIRALVGDEVELPCRISPGKNATGMEVGWYRPPFSRVVHLYRNGKDQDGDQAPEYRGRTELLKDAIGEGKVTLRIRNVRFSDEGGFTCFFRDHSYQEEAAMELKVEDPFYWVSPGVLVLLAVLPVLLLQITLGLVFLCLQYRLRGKLRAEIENLHRTFESFGVLGPQVKEPKKTGQFLEELRNPF

SEQ ID NO: 52796 - protein, 203 aa, Homo sapiens
  MOD_RES (1)..(1): Any amino acid
XFHDTLHVSGVYNGAGGDTHRAMLPSPLNVRLEAPAGMGEQLTETFALDTNTGSFLHTLEGPRFRASQCIYAHRTLPHVLAFRVSIARLAPGSGPITLLLRSAFSPESPDLDLHQGPDFQGARYLYGHTLTPEQPGGPQQEVHMLWTPAPPDLTLGEVPCPSPRPQDTSAMASVLGASPMGAVRNATGATSSGTRTSGCSRVS

SEQ ID NO: 52797 - protein, 101 aa, Homo sapiens
  MOD_RES (1)..(1): Any amino acid
XDRESALKKKHMISMHPITRKDASTSMTMENSLILEDPFECNDSGEDCTHSSTITQRLLTHSGKKPYVSKQCGKSLRNLFSPKPHKQIHTKGNPTSSWMSG

SEQ ID NO: 52798 - protein, 62 aa, Homo sapiens
MAGEQKPSSNLLEQFILLAKGTSGSALTALISQVLEAPGVYVFGELLELANVQEPTRRACQN

SEQ ID NO: 52799 - protein, 207 aa, Homo sapiens
MEVEAALGCSGQGRGCGGVAPAGRGRERASERGTRVRISKGLSGAGGSVRKADFQLNSHLSTLANIHKIYHTLNKLNLTEDIGQDDHQTGSLRSCSSSDCFNKVMPPRKKRRPASGDDLSAKKSRHDSMYRKYDSTRIKTEEEAFSSKRCLEWFYEYAGTDDVVGPEGMEKFCEDIGVEPENMESRTVARLECNGMMSAHCNLCLPG

SEQ ID NO: 52800 - protein, 12 aa, Homo sapiens
EDGTGSPSPSLA

SEQ ID NO: 52801 - protein, 111 aa, Homo sapiens
MSPGLLTTRKEALMAFRDVAVAFTQKEWKLLSSAQRTLYREVMLENYSHLVSLGIAFSKPKLIEQLEQGDEPWREENEHLLDLCPESRSVTQAGVQWHDLGSLQPLPPVFK

SEQ ID NO: 52802 - protein, 708 aa, Homo sapiens
  MOD_RES (1)..(1): Any amino acid
XQTVSLQEQNTTLQTQNAKLQVENSTLNSQSTSLMNQNAQLLIQQSSLENENESVIKEREDLKSLYDSLIKDHEKLELLHERQASEYESLISKHGTLKSAHKNLEVEHRDLEDRLNHTYSQLLKETEVLQTDHKNLKSLLNNSKLEQTRLEAEFSKLKEQYQQLDITSTKLNNQCELLSQLKGNLEEENRHLLDQIQTLMLQNRTLLEQNMESKDLFHVEQRQYIDKLNELRRQKEKLEEKIMDQYKFYDPSPPRRRGNWITLKMRKLIKSKKDINRERQKSLTLTPTRSDSSEGFLQLPHQDSQDSSSVGSNSLEDGQTLGTKKSSTMNDLVQSMVLAGQWTGSTENLEVPDDISTGKRRKELGAMAFSTTAINFSTVNSSAGFRSKQLVNNKDTTSFEDISPQGVSDDSSTGSRVHASRPASLDSGRTSTSNSNNNASLHEVKAGAVNNQSRPQSHSSGEFSLLHDHEAWSSSGSSPIQYLKRQTRSSPVLQHKISETLESRHHKIKTGSPGSEVVTLQQFLEESNKLTSVQIKSSSQENLLDEVMKSLSVSSDFLGKDKPVSCGLARSVSGKTPGDFYDRRTTKPEFLRPGPRKTEDTYFISSAGKPTPGTQGKIKLVKESSLSRQSKDSNPYATLPRASSVISTAEGTTRRTSIHDFLTKDSRLPISVDSPPAAADSNTTAASNVDKVQESRNSKSRSREQQSS

SEQ ID NO: 52803 - protein, 72 aa, Homo sapiens
MNQKLLKLENLLRFHTIYRQLHSLCQRRALRQWRHGFSSAYPVWTAQLCAWPWPTDVLTGAALSQYRLLVTK

SEQ ID NO: 52804 - protein, 135 aa, Homo sapiens
MGAPLLSPGWGAGAAGRRWWMLLAPLLPALLLVRPAGALVEGLYCGTRDCYEVLGVSRSAGKAEIARAYRQLARRYHPDRYRPQPGDEGPGRTPQSAEEAFLLVATAYETLKSSCICPRGLGVEWTPAEAPQLFL

SEQ ID NO: 52805 - protein, 48 aa, Homo sapiens
FCAFLGSWLVPFAYLTVLDLSKSLSAALLTAALLTFGPSLPPGGSGSA

SEQ ID NO: 52806 - protein, 1079 aa, Homo sapiens
MMSAQELVACLCREGEQHLALGELPLATAFYLAAFSCHAPSALQSVRTALAQARGAAVVATLESWCRGDSQIPAIHWDGMAVVSLTGSLASAFLGALCPDHPAAILHLLAGLLARGRHEEVVQRCSALLDSHAQQVLELRLTRALAWVLSGVQAADGVAAYLQAFASSADRTVAFIRTHQRPHLPALLSALQDYLSGHPEAGHSAGQQETGGQRLLAALDPRGTRSDTLSPEALLHSGRFEDCLAACSRALEAHPTGSEPQGERRAALLVTRAASAFFLDGRAQDVFWNLQEAFRESPSGARRQFQAVFSVQDQERVRAQAQEAADVGFARFQEAVRNHPELREDAGRELLAPVTRALRVLLRLAPAGARPALGARLAECLLLAGDAAGARAMCERLLRPARPEDPAGDRAGDRAPLLALRGFCALHAGDSRRAMEDFQTVVEQGAPHPGGCVRALCGRGLLRVLAGSAFLGTLDYVTACRLRPEEALLAAKAYVPWNQRGLLLVVLREEARGMLQRSPRAGPSRAQGRREAAETGGPTTQEGVACGVHQLATLLMELDSEDEASRLLAADALYRLGRLEETHKALLVALSRRPQAAPVLARLALLQLRRGFFYDANQLVKKLVQSGDTACLQPTLDVFCHEDRQLLQGHCHARALAILRARPGGADGRVHTKEAIAYLSLAIFAAGSQASESLLARARCYGFLGQKKTAMFDFNTVLRAEPGNVQALCGRALVHLALDQLQEAVDDIVSALKLGPGTVVPELRSLKPEAQALITQGLYSHCRALLSQLPDTGAPLEDKDTQGLLAVGEALIKIDSGQPHWHLLLADILMAQGSYEEAGTHLEKALHRAPTSEAARARLGLLQLKKGDVPGAARDLQSLAEVDAPDLSCLLHLLEASERQSLAQAAAQEAGTLLDAGQPRQALGYCSLSVLASGSSACHLRLRATCLAELQEFGRALRDLDHVLQEALGDGDLPRRAEDFCRQGRLLLSLGDEAAAAGAFAQALKLAPSLAQNSLCRQPGRAPTARMFLLRGQCCLEEQRHAEAWTAVESGLLVDPDHRGLKRLKARIRREASSGCWLQ

SEQ ID NO: 52807 - protein, 86 aa, Homo sapiens
MIARRNPEPLRFLPDEARSLPPPKLTDPRLLYIGFLGYCSGLIDNLIRRRPIATAGGDIGLCCLSPGSLSDTPAVFAVGSSAATTH

SEQ ID NO: 52808 - protein, 374 aa, Homo sapiens
MHRKHLQEIPDLSSNVATSFTWGWDSSKTSELLSGMGVSALEKEEPDSENIPQELLSNLGHPESPPRKRLKSKGSDKDFVIVRRPKLNRENFPGVSWDSLPDELLLGIFSCLCLPELLKVSGVCKRWYRLASDESLWQTLDLTGKNLHPDVTGRLLSQGVIAFRCPRSFMDQPLAEHFSPFRVQHMDLSNSVIEVSTLHGILSQCSKLQNLSLEGLRLSDPIVNTLAKNSNLVRLNLSGCSGFSEFALQTLLSSCSRLDELNLSWCFDFTEKHVQVAVAHVSETITQLNLSGYRKNLQKSDLSTLVRRCPNLVHLDLSDSVMLKNDCFQEFFQLNYLQHLSLSRCYDIIPETLLIQQKNNANLTSEPTGKQSQQ

SEQ ID NO: 52809 - protein, 692 aa, Homo sapiens
MLTFFLVSGGSLWLFVEFVLSLLEKMQTQEILRILRLPELGDLGQFFRSLSATTLVSMGALAAILAYWFTHRPKALQPPCNLLMQSEEVEDSGGARRSVIGSGPQLLTHYYDDARTMYQVFRRGLSISGNGPCLGFRKPKQPYQWLSYQEVADRAEFLGSGLLQHNCKACTDQFIGVFAQNRPEWIIVELACYTYSMVVVPLYDTLGPGAIRYIINTADISTVIVDKPQKAVLLLEHVERKETPGLKLIILMDPFEEALKERGQKCGVVIKSMQAVEDCGQENHQAPVPPQPDDLSIVCFTSGTTGNPKGAMLTHGNVVADFSGFLKVTESQWAPTCADVHISYLPLAHMFERMVQSVVYCHGGRVGFFQGDIRLLSDDMKALCPTIFPVVPRLLNRMYDKIFSQANTPLKRWLLEFAAKRKQAEVRSGIIRNDSIWDELFFNKIQASLGGCVRMIVTGAAPASPTVLGFLRAALGCQVYEGYGQTECTAGCTFTTPGDWTSGHVGAPLPCNHIKLVDVEELNYWACKGEGEICVRGPNVFKGYLKDPDRTKEALDSDGWLHTGDIGKWLPAGTLKIIDRKKHIFKLAQGEYVAPEKIENIYIRSQPVAQIYVHGDSLKAFLVGIVVPDPEVMPSWAQKRGIEGTYADLCTNKDLKKAILEDMVRLGKESGLHSFEQDLPQCLIQIKVFSKY

SEQ ID NO: 52810 - protein, 118 aa, Homo sapiens
MASHVECRPLGVFECELCTLTAPYSYVGQKPPNTQSMVLLEESYVMKDPFTSDKDRFLVLGSCCSLCSRLECSLFYSKRFCLPCVRENINAFPQEIRQDLEKRKAPSKRTPSQPGSRT

SEQ ID NO: 52811 - protein, 84 aa, Homo sapiens
MTMLQESFSFDDLSVDFTQKEWQLLDPSQKNLYKDVMLENYSSLVSLGYEVMKPDVIFKLEQGEEPWVGDGEIPSSDSPGTSIV

SEQ ID NO: 52812 - protein, 121 aa, Homo sapiens
  MOD_RES (1)..(1): Any amino acid
XKPKLPENYTDETWQKLKEAVEAIQNSTSIKYNLEELYQAVENLCSYKISANLYKQLRQICEDHIKAQIHQFREDSLDSVLFLKKIDRCWQNHCRQMIMIRSIFLFLDRTYVLQNSMLPSI

SEQ ID NO: 52813 - protein, 216 aa, Homo sapiens
  MOD_RES (1)..(1): Any amino acid
XIQDSFASPDLPLLTCLTQDQEFAPDSLFHQSELSFAPLRGIPDKSEDTEWSSRPSEVSEALFQATAEVASDLASSRFSVSQHPLIGSTAVGSQCPFLPSEQGNNEETISSVDELKIPKDCDRYDDLCSYMSWKTRKDTQWPENNLADKDQVSVATSFDITDENIATKRSDHFDAARSYGQYWTQEDSSKQAETYLTTNKRVGISLFRSQNVEDVS

SEQ ID NO: 52814 - protein, 105 aa, Homo sapiens
MAELQQLRVQEAVESMVKSLERENIRKMQVSGPRPSRGAANVKDQKGEDFRPPRWPGHACFSCAQPRFTQRGFLHCSSLSPAMPLCVSVLLLSRRSHVPVQRQLL

SEQ ID NO: 52815 - protein, 97 aa, Homo sapiens
MVEEENIRVVRCGGSELNFRRAVFSADSKYIFCVSGDFVKVYSTVTEECVHILHGHRNLVTGIQLNPNNHLQSQPTWKLLIKDGFALPFTFIPKEIK

SEQ ID NO: 52816 - protein, 62 aa, Homo sapiens
MPEIRVTPLGACPVLSWNLVLPPGRGSRAPSSTDTRTGFHVLPHGVSASSEGAPRPGVDTVL

SEQ ID NO: 52817 - protein, 85 aa, Homo sapiens
PRVEAKPEVQSQPPRVREQRPRERPGFPPRGPRPVSALFLFSGRGDMEQNDSDNRRIIRYPDSHQLFVGNLPHDIDENELKEFFM

SEQ ID NO: 52818 - protein, 727 aa, Homo sapiens
MPPQYGQQGVSGYCQQGQQPYYSQQPQPPHLPPQAQYLPSQSQQRYQPQQDMSQEGYGTRSQPPLAPGKPNHEDLNLIQQERPSSLPDLSGSIDDLPTGTEATLSSAVSASGSTSSQGDQSNPAQSPFSPHASPHLSSIPGGPSPSPVGSPVGSNQSRSGPISPASIPGSQMPPQPPGSQSESSSHPALSQSPMPQERGFMAGTQRNPQMAQYGPQQTGPSMSPHPSPGGQMHAGISSFQQSNSSGTYGPQMSQYGPQGNYSRPPAYSGVPSASYSGPGPGMGISANNQMHGQGPSQPCGAVPLGRMPSAGMQNRPFPGNMSSMTPSSPGMSQQGGPGMGPPMPTVNRKAQEAAAAVMQAAANSAQSRQGSFPGMNQSGLMASSSPYSQPMNNSSSLMNTQAPPYSMAPAMVNSSAASVGLADMMSPGESKLPLPLKADGKEEGTPQPESKSKDSYSSQGISQPPTPGNLPVPSPMSPSSASISSFHGDESDSISSPGWPKTPSSPKSSSSTTTGEKITKVYELGNEPERKLWVDRYLTFMEERGSPVSSLPAVGKKPLDLFRLYVCVKEIGGLAQVNKNKKWRELATNLNVGTSSSAASSLKKQYIQYLFAFECKIERGEEPPPEVFSTGDTKKQPKLQPPSPVVQMEPRACDTGGSGRKASWSRPAPRARAGGSRHTQASGGRRQRHPGLQKPLDSLPPTQQVASPIPVPSLGKVSGNIFVVKGK

SEQ ID NO: 52819 - protein, 242 aa, Homo sapiens
MMDLRNTPAKSLDKFIEDYLLPDTCFRMQINHAIDIICGFLKERCFRGSSYPVCVSKVVKCKKKLGKLPPQYALELLTVYAWERGSMKTHFNTAQGFRTVLELVINYQQLCIYWTKYYDFKNPIIEKYLRRQLTKPRPVILDPADPTGNLGGGDPKGWRQLAQEAEAWLNYPCFKNWDGSPVSSWILLAESNSADDETDDPRRYQKYGYIGTHEYPHFSHRPSTLQAASTPQAEEDWTCTIL

SEQ ID NO: 52820 - protein, 62 aa, Homo sapiens
NKQDLPNAMNAAEITDKLGLHSLRHRNWYIQATCATSGDGLYEGLDWLANQLKNKNGCSGAV

SEQ ID NO: 52821 - protein, 106 aa, Homo sapiens
MMEEEELEFVEELEAVLQLTPEVQLAIEQVFPSQDPLDRADFNAVEYINTLFPTEQSLANIDEVVNKIRLKIRRLDDNIRTVVRGQTNVGQDGRQNSLKPYQLFGK

SEQ ID NO: 52822 - protein, 141 aa, Homo sapiens
MTEVVPSSALSEVSLRLLCHDDIDTVKHLCGDWFPIEYPDSWYRDITSNKKFFSLAATYRGAIVGMIVAEIKNRTKIHKEDGDILASNFSVDTQVAYILSLGVVKEFRKHGIGSLLLESLKDHISTTAQDHCKAIYLHVLT

SEQ ID NO: 52823 - protein, 76 aa, Homo sapiens
  MOD_RES (1)..(1): Any amino acid
XLKSRDLQKLSISSDNMQHAYWELKREMSNLHLVTQVQAELLRKLKTSTAIKKALSQNRAMRSTAPVLGTHGVKDK

SEQ ID NO: 52824 - protein, 628 aa, Homo sapiens
LAELEGAGERGSGGPRGPAERASGVSAAAPGERAGDGAPSRAVAGASAMFAGLQDLGVANGEDLKETLTNCTEPLKAIEQFQTENGVLLPSLQSALPFLDLHGTPRLEFHQSVFDELRDKLLERVSAIASEGKAEERYKKLEDLLEKSFSLVKMPSLQPVVMCVMKHLPKVPEKKLKLVMADKELYRACAVEVKRQIWQDNQALFGDEVSPLLKQYILEKESALFSTELSVLHNFFSPSPKTRRQGEVVQRLTRMVGKNVKLYDMVLQFLRTLFLRTRNVHYCTLRAELLMSLHDLDVGEICTVDPCHKFTWCLDACIRERFVDSKRARELQGFLDGVKKGQEQVLGDLSMILCDPFAINTLALSTVRHLQELVGQETLPRDSPDLLLLLRLLALGQGAWDMIDSQVFKEPKMEVELITRFLPMLMSFLVDDYTFNVDQKLPAEEKAPVSYPNTLPESFTKFLQEQRMACEVGLYYVLHITKQRNKNALLRLLPGLVETFGDLAFGDIFLHLLTGNLALLADEFALEDFCSSLFDGFFLTASPRKENVHRHALRLLIHLHPRVAPSKLEALQKALEPTGQSGEAVKELYSQLGEKLEQLDHRKPSPAQAAETPALELPLPSVPAPAPL

SEQ ID NO: 52825 - protein, 9 aa, Homo sapiens
MAEEKKLKL

SEQ ID NO: 52826 - protein, 320 aa, Homo sapiens
MKGDFRKKKSEARTPLEQEIFNLLHKNKQPVTDPLLTPVEKASLRAMSLEEAKMRRAELQRARALQSYYEAKARREKKIKSKKYHKVVKKGKAKKALKEFEQLRKVNPAAALEELEKIEKARMMERMSLKHQNSGKWAKSKAIMAKYDLEARQAMQEQLSKNKELTQKLQVASESEEEEGGTEDVEELLVPDVVNEVQMNADGPNPWMLRSCTSDTKEAATQEDPEQLPELEAHGVSESEGEERPVAEEEILLREFEERRSLRKRSELSQDAEPAGSQETKDSGSQEVLSELRVLSQKLKENHQSRKQKASSEGTIPQVQ

SEQ ID NO: 52827 - protein, 43 aa, Homo sapiens
MELRVGNRYRLGRKIGSGSFGDIYLVEMGFHRVSQDGLNLLTL

SEQ ID NO: 52828 - protein, 165 aa, Homo sapiens
  MOD_RES (1)..(1): Any amino acid
XDNAPEFNSSEYSVAITELAQVGFALPLFIQVVDKDEGLNSMFEVYLVGNNSHHFIISPTSVQGKADIRIRVAIPLDYETVDRYDFDLFANESVPDHVGYAKVKITLINENDNRPIFSQPLYNISLYENVTVGTSVLTVLWEKFFCSNSSRFSSAQLVVSSWNQL

SEQ ID NO: 52829 - protein, 734 aa, Homo sapiens
MGVMPEIAQAVEEMDWLLPTDIQAESIPLILGGGDVLMAAETGSGKTGAFSIPVIQIVYETLKDQQEGKKGKTTIKTGASVLNKWQMNPYDRGSAFAIGSDGLCCQSREVKEWHGCRATKGLMKGKHYYEVSCHDQGLCRVGWSTMQASLDLGTDKFGFGFGGTGKKSHNKQFDNYGEEFTMHDTIGCYLDIDKGHVKFSKNGKDLGLAFEIPPHMKNQALFPACVLKNAELKFNFGEEEFKFPPKDGFVALSKAPDGYIVKSQHSGNAQVTQTKFLPNAPKALIVEPSRELAEQTLNNIKQFKKYIDNPKLRELLIIGGVAARDQLSVLENGVDIVVGTPGRLDDLVSTGKLNLSQVRFLVLDEADGLLSQGYSDFINRMHNQIPQVTSDGKRLQVIVCSATLHSFDVKKLSEKIMHFPTWVDLKGEDSVPDTVHHVVVPVNPKTDRLWERLGKSHIRTDDVHAKDNTRPGANSPEMWSEAIKILKGEYAVRAIKEHKMDQAIIFCRTKIDCDNLEQYFIQQGGGPDKKGHQFSCVCLHGDRKPHERKQNLERFKKGDVRFLICTDVAARGIDIHGVPYVINVTLPDEKQNYVHRIGRVGRAERMGLAISLVATEKEKVWYHVCSSRGKGCYNTRLKEDGGCTIWYNEMQLLSEIEEHLNCTISQVEPDIKVPVDEFDGKVTYGQKRAAGGGSYKGHVDILAPTVQELAALEKEAQTSFLHLGYLPNQLFRTF

SEQ ID NO: 52830 - protein, 1479 aa, Homo sapiens
MSSGNASYRCSMSSSADFSDEDDFSQKSGSASPAPGDTLPWNLPKHERSKRKIQGGSVLDPAERAVLRIADERDKVQKKTFTKWINQHLMKVRKHVNDLYEDLRDGHNLISLLEVLSGDTLPREKGRMRFHRLQNVQIALDYLKRRQVKLVNIRNDDITDGNPKLTLGLIWTIILHFQISDIHVTGESEDMSAKERLLLWTQQATEGYAGIRCENFTTCWRDGKLFNAIIHKYRPDLIDMNTVAVQSNLANLEHAFYVAEKIGVIRLLDPEDVDVSSPDEKSVITYVSSLYDAFPKVPEGGEGIGANDVEVKWIEYQNMVNYLIQWIRHHVTTMSERTFPNNPVELKALYNQYLQFKETEIPPKETEKSKIKRLYKLLEIWIEFGRIKLLQGYHPNDIEKEWGKLIIAMLEREKALRPEVERLEMLQQIANRVQRDSVICEDKLILAGNALQSDSKRLESGVQFQNEAEIAGYILECENLLRQHVIDVQILIDGKYYQADQLVQRVAKLRDEIMALRNECSSVYSKGRILTTEQTKLMISGITQSLNSGFAQTLHPSLTSGLTQSLTPSLTSSSMTSGLSSGMTSRLTPSVTPAYTPGFPSGLVPNFSSGVEPNSLQTLKLMQIRKPLLKSSLLDQNLTEEEINMKFVQDLLNWVDEMQVQLDRTEWGSDLPSVESHLENHKNVHRAIEEFESSLKEAKISEIQMTAPLKLTYAEKLHRLESQYAKLLNTSRNQERHLDTLHNFVSRATNELIWLNEKEEEEVAYDWSERNTNIARKKDYHAELMRELDQKEENIKSVQEIAEQLLLENHPARLTIEAYRAAMQTQWSWILQLCQCVEQHIKENTAYFEFFNDAKEATDYLRNLKDAIQRKYSCDRSSSIHKLEDLVQESMEEKEELLQYKSTIANLMGKAKTIIQLKPRNSDCPLKTSIPIKAICDYRQIEITIYKDDECVLANNSHRAKWKVISPTGNEAMVPSVCFTVPPPNKEAVDLANRIEQQYQNVLTLWHESHINMKSVVSWHYLINEIDRIRASNVASIKTMLPGEHQQVLSNLQSRFEDFLEDSQESQVFSGSDITQLEKEVNVCKQYYQELLKSAEREEQEESVYNLYISEVRNIRLRLENCEDRLIRQIRTPLERDDLHESVFRITEQEKLKKELERLKDDLGTITNKCEEFFSQAAASSSVPTLRSELNVVLQNMNQVYSMSSTYIDKLKTVNLVLKNTQAAEALVKLYETKLCEEEAVIADKNNIENLISTLKQWRSEVDEKRQVFHALEDELQKAKAISDEMFKTYKERDLDFDWHKEKADQLVERWQNVHVQIDNRLRDLEGIGKSLKYYRDTYHPLDDWIQQVETTQRKIQENQPENSKTLATQLNQQKMLVSEIEMKQSKMDECQKYAEQYSATVKDYELQTMTYRAMVDSQQKSPVKRRRMQSSADLIIQEFMDLRTRYTALVTLMTQYIKFAGDSLKRLEEEEKSLEEEK

SEQ ID NO: 52831 - protein, 28 aa, Homo sapiens
RTSLPSPMFSRNDFSIWSILRKCIGMTR

SEQ ID NO: 52832 - protein, 122 aa, Homo sapiens
  MOD_RES (1)..(1): Any amino acid
XENSLLHLKTVKHELLPSVNDITAVGPAHFYATNDHYFSDPFLKYLETYLNLHWANVVYYSPNEVKVVAEGFDSANGINISPDDKYIYVADILAHEIHVLEKHTNMNLTQLKILTISHLEGT

SEQ ID NO: 52833 - protein, 74 aa, Homo sapiens [sequence omitted]

SEQ ID NO: 52834 - protein, 37 aa, Homo sapiens
  MOD_RES (1)..(1): Any amino acid
XECSSFLHTLARTDITSVYRLSGFESIQNPPNDLSGE

SEQ ID NO: 52835 - protein, 318 aa, Homo sapiens
YTVLEELSPGTIVANITAEDPDDEGFPSHLLYSITTVSKYFMINQLTGTIQVAQRIDRDAGELRQNPTISLEVLVKDRPYGGQENRIQITFIVEDVNDNPATCQKFTFSIMVPERTAKGTLLLDLNKFCFDDDSEAPNNRFNFTMPSGVGSGSRFLQDPAGSGKIVLIGDLDYENPSNLAAGNKYTVIIQVQDVAPPYYKNNVYVYILTSPENEFPLIFDRPSYVFDVSERRPAQGHLSGPEEKRLLSICMVRAVCHHFGLHIASGSPRVPGRPIGQSHPQTLPLQDWEEQGTSDKERRNEDCRERRRGGNYPDEHYL

SEQ ID NO: 52836 - protein, 189 aa, Homo sapiens
MEDYTKIEKIGEGTYGVVYKGRHKTTGQVVAMKKIRLESEEEGVPSTAIREISLLKELRHPNIVSLQDVLMQDSRLYLIFEFLSMDLKKYLDSIPPGQYMDSSLVKSYLYQILQGIVFCHSRRVLHRDLKPQNLLIDDKGTIKLADFGLARAFGIPIRVYTHEVVTLWYRSPEVLLGSARYSTPVDIWS

SEQ ID NO: 52837 - protein, 201 aa, Homo sapiens
MASFSMDCSPSFCVPGLWNPFIIFRSLGLAAMPEKRPFERLPADVSPINYSLCLKPDLLDFTFEGKLEAAAQVRQATNQIVMNCADIDIITASYAPEGDEEIHATGFNYQNEDEKVTLSFPSTLQTGTGTLKIDFVGELNDKMKGFYRSKYTTPSGEVRYAAVTQFEATDARRAFPCWDEPAIKATFDISLVVPKDRVALS

SEQ ID NO: 52838 - protein, 127 aa, Homo sapiens
EAITEYTKAVYTLTSLYRQYTSLLGKMNSEEEDEVWQVIIGARAEMTSKHQEYLKLETTWMTAVGLSEMAAEAAYQTEVFSSKLEEEDACHSPLPVNIVLKVLVNAVRSKCSTDELIKCIYPDGEIH

SEQ ID NO: 52839 - protein, 896 aa, Homo sapiens
MKGKERSPVKAKRSRGGEDSTSRGERSKKLGGSGGSNGSSSGKTDSGGGSRRSLHLDKSSSRGGSREYDTGGGSSSSRLHSYSSPSTKNSSGGGESRSSSRGGGGESRSSGAASSAPGGGDGAEYKTLKISELGSQLSDEAVEDGLFHEFKRFGDVSVKISHLSGSGSGDERVAFVNFRRPEDARAAKHARGRLVLYDRPLKIEAVYVSRRRSRSPLDKDTYPPSASVVGASVGGHRHPPGGGGGQRSLSPGGAALGYRDYRLQQLALGRLPPPPPPPLPRDLERERDYPFYERVRPAYSLEPRVGAGAGAAPFREVDEISPEDDQRANRTLFLGNLDITVTESDLRRAFDRFGVITEVDIKRPSRGQTSTYGFLKFENLDMSHRAKLAMSGKIIIRNPIKIGYGKATPTTRLWVGGLGPWVPLAALAREFDRFGTIRTIDYRKGDSWAYIQYESLDAAHAAWTHMRGFPLGGPDRRLRVDFADTEHRYQQQYLQPLPLTHYELVTDAFGHRAPDPLRGARDRTPPLLYRDRDRDLYPDSDWVPPPPPVRERSTRTAATSVPAYEPLDSLDRRRDGWSLDRDRGDRDLPSSRDQPRKRRLPEESGGRHLDRSPESDRPRKRHCAPSPDRSPELSSSRDRYNSDNDRSSRLLLERPSPIRDRRGSLEKSQGDKRDRKNSASAERDRKHRTTAPTEGKSPLKKEDRSDGSAPSTSTASSKLKSPSQKQDGGTAPVASASPKLCLAWQGMLLLKNSNFPSNMHLLQGDLQVASSLLVEGSTGGKVAQLKITQRLRLDQPKLDEVTRRIKVAGPNGYAILLAVPGSSDSRSSSSSAASDTATSTQRPLRNLVSYLKQKQAAGVISLPVGGNKDKENTGVLHAFPPSKLVEQRMKIWNSKL

SEQ ID NO: 52840 - protein, 1158 aa, Homo sapiens
MAQQANVGELLAMLDSPMLGVRDDVTAVFKENLNSDRGPMLVNTLVDYYLETSSQPALHILTTLQEPHDKHLLDRINEYVGKAATRLSILSLLGHVIRLQPSWKHKLSQAPLLPSLLKCLKMDTDVVVLTTGVLVLITMLPMIPQSGKQHLLDFFDIFGRLSSWCLKKPGHVAEVYLVHLHASVYALFHRLYGMYPCNFVSFLRSHYSMKENLETFEEVVKPMMEHVRIHPELVTGSKDHELDPRRWKRLETHDVVIECAKISLDPTEASYEDGYSVSHQISARFPHRSADVTTSPYADTQNSYGCATSTPYSTSRLMLLNMPGQLPQTLSSPSTRLITEPPQATLWSPSMVCGMTTPPTSPGNVPPDLSHPYSKVFGTTGGKGTPLGTPATSPPPAPLCHSDDYVHISLPQATVTPPRKEERMDSARPCLHRQHHLLNDRGSEEPPGSKGSVTLSDLPGFLGDLASEEDSIEKDKEEAAISRELSEITTAEAEPVVPRGGFDSPFYRDSLPGSQRKTHSAASSSQGASVNPEPLHSSLDKLGPDTPKQAFTPIDLPCGSADESPAGDRECQTSLETSIFTPSPCKIPPPTRVGFGSGQPPPYDHLFEVALPKTAHHFVIRKTEELLKKAKGNTEEDGVPSTSPMEVLDRLIQQGADAHSKELNKLPLPSKSVDWTHFGDEIRTLRDQLLLLHNQLLYERFKRQQHALRNRRLLRKVIKAAALEEHNAAMKDQLKLQEKDIQMWKVSLQKEQARYNQLQEQRDTMVTKLHSQIRQLQHDREEFYNQSQELQTKLEDCRNMIAELRIELKKANNKVCHTELLLSQVSQKLSNSESVQQQMEFLNRQLLVLGEVNELYLEQLQNKHSDTTKEVEMMKAAYRKELEKNRSHVLQQTQRLDTSQKRILELESHLAKKDHLLLEQKKYLEDVKLQARGQLQAAESRYEAQKRITQVFELEILDLYGRLEKDGLLKKLEEEKAEAAEAAEERLDCCNDGCSDSMVGHNEEASGHNGETKTPRPSSARGSSGSRGGGGSSSSSSELSTPEKPPHQRAGPFSSRWETTMGEASASIPTTVGSLPSSKSFLGMKARELFRNKSESQCDEDGMTSSLSESLKTELGKDLGVEAKIPLNLDGPHPSPPTPDSVGQLHIMDYNETHHEHS

SEQ ID NO: 52841 - protein, 284 aa, Homo sapiens
MTFLIVTVAWAAHTRLFQVVGKTDDTLALLNLACMMTITFLPYTFSLMVTFPDVPLGIFLFCVCVIAIGVVQALIVGYAFHFPHLLSPQIQRSAHRALYRRHVLGIVLQGPALCFAAAIFSLFFVPLSYLLMVTVILLPYVSKVTGWCRDRLLGHREPSAHPVEVFSFDLHEPLSKERVEAFSDGVYAIVATLLILDICEDNVPDPKDVKERFSGSLVAALSATGPRFLAYFGSFATVGLLWFAHHSLFLHVRKATRAMGLLNTLSLAFVGGLPLAYQQTSAFA

SEQ ID NO: 52842 - protein, 177 aa, Homo sapiens
MRVHLGGLAGAAALTGALSFVLLAAAIGTDFWYIIDTERLERTGPGAQDLLGSINRSQPEPLSSHSGLWRTCRVQSPCTPLMNPFRLENVTVSESSRQLLTMVTLAGISVYIAYSAAAFREALCLLEEKALLDQVDISFGWSLALGWISFIAELLTGAAFLAAARELSLRRRQDQAI

SEQ ID NO: 52843 - protein, 489 aa, Homo sapiens
MGSAFLDLTQLELNRPTDVTLTLKDPHYPDHDLGIILLSVILTPKEGESRDVTMLMRKSWKRSSKELSENEVVGSYFSVKSLFWRTCGRPALPVLGFCRAELQNPYCKNVQFQTQSLRLSDLHRKSHLWRGIVSITLIEGRDLKAMDSNGLSDPYVKFRLGHQKYKSKIMPKTLNPQWREQFDFHLYEERGGVIDITAWDKDAGKRDDFIGRCQVDLSALSREQTHKLELQLEEGEGHLVLLVTLTASATVSISDLSVNSLEDQKEREEILKRYSPLRIFHNLKDVGFLQVKVIRAEGLMAADVTGKSDPFCVVELNNDRLLTHTVYKNLNPEWNKVFTFNIKDIHSVLEVTVYDEDRDRSADFLGKVAIPLLSIQNGEQKAYVLKNKQLTGPTKGVIYLEIDVIFNAVKASLRTLIPKEQKYIEEENRLSKQLLLRNFIRMKRCVMVLVNAAYYVNSCFDWDSPPRSLAAFVLFLFVVWNFELYMIPL

SEQ ID NO: 52844 - protein, 107 aa, Homo sapiens
MPKRGKKGAVAEDGDELRTEPEAKKSKTAAKKNDKEAAGEGPALYEDPPDQKTSPSGKPATLKICSWNVDGLRAWIKKKGLDWVKEEAPDILCLQETKCSENKLPAE

SEQ ID NO: 52845 - protein, 274 aa, Homo sapiens
  MOD_RES (1)..(1): Any amino acid
XQTQVSQRLATDLLSLMPSLTSGEVAHCAKSFALLKWLSLPLFEAFAQHVLNRAQDITLPHLCSVLLAFARLNFHPDQEDQFFSLVHEKLGSELPGLEPALQVDLVWALCVLQQAREAELQAVLHPEFHIQFLGEPPAPSTTGTGKLPGLVCLVPGGKSQKDQNTFQKLLHINATALLEYPEYSGPLLPASAVAPGPSALDRKVTPLQKELQETLKGLLGSADKGSLEVATQYGWVLDAEVLLDSDGEFLPVRDFVAPHLAQPTGSQSPPPGSK

SEQ ID NO: 52846 - protein, 333 aa, Homo sapiens
MWPLRVYTRKKREGQRLNLTPTPDLGSPAKAEAPPGSKRKGKVHGLSKIAEKAERSRQGGSGSGPFSPRLGVTGEKSLQENRSSEDTQDEKIASLRESVTDDLQVDSSSSNSELVSGLSLHHGMASSLLSYSVTDSYAEYKSFEESFPSPELFRKSDYLDWECPNLEEHMQWKNSTLLDTSKAVAIEKAPQFSNVSAIFSTSSEDYQKCHRKTVMTVADQNVSPKAKCASNSESDNAACEILLAEKTCPSTPEKTKKKKTNSSTPGKKNRGLLTSTPSSETAGFVFPANASEICCIIRTSPGTRQVKNKGVIVKKKKYSLPKDTPQDIIIKMA

SEQ ID NO: 52847 - protein, 113 aa, Homo sapiens
MKGLYFQQSSTDEEITFVFQEKEDLPVTEDNFVKLQVKACALSQINTKLLAEMKMKKDLFPVGREIAGIVLDVGSKVSFFQPDDEVVEVLSRLGAVAHVCNPSTLGGQGGRIT

SEQ ID NO: 52848 - protein, 114 aa, Homo sapiens
  MOD_RES (1)..(1): Any amino acid
XQLEKRDFGKRLSLDSSLVEYMDSNKYIEHLLTQLEEQHRSLWREKLAVARLQREVAQRTSEGAMHEKLIHELEEERHLRLQSEKRLQEVTLESERNRIQMRSLQQQFSRRRKM

SEQ ID NO: 52849 - protein, 298 aa, Homo sapiens
MGLHLRPYRVGLLPDGLLFLLLLLMLLADPALPAGRHPPVVLVPGDLGNQLEAKLDKPTVVHYLCSKKTESYFTIWLNLELLLPVIIDCWIDNIRLVYNKTSRATQFPDGVDVRVPGFGKTFSLEFLDPSKSSVGSYFHTMVESLVGWGYTRGEDVRGAPYDWRRAPTQWFRLQDPSHLTPAWLWPADENGPYFLALREMIEEMYQLYGGPVVLVAHSMGNMYTLYFLQRQPQAWKDKYIRAFVSLGAPWGGVAKTLRVLASGDNNRIPVIGPLKIREQQRSAVSTSWLLPYNYTWSP

SEQ ID NO: 52850 - protein, 37 aa, Homo sapiens
MAKIAKTHEDIEAQIREIQGKKAALDEAQGVGLDSTG

SEQ ID NO: 52851 - protein, 107 aa, Homo sapiens
  MOD_RES (1)..(1): Any amino acid
XEDIQAACTKDLTTVAVDVVLENDTVDDTVSSESLQSLFSEWDNPVFARYPEVAVDVSSGQAESLAVKIHNILYPYRFTKGMIHSMQIPTRSNRHKALVGKNYCLLL

SEQ ID NO: 52852 - protein, 55 aa, Homo sapiens
  MOD_RES (1)..(1): Any amino acid
XLLVRVLRNQTSISQWVPVCSRLIPVSPTQGQGDRALSRTSQGVRCLIHSIHGFL

SEQ ID NO: 52853 - protein, 531 aa, Homo sapiens
MSVVGIDLGFLNCYIAVARSGGIETIANEYSDRCTPACISLGSRTRAIGNAAKSQIVTNVRNTIHGFKKLHGRSFDDPIVQTERIRLPYELQKMPNGSAGVKIPSFFTDAERRSVMAAAQVAGLNCLRLMNETTAVALAYGIYKQDLPPLDEKPRNVVFIDMGHSAYQVLVCAFNKGKLKVLATTFDPYLGGRNFDEALVDYFCDEFKTKYKINVKENSRALLRLYQECEKLKKLMSANASDLPLNIECFMNDLDVSSKMNRAQFEQLCASLLARVEPPLKAVMEQANLQREDISSIEIVGGATRIPAVKEQITKFFLKDISTTLNADEAVARGCALQCAILSPAFKVREFSITDLVPYSITLRWKTSFEDGSGECEVFCKNHPAPFSKVITFHKKEPFELEAFYTNLHEVPYPDARIGSFTIQNVFPQSDGDSSKVKVKVRVNIHGIFSVASASVIEKQNLEGDHSDAPMETETSFKNENKDNMDKMQVDQEEGHQKCHAEHTPEEEIDHTGAKTKSAVSDKQDRLNQTL

SEQ ID NO: 52854 - protein, 104 aa, Homo sapiens
PSEYLTNIHIRDKLAAIKLGRYGEDLLFYLYYMNGGDVLQLLAAVELFNRDWRYHKEERVWITRAPGMEPTMKTNTYERGTYYFFDCLNWRKVAKVYFFPCANV

SEQ ID NO: 52855 - protein, 45 aa, Homo sapiens
MNLRGLFQDFNPRLCVSRCGFSCPFCAWWSSTTLCGPSCSCALWM

SEQ ID NO: 52856 - protein, 227 aa, Homo sapiens
  MOD_RES (1)..(1): Any amino acid
XRATFMEVLTKILQQGTEFDTLAETVLADRFERLVELVTMMGDQGELPIAMALANVVPCSQWDELARVLVTLFDSRHLLYQLLWNMFSKEVELADSMQTLFRGNSLASKIMTFCFKVYGATYLQKLLDPLLRIVITSSDWQHVSFEVDPTRLEPSESLEENQRNLLQMTEKFFHAIISSSSEFPPQLRSVCHCLYQATCHSLLNKATVKEKKENKKSVPKNSHPSMV

SEQ ID NO: 52857 - protein, 102 aa, Homo sapiens
MPGVTVKDVNQQEFVRALAAFLKKSGKLKVPEWVDTVKLAKHKELAPYDENWFYTRAGGLILSIYTEADSLGLDPSFTSGCVSSASTARHLYLRGGAGVGSM

SEQ ID NO: 52858 - protein, 113 aa, Homo sapiens
  MOD_RES (1)..(1): Any amino acid
XLLSPDLKFIEACLRCLRTIFTSPVTPEELLYTGPDHQTILFNHGAVQNIAHLLTSLSYKLDHDLKHAHELRQAAFKLYASLGANDEDIRKKVSLGEGRPPVLTASRQGVTST

SEQ ID NO: 52859 - protein, 116 aa, Homo sapiens
MDEKTKKEEMALSLTRAVAGGDEQVAMKCAIWLAEQRVPLSVQLKPEVSPTQDIRLWVSVEDAQMHTVTIWLTVRPDMTVASLKDMVFLDYGFPPVLQQWVIGQRLARDQETLHSH

SEQ ID NO: 52860 - protein, 149 aa, Homo sapiens
MSWIPFKIGQPKKQIVPKTVERDFEREYGKLQQLEEQTRRLQKDMKKSTDADLAMSKSAVKISLDLLSNPLCEQDQDLLNMVTALDTAMKRMDAFNQEKVNQIQKTVIEPLKKRNQLFWSWVTSEWPQSHELPGLRSLILDTAGLWLAW

SEQ ID NO: 52861 - protein, 102 aa, Homo sapiens
MQQSQVEKYKTLFEEANKKYDGLQQQLSSVERELENKRRLQKQAASSQSATEVRLNRALEEAEKYKLELSKLRQNNKMHIEAAKMLSFTEEEFMKALEWGNS

SEQ ID NO: 52862 - protein, 1347 aa, Homo sapiens
MATQQKASDERISQFDHNLLPELSALLGLDAVQLAKELEEEEQKERAKMQKGYNSQMRSEAKRLKTFVTYEPYSSWIPQEMAAAGFYFTGVKSGIQCFCCSLILFGAGLTRLPIEDHKRFHPDCGFLLNKDVGNIAKYDIRVKNLKSRLRGGKMRYQEEEARLASFRNWPFYVQGISPCVLSEAGFVFTGKQDTVQCFSCGGCLGNWEEGDDPWKEHAKWFPKCEFLRSKKSSEEITQYIQSYKGFVDITGEHFVNSWVQRELPMASAYCNDSIFAYEELRLDSFKDWPRESAVGVAALAKAGLFYTGIKDIVQCFSCGGCLEKWQEGDDPLDDHTRCFPNCPFLQNMKSSAEVTPDLQSRGELCELLETTSESNLEDSIAVGPIVPEMAQGEAQWFQEAKNLNEQLRAAYTSASFRHMSLLDISSDLATDHLLGCDLSIASKHISKPVQEPLVLPEVFGNLNSVMCVEGEAGSGKTVLLKKIAFLWASGCCPLLNRFQLVFYLSLSSTRPDEGLASIICDQLLEKEGSVTEMCVRNIIQQLKNQVLFLLDDYKEICSIPQVIGKLIQKNHLSRTCLLIAVRTNRARDIRRYLETILEIKAFPFYNTVCILRKLFSHNMTRLRKFMVYFGKNQSLQKIQKTPLFVAAICAHWFQYPFDPSFDDVAVFKSYMERLSLRNKATAEILKATVSSCGELALKGFFSCCFEFNDDDLAEAGVDEDEDLTMCLMSKFTAQRLRPFYRFLSPAFQEFLAGMRLIELLDSDRQEHQDLGLYHLKQINSPMMTVSAYNNFLNYVSSLPSTKAGPKIVSHLLHLVDNKESLENISENDDYLKHQPEISLQMQLLRGLWQICPQAYFSMVSEHLLVLALKTAYQSNTVAACSPFVLQFLQGRTLTLGALNLQYFFDHPESLSLLRSIHFPIRGNKTSPRAHFSVLETCFDKSQVPTIDQDYASAFEPMNEWERNLAEKEDNVKSYMDMQRRASPDLSTGYWKLSPKQYKIPCLEVDVNDIDVVGQDMLEILMTVFSASQRIELHLNHSRGFIESIRPALELSKASVTKCSISKLELSAAEQELLLTLPSLESLEVSGTIQSQVKLIQNSPNLHVFHLKCNFFSDFGSLMTMLVSCKKLTEIKFSDSFFQAVPFVASLPNFISLKILNLEGQQFPDEETSEKFAYILGSLSNLEELILPTGDGIYRVAKLIIQQCQQLHCLRVLSFFKTLNDDSVVEIAKVAISGGFQKLENLKLSINHKITEEGYRNFFQALDNMPNLQELDISRHFTECIKAQATTVKSLSQCVLRLPRLIRLNMLSWLLDADDIALLNVMKERHPQSKYLTILQKWILPFSPIIQK

SEQ ID NO: 52863 - protein, 290 aa, Homo sapiens
MMLSLNNLQNIIYNPVIPFVGTIPDQLDPGTLIVIRGHVPSDADRAGCIVCNTLINEKWGREEITYDTPFKREKSFEIVIMVLKDKFQVAVNGKHTLLYGHRIGPEKIDTLGIYGKVNIHSIGFSFSSDLQSTQASSLELTEISRENVPKSGTPQLRLPFAARLNTPMGPGRTVVVKGEVNANAKSFNVDLLAGKSKDIALHLNPRLNIKAFVRNSFLQESWGEEERNITSFPFSPGMYFEMIIYCDVREFKVAVNGVHSLEYKHRFKELSSIDTLEINGDIHLLEVRSW

SEQ ID NO: 52864 - protein, 249 aa, Homo sapiens
MAAVDIRDNLLGISWVDSSWIPILNSGSVLDYFSERSNPFYDRTCNNEVVKMQRLTLEHLNQMVGIEYILLHAQEPILFIIRKQQRQSPAQVIPLADYYIIAGVIYQAPDLGSVINSRVLTAVHGIQSAFDEAMSYCRYHPSKGYWWHFKDHEEQDKVRPKAKRKEEPSSIFQRQRVDALLLDLRQKFPPKFVQLKPGEKPVPVDQTKKEAEPIPETVKPEEKETTKNVQQTVSAKGPPEKRMRLQKAV

SEQ ID NO: 52865 - protein, 158 aa, Homo sapiens
MAVFKTTLWRLISGTLGIICLSLMSTLGILLKNYSDCCSCQEKWVGYRCNCYFISSEQKTWNESRHLCASQKSSLLQLQNTDELDFMSSSQQFYWIGLSYSEEHTAWLWENGSALSQYLFPSFETFNTKNCIAYNPNGNALDESCEDKNRYICKQQLI

SEQ ID NO: 52866 - protein, 304 aa, Homo sapiens
  MOD_RES (1)..(1): Any amino acid
XQRTLSLQAPPVKEGPLFIHRTKGKGPLMSSSFKKLYFSLTTEALSFAKTPSSKCVNELNQWLSALRKVSINNTGLLGSYHPGVFRGDKWSCCHQKEKTGQGCDKTRSRVTLQEWNDPLDHDLEAQLIYRHLLGVEAMLWITINKDTKVPNACLFTINKEDHTLGNIIKSRACFPFAFCRDCQFPEASPATLPVQPAELLAWKSPCATGKDINKHQEVSKSTRSHRHHVDIHLPVFPGKILLNCAALAKRAAPEHISYVPQLSNDTLAGRLTLSTFTLEQPLGQFSSHNISDLDTIWLVVALSN

SEQ ID NO: 52867 - protein, 113 aa, Homo sapiens
MIHTNLKKKFSCCVLVFLLFAVICVWKEKKKGSYYDSFKLQTKEFQVLKSLGKLAMGSDSQSVSSSSTQDPHRGRQTLGSLRGLAKAKPEASFQVWNKDSSSKNLIPRLQKIW

SEQ ID NO: 52868 - protein, 385 aa, Homo sapiens
  MOD_RES (1)..(1): Any amino acid
XLLKDRLLCSGHDVSDGGLVTCLLEMAFAGNCGLQVDVPVPRVDVLSVLFAEEPGLVLEVQEPDLAQVLKRYRDAGLHCLELGHTGEAGPHAMVRVSVNGAVVLEEPVGELRALWEETSFQLDRLQAEPRCVAEEERGLRERMGPSYCLPPTFPKASVPREPGGPSPRVAILREEGSNGDREMADAFHLAGFEVWDVTMQDLCSGAIGLDTFRGVAFVGGFSYADVLGSAKGWAAAVTFHPRAGAELRRFRKRPDTFSLGVCNGCQLLALLGWVGGDPNEDAAEMGPDSQPARPGLLLRHNLSGRYESRWASVRVGPGPALMLRGMEGAVLPVWSAHGEGQAQGRLGEGPRVGGKGGHEGPWLSLPSSFHPRLRSIFFSGTPSSD

SEQ ID NO: 52869 - protein, 1384 aa, Homo sapiens
MATDDKTSPTLDSANDLPRSPTSPSHLTHFKPLTPDQDEPPFKSAYSSFVNLFRFNKERAEGGQGEQQPLSGSWTSPQLPSRTQSVRSPTPYKKQLNEELQRRSSALDTRRKAEPTFGGHDPRTAVQLRSLSTVLKRLKEIMEGKSQDSDLKQYWMPDSQCKECYDCSEKFTTFRRRHHCRLCGQIFCSRCCNQEIPGKFMGYTGDLRACTYCRKIALSYAHSTDSNSIGEDLNALSDSACSVSVLDPSEPRTPVGSRKASRNIFLEDDLAWQSLIHPDSSNTPLSTRLVSVQEDAGKSPARNRSASITNLSLDRSGSPMVPSYETSVSPQANRTYVRTETTEDERKILLDSVQLKDLWKKICHHSSGMEFQDHRYWLRTHPNCIVGKELVNWLIRNGHIATRAQAIAIGQAMVDGRWLDCVSHHDQLFRDEYALYRPLQSTEFSETPSPDSDSVNSVEGHSEPSWFKDIKFDDSDTEQIAEEGDDNLAKYLISDTGGQQLSISDAFIKESLFNRRVEEKSKELPFTPLGWHHNNLELLREENGEKQAMERLLSANHNHMMALLQQLLHSDSLSSSWRDIIVSLVCQVVQTVRPDVKNQDDDMDIRQFVHIKKIPGGKKFDSVVVNGFVCTKNIAHKKMSSCIKNPKILLLKCSIEYLYREETKFTCIDPIVLQEREFLKNYVQRIVDVRPTLVLVEKTVSRIAQDMLLEHGITLVINVKSQVLERISRMTQGDLVMSMDQLLTKPHLGTCHKFYMQIFQLPNEQTKTLMFFEGCPQHLGCTIKLRGGSDYELARVKEILIFMICVAYHSQLEISFLMDEFAMPPTLMQNPSFHSLIEGRGHEGAVQEQYGGGSIPWDPDIPPESLPCDDSSLLELRIVFEKGEQENKNLPQAVASVKHQEHSTTACPAGLPCAFFAPVPESLLPLPVDDQQDALGSEQPETLQQTVVLQDPKSQIRAFRDPLQDDTGLYVTEEVTSSEDKRKTYSLAFKQELKDVILCISPVITFREPFLLTEKGMRCSTRDYFAEQVYWSPLLNKEFKEMENRRKKQLLRDLSGLQGMNGSIQAKSIQVLPSHELVSTRIAEHLGDSQSLGRMLADYRARGGRIQPKNSDPFAHSKDASSTSSGQSGSKNEGDEERGLILSDAVWSTKVDCLNPINHQRLCVLFSSSSAQSSNAPSACVSPWIVTMEFYGKNDLTLGIFLERYCFRPSYQCPSMFCDTPMVHHIRRFVHGQGCVQIILKELDSPVPGYQHTILTYSWCRICKQVTPVVALSNESWSMSFAKYLELRFYGHQYTRRANAEPCGHSIHHDYHQYFSYNQMVASFSYSPIRLLEVCVPLPKIFIKRQAPLKVSLLQDLKDFFQKVSQVYVAIDERLASLKTDTFS

SEQ ID NO: 52870 - protein, 509 aa, Homo sapiens
MSGSSGPAPTPAVTKARRGDLTLQHGGGGRLGPRVGALTAAGGPCRKQLPPPPLSSLLGQGPGPGVQLDIASQSLDQEILLKVKTEIEEELKSLDKEISEAFTSTGFDRHTSPVFSPANPESSMEDCLAHLGEKVSQELKEPLHKALQMLLSQPVTYQAFRECTLETTVHASGWNKILVPLVLLRQMLLELTRRGQEPLSALLQFGVTYLEDYSAEYIIQQGGWGTVFSLESEEEEYPGITAEDSNDIYILPSDNSGQVSPPESPTVTTSWQSESLPVSLSASQSWHTESLPVSLGPESWQQIAMDPEEVKSLDSNGAGEKSENNSSNSDIVHVEKEEVPEGMEEAAVASVVLPARELQEALPEAPAPLLPHITATSLLGTREPDTEVITVEKSSPATSLFVELDEEEVKAATTEPTEVEEVVPALEPTETLLSEKEINAREESLVEELSPASEKKPVPPSEGKSRLSPAGEMKPMPLSEGKSILLFGGAAAVAILAVAIGVALALRKK

SEQ ID NO: 52871 - protein, 123 aa, Homo sapiens
MTAEDSTAAMSSDSAAGSSAKVPEGVAGAPNEAALLALMERTGYSMVQENGQRKYGGPPPGWEGPHPQRGCEVFVGKIPRDVYEDELVPVFEAVGRIYELRLMMDFDGKNRGYAFVMYCHKHE

SEQ ID NO: 52872 - protein, 38 aa, Homo sapiens
MSNEVETSATNGQPDQQAAPKAPSKKEKKKGPEKTDEY

SEQ ID NO: 52873 - protein, 386 aa, Homo sapiens
MRGEQGAAGARVLQFTNCRILRGGKLLREDLWVRGGRILDPEKLFFEERRVADERRDCGGRILAPGFIDVQINGGFGVDFSQATEDVGSGVALVARRILSHGVTSFCPTLVTSPPEVYHKVVPQIPVKSGGPHGAGVLGLHLEGPFISREKRGAHPEAHLRSFEADAFQDLLATYGPLDNVRIVTLAPELGRSHEVIRALTARGICVSLGHSVADLRAAEDAVWSGATFITHLFNAMLPFHHRDPGIVGLLTSDRLPAGRCIFYGMIADGTHTNPAALRIAHRAHPQGLVLVTDAIPALGLGNGRHTLGQQEVEVDGLTAYVAGCSMESALEAASLHPAQLLGLEKSKGTLDFGADADFVVLDDSLHVQATYISGELVWQADAARQ

SEQ ID NO: 52874 - protein, 144 aa, Homo sapiens
MSHPDYRMNLRPLGTPRGVSAVAGPHDIGASPGDKKSKNRSTRGKKKSIFETYMSKEDVSEGLKRGTLIQGVLRINPKKFHEAFIPSPDGDRDIFIDGVVARNRALNGDLVVVKLLPEEHWKVVKPESNDKETEAAYESDIPEE

SEQ ID NO: 52875 - protein, 373 aa, Homo sapiens
MAQGRERDEGPHSAGGASLSVRWVQGFPKQNVHFVNDNTICYPCGNYVIFINIETKKKTVLQCSNGIVGVMATNIPCEVVAFSDRKLKPLIYVYSFPGLTRRTKLKGNILLDYTLLSFSYCGTYLASYSSLPEFELALWNWESSIILCKKSQPGMDVNQMSFNPMNWRQLCLSSPSTVSVWTIERSNQEHCFRARSVKLPLEDGSFFNETDVVFPQSLPKDLIYGPVLPLSAIAGLVGKEAETFRPKDDLYPLLHPTMHCWTPTSDLYIGCEEGHLLMINGDTLQVTVLNKIEEESPLEDRRNFISPVTLVYQKEGVLASGIDGFVYSFIIKDRSYMIEDFLEIERPVEHMTFSPNYTVLLIQTDKVCWMVIS

SEQ ID NO: 52876 - protein, 436 aa, Homo sapiens
MTIHQFLLLFLFWVCLPHFCSPEIMFRRTPVPQQRILSSRVPRSDGKILHRQKRGWMWNQFFLLEEYTGSDYQYVGKLHSDQDKGDGSLKYILSGDGAGTLFIIDEKTGDIHATRRIDREEKAFYTLRAQAINRRTLRPVEPESEFVIKIHDINDNEPTFPEEIYTASVPEMSVVGTSVVQVTATDADDPSYGNSARVIYSILQGQPYFSVEPETGIIRTALPNMNRENREQYQVVIQAKDMGGQMGGLSGTTTVNITLTDVNDNPPRFPQNTIHLRVLESSPVGTAIGSVKATDADTGKNAEVEYRIIDGDGTDMFDIVTEKDTQEGIITVKKPLDYESRRLYTLKVEAENTHVDPRFYYLGPFKDTTIVKISIEDVDEPPVFSRSSYLFEVHEDIEVGTIIGTVMARDPDSISSPIRQSQRDNTRGCFCENFGC

SEQ ID NO: 52877 - protein, 201 aa, Homo sapiens
  MOD_RES (1)..(1): Any amino acid
XEAFLTDVATCFMGPLVAERAVLSLAGELEHSICLLSLTDSSLSDDRLNHLLSVAPQQSLVLLEDVDAAFLSRDLAVENPVKYQGLGRLTFSGLLNALDGVASTEARIVFMTTNHVDRLDPALIRPGRVDLKEYVGYCSHWQLTQMFQRFYPGQAPSLAENFAEHVLRATNQISPAQVQGYFMLYKNDPVGAIHNAESLRR

SEQ ID NO: 52878 - protein, 963 aa, Homo sapiens
MPLQKTNEEVSLSGIDSECTVVQPSPGSQSNARILGVCSDNQLSTTSPETVAAKRLHHVLAASEDKDKMKKEVLQSSRDIMQSKSACEIKQSHQECSTQQTQQKKYLEQLHLPQSKPISPNFKVKTIKLPTLDHTLNETDHSYESHKQQSEIDVQTFTKKQYLKTKKTEASTECSHKQSLAERHYQLPKKEKRVTVQLPTESIQKNQEDKLKMVPRKQREFSGSDRGKLPGSEEKNQGPSMIGRKEERLITERKHEHLKNKSAPKVVKQKVIDAHLDSQTQNFQQTQIQTAESKAEHKKLPQPYNSLQEEKCLEVKGIQEKQVFSNTKDSKQEITQNKSFFSSVKESQRDDGKGALNIVEFLRKREELQQILSRVKQFEAEPNKSGLKTFQTLLNTIPGWLISEDKREYAVHIAMENNLEKVKEEITHIKTQAEDMLVSYENIIQTAMMSSKTGKPGNKPTSLDETSSKVSNVHVSNNKNSEQKENKIAKEKTVQHQVAAHHEATVRSHVKTHQEIKLDDSNIPPPSLKTRPPSPTFITIESTARRTENPTKNELSQSPKKDSYVEPPPRRPMSQKSEIHRANTSPSPPRSRSEQLVRLKDTTAKLSKGAIPCPAATPVPIVEKRSEIIMSPATLRRQIKIETRGRDSPPTITIPVNINHAASGSFRESVDAQEEIRKVEKRATYVHKDGLNSTDHMVPDTESYDAVEIIRKVAVPPRLSEHTQRYEAANRTVQMAENFVNDPENEINRWFREFEHGPVSEAKSNRRVYAKGETNHNIQQESRTFCKEEFGLTSLGNTSFTDFSCKHPRELREKIPVKQPRICSETRSLSEHFSGMDAFESQIVESKMKTSSSHSSEAGKSGCDFKHAPPTYEDVIAGHILDISDSPKEVRKNFQKTWQESGRVFKGLGYATADASATEMRTTFQEESAFISEAAAPRQGNMYTLSKDSLSNGVPSGRQAEFS

SEQ ID NO: 52879 - protein, 77 aa, Homo sapiens
MALPQVPSLVTQCHELGKRLHWAGPGKGSHPDMDGHGVRVLWCQCSWAAGIVQGPHLDALSAHCGPGLEQLPMGVTY

SEQ ID NO: 52880 - protein, 14 aa, Homo sapiens
MAMAPSPSLVQVYT

SEQ ID NO: 52881 - protein, 906 aa, Homo sapiens
MELAVAVLRDLLRYAAQLPALFRDISMNHLPGLLTSLLGLRPECEQSALEGMKACMTYFPRACGSLKGKLASFFLSRVDALSPQLQQLACECYSRLPSLGAGFSQGLKHTESWEQELHSLLASLHTLLGALYEGAETAPVQNEGPGVEMLLSSEDGDAHVLLQLRQRFSGLARCLGLMLSSEFGAPVSVPVQEILDFICRTLSVSSKNISLHGDGPLRLLLLPSIHLEALDLLSALILACGSRLLRFGILIGRLLPQVLNSWSIGRDSLSPGQERPYSTVRTKVYAILELWVQVCGASAGMLQGGASGEALLTHLLSDISPPADALKLRSPRGSPDGSLQTGKPSAPKKLKLDVGEAMAPPSHRKGDSNANSDVCAAALRGLSRTILMCGPLIKEETHRRLHDLVLPLVMGVQQGEVLGSSPYTSSRCRRELYCLLLALLLAPSPRCPPPLACALQAFSLGQREDSLEVSSFCSEALVTCAALTHPRVPPLQPMGPTCPTPAPVPPPEAPSPFRAPPFHPPGPMPSVGSMPSAGPMPSAGPMPSAGPVPSARPGPPTTANHLGLSVPGLVSVPPRLLPGPENHRAGSNEDPILAPSGTPPPTIPPDETFGGRVPRPAFVHYDKEEASDVEISLESDSDDSVVIVPEGLPPLPPPPPSGATPPPIAPTGPPTASPPVPAKEEPEELPAAPGPLPPPPPPPPPVPGPVTLPPPQLVPEGTPGGGGPPALEEDLTVININSSDEEEEEEEEEEEEEEEEEEEEEDFEEEEEDEEEYFEEEEEEEEEFEEEFEEEEGELEEEEEEEDEEEEEELEEVEREGESPAAGPPPQELVEEEPSAPPTLLEEETEDGSDKVQPPPETPAEEEMETETEAEALQEKEQDDTAAMLADFIDCPPDDEKPPPPTEPDS

SEQ ID NO: 52882 - protein, 64 aa, Homo sapiens
MEKLRLLGLRYQESIRRFARAVRAGKKLSEVREQSLMVPEPRFKSRSPRFQDSQIVTTSRVFAQ

SEQ ID NO: 52883 - protein, 42 aa, Homo sapiens
MEKHSQEARQADRESEKPVDSLHPGAGTAKHPPPAASLEVTG

SEQ ID NO: 52884 - protein, 895 aa, Homo sapiens
MERASERRTASALFAGFRALGLFSNDIPHVVRFSALKRRFYVTTCVGKSFHTYDVQKLSLVAVSNSVPQDICCMAADGRLVFAAYGNVFSAFARNKEIVHTFKGHKAEIHFLQPFGDHIISVDTDGILIIWHIYSEEEYLQLTFDKSVFKISAILHPSTYLNKILLGSEQGSLQLWNVKSNKLLYTFPGWKVGVTALQQAPAVDVVAIGLMSGQVIIHNIKFNETLMKFRQDWGPITSISFRTDGHPVMAAGSPCGHIGLWDLEDKKLINQMRNAHSTAIAGLTFLHREPLLVTNGADNALRIWIFDGPTGEGRLLRFRMGHSAPLTNIRYYGQNGQQILSASQDGTLQSFSTVHEKFNKSLGHGLINKKRVKRKGLQNTMSVRLPPITKFAAEEARESDWDGIIACHQGKLSCSTWNYQKSTIGAYFLKPKELKKDDITATAVDITSCGNFAVIGLSSGTVDVYNMQSGIHRGSFGKDQAHKGSVRGVAVDGLNQLTVTTGSEGLLKFWNFKNKILIHSVSLSSSPNIMLLHRDSGILGLALDDFSISVLDIETRKIVREFSGHQGQINDMAFSPDGRWLISAAMDCSIRTWDLPSGCLIDCFLLDSAPLNVSMSPTGDFLATSHVDHLGIYLWSNISLYSVVSLRPLPADYVPSIVMLPGTCQTQDVEVSEETVEPSDELIEYDSPEQLNEQLVTLSLLPESRWKNLLNLDVIKKKNKPKEPPKVPKSAPFFIPTIPGLVPRYAAPEQNNDPQQSKVVNLGVLAQKSDFCLKLEEGLVNNKYDTALNLLKESGPSGIETELRSLSPDCGGSIEVMQSFLKMIGMMLDRKRDFELAQAYLALFLKLHLKMLPSEPVLLEEITNLSSQVEENWTHLQSLFNQSMCILNYLKSALL

SEQ ID NO: 52885 - protein, 893 aa, Homo sapiens
MESTLSASNMQDPSSSPLEKCLGSANGNGDLDSEGSSLEETGFNWGEYLEETGASAAPHTSFKHVEISIQSNFQPGMKLEVANKNNPDTYWVATIITTCGQLLLLRYCGYGEDRRADFWCDVVIADLHPVGWCTQNNKVLMPPDAIKEKYTDWTEFLIRDLTGSRTAPANLLEGPLRGKGPIDLITVGSLIELQDSQNPFQYWIVSVIENVGGRLRLRYVGLEDTESYDQWLFYLDYRLRPVGWCQENKYRMDPPSEIYPLKMASEWKCTLEKSLIDAAKFPLPMEVFKDHADLRSHFFTVGMKLETVNMCEPFYISPASVTKVFNNHFFQVTIDDLRPEPSKLSMLCHADSLGILPVQWCLKNGVSLTPPKGYSGQDFDWADYHKQHGAQEAPPFCFRNTSFSRGFTKNMKLEAVNPRNPGELCVASVVSVKGRLMWLHLEGLQTPVPEVIVDVESMDIFPVGWCEANSYPLTAPHKTVSQKKRKIAVVQPEKQLPPTVPVKKIPHDLCLFPHLDTTGTVNGKYCCPQLFINHRCFSGPYLNKGRIAELPQSVGPGKCVLVLKEVLSMIINAAYKPGRVLRELQLVEDPHWNFQEETLKAKYRGKTYRAVVKIVRTSDQVANFCRRVCAKLECCPNLFSPVLISENCPENCSIHTKTKYTYYYGKRKKISKPPIGESNPDSGHPKPARRRKRRKSIFVQKKRRSSAVDFTAGSGEESEEEDADAMDDDTASEETGSELRDDQTDTSSAEVPSARPRRAVTLRSGSEPVRRPPPERTRRGRGAPAASSAEEGEKCPPTKPEGTEDTKQEEEERLVLESNPLEWTVTDVVRFIKLTDCAPLAKIFQEQDIDGQALLLLTLPTVQECMELKLGPAIKLCHQIERVKVAFYAQYAN

SEQ ID NO: 52886 - protein, 70 aa, Homo sapiens
MAASMCDVFSFCVGVAGRARVSVEVRFVSSAKGKGLFATQLIRKGETIFVERPLVAAQFLWNALYRYRGH

SEQ ID NO: 52887 - protein, 33 aa, Homo sapiens
MENSTTTISREELEELQEAFNKIDIDNSGYVSD

SEQ ID NO: 52888 - protein, 630 aa, Homo sapiens
MRTVVLTMKASVIEMFLAVPQINCDVKAGKIIDPEFIVKCPAGCQDPKYHVYGTDVYASYSSVCGAAVHSGVLDNSGGKILVRKVAGQSGYKGSYSNGVQSLSLPRWRESFIVLESKPKKGVTYPSALTYSSSKSPAAQAGETTKAYQRPPIPGTTAQPVTLMQLLAVTVAVATPTTLPRPSPSAASTTSIPRPQSVGHRSQEMGEMDSWKPGSVLLDEGLVPKEELSTQSLEPVSLGDPNCKIDLSFLIDGSTSIGKRRFRIQKQLLADVAQALDIGPAGPLMGVVQYGDNPATHFNLKTHTNSRDLKTAIEKITQRGGLSNVGRAISFVTKNFFSKANGNRSGAPNVVVVMVDGWPTDKVEEASRLARESGINIFFITIEGAAENEKQYVVEPNFANKAVCRTNGFYSLHVQSWFGLHKTLQPLVKRVCDTDRLACSKTCLNSADIGFVIDGSSSVGTGNFRTVLQFVTNLTKEFEISDTDTRIGAVQYTYEQRLEFGFDKYSSKPDILNAIKRVGYWSGGTSTGAAINFALEQLFKKSKPNKRKLMILITDGRSYDDVRIPAMAAHLKGVITYAIGVAWAAQEELEVIATHPARDHSFFVDEFDNLHQYVPRIIQNICTEFNSQPRN

SEQ ID NO: 52889 - protein, 1588 aa, Homo sapiens
  MOD_RES (1)..(1): Any amino acid
XAILGKLYKIPELGGKDVEDLFTAVLSPANTQPTPLPQPPPPTQLLPIHNQDAFSRMPLMNGLIGSSPHLPHNSLPPGSGLGTFSAIAQSSYPDARDKNSAFNPMASDPNNSWTSSAPTVEGENDTMSNAQRSTLKWEKEEALGEMATVAPVLYTNINFPNLKEEFPDWTTRVKQIAKLWRKASSQERAPYVQMRQKSKQQAKIEATQKLEQVKNEQQQQQQQQFGSQHLLVQSGSDTPSSGIQSPLTPQPGNGNMSPAQSFHKELFTKQPPSTPTSTSSDDVFVKPQAPPPPPAPSRIPIQDSLSQAQTSQPPSPQVFSPGSSNSRPPSPMDPYAKMVGTPRPPPVGHSFSRRNSAAPVENCTPLSSVSRPLQMNETTANRPSPVRDLCSSSTTNNDPYAKPPDTPRPVMTDQFPKSLGLSRSPVVSEQTAKGPIAAGTSDHFTKPSPRADVFQRQRIPDSYARPLLTPAPLDSGPGPFKTPMQPPPSSQDPYGSVSQASRRLSVDPYERPALTPRPIDNFSHNQSNDPYSQPPLTPHPAVNESFAHPSRAFSQPGTISRPTSQDPYSQPPGTPRPVVDSYSQSSGTARSNTDPYSQPPGTPRPTTVDPYSQQPQTPRPSTQTDLFVTPVTNQRHSDPYAHPPGTPRPGISVPYSQPPATPRPRISEGFTRSSMTRPVLMPNQDPFLQAAQNRGPALPGPLVRPPDTCSQTPRPPGPGLSDTFSRVSPSAARDPYDQSPMTPRSQSDSFGTSQTAHDVADQPRPGSEGSFCASSNSPMHSQGQQFSGVSQLPGPVPTSGVTDTQNTVNMAQADTEKLRQRQKLREIILQQQQQKKIAGRQEKGSQDSPAVPHPGPLQHWQPENVNQAFTRPPPPYPGNIRSPVAPPLGPRYAVFPKDQRGPYPPDVASMGMRPHGFRFGFPGGSHGTMPSQERFLVPPQQIQGSGVSPQLRRSVSVDMPRPLNNSQMNNPVGLPQHFSPQSLPVQQHNILGQAYIELRHRAPDGRQRLPFSAPPGSVVEASSNLRHGNFIPRPDFPGPRHTDPMRRPPQGLPNQLPVHPDLEQVPPSQQEQGHSVHSSSMVMRTLNHPLGGEFSEAPLSTSVPSETTSDNLQITTQPSDGLEEKLDSDDPSVKELDVKDLEGVEVKDLDDEDLENLNLDTEDGKVVELDTLDNLETNDPNLDDLLRSGEFDIIAYTDPELDMGDKKSMFNEELDLPIDDKLDNQCVSVEPKKKEQENKTLVLSDKHSPQKKSTVTNEVKTEVLSPNSKVESKCETEKNDENKDNVDTPCSQASAHSDLNDGEKTSLHPCDPDLFEKRTNRETAGPSANVIQASTQLPAQDVINSCGITGSTPVLSSLLANEKSDNSDIRPSGSPPPPTLPASPSNHVSSLPPFIAPPGRVLDNAMNSNVTVVSRVNHVFSQGVQVNPGLIPGQSTVNHSLGTGKPATQTGPQTSQSGTSSMSGPQQLMIPQTLAQQNRERPLLLEEQPLLLQDLLDQERQEQQQQRQMQAMIRQRSEPFFPNIDFDAITDPIMKAKMVALKGINKVMAQNNLGMPPMVMSRFPFMGQVVTGTQNSEGQNLGPQAIPQ

SEQ ID NO: 52890 - protein, 766 aa, Homo sapiens
MRVKDPTKALPEKAKRSKRPTVPHDEDSSDDIAVGLTCQHVSHAISVNHVKRAIAENLWSVCSECLKERRFYDGQLVLTSDIWLCLKCGFQGCGKNSESQHSLKHFKSSRTEPHCIIINLSTWIIWCYECDEKLSTHCNKKVLAQIVDFLQKHASKTQTSAFSRIMKLCEEKCETDEIQKGGKCRNLSVRGITNLGNTCFFNAVMQNLAQTYTLTDLMNEIKESSTKLKIFPSSDSQLDPLVVELSRPGPLTSALFLFLHSMKETEKGPLSPKVLFNQLCQKAPRFKDFQQQDSQELLHYLLDAVRTEETKRIQASILKAFNNPTTKTADDETRKKVKAYGKEGVKMNFIDRIFIGELTSTVMCEECANISTVKDPFIDISLPIIEERSQLIHDRKCIRKLSSGETVTYQKNENLEMNGDSLMFASLMNSESRLNESPTDDSEKEASHSESNVDADSEPSESESASKQTGLFRSSSGSGVQPDGPLYPLSAGKLLYTKETDSGDKEMAEAISELRLSSTVTGDQDFDRENQPLNISNNLCFLEGKHLRSYSPQNAFQTLSQSYITTSKECSIQSCLYQFTSMELLMGNNKLLCENCTKNKQKYQEETSFAEKKVEGVYTNARKQLLISAVPAVLILHLKRFHQAGLSLRKVNRHVDFPLMLDLAPFCSATCKNASVGDKVLYGLYGIVEHSGSMREGHYTAYVKVRTPSRKLSEHNTKKKNVPGLKAADNESAGQWVHVSDTYLQVVPESRALSAQAYLLFYERVL

SEQ ID NO: 52891 - protein, 165 aa, Homo sapiens
MSDPITLNVGGKLYTTSLATLTSFPDSMLGAMFSGKMPTKRDSQGNCFIDRDGKVFRYILNFLRTSHLDLPEDFQEMGLLRREADFYQVQPLIEALQEKEVELSKAEKNAMLNITLNQRVQTVHFTVREAPQIYSLSSSSMEVFNANIFSTSCLFLKLLGSKLFY

SEQ ID NO: 52892 - protein, 171 aa, Homo sapiens
  MOD_RES (1)..(1): Any amino acid
XCSCHPQYKMHTDGRSCLEREDTVLEVTESNTTSVVDGDKRVKRRLLMETCAVNNGGCDRTCKDTSTGVHCSCPVGFTLQLDGKTCKDIDECQTRNGGCDHFCKNIVGSFDCGCKKGFKLLTDEKSCQDVDECSLDRTCDHSCINHPGTFACACNRGYTLYGFTHCGEVKG

SEQ ID NO: 52893 - protein, 212 aa, Homo sapiens
MVPWVRTMGQKLKQRLRLDVGREICRQYPLFCFLLLCLSAASLLLNRYIHILMIFWSFVAGVVTFYCSLGPDSLLPNIFFTIKYKPKLGLQELFPQGHSCAVCGKVKCKRHRPSLLLENYQPWLDLKISSKVDASLSEVLELVLENFVYPWYRDVTDDESFVDELRITLRFFASVLIRRIHKVDIPSIITKKLLKAAMKHIEVIVKARQKDL

SEQ ID NO: 52894 - protein, 150 aa, Homo sapiens
MQMIDLQTGTPWESVTFTALGTDRKVFFNILEEARELALQQEEGKTVMYTAVGSEWRPFGYPRRRRPLNSVVLQQGLADRIVRDVQEFIDNPKWYTDRGIPYRRGYLLYGPPGCGKSSFITALAGELEHSICLLSLTDSSLSDDRLNHLL

SEQ ID NO: 52895 - protein, 93 aa, Homo sapiens
MSSSPVKRQRMESALDQLKQFTTVVADTGDFHAIDEYKPQDATTNPSLILAAAQMPAYQELVEEAIAYGRKLGGNTKEDSGPSIHRSRRKALL

SEQ ID NO: 52896 - protein, 153 aa, Homo sapiens
  MOD_RES (1)..(1): Any amino acid
XTQAQVYSEDMALNIGSEPEGLQVEEKERPVQRLSSVLGPLEELLQPLFPLLSLSKARVQTPAVVADSGKSKGKDKERKTSTGQHSTVQPEVADKIVLVADRHLLELPLEGLSVFDEGTISSVSREFSLQMLWNRLHKEETDSEKHEGARGRP

SEQ ID NO: 52897 - protein, 248 aa, Homo sapiens
  MOD_RES (1)..(1): Any amino acid
XCSTWSFLAPLPQQFHLKILFLPLTPLRLLLLSAQVLIVVPFREAALRVVQLFISLLEGDSKKKIIVSNKKRFQGEYGSDPEERPPNLKRPEDYEAVFVGNIDDHFRIGVAILQRSIRLYAPFYSSDILIASPLGLRTIIGGEGEKKRDFDFLSSIELLIIDQADIYLMQNWEHVLHLMNHMNLLPLDSHGVDFSRVRMWSLNNWSKYYRQTLLFGALQDAQINSVFNKYCVNMQGQVGSRLVSSVSS

SEQ ID NO: 52898 - protein, 40 aa, Homo sapiens
MGNIFGNLLKSLIGKKEMRILMVGLDAAGKTTILYKLKLG

SEQ ID NO: 52899 - protein, 357 aa, Homo sapiens
  MOD_RES (1)..(1): Any amino acid
XLRYGALCNTNDSQNEDGGMVKEMESKDEQWKRAMDYLNVVNELNYMTQIVIMLYEDPNKDLSSEERFHVELHFSPGAKGCEEDKNLPSGYGYRPASRENEGRRPFKIDNDDEPHTSKRDEVDRAVILFKPMVSEPIHIHRKSPLPRSRKTATNDEESPLSVSSPEGTGTWLHYTSGVGTGRRRRRSGEQITSSPVSPKSLAFTSSIFGSWQQVVSENANYLRTPRTLVEQKQNPTVGFELYSMVPSICPLETLHNALSLKQVDEFLASIASPSSDVPRKTAEISSTALRSSPIMRKKVSLNTYTPAKILPTPPATLKSTKASSKPATSGPSSAVVPNTSSRKKNITSKTETHEHKK

SEQ ID NO: 52900 - protein, 260 aa, Homo sapiens
MSVLGEYERHCDSINSDFGSESGGCGDSSPGPSASQGPRAGGGAAEQEELHYIPIRVLGRGAFGEATLYRRTEDDSLVVWKEVDLTRLSEKERRDALNEIVILALLQHDNIIAYYNHFMDNTTLLIELEYCNGGNLYDKILRQKDKLFEEEMVVWYLFQIVSAVSCIHKAGILHRDIKTLNIFLTKANLIKLGDYGLAKKLNSEYSMAETLVGTPYYMSPELCQGVKYNFKSDIWAVGCVIFELLTLKRTFDATAWSAVS

SEQ ID NO: 52901 - protein, 88 aa, Homo sapiens
MAAAATAAEGVPSRGPPGEVIHLNVGGKRFSTSRQTLTWIPDSFFSSLLSGRISTLKDETGAIFIDRDPTVFAPILNFLRTKELDPRP

SEQ ID NO: 52902 - protein, 51 aa, Homo sapiens
  MOD_RES (1)..(1): Any amino acid
XALAFYRAKNPTDKPVIGISTYNIVPFEAGQYFNKIQVLSSRLQSCTESTF

SEQ ID NO: 52903 - protein, 86 aa, Homo sapiens
MPKTMHFLFRFIVFFYLWGLFTAQRQKKEESTEEVKIEVLHRPENCSKTSKKGDLLNAHYDGYLAKDGSKFYCSRRQDSTGCYIDF

SEQ ID NO: 52904 - protein, 60 aa, Homo sapiens
MSACNTFTEHVWKPGECKNCFKPKSLHQLPPDPEKAPITHGNVKTNANHSNNHRIRNTGN

SEQ ID NO: 52905 - protein, 640 aa, Homo sapiens
MCASVKYNIRGPALIPRMKTKHRIYYITLFSIVLLGLIATGMFQFWPHSIESSNDWNVEKRSIRDVPVVRLPADSPIPERGDLSCRMHTCFDVYRCGFNPKNKIKVYIYALKKYVDDFGVSVSNTISREYNELLMAISDSDYYTDDINRACLFVPSIDVLNQNTLRIKETAQAMAQLSRWDRGTNHLLFNMLPGGPPDYNTALDVPRDRALLAGGGFSTWTYRQGYDVSIPVYSPLSAEVDLPEKGPGPRQYFLLSSQVGLHPEYREDLEALQVKHGESVLVLDKCTNLSEGVLSVRKRCHKHQVFDYPQVLQARWFWEAYFQSIKAIALATLQIINDRIYPYAAISYEEWNDPPAVKWGSVSNPLFLPLIPPQSQGFTAIVLTYDRVESLFRVITEVSKVPSLSKLLVVWNNQNKNPPEDSLWPKIRVPLKVVRTAENKLSNRFFPYDEIETEAVLAIDDDIIMLTSDELQFGYEVWREFPDRLVGYPGRLHLWDHEMNKWKYESEWTNEVSMVLTGAAFYHKYFNYLYTYKMPGDIKNWVDAHMNCEDIAMNFLVANVTGKAVIKVTPRKKFKCPECTAIDGLSLDQTHMVERSECINKFASVFGTMPLKVVEHRADPVLYKDDFPEKLKSFPNIGSL

SEQ ID NO: 52906 - protein, 802 aa, Homo sapiens
MAQWNQLQQLDTRYLEQLHQLYSDSFPMELRQFLAPWIESQDWAYAASKESHATLVFHNLLGEIDQQYSRFLQESNVLYQHNLRRIKQFLQSRYLEKPMEIARIVARCLWEESRLLQTAATAAQQGGQANHPTAAVVTEKQQMLEQHLQDVRKRVQDLEQKMKVVENLQDDFDFNYKTLKSQGDMQDLNGNNQSVTRQKMQQLEQMLTALDQMRRSIVSELAGLLSAMEYVQKTLTDEELADWKRRQQIACIGGPPNICLDRLENWITSLAESQLQTRQQIKKLEELQQKVSYKGDPIVQHRPMLEERIVELFRNLMKSAFVVERQPCMPMHPDRPLVIKTGVQFTTKVRLLVKFPELNYQLKIKVCIDKDSGDVAALRGSRKFNILGTNTKVMNMEESNNGSLSAEFKHLVCGRSSPSQRASGCRRGLGRASQDTCLFLFLQTLREQRCGNGGRANCDASLIVTEELHLITFETEVYHQGLKIDLETHSLPVVVISNICQMPNAWASILWYNMLTNNPKNVNFFTKPPIGTWDQVAEVLSWQFSSTTKRGLSIEQLTTLAEKLLGPGVNYSGCQITWAKFCKENMAGKGFSFWVWLDNIIDLVKKYILALWNEGYIMGFISKERERAILSTKPPGTFLLRFSESSKEGGVTFTWVEKDISGKTQIQSVEPYTKQQLNNMSFAEIIMGYKIMDATNILVSPLVYLYPDIPKEEAFGKYCRPESQEHPEADPGSAAPYLKTKFICVTPTTCSNTIDLPMSPRTLDSLMQFGNNGEGAEPSAGGQFESLTFDMELTSECATSPM

SEQ ID NO: 52907 - protein, 161 aa, Homo sapiens
MALQLWALTLLGLLGAGASLRPRKLDFFRSEKELNHLAVDEASGVVYLGAVNALYQLDAKLQLEQQVATGPALDNKKCTPPIEASQCHEAEMTDNVNQLLLLDPPRKRLVECGSLFKGICALRALSNISLRLFYEDGSGEKSFVASNDEGVATVGLVSSTG

SEQ ID NO: 52908 - protein, 819 aa, Homo sapiens
MAKPLTDQEKRRQISIRGIVGVENVAELKKSFNRHLHFTLVKDRNVATTRDYYFALAHTVRDHLVGRWIRTQQHYYDKCPKRVYYLSLEFYMGRTLQNTMINLGLQNACDEAIYQLGLDIEELEEIEEDAGLGNGGLGRLAACFLDSMATLGLAAYGYGIRYEYGIFNQKIRDGWQVEEADDWLRYGNPWEKSRPEFMLPVHFYGKVEHTNTGTKWIDTQVVLALPYDTPVPGYMNNTVNTMRLWSARAPNDFNLRDFNVGDYIQAVLDRNLAENISRVLYPNDNFFEGKELRLKQEYFVVAATLQDIIRRFKASKFGSTRGAGTVFDAFPDQVAIQLNDTHPALAIPELMRIFVDIEKLPWSKAWELTQKTFAYTNHTVLPEALERWPVDLVEKLLPRHLEIIYEINQKHLDRIVALFPKDVDRLRRMSLIEEEGSKRINMAHLCIVGSHAVNGVAKIHSDIVKTKVFKDFSELEPDKFQNKTNGITPRRWLLLCNPGLAELIAEKIGEDYVKDLSQLTKLHSFLGDDVFLRELAKVKQENKLKFSQFLETEYKVKINPSSMFDVQVKRIHEYKRQLLNCLHVITMYNRIKKDPKKLFVPRTVIIGGKAAPGYHMAKMIIKLITSVADVVNNDPMVGSKLKVIFLENYRVSLAEKVIPATDLSEQISTAGTEASGTGNMKFMLNGALTIGTMDGANVEMAEEAGEENLFIFGMRIDDVAALDKKGYEAKEYYEALPELKLVIDQIDNGFFSPKQPDLFKDIINMLFYHDRFKVFADYEAYVKCQDKVSQLYMKSDAVRPKHWPGKDSVQTGPLRETVR

SEQ ID NO: 52909 - protein, 1163 aa, Homo sapiens
MLNGAGLDKALKMSLPRRSRIRSSVGPVRSSLGYKKAEDEMSRATSVGDQLEAPARTIYLNQPHLNKFRDNQISTAKYSVLTFLPRFLYEQIRRAANAFFLFIALLQQIPDVSPTGRYTTLVPLIIILTIAGIKEIVEDFKRHKADNAVNKKKTIVLRNGMWHTIMWKEVAVGDIVKVVNGQYLPADVVLLSSSEPQAMCYVETANLDGETNLKIRQGLSHTADMQTREVLMKLSGTIECEGPNRHLYDFTGNLNLDGKSLVALGPDQILLRGTQLRNTQWVFGIVVYTGHDTKLMQNSTKAPLKRSNVEKVTNVQILVLFGILLVMALVSSAGALYWNRSHGEKNWYIKKMDTTSDNFGYNLLTFIILYNNLIPISLLVTLEVVKYTQALFINWDTDMYYIGNDTPAMARTSNLNEELGQVKYLFSDKTGTLTCNIMNFKKCSIAGVTYGHFPELAREPSSDDFCRMPPPCSDSCDFDDPRLLKNIEDRHPTAPCIQEFLTLLAVCHTVVPEKDGDNIIYQASSPDEAALVKGAKKLGFVFTARTPFSVIIEAMGQEQTFGILNVLEFSSDRKRMSVIVRTPSGRLRLYCKGADNVIFERLSKDSKYMEETLCHLEYFATEGLRTLCVAYADLSENEYEEWLKVYQEASTILKDRAQRLEECYEIIEKNLLLLGATAIEDRLQAGVPETIATLLKAEIKIWVLTGDKQETAINIGYSCRLVSQNMALILLKEDSLDATRAAITQHCTDLGNLLGKENDVALIIDGHTLKYALSFEVRRSFLDLALSCKAVICCRVSPLQKSEIVDVVKKRVKAITLAIGDGANDVGMIQTAHVGVGISGNEGMQATNNSDYAIAQFSYLEKLLLVHGAWSYNRVTKCILYCFYKNVVLYIIEIFTALPPFTLGIFERSCTQESMLRFPQLYKITQNGEGFNTKVFWGHCINALVHSLILFWFPMKALEHDTVLTSGHATDYLFVGNIVYTYVVVTVCLKAGLETTAWTKFSHLAVWGSMLTWLVFFGIYSTIWPTIPIAPDMRGQATMVLSSAHFWLGLFLVPTACLIEDVAWRAAKHTCKKTLLEEVQELETKSRVLGKAVLRDSNGKRLNERDRLIKRLGRKTPPTLFRGSSLQQGVPHGYAFSQEEHGAVSQEEVIRAYDTTKKKSRKK

SEQ ID NO: 52910 - protein, 356 aa, Homo sapiens
MLLGFRRGRRSHFKHIIHGLLPAASVAPKAAVPRTPPPRSPNPSPERPRSALAAAILATTLTGRTVAIPQPRQRSRSESDVSSVEQDSFIEPYATTSQLRPRPNWQSEMGRRSSLPSFETLDYGDEEDIETQLSSSGKELGDVSAREDRGGHSDDLYAVPHRNQVPLLHEVNSEDDENISHQDGFPGSPPAPQRTQQKDGKHPVLNLKDEKPPLCEKPPPSPDITGRARQRYTEITREKFEALKEENMDLNNMNQSLTLELNTMKQAMKELQLKLKGMEKEKRKLKEAEKASSQEVAAPELLYLRKQAQELVDENDGLKMTVHRLNVELSRYQTKFRHLSKEEVTFPIVKISFSDF

SEQ ID NO: 52911 - protein, 17 aa, Homo sapiens
MPKNKKRNTPHRGSSAG

SEQ ID NO: 52912 - protein, 94 aa, Homo sapiens
MVVGESGLGKSTLINSLFLTDLYPERVIPGAAEKIERTVQIEASTVEIEERGVKLRLTVVDTPGYGDAINCRDWYAPPCPGICICLLNILHKFI

SEQ ID NO: 52913 - protein, 44 aa, Homo sapiens
MWLGTSGKSGLPGHCLENPLQECHPAQLEEWALKGLGWTLTSAT

SEQ ID NO: 52914 - protein, 58 aa, Homo sapiens
MALRVVRSVRALLCTLRAVPSPAAPCPPRPWQLGVGAVRTLRTGPALLSGSVGRCCLL

SEQ ID NO: 52915 - protein, 813 aa, Homo sapiens
MKPILLFMERACISLGSRTRAIGNAAKSQIVTNVRNTIHGFKKLHGRSFDDPIVQTERIRLPYELQKMPNGSAGVKVRYLEEERPFAIEQVTGMLLAKLKETSENALKKPVADCVISIPSFFTDAERRSVMAAAQVAGLNCLRLMNETTAVALAYGIYKQDLPPLDEKPRNVVFIDMGHSAYQVLVCAFNKGKLKVLATTFDPYLGGRNFDEALVDYFCDEFKTKYKINVKENSRALLRLYQECEKLKKLMSANASDLPLNIECFMNDLDVSSKMNRAQFEQLCASLLARVEPPLKAVMEQANLQREDISSIEIVGGATRIPAVKEQITKFFLKDISTTLNADEAVARGCALQCAILSPAFKVREFSITDLVPYSITLRWKTSFEDGSGECEVFCKNHPAPFSKVITFHKKEPFELEAFYTNLHEVPYPDARIGSFTIQNVFPQSDGDSSKVKVKVRVNIHGIFSVASASVIEKQNLEGDHSDAPMETETSFKNENKDNMDKMQVDQEEGHQKCHAEHTPEEEIDHTGAKTKSAVSDKQDRLNQTLKKGKVKSIDLPIQSSLCRQLGQDLLNSYIENEGKMIMQDKLEKERNDAKNAVEEYVYDFRDRLGTVYEKFITPEDLSKLSAVLEDTENWLYEDGEDQPKQVYVDKLQELKKYGQPIQMKYMEHEERPKALNDLGKKIQLVMKVIEAYRNKDERYDHLDPTEMEKVEKCISDAMSWLNSKMNAQNKLSLTQDPVVKVSEIVAKSKELDNFCNPIIYKPKPKAEVPEDKPKANSEHNGPMDGQSGTETKSDSTKDSSQHTKSSGEMEVD

SEQ ID NO: 52916 - protein, 40 aa, Homo sapiens
MTRGGPGGRPGLPQPPPLLLLLLLLPLLLVTAEPPKPADT

SEQ ID NO: 52917 - protein, 320 aa, Homo sapiens
VGILSGLHLTFWGPGPCLSPPQIKAEDPSGDSAPAAPLPPQPAQPHLPQAQLMLTGSQLAGLTALMPAQQQLLLQQAQAQLLAAAVQQSSAAAAANAAAAAAAASASSSTSSSSSSSASSSTSQPPASSGGGDLPPPQPASQPPGTPQLTLSQPIQLTAQDIQQLLQLQQLVLVPGHHLQPPAQFLLPQAQQSQPGLLPTPNLFQLPQQTQGALLTSQPRAGLPTQAVTRPTLPDPHLSHPQPPKCLEPPSHPEEPSDLEELEQFARTFKQRRIKLGFTQGDVGLAMGKLYGNDFSQTTISRFEALNLSFKNMCKLKPLL

SEQ ID NO: 52918 - protein, 35 aa, Homo sapiens
MAMTWIVFSLWPLTVFMGHIGGHSLFSCEPITLRM

SEQ ID NO: 52919 - protein, 119 aa, Homo sapiens
MWTEEAGATAEAQESGIRNKSSSSSQIPVVGVVTEDDEAQDVFKPMDLNRVIKLLEETDKDGLEEKQLKFVKKLVQCYQNGLPLRDLAQIFKILNLCSGKIKNQPRFIESAYDIIKLCG

SEQ ID NO: 52920 - protein, 115 aa, Homo sapiens
MGTSLLCWVVLGFLGTDHTGAGVSQSPRYKVTKRGQDVALRCDPISGHVSLYWYRQALGQGPEFLTYFNYEAQQDKSGLPNDRFSAERPEGSVSTLTIQRTEQRDSAMYRCASSL

SEQ ID NO: 52921 - protein, 210 aa, Homo sapiens
MKFFLLLFTIGFCWAQYSPNTQQGRTSIVHLFEWRWVDIALECERYLAPKGFGGVQVSPPNENVAIYNPFRPWWERYQPVSYKLCTRSGNEDEFRNMVTRCNNVGVRIYVDAVINHMCGNAVSAGTSSTCGSYFNPGSRDFPAVPYSGWDFNDGKCKTGSGDIENYNDATQVIDLGGEPIKSSDYFGNGRVTEFKYGAKLGTVIRKWNGE

SEQ ID NO: 52922 - protein, 179 aa, Homo sapiens
MNFSEVFKLSSLLCKFSPDGKYLASCVQYRLVVRDVNTLQILQLYTCLDQIQHIEWSADSLFILCAMYKRGLVQVWSLEQPEWHCKIDEGSAGLVASCWSPDGRHILNTTEFHLRITVWSLCTKSVSYIKYPKACLQGITFTRDGRYMALAERRDCKDYVSIFVCSDWQLLRYKILLYS

SEQ ID NO: 52923 - protein, 685 aa, Homo sapiens
MAAGKSGGSAGEITFLEALARSESKRDGGFKNNWSFDHEEESEGDTDKDGTNLLSVDEDEDSETSKGKKLNRRSEIVANSSGEFILKTYVRRNKSESFKTLKGNPIGLNMLSNNKKLSENTQNTSLCSGTVVHGRRFHHAHAQIPVVKTAAQRKEYPPHVQKVEINPVRLSRLQGVERIMKKTEESESQVEPEIKRKVQQKRHCSTYQPTPPLSPASKKCLTHLEDLQRNCRQAITLNESTGPLLRTSIHQNSGGQKSQNTGLTTKKFYGNNVEKVPIDIIVNCDDSKHTYLQTNGKVILPGAKIPKITNLKERKTSLSDLNDPIILSSDDDDDNDRTNRRESISPQPADSACSSPAPSTGKVEAALNENTCRAERELRSIPEDSELNTVTLPRKARMKDQFGNSIINTPLKRRKVFSQEPPDALALSCQSSFDSVILNCRSIRVGTLFRLLIEPVIFCLDFIKIQLDEPDHDPVEIILNTSDLTKCEWCNVRKLPVVFLQAIPAVYQKLSIQLQMNKEDKVWNDCKGVNKLTNLEEQYIILIFQNGLDPPANMVFESIINEIGIKNNISNFFAKIPFEEANGRLVACTRTYEESIKGSCGQKENKIKTVSFESKIQLRSKQEFQFFDEEEETGENHTIFIGPVEKLIVYPPPPAKGGISVTNEDLHCLNEGEFLNDVIIDFYLK

SEQ ID NO: 52924 - protein, 62 aa, Homo sapiens
RRSLNFGGSTGTVPAPRLAPTGVSWADKVKAHHTGSTASSEITPAQSCPPMTVQKASRKNGK

SEQ ID NO: 52925 - protein, 274 aa, Homo sapiens
FPFAPPGAAAEPHSLRYNLTVLSWDGSVQSGFLTEVHLDGQPFLRCDRQKCRAKPQGQWAEDVLGNKTWDRETRDLTGNGKDLRMTLAHIKDQKEVPPMVNVTRSEASEGNITVTCRASGFYPWNITLSWRQDGVSLSHDTQQWGDVLPDGNGTYQTWVATRICQGEEQRFTCYMEHSGNHSTHPVPSGKVLVLQSHWQTFHVSAVAAAAIFVIIIFYVRCCKKKTSAAEGPELVSLQVLDQHPVGTSDHRDATQLGFQPLMSDLGSTGSTEGA

SEQ ID NO: 52926 - protein, 624 aa, Homo sapiens
MVVSEVDIAKADPAAASHPLLLNGDATVAQKNPGSVAENNLCSQYEEKVRPCIDLIDSLRALGVEQDLALPAIAVIGDQSSGKSSVLEALSGVALPRGSGIVTRCPLVLKLKKLVNEDKWRGKVSYQDYEIEISDASEVEKEINKAQNAIAGEGMGISHELITLEISSRDVPDLTLIDLPGITRVAVGNQPADIGYKIKTLIKKYIQRQETISLVVVPSNVDIATTEALSMAQEVDPEGDRTIGILTKPDLVDKGTEDKVVDVVRNLVFHLKKGYMIVKCRGQQEIQDQLSLSEALQREKIFFENHPYFRDLLEEGKATVPCLAEKLTSELITHICKSLPLLENQIKETHQRITEELQKYGVDIPEDENEKMFFLIDKVNAFNQDITALMQGEETVGEEDIRLFTRLRHEFHKWSTIIENNFQEGHKILSRKIQKFENQYRGRELPGFVNYRTFETIVKQQIKALEEPAVDMLHTVTDMVRLAFTDVSIKNFEEFFNLHRTAKSKIEDIRAEQEREGEKLIRLHFQMEQIVYCQDQVYRGALQKVREKELEEEKKKKSWDFGAFQSSSATDSSMEEIFQHLMAYHQKRSHCLWPSLPMTAPSWLRVTEEALLTPRMPSLSWGVQ

SEQ ID NO: 52927 - protein, 141 aa, Homo sapiens
MTTSGALFPSLVPGSRGASNKYLVEFRAGKMSLKGTTVTPDKRKGLVYIQQTDDSLIHFCWKDRTSGNVEDEPKTDQDEEHCRKVNEYLNNPPMPGALGASGSSGHELSALGGEGGLQSLLGNMSHSQLMQLIGPAGLGGL

SEQ ID NO: 52928 - protein, 81 aa, Homo sapiens
MTKFQEAVTFKDVAVAFTEEELGLLDSAQRKLYRDVMLENFRNLVSVGHQSFKPDMISQLEREEKLWMKELQTQRGKHSET

SEQ ID NO: 52929 - protein, 182 aa, Homo sapiens
MKSLLLLVLISICWADHLSDNYTLDHDRAIHIQENGPHLLVEAEQAKVFSHRGGNVTLPCKFYRDPTAFGSGIHKIRIKWTKLTSDYLKEVDVFVSMGYHKKTYGGYQGRVFLKGGSDSDASLVITDLTLEDYGRYKCEVIEGLEDDTVVVALDLQGVVFPYFPRLGRYNLNFHEAQQACLD

SEQ ID NO: 52930 - protein, 231 aa, Homo sapiens
MQKGKGRTSRIRRRKLCGSSESRGVNESHKSEFIELRKWLKARKFQDSNLAPACFPGTGRGLMSQTSLQEGQMIISLPESCLLTTDTVIRSYLGAYITKWKPPPSPLLALCTFLVSEKHAGHRSLWKPYLEILPKAYTCPVCLEPEVVNLLPKSLKAKAEEQRAHVQEFFASSRDFFSSLQPLFAEAVDSIFSYSALLWAWCTVNTRAVYLRPRQRECLSAEPDTCALAPY

SEQ ID NO: 52931 - protein, 133 aa, Homo sapiens
MFPFYSCWRTGLLLLLLAVAVRESWQTEEKTCDLVGEKGKESEKELALVKRLKPLFNKSFESTVGQGSDTYIYIFRVCREAGNHTSGAGLVQINKSNGKETVVGRLNETHIFNGSLHHWLLFMLLGGSYTSDW

SEQ ID NO: 52932 - protein, 187 aa, Homo sapiens
  MOD_RES (1)..(1): Any amino acid
XKTTPHPEVPQTKLAPKVPQRTHRPHPKPKTTLSPEELQTELVPATIFEPVSPIKEAPGTTFVPVTDLEPVTFRTEIPATTLATKTSKRTRPPRPRPKTTPSPQAPETKPAPKQTPRAPPKPKTSPRPRIPQTQPVPKVPQRVTAKPKTSPSPEVSYTTPAPLETRGIPFIPMISPSPSQEELQTTL

SEQ ID NO: 52933 - protein, 88 aa, Homo sapiens
SKEQQPGKCEGTRTVRLTYKNRLYFSVQARGETDREKLLLMYQTNDQIINGLFPLNKDLALEMAALLSQAALPATFNQMDGPPGTQCC

SEQ ID NO: 52934 - protein, 146 aa, Homo sapiens
RQRRDLDMEGRKIHVILARSTSMPQLGERSGVIRVKQYKQSLAIESDGKKGSKVFMYYFDNPGGQIPSWLINWAAKAGLELLTSSNPLASASQSAGITGMSHHTRPIRAEPSGKLRIRETSSSFWQTQTFCNRLSGRKRKDIKIKT

SEQ ID NO: 52935 - protein, 140 aa, Homo sapiens
MVQAHGGRSRAQPLTLSLGAAMTQPPPEKTPAKKHVRLQERTHLLCEHTPGGHPTLSAHCWTPPYPLGPSAPATQPQATGRRILEDPFKLCQPRRPGHPWPRLQGPIQDHLAKSPEPCLSRPGTEPGGRRLHQCQLHPRL

SEQ ID NO: 52936 - protein, 113 aa, Homo sapiens
MGAPPGYRPSAWVHLLHQLPRADFQLRPVPSVFAPQEQEYQQALLLVAALAGLGLGLSLIFIAVYLIRFCCCRPPEPPGSKIPSPGGGCVTWSCIVALLAGWCWRRWRGWARR

SEQ ID NO: 52937 - protein, 208 aa, Homo sapiens
MTQQPLRGVTSLRFNQDQSCFCCAMETGVRIYNVEPLMEKGHLDHEQVGSMGLVEMLHRSNLLALVGGGSSPKFSEISVLIWDDAREGKDSKEKLVLEFTFTKPVLSVRMRHDKIVIVLKNRIYVYSFPDNPRKLFEFDTRDNPKGERAQIHRWLCDLCPSLEKQLLVFPGHKCGSLQLVDLASTKPGTSSAPFTINAHQSDIACVSL

SEQ ID NO: 52938 - protein, 182 aa, Homo sapiens
  MOD_RES (1)..(1): Any amino acid
XRKLEELIQGAQCVHSPRFPAQYLKLRERMQIQKEMERLRFLLSDQSLLLLPEYHQRVEVLRTLGYVDEAGTVKLAGRVACAMSSHELLLTELMFDNALSTLRPEEIAALLSGLVCQSPGDAGDQLPNTLKQGIERVRAVAKRIGEVQVACGLNQTVEEFVGELNFGLVEVVYEWARGMVST

SEQ ID NO: 52939 - protein, 59 aa, Homo sapiens
  MOD_RES (1)..(1): Any amino acid
XKGYMVVLRLATGFSHPLTQSAVMGHRSRRSRQPWTPALGHSKTSGEWRGGARPGPCGC

SEQ ID NO: 52940 - protein, 77 aa, Homo sapiens
TLAGEYFHKAAQGGHMEGTLWCSLYYITGNLETFPRDPEKAVVKSLSTSVLGHPHTDTLALQKIVLHNTFGFKFNLT

SEQ ID NO: 52941 - protein, 36 aa, Homo sapiens
MSASPDDLSTGGRLQNMTVDECFQSRNTVLQGQPFG

SEQ ID NO: 52942 - protein, 480 aa, Homo sapiens
GKVKLQQNPGKFDELDMSPGDPKWLDVIERDLHRQFPFHEMFVSRGGHGQQDLFRVLKAYTLYRPEEGYCQAQAPIAAVLLMHMPAEQAFWCLVQICEKYLPGYYSEKLEAIQLDGEILFSLLQKVSPVAHKHLSRQKIDPLLYMTEWFMCAFSRTLPWSSVLRVWDMFFCEGVKIIFRVGLVLLKHALGSPEKVKACQGQYETIERLRSLSPKIMQEAFLVQEVVELPVTERQIEREHLIQLRRWQETRELPPSEFLQVAEATWLVLNVSSHSGAAVQAAGVTKIARSVIAPLAEHHVSVLMLSTYQTDFILVREQDLSVVIHTLAQEFDIYREVGGEPVPVTRDDSSNGFPRTQHGPSPTVHPIQSPQNRFCVLTLDPETLPAIATTLIDVLFYSHRFPSDLLLTSSSGELWRMVRIGGQPLGFDECGIVAQIAGPLAAADISAYYISTFNFDHALVPEDGIGSVIEVLQRRQEGLAS

SEQ ID NO: 52943 - protein, 140 aa, Homo sapiens
MALLTAAARLLGTKGIRFRGFSIPECQKLLPKAKGGEEPLPEGLFWLLVTGHIPTEEQVSWLSKEWAKRAALPSHVVTMLDNFPTNLHPMSQLSAAVTALNSESNFARAYAQGISRTKYWELIYEDSMDLIAKLPCVAAK

SEQ ID NO: 52944 - protein, 92 aa, Homo sapiens
  MOD_RES (1)..(1): Any amino acid
XHLRPGARYTVRVAALNGVSGPAAAAGTTYAQVTVSTGPGAPWEEDEIRRDRVEPQSVSLSWREPIPAGAPGANDTEYEIRYYEKDTCADFC

SEQ ID NO: 52945 - protein, 162 aa, Homo sapiens
MQRKHVPTSDLTLIPAMWIPSSTLPRPARPSQDVRTVQALQTASHLSQQADLRSIVEEIEDLVARLDELGGVYLQFEEGLETTALFVAATYKLMDHVGTEPSIKEDQVIQLMNAIFSKKNFESLSEAFSVASAAAVLSHNRYHVPVVVVPEGSASDTHEQAI

SEQ ID NO: 52946 - protein, 1069 aa, Homo sapiens
MATQVMGQSSGGGGLFTSSGNIGMALPNDMYDLHDLSKAELAAPQLIMLANVALTGEVNGSCCDYLVGEERQMAELMPVGDNNFSDSEEGEGLEESADIKGEPHGLENMELRSLELSVVEPQPVFEASGAPDIYSSNKDLPPETPGAEDKGKSSKTKPFRCKPCQYEAESEEQFVHHIRVHSAKKFFVEESAEKQAKARESGSSTAEEGDFSKGPIRCDRCGYNTNRYDHYTAHLKHHTRAGDNERVYKCIICTYTTVSEYHWRKHLRNHFPRKVYTCGKCNYFSDRKNNYVQHVRTHTGEKPFKCDQCSYVASNQHEVTRHARQVHNGPKPLNCPHCDYKTADRSNFKKHVELHVNPRQFNCPVCDYAASKKCNLQYHFKSKHPTCPNKTMDVSKVKLKKTKKREADLPDNITNEKTEIEQTKIKGDVAGKKNEKSVKAEKRDVSKEKKPSNNVSVIQVTTRTRKSVTEVKEMDVHTGSNSEKFSKTKKSKRKLEVDSHSLHGPVNDEESSTKKKKKVESKSKNNSQEVPKGDSKVEENKKQNTCMKKSTKKKTLKNKSSKKSSKPPQKEPVEKGSAQMDPPQMGPAPTEAVQKGPVQVEPPPPMEHAQMEGAQIRPAPDEPVQMEVVQEGPAQKELLPPVEPAQMVGAQIVLAHMELPPPMETAQTEVAQMGPAPMEPAQMEVAQVESAPMQVVQKEPVQMELSPPMEVVQKEPVQIELSPPMEVVQKEPVKIELSPPIEVVQKEPVQMELSPPMGVVQKEPAQREPPPPREPPLHMEPISKKPPLRKDKKEKSNMQSERARKEQVLIEVGLVPVKDSWLLKESVSTEDLSPPSPPLPKENLREEASGDQKLLNTGEGNKEAPLQKVGAEEADESLPGLAANINESTHISSSGQNLNTPEGETLNGKHQTDSIVCEMKMDTDQNTRENLTGINSTVEEPVSPMLPPSAVEEREAVSKTALASPPATMAANESQEIDEDEGIHSHEGSDLSDNMSEGSDDSGLHGARPVPQESSRKNAKEALAVKAAKGDFVCIFCDRSFRKGKDYSKHLNRHLVNVYYLEEAAQGQE

SEQ ID NO: 52947 - protein, 168 aa, Homo sapiens
CARLDTIISKYPAANAYTIPSDFISKRDFSNSCSSMFQLPSFMKALKFETPAPNYYNASVSCCKQRNNVCTRAGFMSKTQRGSFAFADKGPPPGHYDINESLVKQSPNTLMSCFKSKTNRGLKLTSTGPGPGYYNPSDCTKVPKKTLFPGGSKASDLAGHLPKSTQPT

SEQ ID NO: 52948 - protein, 852 aa, Homo sapiens
MNSVLTKHGSPPRSWLSLCSGTDDQSPAEKKGLRCQNPACMDKGRAAKVCHHADCQQLHRRGPLNLCEACDSKFHSTMHYDGHVRFDLPPQGSVLARNVSTRSCPPRTSPAVDLEEEEEESSVDGKGDRKSTGLKLSKKKARRRHTDDPSKECFTLKFDLNVDIETEIVPAMKKKSLGEVLLPVFERKGIALGKVDIYLDQSNTPLSLTFEAYRFGGHYLRVKAPAKPGDEGKVEQGMKDSKSLSLPILRPAGTGPPALERVDAQSRRESLDILAPGRRRKNMSEFLGEASIPGQEPPTPSSCSLPSGSSGSTNTGDSWKNRAASRFSGFFSSGPSTSAFGREVDKMEQLEGKLHTYSLFGLPRLPRGLRFDHDSWEEEYDEDEDEDNACLRLEDSWRELIDGHEKLTRRQCHQQEAVWELLHTEASYIRKLRVIINLFLCCLLNLQESGLLCEVEAERLFSNIPEIAQLHRRLWASVMAPVLEKARRTRALLQPGDFLKGFKMFGSLFKPYIRYCMEEEGCMEYMRGLLRDNDLFRAYITWAEKHPQCQRLKLSDMLAKPHQRLTKYPLLLKSVLRKTEEPRAKEAVVAMIGSVERFIHHVNACMRQRQERQRLAAVVSRIDAYEVVESSSDEVDKLLKEFLHLDLTAPIPGASPEETRQLLLEGSLRMKEGKDSKMDVYCFLFTDLLLVTKAVKKAERTRVIRPPLLVDKIVCRELRDPGSFLLIYLNEFHSAVGAYTFQASGQALCRGWVDTIYNAQNQLQQLRAQEPPGSQQPLQSLEEEEDEQEEEEEEEEEEEEGEDSGTSAASSPTIMRKSSGSPDSQHWKLTLAQLYRIRTTLLLNSTLTASEV

SEQ ID NO: 52949 - protein, 259 aa, Homo sapiens
MSQEGDYGRWTISSSDESEEEKPKPDKPSTSSLLCARQGAANEPRYTCSEAQKAAHKRKISPVKFSNTDSVLPPKRQKSGSQEDLGWCLSSSDDELQPEMPQKQAEKVVIKKEKDISAPNDGTAQRTENHGAPACHRLKEEEDEYETSGEGQDIWDMLDKGNPFQFYLTRVSGVKPKYNSGALHIKDILSPLFGTLVSSAQFNYCFDVDWLVKQYPPEFRKKPILLVHGDKREAKAHLHAQAKPYENISLCQENDAAAL

SEQ ID NO: 52950 - protein, 140 aa, Homo sapiens
MHRLQLSDTGTYTCQAITEVNVYGSGTLVLVTEEQSQGWHRCSDAPPRASALPAPPTGSALPDPQTASALPDPPAASALPAALAVISFLLGLGLGVACVLARTQIKKLCSWRDKNSAACVVYEDMSHSRCNTLSSPNQYQ

SEQ ID NO: 52951 - protein, 1045 aa, Homo sapiens
MEGLEEAEANCSVAFAEAQRWVEAVTEKNFETKDFRASLENGVLLCDLINKLKPGVIKKINRLSTPIAGLDNINVFLKACEQIGLKEAQLFHPGDLQDLSNRVTVKQEETDRRVKNVLITLYWLGRKAQSNPYYNGPHLNLKAFENLLGQALTKALEDSSFLKRSGRDSGYGDIWCPERGEFLAPPRHHKREDSFESLDSLGSRSLTSCSSDITLRGGREGFESDTDSEFTFKMQDYNKDDMSYRRISAVEPKTALPFNRFLPNKSRQPSYVPAPLRKKKPDKHEDNRRSWASPVYTEADGTFSRLFQKIYGENGSKSMSDVSAEDVQNLRQLRYEEMQKIKSQLKEQDQKWQDDLAKWKDRRKSYTSDLQKKKEEREEIEKQALEKSKRSSKTFKEMLQDRESQNQKSTVPSRRRMYSFDDVLEEGKRPPTMTVSEASYQSERVEEKGATYPSEIPKEDSTTFAKREDRVTTEIQLPSQSPVEEQSPASLSSLRSRSTQMESTRVSASLPRSYRKTDTVRLTSVVTPRPFGSQTRGISSLPRSYTMDDAWKYNGDVEDIKRTPNNVVSTPAPSPDASQLASSLSSQKEVAATEEDVTRLPSPTSPFSSLSQDQAATSKATLSSTSGLDLMSESGEGEISPQREVSRSQDQFSDMRISINQTPGKSLDFGFTIKWDIPGIFVASVEAGSPAEFSQLQVDDEIIAINNTKFSYNDSKEWEEAMAKAQETGHLVMDVRRYGKAGSPETKWIDATSGIYNSEKSSNLSVTTDFSESLQSSNIESKEINGIHDESNAFESKASESISLKNLKRRSQFFEQGSSDSVVPDLPVPTISAPSRWVWDQEEERKRQERWQKEQDRLLQEKYQREQEKLREEWQRAKQEAERENSKYLDEELMVLSSNSMSLTTREPSLATWEATWSEGSKSSDREGTRAGEEERRQPQEEVVHEDQGKKPQDQLVIERERKWEQQLQEEQEQKRLQAEAEEQKRPAEEQKRQAEIERETSVRIYQYRRPVDSYDIPKTEEASSGFLPGDRNKSRSTTELDDYS

SEQ ID NO: 52952 - protein, 64 aa, Homo sapiens
MVSWGRFICLVVVTMATLSLARPSFSLVEDTTLEPEDAISSGDDEDDTDGAEDFVSENSNNKSK

SEQ ID NO: 52953 - protein, 71 aa, Homo sapiens
  MOD_RES (1)..(1): Any amino acid
XNHVMLAKTAEDMGKKFYIVWTKLDMDLSTGALPEVQLLQIRENVLENLQKERSSRNQQVYPNHSHVPLAC

SEQ ID NO: 52954 - protein, 227 aa, Homo sapiens
  MOD_RES (1)..(1): Any amino acid
XSQEETKERRHSHTIGGLPESDDQSELPSPPALPMSLSAKGQLTNIVHGSVLSLASSASSTYSSQIRKLRRELESSQEKVATLTSQLSANANLVAAFEQSLVNMTSRLRHLAETAEEKDTELLDLRETIDFLKKKNSEAQAVIQGALNASETTPKELRIKRQNSSDSISSLNSITSHSSIGSSKDADAKKKKKKSWLRSSFNKAFSIKKGPKSASSYSDIEEIATPD

SEQ ID NO: 52955 - protein, 226 aa, Homo sapiens
  MOD_RES (1)..(1): Any amino acid
XSDLGKQIKLKEVEGTLLQPATVDNWSQIQSFEAKPDDLLICTYPKAGTTWIQEIVDMIEQNGDVEKCQRAIIQHRHPFIEWARPPQPSGVEKAKAMPSPRILKTHLSTQLLPPSFWENNCKFLYVARNAKDCMVSYYHFQRMNHMLPDPGTWEEYFETFINGKVVWGSWFDHVKGWWEMKDRHQILFLFYEDIKRELWGIGKTTSLLPRMRGLMKSIEERWKEPP

SEQ ID NO: 52956 - protein, 131 aa, Homo sapiens
MDLPDSASRVFCGRILSMVNTDDVNAIILAQKNMLDRFEKTNEMLLNFNNLSSARLQQMSERFLHHTRTLVEMKRDLDSIFRRIRTLKGKLARQHPEAFSHIPEASFLEEEDEDPIPPSTTTTIATSEQST

SEQ ID NO: 52957 - protein, 42 aa, Homo sapiens
  MOD_RES (1)..(1): Any amino acid
XKTRKLRGHVSHGHGRIGKHRKHPGGRGNAGGLHHHRINFDK

SEQ ID NO: 52958 - protein, 147 aa, Homo sapiens
MSRKGPRAEVCADCSAPGVCWCVTSAAACTGAWDATSPLSSTFATAPGLPRCCRWCTRLPATGPTPSGSTPCWTPHKCRAAGVKPTPKTKSTPSSQSSSGPSTRCWHLCTSFPAGTMMESPPKTSASNYTRACGQATWRHVCACSPW

SEQ ID NO: 52959 - protein, 653 aa, Homo sapiens
MELENDYCLNDYNISEGCTLKLVLAMRGGPINTRRVPTDDPLRKMAEYLDSSRVEVWEKTSCSKQVTFLVYQEGDQLNFFPAVDRGDGTLTPLSDSSKKIDFHLHVLRRKGEHRMSGGSMYNSDTDEDEETEPSSSGQQIIENSITMNKMKLLKAKMKNMNLSKKPKKAVKIKPHPPVAPRPSSGSTAPSRHRLLRVLPNIGQSCSPAFGNAYPPEISRNGISSLATQLSAERYISSITGEFLKEDNSWENNTLSHFSSNVKLPPQIPHLELGNDQELADSVLHLGSSLPRQTKHFLGNLPSSNGNIVLPSEECVTEQSLLPKVGSLASFAEGNADEQSSGLEGACKVNLELLLTNADKGLKAPEQHLKHVAGVLNGESVETSVLNYRELSPHKNRLLSPLRCSAPMSLHNSLVKPERQSKCFEFGKLQPSSSQSLDVQNITDSSFSRTTCFQGVKVDSLGKRSDVISKVEARDITEMTNKASKEPVGCVNNISFLASLAGSTSRNRLQSTRGAGRLQNSGTGLSTNLQHFQEENFRKSSPQLEHTGVFLSTHGVGMNGNNAAAGKSVGECTTHHLPPVKAPLQTKKKTTNHCFLCGKKTGLASSYECRCGNNFCASHRYAETHGCTYDYKSAGRRYLHEANPVVNAPKLPKI

SEQ ID NO: 52960 - protein, 84 aa, Homo sapiens
MPVKKKRKSPGVAAAVAEDGGLKKCKISSYCRSQPPARLISGEEHFSSKKCLAWFYEYAGPDEVVGPEGMEKFCEDIGVEPENV

SEQ ID NO: 52961 - protein, 19 aa, Homo sapiens
MVGKVQIPIMLVGNKKDLH

SEQ ID NO: 52962 - protein, 59 aa, Homo sapiens
MTQQPLRGVTSLRFNQDQSCFCCAMETDHEQVGSMGLVEMLHRSNLLALVGGGSSPKFS

SEQ ID NO: 52963 - protein, 110 aa, Homo sapiens
MRKHHLQLGAAGSQEQEQTAEPLMGSSLLEEASVPSKNLVSMNSQPSLGGESLNLPNTNSILGVDDEVLAEGSPRSLSSVPDVTHHLVTMQSGRQSYEVSVLTAVNPQEV

SEQ ID NO: 52964 - protein, 121 aa, Homo sapiens
MLMPKKNRIAIYELLFKEGVMVAKKDVHMPKHPELADKNVPNLHVMKAMQSLKSRGYVKEQFAWRHFYWYLTNEGIQYLRDYLHLPPEIVPATLRRSRPETGRPRPKGLEGERPARLTRGE

SEQ ID NO: 52965 - protein, 379 aa, Homo sapiens
MDSFDLALLQEWDLESLWGEDILNQRNDSLVVEFQSSASRCRSVYEPDRNALRRKERERRNQETQQDDGTFNSSYSLFSEPYKTNKGDELSNRIQNTLGNYDEMKDFLTDRSNQSHLVGVPKPGVPQTPVNKIDEHFVADSRAQNQPSSICSTTTSTPAAVPVQQSKRGTMGWQKAGHPPSDGQQRATQQGSLRTLLGDGVGRQQPRAKQVCNVEVGLQTQERPPAMAAKHSSSGHCVQNFPPSLASKPSLVQQKPTAYVRPMDGQDQAPDESPKLKSSSETSVHCTSYRGVPASKPEPARAKAKLSKFSIPKQGEESRSGETNSCVEEIIRYPRVCFSNAVQTEPALPGPGCTGHSLWRICSVGPPGAGRRQPTCLCA

SEQ ID NO: 52966 - protein, 505 aa, Homo sapiens
  MOD_RES (1)..(1): Any amino acid
XVERGSPKSCFLFLGSVLCEVNWVSVLSDAWNSSPHPETRSMIVCLLFMMILLAKEVQLVDQTDSPLLSLLGQTSSLSWHLVDIVSYQSVLSYFSSHYPPSIILAKESYAELIMKLLKVSAGLSIPTDSQKHLDAVPKCQAFTHQMVQFLSTLEQNGKITLAVLEQEMSKLLDDIIVFNPPDMDSQTRHMALSSLFMEVLMMMNNATIPTAEFLRGSIRTWIGQKMHGLVVLPLLTAACQSLASVRHMAETTEACITAYFKESPLNQNSGWGPILVSLQVPELTMEEFLQECLTLGSYLTLYVYLLQCLNSEQTLRNEMKVLLILSKWLEQVYPSSVEEEAKLFLWWHQVLQLSLIQTEQNDSVLTESVIRILLLVQSRQNLVAEERLSSGILGAIGFGRKSPLSNRFRVVARSMAAFLSVQVPMEDQIRLRPGSELHLTPKAQQALNALESMASSKQYVEYQDQILQATQFIRHPGHCLQDGKSFLALLVNCLYPEVHYLDHIR

SEQ ID NO: 52967 - protein, 27 aa, Homo sapiens
MDRMTEDALRLNLLKRSLDPADERDDV

SEQ ID NO: 52968 - protein, 1643 aa, Homo sapiens
MQHQRQQQADHANEANYARGTRLPLSGEGPTSQPNSSKQTVLSWQAAIDAARQAKAAQTMSTSAPPPVGSLSQRKRQQYAKSKKQGNSSNSRPARALFCLSLNNPIRRACISIVEWKPFDIFILLAIFANCVALAIYIPFPEDDSNSTNHNLEKVEYAFLIIFTVETFLKIIAYGLLLHPNAYVRNGWNLLDFVIVIVGLFSVILEQLTKETEGGNHSSGKSGGFDVKALRAFRVLRPLRLVSGVPSLQVVLNSIIKAMVPLLHIALLVLFVIIIYAIIGLELFIGKMHKTCFFADSDIVAEEDPAPCAFSGNGRQCTANGTECRSGWVGPNGGITNFDNFAFAMLTVFQCITMEGWTDVLYWVNDAIGWEWPWVYFVSLIILGSFFVLNLVLGVLSGEFSKEREKAKARGDFQKLREKQQLEEDLKGYLDWITQAEDIDPENEEEGGEEGKRNTSMPTSETESVNTENVSGEGENRGCCGSLWCWWRRRGAAKAGPSGCRRWGQAISKSKLSRRWRRWNRFNRRRCRAAVKSVTFYWLVIVLVFLNTLTISSEHYNQPDWLTQIQDIANKVLLALFTCEMLVKMYSLGLQAYFVSLFNRFDCFVVCGGITETILVELEIMSPLGISVFRCVRLLRIFKVTRHWTSLSNLVASLLNSMKSIASLLLLLFLFIIIFSLLGMQLFGGKFNFDETQTKRSTFDNFPQALLTVFQILTGEDWNAVMYDGIMAYGGPSSSGMIVCIYFIILFICGNYILLNVFLAIAVDNLADAESLNTAQKEEAEEKERKKIARKESLENKKNNKPEVNQIANSDNKVTIDDYREEDEDKDPYPPCDVPVGEEEEEEEEDEPEVPAGPRPRRISELNMKEKIAPIPEGSAFFILSKTNPIRVGCHKLINHHIFTNLILVFIMLSSAALAAEDPIRSHSFRNTILGYFDYAFTAIFTVEILLKMTTFGAFLHKGAFCRNYFNLLDMLVVGVSLVSFGIQSSAISVVKILRVLRVLRPLRAINRAKGLKHVVQCVFVAIRTIGNIMIVTTLLQFMFACIGVQLFKGKFYRCTDEAKSNPEECRGLFILYKDGDVDSPVVRERIWQNSDFNFDNVLSAMMALFTVSTFEGWPALLYKAIDSNGENIGPIYNHRVEISIFFIIYIIIVAFFMMNIFVGFVIVTFQEQGEKEYKNCELDKNQRQCVEYALKARPLRRYIPKNPYQYKFWYVVNSSPFEYMMFVLIMLNTLCLAMQHYEQSKMFNDAMDILNMVFTGVFTVEMVLKVIAFKPKHYFTDAWNTFDALIVVGSVVDIAITEVNNSEESNRISITFFRLFRVMRLVKLLSRGEGIRTLLWTFIKSFQALPYVALLIAMLFFIYAVIGMQMFGKVAMRDNNQINRNNNFQTFPQAVLLLFRCATGEAWQEIMLACLPGKLCDPESDYNPGEEYTCGSNFAIVYFISFYMLCAFLIINLFVAVIMDNFDYLTRDWSILGPHHLDEFKRIWSEYDPEAKGRIKHLDVVTLLRRIQPPLGFGKLCPHRVACKRLVAMNMPLNSDGTVMFNATLFALVRTALKIKTEGNLEQANEELRAVIKKIWKKTSMKLLDQVVPPAGDDEVTVGKFYATFLIQDYFRKFKKRKEQGLVGKYPAKNTTIALQMLERML

SEQ ID NO: 52969 - protein, 158 aa, Homo sapiens
MSKCRKTPVQQLASPASFSPDILADIFELFAKNFSYGKPLNNEWQLPDPSEIFTCDHTELNAFLDLKNSLNEVKNLLSDKKLDEWHEHTAFTNKAGKIISHVRKSVNAELCTQAWCKFHEILCSFPLIPQEAFQNGKLNSLHLCEAPGAFIASLNHYL

SEQ ID NO: 52970 - protein, 89 aa, Homo sapiens
MKDEPRSTNLFMKLDSVFIWKEPFGLVLIIAPWNYPLNLTLVLLVGALAAGSCVVLKPSEISQGTEKVLAEVLPQYLDQSCFAVVLGGP

SEQ ID NO: 52971 - protein, 62 aa, Homo sapiens
MDERIQRKVEKLEQQCQKEAKEFAKKVQELQKSNQVAFQHFQELDEHISYVATKVCHLGDQL

SEQ ID NO: 52972 - protein, 51 aa, Homo sapiens
MARKLVMFRDVAIDFSQEEWECLDSAQRDLYRDVMLENYSNLVSLAHQIST

SEQ ID NO: 52973 - protein, 241 aa, Homo sapiens
MYERSYMHRDVITHVVCTKTDFIITASHDGHVKFWKKIEEGIEFVKHFRSHLGVIESIAVSSEGALFCSVGDDKAMKVFDVVNFDMINMLKLGYFPGQCEWIYCPGDAISSVAASEKSTGKIFIYDGRGDNQPLHIFDKLHTSPLTQIRLNPVYKAVVSSDKSGMIEYWTGPPHEYKFPKNVNWEYKTDTDLYEFAKCKAYPTSVCFSPDGKKIATIGSDRKVRIFRFVTGKLMRVFDESL

SEQ ID NO: 52974 - protein, 122 aa, Homo sapiens
MQTKGGQTWARRALLLGILWATAHLPLSGTSLPQRLPRATGNSTQCVISPSSEFPEGFFTRQERRDGGIIIYFLIIVYMFMAISIVCDEYFLPSLEIISECKWLESCPVTFWESVPHRYDCL

SEQ ID NO: 52975 - protein, 159 aa, Homo sapiens
  MOD_RES (1)..(1): Any amino acid
XLLERYPECGNLLLRPSGDGADGVSVTTRQMHNGTHVVRHYKVKREGPKYVIDVEQPFSCTSLDAVVNYFVSHTKKALVPFLLDEDYEKVLGYVEADKENGENVWVAPSAPGPEPKVFNGGLGRKLPVSSAQPLFPTAGLADMTAELQKKLEKRRALEH

SEQ ID NO: 52976 - protein, 212 aa, Homo sapiens
MWLLCRAAPWSRAPAVLFSSLGELSSISAQRSPGGPGGGASYSVRPSGRYPVARRAPSPVKPASLERVEGLGAGAGGAGRPFGLTPPTILKSSSLSIPHEPKEVRFVVRSVSARSRSPSPSPLPSPASGPGPGAPGPRRPFQQKPLQLWSKFDVGDWLESIHLGEHRDRFEDHEIEGAHLPALTKDDFVELGVTRVGHRMNIERALRQLDGS

SEQ ID NO: 52977 - protein, 143 aa, Homo sapiens
MTVGENEGVDDQGGWGKRLTTAGPSCSCADAFSDFTLARQGYPRMAFSACFGGIIFNILVGVGLGCLLQISRSHTEVKLEPDGLLVWVLAGALGLSLVFSLVSVPLQCFQLSRVYGFCLLLFYLNFLVVALLTEFGVIHLKSM

SEQ ID NO: 52978 - protein, 78 aa, Homo sapiens
  MOD_RES (1)..(1): Any amino acid
XKQPSEEDPDEGIKDLVEITLKKMDHDHDGKLSFADYELAVREETLLLEAFGPCLPDPKSQMEFEAQVFKDPNEFNDM

SEQ ID NO: 52979 - protein, 189 aa, Homo sapiens
EVPDPNRPQRLGLHQREVFLFNDLLVVTKIFQKKKILVTYSFRQSFPLVEMHMQLFQNSYYQFGIKLLSAVPGGERKVLIIFNAPSLQDRLRFTSDLRESIAEVQEMEKYRVESELEKQKGMMRPNASQPGGAKDSVNGTMARSSLEDTYGAGDGLKRGALSSSLRDLSDAGVPGKTTSKSSSWGHLRI

SEQ ID NO: 52980 - protein, 129 aa, Homo sapiens
MSAEVIHQVEEALDTDEKEMLLFLCRDVAIDVVPPNVRDLLDILRERGKLSVGDLAELLYRVRRFDLLKRILKMDRKAVETHLLRNPHLVSDYRVLMAEIGEDLDKSDVSSLIFLMKDYMGRGKISKEK

SEQ ID NO: 52981 - protein, 114 aa, Homo sapiens
MGSTDSKLNFRKAVIQLTTKTQAVEKLVQGAESGCHSEKEKQIVLNCSRLLTRVLPYIFEDPDWRGFFWSTVPGAGRGGGEEDDEHARPLAESLLLAIADLLFCPDFTVQSHRR

SEQ ID NO: 52982 - protein, 94 aa, Homo sapiens
MGVQVETISPGDGRTFPKRGQTCVVHYTGMLEDGKKFDSSRDRNKPFKFMLGGIFIRFKNKKSEKSHPHAIPSDQYPHKKLLLLMFLVLWFKHI

SEQ ID NO: 52983 - protein, 130 aa, Homo sapiens
MENTGEQVVCLMAYHLLFAMFVWSYWKTIFTLPMNPSKEFHLSYAEKDLLEREPRGEAHQEVLRRAAKDLPIYTRTMSGAIRYCDRCQLIKPDRCHHCSVCDKCILKMDHHCPWVNNCVGFSNYKFFLLF

SEQ ID NO: 52984 - protein, 35 aa, Homo sapiens
  MOD_RES (1)..(1): Any amino acid
XLETLGQEKLKLEAELGNMQGLVEDFKNKMWMKLT

SEQ ID NO: 52985 - protein, 195 aa, Homo sapiens
MNYLDRYLSCVPTRKAQLQLLGAVCMLLASKLRETTPLTIEKLCIYTDHAVSPRQLRDWEVLVLGKLKWDLAAVIAHDFLAFILHRLSLPRDRQALVKKHAQTFLALCATGLPAGLSGADRSCTQGEPQGSLSDQLQPSAQSPPGLQQPRAQPDQHSYRCHSHTPVALERPSGVATKQRRGRCHPPPCLQEPHHI

SEQ ID NO: 52986 - protein, 1095 aa, Homo sapiens
  MOD_RES (1)..(1): Any amino acid
XTDPVDVVPQDGRNDFYCWVCHREGQVLCCELCPRVYHAKCLRLTSEPEGDWFCPECEKITVAECIETQSKAMTMLTIEQLSYLLKFAIQKMKQPGTDAFQKPVPLEQHPDYAEYIFHPMDLCTLEKNAKKKMYGCTEAFLADAKWILHNCIIYNGGNHKLTQIAKVVIKICEHEMNEIEVCPECYLAACQKRDNWFCEPCSNPHPLVWAKLKGFPFWPAKALRDKDGQVDARFFGQHDRAWVPINNCYLMSKEIPFSVKKTKSIFNSAMQEMEVYVENIRRKFGVFNYSPFRTPYTPNSQYQMLLDPTNPSAGTAKIDKQEKVKLNFDMTASPKILMSKPVLSGGTGRRISLSDMPRSPMSTNSSVHTGSDVEQDAEKKATSSHFSASEESMDFLDKSTASPASTKTGQAGSLSGSPKPFSPQLSAPITTKTDKTSTTGSILNLNLDRSKAEMDLKELSESVQQQSTPVPLISPKRQIRSRFQLNLDKTIESCKAQLGINEISEDVYTAVEHSDSEDSEKSDSSDSEYISDDEQKSKNEPEDTEDKEGCQMDKEPSAVKKKPKPTNPVEIKEELKSTSPASEKADPGAVKDKASPEPEKDFSEKAKPSPHPIKDKLKGKDETDSPTVHLGLDSDSESELVIDLGEDHSGREGRKNKKEPKEPSPKQDVVGKTPPSTTVGSHSPPETPVLTRSSAQTSAAGATATTSTSSTVTVTAPAPAATGSPVKKQRPLLPKETAPAVQRVVWNSSTVQQKEITQSPSTSTITLVTSTQSSPLVTSSGSMSTLVSSVNADLPIATASADVAADIAKYTSKMMDAIKGTMTEIYNDLSKNTTGSTIAEIRRLRIEIEKLQWLHQQELSEMKHNLELTMAEMRQSLEQERDRLIAEVKKQLELEKQQAVDETKKKQWCANCKKEAIFYCCWNTSYCDYPCQQAHWPEHMKSCTQSATAPQQEADAEVNTETLNKSSQGSSSSTQSAPSETASASKEKETSAEKSKESGSTLDLSGSRETPSSILLGSNQGSVSKRCDKQPAYAPTTTDHQPHPNYPAQKYHSRSNKSSWSSSDEKRGSTRSDHNTSTSTKSLLPKESRLDTFWD

SEQ ID NO: 52987 - protein, 61 aa, Homo sapiens
DEQEIPFRLREIMRSRQEMKNPISNKKRKKAGDLQKDIGEGSKGRGARHRSPQVQTEEGGV

SEQ ID NO: 52988 - protein, 163 aa, Homo sapiens
  MOD_RES (1)..(1): Any amino acid
XMELSESVQKGFQMLADPRSFDSNAFTLLLRAAFQSLLDAQADEAVLDHPDLKHIDPVVLKHCHAAAATYILEAGKHRADKSTLSIGRSLPHITDVSWRLEYQIKTNQLHRMYRPAYLVTLSVQNTDSPSYPEISFSCSMEQLQDLVGKLKDASKSLERATQL

SEQ ID NO: 52989 - protein, 512 aa, Homo sapiens
MADNEKLDNQRLKNFKNKGRDLETMRRQRNEVVVELRKNKRDEHLLKRRNVPHEDICEDSDIDGDYRVQNTSLEAIVQNASSDNQGIQLSAVQAARKLLSSDRNPPIDDLIKSGILPILVHCLERDDNPSLQFEAAWALTNIASGTSEQTQAVVQSNAVPLFLRLLHSPHQNVCEQAVWALGNIIGDGPQCRDYVISLGVVKPLLSFISPSIPITFLRNVTWVMVNLCRHKDPPPPMETIQEILPALCVLIHHTDVNILVDTVWALSYLTDAGNEQIQMVIDSGIVPHLVPLLSHQEVKVQTAALRAVGNIVTGTDEQTQVVLNCDALSHFPALLTHPKEKINKEAVWFLSNITAGNQQQVQAVIDANLVPMIIHLLDKGDFGTQKEAAWAISNLTISGRKDQVAYLIQQNVIPPFCNLLTVKDAQVVQVVLDGLSNILKMAEDEAETIGNLIEECGGLEKIEQLQNHENEDIYKLAYEIIDQFFSSDDTGPRLECIGAVTAHCNLPLPGSD

SEQ ID NO: 52990 - protein, 140 aa, Homo sapiens
MANSGLQLLGFSMALLGWVGLVACTAIPQWQMSSYAGDNIITAQAMYKGLWMDCVTQSTGMMSCKIGLAGHSSPNGGLPGAGLPGHVCGHDGHEVHALWGRRQSEEGPYSHGWRHNFHRGRSCRLGSLLLVWPSDCHRLL

SEQ ID NO: 52991 - protein, 106 aa, Homo sapiens
MWSWKCLLFWAVLVTATLCTARPSPTLPEQAQPWGAPVEVESFLVHPGDLLQLRCRLRDDVQSINWLRDGVQLAESNRTRITGEEVEVQDSVPADSGLYACVTSSP

SEQ ID NO: 52992 - protein, 187 aa, Homo sapiens
LMAKAIMDFRLVDLPLGLPFYKWMLRQETSLTSHDLFDIDPVVARSVYHLEDIVRQKKRLEQDKSQTKESLQYALETLTMNGCSVEDLGLDFTLPGFPNIELKKGGKDIPVTIHNLEEYLRLDQLLCGSKADTWDAKTLMECCRPDHGYTHDSRAVKFLFEILSSFDNEQQRLFLQFVTGSPRLPVG

SEQ ID NO: 52993 - protein, 188 aa, Homo sapiens
  MOD_RES (1)..(1): Any amino acid
XEIKAGKSLKPTPQSKGLTTVFSGIGQPAFQPDSPLPSVSPALSPVRSPTPPAAGFQPLLNGSLVPVPPTTPAPGVQLDVEALIPTHDEQGRPIPEWKRQVMVRKMQLKMQEEEEQRRKEEEEEARLASMPAWRRDLLRKKLEEEREQKRKEEERQKQEELRREKEQSEKLRTLGYDESKLAPWQRQI

SEQ ID NO: 52994 - protein, 71 aa, Homo sapiens
MACAGLLTVCLLRPPAPQPQPQTPRHPQLAPDPGPAGHTLFQDVFRRADKNELLCRWGSQPGGAAGTVQRH

SEQ ID NO: 52995 - protein, 89 aa, Homo sapiens
MAALTTLFKYIDENQDRYIKKLAKWVAIQSVSAWPEKRGEIRRMMEVAAADVKQLGGSVELVDIGKQKLPDGSEIPLPPILLGRLGSDP

SEQ ID NO: 52996 - protein, 79 aa, Homo sapiens
MRMTMEEMKNEAETTSMVSMPLYAVMYPVFNELERVNLSAAQTLRAAFIKAEKENPGLTQDIIMKILEKKSVEVNFTES

SEQ ID NO: 52997 - protein, 97 aa, Homo sapiens
MAGQGLPLHVATLLTGLLECLGFAGVLFGWPSLVFVFKNEDYFKDLCGPDAGPIGNATGQADCKAQDERFSLIFTLGSFMNNFMTFPTGYIFDRFKT

SEQ ID NO: 52998 - protein, 69 aa, Homo sapiens
MATLPAEPSAGPAAGGEAVAAAAATEEEEEEARQLLQTLQAAEGQQLVQEPATARPDRGRRRRALQERV

SEQ ID NO: 52999 - protein, 86 aa, Homo sapiens
RYQPMEPNPRVPLSRVFFASWRVVLEGGIDPILRGLMATPAKLNRQNQIAVDEIRERLFEQISLPRIICDNTGITTVSKNNIFMSN

SEQ ID NO: 53000 - protein, 86 aa, Homo sapiens
  MOD_RES (1)..(1): Any amino acid
XRSERKHRSRSRDRRRSKSRDRKSYKHRSKSRDREQDRKSKEKVQRKYAQMKMELSRVRRHTKASSEGKDSVVLQNILSVGVVSGP

SEQ ID NO: 53001 - protein, 24 aa, Homo sapiens
  MOD_RES (1)..(1): Any amino acid
XKISLPVIGLDEILKFVARNYLEG

SEQ ID NO: 53002 - protein, 346 aa, Homo sapiens
MQHLKSKKREERWMRASKRQSEKEMEELHHNIDDLLQEKKSLECEVEELHRTVQKRQQQKDFIDGNVESLMTELEIEKSLKHHEDIVDEIECIEKTLLKRRSELREADRLLAEAESELSCTKEKTKNAVEKFTDAKRSLLQTESDAEELERRAQETAVNLVKADQQLRSLQADAKDLEQHKIKQEEILKEINKIVAAKDSDFQCLSKKKEKLTEELQKLQKDIEMAERNEDHHLQVLKESEVLLQAKRAELEKLKSQVTSQQQEMAVLDRQLGHKKEELHLLQGSMVQAKADLQEALRLGETEVTEKCNHIREVKSLLEELSFQKGELNVQISERKTQLTLIKQEI

SEQ ID NO: 53003 - protein, 41 aa, Homo sapiens
  MOD_RES (1)..(1): Any amino acid
XSRAEAESRLQPCKEAGYLVRNSESGNSRYSIALKNHHLLS

SEQ ID NO: 53004 - protein, 439 aa, Homo sapiens
MDAKSLTAWSRTLVTFKDVFVDFTREEWKLLDTAQQIVYRNVMLENYKNLVSLGYQLTKPDVILRLEKGEEPWLVEREIHQETHPDSETAFEIKSSVSSRSIFKDKQSCDIKMEGMARNDLWYLSLEEVWKCRDQLDKYQENPERHLRHQLIHTGEKPYECKECGKSFSRSSHLIGHQKTHTGEEPYECKECGKSFSWFSHLVTHQRTHTGDKLYTCNQCGKSFVHSSRLIRHQRTHTGEKPYECPECGKSFRQSTHLILHQRTHVRVRPYECNECGKSYSQRSHLVVHHRIHTGLKPFECKDCGKCFSRSSHLYSHQRTHTGEKPYECHDCGKSFSQSSALIVHQRIHTGEKPYECCQCGKAFIRKNDLIKHQRIHVGEETYKCNQCGIIFSQNSPFIVHQIAHTGEQFLTCNQCGTALVNTSNLIGYQTNHIRENAY

SEQ ID NO: 53005 - protein, 561 aa, Homo sapiens
MFLNTLTPKFYVALTGTSSLISGLILIFEWWYFRKYGTSFIEQVSVSHLRPLLGGVDNNSSNNSNSSNGDSDSNRQSVSECKVWRNPLNLFRGAEYNRYTWVTGREPLTYYDMNLSAQDHQTFFTCDSDHLRPADAIMQKAWRERNPQARISAAHEALEINEIRSRVEVPLIASSTIWEIKLLPKCATAYILLAEEEATTIAEAEKLFKQALKAGDGCYRRSQQLQHHGSQYEAQHRRDTNVLVYIKRRLAMCARRLGRTREAVKMMRDLMKEFPLLSMFNIHENLLEALLELQAYADVQAVLAKYDDISLPKSATICYTAALLKARAVSDKFSPEAASRRGLSTAEMNAVEAIHRAVEFNPHVPKYLLEMKSLILPPEHILKRGDSEAIAYAFFHLAHWKRVEGALNLLHCTWEGTFRMIPYPLEKGHLFYPYPICTETADRELLPFPQHFVCPLKLCHGESGEHPPIQSVAPANTDLREALSSTHLTRRCHHLLCANSLWTARKHDFEKGKPFRDFKMFMDYSILKAVFVVQNSLMFSSILFCLQKRRKSKIKLLCITA

SEQ ID NO: 53006 - protein, 83 aa, Homo sapiens
MPIMGSSVYITVELAIAVLAILGNVLVCWAVWLNSNLQNVTNYFVVSLAAADIAVGVLAIPFAITISTGFCAACHGCLFIACF

SEQ ID NO: 53007 - protein, 105 aa, Homo sapiens
MPNSEPASLLELFNSIATQGELVRSLKAGNASKAESHSVAQAGVHWHSLGSLQPLPPEFERFSCPGLDEIDSAVKMLVSLKMSYKAAAGEDYKADCPPGNPAPTS

SEQ ID NO: 53008 - protein, 535 aa, Homo sapiens
MSTRTPLPTVNERDTENHTSHGDGRQEVTSRTSRSGARCRNSIASCADEQPHIGNYRLLKTIGKGNFAKVKLARHILTGREVAIKIIDKTQLNPTSLQKLFREVRIMKILNHPNIVKLFEVIETEKTLYLIMEYASGGEVFDYLVAHGRMKEKEARSKFRQIVSAVQYCHQKRIVHRDLKAENLLLDADMNIKIADFGFSNEFTVGGKLDTFCGSPPYAAPELFQGKKYDGPEVDVWSLGVILYTLVSGSLPFDGQNLKELRERVLRGKYRIPFYMSTDCENLLKRFLVLNPIKRGTLEQIMKDRWINAGHEEDELKPFVEPELDISDQKRIDIMVGMGYSQEEIQESLSKMKYDEITATYLLLGRKSSEVRPSSDLNNSTGQSPHHKVQRSVSSSQKQRRYSDHAGPAIPSVVAYPKRSQTSTADSDLKEDGISSRKSSGSAVGGKGIAPASPMLGNASNPNKADIPERKKSSTVPSSNTASGGMTRRNTYVCSERTTADRHSVIQNGKENRDLQQRRVTRIQCGMHELKTEVI

SEQ ID NO: 53009 - protein, 125 aa, Homo sapiens
MKSEDYPHETMAPDIHEERQYRCEDCDQLFESKAELADHQKFPCSTPHSAFSMVEEDFQQKLESENDLQEIHTIQECKECDQVFPDLQSLEKHMLSHTEEREYKCDQCPKAFNWKSNLIRHQMSH

SEQ ID NO: 53010 - protein, 427 aa, Homo sapiens
MPGRCREGSGAYALTGKDLKYFMHGVCREGSQCLFSHDLANSKPSTICKYYQKGYCAYGTRCRYDHTRPSAAAGGAVGTMAHSVPSPAFHSPHPPSEVTASIVKTNSHEPGKREKRTLVLRDRNLSGMAERKTQPSMVSNPGSCSDPQPSPEMKPHSYLDAIRSGLDDVEASSSYSNEQQLCPYAAAGECRFGDACVYLHGEVCEICRLQVLHPFDPEQRKAHEKICMLTFEHEMEKAFAFQASQDKVCSICMEVILEKASASERRFGILSNCNHTYCLSCIRQWRCAKQFENPIIKSCPECRVISEFVIPSVYWVEDQNKKNELIEAFKQGMGKKACKYFEQGKGTCPFGSKCLYRHAYPDGRLAEPEKPRKQLSSQGTVRFFNSVRLWDFIENRESRHVPNNEDVDMTELGDLFMHLSGVESSEP

SEQ ID NO: 53011 - protein, 36 aa, Homo sapiens
  MOD_RES (1)..(1): Any amino acid
XISAKSLRGRDSTRKQDASEKDSVPMGSPAFLLSLF

SEQ ID NO: 53012 - protein, 105 aa, Homo sapiens
MLELAQDRLQFETVEVSEPSMLQKILTTRRRETGGNEPLPVPTLQHHLAPPAEARKVPSASQVQAIKCFLSKCWSLNISTKEYAYLKGTVLFNPGKGKENDCNHH

SEQ ID NO: 53013 - protein, 72 aa, Homo sapiens
MAVLWRLSAVCGALGGRALLLRTPVVRPAHISAFLQDRPIPEWCGVQHIHLSPSHHCWSAVVRSRLTATSTF

SEQ ID NO: 53014 - protein, 111 aa, Homo sapiens
MLGESVPAAVEQEQLGEVKLEEEEAVSPEDPRRPESRLRPEVAHQLFRCFQYQEDMGPRASLSRLRELCGHWLRPALHTKKQILELLVPRAPHHGQRRVPEIRSWRLCWSA

SEQ ID NO: 53015 - protein, 702 aa, Homo sapiens
MRLPDLRPWTSLLLVDAALLWLLQGPLGTLLPQGLPGLWLEGTLRLGGLWGLLKLRGLLGFVGTLLLPLCLATPLTVSLRALVAGASRAPPARVASAPWSWLLVGYGAAGLSWSLWAVLSPPGAQEKEQDQVNNKVLMWRLLKLSRPDLPLLVAAFFFLVLAVLGETLIPHYSGRVIDILGGDFDPHAFASAIFFMCLFSFGSSLSAGCRGGCFTYTMSRINLRIREQLFSSLLRQDLGFFQETKTGELNSRLSSDTTLMSNWLPLNANVLLRSLVKVVGLYGFMLSISPRLTLLSLLHMPFTIAAEKVYNTRHQEVLREIQDAVARAGQVVREAVGGLQTVRSFGAEEHEVCRYKEALEQCRQLYWRRDLERALYLLIRRVLHLGVQMLMLSCGLQQMQDGELTQGSLLSFMIYQESVGSYVQTLVYIYGDMLSNVGAAEKVFSYMDRQPNLPSPGTLAPTTLQGVVKFQDVSFAYPNRPDRPVLKGLTFTLRPGEVTALVGPNGSGKSTVAALLQNLYQPTGGQVLLDEKPISQYEHCYLHSQVVSVGQEPVLFSGSVRNNITYGLQSCEDDKVMAAAQAAHADDFIQEMEHGIYTDVGEKGSQLAAGQKQRLAIARALVRDPRVLILDEATSALDVQCEQALQDWNSRGDRTVLVIAHRLQTVQRAHQILVLQEGKLQKLAQLEGQDLYSRLVQQRLMD

SEQ ID NO: 53016 - protein, 79 aa, Homo sapiens
HPDMYERAVLRKDHQKKYGATVDLWSIGVTFYHAATGSLPFRPFEGPRRNKEVISLRIKVSSCIHVAAKDMISFFFMAA

SEQ ID NO: 53017 - protein, 462 aa, Homo sapiens
MSLPSRQTAIIVNPPPPEYINTKKNGRLTNQLQYLQKVVLKDLWKHSFSWPFQRPVDAVKLQLPDYYTIIKNPMDLNTIKKRLENKYYAKASECIEDFNTMFSNCYLYNKPGDDIVLMAQALEKLFMQKLSQMPQEEQVVGVKERIKKGTQQNIAVSSAKEKSSPSATEKVFKQQEIPSVFPKTSISPLNVVQGASVNSSSQTAAQVTKGVKRKADTTTPATSAVKASSEFSPTFTEKSVALPPIKENMPKNVLPDSQQQYNVVKTVKVTEQLRHCSEILKEMLAKKHFSYAWPFYNPVDVNALGLHNYYDVVKNPMDLGTIKEKMDNQEYKDAYKFAADVRLMFMNCYKYNPPDHEVVTMARMLQDVFETHFSKIPIEPVESMPLCYIKTDITETTGRENTNEASSEGNSSDDSEDERVKRLAKLQEQLKAVHQQLQVLSQVPFRKLNKKKEKSKKEKKKE

SEQ ID NO: 53018 - protein, 179 aa, Homo sapiens
MREYKLVVLGSGGVGKSALTVQFVQGIFVEKYDPTIEDSYRKQVEVDAQQCMLEILDTAGTEQFTAMRDLYMKNGQGFALVYSITAQSTFNDLQDLREQILRVKDTDDVPMILVGNKCDLEDERVVGKEQGQNLARQWNNCAFLESSAKSKINVNEVWSNILKMGLHLKYNIEDEWKMS

SEQ ID NO: 53019 - protein, 381 aa, Homo sapiens
MVAEVCSMPTASTVKKPFDLRSKMGKWCHHRFPCCRGSGKSNMGTSGDHDDSFMKMLRSKMGKCCRHCFPCCRGSGTSNVGTSGDHENSFMKMLRSKMGKWCCHCFPCCRGSGKSNVGAWGDYDHSAFMEPRYHIRREDLDKLHRAAWWGKVPRKDLIVMLRDTDMNKRDKEKRTALHLASANGNSEVVQLLLDRRCQLNVLDNKKRTALIKAIQCQEDECVLMLLEHGADRNIPDEYGNTALHYAIYNEDKLMAKALLLYGADIESKNKCGLTPLLLGVHEQKQQVVKFLIKKKANLNVLDRYGRTALILAVCCGSASIVNLLLEQNVDVSSQDLSGQTAREYAVSSHHHVICELLSDYKEKQMLKISSENSNPGKEAEE

SEQ ID NO: 53020 - protein, 194 aa, Homo sapiens
MLSSPLRVAVVCVSNINRSMEAHSILRRKGLSVRSFGTESHVRLPGRRPNHPVVYDFATTYKEMYNDLLRKDRECYTHNGILHILGRNERIKPGPERFQECTEFFDVIFTCEERVYDTVVEDLCSREQQTFQPVHVINMDIKDTLEGAILGAFLICEICQCLQQSDDMEDSLEELLLQMEEKAGKSFLHTVCFY

SEQ ID NO: 53021 - protein, 127 aa, Homo sapiens
MVLILGRRLNREDLGVRDSPATKRKVFEMDPKSLTGHEFFDFSSGSSHAENILQIFNEFRDSRLFTDVIICVEGKEFPCHRAVLSACSSYFRAMFCNDHRESREMLVEINGILAEAMECFLQYVYTG

SEQ ID NO: 53022 - protein, 193 aa, Homo sapiens
MGGPRGAGWVAAGLLLGAGACYCIYRLTRGRRRGDRELGIRSSKSAGALEEGTSEGQLCGRSARPQTGGTWESQWSKTSQPEDLTDGSYDDVLNAEQLQKLLYLLESTEDPVIIERALITLGNNAAFSVNQAIIRELGGIPIVANKINHSNQSIKEKALNALNNLSVNVENQIKIKPRITFRGMENKTEEGGT

SEQ ID NO: 53023 - protein, 1075 aa, Homo sapiens
MAFTERVNSSGNSLYNDDRNLLRIREKERRNQEAHQEKEAFPEKIPLFGEPYKTAKGDELSSRIQNMLGNYEEVKEFLSTKSHTHRLDASENRLGKPKYPLIPDKGSSIPSSSFHTSVHHQSIHTPASGPLSVGNISHNPKMAQPRTEPMPSLHAKSCGPPDSQHLTQDRLGQEGFGSSHHKKGDRRADGDHCASVTDSAPERELSPLISLPSPVPPLSPIHSNQQTLPRTQGSSKVHGSSNNSKGYCPAKSPKDLAVKVHDKETPQDSLVAPAQPPSQTFPPPSLPSKSVAMQQKPTAYVRPMDGQDQAPSESPELKPLPEDYRQQTFEKTDLKVPAKAKLTKLKMPSQSVEQTYSNEVHCVEEILKEMTHSWPPPLTAIHTPSTAEPSKFPFPTKDSQHVSSVTQNQKQYDTSSKTHSNSQQGTSSMLEDDLQLSDSEDSDSEQTPEKPPSSSAPPSAPQSLPEPVASAHSSSAESESTSDSDSSSDSESESSSSDSEENEPLETPAPEPEPPTTNKWQLDNWLTKVSQPAAPPEGPRSTEPPRRHPESKGSSDSATSQEHSESKDPPPKSSSKAPRAPPEAPHPGKRSCQKSPAQQEPPQRQTVGTKQPKKPVKASARAGSRTSLQGEREPGLLPYGSRDQTSKDKPKVKTKGRPRAAASNEPKPAVPPSSEKKKHKSSLPAPSKALSGPEPAKDNVEDRTPEHFALVPLTESQGPPHSGSGSRTSGCRQAVVVQEDSRKDRLPLPLRDTKLLSPLRDTPPPQSLMVKITLDLLSRIPQPPGKGSRQRKAEDKQPPAGKKHSSEKRSSDSSSKLAKKRKGEAERDCDNKKIRLEKEIKSQSSSSSSSHKESSKTKPSSQSSKKEMLPPPPVSSSSQKPAKPALKRSRREADTCGQDPPKSASSTKSNHKDSSIPKQRRVEGKGSRSSSEHKGSSGDTANPFPVPSLPNGNSKPGKPQVKFDKQQADLHMREAKKMKQKAELMTDRVGKAFKYLEAVLSFIECGIATESESQSSKSAYSVYSETVDLIKFIMSLKSFSDATAPTQEKIFAVLCMRCQSILNMAMFRCKKDIAI

SEQ ID NO: 53024 - protein, 326 aa, Homo sapiens
MKKVTAEAISWNESTSETNNSMVTEFIFLGLSDSQGLQTFLFMLFFVFYGGIVFGNLLIVITVVSDSHLHSPMYFLLANLSLIDLSLSSVTAPKMITDFFSQRKVISFKGCLVQIFLLHFFGGSEMVILIAMGFDRYIAICKPLHYTTIMCGNACVGIMAVAWGIGFLHSVSQLAFAVHLPFCGPNEVDSFYCDLPRVIKLACTDTYRLDIMVIANSGVLTVCSFVLLIISYTIILMTIQHRPLDKSSKALSTLTAHITVVLLFFGPCVFIYAWPFPIKSLDKFLAVFYSVITPLLNPIIYTLRNKDMKTAIRQLRKWDAHSSVKF

SEQ ID NO: 53025 - protein, 143 aa, Homo sapiens
FQPPKLKDKMKWSNSFHHFVKMALTKNPKKRPTAEKLLQHPFVTQHLTRSLAIELLDKVNNPDHSTYHDFDDDDPEPLVAVPHRIHSTSRNVREEKTRSEITFGQVKFDPPLRKETEPHHELPDSDGFLDSSEEIYYTARSNL

SEQ ID NO: 53026 - protein, 66 aa, Homo sapiens
MLFWVLGLLILCGFLWTRKGKLKIEDITDKYIFITGCDSGFGNLAARTFDKKGFHVIAACLTESGS

SEQ ID NO: 53027 - protein, 163 aa, Homo sapiens
MADSEALPSLAGDPVAVEALLRAVFGVVVDEAIQKGTSVSQKVCEWKEPEELKQLLDLELRSQGESQKQILERCRAVIRYSVKTGHPRFFNQLFSGLDPHALAGRIITESLNTSQYTYEIAPVFVLMEEEVLRKLRALVGWSSGDGIFCPGGSISNMYAVNLA

SEQ ID NO: 53028 - protein, 181 aa, Homo sapiens
  MOD_RES (1)..(1): Any amino acid
XIPMSEYKLLACDIQQLFIAVTIHACSSSGSQYFRVIEDLIVMLGYLQNSKNKRTQNMAVALQLRVLQAAMEFIRTTANHDSENLTDSLQSPSAPHHAVVQKRKSIAGSIPMKGSIIPHLPRHHFGSYGQLPMPFSFGPLNQDSSPQFSPGCTTCVVPPGAGPRKFPLAQTESLLMKMRSV

SEQ ID NO: 53029 - protein, 9 aa, Homo sapiens
MSTPTDPGA

SEQ ID NO: 53030 - protein, 170 aa, Homo sapiens
MAMFEQMRANVGKLLKGIDRYQFNPAFFQTTVTAQILLKALTNLPHTDFTLCKCMIDQAHQEERPIRQILYLGDLLETCHFQAFWQALDENMDLLEGITGFEDSVRKFICHVVGITYQHIDRWLLAEMLGDLSDSQLKVWMSKYGWSADESGQIFICSQEESIKPKNIVE

SEQ ID NO: 53031 - protein, 115 aa, Homo sapiens
  MOD_RES (1)..(1): Any amino acid
XPPTTPQPPTTPQLPTTGSRPTQVWPMTGTSTTIGLLSSTGPSPSSNHTPASPTQTPLLPATLTSSKPTASSGGKEPPAEPMERAAAGGPRYTSGVGLGMALLPGSHLPLSRFPA

SEQ ID NO: 53032 - protein, 139 aa, Homo sapiens
MVALCSLQHLGSSDPRALPTLPTATSGQRPAKRRRKSPAMAALTRDPQFQKLQQWYREHRSELNLRRLFDANKDRFNHFSLTLNTNHGHILVDYSKNLVTEDVMRMLVDLAKSRGVEAARERMFNGEKINYTEGRAVLH

SEQ ID NO: 53033 - protein, 396 aa, Homo sapiens
MQLPRWWELGDPCAWTGQGRGTRRMSPATTGTFLLTGEISNDPITFNTNLMGYPDRPGWLRYIQRTPYSDGVLYGSPTAENVGKPTIIEITAYNRRTFETARHNLIINIMSAEDFPLPYQAEFFIKNMNVEEMLASEVLGDFLGAVKNVWQPERLNAINITSALDRGGRVPLPINDLKEGVYVMVGADVPFSSCLREVENPQNQLRCSQEMEPVITCDKKFRTQFYIDWCKISLVDKTKQVSTYQEVIRGEGILPDGGEYKPPSDSLKSRDYYTDFLITLAVPSAVALVLFLILAYIMCCRREGVEKRNMQTPDIQLVHHSAIQKSTKELRDMSKNREIAWPLSTLPVFHPVTGEIIPPLHTDNYDSTNMPLMQTQQNLPHQTQIPQQQTTGKWYP

SEQ ID NO: 53034 - protein, 157 aa, Homo sapiens
  MOD_RES (1)..(1): Any amino acid
XHYIQHLSFGEDYPGIVNPLDHTNVTAPQASMMFQYFVKVVPTVYMKVDGEAQQERGRSRGGADGGWSQVLALALAQAPLPPQVLRTNQFSVTRHEKVANGLLGDQGLPGVFVLYELSPMMVKLTEKHRSFTHFLTGVCAIIGGMFTVAGLIDSLIY

SEQ ID NO: 53035 - protein, 161 aa, Homo sapiens
  MOD_RES (1)..(1): Any amino acid
XYPLLKPLHTIVGYGRMKNLLDENVCLDQGPVPGNTPIMYYCHEFSSQNVYYHLTGELYVGQLIAEASASDRCLTDPGKAEKPTLEPCSKAAKNRLHIYWDFKPEKCWQVVQARTSMHRILTAAGPSTSSEDENPAWHRWQASGLTPLWRPPTSSNQARKS

SEQ ID NO: 53036 - protein, 24 aa, Homo sapiens
  MOD_RES (1)..(1): Any amino acid
XLQTRRNFWSVTHPAKAASLSYRR

SEQ ID NO: 53037 - protein, 398 aa, Homo sapiens
ASPTSPKVFPLSLCSTQPDGNVVIACLVQGFFPQEPLSVTWSESGQGVTARNFPPSQDASGDLYTTSSQLTLPATQCLAGKSVTCHVKHYTNPSQDVTVPCPVPSTPPTPSPSTPPTPSPSCCHPRLSLHRPALEDLLLGSEANLTCTLTGLRDASGVTFTWTPSSGKSAVQGPPERDLCGCYSVSSVLPGCAEPWNHGKTFTCTAAYPESKTPLTATLSKSGNTFRPEVHLLPPPSEELALNELVTLTCLARGFSPKDVLVRWLQGSQELPREKYLTWASRQEPSQGTTTFAVTSILRVAAEDWKKGDTFSCMVGHEALPLAFTQKTIDRLADWQMPPPYVVLDLPQETLEEETPGANLWPTTITFLTLFLLSLFYSTALTVTSVRGPSGNREGPQY

SEQ ID NO: 53038 - protein, 103 aa, Homo sapiens
MEDYEQELCGVEDDFHNQFAAELEGRRLRRPPGSPCSPRADPRGRSRRPLPEGTRPPVPPQPHLWAAARAAPGRGRWTPTCSRPGPCPTPPGSNGLGCRWSRG

SEQ ID NO: 53039 - protein, 107 aa, Homo sapiens
MDADKEKDLQKFLKNVDEISNLIQEMNSDDPVVQQKAVLETEKRLLLMEEDQEEDECRTTLNKTMISPPQTAMKSAEEINSEAFLASVEKDAKERAKRRRENKVLAD

SEQ ID NO: 53040 - protein, 245 aa, Homo sapiens
MSELEQLRQEAEQLRNQIQDARKACNDATLVQITSNMDSVGRIQMRTRRTLRGHLAKIYAMHWGYDSRLLVSASQDGKLIIWDSYTTNKMHAIPLRSSWVMTCAYAPSGNYVACGGLDNICSIYNLKTREGNVRVSRELPGHTGYLSCCRFLDDSQIVTSSGDTTCALWDIETAQQTTTFTGHSGDVMSLSLSPDMRTFVSGACDASSKLWDIRDGMCRQSFTGHVSDINAVSGEVWRQASIEGR

SEQ ID NO: 53041 - protein, 159 aa, Homo sapiens
MSQGILSPPAGLLSDDDVVVSPMFESTAADLGSVVRKNLLSDCSVVSTSLEDKQQVPSEDSMEKVKVYLRVRPLLPSELERQEDQGCVRIENVETLVLQAPKDSFALKSNERGIGQATHRFTFSQIFGPEVGQASFFNLTVKEMVKDVLKGQNWLIYTY

SEQ ID NO: 53042 - protein, 1097 aa, Homo sapiens
MEEKQQIILANQDGGTVAGAAPTFFVILKQPGNGKTDQGILVTNQDACALASSVSSPVKSKGKICLPADCTVGGITVTLDNNSMWNEFYHRSTEMILTKQGRRMFPYCRYWITGLDSNLKYILVMDISPVDNHRYKWNGRWWEPSGKAEPHVLGRVFIHPESPSTGHYWMHQPVSFYKLKLTNNTLDQEGHIILHSMHRYLPRLHLVPAEKAVEVIQLNGPGVHTFTFPQTEFFAVTAYQNIQITQLKIDYNPFAKGFRDDGLNNKPQRDGKQKNSSDQEGNNISSSSGHRVRLTEGQGSEIQPGDLDPLSRGHETSGKGLEKTSLNIKRDFLGFMDTDSALSEVPQLKQEISECLIASSFEDDSRVASPLDQNGSFNVVIKEEPLDDYDYELGECPEGVTVKQEETDEETDVYSNSDDDPILEKQLKRHNKVDNPEADHLSSKWLPSSPSGVAKAKMFKLDTGKMPVVYLEPCAVTRSTVKISELPDNMLSTSRKDKSSMLAELEYLPTYIENSNETAFCLGKESENGLRKHSPDLRVVQKYPLLKEPQWKYPDISDSISTERILDDSKDSVGDSLSGKEDLGRKRTTMLKIATAAKVVNANQNASPNVPGKRGRPRKLKLCKAGRPPKNTGKSLISTKNTPVSPGSTFPDVKPDLEDVDGVLFVSFESKEALDIHAVDGTTEESSSLQASTTNDSGYRARISQLEKELIEDLKTLRHKQVIHPGLQEVGLKLNSVDPTMSIDLKYLGVQLPLAPATSFPFWNLTGTNPASPDAGFPFVSRTGKTNDFTKIKGWRGKFHSASASRNEGGNSESSLKNRSAFCSDKLDEYLENEGKLMETSMGFSSNAPTSPVVYQLPTKSTSYVRTLDSVLKKQSTISPSTSYSLKPHSVPPVSRKAKSQNRQATFSGRTKSSYKSILPYPVSPKQKYSHVILGDKVTKNSSGIISENQANNFVVPTLDENIFPKQISLRQAQQQQQQQQGSRPPGLSKSQVKLMDLEDCALWEGKPRTYITEERADVSLTTLLTAQASLKTKPIHTIIRKRAPPCNNDFCRLGCVCSSLALEKRQPAHCRRPDCMFGCTCLKRKVVLVKGGSKTK

SEQ ID NO: 53043 - protein, 32 aa, Homo sapiens
MMSASRLAGTLIPAMAFLSCVRPESWEPCVEV

SEQ ID NO: 53044 - protein, 182 aa, Homo sapiens
MAAPRFGGPRRGGAQHELLEKAARLERGPPPRGDPEAVGRRAVAGDGGSCSGCWCWRRLFRGPRRKKLRQAHARAGKEAPERGLWGPSSLQRLLQRLATWRRRYLRRKERPDRLEEIPLLVLDRAQGGHEAAAGPQSSVPGRPAQAAPARQPRRRSATRSRSPVAPPVHAQDCFFLFGQQKQ

SEQ ID NO: 53045 - protein, 521 aa, Homo sapiens
MKNCGVNCSGDVFTALIGEIASPNYPKPYPENSRCEYQIRLEKGFQVVVTLRREDFDVEAADSAGNCLDSLVFVAGDRQFGPYCGHGFPGPLNIETKSNALDIIFQTDLTGQKKGWKLRYHGDPMPCPKEDTPNSVWEPAKAKYVFRDVVQITCLDGFEVVEGRVGATSFYSTCQSNGKWSNSKLKCQPVDCGIPESIENGKVEDPESTLFGSVIRYTCEEPYYYMENGGGGEYHCAGNGSWVNEVLGPELPKCVPVCGVPREPFEEKQRIIGGSDADIKNFPWQVFFDNPWAGGALINEYWVLTAAHVVEGNREPTMYVGSTSVQTSRLAKSKMLTPEHVFIHPGWKLLEVPEGRTNFDNDIALVRLKDPVKMGPTVSPICLPGTSSDYNLMDGDLGLISGWGRTEKRDRAVRLKAARLPVAPLRKCKEVKVEKPTADAEAYVFTPNMICAGGEKGMDSCKGDSGGAFAVQDPNDKTKFYAAGLVSWGPQCGTYGLYTRVKNYVDWIMKTMQENSTPRED

SEQ ID NO: 53046 - protein, 179 aa, Homo sapiens
MLITQGLISKGILSSHPKYGSIPKLILACIMGYFAGKLSYVKTCQEKFKKLENSPLGEALRSGQARRSSPPGHYYQKSKYDSSVSGQSSFVTSPAADNIEMLPHYEPIPFSSSMNESAPTGITDHIVQGPDPNLEESPKRKNITYEELRNKNRESYEVSLTQKTDPSVRPMHERVPKKE

SEQ ID NO: 53047 - protein, 220 aa, Homo sapiens
  MOD_RES (1)..(1): Any amino acid
XLHKQPRFWASMMEAASCPPDYVPPEIFHFHTRSDVRLYGMIYKPHALQPGKKHPTVLFVYGGPQVQLVNNSFKGIKYLRLNTLASLGYAVVVIDGRGSCQRGLRFEGALKNQMGQVEIEDQVEGLQFVAEKYGFIDLSRVAIHGWSYGGFLSLMGLIHKPQVFKAQPLAYPPRLPGRKRALFPHKLPRLPTDPSRETLPAPDLPQRETQYSLPRVGRAL

SEQ ID NO: 53048 - protein, 178 aa, Homo sapiens
MKATIILLLLAQVSWAGPFQQRGLFDFMLEDEASGIGPEVPDDRDFEPSLGPVCPFRCQCHLRVVQCSDLGLDKVPKDLPPDTTLLDLQNNKITEIKDGDFKNLKNLHALILVNNKISKVSPGAFTPLVKLERLYLSKNQLKELPEKMPKTLQELRAHENEITKVRKVTFNGLNQMIV

SEQ ID NO: 53049 - protein, 2376 aa, Homo sapiens
MAAEEGVASAASAGGSWGTAAMGRVLPMLLVPVPAEAMGQLGSRAQLRTQPEALGSLTAAGSLQVLSLTPGSRGGGRCCLEGPFWHFLWEDSRNSSTPTEKPKLLALGENYELLIYEFNLKDGRCDATILYSCSREALQKLIDDQDISISLLSLRILSFHNNTSLLFINKCVILHIIFPERDAAIRVLNCFTLPLPAQAVDMIIDTQLCRGILFVLSSLGWIYIFDVVDGTYVAHVDLALHKEDMCNEQQQEPAKISSFTSLKVSQDLDVAVIVSSSNSAVALNLNLYFRQHPGHLLCERILEDLPIQGPKGVDEDDPVNSAYNMKLAKFSFQIDRSWKAQLSSLNETIKNSKLEVSCCAPWFQDILHLESPESGNHSTSVQSWAFIPQDIMHGQYNVLQKDHAKTSDPGRSWKIMHISEQEEPIELKCVSVTGFTALFTWEVERMGYTITLWDLETQGMQCFSLGTKCIPVDSSGDQQLCFVLTENGLSLILFGLTQEEFLNRLMIHGSASTVDTLCHLNGWGRCSIPIHALEAGIENRQLDTVNFFLKSKENLFNPSSKSSVSDQFDHLSSHLYLRNVEELIPALDLLCSAIRESYSEPQSKHFSEQLLNLTLSFLNNQIKELFIHTEELDEHLQKGVNILTSYINELRTFMIKFPWKLTDAIDEYDVHENVPKVKESNIWKKLSFEEVIASAILNNKIPEAQTFFRIDSHSAQKLEELIGIGLNLVFDNLKKNNIKEASELLKNMGFDVKGQLLKICFYTTNKNIRDFLVEILKEKNYFSEKEKRTIDFVHQVEKLYLGHFQENMQIQSFPRYWIKEQDFFKHKSVLDSFLKYDCKDEFNKQDHRIVLNWALWWDQLTQESILLPRISPEEYKSYSPEALWRYLTARHDWLNIILWIGEFQTQHSYASLQQNKWPLLTVDVINQNTSCNNYMRNEILDKLARNGVFLASELEDFECFLLRLSRIGGVIQDTLPVQNYKTKEGWDFHSQFILYCLEHSLQHLLYVYLDCYKLSPENCPFLEKKELHEAHPWFEFLVQCRQVASNLTDPKLIFQASLANAQILIPTNQASVSSMLLEGHTLLALATTMYSPGGVSQVVQNEENENCLKKVDPQLLKMALTPYPKLKTALFPQCTPPSVLPSDITIYHLIQELIKSKTPKQLIQQVGNEAYVIGLSSFHIPSIGAACVCFLELLGLDSLKLRVDMKVANIILSYKCRNEDAQYSFIRESVAEKLSKLADGEKTTTEELLVLLEEGTWNSIQQQEIKRLSSESSSQWALVVQFCRLHNMKLSISYLRECAKANDWLQFIIHSQLHNYHPAEVKSLIQYFSPVIQDHLRLAFENLPSVPTSKMDSDQVCNKCPQELQGSKQEMTDLFEILLQCSEEPDSWHWLLVEAVKQQAPILSVLASCLQGASAISCLCVWIITSVEDNVATEAMGHIQDSTEDHTWNLEDLSVIWRTLLTRQKSKTLIRGFQLFFKDSPLLLVMEMYELCMFFRNYKEAEAKLLEFQKSLETLNTAATKVHPVIPAMWLEDQVCFLLKLMLQQCKTQYELGKLLQLFVEREHLFSDGPDVKKLCILCQILKDTSIAINHTIITSYSIENLQHECRSILERLQTDGQFALARRVAELAELPVDNLVIKEITQEMQTLKHIEQWSLKQARIDFWKKCHENFKKNSISSKAASSFFSTQAHVACEHPTGWSSMEERHLLLTLAGHWLAQEDVVPLDKLEELEKQIWLCRITQHTLGRNQEETEPRFSRQISTSGELSFDSLASEFSFSKLAALNTSKYLELNSLPSKETCENRLDWKEQESLNFLIGRLLDDGCVHEASRVCRYFHFYNPDVALVLHCRALASGEASMEDLHPEIHALLQSAELLEEEAPDIPLRRVHSTSSLDSQKFVTVPSSNEVVTNLEVLTSKCLHGKNYCRQVLCLYDLAKELGCSYTDVAAQDGEAMLRKILASQQPDRCKRAQAFISTQGLKPDTVAELVAEEVTRELLTSSQGTGHKQMFNPTEESQTFLQLTTLCQDRTLVGMKLLDKISSVPHGELSCTTELLILAHHCFTLTCHMEGIIRVLQAAHMLTDNHLAPSEEYGLVVRLLTGIGRYNEMTYIFDLLHKKHYFEVLMRKKLDPSGTLKTALLDYIKRCRPGDSEKHNMIALCFSMCREIGENHEAAARIQLKLIESQPWEDSLKDGHQLKQLLLKALTLMLDAAESYAKDSCVRQAQHCQRLTKLITLQIHFLNTGQNTMLINLGRHKLMDCILALPRFYQASIVAEAYDFVPDWAEILYQQVILKGDFNYLEEFKQQRLLKSSIFEEISKKYKQHQPTDMVMENLKKLLTYCEDVYLYYKLAYEHKFYEIVNVLLKDPQTGCCLKDMLAG

SEQ ID NO: 53050 - protein, 97 aa, Homo sapiens
  MOD_RES (1)..(1): Any amino acid
XELLPEKEETSQADQDIQDKEPHCHIPIKRNSIFNRSIRRKSKAKARDNPERNASCLADSQDNGKSVNEPLTLNIPWSRMPPCRTAMQTDPGAQEMR

SEQ ID NO: 53051 - protein, 1379 aa, Homo sapiens
MAALLRSARWLLRAGAAPRLPLSLRLLPGGPGRLHAASYLPAARAGPVAGGLLSPARLYAIAAKEKDIQEESTFSSRKISNQFDWALMRLDLSVRRTGRIPKKLLQKVFNDTCRSGGLGGSHALLLLRSCGSLLPELKLEERTEFAHRIWDTLQKLGAVYDVSHYNALLKVYLQNEYKFSPTDFLAKMEEANIQPNRVTYQRLIASYCNVGDIEGASKILGFMKTKDLPVTEAVFSALVTGHARAGDMENAENILTVMRDAGIEPGPDTYLALLNAYAEKGDIDHVKQTLEKVEKSELHLMDRDLLQIIFSFSKAGYPQYVSEILEKVTCERRYIPDAMNLILLLVTEKLEDVALQILLACPVSKEDGPSVFGSFFLQHCVTMNTPVEKLTDYCKKLKEVQMHSFPLQFTLHCALLANKTDLAKALMKAVKEEGFPIRPHYFWPLLVGRRKEKNVQGIIEILKGMQELGVHPDQETYTDYVIPCFDSVNSARAILQENGCLSDSDMFSQAGLRSEAANGNLDFVLSFLKSNTLPISLQSIRSSLLLGFRRSMNINLWSEITELLYKDGRYCQEPRGPTEAVGYFLYNLIDSMSDSEVQAKEEHLRQYFHQLEKMNVKIPENIYRGIRNLLESYHVPELIKTVQLTSSELESTLETLKAENQPIRDVLKQLILVLCSEENMQKALELKAKYESDMVTGGYAALINLCCRHDKVEDALNLKEEFDRLDSSAVLDTGKYVGLVRVLAKHGKLQDAINILKEMKEKDVLIKDTTALSFFHMLNGAALRGEIETVKQLHEAIVTLGLAEPSTNISFPLVTVHLEKGDLSTALEVAIDCYEKYKVLPRIHDVLCKLVEKGETDLIQKAMDFVSQEQGEMVMLYDLFFAFLQTGNYKEAKKIIETPGIRARSARLQWFCDRCVANNQVETLEKLVELTQKLFECDRDQMYYNLLKLYKINGDWQRADAVWNKIQEENVIPREKTLRLLAEILREGNQEVPFDVPELWYEDEKHSLNSSSASTTEPDFQKDILIACRLNQKKGAYDIFLNAKEQNIVFNAETYSNLIKLLMSEDYFTQAMEVKAFAETHIKGFTLNDAANSRLIITQVRRDYLKEAVTTLKTVLDQQQTPSRLAVTRVIQALAMKGDVENIEVVQKMLNGLEDSIGLSKMVFINNIALAQIKNNNIDAAIENIENMLTSENKVIEPQYFGLAYLFRKVIEEQLEPAVEKISIMAERLANQFAIYKPVTDFFLQLVDAGKVDDARALLQRCGAIAEQTPILLLFLLRNSRKQGKASTVKSVLELIPELNEKEEAYNSLMKSYVSEKDVTSAKALYEHLTAKNTKLDDLFLKRYASLLKYAGEPVPFIEPPESFEFYAQQLRKLRENSS

SEQ ID NO: 53052 - protein, 214 aa, Homo sapiens
MDCRVHMRPIGLTWVLQLTLAWILLEACGGSRPLQARSQQHHGLAADLGKGKLHLAGPCCPSEMDTTETSGPGNHPERCGVPSPECESFLEHLQRALRSRFRLRLLGVRQAQPLCEELCQAWFANCEDDITCGPTWLPLSEKRGCEPSCLTYGQTFADGTDLCRSALGHALPVAAPGARHCFNISISAVPRPRPGRRGREAPSRRSRSPRTSIL

SEQ ID NO: 53053 - protein, 181 aa, Homo sapiens
MHRALAALKNKPLNHVHKVVKERLCPWLCSRQPEPFGVKFHHAHCKKFHSKNGNDLHPLGGPVFSQVSDCDRLEQNVKNEESQMFYRRLSNLTSSEEVLSFISTMETLPDTMAAGALQRICEVEKKDGDQGLPKEILENSIFQALCFQFEKEPSQLSNTSLVTALQALILLHVDPQSSLLL

SEQ ID NO: 53054 - protein, 66 aa, Homo sapiens
MCSSILKDILHLAEHDGTHPEQGLYTCAAEHDLHQKEQIREKLTRSDEWRPSFVNHSAHVGERNFT

SEQ ID NO: 53055 - protein, 1016 aa, Homo sapiens
MLEMRDVYMEEDVYQLQELRQQLDQASKTCRILQYRLRKAERRSLRAAQTGQVDGELIRGLEQDVKVSKDISMRLHKELEVVEKKRARLEEENEELRQRLIETELAKQVLQTELERPREHSLKKRGTRSLGKADKKTLVQEDSADLKCQLHFAKEESALMCKKLTKLAKENDSMKEELLKYRSLYGDLDSALSAEELADAPHSRETELKVHLKLVEEEANLLSRRIVELEVENRGLRAEMDDMKDHGGGCGGPEARLAFSALGGGECGESLAELRRHLQFVEEEAELLRRSSAELEDQNKLLLNELAKFRSEHELDVALSEDSCSVLSEPSQEELAAAKLQIGELSGKVKKLQYENRVLLSNLQRCDLASCQSTRPMLETDAEAGDSAQCVPAPLGETHESHAVRLCRAREAEVLPGLREQAALVSKAIDVLVADANGFTAGLRLCLDNECADFRLHEAPDNSEGPRDTKLIHAILVRLSVLQQELNAFTRKADAVLGCSVKEQQESFSSLPPLGSQGLSKEILLAKDLGSDFQPPDFRDLPEWEPRIREAFRTGDLDSKPDPSRSFRPYRAEDNDSYASEIKELQLVLAEAHDSLRGLQEQLSQERQLRKEEADNFNQKMVQLKEDQQRALLRREFELQSLSLQRRLEQKFWSQEKNMLVQESQQFKHNFLLLFMKLRWFLKRWRQGKVLPSEGDDFLEVNSMKELYLLMEEEEINAQHSDNKACTGDSWTQNTPNEYIKTLADMKVTLKELCWLLRDERRGLTELQQQFAKAKATWETERAELKGHTSQMELKTGKGAGERAGPDWKAALQREREEQQHLLAESYSAVMELTRQLQISERNWSQEKLQLVERLQGEKQQVEQQVKELQNRLSQLQKAADPWVLKHSELEKQDNSWKETRSEKIHDKEAVSEVELGGNGLKRTKSVSSMSEFESLLDCSPYLAGGDARGKKLPNNPAFGFVSSEPGDPEKDTKEKPGLSSRDCNHLGALACQDPPGSQKLPFLLILAPPQPPPIL

SEQ ID NO: 53056 - protein, 88 aa, Homo sapiens
KDDDHNGHIDFITAASNLRAKMYSIEPADRFKTKRIAGKIIPAIATTTATVSGLKWNIIYNLGSMDRTWKRRFHPLGFHKCSQREVWN

SEQ ID NO: 53057 - protein, 166 aa, Homo sapiens
MAWLCGSLPVVVAVTAMETAARQECYPELKPVQSINAHPSNCICIKFDPMGKYFATGSADALVSLWDVDELVCVRCFSRLDWPVRTLSFSHDGKMLASASEDHFIDIAEVETGDKLWEVQCESPTFTVAWHPKRPLLAFACDDKDGKYDSSREAGTVKLFGLPNDS

SEQ ID NO: 53058 - protein, 627 aa, Homo sapiens
MEENLISMREDHSFHVRYRMEASCLELALEGERLCKSGDCRAGVSFFEAAVQVGTEDLKTLSAIYSQLGNAYFYLHDYAKALEYHHHDLTLARTIGDQLGEAKASGNLGNTLKVLGNFDEAIVCCQRHLDISRELNDKVGEARALYNLGNVYHAKGKSFGCPGPQDVGEFPEEVRDALQAAVDFYEENLSLVTALGDRAAQGRAFGNLGNTHYLLGNFRDAVIAHEQRLLIAKEFGDKAAERRAYSNLGNAYIFLGEFETASEYYKKTLLLARQLKDRAVEAQSCYSLGNTYTLLQDYEKAIDYHLKHLAIAQELNDRIGEGRACWSLGNAYTALGNHDQAMHFAEKHLEISREVGDKSGELTARLNLSDLQMVLGLSYSTNNSIMSENTEIDSSLNGVRPKLGRRHSMENMELMKLTPEKVQNWNSEILAKQKPLIAKPSAKLLFVNRLKGKKYKTNSSTKVLQDASNSIDHRIPNSQRKISADTIGDEGFFDLLSRFQSNRMDDQRCCLQEKNCHTASTTTSSTPPKMMLKTSSVPVVSPNTDEFLDLLASSQSRRLDDQRASFSNLPGLRLTQNSQSVLSHLMTNDNKEADEDFFDILVKCQVCLYIFFVLHTAQIPLKTLVVL

SEQ ID NO: 53059 - protein, 455 aa, Homo sapiens
MSLTVVSMACVGFFLLQGAWPLMGGQDKPFLSARPSTVVPRGGHVALQCHYRRGFNNFMLYKEDRSHVPIFHGRIFQESFIMGPVTPAHAGTYRCRGSRPHSLTGWSAPSNPLVIMVTGNHRKPSLLAHPGPLLKSGETVILQCWSDIMFEHFFLHREGISEDPSRLVGQIHDGVSKANFSIGPLMPVLAGTYRCYGSVPHSPYQLSAPSDPLDIVITGLYEKPSLSAQPGPTVQAGENVTLSCSSWSSYDIYHLSREGEAHERRLRAVPKVNRTFQADFPLGPATHGGTYRCFGSFRALPCVWSNSSDPLLVSVTGNPSSSWPSPTEPSSKSGICRHLHVLIGTSVVIFLFILLLFFLLYRWCSNKKNAAVMDQEPAGDRTVNRQDSDEQDPQEVTYAQLDHCVFIQRKISRPSQRPKTPLTDTSVYTELPNAEPRSKVVSCPRAPQSGLEGVF

SEQ ID NO: 53060 - protein, 110 aa, Homo sapiens
  MOD_RES (1)..(1): Any amino acid
XPIERAFAQKTRPIKPPPDSQETLALPSLVPQNYTENKNEGVDVTSLRGEVESLRRALELMEVQLERKLTDIWEELKSEKEQRRRLEVQVMQGTQKSQTPRVIHTQTQTY

SEQ ID NO: 53061 - protein, 388 aa, Homo sapiens
  MOD_RES (1)..(1): Any amino acid
XLFDGAEVVLGPDTSMELLGPVPPEQQFINQKMRPGSGMLSIRVIPDGPTRALQITDFCHRKSSRSYEVDELPVTEQELQKLKNPDTEQELEVLVRLEGGIGLSLINKVPEELVFASLTGINVHYTQLATSHMLELSIQDVQVDNQLIGTTQPFMLYVTPLSNENEVIETGPAVQVNAVKFPSKSALTNIYKHLMITAQRFTVQIEEKLLLKLLSFFGYDQAESEVEKYDENLHEKTAEQGGTPIRYYFENLKISIPQIKLSVFTSNKLPLDLKALKSTLGFPLIRFEDAVINLDPFTRVHPYETKEFIINDILKHFQEELLSQAARILGSVDFLGNPMGLLNDVSEGVTGLIKYGNVGGLIRNVTHGVSNSAAKVTQCQSWKGFWKS

SEQ ID NO: 53062 - protein, 1177 aa, Homo sapiens
MTENMKECLAQTNAAVGDMVTVVKTEVCSPLRDQEYGQPCSRRPDSSAMEVEPKKLKGKRDLIVPKSFQQVDFWFCESCQEYFVDECPNHGPPVFVSDTPVPVGIPDRAALTIPQGMEVVKDTSGESDVRCVNEVIPKGHIFGPYEGQISTQDKSAGFFSWLIVDKNNRYKSIDGSDETKANWMRYVVISREEREQNLLAFQHSERIYFRACRDIRPGEWLRVWYSEDYMKRLHSMSQETIHRNLARGEKRLQREKSEQVLDNPEDLRGPIHLSVLRQGKSPYKRGFDEGDVHPQAKKKKIDLIFKDVLEASLESAKVEAHQLALSTSLVIRKVPKYQDDAYSQCATTMTHGVQNIGQTQGEGDWKVPQGVSKEPGQLEDEEEEPSSFKADSPAEASLASDPHELPTTSFCPNCIRLKKKVRELQAELDMLKSGKLPEPPVLPPQVLELPEFSDPAASESMVSGPAIMEDDDQEVDSADESVSNDMMTATDEPSKMSSATGRRIRRFKQEWLKKFWFLRYSPTLNEMWCHVCRQYTVQSSRTSAFIIGSKQFKIHTIKLHSQSNLHKKCLQLYKLRMHPEKTEEMCRNMTLLFNTAYHLALEGRPYLDFRPLAELLRKCELKVVDQYMNEGDCQILIHHIARALREDLVERIRQSPCLSVILDGQSDDLLADTVAVYVQYTSSDGPPATEFLSLQELGFSSTESYLQALDRAFSALGIRLQDEKPTVGLGVDGANITASLRASMFMTIRKTLPWLLCLPFMVHRPHLEILDAISGKELPCLEELENNLKQLLSFYRYSPRLMCELRSTAATLCEETEFLGDIRAVRWIIGEQNVLNALIKDYLEVVAHLKEVSSQTQRADASAIALALLQFLMDYQSIKLIYFLLDVIAVLSRLAYIFQGEYLLVSQVDDKIEEAIQEISRLADSPGEYLQEFEENFRESFNGIAMKNLRVAEAKFQSIREKICQKTQVILAQRFDSRSRIFVKACQVFDLAAWPRSSEELMSYGKEDMVQIFDHLEAIPTFSRDVCREGLDPRGSLLMEWRELKADYYTKNGFKDLISHICKYKQRFPLLNKIIQVLKVLPTSTACCEKGRNALQRVRKNHRSRLTLEQLSDLLTIAVNGPPITNFDAKRALDSWFEEKSGNSYALSAEVLSRMSALEQKPALQTMDHGTEFYPDI

SEQ ID NO: 53063 - protein, 138 aa, Homo sapiens
MKRPKLKKASKRMTCHKRYKIQKKVREHHRKLRKEAKKRGHKKPRKDPGVPNSAPFKEALLREAELRKQRLEELKQQQKLDRQKELEKKRKLETNPDIKPSNVEPMEKEFGLCKTENKAKSGKQNSKKLYCQELKKVS

SEQ ID NO: 53064 - protein, 61 aa, Homo sapiens
MAFKDTGKTPVEPEVAIHRIRITLTSRNVKSLEKVCADLIRGAKEKNLKVKGPVRMPTKVK

SEQ ID NO: 53065 - protein, 465 aa, Homo sapiens
MAFGKSHRDPYATSVGHLIEKATFAGVQTEDWGQFMHICDIINTTQDGPKDAVKALKKRISKNYNHKEIQLTLSLIDMCVQNCGPSFQSLIVKKEFVKENLVKLLNPRYNLPLDIQNRILNFIKTWSQGFPGGVDVSEVKEVYLDLVKKGVQFPPSEAEAETARQETAQISSNPPTSVPTAPALSSVIAPKNSTVTLVPEQIGKLHSELDMVKMNVRVMSAILMENTPGSENHEDIELLQKLYKTGREMQERIMDLLVVVENEDVTVELIQVNEDLNNAILGYERFTRNQQRILEQNKNQKEATNTTSEPSAPSQDLLDLSPSPRMPRATLGELNTMNNQLSGLNFSLPSSDVTNNLKPSLHPQMNLLALENTEIPPFAQRTSQNLTSSHAYDNPVSLQTIAAAPSNQSLPPLPSNHPAMTKSDLQPPNYYEVMEFDPLAPAVTTEAIYEEIDAHQHKGAQNDGD

SEQ ID NO: 53066 - protein, 68 aa, Homo sapiens
MSGFSSVAATKKVVQQLQLEAGLNSVKVSQAAADLKQFCLQNAQHDPLLTGVSSSTNPFRPQKVCSFL

SEQ ID NO: 53067 - protein, 22 aa, Homo sapiens
MVLVHVGYLVLPVFGSVRNRAQ

SEQ ID NO: 53068 - protein, 820 aa, Homo sapiens
MEPLTFKDVAIEFSLEEWQCLDTAQRDLYRNVLLENYRNLVFLVMSFHFAQDLWPEQNIKDSFQKVTLRRYGKCEYENLQLRKGCKHVDECTGHKGGHNTVNQCLTATPSKIFQCNKYVKVFDKFSNSNRYKRRHTGNKHFKCKECSKSFCVLSQLTQHRRIHTRVNSYKCEECGKAFNWFSTLTKHKRIHTGEKPYKCEECGKAFNQSSQLTRHKIIHTEEKPNKCEECGKAFKQASHLTIHKIIHTGEKPYKYEECGKVFSQSSHLTTQKILHTGENLYKCKECGKAFNLFSNLTNHKRIHAGEKPYKCKECGRAFNISSNLNKQEKIHTGGKLNKCEECDKAFNRSLKLTAHKKILMEEKPYKCEECGKVFNQFSTLTRHKIIHTGEKPYKCKECGKAFNQSSNLTEHKKIHTAEKSYKCEECGKAFNQHSNLINHRKIYSGEKPYKCEECGKAFNRSSTLTRHKKIHTGEKPYKCEECDRAFSQSSNLTEHKKIHTGEKPYKCEECGKAFNRFSTLTKHKRIHTGEKPYKCEECGKAFNQSYQLTRHKIVHTKEKLNKCEEFGKAFKQSSHRTIHKIIHTGEKPYKCEEHGKVFNQSSNLTTQKIIHTGENLYKFEEHGKAFNLFSNITNHKIIYTGEKPHKCEECGKAYNRFSNLTIHKRIHTGEKPYQCAECGKAFNCSSTLNRHKIIHTGEKPYKCKECGKAFNLSSTLTAHKKIHTGEKPYKCEECGKAFNQSSNLTTHKKIHTSEKPYKCEECGKSFNQFSSLNIHKIIHTGEKPYKCGDYGRAFNLSSNLTTHKKIHTGEKPYKCEYGKT

SEQ ID NO: 53069 - protein, 439 aa, Homo sapiens
MATPDQKSPNVLLQNLCCRILGRSEADVAQQFQYAVRVIGSNFAPTVERDEFLVAEKIKKELIRQRREADAALFSELHRKLHSQGVLKNKWSILYLLLSLSEDPRRQPSKVSSYATLFAQALPRDAHSTPYYYARPQTLPLSYQDRSAQSAQSSGSVGSSGISSIGLCALSGPAPAPQSLLPGQSNQAPGVGDCLRQQLGSRLAWTLTANQPSSQATTSKGVPSAVSRNMTRSRREGDTGGTMEITEAALVRDILYVFQGIDGKNIKMNNTENCYKVEGKANLSRSLRDTAVRLSELGWLHNKIRRYTDQRSLDRSFGLVGQSFCAALHQELREYYRLLSVLHSQLQLEDDQGVNLGLESSLTLRRLLVWTYDPKIRLKTLAALVDHCQGPTRVFPTHVFPTRDFPTRDFPTRDFPMHVFPTRVFPTRVWHSLCFRTRL

SEQ ID NO: 53070 - protein, 584 aa, Homo sapiens
MLVSFDHENKKVRLVLSGEKVLETLQEKGERTNPNHPTLWRPEYGSYMIEGTPGQPYGGTMSEFNTVEANMRKRRKEATSILEENQALCTITSFPRLGCPGFTLPEVKPNPVEGGASKSLFFPDEAINKHPRFSTLTRNIRHRRGEKVVINVPIFKDKNTPSPFIETFTEDDEASRASKPDHIYMDAMGFGMGNCCLQVTFQACSISEARYLYDQLATICPIVMALSAASPFYRGYVSDIDCRWGVISASVDDRTREERGLEPLKNNNYRISKSRYDSIDSYLSKCGEKYNDIDLTIDKEIYEQLLQEGIDHLLAQHVAHLFIRDPLTLFEEKIHLDDANESDHFENIQSTNWQTMRFKPPPPNSDIGWRVEFRPMEVQLTDFENSAYVVFVVLLTRVILSYKLDFLIPLSKVDENMKVAQKRDAVLQGMFYFRKDICKGGNAVVDGCGKAQNSTELAAEEYTLMSIDTIINGKEGVFPGLIPILNSYLENMEVDVDTRCSILNYLKLIKKRASGELMTVARWMREFIANHPDYKQDSVITDEMNYSLILKCNQIANELCECPELLGSAFRKVKYSGSKTDSSN

SEQ ID NO: 53071 - protein, 1338 aa, Homo sapiens
MSSPMPDCTSKCRSLKHALDVLSVVTKGSENQIKAFLSSHCYNAATIKDVFGRNALHLVSSCGKKGVLDWLIQKGVDLLVKDKESGWTALHRSIFYGHIDCVWSLLKHGVSLYIQDKEGLSALDLVMKDRPTHVVFKNTDPTDVYTWGDNTNFTLGHGSQNSKHHPELVDLFSRSGIYIKQVVLCKFHSVFLSQKGQVYTCGHGPGGRLGHGDEQTCLVPRLVEGLNGHNCSQVAAAKDHTVVLTEDGCVYTFGLNIFHQLGIIPPPSSCNVPRQIQAKYLKGRTIIGVAAGRFHTVLWTREAVYTMGLNGGQLGCLLDPNGEKCVTAPRQVSALHHKDIALSLVAASDGATVCVTTRGDIYLLADYQCKKMASKQLNLKKVLVSGGHMEYKVDPEHLKENGGQKICILAMDGAGRVFCWRSVNSSLKQCRWAYPRQVFISDIALNRNEILFVTQDGEGFRGRWFEEKRKSSEKKEILSNLHNSSSDVSYVSDINSVYERIRLEKLTFAHRAVSVSTDPSGCNFAILQSDPKTSLYEIPAVSSSSFFEEFGKLLREADEMDSIHDVTFQVGNRLFPAHKYILAVHSDFFQKLFLSDGNTSEFTDIYQKDEDSAGCHLFVVEKVHPDMFEYLLQFIYTDTCDFLTHGFKPRIHLNKNPEEYQGTLNSHLNKVNFHEDDNQKSAFEVYKSNQAQTVSERQKSKPKSCKKGKNIREDDPVRMLQTVAKKFDFSNLSSRLDGVRFENEKINVIAKNTGNKLKLSQKKCSFLCDVTMKSVDGKEFPCHKCVLCARLEYFHSMLSSSWIEASSCAALEMPIHSDILKVILDYLYTDEAVVIKESQNVDFICSVLVVADQLLITRLKEICEVALTEKLTLKNAAMLLEFAAMYSAKQLKLSCLQFIGLNMAALLEARSLDVLSDGVLKDLSEFYRKMIPAMDRRVITPYQDGPDISYLEVEDGDIFLKEEINMEQNHSETMFKKAKTKAKKKPRKRSDSSGGYNLSDIIQSPSSTELLTSDSEGSYAGVGSPRDLQSPDFTTGFHSDKIEAKVKPYVNGTSPVYSREDLKPWEKSPILKISAPQPIPSNRIDTTSSASWVAGSFSPVSPPVVDLRTIMEIEESRQKCGATPKSHLGKTVSHGVKLSQKQRKMIALTTKENNSGMNSMETVLFTPSKAPKPVNAWASSLHSVSSKSFRDFLLEEKKSVTSHSSGDHVKKVSFKGIENSQAPKIVRCSTHGTPGPEGNHISDLPLLDSPNPWLSSSVTAPSMVAPVTFASIVEEELQQEAALIRSREKPLALIQIEEHAIQDLLVFYEAFGNPEEFVIVERTPQGPLAVPMWNKHGC

SEQ ID NO: 53072 - protein, 133 aa, Homo sapiens
MPYIDESPTMSPQLSARSQGGGDGVSPTPPEGLAPGPMKPLKATATTSQPVLTIQQIETIFYKIQDIYEIHKEFYDNLCPKVQQWDSQVTMGHLFQKLASQLGVYKAFVDNYKVALETAEKCSQSNNQFQKIS

SEQ ID NO: 53073 - protein, 195 aa, Homo sapiens
MNERAIAGALIADFLSGLVHWGADTWGSVELPIVGKAFIRPFREHHIDPTAITRHDFIETNGDNCLVTLLPLLNMAYKFRTHSPEALEQLYPWECFVFCLIIFGTFTNQIHKWSHTYFGLPRWVTLLQDWHVILPRKHHRIHHVSPHETYFCITTGWLNYPLEKIGFWRRLEDLIQGLTGEKPRADDMKWAQKIK

SEQ ID NO: 53074 - protein, 328 aa, Homo sapiens
MGPLMVLFCLLFLYPGLADSAPSCPQNVNISGGTFTLSHGWAPGSLLTYSCPQGLYPSPASRLCKSSGQWQTPGATRSLSKAVCKPVRCPAPVSFENGIYTPRLGSYPVGGNVSFECEDGFILRGSPVRQCRPNGMWDGETAVCDNGAGHCPNPGISLGAVRTGFRFGHGDKVRYRCSSNLVLTGSSERECQGNGVWSGTEPICRQPYSYDFPEDVAPALGTSFSHMLGATNPTQKTKESLGRKIQIQRSGHLNLYLLLDCSQSVSENDFLIFKESASLMVDRVRNQESACSRGLPVLTISLCLLPLLRTPLTAHLLQEVFSDYTHAM

SEQ ID NO: 53075 - protein, 405 aa, Homo sapiens
MATANGAVENGQPDRKPPALPRPIRNLEVKFTKIFINNEWHESKSGKKFATCNPSTREQICEVEEGDKPDVDKAVEAAQVAFQRGSPWRRLDALSRGRLLHQLADLVERDRATLAAGFPPGVVNIVPGFGPTVGAAISSHPQINKIAFTGSTEVGKLVKEAASRSNLKRVTLELGGKNPCIVCADADLDLAVECAHQGVFFNQGQCCTAASRVFVEEQVYSEFVRRSVEYAKKRPVGDPFDVKTEQGPQIDQKQFDKILELIESGKKEGAKLECGGSAMEDKGLFIKPTVFSEVTDNMRIAKEEIFGPVQPILKFKSIEEVIKRANSTDYGLTAAVFTKNLDKALKLASALESGTVWINCYNALYAQAPFGGFKMSGNGRELGEYALAEYTEVKTVTIKLGDKNP

SEQ ID NO: 53076 - protein, 478 aa, Homo sapiens
MLENYRNLVFLGIALTKPDLITCLEQGKEPWNIKRHEMVAKPPVICSHFPQDLWAEQDIKDSFQEAILKKYGKYGHDNLQLQKGCKSVDECKVHKEHDNKLNQCLITTQSNIFQCDPSAKVFHTFSNSNRHKIRHTRKKPFKCKKCEKSFCMLLHLTQHKRFHITENSYQCKDCGKAFNWFSTLTTHRRIHTGEKPYKCEECGKAFNRSSHLTTHKIIHTGEKPYRCEECGKAFNRSSHLTTHKRIHTGVKPYKCTECGKAFNRSSHLTTHRIIHTGEKPYKCEECGKAFNQSSTLTTHKITHAGEKPYKCEECGKAFYRFSYLTKHKTSHTGEKFYKCEECGKGFNWSSALTKHKRIHTGEKPYKCEECGKAFNESSNLTTHKMIHTGEKPYKCDECGKAFNRSSQLTAHKMIHTGEKPYKCEECGKAFNRSSTLTKHKITHTGEKSYKWEECGKDFNQSLSLIKQNNSYWRETLQM

SEQ ID NO: 53077 - protein, 235 aa, Homo sapiens
MQTFPSGEIIGGHEAKPHSRPYMAYLMIWDQKSLKRCGGFLIRDDFVLTAAHCWGSSINVTLGAHNIKEQEPTQQFIPVKRPIPHPAYNPKNFSNDIMLLQLERKAKRTRAVQPLRLPSNKAQVKPGQTCSVAGWGQTAPLGKHSHTLQEVKMTVQEDRKCESDLRHYYDSTIELCVGDPEIKKTSFKGDSGGPLVCNKVAQGIVSYGRNNGMPPRACTKVSSFVHWIKKTMKRY

SEQ ID NO: 53078 - protein, 266 aa, Homo sapiens
MVCLKLPGGSSLAALTVTLMVLSSRLAFAGDTRPRFLELLKSECHFFNGTERVRFLERHFHNQEEYARFDSDVGEYRAVRELGRPDAEYWNSQKDLLEQKRGQVDNYCRHNYGVGESFTVQRRVHPQVTVYPAKTQPLQHHNLLVCSVSGFYPGSIEVRWFRNGQEEKAGVVSTGLIQNGDWTFQTLVMLETVPRSGEVYTCQVEHPSVTSPLTVEWSARSESAQSKMLSGVGGFVLGLLFLGAGLFIYFRNQKGHSGLQPTGFLS

SEQ ID NO: 53079 - protein, 193 aa, Homo sapiens
MALTQGQLSFSDVAIEFSQEEWKCLDPGQKALYRDVMLENYRNLVSLGICLPDLSVTSMLEQKRDPWTLQSEVKIINNPDGRECIKGVNTDFSLLAWDARVFRVEAWRASGGAEEPTGPNFVGNDSPLPSPLALLPFPSVSASLGDAKRARLTAEGRGHGTLRAGPAPRPRSAAPHAPDAVQRWPPEQRLPRS

SEQ ID NO: 53080 - protein, 624 aa, Homo sapiens
MERCSRCHRLLLLLPLVLGLSAAPGWAGAPPVDVLRALRFPSLPDGVRRAKGICPADVAYRVARPAQLSAPTRQLFPGGFPKDFSLLTVVRTRPGLQAPLLTLYSAQGVRQLGLELGRPVRFLYEDQTGRPQPPSQPVFRGLSLADGKWHRVAVAVKGQSVTLIVDCKKRVTRPLPRSARPVLDTHGVIIFGARILDEEVFEGDVQELAIVPGVQAAYESCEQKELECEGGQRERPQNQQPHRAQRSPQQQPSRLHRPQNQEPQSQPTESLYYDYEPPYYDVMTTGTTPDYQDPTPGEEEEILESSLLPPLEEEQTDLQVPPTADRFQAEEYGEGGTDPPEGPYDYTYGYGDDYREETELGPALSAETAHSGAAAHGPRGLKGEKGEPAVLEPGMLVEGPPGPEGPAGLIGPPGIQGNPGPVGDPGERGPPGRAGLPGSDGAPGPPGTSLMLPFRFGSGGGDKGPVVAAQEAQAQAILQQARLALRGPPGPMGYTGRPGPLGQPGSPGLKGESGDLGPQGPRGPQGLTGPPGKAGRRGRAGADGARGMPGDPGVKGDRGFDGLPGLPGEKGHRGDTGAQGLPGPPGEDGERGDDGEIGPRGLPGESGPRGLLGPKGPPGIPGPP

SEQ ID NO: 53081 - protein, 50 aa, Homo sapiens
MTTSALRRQVKNIVHNYSEAEIKWPSPKSWACCGGGSMTAARTGGTCTRL

SEQ ID NO: 53082 - protein, 348 aa, Homo sapiens
MSLLVVSMACVGFFLLQGAWPHEGVHRKPSLLAHPGRLVKSEETVILQCWSDVMFEHFLLHREGMFNDTLRLIGEHHDGVSKANFSISRMTQDLAGTYRCYGSVTHSPYQVSAPSDPLDVVIIGLYEKPSLSAQPGPTVLAGENVTLSCSSRSSYDMYHLSREGEAHERRLPAGTKVNGTFQANFPLGPATHGGTYRCFGSFRDSPYEWSKSSDPLLVSVTGNPSNSWPSPTEPSSETGNPRHLHILIGTSVVIILFILLFFLLHCWCSNKKNAAVMDQESAGNRTANSEDSDEQDPQEVTYTQLNHCVFTQRKITRPSQRPKTPPTDIIVYTELPNAESRSKVVSCP

SEQ ID NO: 53083 - protein, 501 aa, Homo sapiens
MAAPEPLSPAGGAGEEAPEEDEDEAEAEDPERPNAGAGGGRSGGGGSSVSGGGGGGGAGAGGCGGPGGALTRRAVTLRVLLKDALLEPGAGVLSIYYLGKKFLGDLQPDGRIMWQETGQTFNSPSAWATHCKKLVNPAKKSGCGWASVKYKGQKLDKYKATWLRLHQLHTPATAADESPASEGEEEELLMEEEEEDVLAGVSAEDKSRRPLGKSPSEPAHPEATTPGKRVDSKIRVPVRYCMLGSRDLARNPHTLVEVTSFAAINKFQPFNVAVSSNVLFLLDFHSHLTRSEVVGYLGGRWDVNSQMLTVLRAFPCRSRLGDAETAAAIEEEIYQSLFLRGLSLVGWYHSHPHSPALPSLQDIDAQMDYQLRLQGSSNGFQPCLALLCSPYYSGNPGPESKISPFWVMPPPEQRPSDYGIPMDVEMAYVQDSFLTNDILHEMMLLVEFYKGSPDLVRLQEPWSQEHTYLDKLKISLASRTPKDQSLCHVLEQVCGVLKQGS

SEQ ID NO: 53084 - protein, 389 aa, Homo sapiens
MSLRIDVDTNFPECVVDAGKVTLGTQQRQEMDPRLREKQNEIILRAVCALLNSGGGIIKAEIENKGYNYERHGVGLDVPPIFRSHLDKMQKENHFLIFVKSWNTEAGVPLATLCSNLYHRERTSTDVMDSQEALAFLKCRTQTPTNINVSNSLGPQAAQGSVQYEGNINVSAAALFDRKRLQYLEKLNLPESTHVEFVMFSTDVSHCVKDRLPKCVSAFANTEGGYVFFGVHDETCQVIGCEKEKIDLTSLRASIDGCIKKLPVHHFCTQRPEIKYVLNFLEVHDKGALRGYVCAIKVEKFCCAVFAKVPSSWQVKDNRVRQLPTREWTAWMMEADPDLSRCPEMVLQLSLSSATPRSKPVCIHKNSECLKEQQKRYFPVSARKTSASQ

SEQ ID NO: 53085 - protein, 312 aa, Homo sapiens
MSANTSMVTEFLLLGFSHLADLQGLLFSVFLTIYLLTVAGNFLIVVLVSTDAALQSPMYFFLRTLSALEIGYTSVTVPLLLHHLLTGRRHISRSGCALQMFFFLFFGATECCLLAAMAYDRYAAICEPLRYPLLLSHRVCLQLAGSAWACGVLVGLGHTPFIFSLPFCGPNTIPQFFCEIQPVLQLVCGDTSLNELQIILATALLILCPFGLILGSYGRILVTIFRIPSVAGRRKAFSTCSSHLIVVSLFYGTALFIYIRPKASYDPATDPLVSLFYAVVTPILNPIIYSLRNTEVKAALKRTIQKTVPMEI

SEQ ID NO: 53086 - protein, 30 aa, Homo sapiens
MGQICQRESATAAEKPKLHLLAESEIDKYL

SEQ ID NO: 53087 - protein, 118 aa, Homo sapiens
MEYPAPATVQAADGGAAGPYSSSELLEGQEPDGVRFDRERARRLWEAVSGAQPVGREEAGKGYPCKTCKIVLNSIEQYQAHVSGFKHKNQSPKTVASSLGQIPMQRQPIQKDSTTLED

SEQ ID NO: 53088 - protein, 87 aa, Homo sapiens
MALDRRRWLMAQQQQELQQKEQELKNHQEEEQQSEEKLQPHKKLNVPQPPVAKLWTSQEQPQPSQQQPSVQPPSQPPPQPSTLPQAQ

SEQ ID NO: 53089 - protein, 48 aa, Homo sapiens
MKKTQEISKGKRKEDSLTASQRKQRDSEIMQEKQKAANEKKSMQTREK

SEQ ID NO: 53090 - protein, 74 aa, Homo sapiens
MSEPQPRGAERDLYRDTWVRYLGYANEVGEAFRSLVPAAVVWLSYGVASSYVLADAIDKGKKAGEDFLPLPQLD

SEQ ID NO: 53091 - protein, 199 aa, Homo sapiens
MDPLFQQTHKQVHEIQSCMGRLETADKQSVHIVENEIQASIDQIFSRLERLEILSSKEPPNKRQNARLRVDQLKYDVQHLQTALRNFQHRRHAREQQERQREELLSRTFTTNDSDTTIPMDESLQFNSSLQKVHNGMDDLILDGHNILDGLRTQRLTLKGTQKKILDIANMLGLSNTVMRLIEKRAFQDKYFMIASVSS

SEQ ID NO: 53092 - protein, 166 aa, Homo sapiens
MPWRGRRFRLCRRKMAVLSKEYGFVLLTGAASFIMVAHLAINVSKARKKYKVEYPIMYSTDPENGHIFNCIQRAHQNTLEVYPPFLFFLAVGGVYHPRIASGLGLAWIVGRVLYAYGYYTGEPSKRSRGALGSIALLGLVGTTVCSAFQHLGWVKSGLGSGPKCCH

SEQ ID NO: 53093 - protein, 94 aa, Homo sapiens
MSLAGQVPGPDHCDGRAGGGQGLCTGLAAGVCSLYPLKRKPLLEKRQLLATCPCVSHPVLVAGVSHQLGRPRVKCGLLRTERSPTCPHSQPGRS

SEQ ID NO: 53094 - protein, 430 aa, Homo sapiens
METFIPIDLTTENQEMDKEETKTKPRLLRYEEKKYEDVKPLETQPAEIAEKETLEYKTVRTFSESLKSEKTEDYLRESIIQQHMVSPEPASLKEKGKSRRKKDQTHACPNVRKARPVSYDRTEPKDDDVIRNIIRLREKLGWQTILPQHSLKYGSSKIAIQKITLKKPLEDDGEFVYCLPRKSPKSLYNPYDLQVINIVGSVKEVELIPTLEWLSERRHYYLLRQFKIFSDFRMNKAFVTWKLNVKRIKTEKSRSFLYHHLFLADDLFQTCLVYIRGLCEDAINLKNYNDHENNLSAICLVKLDSSRTYSLDEFCEEQLQQATQALKQLEDIRNKAISEMKSTFLKVAEKNEIKEYFESKLSEDDTTHFKLPKYRRLLETFFKFVMLVDYIFQELIRQLMNTAVTLLLELFNGSAGMPFSVEKKNENLIR

SEQ ID NO: 53095 - protein, 269 aa, Homo sapiens
MHILKGSPNVIPRAHGQKNTRRDGTGLYPMRGPFKNLALLPFSLPLLGGGGSGSGEKVSVSKMAAAWPSGPSAPEAVTARLVGVLWFVSVTTGPWGAVATSAGGEESLKCEDLKVGQYICKDPKINDATQEPVNCTNYTAHVSCFPAPNITCKDSSGNETHFTGNEVGFFKPISCRNVNGYSYKVAVALSLFLGWLGADRFYLGYPALGLLKFCTVGFCGIGSLIDFILISMQIVGPSDGSSYIIDYYGTRLTRLSITNETFRKTQLYP

SEQ ID NO: 53096 - protein, 454 aa, Homo sapiens
MPNPRPGKPSAPSLALGPSPGASPSWRAAPKASDLLGARGPGGTFQGRDLRGGAHASSSSLNPMPPSQLQLPTLPLVMVAPSGARLGPLPHLQALLQDRPHFMHQLSTVDAHARTPVLQVHPLESPAMISLTPPTTATGVFSLKARPGLPPGINVASLEWVSREPALLCTFPNPSAPRKDRSVDRAGKDPRPPIPSPDTLCPPSTLSAVPQSSYPLLANGVCKWPGCEKVFEEPEDFLKHCQADHLLDEKGRAQCLLQREMVQSLEQQLVLEKEKLSAMQAHLAGKMALTKASSVASSDKGSCCIVAAGSQGPVVPAWSGPREAPDSLFAVRRHLWGSHGNSTFPEFLHNMDYFKFHNMRPPFTYATLIRWAILEAPEKQRTLNEIYHWFTRMFAFFRNHPATWKNAIRHNLSLHKCFVRVESEKGAVWTVDELEFRKKRSQRPSRCSNPTPGP

SEQ ID NO: 53097 - protein, 201 aa, Homo sapiens
MPITRMRMRPWLEMQINSNQIPGLIWINKEEMIFQIPWKHAAKHGWDINKDACLFRSWAIHTGRYKAGEKEPDPKTWKANFRCAMNSLPDIEEVKDQSRNKGSSAVRVYRMLPPLTKNQRKERKSKSSRDAKSKAKRKSCGDSSPDTFSDGLSSSTLPDDHSSYTVPGYMQDLEVEQALTPALGAVGVAANKRGWEGVPTQ

SEQ ID NO: 53098 - protein, 304 aa, Homo sapiens
MRLPLGIYRQRGRFRHFSPGLRQDYASTSASVSRHSSSVSLSSGKKGTCSDQEYDQYSLEDEEEFDHLPPPQPRLPRCSPFQRGIPHSQTFSSIRECRRSPSSQYFPSNNYQQQQYYSPQAQTPDQQPNRTNGDKLRRSMPNLARMPSTTAISSNISSPVTVRNSQSFDSSLHGAGNGISRIQSCIPSPGQLQHRVHSVGHFPVSIRQPLKATAYVSPTVQGSSNMPLSNGLQLYSNTGIPTPNKAAASGIMGRSALPRPSLAINGSNLPRSKIAQPVRSFLQPPKPLSSLSTLRDGNWRDGCY

SEQ ID NO: 53099 - protein, 386 aa, Homo sapiens
MEERPAETNANVDNSASPSVAQLAGRFREQAAAAKEKSPPNASHPPKFKVKSSPLIEKLQANLTFDPAALLPGASPKSPGLKAMVSPFHSPPSTPSSPGVRSRPSEAEEVPVSFDQPPEGSHLPCYNKVRTRGSIKRRPPSRRFRRSQSDCGELGDFRAVESSQQNGAKEEDGDEVLPSKSKAPGSPLSSEGAAGEGVRTLGPAEKPPLRRSPSRTEKQEEDRATEEAKNGEKARRSSEEVDGQHPAQEEVPESPQTSGPEAENRCGSPREEKPAGEEAEMEKATEVKGERVQNEEVGPEHDSQETKKLEEGAAVKETPHSPPGGVKGGDVPKQEKGKEKQQEGAVLEPGCSPQTGPAQLETSSEVQSEPAVPKPEDDTPVQDTKM

SEQ ID NO: 53100 - protein, 207 aa, Homo sapiens
MDPSAPQPRAETSGKDIWHPGERCLAPSPDNGKLCEASIKSITVDENGKSFAVVLYADFQERKIPLKQLQEVKFVKDCPRNLIFDDEDLEKPYFPNRKFPSSSVAFKLSDNGDSIPYTINRYLRDYQREGTRFLYGHYIHGGGCILGDDMGLGKTVQVISFLAAVLHKKGTREDIENNMPEFLLRSMKKEPLSSTAKKFGMVSCHCG

SEQ ID NO: 53101 - protein, 193 aa, Homo sapiens
MVSRMVSTMLSGLLFWLASGWTPAFAYSPRTPDRVSEADIQRLLHGVMEQLGIARPRVEYPAHQAMNLVGPQSIEGGAHEGLQHLGPFGNIPNIVAELTGDNIPKDFSEDQGYPDPPNPCPVGKTDDGCLENTPDTAEFSREFQLHQHLFDPEHDYPGLGKWSVNPYLQGQRLDNVVAKKSVPHFSDEDKDPE

SEQ ID NO: 53102 - protein, 133 aa, Homo sapiens
MAKERGLISPSDFAQLQKYMEYSTKKVSDVLKLFEDGEMAKYVQGDAIGYEGFQQFLKIYLEVDNVPRHLSLALFQSFETGHCLNETNVTKDVVCLNDVSCYFSLLEGGRPEDKLEFTFKLYDTDRNGILDSS

SEQ ID NO: 53103 - protein, 432 aa, Homo sapiens
MEKENQKLQASENDLLNKRLKLDYEEITPCLKEVTTVWEKMLSTPGRSKIKFDMEKMHSAVGQGVPRHHRGEIWKFLAEQFHLKHQFPSKQQPKDVPYKELLKQLTSQQHAILIDLGRTFPTHPYFSAQLGAGQLSLYNILKAYSLLDQEVGYCQGLSFVAGILLLHMSEEEAFKMLKFLMFDMGLRKQYRPDMIILQIQMYQLSRLLHDYHRDLYNHLEEHEIGPSLYAAPWFLTMFASQFPLGFVARVFDMIFLQGTEVIFKVALSLLGSHKPLILQHENLETIVDFIKSTLPNLGLVQMEKTINQVFEMDIAKQLQAYEVEYHVLQEELIDSSPLSDNQRMDKLEKTNSSLRKQNLDLLEQLQVANGRIQSLEATIEKLLSSESKLKQAMLTLELERSALLQTVEELRRRSAEPSDREPECTQPEPTGD

SEQ ID NO: 53104 - protein, 19 aa, Homo sapiens
  MOD_RES (1)..(1): Any amino acid
XQEPPILQHTEQQAGHTAH

SEQ ID NO: 53105 - protein, 376 aa, Homo sapiens
MPKNSKVVKRELDDDVTESVKDLLSNEDAADDAFKTSELIVDGQEEKDTDVEEGSEVEDERPAWNSKLQYILAQVGFSVGLGNVWRFPYLCQKNGGGAYLLPYLILLMVIGIPLFFLELSVGQRIRRGSIGVWNYISPKLGGIGFASCVVCYFVALYYNVIIGWSLFYFSQSFQQPLPWDQCPLVKNASHTFVEPECEQSSATTYYWYREALNISSSISESGGLNWKMTICLLAAWVMVCLAMIKGIQSSGKIIYFSSLFPYVVLICFLIRAFLLNGSIDGIRHMFTPKLEIMLEPKVWREAATQVFFALGLGFGGVIAFSSYNKRDNNCHFDAVLVSFINFFTSVLATLVVFAVLGFKANVINEKCITQLFRGPA

SEQ ID NO: 53106 - protein, 624 aa, Homo sapiens
MSSGLRAADFPRWKRHISEQLRRRDRLQRQAFEEIILQYNKLLEKSDLHSVLAQKLQAEKHDVPNRHEISPGHDGTWNDNQLQEMAQLRIKHQEELTELHKKRGELAQLVIDLNNQMQRKDREMQMNEAKIAECLQTISDLETECLDLRTKLCDLERANQTLKDEYDALQITFTALEGKLRKTTEENQELVTRWMAEKAQEANRLNAENEKDSRRRQARLQKELAEAAKEPLPVEQDDDIEVIVDETSDHTEETSPVRAISRAATKRLSQPAGGLLDSITNIFGLSESPLLGHHSSSDAARRRSVSSFPVPQDNVDTHPGSGKEVRVPATALCVFDAHDGEVNAVQFSPGSRLLATGGMDRRVKLWEVFGEKCEFKGSLSGSNAGITSIEFDSAGSYLLAASNDFASRIWTVDDYRLRHTLTGHSGKVLSAKFLLDNARIVSGSHDRTLKLWDLRSKVCIKTVFAGSSCNDIVCTEQCVMSGHFDKKIRFWDIRSESIVREMELLGKITALDLNPERTELLSCSRDDLLKVIDLRTNAIKQTFSAPGFKCGSDWTRVVFSPDGSYVAAGSAEGSLYIWSVLTGKVEKVLSKQHSSSINAVAWSPSGSHVVSVDKGCKAVLWAQY

SEQ ID NO: 53107 - protein, 382 aa, Homo sapiens
MLLMVVSMACVGLFLVQRAGPHMGGQDKPFLSAWPSAVVPRGGHVTLRCHYRHRFNNFMLYKEDRIHVPIFHGRIFQEGFNMSPVTTAHAGNYTCRGSHPHSPTGWSAPSNPMVIMVTGNHRKPSLLAHPGPLVKSGERVILQCWSDIMFEHFFLHKEWISKDPSRLVGQIHDGVSKANFSIGSMMRALAGTYRCYGSVTHTPYQLSAPSDPLDIVVTGLYEKPSLSAQPGPKVQAGESVTLSCSSRSSYDMYHLSREGGAHERRLPAVRKVNRTFQADFPLGPATHGGTYRCFGSFRHSPYEWSDPSDPLLVSVTGNPSSSWPSPTEPSSKSGNLRHLHILIGTSVVKIPFTILLFFLLHRWCSNKKKCCCNGPRACREQK

SEQ ID NO: 53108 - protein, 245 aa, Homo sapiens
MKKYGSLVPLSEKEVLGRLKDVFNEDFSNRKPFINREITNYRARHQKCNFRIFYNKHMLDMDDLATLDGQNWLNDQVINMYGELIMDAVPDKVHFFNSFFHRQLVTKGYNGVKRWTKKVDLFKKSLLLIPIHLEVHWSLITVTLSNRIISFYDSQGIHFKFCVENIRKYLLTEAREKNRPEFLQGWQTAVTKCIPQQKNDSDCGVFVLQYCKCLALEQPFQFSQEDMPRVRKRIYKELCECRLMD

SEQ ID NO: 53109 - protein, 963 aa, Homo sapiens
MVSEKSHLGNPQEPVQEEPKTRLLSMTVRRGPRSLPPIPSTSRTGFAEFSMRGRMREKLQAARSKAESALLQEIPTPRPRRLRSPSKKELETEFGTEPGKEVERTQQEVDSQSYSRVKFHDSARKIKPKPQVPPGFPSAEEAYNFFTFNFDPEPEGSEEKPKARHRAGTNQEEEEGEEEEPPAQGGGKEMDEEELLNGDDAEDFLLGLDHVADDFVAVRPADYESIHDRLQMEREMLFIPSRQTVPTYKKLPENVQPRFLEDEGLYTGVRPEVARTNQNIMENRLLMQDPERRWFGDDGRILALPNPIKPFPSRPPVLTQEQSIKAELETLYKKAVKYVHSSQHVIRSGDPPGNFQLDIDISGLIFTHHPCFSREHVLAAKLAQLYDQYLARHQRNKAKFLTDKLQALRNAVQTGLDPEKPHQSLDTIQKTINEYKSEIRQTRKFRDAEQEKDRTLLKTIIKVWKEMKSLREFQRFTNTPLKLVLRKEKADQKADEEAYEAEIQAEISELLEEHTEEYAQKMEEYRTSLQQWKAWRKVQRAKKKKRKQAAEEHPGDEIAEPYPEEDLVKPSPPEPTDRAVIEQEVRERAAQSRRRPWEPTLVPELSLAGSVTPNDQCPRAEVSRREDVKKRSVYLKVLFNNKEVSRTVSRPLGADFRVHFGQIFNLQIVNWPESLTLQVYETVGHSSPTLLAEVFLPIPETTVVTGRAPTEEVEFSSNQHVTLDHEGVGSGVPFSFEADGSNQLTLMTSGKVSHSVAWAIGENGIPLIPPLSQQNIGFRSALKKADAISSIGTSGLTDMKKLAKWAAESKLDPNDPNNAPLMQLISVATSGESYVPDFFRLEQLQQEFNFVSDQELNRSKRFRLLHLRSQEVPEFRNYKQVPVYDREIMEKVFQDYEKRLRDRNVIETKEHIDTHRAIVAKYLQQVRESVINRFLIAKQYFLLADMIVEEEVPNIRPFFFLES

SEQ ID NO: 53110 - protein, 200 aa, Homo sapiens
MDNRNTQMYTEGRTKAPGTQPSPGLRITIKRAGVEPIIPGVSKVMFPDASEVGSKKHLSSASRGPEKGPRLRDAFEKGPSELRIQEQGPPARPGKKQPSWVPQEGSQELQAGQDQSELGLLPSWVPEVPEGLQQLGSGKEIKGQQGRQRNRGIGEDQPPESCQAGHGGSRLLIPALLEAEGGRSPEVKTSLANMVKPCLY

SEQ ID NO: 53111 - protein, 126 aa, Homo sapiens
MKSLKAKFRKSDTNEWNKNDDRLLQAVENGDAEKVASLLGKKGASATKHDSEGKTAFHLAAAKGHVECLRVMITHGVDVTAQDTTGHSALHLAAKNSHHECIRKLLQSKCPAESVDSSGKTALHYA

SEQ ID NO: 53112 - protein, 110 aa, Homo sapiens
MSTAAFHISSLLEKMTSSDKDFRFMATSDLMSELQKDSIQLDEDSERKVVKMLLRLLEDKNGEVQNLAVKCCRAPLLQGPLSCHNPGKEAGREWGEGRSLAQVARGVRSA

SEQ ID NO: 53113 - protein, 659 aa, Homo sapiens
MKQLPAATVRLLSSSQIITSVVSVVKELIENSLDAGATSVDVKLENYGFDKIEVRDNGEGIKAVDAPVMAMKYYTSKINSHEDLENLTTYGFRGEALGSICCIAEVLITTRTAADNFSTQYVLDGSGHILSQKPSHLGQGTTVTALRLFKNLPVRKQFYSTAKKCKDEIKKIQDLLMSFGILKPDLRIVFVHNKIYLSGFLPKCDADHSFTSLSTPERSFIFINSRPVHQKDILKLIRHHYNLKCLKESTRLYPVFFLKIDVPTADVDVNLTPDKSQVLLQNKESVLIALENLMTTCYGPLPSTNSYENNKTDVSAADIVLSKTAETDVLFNKVESSGKNYSNVDTSVIPFQNDMHNDESGKNTDDCLNHQISIGDFGYGHCSSEISNIDKNTKNAFQDISMSNVSWENSQTEYSKTCFISSVKHTQSENGNKDHIDESGENEEEAGLENSSEISADEWSRGNILKNSVGENIEPVKILVPEKSLPCKVSNNNYPIPEQMNLNEDSCNKKSNVIDNKSGKVTAYDLLSNRVIKKPMSASALFVQDHRPQFLIENPKTSLEDATLQIEELWKTLSEEEKLKYEEKATKDLERYNSQMKRAIEQESQMSLKDGRKKIKPTSAWNLAQKHKLKTSLSNQPKLDELLQSQIEKRRSQNIKMSF

SEQ ID NO: 53114 - protein, 114 aa, Homo sapiens
MAAVVAVCGGLGRKKLTHLVTAAVSLTHPGTHTVLWRRGCSQQVSSNEDLLLSQFVSPFTGCIYGRHITGLCGKKQKEITKAIKRAQIMGFMPVTYKDPAYLKDPKVCNIRYRE

SEQ ID NO: 53115 - protein, 256 aa, Homo sapiens
VFLSEWKEHKVALSQLTSLEMKDDFLHGLQMLKSLQGTHVVTLLGYCEDDNTMLTEYHPLGSLSNLEETLNLSKYQNVNTWQHRLELAMDYVSIINYLHHSPVGTRVMCDSNDLPKTLSQYLLTSNFSILANDLDALPLVNHSSGMLVKCGHRELHGDFVAPEQLWPYGEDVPFHDDLMPSYDEKIDIWKIPDISSFLLGHIEGSDMVRFHLFDIHKACKSQTPSERPTAQDVLETYQKVLDTLRDAMMSQAREML

SEQ ID NO: 53116 - protein, 335 aa, Homo sapiens
MATQVMGQSSGGGGLFTSSGNIGMALPNDMYDLHDLSKAELAAPQLIMLANVALTGEVNGSCCDYLVGEERQMAELMPVGDNNFSDSEEGEGLEESADIKGEPHGLENMELRSLELSVVEPQPVFEASGAPDIYSSNKDLPPETPGAEDKGKSSKTKPFRCKPCQYEAESEEQFVHHIRVHSAKKFFVEESAEKQAKARESGSSTAEEGDFSKGPIRCDRCGYNTNRYDHYTAHLKHHTRAGDNERVYKCIICTYTTVSEYHWRKHLRNHFPRKVYTCGKCNYFSDRKNNYVQHVRTHTGERPYKCELCPYSSSQKTHLTRHMRTHSERLPCPRR

SEQ ID NO: 53117 - protein, 457 aa, Homo sapiens
METVMDTIVDSLFCFFVTLGAVPIIRCSRGTAAEMVAVKLDKKLRENLRDARNSLFTGDTLGAGQFSFQRPLLVLVDRNIDLATPLHHTWTYQALVHDVLDFHLNRVNLEESSGVENSPAGARPKRKNKKSYDLTPVDKFWQKHKGSPFPEVAESVQQELESYRAQEDEVKRLKSIMGLEGEDEGAISMLSDNTAKLTSAVSSLPELLEKKRLIDLHTNVATAVLEHIKARKLDVYFEYEEKIMSKTTLDKSLLDIISDPDAGTPEDKMRLFLIYYISTQQAPSEADLEQYKKALTDAGCNLNPLQYIKQWKAFTKMASAPASYGSTTTKPMGLLSRVMNTGSQFVMEGVKNLVLKQQNLPVTRILDNLMEMKSNPETDDYRYFDPKMLRGNDSSVPRNKNPFQEAIVFVVGGGNYIEYQNLVDYIKGKQGKHILYGCSELFNATQFIKQLSQLGQK

SEQ ID NO: 53118 - protein, 52 aa, Homo sapiens
MVNVPGTVDIQGCGHRILSGGVGTPGLRSEAFIWGCDVRELRKPGLSGSRCL

SEQ ID NO: 53119 - protein, 153 aa, Homo sapiens
MSDTWSSIQAHKKQLDSLRERLQRRRKQDSGHLDLRNPEAALSPTFRSDSPVPTAPTSGGPKPSTASAVPELATDPELEKKLLHHLSDLALTLPTDAVSICLAISTPDAPATQDGVESLLQKFAAQELIEHRNQQRSQPRNQGNMLPQMLIWR

SEQ ID NO: 53120 - protein, 203 aa, Homo sapiens
MTPILTVLICLGLSLGPRTHVQAGHLPKPTLWAEPGSVIIQGSPVTLRCQGSLQAEEYHLYRENKSASWVRRIQEPGKNGQFPIPSITWEHAGRYHCQYYSHNHSSEHQAQQNQAEFRMGPVTSAHVGTYRCYSSLSSNPYLLSLPSDPLELVVSASLGQHPQDYTVENLIRMGVAGLVLVVLGILLFEAQHSQRSLQDAAGR

SEQ ID NO: 53121 - protein, 41 aa, Homo sapiens
MAAPSPSGGGGSGGGSGSGTPGPVGSPAPGHPAVSSMQERD

SEQ ID NO: 53122 - protein, 315 aa, Homo sapiens
MNVSEPNSSFAFVNEFILQGFSCEWTIQIFLFSLFTTTYALTITGNGAIAFVLWCDRRLHTPMYMFLGNFSFLEIWYVSSTVPKMLVNFLSEKKNISFAGCFLQFYFFFSLGTSECLLLTVMAFDQYLAICRPLLYPNIMTGHLYAKLVILCWVCGFLWFLIPIVLISQMPFCGPNIIDHVVCDPGPRFALDCVSAPRIQLFCYTLSSLVIFGNFLFIIGSYTLVLKAMLGMPSSTGRHKAFSTCGSHLAVVSLCYSSLMVMYVSPGLGHSTGMQKIETLFYAMVTPLFNPLIYSLQNKEIKAALRKVLGSSNII

SEQ ID NO: 53123 - protein, 188 aa, Homo sapiens
MFPPSGSTGLIPPSHFQARPLSTLPRMAPTWLSDIPLVQPPGHQDVSERRLDTQRPQVTMWERDVSSDRQEPGRRGRSWGLEGSQALSQQAEVIVRQLQELRWLEEEVWLLRETSLQQKMRLEAQAMELEALARAEKAGRAEAEGLRAALAGAEVVRKNLEEGRQRELEEVQRLHQEQLSSLTQAHEE

SEQ ID NO: 53124 - protein, 1375 aa, Homo sapiens
MEPSPSPAPQAQPPKPVPKPRTVFGGLSGPATTQRPGLSPALGGPGVSRSPEPSPRPPPLPTSSSEQSSALNTVEMMPNSIYFGLDSRGRAQAAQDKAPDSSQISAPTPALRPTTGTVHIMDPGCLYYGVQPVGTPGAPDRRESRGVCQGRAEHRLSRQDLEAREDAGYASLELPGDSTLLSPTLETEETSDDLISPYASFSFTADRLTPLLSGWLDKLSPQGNYVFQRRFVQFNGRSLMYFGSDKDPFPKGVIPLTAIEMTRSSKDNKFQVITGQRVFVFRTESEAQRDMWCSTLQSCLKEQRLLGHPRPPQPPRPLRTGMLELRGHKAKVFAALSPGELALYKSEQAFSLGIGICFIELQGCSVRETKSRSFDLLTPHRCFSFTAESGGARQSWAAALQEAVTETLSDYEVAEKIWSNRANRQCADCGSSRPDWAAVNLGVVICKQCAGQHRALGSGISKVQSLKLDTSVWSNEIVQLFIVLGNDRANRFWAGTLPPGEGLHPDATPGPRGEFISRKYRLGLFRKPHPQYPDHSQLLQALCAAVARPNLLKNMTQLLCVEAFEDPSPGVYNEVVVRATYSGFLYCSPVSNKAGPSPPRRGRDAPPRLWCVLGAALEMFASENSPEPLSLIQPQDIVCLGVSPPPTDPGDRFPFSFELILAGGRIQHFGTDGADSLEAWTSAVGKWFSPLSCHQLLGPGLLRLGRLWLRSPSHTAPAPGLWLSGFGLLRGDHLFLCSAPGPGPPAPEDMVHLRRLQEISVVSAADTPDKKEHLVLVETGRTLYLQGEGRLDFTAWNAAIGGAAGGGGTGLQEQQMSRGDIPIIVDACISFVTQHELPQKNQRLEKYKDVIGCLPRVNRRTLATLIGHLYRVQKCAALNQMCTRNLALLFAPSVFQTDGRGEHEVRVLQELIDGYISVFDIDSDQVAQIDLEVSLITTWKDVQLSQAGDLIMEVYIEQQLPDNCVTLKVSPTLTAEELTNQVLEMRGTAAGMDLWVTFEIREHGELERPLHPKEKVLEQALQWCQLPEPCSASLLLKKVPLAQAGCLFTGIRRESPRVGLLRCREEPPRLLGSRFQERFFLLRGRCLLLLKEKKSSKPEREWPLEGAKVYLGIRKKLKPPTPWGFTLILEKMHLYLSCTDEDEMWDWTTSILKAQHDDQQPVVLRRHSSSDLARQKFGTMPLLPIRGDDSGATLLSANQTLRRLHNRRTLSMFFPMKSSQGSVEEQEELEEPVYEEPVYEEVGAFPELIQDTSTSFSTTREWTVKPENPLTSQKSLDQPFLSKSSTLGQEERPPEPPPGPPSKSSPQARGSLEEQLLQELSSLILRKGETTAGLGSPSQPSSPQSPSPTGLPTQTPGFPTQPPCTSSPPSSQPLT

SEQ ID NO: 53125 - protein, 64 aa, Homo sapiens
MLREEAAQKRKGKEPGMALPQGRLTFRDVAIEFSLAEWKCLNPSQRALYREVMLENYRNLEAVG

SEQ ID NO: 53126 - protein, 42 aa, Homo sapiens
MAAVDLEKLRASGAGKAIGVLTSGGDAQGPLTSPPGPLLRWL

SEQ ID NO: 53127 - protein, 421 aa, Homo sapiens
MYHGMNPSNGDGFLEQQQQQQQPQSPQRLLAVILWFQLALCFGPAQLTGDCRIPQIEDAEIHNKTYRHGEKLIITCHEGFKIRYPDLHNMVSLCRDDGTWNNLPICQGCLRPLASSNGYVNISELQTSFPVGTVISYRCFPGFKLDGSAYLECLQNLIWSSSPPRCLALEAQVCPLPPMVSHGDFVCHPRPCERYNHGTVVEFYCDPGYSLTSDYKYITCQYGEWFPSYQVYCIKSEQTWPSTHETLLTTWKIVAFTATSVLLVLLLVILARMFQTKFKAHFPPRGPPRSSSSDPDFVVVDGVPVMLPSYDEAVSGGLSALGPGYMASVGQGCPLPVDDQSPPAYPGSGDTDTGPGESETCDSVSGSSELLQSLYSPPRCQESTHPASDNPDIIASTAEEVASTSPGIDIADEIPLMEEDP

SEQ ID NO: 53128 - protein, 301 aa, Homo sapiens
MLGLWGQRLPAAWVLLLLPFLPLLLLAAPAPHRASYKPVIVVHGLFDSSYSFRHLLEYINETHPGTVVTVLDLFDGRESLRPLWEQVQGFREAVVPIMAKAPQGVHLICYSQGGLVCRALLSVMDDHNVDSFISLSSPQMGQYGDTDYLKWLFPTSMRSNLYRICYSPWGQEFSICNYWHDPHHDDLYLNASSFLALINGERDHPNATVWRKNFLRVGHLVLIGGPDDGVITPWQSSFFGFYDANETVLEMEEQLPARPTHQSELLLLRLVCLKPPRRKKPACRVQRQSESWGPGLSCALS

SEQ ID NO: 53129 - protein, 531 aa, Homo sapiens
MSSEMEPLLLAWSYFRRRKFQLCADLCTQMLEKSPYDQAAWILKARALTEMVYIDEIDVDQEGIAEMMLDENAIAQVPRPGTSLKLPGTNQTGGPSQAVRPITQAGRPITGFLRPSTQSGRPGTMEQAIRTPRTAYTARPITSSSGRFVRLGTASMLTSPDGPFINLSRLNLTKYSQKPKLAKALFEYIFHHENDVKTIHLEDVVLHLGIYPFLLRNKNHIEKNALDLAALSTEHSQYKDWWWKVQIGKCYYRLGMYREAEKQFKSALKQQEMVDTFLYLAKVYVSLDQPVTALNLFKQGLDKFPGEVTLLCGIARIYEEMNNMSSAAEYYKEVLKQDNTHVEAIACIGSNHFYSDQPEIALRFYRRLLQMGIYNGQLFNNLGLCCFYAQQYDMTLTSFERALSLAENEEEAADVWYNLGHVAVGIGDTNLAHQCFRLALVNNNNHAEAYNNLAVLEMRKGHVEQARALLQTASSLAPHMYEPHFNFATISDKIGDLQRSYVAAQKSEAAFPDHVDTQHLIKQLRQHFAML

SEQ ID NO: 53130 - protein, 182 aa, Homo sapiens
MPIPPPPPPPPGPPPPPTFHQANTEQPKLSRDEQRGRGALLQDICKGTKLKKVTNINDRSAPILETPPPPPPVIRNGARDAPPPPPPYRMHGSEPPSRGKPPPPPSRTPAGPPPPPPPPLRNGHRDSITTVRSFLDDFESKYSFHPVEDFPAPEEYKHFQRIYPSKTNRAARGAPPLPPILR

SEQ ID NO: 53131 - protein, 497 aa, Homo sapiens
MLEHALRDAKMAETCIVKEKQDYKQKLKALKIEVNKLKEDLNEKTTENNEQREEIIRLKQEKSCLHDELLFTVEREKRKDELLNIAKSKQERTNSELHNLRQIYVKQQSDLQFLNFNVENSQELIQMYDSKMEESKALDSSRDMCLSDLENNHPKVDIKREKNQKSLFKDQKFEAMLVQQNRSDKSSCDECKEKKQQIDTVFGEKSVITLSSIFTKDLVEKHNLPWSLGGKTQIEPENKITLCKIHTKSPKCHGTGVQNEGKQPSETPTLSDEKQWHDVSVYLGLTNCPSSKHPEKLDVECQDQMERSEISCCQKNEACLGESGMCDSKCCHPSNFIIEAPGHMSDVEWMSIFKPSKMQRIVRLKSGCTCSESICGTQHDSPASELIAIQDSHSLGSSKSALREDETESSSNKKNSPTSLLIYKDAPAFNEKASIVLPSQDDFSPTSKLQRLLAESRQMVTDLELSTLLPISHENLTGSATNISHLCGRQKADTNTE

SEQ ID NO: 53132 - protein, 371 aa, Homo sapiens
MAVMAPRTLLLLLSGALALTQTWAGSHSMRYFFTSVSRPGRGEPRFIAVGYVDDTQFVRFDSDAASQKMEPRAPWIEQEGPEYWDQETRNMKAHSQTDRANLGTLRGYYNQSEDGSHTIQIMYGCDVGPDGRFLRGYRQDAYDGKDYIALNEDLRSWTAADMAAQITKRKWEAVHAAEQRRVYLEGRCVDGLRRYLENGKETLQRTDPPKTHMTHHPISDHEATLRCWALGFYPAEITLTWQRDGEDQTQDTELVETRPAGDGTFQKWAAVVVPSGEEQRYTCHVQHEGLPKPLTLRWELSSQPTIPIVGIIAGLVLLGAVITGAVVAAVMWRRKSSGGEGVKDRKGGSYTQAASSDSAQGSDVSLTACKV

SEQ ID NO: 53133 - protein, 929 aa, Homo sapiens
MALDIFSSYTGRDIPELPEREEGEGEESELQNTAYSNWNQPRRVELWREPSKSLGISIVGGRGMGSRLSNGEVMRGIFIKHVLEDSPAGKNGTLKPGDRIVEVDGMDLRDASHEQAVEAIRKAGNPVVFMVQSIINRPRAPSQSESEPEKAPLCSVPPPPPSAFAEMGSDHTQSSASKISQDVDKEDEFGYSWKNIRERYGTLTGELHMIELEKGHSGLGLSLAGNKDRSRMSVFIVGIDPNGAAGKDGRLQIADELLEINGQILYGRSHQNASSIIKCAPSKVKIIFIRNKDAVNQMAVCPGNAVEPLPSNSENLQNKETEPTVTTSDAAVDLSSFKNVQHLELPKDQGGLGIAISEEDTLSGVIIKSLTEHGVAATDGRLKVGDQILAVDDEIVVGYPIEKFISLLKTAKMTVKLTIHAENPDSQAVPSAAGAASGEKKNSSQSLMVPQSGSPEPESIRNTSRSSTPAIFASDPATCPIIPGCETTIEISKGRTGLGLSIVGGSDTLLGAIIIHEVYEEGAACKDGRLWAGDQILEVNGIDLRKATHDEAINVLRQTPQRVRLTLYRDEAPYKEEEVCDTLTIELQKKPGKGLGLSIVGKRNDTGVFVSDIVKGGIADADGRLMQGDQILMVNGEDVRNATQEAVAALLKCSLGTVTLEVGRIKAGPFHSERRPSQSSQVSEGSLSSFTFPLSGSSTSESLESSSKKNALASEIQGLRTVEMKKGPTDSLGISIAGGVGSPLGDVPIFIAMMHPTGVAAQTQKLRVGDRIVTICGTSTEGMTHTQAVNLLKNASGSIEMQVVAGGDVSVVTGHQQEPASSSLSFTGLTSSSIFQDDLGPPQCKSITLERGPDGLGFSIVGGYGSPHGDLPIYVKTVFAKGAASEDGRLKRGDQIIAVNGQSLEGVTHEEAVAILKRTKGTVTLMVLS

SEQ ID NO: 53134 - protein, 141 aa, Homo sapiens
MMDKMRDNKYRSSETKRINIMLLSIVVAFAVCWLPLTIFNTVFDWNHQIIATCNHNLLFLLCHLTAMISTCVNPIFYGFLNKNFQRDLQFFFNFCDFRSRDDDYETIAMSTMHTDVSKTSLKQASPVAFKKINNNDDNEKI

SEQ ID NO: 53135 - protein, 107 aa, Homo sapiens
MSIMSYNGGAVMAMKGKNCVAIAADRRFGIQAQMVTTDFQKIFPMGDRLYIGLAGLATDVQTVAQRLKFRLNLYELKEGRQIKPYTLMSMVANLLYEKRPHRLPHGD

SEQ ID NO: 53136 - protein, 374 aa, Homo sapiens
MPGMMEKGPELLGKNRSANGSAKSPAGGGGSGASSTNGGLHYSEPESGCSSDDEHDVGMRVGAEYQARIPEFDPVETRSCYVSQAGLKLRGSSHPPSLASQSAGIIGATKYTDKDNGGMLVWSPYHSIPDAKLDEYIAIAKEKHGYNVEQALGMLFWHKHNIEKSLADLPNFTPFPDEWTVEDKVLFEQAFSFHGKSFHRIQQMLPDKTIASLVKYYYSWKKTRSRTSLMDRQARKLANRHNQGDSDDDVEETHPMDGNDSDYDPKKEAKKEGNTEQPVQTSKIGLGRREYQSLQHRHHSQRSKCRPPKGMYLTQEDVVAVSCSPNAANTILRQLDMELISLKRQFQASTGSFGLYPLRIWEDYYILLTKCSEC

SEQ ID NO: 53137 - protein, 421 aa, Homo sapiens
MSVSVLSPSRRLGGVSGILQVTSLLILLLLLIKAAQLYLHRQWLLKALQQFPCPPSHWLFGHIQEFQHDQELQRIQERVKTFPSACPYWIWGGKVRVQLYDPDYMKVILGRSDPKSHGSYKFLAPRIGYGLLLLNGQTWFQHRRMLTPAFHNDILKPYVGLMADSVRVMLDKWEELLGQDSPLEVFQHVSLMTLDTIMKSAFSHQGSIQVDRPSDPTEEGSTTEGGGAGEDQEEEALGFSGHPPLGQRAPGLPRPCWCSGWNCFRNHLDQMPYTTMCIKEALRLYPPVPGIGRELSTPVTFPDGRSLPKGIMVLLSIYGLHHNPKVWPNLEVFDPSRFAPGSAQHSHAFLPFSGGSRNCIGKQFAMNQLKVARALTLLRFELLPDPTRIPIPMARLVLKSKNGIHLRLRRLPNPCEDKDQL

SEQ ID NO: 53138 - protein, 80 aa, Homo sapiens
MNFSTLRNIQGLFAPLKLQMEFKAVQQVQRLPFLSSSNLSLDVLRGNDETIGFEDILNDPSQSEVMGEPHLMVEYKLGLL

SEQ ID NO: 53139 - protein, 161 aa, Homo sapiens
MCDFTEDQTAEFKEAFQLFDRTGDGKILYSQCGDVMRALGQNPTNAEVLKVLGNPKSDEMNVKVLDFEHFLPMLQTVAKNKDQGTYEDYVEGLRVFDKEGNGTVMGAEIRHVLVTLGEKMTEEEVEMLVAGHEDSNGCINYEGKRRCEGLQESCSHHNPPA

SEQ ID NO: 53140 - protein, 51 aa, Homo sapiens
MGCGNSTATSAGAGQGPAGAAKDVNYGGVYVGLPSEAVNMVSSQTKTVRKN

SEQ ID NO: 53141 - protein, 54 aa, Homo sapiens
MSYMLPHLHNGWQVDQAILSEEDRVVVIRFGHDWDPTCMKMDEVLYSIAEKVVA

SEQ ID NO: 53142 - protein, 233 aa, Homo sapiens
MRLLPLLRTVLWAAFLGSPLRGGSSLRHVVYWNSSNPSLRREGYTVQVNVNDYLDIYCPHYNSSGVGPGAGPGPGGGAEQYVLYMVSRNGYRTCNASQGFKRWECNRPHAPHSPIKFSEKFQRYSAFSLGYEFHAGHEYYYISTPTHNLHWKCLRMKVFVCCASTSHSGEKPVPTLPQFTMGPNVKINVLEDFEGENPQVPKLEKSISGTSPKREHLPLAVGIAFFLMTFLAS

SEQ ID NO: 53143 - protein, 324 aa, Homo sapiens
MRSLLLLSAFCLLEAALAAEVKKPAAAAAPGTAEKLSPKAATLAERSAGLAFSLYQAMAKDQAVENILVSPVVVASSLGLVSLGGKATTASQAKAVLSAEQLRDEEVHAGLGELLRSLSNSTARNVTWKLGSRLYGPSSVSFADDFVRSSKQHYNCEHSKINFRDKRSALQSINEWAAQTTDGKLPEVTKDVERTDGALLVNAMFFKPHWDEKFHHKMVDNRGFMVTRSYTVGVMMMHRTGLYNYYDDEKEKLQIVEMPLAHKLSSLIILMPHHVEPLERLEKLLTKEQLKIWMGKMQKKAVAISLPKGVVEVTHDLQVRGGPA

SEQ ID NO: 53144 - protein, 244 aa, Homo sapiens
MEPNDSTSTAVEEPDSLEVLVKTLDSQTRTFIVGAQMNVKEFKEHIAASVSIPSEKQRLIYQGRVLQDDKKLQEYNVGGKVIHLVERAPPQTHLPSGASSGTGSASATHGGGSPPGTRGPGASVHDRNANSYVMVGTFNLPSEPRVRLVMAQHMIRDIQTLLSRMECRGGPQPQHSQPPPQPPAVTPEPVALSSQTSEPVESEAPPREPMEAEEVEERAPAQNPELTPGPAPAGPTPAPETNAP

SEQ ID NO: 53145 - protein, 430 aa, Homo sapiens
MAWTFECSRTTSPEPLSTSPCRTTSSRNSPTMSCPASVACEPSTSTTTSSPPKLSVAPQFLPRSLRVADLAANQVMEIFPLTFGEKPALRSVYLHNNQLSNAGLPPDAFRGSEAIATLSLSNNQLSYLPPSLPPSLERLHLQNNLISKVPRGALSRQTQLRELYLQHNQLTDSGLDATTFSKLHSLEYLDLSHNQLTTVPAGLPRTLAILHLGRNRIRQVEAARLHGARGLRYLLLQHNQLGSSGLPAGALRPLRGLHTLHLYGNGLDRVPPALPRRLRALVLPHNHVAALGARDLVATPGLTELNLAYNRLASARVHHRAFRRLRALRSLDLAGNQLTRLPMGLPTGLRTLQLQRNQLRMLEPEPLAGLDQLRELSLAHNRLRVGDIGPGTWHELQALQVRHRLVSHTVPRAPPSPCLPCHVPNILVSW

SEQ ID NO: 53146 - protein, 121 aa, Homo sapiens
MTSSRLWFSLLLAAAFAGRATALWPWPQNFQTSDQRYVLYPNNFQFQYDVSSAAQPGCSVLDEAFQRYRDLLFGSGSWPRPYLTETGLSLSFRLECSGVITAYSNLELQDSSSLPASLMSS

SEQ ID NO: 53147 - protein, 50 aa, Homo sapiens
MASQNRDPAATSVAAARKGAEPSGGAARGPVGKRLQQELMTLMNPTLIVP

SEQ ID NO: 53148 - protein, 328 aa, Homo sapiens
MSLMVVSMACVGFFLLQGAWPHEGGQDKPFLSAWPSPVVSEGEHVALQCRSRLGFNEFSLSKEDGMPVPELYNRVFRNTVFIGPVTPAHAGTYRCRGSHPHFLTGWSAPSNPLVIMVTGVHRKPSLLAHPGPLVKSEETVILQCWSDVMFEHFLLHREGKFNDTLRLTGELHDGVSKANFSIGRMTQDLAGTYRCYGSVPHSPYQLSAPSDPLDIVITGLCGKPSLSAQPRPMVKAGESVTLSCSSRSSYDIYHLSREGEAHELRFPAVPKVNGTFQANFPLGPATHGGTYRCFGSFRDSPYEWSDLSDPLLVSVTDSMKEKGKDVIL

SEQ ID NO: 53149 - protein, 128 aa, Homo sapiens
LRTIMEIEESRQKCGATPKSHLGKTVSHGVKLSQKQRKMIALTTKENNSGMNSMETVLFTPSKAPKPVNAWASSLHSVSSKSFRDFLLEEKKSVTSHSSGDHVKKVSFKGIENSQAPKIVSFVGGERR

SEQ ID NO: 53150 - protein, 140 aa, Homo sapiens
MIAAVDTDSPREVFFRVAADMFSDGNFNWGRVVALFYFASKLVLKALCTKVPELIRTIMGWTLDFLRERLLGWIQDQGGWVRLLKPPHPHHRALTTAPAPPSLPPATPLGPWAFWSRSQWCPLPIFRSSDVVYNAFSLRV

SEQ ID NO: 53151 - protein, 144 aa, Homo sapiens
MVDKDTERDIEMKRQLRRLRELHLYSTWKKYQEAMKTSLGVPQRGDLEDLEEHVPGQTVSEEATGVHMMQVDPATPAKKLEDSTITGSHQQMSASPSSAPAEEATEKTKVEEEVKTRKPKKKTRKPSKKSRWNVLKCWDIFNIF

SEQ ID NO: 53152 - protein, 489 aa, Homo sapiens
MPGIKRILTVTILALCLPSPGNAQAQCTNGFDLDRQSGQCLDGVSLSSPRLECNGAISAHCNLCLPGSSDSSASASQVAGITDIDECRTIPEACRGDMMCVNQNGGYLCIPRTNPVYRGPYSNPYSTPYSGPYPAAAPPLSAPNYPTISRPLICRFGYQMDESNQCVDVDECATDSHQCNPTQICINTEGGYTCSCTDGYWLLEGQCLDIDECRYGYCQQLCANVPGSYSCTCNPGFTLNEDGRSCQDVNECATENPCVQTCVNTYGSFICRCDPGYELEEDGVHCSDMDECSFSEFLCQHECVNQPGTYFCSCPPGYILLDDNRSCQDINECEHRNHTCNLQQTCYNLQGGFKCIDPIRCEEPYLRISDNRCMCPAENPGCRDQPFTILYRDMDVVSGRSVPADIFQMQATTRYPGAYYIFQIKSGNEGREFYMRQTGPISATLVMTRPIKGPREIQLDLEMITVNTVINFRGSSVIRLRIYVSQYPF

SEQ ID NO: 53153 - protein, 358 aa, Homo sapiens
MDKTFERKLPVSSLTISRLIDNISSREEIDHAEYYLYKFRHSPNCWYLRNWTIHTWIRQCLKYDAQDKALYTLVNKVQYGIFPDNFTFNLLMDSFIKKENYKDALSVVFEVMMQEAFEVPSTQLLSLYVLFHCLAKKTDFSWEEERNFGASLLLPGLKQKNSVGFSSQLYGYALLGKVELQQGLRAVYHNMPLIWKPGYLDRALQVMEKVAASPEDIKLCREALDVLGAVLKALTSADGASEEQSQNDEDNQGSEKLVEQLDIEETEQSKLPQYLERFKALHSKLQALGKIESEGLLSLTTQLVKEKLSTCEAEDIATYEQNLQQWHLDLVQLIQREQQQREQAKQEYQAQKAAKASA

SEQ ID NO: 53154 - protein, 183 aa, Homo sapiens
MATEGAAQLGNRVAGMVCSLWVLLLVSSVLALEEVLLDTTGETSEIGWLTYPPGGWDEVSVLDDQRRLTRTFEACHVAGAPPGTGQDNWLQTHFVERRGAQRAHIRLHFSVRACSSLGVSGGTCRETFTLYYRQAEEPDSPDSVSSWHLKRWTKRRRPVGLGGPPWWQLWAPVWLMQSQRRME

SEQ ID NO: 53155 - protein, 165 aa, Homo sapiens
MAPRHFLLVTLSTESVAQPSIQASSTTVTEKGSVVLTCHTNNTGTSFQWIFNNQRLQVTKRMKLSWFNHVLTIDPIRQEDAGEYQCEVSNPVSSNRSDPLKLTVKSDDNTLGILIGVLVGSLLVAALVCFLLLRKTGRASDQSDFREQQPPASTPGHGPSDSSIS

SEQ ID NO: 53156 - protein, 68 aa, Homo sapiens
MNGHISNHPSSFGMYPSQMNGYGSSPTFSQTDREHGSKTSAKALYEQRKNYARDSVSSVSDISQYRVE

SEQ ID NO: 53157 - protein, 56 aa, Homo sapiens
MTSDFPVLDPSWTAQEEMALLEAVMDCGFGNWQDVANQMCTKTKEECEKHYMKHFI

SEQ ID NO: 53158 - protein, 179 aa, Homo sapiens
MERRRITSAARRSYVSSGEMMVGGLAPGRRLGPGTRLSLARMPPPLPTRVDFSLAGALNAGFKETRASERAEMMELNDRFASYIEKVRFLEQQNKALAAELNQLRAKEPTKLADVYQAELRELRLRLDQLTANSARLEVERDNLAQDLATVRQKKQMKPPWPVWIWRGRLSRWRRRSGS

SEQ ID NO: 53159 - protein, 62 aa, Homo sapiens
MLRRALLCLAVAALVRADAPEEEDHVLVLRKSNFAEALAAHKYLLVEFCERRAWRAGGARGR

SEQ ID NO: 53160 - protein, 78 aa, Homo sapiens
MADAKYVLCRWEKRLWPAKVLARTATSTKNKRRKEYFLAVQILSLEEKIKVKSTEVEILEKSQIEAIASSLGNANPLS

SEQ ID NO: 53161 - protein, 966 aa, Homo sapiens
MTLLEPEMLMMAVQSVLQLKLQQRRTREELVSQGIMPPLKSPAAFHEQRRSLERARTEDYLKRKIRSRPERSELVRMHILEETSAEPSLQAKQLKLKRARLADDLNEKIAQRPGPMELVEKNILPVESSLKEAIIVGQVNYPKVADSSSFDEDSSDALSPEQPASHESQGSVPSPLEARVSEPLLSATSASPTQVVSQLPMGRDSREMLFLAEQPPLPPPPLLPPSLTNGTTIPTAKSTPTLIKQSQPKSASEKSQRSKKAKELKPKVKKLKYHQYIPPDQKQDRGAPPMDSSYAKILQQQQLFLQLQILNQQQQQHHNYQAILPAPPKSAGEALGSSGTPPVRSLSTTNSSSSSGAPGPCGLARQNSTSLTGKPGALPANLDDMKVAELKQELKLRSLPVSGTKTELIERLRAYQDQISPVPGAPKAPAATSILHKAGEVVVAFPAARLSTGPALVAAGLAPAEVVVATVASSGVVKFGSTGSTPPVSPTPSERSLLSTGDENSTPGDTFGEMVTSPLTQLTLQASPLQILVKEEGPRAGSCCLSPGGRAELEGRDKDQMLQEKDKQIEALTRMLRQKQQLVERLKLQLEQEKRAQQPAPAPAPLGTPVKQENSFSSCQLSQQPLGPAHPFNPSLAAPATNHIDPCAVAPGPPSVVVKQEALQPEPEPVPAPQLLLGPQGPSLIKGVAPPTLITDSTGTHLVLTVTNKNADSPGLSSGSPQQPSSQPGSPAPAPSAQMDLEHPLQPLFGTPTSLLKKEPPGYEEAMSQQPKQQENGSSSQQMDDLFDILIQSGEISADFKEPPSLPGKEKPSPKTVCGSPLAAQPSPSAELPQAAPPPPGSPSLPGRLEDFLESSTGLPLLTSGHDGPEPLSLIDDLHSQMLSSTAILDHPPSPMDTSELHFVPEPSSTMGLDLADGHLDSMDWLELSSGGPVLSLAPLSTTAPSLFSTDFLDGHDLQLHWDSCL

SEQ ID NO: 53162 - protein, 298 aa, Homo sapiens
MAGLRNESEQEPLLGDTPGSREWDILETEEHYKSRWRSIRILYLTMFLSSVGFSVVMMSIWPYLQKIDPTADTSFLGWVIASYSLGQMVASPIFGLWSNYRPRKEPLIVSILISVAANCLYAYLHIPASHNKYYMLVARGLLGIGAVFQTCFTFLGEKGVTWDVIKLQINMYTTPVLLSAFLGILNIILILAILREHRVDDSGRQCKSINFEEASTDEAQVPQGNIDQVAVVAINVLFFVTLFIFALFETIITPLTMDMYAWTQEQAVLYNGIILAALGVEAVVIFLGVKLLSKKFAQ

SEQ ID NO: 53163 - protein, 50 aa, Homo sapiens
MKRLGSVQRKMPCVFVTEVKEEPSSKREHQVSTFWGNPLISHLKFWQLKL

SEQ ID NO: 53164 - protein, 93 aa, Homo sapiens
MVRLDISEGRAAVAAVVGGVVAVGTVLVALSAMGFTSVGIAASSIAAKMMSTAAIANGGGVAAGSLVAILQSVGAAGLSVTSKVIGGFAGTAL

SEQ ID NO: 53165 - protein, 209 aa, Homo sapiens
MSDHGDVSLPPEDRVRALSQLGSAVEVNEDIPPRRYFRSGVEIIRMASIYSEEGNIEHAFILYNKYITLFIEKLPKHRDYKSAVIPEKKDTVKKLKEIAFPKAEELKAELLKRYTKEYTEYNEEKKKEAEELARNMAIQQELEKEKQRVAQQKQQQLEQEQFHAFEEMIRNQELEKERLKIVQEFGKFPQSMDCAMWWCLGGCAHSFSS

SEQ ID NO: 53166 - protein, 207 aa, Homo sapiens
MLENYSLLLSVGYCITKPEVVCKLEHGQVLWILEEESPSQSHLDCCIDDDLMEKRQENQDQHLQKVDFVNNKTLTMDRNGVLGKTFSLDTNPILSRKIRGNCDSSGMNLNNISELIISNRSSFVRNPAECNVRGKFLLCMKRENPYARGKPLEYDGNGKAVSQNEDLFRHQYIQTLKQCFEYNQCGKAFHEEAACSTHKRVCSWETL

SEQ ID NO: 53167 - protein, 3388 aa, Homo sapiens
MTAWRRFQSLLLLLGLLVLCARLLTAAKGQNCGGLVQGPNGTIESPGFPHGYPNYANCTWIIITGERNRIQLSFHTFALEEDFDILSVYDGQPQQGNLKVRLSGFQLPSSIVSTGSILTLWFTTDFAVSAQGFKALYEVLPSHTCGNPGEILKGVLHGTRFNIGDKIRYSCLPGYILEGHAILTCIVSPGNGASWDFPAPFCRAEGACGGTLRGTSSSISSPHFPSEYENNADCTWTILAEPGDTIALVFTDFQLEEGYDFLEISGTEAPSIWLTGMNLPSPVISSKNWLRLHFTSDSNHRRKGFNAQFQVKKAIELKSRGVKMLPSKDGSHKNSVLSQGGVALVSDMCPDPGIPENGRRAGSDFSRVGANVQFSCEDNYVLQGSKSITCQRVTETLAAWSDHRPICRARTCGSNLRGPSGVITSPNYPVQYEDNAHCVWVITTTDPDKVIKLAFEEFELERGYDTLTVGDAGKVGDTRSVLYVLTGSSVPDLIVSMSNQMWLHLQSDDSIGSPGFKAVYQEIEKGGCGDPGIPAYGKRTGSSFLHGDTLTFECPAAFELVGERVITCQQNNQWSGNKPSCVFSCFFNFTASSGIILSPNYPEEYGNNMNCVWLIISEPGSRIHLIFNDFDVEPQFDFLAVKDDGISDITVLGTFSGNEVPSQLASSGHIVRLEFQSDHSTTGRGFNITYTTFGQNECHDPGIPINGRRFGDRFLLGSSVSFHCDDGFVKTQGSESITCILQDGNVVWSSTVPRCEAPCGGHLTASSGVILPPGWPGYYKDSLHCEWIIEAKPGHSIKITFDRFQTEVNYDTLEVRDGPASSSPLIGEYHGTQAPQFLISTGNFMYLLFTTDNSRSSIGFLIHYESVTLESDSCLDPGIPVNGHRHGGDFGIRSTVTFSCDPGYTLSDDEPLVCERNHQWNHALPSCDALCGGYIQGKSGTVLSPGFPDFYPNSLNCTWTIEVSHGKGVQMIFHTFHLESSHDYLLITEDGSFSEPVARLTGSVLPHTIKAGLFGNFTAQLRFISDFSISYEGFNITFSEYDLEPCDDPGVPAFSRRIGFHFGVGDSLTFSCFLGYRLEGATKLTCLGGGRRVWSAPLPRCVAECGASVKGNEGTLLSPNFPSNYDNNHECIYKIETEAGKGIHLRTRSFQLFEGDTLKVYDGKDSSSRPLGTFTKNELLGLILNSTSNHLWLEFNTNGSDTDQGFQLTYTSFDLVKCEDPGIPNYGYRIRDEGHFTDTVVLYSCNPGYAMHGSNTLTCLSGDRRVWDKPLPSCIAECGGQIHAATSGRILSPGYPAPYDNNLHCTWIIEADPGKTISLHFIVFDTEMAHDILKVWDGPVDSDILLKEWSGSALPEDIHSTFNSLTLQFDSDFFISKSGFSIQFSTSIAATCNDPGMPQNGTRYGDSREAGDTVTFQCDPGYQLQGQAKITCVQLNNRFFWQPDPPTCIAACGGNLTGPAGVILSPNYPQPYPPGKECDWRVKVNPDFVIALIFKSFNMEPSYDFLHIYEGEDSNSPLIGSYQGSQAPERIESSGNSLFLAFRSDASVGLSGFAIEFKEKPREACFDPGNIMNGTRVGTDFKLGSTITYQCDSGYKILDPSSITCVIGADGKPSWDQVLPSCNAPCGGQYTGSEGVVLSPNYPHNYTAGQICLYSITVPKEFVVFGQFAYFQTALNDLAELFDGTHAQARLLSSLSGSHSGETLPLATSNQILLRFSAKSGASARGFHFVYQAVPRTSDTQCSSVPEPRYGRRIGSEFSAGSIVRFECNPGYLLQGSTALHCQSVPNALAQWNDTIPSCVVPCSGNFTQRRGTILSPGYPEPYGNNLNCIWKIIVTEGSGIQIQVISFATEQNWDSLEIHDGGDVTAPRLGSFSGTTVPALLNSTSNQLYLHFQSDISVAAAGFHLEYKTVGLAACQEPALPSNSIKIGDRYMVNDVLSFQCEPGYTLQGRSHISCMPGTVRRWNYPSPLCIATCGGTLSTLGGVILSPGFPGSYPNNLDCTWRISLPIGYGAHIQFLNFSTEANHDFLEIQNGPYHTSPMIGQFSGTDLPAALLSTTHETLIHFYSDHSQNRQGFKLAYQAYELQNCPDPPPFQNGYMINSDYSVGQSVSFECYPGYILIGHPVLTCQHGINRNWNYPFPRCDAPCGYNVTSQNGTIYSPGFPDEYPILKDCIWLITVPPGHGVYINFTLLQTEAVNDYIAVWDGPDQNSPQLGVFSGNTALETAYSSTNQVLLKFHSDFSNGGFFVLNFHAFQLKKCQPPPAVPQAEMLTEDDDFEIGDFVKYQCHPGYTLVGTDILTCKLSSQLQFEGSLPTCEAQCPANEVRTGSSGVILSPGYPGNYFNSQTCSWSIKVEPNYNITIFVDTFQSEKQFDALEVFDGSSGQSPLLVVLSGNHTEQSNFTSRSNQLYLRWSTDHATSKKGFKIRYAAPYCSLTHPLKNGGILNRTAGAVGSKVHYFCKPGYRMVGHSNATCRRNPLGMYQWDSLTPLCQAVSCGIPESPGNGSFTGNEFTLDSKVVYECHEGFKLESSQQATAVCQEDGLWSNKGKPPTCKPVACPSIEAQLSEHVIWRLVSGSLNEYGAQVLLSCSPGYYLEGWRLLRCQANGTWNIGDERPSCRAGHCGSPDPIVNGHISGDGFSYRDTVVYQCNPGFRLVGTSVRICLQDHKWSGQTPVCVPITCGHPGNPAHGFTNGSEFNLNDVVNFTCNTGYLLQGVSRAQCRSNGQWSSPLPTCRVVNCSDPGFVENAIRHGQQNFPESFEYGMSILYHCKKGFYLLGSSALTCMANGLWDRSLPKCLAISCGHPGVPANAVLTGELFTYGAVVHYSCRGSESLIGNDTRVCQEDSHWSGALPHCTGNNPGFCGDPGTPAHGSRLGDDFKTKSLLRFSCEMGHQLRGSPERTCLLNGSWSGLQPVCEAVLCPQPPPVQNGTVEGSDFRWGSSISYSCMDGYQLSHSAILSCEGRGVWKGEIPQCLPVFCGDPGIPAEGRLSGKSFTYKSEVFFQCKSPFILVGSSRRVCQADGTWSGIQPTCIDPAHNTCPDPGTPHFGIQNSSRGYEVGSTVFFRCRKGYHIQGSTTRTCLANLTWSGIQTECIPHACRQPETPAHADVRAIDLPTFGYTLVYTCHPGFFLAGGSEHRTCKADMKWTGKSPVCKSKGVREVNETVTKTPVPSDVFFVNSLWKGYYEYLGKRQPATLTVDWFNATSSKVNATFSEASPVELKLTGIYKKEEAHLLLKAFQIKGQADIFVSKFENDNWGLDGYVSSGLERGGFTFQGDIHGKDFGKFKLERQDPLNPDQDSSSHYHGTSSGSVAAAILVPFFALILSGFAFYLYKHRTRPKVQYNGYAGHENSNGQASFENPMYDTNLKPTEAKAVRFDTTLNTVCTVV

SEQ ID NO: 53168 - protein, 103 aa, Homo sapiens
MSDWGQGFPQDPPDTSPSEGTNLNAPNSLGVSALCAICGDRATGKHYGASSCDGCKGFFRRSVRKNHMYSCRFSRQCVVDKDKRNQCRYCRLKKCFRAGMKKE

SEQ ID NO: 53169 - protein, 61 aa, Homo sapiens
MSEKKQPVDLGLLEEDDEFEEFPAEDWAGLDEDEDAHVWEDNWDDDNVEDDFSNQLRSQNG

SEQ ID NO: 53170 - protein, 158 aa, Homo sapiens
MVPHAILARGRDVCRRNGLLILSVLSVIVGCLLGFFLRTRRLSPQEISYFQFPGELLMRMLKMMILPLVVSSLMSGLASLDAKTSSRLGVLTVAYYLWTTFMAVIVGIFMVSIIHPGSAAQKETTEQSGKPIMSSADALLDLIRNMFPANLVEATFKQ

SEQ ID NO: 53171 - protein, 137 aa, Homo sapiens
MRNGISPIIIDNTNLHAWEMKPYAVMALENNYEVIFREPDTRWKFNVQELARRNIHGVSREKIHRMKERYEHDVTFHSVLHAEKPSRMNRNQDRNNALPSNNARYWNSYTEFPNRRAHGGFTNESSYHRRGGCHHGY

SEQ ID NO: 53172 - protein, 378 aa, Homo sapiens
MPRGEAPGPGRRGAKDEALGEESGERWSPEFHLQRKLADSSHSEQQDRNRVSEELIMVVQEMKKYFPSERRNKPSTLDALNYALRCVHSVQANSEFFQILSQNGAPQADVSMYSLEELATIASEHTSKNTDTFVAVFSFLSGRLVHISEQAALILNRKKDVLASSHFVDLLAPQDMRVFYAHTARAQLPFWNNWTQRAARYECAPVKPFFCRIRGGEDRKQEKCHSPFRIIPYLIHVHHPAQPELESEPCCLTVVEKIHSGYEAPRIPVNKRIFTTTHTPGCVFLEVDEKAVPLLGYLPQDLIGTSILSYLHPEDRSLMVAIHQKVLKYAGHPPFEHSPIRFCTQNGDYIILDSSWSSFVNPWSRKISFIIGRHKVRT

SEQ ID NO: 53173 - protein, 511 aa, Homo sapiens
MVLKKFLKEIQSILPGISAKLTWTSEEGSYSQDMTGVTPFQMIFEVDEKPRTLMTDCLVIKHFLRKIIMVHPKVRFHFSVKVNGILSTEIFGVENEPTLNLGNGIALLVDSQHYVSRPNFGTIESHCSRIHPVLGHPVMLFIPEDVAGMDLLGELILTPAAALCPSPKVSSNQLNRISSVSIFLYGPLGLPLILSTWEQPMTTFFKDTSSLVDWKKYHLCMIPNLDLNLDRDLVLPDVSYQVESSEEDQSQTMDPQGQTLLLFLFVDFHSAFPVQQMEIWGVYTLLTTHLNAILVESHSVVQGSIQFTVDKVLEQHHQAAKAQQKLQASLSVAVNSIMSILTGSTRSSFRKMCLQTLQAADTQEFRTKLHKVFREITQHQFLHHCSCEVKQLTLEKKDSAQGTEDAPDNSSLELLADTSGQAENKRLKRGSPRIEEMRALRSARAPSPSEAAPRRPEATAAPLTPRGREHREAHGRALAPGRASLGSRLEDVLWLQEVSNLSEWLSPSPGP

SEQ ID NO: 53174 - protein, 177 aa, Homo sapiens
MDPLNLSWYDDDLERQNWSRPFNGSDGKADRPHYNYYATLLTLLIAVIVFGNVLVCMAVSREKALQTTTNYLIVSLAVADLLVATLVMPWVVYLEVVGEWKFSRIHCDIFVTLDVMMCTASILNLCAISIDRYTAVAMPMLYNTRYSSKRRVTVMISIVWVLSFTISCPLLFGLNNA

SEQ ID NO: 53175 - protein, 62 aa, Homo sapiens
MIPGKYRSVSGRAANNVNCGLHLVIQTSSLPEKNKHLYLPTFYTLCLKTQHDFSSFDQVGNL

SEQ ID NO: 53176 - protein, 212 aa, Homo sapiens
MAALRALCGFRGVAAQVLRPGAGVRLPIQPSRGVRQWQPDVEWAQQFGGAVMYPSKETAHWKPPPWNDVDPPKDTIVKNITLNFGPQHPAAHGVLRLVMELSGEMVRKCDPHIGLLHRGTEKLIEYKTYLQALPYFDRLDYVSMMCNEQAYSLAVEKLLNIRPPPRAQWIRVLFGEITRLLNHIMAVTTHALDLGAMTPFFWLFEEREKHVL

SEQ ID NO: 53177 - protein, 493 aa, Homo sapiens
MGELCRRDSALTALDEETLWEMMESHRHRIVRCICPSRLTPYLRQAKVLCQLDEEEVLHSPRLTNSAMRAGHLLDLLKTRGKNGAIAFLESLKFHNPDVYTLVTGLQPDVDFSNFSGLMETSKLTECLAGAIGSLQEELNQEKGQKEVLLRRCQQLQEHLGLAETRAEGLHQLEADHSRMKREVSAHFHEVLRLKDEMLSLSLHYSNALQEKELAASRCRSLQEELYLLKQELQRANMVSSCELELQEQSLRTASDQESGDEELNRLKEENEKLRSLTFSLAEKDILEQSLDEARGSRQELVERIHSLRERAVAAERQREQGEGECAAGPGVRAAEGARPGVLREGQCSEGDFPEPGGEGLPPQAGVRADGPGLRAAHTASPAAGRASGCAQAGSQDQGALSTGEAAAGADACHLPQRRQRLQPRQLHRVSALVGPECHVQPRAGGQLPLQQPRAPQPAVPVQAGGRGLRGRTLVFQQLPGDPGGRPGSPAGS

SEQ ID NO: 53178 - protein, 5385 aa, Homo sapiens
  MOD_RES (1)..(1): Any amino acid
XTTEDTLITGSKTAAPVTSTGSTTATLEGQSTAASSRTSNQDISASSQNHQTKSTETTSKAQTDTLTQMMTSTLFSSPSVHNVMETAPPDEMTTSFPSSVTNTLMMTSKTITMTTSTDSTLGNTEETSTAGTESSTPVTSAVSITAGQEGQSRTTSWRTSIQDTSASSQNHWTRSTQTTRESQTSTLTHRTTSTPSFSPSVHNVTGTVSQKTSPSGETATSSLCSVTNTSMMTSEKITVTTSTGSTLGNPGETSSVPVTGSLMPVTSAALVTFDPEGQSPATFSRTSTQDTTAFSKNHQTQSVETTRVSQINTLNTLTPVTTSTVLSSPSGFNPSGTVSQETFPSGETTTSSPSSVSNTFLVTSKVFRMPTSRDSTLGNTEETSLSVSGTISAITSKVSTIWWSDTLSTALSPSSLPPKISTAFHTQQSEGAETTGRPHERSSFSPGVSQEIFTLHETTTWPSSFSSKGHTTWSQTELPSTSTGAATRLVTGNPSTGTAGTIPRVPSKVSAIGEPGEPTTYSSHSTTLPKTTGAGAQTQWTQETGTTGEALLSSPSYSVTQMIKTATSPSSSPMLDRHTSQQITTAPSTNHSTIHSTSTSPQESPAVSQRGHTQAPQTTQESQTTRSVSPMTDTKTVTTPGSSFTASGHSPSEIVPQDAPTISAATTFAPAPTGDGHTTQAPTTALQAAPSSHDATLGPSGGTSLSKTGALTLANSVVSTPGGPEGQWTSASASTSPDTAAAMTHTHQAESTEASGQTQTSEPASSGSRTTSAGTATPSSSGASGTTPSGSEGISTSGETTRFSSNPSRDSHTTQSTTELLSASASHGAIPVSTGMASSIVPGTFHPTLSEASTAGRPTGQSSPTSPSASPQETAAISRMAQTQRTRTSRGSDTISLASQATDTFSTVPPTPPSITSTGLTSPQTETHTLSPSGSGKTFTTALISNATPLPVTYASSASTGHTTPLHVTDASSVSTGHATPLPVTSPSSVSTGHTTPLPVTDTSSESTGHVTPLPVTSFSSASTGDSTPLPVTDTSSASTGHVTPLPVTSLSSASTGDTTPLPVTDTSSASTGHATSLPVTDTSSVSTGHTTPLPVTDTSSASTGHATSLPVTDTSSVSTGHTTPLHVTDASSASTGQATPLPVTSLSSVSTGDTTPLPVTSPSSASTGHATPLLVTDTSSASTGHATPLPVTDASSVSTDHATSLPVTIPSAASTGHTTPLPVTDTSSASTGQATSLLVTDTSSVSTGDTTPLPVTSTSSASTGHVTPLHVTSPSSASTGHATPLPVTSLSSASTGDTMPLPVTSPSSASTGDTTPLPVTDASSVSTGHTTPLHVTDASSASTGQATPLPVTSLSSVSTGDTTPLPVTSPSSASTGHATPLLVTDTSSASTGHATPLPVTDASSVSTDHATSLPVTIPSAASTGHTTPLPVTDTSSASTGQATSLLVTDTSSVSTGDTTPLPVTSTSSASTGHVTPLHVTSPSSASTGHATPLPVTSLSSASTGDTMPLPVTSPSSASTGDTTPLPVTDASSVSTGHTTPLPVTSPSSASTGHTTPLPVTDTSSASKGDTTPLPVTSPSSASTGHTTPLPVTDTSSASTGDTTPLPVTNASSLSTGHATPLHVTSPSSASTGHATPLPVTSTSSASTGHATPLPVTGLSSATTDDTTRLPVTDVSSASTGQATPLPVTSLSSVSTGDTTPLPVTSPSSASTGHASPLLVTDASSASTGQATPLPVTDTSSVSTAHATPLPVTGLSSASTDDTTRLPVTDVSSASTGQAIPLPVTSPSSASTGDTTPLPVTDASSASTGDTTSLPVTIPSSASSGHTTSLPVTDASSVSTGHATSLLVTDASSVSTGDTTPLPVTDTNSASTGDTTPLHVTDASSVSTGHATSLPVTSLSSASTGDTTPLPVTSPSSASSGHTTPLPVTDASSVPTGHATSLPVTDASSVSTGHATPLPVTDASSVSTGHATPLPVTDTSSVSTGQATPLPVTSLSSASTGDTTPLPVTDTSSASTGQDTPLPVTSLSSVSTGDTTPLPVTNPSSASTGHATPLLVTDASSISTGHATSLLVTDASSVSTGHATALHDTDASSLSTGDTTPLPVTSPSSTSTGDTTPLPVTETSSVSTGHATSLPVTDTSSASTGHATSLPVTDTSSASTGHATPLPVTDTSSASTGQATPLPVTSPSSASTGHAIPLLVTDTSSASTGQATPLPVTSLSSASTGDTTPLPVTDASSVSTGHATSLPVTSLSSVSTGDTTPLPVTSPSSASTGHATPLHVTDASSASTGHATPLPVTSLSSASTGDTTPLPVTSPSSASTGHATPLHVTDASSVSTGDTTPLPVTSSSSASSGHTTPLPVTDASSASTGDTTPLPVTDTSSASTGHATHLPVTGLSSASTGDTTRLPVTNVSSASTGHATPLPVTSTSSASTGDTTPLPGTDTSSVSTGHTTPLLVTDASSVSTGDTTRLPVTSPSSASTGHTTPLPVTDTPSASTGDTTPLPVTNASSLSTRHATSLHVTSPSSASTGHATSLPVTDTSAASTGHATPLPVTSTSSASTGDTTPLPVTDTYSASTGQATPLPVTSLSSVSTGDTTPLPVTSPSSASTGHATPLLVTDASSASTGQATPLPVTSLSSVSTGDTTPLPVTSPSSASTGHATSLPVTDTSSASTGDTTSLPVTDTSSAYTGDTTSLPVTDTSSSSTGDTTPLLVTETSSVSTGDTTPLPVTDTSSASTGHATPLPVTNTSSVSTGHATPLHVTSPSSASTGHTTPLPVTDASSVSTGHATSLPVTDASSVFTGHATSLPVTIPSSASSGHTTPLPVTDASSVSTGHATSLPVTDASSVSTGHATPLPVTDASSVSTGHATPLPLTSLSSVSTGDTTPLPVTDTSSASTGQATPLPVTSLSSVSTGDTTPLPVTDTSSASTGHATSLPVTDTSSASTGHATPLPDTDTSSASTGHATLLPVTDTSSASIGHATSLPVTDTSSISTGHATPLHVTSPSSASTGHATPLPVTDTSSASTGHANPLHVTSPSSASTGHATPLPVTDTSSASTGHATPLPVTSLSSVSTGDTTPLPVTSPSSASTGHTTPLPVTDTSSASTGQATALPVTSTSSASTGDTTPLPVTDTSSASTGQATPLPVTSLSSVSTGDTTPLPVTSPSSASTGHATPLLVTDASSASTGQATPLPVTSLSSVSTGDTTPLPVTSPSSASTGHATSLPVTDTSSASTGDTTSLPVTDTSSAYTGDTTSLPVTDTSSSSTGDTTPLLVTETSSVSTGHATPLLVTDASSASTGHATPLHVTSPSSASTGDTTPVPVTDTSSVSTGHATPLPVTGLSSASTGDTTRLPVTDISSASTGQATPLPVTNTSSVSTGDTMPLPVTSPSSASTGHATPLPVTSTSSASTGHATPVPVTSTSSASTGHTTPLPVTDTSSASTGDTTPLPVTSPSSASTGHTTPLHVTIPSSASTGDTSTLPVTGASSASTGHATPLPVTDTSSVSTGHATPLPVTSLSSVSTGDTTPLPVTDASSASTGQATPLPVTSLSSVSTGDTTPLLVTDASSVSTGHATPLPVTDTSSASTGDTTRLPVTDTSSASTGQATPLPVTSLSSVSTGDTTPLLVTDASSVSTGHATPLPVTDTSSASTGDTTRLPVTDTSSASTGQATPLPVTIPSSSSSGHTTPLPVTSTSSVSTGHVTPLHVTSPSSASTGHVTPLPVTSTSSASTGHATPLLVTDASSVSTGHATPLPVTDASSASTGDTTPLPVTDTSSASTGQATPLPVTSLSSVSTGDTTPLPVTDASSASTGHATPLPVTIPSSVSTGDTMPLPVTSPSSASTGHATPLPVTGLSSASTGDTTPLPVTDTSSASTRHATPLPVTDTSSASTDDTTRLPVTDVSSASTGHATPLPVTSTSSASTGDTTPLPVTDTSSVSTGHATSLPVTSRSSASTGHATPLPVTDTSSVSTGHATPLPVTSTSSVSTGHATPLPVTSPSSASTGHATPVPVTSTSSASTGDTTPLPVTNASSLSTGHATPLHVTSPSSASRGDTSTLPVTDASSASTGHATPLPLTSLSSVSTGDTTPLPVTDTSSASTGQATPLPVTSLSSVSTGDTTPLPVTIPSSASSGHTTSLPVTDASSVSTGHGTPLPVTSTSSASTGDTTPLPVTDTSSASTGHATPLPVTDTSSASTGHATPLPVTSLSSVSTGHATPLAVSSATSASTVSSDSPLKMETPGMTTPSLKTDGGRRTATSPPPTTSQTIISTIPSTAMHTRSTAAPIPILPERGVSLFPYGAGAGDLEFVRRTVDFTSPLFKPATGFPLGSSLRDSLYFTDNGQIIFPESDYQIFSYPNPLPTGFTGRDPVALVAPFWDDADFSTGRGTTFYQEYETFYGEHSLLVQQAESWIRKMTNNGGYKARWALKVTWVNAHAYPAQWTLGSNTYQAILSTDGSRSYALFLYQSGGMQWDVAQRSGNPVLMGFSSGDGYFENSPLMSQPVWERYRPDRFLNSNSGLQGLQFYRLHREERPNYRLECLQWLKSQPRWPSWGWNQVSCPCSWQQGRRDLRFQPVSIGRWGLGSRQLCSFTSWRGGVCCSYGPWGEFREGWHVQRPWQLAQELEPQSWCCRWNDKPYLCALYQQRRPHVGCATYRPPQPAWMFGDPHITTLDGVSYTFNGLGDFLLVGAQDGNSSFLLQGRTAQTGSAQATNFIAFAAQYRSSSLGPVTVQWLLEPHDAIRVLLDNQTVTFQPDHEDGGGQETFNATGVLLSRNGSEVSASFDGWATVSVIALSNILHASASLPPEYQNRTEGLLGVWNNNPEDDFRMPNGSTIPPGSPEEMLFHFGMTWQINGTGLLGKRNDQLPSNFTPVFYSQLQKNSSWAEHLISNCDGDSSCIYDTLALRNASIGLHTREVSKNYEQANATLNQYPPSINGGRVIEAYKGQTTLIQYTSNAEDANFTLRDSCTDLELFENGTLLWTPKSLEPFTLEILARSAKIGLASALQPRTVVCHCNAESQCLYNQTSRVGNSSLEVAGCKCDGGTFGRYCEGSEDACEEPCFPSVHCVPGKGCEACPPNLTGDGRHCAALGSSFLCQNQSCPVNYCYNQGHCYISQTLGCQPMCTCPPAFTDSRCFLAGNNFSPTVNLELPLRVIQLLLSEEENASMAEVNASVAYRLGTLDMRAFLRNSQVERIDSAAPASGSPIQHWMVISEFQYRPRGPVIDFLNNQLLAAVVEAFLYHVPRRSEEPRNDVVFQPISGEDVRDVTALNVSTLKAYFRCDGYKGYDLVYSPQSGFTCVSPCSRGYCDHGGQCQHLPSGPRCSCVSFSIYTAWGEHCEHLSMKLDAFFGIFFGALGGLLLLGVGTFVVLRFWGCSGARFSYFLNSAEALP

SEQ ID NO: 53179 - protein, 131 aa, Homo sapiens
MAVEFDGGVVMGSDSRVSAGEAVVNRVFDKLSPLHERIYCALSGSAADAQAVADMAAYQLELHGIELEEPPLVLAAANVVRNISYKYREDLSAHLMVAGWDQREGGQVYGTLGGMLTRQPFAIGGSGSTFI

SEQ ID NO: 53180 - protein, 291 aa, Homo sapiens
MITTTKELAPNRQLMTYWLQELQQKRWEYCNSLDMVKWDSRTSPTPGDFPKGLVARDNTDLIYPHPNASAEKARNVLAVETVPGELVGEQAANQPAPGHPNSINFYSLKQWGNELKNSMSSFRPGRGHNDSRRTVFYTNEEWELLDPTPKDLEESIVQEEKKKLTPEGNKGVTGSGFPFDFGRNPYKGKRPLKDIIGSYKNRHSSGDPSSEGTSGSGSVSIRKPASEMQLQVQSQQEELEQLKKDLSSQKELVRLLQQTVRSSQYDKYFTSSRLCEGVPKDTLELLHQKDD

SEQ ID NO: 53181 - protein, 74 aa, Homo sapiens
MEAPDYEVLSVREQLFHERIRECIISTLLFATLYILCHIFLTRFKKPAEFTTVSSYKMGVTMSTYSIVWTKGDG

SEQ ID NO: 53182 - protein, 187 aa, Homo sapiens [sequence omitted]

SEQ ID NO: 53183 - protein, 152 aa, Homo sapiens
MSSEPPPPYPGGPTAPLLEEKSGAPPTPGRSSPAVMQPPPGMPLPPADIGPPPYEPPGHPMPQPGFIPPHMSADGTYMPPGPYTPGPYPGPGGHTATVLVPSGAATTVTVLQGEIFEGAPVQTVCPHCQQAITTKISYEIGLMNFVLGFFCC

SEQ ID NO: 53184 - protein, 42 aa, Homo sapiens
MAAASAGATRLLLLLLMAVAAPSRARGSGCRAGTGARGVSAL

SEQ ID NO: 53185 - protein, 69 aa, Homo sapiens
MEHIQGAWKTISNGFGFKDAVFDGSSCISPTIVQQFGYQRRASDDGKLTDPSKTSNTIRVFLPNKQRTV

SEQ ID NO: 53186 - protein, 123 aa, Homo sapiens
MATKCGNCGPGYSTPLEAMKGPREEIVYLPCIYRNTGTEAPDYLATVDVDPKSPQYCQVIHRLPMPNLKDELHHSGWNTCSSCFGDSTKSRTKLVLPSLISSRIYVVDVGSEPRAPKLHKACH

SEQ ID NO: 53187 - protein, 36 aa, Homo sapiens
MRSGKASCTLETVWEDKHKYEEAERRFYEHEATQAA

SEQ ID NO: 53188 - protein, 20 aa, Homo sapiens
MNQVTDWVDPSFDDFLECSG

SEQ ID NO: 53189 - protein, 82 aa, Homo sapiens
PPKKPAPIGEFQSTEPEQSCADTPVFLAKPPIGFFTDYEIGPVYEMVIALQNTTTTSRYLRVLPPSTPYFALGLGHCNRRLC

SEQ ID NO: 53190 - protein, 130 aa, Homo sapiens
MNAAINTGPAPAVTKTETEVQNPDVLWDLDIPEGRSHADQDSNPKAEAPAPLQPALQLAPQQPQARSPFPLPIFQEVPFAPPLCNLPPLLNHSVSYPLATCPERNVLFHSLLNLAQEDHSFNAKPFPSEL

SEQ ID NO: 53191 - protein, 45 aa, Homo sapiens
MAEYLASIFGTEKDKVNCSFYFKIGACRHGDRCSRLHNKPTFSQH

SEQ ID NO: 53192 - protein, 116 aa, Homo sapiens
MFAEFFGGRNPFDTFFGQRNGEEGMDIDDPFSGFPMGMGGFTNVNFGRSRSAQEPARKKQDPPVTHDLRVSLEEIYSGCTKKMKISHKRLNPDGKSIRNEDKILTIEVKKGWKEGT

SEQ ID NO: 53193 - protein, 168 aa, Homo sapiens
MSLVLNDLLICCRQLEHDRATERKKEVEKFKRLIRDPETIKHLDRHSDSKQGKYLNWDAVFRFLQKYIQKETECLRIAKPNVSASTQASRQKKMQEISSLVKYFIKCANRRAPRLKCQELLNYIMDTVKDSSNGAIYGADCSNILLKDILSVRKYWCEISQQQWLGMF

SEQ ID NO: 53194 - protein, 119 aa, Homo sapiens
MTSSRLWFSLLLAAAFAGRATALWPWPQNFQTSDQRYVLYPNNFQFQYDVSSAAQPGCSVLDEAFQRYRDLLFGSGSWPRPYLTGLSLSFRLECSGVITAYSNLELQDSSSLPASLMSS

SEQ ID NO: 53195 - protein, 66 aa, Homo sapiens
MADNLDEFIEEQKARLAEDKAELESDPPYMEMKNLALLARQDCNGVISARHNLRLPGSSDSSASAS

SEQ ID NO: 53196 - protein, 97 aa, Homo sapiens
MLREEATKKSKEKEPGMALPQGRLTFRDVAIEFSLEEWKCLNPAQRALYRAVMLENYRNLEFVGEENVPPDMRNLHLSILALSGFIFSFVILPHTCF

SEQ ID NO: 53197 - protein, 346 aa, Homo sapiens
MAPRSLLLLLSGALALTDTWAGSHSLRYFSTAVSRPGRGEPRYIAVEYVDDTQFLRFDSDAAIPRMEPREPWVEQEGPQYWEWTTGYAKANAQTDRVALRNLLRRYNQSEAGSHTLQGMNGCDMGPDGRLLRGYHQHAYDGKDYISLNEDLRSWTAADTVAQITQRFYEAEEYAEEFRTYLEGECLELLRRYLENGKETLQRADPPKAHVAHHPISDHEATLRCWALGFYPAEITLTWQRDGEEQTQDTELVETRPAGDGTFQKWAAVVVPSGEEQRYTCHVQHEGLPQPLILRWEQSPQPTIPIVGIVAGLVVLGAVVTGAVVAAVMWRKKSSDRNRGSYSQAAV

SEQ ID NO: 53198 - protein, 148 aa, Homo sapiens
MEYLGGGSALDLLKPGPLEETYIATILREILKGLDYLHSERKIHRDIKAANVLLSEQGDVKLADFGVAGQLTDTQIKRNTFVGTPFWMAPEVIKQSAYDFKADIWSLGITAIELAKGEPPNSDLHPMRVLFLIPKNSPPTLEGQHSKP

SEQ ID NO: 53199 - protein, 106 aa, Homo sapiens
MKTFIIGISGVTNSGKTTLAKNLQKHLPNCSVISQDDFFKPESEIETDKNGFLQYDVLEALNMEKMMSAISCWMESARHSVVSTDQESAEEIPILIIEGFLLFNYK

SEQ ID NO: 53200 - protein, 134 aa, Homo sapiens
MAQQRALPQSKETLLQSYNKRLKDDIKSIMDNFTEIIKTAKIEDETQVSRATQGEQDNYEMHVRAGESLMKLVSDLKQFLILNDFPSVNEAIDQRNQQLRTLQEECDRKLITLRDEISIDLYELEEEYYSSRYK

SEQ ID NO: 53201 - protein, 70 aa, Homo sapiens
MMAEREEDDDTEEAWMQLRPTEPLPSQCCGSGCSPCVFDLYHRDLARWEAAQASKDRSLLRGPESQRDSR

SEQ ID NO: 53202 - protein, 1068 aa, Homo sapiens
MPPGVDCPMEFWTKEENQSVVVDFLLPTGVYLNFPVSRNANLSTIKQLLWHRAQYEPLFHMLSGPEAYVFTCINQTAEQQELEDEQRRLCDVQPFLPVLRLVAREGDRVKKLINSQISLLIGKGLHEFDSLCDPEVNDFRAKMCQFCEEAAARRQQLGWEAWLQYSFPLQLEPSAQTWGPGTLRLPNRALLVNVKFEGSEESFTFQVSTKDVPLALMACALRKKATVFRQPLVEQPEDYTLQVNGRHEYLYGSYPLCQFQVQKPRAKPPPIPAKKPSSVSLWSLEQPFRIELIQGSKVNADERMKLVVQAGLFHGNEMLCKTVSSSEVSVCSEPVWKQRLEFDINICDLPRMARLCFALYAVIEKAKKARSTKKKSKKADCPIAWANLMLFDYKDQLKTGERCLYMWPSVPDEKGELLNPTGTVRSNPNTDSAAALLICLPEVAPHPVYYPALEKLPGGMLLASREWRPELLWMRLHAEDSAPSRMIGVAMPGLGVLPGLVQAPGDAECSRLLQILELGRHSECVHVTEEEQLQLREILERRGSGELYEHEKDLVWKLRHEVQEHFPEALARLLLVTKWNKHEDVAQDALPAVSWPELPVLSALELLDFSFPDCHVGSFAIKSLRKLTDDELFQYLLQLVQVLKYESYLDCELTKFLLDRALANRKIGHFLFWHLRSEMHVPSVALRFGLILEAYCRGSTHHMKVLMKQGEALSKLKALNDFVKLSSQKTPKPQTKELMHLCMRQEAYLEALSHLQSPLDPSTLLAEVCVEQCTFMDSKMKPLWIMYSNEEAGSGGSVGIIFKNGDDLRQDMLTLQMIQLMDVLWKQEGLDLRMTPYGCLPTGDRTGLIEVVLRSDTIANIQLNKSNMAATAAFNKDALLNWLKSKNPGEALDRAIEEFTLSCAGYCVATYVLGIGDRHSDNIMIRESGQLFHIDFGHFLGNFKTKFGINRERVPFILTYDFVHVIQQGKTNNSEKFERFRGYCERAYTILRRHGLLFLHLFALMRAAGLPELSCSKDIQYLKDSLALGKTEEEALKHFRVKFNEALRESWKTKVNWLAHNVSKDNRQ

SEQ ID NO: 53203 - protein, 447 aa, Homo sapiens
MPMPTEGTPPPLSGTPIPVPAYFRHAEPGFSLKRPRGLSRSLPPPPPAKGSIPISRLFPPRTPGWHQLQPRRVSFRGEASETLQSPGYDPSRPESFFQQSFQRLSRLGHGSYGEVFKVRSKEDGRLYAVKRSMSPFRGPKDRARKLAEVGSHEKVGQHPCCVRLEQAWEEGGILYLQTELCGPSLQQHCEAWGASLPEAQVWGYLRDTLLALAHLHSQGLVHLDVKPANIFLGPRGRCKLGDFGLLVELGTAGAGEVQEGDPRYMAPELLQGSYGTAADVFSLGLTILEVACNMELPHGGEGWQQLRQGYLPPEFTAGLSSELRSVLVMMLEPDPKLRATAEALLALPVLRQPRAWGVLWCMAAEALSRGWALWQALLALLCWLWHGLAHPASWLQPLGPPATPPGSPPCSLLLDSSLSSNWDDDSLGPCVLKRTEGALECSQMEGL

SEQ ID NO: 53204 - protein, 390 aa, Homo sapiens
MNGVTLDLEERAKVTSGFISGCSGHCTSYGTNCENGGKCLERYHGYSCDCSNTAYDGTFCNKDVGAFFEEGMWLRYNFQAPATNARDSSSRVDNAPDQQNSHPDLAQEEIRFSFSTTKAPCILLYISSFTTDFLAVLVKPTGSLQIRYNLGGTREPYNIDVDHRNMANGQPHSVNITRHEKTIFLKLDHYPSVSYHLPSSSDTLFNSPKSLFLGKVIETGKIDQEIHKYNTPGFTGCLSRVQFNQIAPLKAALRQTNASAHVHIQGELVESNCGASPLTLSPMSSATDPWHLDHLDSASADFPYNPGQGQAIRNGVNRNSAIIGGVIAVVIFTILCTLVFLIRYMFRHKGTYHTNEAKGAESAESADAAIMNNDPNFTETIDESKKEWLI

SEQ ID NO: 53205 - protein, 117 aa, Homo sapiens
MEDEVVRFAKKMDKMVQKKNAAGALDLLKELKNIPMTLELLQEMASDELKEMRKNLTKEAIREHQMAKTGGTQTDLFTCGKCKKKNCTYTQVQTRSADEPMTTFVVCNECGNRWKFC

SEQ ID NO: 53206 - protein, 83 aa, Homo sapiens
MADTIFGSGNDQWVCPNDRQLALRAKLQTGWSVHTYQTEKQRRKQHLSPAEVEAILQVIQRAERLDVLEQQRIGRLVERLETM

SEQ ID NO: 53207 - protein, 53 aa, Homo sapiens
MRSGKASCTLETVWEDKHKYEEAERRFYEHEATQAAASAQQLPAEGPAMNGPG

SEQ ID NO: 53208 - protein, 49 aa, Homo sapiens
MKVWLKSLMKLCSKCFPRFRMTHHLMKQEQQSDPLQRETHKKAIPNRRA

SEQ ID NO: 53209 - protein, 205 aa, Homo sapiens
MLALRVARGSWGALRGAAWAPGTRPSKRRACWALLPPVPCCLGCLAERWRLRPAALGLRLPGIGQRNHCSGAGKAAPRPAAGAGAAAEAPGGQWGPASTPSLYENPWTIPNMLSMTRIGLAPVLGYLIIEEDFNIALGVFALAGLTDLLDGFIARNWANQRSALGSALDPLADKILISILYVSLTYADLIPANTCQVFQSLLCHC

SEQ ID NO: 53210 - protein, 171 aa, Homo sapiens
MSAVGAATPYLHHPGDSHSGRVSFLGAQLPPEVAAMARLLGDLDRSTFRKLLKFVVSSLQGEDCREAVQRLGVSANLPEEQLGALLAGMHTLLQQALRLPPTSLKPDTFRDQLQELCIPQDLVGDLASVVFGSQRPLLDSVAQQQGAWLPHVADFRWRVDVAISTSALARS

SEQ ID NO: 53211 - protein, 327 aa, Homo sapiens
MQNKWLMINIQNVQDFACQCLNRDVWSNEAVKNIIREHFIFWQVYHDSEEGQRYIQFYKLGDFPYVSILDPRTGQKLVEWHQLDVSSFLDQVTGFLGEHGQLDGLSSSPPKKCARSESLIDASEDSQLEAAIRASLQETHFDSTQTKQDSRSDEESESELFSGSEEFISVCGSDEEEEVENLAKSRKSPHKDLGHRKEENRRPLTEPPVRTDPGTATNHQGLPAVDSEILEMPPEKADGVVEGIDVNGPKAQLMLRYPDGKREQITLPEQAKLLALVKHVQSKGYPNERFELLTNFPRRKLSHLDYDITLQEAGLCPQETVFVQERN

SEQ ID NO: 53212 - protein, 775 aa, Homo sapiens
MASEGTNIPSPVVRQIDKQFLICSICLERYKNPKVLPCLHTFCERCLQNYIPAHSLTLSCPVCRQTSILPEKGVAALQNNFFITNLMDVLQRTPGSNAEESSILETVTAVAAGKPLSCPNHDGNRQSFAVVPRLVSNPWPQVILPPWPSKVLGLQVMEFYCQSCETAMCRECTEGEHAEHPTVPLKDVVEQHKASLQVQLDAVNKRLPEIDSALQFISEIIHQLTNQKASIVDDIHSTFDELQKTLNVRKSVLLMELEVNYGLKHKVLQSQLDTLLQGQESIKSCSNFTAQALNHGTETEVLLVKKQMSEKLNELADQDFPLHPRENDQLDFIVETEGLKKSIHNLGTILTTNAVASETVATGEGLRQTIIGQPMSVTITTKDKDGELCKTGNAYLTAELSTPDGSVADGEILDNKNGTYEFLYTVQKEGDFTLSLRLYDQHIRGSPFKLKVIRSADVSPTTEGVKRRVKSPGSGHVKQKAVKRPASMYSTGKRKENPIEDDLIFRVGTKGRNKGEFTNLQGVAASTNGKILIADSNNQCVQIFSNDGQFKSRFGIRGRSPGQLQRPTGVAVHPSGDIIIADYDNKWVSIFSSDGKFKTKIGSGKLMGPKGVSVDRNGHIIVVDNKACCVFIFQPNGKIVTRFGSRGNGDRQFAGPHFAAVNSNNEIIITDFHNHSVKVFNQEGEFMLKFGSNGEGNGQFNAPTGVAVDSNGNIIVADWGNSRIQVFDGSGSFLSYINTSADPLYGPQGLALTSDGHVVVADSGNHCFKVYRYLQ

SEQ ID NO: 53213 - protein, 192 aa, Homo sapiens
MEPGLWLLFGLTVTSAAGFVPCSQSGDAGRRGVSQAPTAARSEGDCEETVAGPGEETVAGPGEGTVAPTALQGPSPGSPGQEQAAEGAPEHHRSRRCTCFTYKDKECVYYCHLDIIWINTPEQTVPYGLSNYRGSFRGKRSAGPLPGNLQLSHRPHLRCACVGRYDKACLHFCTQTLDVSRLKSRTNKASRL

SEQ ID NO: 53214 - protein, 1061 aa, Homo sapiens
MGRHVATSCHVAWLLVLISGCWGQVNRLPFFTNHFFDTYLLISEDTPVGSSVTQLLAQDMDNDPLVFGVSGEEASRFFAVEPDTGVVWLRQPLDRETKSEFTVEFSVSDHQGVITRKVNIQVGDVNDNAPTFHNQPYSVRIPENTPVGTPIFIVNATDPDLGAGGSVLYSFQPPSQFFAIDSARGIVTVIRELDYETTQAYQLTVNATDQDKTRPLSTLANLAIIITDVQDMDPIFINLPYSTNIYEHSPPGTTVRIITAIDQDKGRPRGIGYTIVSGNTNSIFALDYISGVLTLNGLLDRENPLYSHGFILTVKGTELNDDRTPSDATVTTTFNILVIDINDNAPEFNSSEYSVAITELAQVGFALPLFIQVVDKDENLGLNSMFEVYLVGNNSHHFIISPTSVQGKADIRIRVAIPLDYETVDRYDFDLFANESVPDHVGYAKVKITLINENDNRPIFSQPLYNISLYENVTVGTSVLTVLATDNDAGTFGEVSYFFSDDPDRFSLDKDTGLIMLIARLDYELIQRFTLTIIARDGGGEETTGRVRINVLDVNDNVPTFQKDAYVGALRENEPSVTQLVRLRATDEDSPPNNQITYSIVSASAFGSYFDISLYEGYGVISVSRPLDYEQISNGLIYLTVMAMDAGNPPLNSTVPVTIEVFDENDNPPTFSKPAYFVSVVENIMAGATVLFLNATDLDRSREYGQESIIYSLEGSTQFRINARSGEITTTSLLDRETKSEYILIVRAVDGGVGHNQKTGIATVNITLLDINDNHPTWKDAPYYINLVEMTPPDSDVTTVVAVDPDLGENGTLVYSIQPPNKFYSLNSTTGKIRTTHAMLDRENPDPHEAELMRKIVVSVTDCGRPPLKATSSATVFVNLLDLNDNDPTFQNLPFVAEVLEGIPAGVSIYQVVAIDLDEGLNGLVSYRMPVGMPRMDFLINSSSGVVVTTTELDRERIAEYQLRVVASDAGTPTKSSTSTLTIHVLDVNDETPTFFPAVYNVSVSEDVPREFRVVWLNCTDNDVGLNAELSYFITGAAPASAHLCRPPGALPPPLPDGQPD

SEQ ID NO: 53215 - protein, 468 aa, Homo sapiens
MDSLASLVLCGVSLLLSGTVEGAMDLILINSLPLVSDAETSLTCIASGWRPHEPITIGRDFEALMNQHQDPLEVTQDVTREWAKKVVWKREKASKINGAYFCEGRVRGEAIRIRTMKMRQQASFLPATLTMTVDKGDNVNISFKKVLIKEEDAVIYKNGSFIHSVPRHEVPDILEVHLPHAQPQDAGVYSARYIGGNLFTSAFTRLIVRRCEAQKWGPECNHLCTACMNNGVCHEDTGECICPPGFMGRTCEKACELHTFGRTCKERCSGQEGCKSYVFCLPDPYGCSCATGWKGLQCNEGIQRMTPKIVDLPDHIEVNSGKFNPICKASGWPLPTNEEMTLVKPDGTVLHPKDFNHTDHFSVAIFTIHRILPPDSGVWVCSVNTVAGMVEKPFNISVKVLPKPLNAPNVIDTGHNFAVINISSEPYFGDGPIKSKKLLYKPVNHYEAWQHIQVSMEKQRLTKANSDK

SEQ ID NO: 53216 - protein, 74 aa, Homo sapiens
MDSLLEALQSGAAFRRKRGPRQANRKAGCAVTSLLASELTKDDAMAAVPAKVSKNSETFPTILEEAKELVGRAS

SEQ ID NO: 53217 - protein, 537 aa, Homo sapiens
MCDLRRPAAGGMMDLAYVCEWEKWSKSTHCPSVPLACAWSCRNLIAFTMDLRSDDQDLTRMIHILDTEHPWDLHSIPSEHHEAITCLEWDQSGSRLLSADADGQIKCWSMADHLANSWESSVGSLVEGDPIVALSWLHNGVKLALHVEKSGASSFGEKFSRVKFSPSLTLFGGKPMEGWIAVTVSGLVTVSLLKPSGQVLTSTESLCRLRGRVALADIAFTGGGNIVVATADGSSASPVQFYKVCVSVVSEKCRIDTEILPSLFMRCTTDLNRKDKFPAITHLKFLARDMSEQVLLCASSQTSSIVECWSLRKEGLPVNNIFQQISPVVGDKQPTILKWRILSATNDLDRVSAVALPKLPISLTNTDLKVASDTQFYPGLGLALAFHDGSVHIVHRLSLQTMAVFYSSAAPRPVDEPAMKRPRTAGPAVHLKAMQLSWTSLALVGIDSHGKVLSTRILAMKASLCKLSPCTVTRVCDYHTKLFLIAISSTLKSLLRPHFLNTPDKSPGDRLTEICTKITDVDIDKVMINLKTEEFVL

SEQ ID NO: 53218 - protein, 159 aa, Homo sapiens
MAQASPPRPERVLGASSPEARPAQEALLLPTGVFQVAEKMEKRTCALCPKDVEYNVLYFAQSENIAAHENCLLYSSGLVECEDQDPLNPDRSFDVESVKKEIQRGRKLKCKFCHKRGATVGCDLKNCNKNYHFFCAKKDDAVPQSDGVRGIYKYLIKHF

SEQ ID NO: 53219 - protein, 60 aa, Homo sapiens
MIPARFAGVLLALALILPETRCLQMPSPVGELRSIKVAQNCPILWGHRMRRKESKTWMDY

SEQ ID NO: 53220 - protein, 239 aa, Homo sapiens
MSDEEVEQVEEEAQEEEEKPRPKLTAPKIPEGEKVDFDDIQKKRQNKDLMELQALIDSHFEARKKEEEELVALKERIEKRRAERAEQQRIRAEKERERQNRLAEEKARREEEDAKRRAEDDLKKKKALSSMGANYSSYLAKADQKRGKKQTAREMKKKILAERRKPLNIDHLGEDKLRDKAKELWETLHQLEIDKFEFGEKLKRQKYDITTLRSRIDQAQKHSKKAGTPAKGKVGGRWK

SEQ ID NO: 53221 - protein, 69 aa, Homo sapiens
MGNPENIEDAYVAVIRPKNTASLNSREYRAKSYEILLHEVPIEGQKKKRKKVLLETKLQGNSEITQGIL

SEQ ID NO: 53222 - protein, 436 aa, Homo sapiens
  MOD_RES (1)..(1): Any amino acid
XRLIREIDKLKEDINSHVIKVKWAQNKLKAEMDSHKETKDKLKETTTKLTQAKEEADQIRKNCQDMIKTYQESEEIKSNELDAKLRVTKGELEKQMQEKSDQLEMHHAKIKELEDLKRTFKEGMDELRTLRTKVKCLEDERLRTEDELSKYKEIINRQKAEIQNLLDKVKTADQLQEQLQRGKQEIENLKEEVESLNSLINDLQKDIEGSRKRESELLLFTERLTSKNAQLQSESNSLQSQFDKVSCSESQLQSQCEQMKQTNINLESRLLKEEELRKEEVQTLQAELACRQTEVKALSTQVEELKDELVTQRRKHASSIKDLTKQLQQARRKLDQVESGSYDKEVSSMGSRSSSSGSLNARSSAEDRSPENTGSSVAVDNFPQVDKAMLIERIVRLQKAHARKNEKIEFMEDHIKQLVEEIRKKTKKIYKHLEQK

SEQ ID NO: 53223 - protein, 251 aa, Homo sapiens
MDSELMHSIVGSYHKPPERVFVPSFTQNEPSQNCHPANLEVTSPKILHSPNSQALILALKTLQEKIHRLELERTQAEDNLNILSREAAQYKKALENETNERNLAHQELIKQKKDISIQLSSAQSRCTLLEKQLEYTKRMVLNVEREKNMILEQQAQLQREKEQDQMKLYAKLEKLDVLEKECFRLTTTQKTAEDKIKHLEEKLKEEEHQRKLFQDKASELQTGLEISKIIMSSVSNLKHSKEKKKSSKVCI

SEQ ID NO: 53224 - protein, 183 aa, Homo sapiens
MATRGGAGVAMAVWSLLSARAVTAFLLLFLPRFLQAQTFSFPFQQPEKCDNNQYFDISALSCVPCGANQRQDARGTSCVCLPGFQMISNNGGPAIICKKCPENMKGVTEDGWNCISCPSDLTAEGKCHCPIGHILGHVFNFRMVCKVFAIISSCMLGICQSNILSSSWKYVCDEHEFLRLCHI

SEQ ID NO: 53225 - protein, 70 aa, Homo sapiens
MAGVLKKTTGLVGLAVCNTPHERLRILYTKILDVLEEIPKNAAYRKYTEQITNEKLAMVKAPIIMQIISS

SEQ ID NO: 53226 - protein, 119 aa, Homo sapiens
MGKTNSKLAPEVLEDLVQNTEFSEQELKQWYKGFLKDCPSGILNLEEFQQLYIKAIYKMVGTVIMMRMNQDGLTPQQRVDKIFKKMDQDKDDQITLEEFKEAAKSDPSIVLLLQCDMQK

SEQ ID NO: 53227 - protein, 93 aa, Homo sapiens
  MOD_RES (1)..(1): Any amino acid
XGVRRDVFLNGSYNDYVREFHNMGPPPPWQGMPPYPGMEQPPHHPYYQHHAPPPQAHPPYSGHHPVPHEARYRDKRVVSAQGGKGVRELLRIL

SEQ ID NO: 53228 - protein, 39 aa, Homo sapiens
MGLQACLLGLFALILSGKCSYSPEPDQRRTKIPDPRECG

SEQ ID NO: 53229 - protein, 58 aa, Homo sapiens
MWKLLPAAGPAGGEPYRLLTGVEYVVGRKNCAILIENDQSISRNHAVLTANFSVTNLV

SEQ ID NO: 53230 - protein, 120 aa, Homo sapiens
MENSSAASASSEAGSSRSQEIEELERFIDSYVLEYQVQGLLADKTEGDGESERTQSHISQEEVLNGGPPMKGLTEEWTADCSEPLDSSCSFSRGRAPPQQNGSKDNSLDMLGTDIWAANT

SEQ ID NO: 53231 - protein, 83 aa, Homo sapiens
MTEEVIVIAKWDYTAQQDQELDIKKNERLWLLDDSKTWWRVRNAANRTGYVPSNYVERKNSLKKGSLVKNLKDTLAQRLLRVP

SEQ ID NO: 53232 - protein, 263 aa, Homo sapiens
MARPQPCGPPHARCGSPSLPERPLQVKVVGLFSCPNFQIAKSAAENLKNNHPSKFEDPILVPLQEFAWHQYLQEKKRELKNETWEYSSSVISFVNGQFLGDALDLQKWAHEVWDIVDIKPSALYDALTEDFSAKFLRDTKHDFVFLDICIDSSPIGRLIFELYCDVCPKTCKNFQVLCTGKAGFSQRGIRLHYKNSIFHRIVQNGWIQGGDIVYGKGDNGESIYGPTFEDGVSLSPMLECNGVISAHCNLHLPGSSDSPASAS

SEQ ID NO: 53233 - protein, 202 aa, Homo sapiens
MSLWLGAPVPDIPPDSAVELWKPGAQDASSQAQGGSSCILREEARMPHSAGGTAGVGLEAAEPTALLTRAEPPSEPTEIRPQKRKKGPAPKMLGNELCSVCGDKASGFHYNVLSCEGCKGFFRRSVIKGAHYICHSGGHCPMDTYMRRKCQECRLRKCRQAGMREECVLSEEQIRLKKLKRQEEEQAHATSLPPRASSPPQI

SEQ ID NO: 53234 - protein, 503 aa, Homo sapiens
MAETSLLEAGASAASTAAALENLQVEASCSVCLEYLKEPVIIECGHNFCKACITRWWEDLERDFPCPVCRKTSRYRSLRPNRQLGSMVEIAKQLQAVKRKIRDESLCPQHHEALSLFCYEDQEAVCLICAISHTHRAHTVVPLDDATQEYKEKLQKCLEPLEQKLQEITRCKSSEEKKPGELKRLVESRRQQILREFEELHRRLDEEQQVLLSRLEEEEQDILQRLRENAAHLGDKRRDLAHLAAEVEGKCLQSGFEMLKDVKSTLEKCEKVKTMEVTSVSIELEKNFSNFPRQYFALRKILKQLIADVTLDPETAHPNLVLSEDRKSVKFVETRLRDLPDTPRRFTFYPCVLATEGFTSGRHYWEVEAAHCVLAQDPENQALARFYCYTERTIAKRLVLRRDPSVKRTLCRGCSSLLVPGLTCTQRQRRCRGQRWTVQTCLTCQRSQRFLNDPGHLLWGDRPEAQLGSQADSKPLQPLPNTAHSISDRLPEEKMQTQGSSNQ

SEQ ID NO: 53235 - protein, 793 aa, Homo sapiens
MCSQEAFQAQRSQLVELLVSGSLEGFESVLDWLLSWEVLSWEDYEGFHLLGQPLSHLARRLLDTVWNKGTWACQKLIAAAQEAQADSQSPKLHGCWDPHSLHPARDLQSHRPAIVRRLHSHVENMLDLAWERGFVSQYECDEIRLPIFTPSQRARRLLDLATVKANGLAAFLLQHVQELPVPLALPLEAATCKKYMAKLRTTVSAQSRFLSTYDGAETLCLEDIYTENVLEVWADVGMAGPPQKSPATLGLEELFSTPGHLNDDADTVLVVGEAGSGKSTLLQRLHLLWAAGQDFQEFLFVFPFSCRQLQCMAKPLSVRTLLFEHCCWPDVGQEDIFQLLLDHPDRVLLTFDGFDEFKFRFTDRERHCSPTDPTSVQTLLFNLLQGNLLKNARKVVTSRPAAVSAFLRKYIRTEFNLKGFSEQGIELYLRKRHHEPGVADRLIRLLQETSALHGLCHLPVFSWMVSKCHQELLLQEGGSPKTTTDMYLLILQHFLLHATPPDSASQGLGPSLLRGRLPTLLHLGRLALWGLGMCCYVFSAQQLQAAQVSPDDISLGFLVRAKGVVPGSTAPLEFLHITFQCFFAAFYLALSADVPPALLRHLFNCGRPGNSPMARLLPTMCIQASEGKDSSVAALLQKAEPHNLQITAAFLAGLLSREHWGLLAECQTSEKALLRRQACARWCLARSLRKHFHSIPPAAPGEAKSVHAMPGFIWLIRSLYEMQEERLARKAARGLNVGHLKLTFCSVGPTECAALAFVLQHLRRPVALQLDYNSVGDIGVEQLLPCLGVCKAL

SEQ ID NO: 53236 - protein, 60 aa, Homo sapiens
MAERQEEQRGSPPLRAEGKADAEVKLILYHWTHSFSSQKVRLVIAEKALKCEEHDKEHPG

SEQ ID NO: 53237 - protein, 113 aa, Homo sapiens
  MOD_RES (1)..(1): Any amino acid
XIYVLKDSSRILNLCNQSFIPAFFQAHMAHKKSLWTIEPNEGMVPPETDVQLALTANLNDTLTFKDCVILDIENSSTYRIPVQASGTGSTIVSDKPFAPELNLGAHFRNLTVS

SEQ ID NO: 53238 - protein, 141 aa, Homo sapiens
MLLPNILLTEQLYDGYDEEYDCPILDEDRVVDELDNQMREGGVIVDYHGCDFFPERWFHIVFVLRTDTNVLYERLETRGYNEKKLTDNIQCEIFQVLYEEATASYKEEIVHQLPSNKPEELENNVDQILKWIEQWIKDHNS

SEQ ID NO: 53239 - protein, 723 aa, Homo sapiens
MGCLWGLALPLFFFCWEVGVSGSSAGPSTRRADTAMTTDDTEVPAMTLAPGHAALETQTLSAETSSRASTPAGPIPEAETRGAKRISPARETRSFTKTSPNFMVLIATSVETSAASGSPEGAGMTTVQTITGSDPREAIFDTLCTDDSSEEAKTLTMDILTLAHTSTEAKGLSSESSASSDSPHPVITPSRASESSASSDGPHPVITPSRASESSASSDGPHPVITPSRASESSASSDGPHPVITPSRASESSASSDGPHPVITPSRASESSASSDGPHPVITPSRASESSASSDGPHPVITPSRASESSASSDGPHPVITPSRASESSASSDGPHPVITPSRASESSASSDGLHPVITPSRASESSASSDGPHPVITPSRASESSASSDGPHPVITPSWSPGSDVTLLAEALVTVTNIEVINCSITEIETTTSSIPGASDTDLIPTEGVKASSTSDPPALPDSTEAKPHITEVTASAETLSTAGTTESAAPDATVGTPLPTNSATEREVTAPGATTLSGALVTVSRNPLEETSALSVETPSYVKVSGAAPVSIEAGSAVGKTTSFAGSSASSYSPSEAALKNFTPSETPTMDIATKGPFPTSRDPLPSVPPTTTNSSRGTNSTLAKITTSAKTTMKPPTATPTTARTRPTTDVSAGENGGFLLLRLSVASPEDLTDPRVAERLMQQMERSLALSPRLECSGVISAHCKLHLLGSRDSPASAS

SEQ ID NO: 53240 - protein, 130 aa, Homo sapiens
MGRPAGLFPPLCPFLGFRPEACWERHMQIERAPSVPPFLRWAGYRPGPVRRRGKVELIKFVRVQWRRPQVEWRRRRWGPGPGASMAGSEELGLREDTLRVLAAFLRRGEAAGSPVPTPPRRASWLFHPWT

SEQ ID NO: 53241 - protein, 105 aa, Homo sapiens
MTPILTVLICLGLSLDPRTHVQAGPLPKPTLWAEPGSVITQGSPVTLRCQGSLETQEYHLYREKKTALWITRIPQELVKKGQFPILSITWEHAGRYCCIYGSHTA

SEQ ID NO: 53242 - protein, 21 aa, Homo sapiens
MTTSLDTVETFGTTSYYDDVG

SEQ ID NO: 53243 - protein, 221 aa, Homo sapiens
MAAAGARPVELGFAESAPAWRLRSEQFPSKVGGRPAWLGAAGLPGPQALACELCGRPLSFLLQVYAPLPGRPDAFHRCIFLFCCREQPCCAGLRVFRNQLPRKNDFYSYEPPSENPPPETGESVCLQLKSGAHLCRVCGCLGPKTCSRCHKAYYCSKEHQTLDWRLGHKQACAQPDHLDHIIPDHNFLFPEFEIVIETEDEIMPEVVEKEDYSEIIGSMDS

SEQ ID NO: 53244 - protein, 71 aa, Homo sapiens
MGEIKVSPDYNWFRGTVPLKKIIVDDDDSKIWSLYDAGPRSIRCPLIFLPPVSGTADVFFRQILALTGWGY

SEQ ID NO: 53245 - protein, 135 aa, Homo sapiens
MRRDVRILLLGEAQVGKTSLILSLVGEEFPEEVPPRAEEITIPADVTPEKVPTHIVDYSEAEQTDEELREEIHKANVVCVVYDVSEEATIEKIRTKWIPLVNGGTTQGPSGQQVRPAVGELHGGRAPHHEPVSRD

SEQ ID NO: 53246 - protein, 306 aa, Homo sapiens
  MOD_RES (1)..(1): Any amino acid
XSEELEVQKPQVKLRRAVSEVARPASTPPIMASAIKDEDDEDRIIAELEVFERSSVSSLPPTPRRQLIPTLLSPQDLGPPGGSAPGPTRKAAPGPRAFCVPRIILTECAPNPPSPPEARLEELGPRTAPTPRPQTLADSTRGWDGPQSPPGVVGETSGPRSSFMPRKEGAALKRLGGGGSSLEDGGARVQCPQGPAQDGTPETSTADTYPEEILKDSGHDAQTCSREHQGQAAANSGRTTWGATAQQMDSLEETLRELEATLSNMGTGPAMGSPGSPPPLPLRPQVAARFSSSSAAFLLHFQSQTE

SEQ ID NO: 53247 - protein, 228 aa, Homo sapiens
MEQLNLADSGLVGKEARRCRRASPPMGMPSAWWLQNEAGCLFAARQVNGQQGGGSEPAAAAAVVAAGDKWKPPQGTDSIKMENGQSTAAKLGLPPLTPEQQEALQKAKKYAMEQSIKSVLVKQTIAHQQQQLTNLQMAAVTMGFGDPLSPLQSMAAQRQRALAIMCRVYVGSIYYELGEDTIRQAFAPFGPIKSIDMSWDSVTMKHKGFAFVEYEVPEAAQLALEQMN

SEQ ID NO: 53248 - protein, 401 aa, Homo sapiens
MSRDVCIHTWPCTYYLEPKRRWVTGQLSLTSLSLRFMTDSTGEILVSFPLSSIVEIKKEASHFIFSSITILEKGHAKHWFSSLRPSRNVVFSIIEHFWRELLLSQPGAVADASVPRTRGEELTGLMAGSQKRLEDTARVLHHQGQQLDSVMRGLDKMESDLEVADRLLTELESPAWWPFSSKLWKTPPETKPREDVSMTSCEPFGKEGILIKIPAVISHRTESHVKPGRLTVLVSGLEIHDSSSLLMHRFEREDVDDIKVHSPYEISIRQRFIGKPDMAYRLISAKMPEVIPILEVQFSKKMELLEDALVLRSARTSSPAEKSCSVWHAASGLMGRTLHREPPAGDQEGTALHLQTSLPALSEADTQELTQGFRPMSLSTQTVLVMLCSESAGALWRQRLS

SEQ ID NO: 53249 - protein, 545 aa, Homo sapiens
MATEHVNGNGTEEPMDTTSAVIHSENFQTLLDAGLPQKVAEKLDEIYVAGLVAHSDLDERAIEALKEFNEDGALAVLQQFKDSDLSHVQNKSAFLCGVMKTYRQREKQGTKVADSSKGPDEAKIKALLERTGYTLDVTTGQRKYGGPPPDSVYSGQQPSVGTEIFVGKIPRDLFEDELVPLFEKAGPIWDLRLMMDPLTGLNRGYAFVTFCTKEAAQEAVKLYNNHEIRSGKHIGVCISVANNRLFVGSIPKSKTKEQILEEFSKVTEGLTDVILYHQPDDKKKNRGFCFLEYEDHKTAAQARRRLMSGKVKVWGNVGTVEWADPIEDPDPEVMAKVKVLFVRNLANTVTEEILEKAFSQFGKLERVKKLKDYAFIHFDERDGAVKAMEEMNGKDLEGENIEIVFAKPPDQKRKERKAQRQAAKNQMYDDYYYYGPPHMPPPTRGRGRGGRGGYGYPPDYYGYEDYYDYYGYDYHNYRGGYEDPYYGYEDFQVGARGRGGRGARGAAPSRGRGAAPPRGRAGYSQRGGPGSARGVRAGKRGRGRS

SEQ ID NO: 53250 - protein, 478 aa, Homo sapiens
MGANASNYPHSCSPRVGGNSQAQQTFIGTSSYSQQGYGCESKLYSLDHGHEKPQDKKKRTSGLATLKKKFIKRRKSNRSADHAKQMRELLSGWDVRDVNALVEEYEGTSALKELSLQASLARPEARTLQKDMADLYEYKYCTDVDLIFQETCFPVHRAILAARCPFFKTLLSSSPEYGAEIIMDINTAGIDMPMFSALLHYLYTGEFGMEDSRFQNVDILVQLSEEFGTPNSLDVDMRGLFDYMCYYDVVLSFSSDSELVEAFGGNQNCLDEELKAHKAVISARSPFFRNLLQRRIRTGEEITDRTLRTPTRIILDESIIPKKYATVILHCMYTDVVDLSVLHCSPSVGSLSEVQALVAGKPNMTRAEEAMELYHIALFLEFNMLAQACLPFVLQRRLQSSGLPVQQSFQTAAYCLNLKYENPSKDNWTFEESFQIETEIRAKRTKSWRKQTMKGAEENFSRIKISLYKRTFYGISET

SEQ ID NO: 53251 - protein, 128 aa, Homo sapiens
MAPTWGPGMVSVVGPMGLLVVLLVGGCAAEEPPRFIKEPKDQIGVSGGVASFVCQATGDPKPRVTWNKKGKKVNSQRFETIEFDESAGAVLRIQPLRTPRDENVYECVAQNSVGEITVHAKLTVLRGP

SEQ ID NO: 53252 - protein, 145 aa, Homo sapiens
MAQPPRLSRSGASSLWDPASPAPTSGPRPRLWEGQDVLARWTDGLLYLGTIKKVDSAREVCLVQFEDDSQFLVLWKDISPAALPGEELLCCVCRSETVVPGNRLVSCEKCRHAYHQDCHVPRAPAPGEGEGTSWVCRQCVFAIAT

SEQ ID NO: 53253 - protein, 796 aa, Homo sapiens
MSADNQLQVIFITNDRRNKEKAIEEGIPAFTCEEYVKSLTANPELIDRLACLSEEGNEIESGKIIFSEHLPLSKLQQGIKSGTYLQGTFRASRENYLEATVWIHGDNEENKEIILQGLKHLNRAVHEDIVAVELLPKSQWVAPSSVVLHDEGQNEEDVEKEEETERMLKTAVSEKMLKPTGRVVGIIKRNWRPYCGMLSKSDIKESRRHLFTPADKRIPRIRIETRQASTLEGRRIIVAIDGWPRNSRYPNGHFVRNLGDVGEKETETEVLLLEHDVPHQPFSQAVLSFLPKMPWSITEKDMKNREDLRHLCICSVDPPGCTDIDDALHCRELENGNLEVGVHIADVSHFIRPGNALDQESARRGTTVYLCEKRIDMVPELLSSNLCSLKCDVDRLAFSCIWEMNHNAEILKTKFTKSVINSKASLTYAEAQLRIDSANMNDDITTSLRGLNKLAKILKKRRIEKGALTLSSPEVRFHMDSETHDPIDLQTKELRETNSMVEEFMLLANISVAKKIHEEFSEHALLRKHPAPPPSNYEILVKAARSRNLEIKTDTAKSLAESLDQAESPTFPYLNTLLRILATRCMMQAVYFCSGMDNDFHHYGLASPIYTHFTSPIRRYADVIVHRLLAVAIGADCTYPELTDKHKLADICKNLNFRHKMAQYAQRASVAFHTQLFFKSKGIVSEEAYILFVRKNAIVVLIPKYGLEGTVFFEEKDKPNPQLIYDDEIPSLKIEDTVFHVFDKVKVKIMLDSSNLQHQKIRMSLVEPQIPGISIPTDTSNMDLNGPKKKKMKLGK

SEQ ID NO: 53254 - protein, 67 aa, Homo sapiens
MDSSTAHSPVFLVFPPEITASEYESTELSATTFSTQSPLQKLFARKMKILGDIHSGALFCSLILEPS

SEQ ID NO: 53255 - protein, 159 aa, Homo sapiens
MAALTRDPQFQKLQQWYREHRSELNLRRLFDANKDRFNHFSLTLNTNHGHILVDYSKNLVTEDVMRMLVDLAKSRGVEAARERMFNGEKINYTEGRAVLHVALRNRSNTPILVDGKDVMPEVNKVLDKMKSFCQRVRSGDWKGYTGKTITDVINIGIGG

SEQ ID NO: 53256 - protein, 101 aa, Homo sapiens
MSLLDGLASSPRAPLQSSKARMKKLPKKSQNEKYRLKYLRLRKAAKATVFENAAICDEIARLEEKFLKAKEERRSSPTDLAFMMRVPSTPWAIAVLEYMPA

SEQ ID NO: 53257 - protein, 393 aa, Homo sapiens
MVARVGLLLRALQLLLWGHLDAQPAERGGQELRKEAEAFLEKYGYLNEQVPKAPTSTRFSDAIRAFQWVSQLPVSGVLDRATLRQMTRPRCGVTDTNSYAAWAERISDLFARHRTKMRRKKRFAKQGNKWYKQHLSYRLVNWPEHLPEPAVRGAVRAAFQLWSNVSALEFWEAPATGPADIRLTFFQGDHNDGLGNAFDGPGGALAHAFLPRRGEAHFDQDERWSLSRRRGRNLFVVLAHEIGHTLGLTHSPAPRALMAPYYKRLGRDALLSWDDVLAVQSLYGKPLGGSVAVQLPGKLFTDFETWDSYSPQGRRPETQGPKYCHSSFDAITVDRQQQLYIFKGSHFWEVAADGNVSEPRPLQERWVGLPPNIEAAAVSLNDGDFYFFKVQSV

SEQ ID NO: 53258 - protein, 201 aa, Homo sapiens
MERLQKQPLTSPGSVSPSRDSSVPGSPSSIVAKMDNQVLGYKDLAAIPKDKAILDIERPDLMIYEPHFTYSLLEHVELPRSRERSLSPKSTSPPPSPEVWADSRSPGIISQASAPRTTGTPRTSLPHFHHPETSRPDSNIYKKPPIYKQRESVGGSPQTKHLIEDLIIESSKFPAAQPPDPNQPAKIETDYWPCPPSLAVV

SEQ ID NO: 53259 - protein, 344 aa, Homo sapiens
MSLVPGLTSIEQPQPQLLDQLGIPRRCFQDWVDQNGLPGLSVTQQIRGITLLRRLECSNTIIAHCRHELLGPPTLSPSAWSSPASPPPRALPLGSCASKMLERGAESAAGATDPSPTGKEPVTKEAPHQGPPQKPSQSAPGPTASAGSPPRPRRRPPPQRPHRCPDCDKAFSYPSKLATHRLAHGGARPHPCPDCPKAFSYPSKLAAHRLTHSGARPHPCPHCPKSFGHRSKLAAHLWTHAPTRPYPCPDCPKSFCYPSKLAAHRHTHHATDARPYPCPHCPKAFSFPSKLAAHRLCHDPPTAPGSQATAWHRCSSCGQAFGQRRLLLLHQRSHHQVEHKGERD

SEQ ID NO: 53260 - protein, 238 aa, Homo sapiens
MAQPPPDVEGDDCLPAYRHLFCPDLLRDKVAFITGGGSGIGFRIAEIFMRHGCHTVIASRSLPRVLTAARKLAGATGRRCLPLSMDVRAPPAVMAAVDQALKEFGRIDILINCESVLSEAPAAPAVSHSAGAAGNFLCPAGALSFNAFKTVMDIDTSGTFNVSRVLYEKFFRDHGGVIVNITATLGNRGQALQVHAGSAKAAVDAMTRHLAVEWGPQNIRVNSLAPGPISGTEGLRRL

SEQ ID NO: 53261 - protein, 37 aa, Homo sapiens
MFHVSFRYIFGLPPLILVLLPVASSDCDIEGQHERNW

SEQ ID NO: 53262 - protein, 315 aa, Homo sapiens
MITSVSPSTSTNSSFLLTGFSGMEQQYPWLSIPFSSIYAMVLLGNCMVLHVIWTEPSLHQPMFYFLSMLALTDLCMGLSTVYTVLGILWGIIREISLDSCIAQSYFIHGLSFMESSVLLTMAFDRYIAICNPLRYSSILTNSRIIKIGLTIIGRSFFFITPPIICLKFFNYCHFHILSHSFCLHQDLLRLACSDIRFNSYYALMLVICILLLDAILILFSYILILKSVLAVASQEERHKLFQTCISHICAVLVFYIPIISLTMVHRFGKHLSPVAHVLIGNIYILFPPLMNPIIYSVKTQQIHTRMLRLFSLKRY

SEQ ID NO: 53263 - protein, 117 aa, Homo sapiens
MENTENSVDSKSIKNLEPKIIHGSESMDSGISLDNSYKMDYPEMGLCIIINNKNFHKSTGMTSRSGTDVDAANLRETFRNLKYEVRNKNDLTREEIVELMRDVSKEDHSKRSSFVCV

SEQ ID NO: 53264 - protein, 160 aa, Homo sapiens
MPKGRPNTMNNYGVLLHELGLDEPLMTPLRERFLQPLMALLYPDCGGGRLDSHRAFVVKYAPGQDLELGCHYDNAELTLNVALGKVFTGGALYFGGLFQAPTALTEPLEVEHVVGQGVLHRGGQLHGARPLGTGERWNLVVWLRASAVRNSLCPMCCREP

SEQ ID NO: 53265 - protein, 120 aa, Homo sapiens
MNRRRKFLLASVLALQNSSFIYPSCQKCFSRIILVSKRSNCPKCGSTGESGNANYRYKLSLKVAESNKLFVITVFGSCLDTFFGLTATGLHRILKTNLDKVQMPVTSYSNALTTKEKPKH

SEQ ID NO: 53266 - protein, 298 aa, Homo sapiens
MSSTQFNKGPSYGLSAEVKNRLLSKYDPQKEAELRTWIEGLTGLSIGPDFQKGLKDGTILCTLMNKLQPGSVPKINRSMQNWHQLENLSNFIKAMVSYGMNPVDLFEANDLFESGNMTQAKTKGLQSGVDIGVKYSEKQERNFDDATMKAGQCVIGLQMGTNKCASQSGMTAYGTRRHLYDPKNHILPPMDHSTISLQMGTNKCASQVGMTAPGTRRHIYDTKLGTDKCDNSSMSLQMGYTQGANQSGQVFGLGRQIYDPKYCPQGTVADGAPSGTGDCPDPGEVPEYPPYYQEEAGY

SEQ ID NO: 53267 - protein, 745 aa, Homo sapiens
MNGEADCPTDLEMAAPKGQDRWSQEDMLTLLECMKNNLPSNDSSKFKTTESHMDWEKVAFKDFSGDMCKLKWVEISNEVRKFRTLTELILDAQEHVKNPYKGKKLKKHPDFPKKPLTPYFRFFMEKRAKYAKLHPEMSNLDLTKILSKKYKELPEKKKMKYIQDFQREKQEFERNLARFREDHPDLIQNAKKSDIPEKPKTPQQLWYTHEKKVYLKVRPDEIMRDYIQKHPELNISEEGITKSTLTKAERQLKDKFDGRPTKPPPNSYSLYCAELMANMKDVPSTERMVLCSQQWKLLSQKEKDAYHKKCDQKKKDYEVELLRFLESLPEEEQQRVLGEEKMLNINKKQATSPASKKPAQEGGKGGSEKPKRPVSAMFIFSEEKRRQLQEERPELSESELTRLLARMWNDLSEKKKAKYKAREAALKAQSERKPGGEREERGKLPESPKRAEEIWQQSVIGDYLARFKNDRVKALKAMEMTWNNMEKKEKLMWIKKAAEDQKRYERELSEMRAPPAATNSSKKMKFQGEPKKPPMNGYQKFSQELLSNGELNHLPLKERMVEIGSRWQRISQSQKEHYKKLAEEQQKQYKVHLDLWVKSLSPQDRAAYKEYISNKRKSMTKLRGPNPKSSRTTLQSKSPRRMMKRMRMTRTRMKKRKMMRMGTPLKMAATPLSPAARTRARMGMRMKRMTRTKTTTRMTMRMKIMSPRAAAPAPPPQGTPQTLTPTEAQPHPRAARESPGAPLPN

SEQ ID NO: 53268 - protein, 144 aa, Homo sapiens
MMYGGMRGMKGLVYETSVLDPDEGIRFRGFSIPECQKLLPKAKGGEEPLPEGLFWLLVTGHIPTEEQVSWLSKEWAKRAALPSHVVTMLDNFPTNLHPMSQLSAAVTALNSESNFARAYAQGISRTKYWELIYEDSMDLIAKLP

SEQ ID NO: 53269 - protein, 148 aa, Homo sapiens
MRVTLATIAWMVSFVSNYSHTANILPDIENEDFIKDCVRIHNKFRSEVKPTASDMLYMTWDPALAQIAKAWASNCQFSHNTRLKPPHKLHPNFTSLGENIWTGSVPIFSVSSAITNWYDEIQDYDFKTRICKKVCGHYTQRELPNLAI

SEQ ID NO: 53270 - protein, 1236 aa, Homo sapiens
MFGDLFEEEYSTVSNNQYGKGKKLKTKALEPPAPREFTNLSGIRNQGGTCYLNSLLQTLHFTPEFREALFSLGPEELGLFEDKDKPDAKVRIIPLQLQRLFAQLLLLDQEAASTADLTDSFGWTSNEEMRQHDVQELNRILFSALETSLVGTSGHDLIYRLYHGTIVNQIVCKECKNVSERQEDFLDLTVAVKNVSGLEDALWNMYVEEEVFDCDNLYHCGTCDRLVKAAKSAKLRKLPPFLTVSLLRFNFDFVKCERYKETSCYTFPLRINLKPFCEQSELDDLEYIYDLFSVIIHKGGCYGGHYHVYIKDVDHLGNWQFQEEKSKPDVNLKDLQSEEEIDHPLMILKAILLEEENNLIPVDQLGQKLLKKIGISWNKKYRKQHGPLRKFLQLHSQIFLLSSDESTVRLLKNSSLQAESDFQRNDQQIFKMLPPESPGLNNSISCPHWFDINDSKVQPIREKDIEQQFQGKESAYMLFYRKSQLQRPPEARANPRYGVPCHLLNEMDAANIELQTKRAECDSANNTFELHLHLGPQYHFFNGALHPVVSQTESVWDLTFDKRKTLGDLRQSIFQLLEFWEGDMVLSVAKLVPAGLHIYQSLGGDELTLCETEIADGEDIFVWNGVEVGGVHIQTGIDCEPLLLNVLHLDTSSDGEKCCQVIESPHVFPANAEVGTVLTALAIPAGVIFINSAGCPGGEGWTAIPKEDMRKTFREQGLRNGSSILIQDSHDDNSLLTKEEKWVTSMNEIDWLHVKNLCQLESEEKQVKISATVNTMVFDIRIKAIKELKLMKELADNSCLRPIDRNGKLLCPVPDSYTLKEAELKMGSSLGLCLGKAPSSSQLFLFFAMGSDVQPGTEMEIVVEETISVRDCLKLMLKKSGLQGDAWHLRKMDWCYEAGEPLCEEDATLKELLICSGDTLLLIEGQLPPLGFLKVPIWWYQLQGPSGHWESHQDQTNCTSSWGRVWRATSSQGASGNEPAQVSLLYLGDIEISEDATLAELKSQAMTLPPFLEFGVPSPAHLRAWTVERKRPGRLLRTDRQPLREYKLGRRIEICLEPLQKGENLGPQDVLLRTQVRIPGERTYAPALDLVWNAAQGGTAGSLRQRVADFYRLPVEKIEIAKYFPEKFEWLPISSWNQQITKRKKKKKQDYLQGAPYYLKDGDTIGVKNLLIDDDDDFSTIRDDTGKEKQKQRALGRRKSQEALHEQSSYILSSAETPARPRAPETSLSIHVGSFR

SEQ ID NO: 53271 - protein, 103 aa, Homo sapiens
MSSAAADHWAWLLVLSFVFGCNVLRILLPSFSSFMSRVLQKDAEQESQMRAEIQDMKQELSTVNMMDEFARYARLERKINKMTDKLKTHGTVSLAAWRLHESG

SEQ ID NO: 53272 - protein, 46 aa, Homo sapiens
MLETLRERLLSVQQDFTSGSLSADKPLDCQCVPLACHLVEKQLISK

SEQ ID NO: 53273 - protein, 189 aa, Homo sapiens
  MOD_RES (1)..(1): Any amino acid
XKTSAGKHQQYDCKWYIPLADLVFPSPEESEASPQVHPFPDHELEDMKMKISALKSEIQKEKANKGQSRAIERLKKKMFENEFLLLLNSPTIPFRIHNRNGKSYLFLLSSDYERSEWREAIQKLQKKDLQAFVLSSVELQVLTGSCFKLRTVHNIPVTSNKDDLYCTLEVDSFGYFVSKAKTRVFRDTA

SEQ ID NO: 53274 - protein, 62 aa, Homo sapiens
MRSGKASCTLETVWEDKHKYEEAERRFYEHEATQAAASAQQLPAEGPAMNGPGQDDPEDADE

SEQ ID NO: 53275 - protein, 114 aa, Homo sapiens
MSGGGTETPVGCEAAPGGGSKKRDSLGTAGSAHLIIKDLGEIHSRLLDHRPVIQGETRYFVKEFEEKRGLREMRVLENLKNMIHETNEHTLPKCRDTMRDSLSQVLQRYEELSC

SEQ ID NO: 53276 - protein, 115 aa, Homo sapiens
MGEPQGSMRILVTGGSGLVGKAIQKVVADGAGLPGEDWVFVSSKDADLTWLAWPGCAWLCSWKNKHPPISSWKPAPSYQPGPGATLPFDCPSCHSPTQFLHLAPNPGVLVPSRAS

SEQ ID NO: 53277 - protein, 117 aa, Homo sapiens
MGGRRTKGGRGVGDGETAPGGRRTARELRVCTHAVCMCVQQIQALLAPPKTDEAEKRSRKPEKEPRRSGRATNHDSCDSCKEGGDLLCCDHCPAAFHLQCCNPPLSEEMLPPGEWMC

SEQ ID NO: 53278 - protein, 12 aa, Homo sapiens
MATHSPQKSHQC

SEQ ID NO: 53279 - protein, 267 aa, Homo sapiens
MGAAAAEADRTLFVGNLETKVTEELLFELFHQAGPVIKVKIPKDKDGKPKQFAFVNFKHEVSVPYAMNLLNGIKLYGRPIKIQFRSGSSHAPQDVSLSYPQHHVGNSSPTSTSPSSRYERTMDNMTSSAQIIQRSFSSPENFQRQAVMNSALRQMSYGGKFGSSPLDQSGFSPSVQSHSHSFNQSSSSQWRQGTPSSQRKVRMNSYPYLADRHYSREQRYTDHGSDHHYRGKRDDFFYEDRNHDDWSHDYDNRRDSSRDGKWRSSRH

SEQ ID NO: 53280 - protein, 155 aa, Homo sapiens
MAPVAITLVSDGTRCLLARQSSFPKGMYSALAGFCDIGESVEETIRREVAEEVGLEVESLQYYASQHWPFPSGSLMIACHATVKPGQTEIQVNLRELETAAWFSHDEVATALKRKGPYTQQQNGTFPFWLPPKLAISHQLIKEWVEKQTCSSLPA

SEQ ID NO: 53281 - protein, 78 aa, Homo sapiens
MTRENVAHNALRQEGLVKGKDDTWKWGTSFQGSSSSVWETSHLHFRQLRYHETSGPQEALSRLRELCRRWLRPEARTK

SEQ ID NO: 53282 - protein, 69 aa, Homo sapiens
  MOD_RES (1)..(1): Any amino acid
XKYKVWDSYGRPLYNSQPHEHPITSVAWAPDGELFAVGSFHTLRLCDKTGFLFHQMKDYKQAKVTYFKW

SEQ ID NO: 53283 - protein, 571 aa, Homo sapiens
MLETILRMLDNDSILVDAIRKIKDDVEYYVDSSQDPDFEENEFLYDDLDLEDIPQALVATSPPSHSHMEDEIFNQSSSTPTSTTSSSPIPPSPANCTTENSEDDKKRGRSTDSEVSQSPAKNGSKPVHSNQHPQSPAVPPTYPSGPPPAASALSTTPGNNGVPAPAAPPSALGPKASPAPSHNSGTPAPYAQAVAPPAPSGPSTTQPRPPSVQPSGGGGGGSGGGGSSSSSNSSAGGGAGKQNGATSYSSVVADSPAEVALSSSGGNNASSQALGPPSGPHNPPPSTSKEPSAAAPTGAGGVAPGSGNNSGGPSLLVPLPVNPPSSPTPSFSDAKAAGALLNGPPQFSTAPEIKAPEPLSSLKSMAERAAISSGIEDPVPTLHLTERDIILSSTSAPPASAQPPLQLSEVNIPLSLGVCPLGPVPLTKEQLYQQAMEEAAWHHMPHPSDSERIRQYLPRNPCPTPPYHHQMPPPHSDTVEFYQRLSTETLFFIFYYLEPRDVRTAWVDSEAGPLRHTSAPLPVAHWLTRGPSPALLQQPQSRPTPLCSSAHSQASLETTGELSSPLPTPLL

SEQ ID NO: 53284 - protein, 320 aa, Homo sapiens
MARPIQVKPADSESRGGRDRKLFVGMLNKQQSEEDVLRLFQPFGVIDECTVLRGPDGSSKGCAFVKFSSHTEAQAAIHALHGSQTMPGASSSLVVKFADTDKERTLRRMQQMVGQLGILTPSLTLPFSPYSAYAQALMQQQTTVLSTSGSYLSPGVAFSPCHIQQIGAVSLNGLPATPIAPASGLHSPPLLGTTAVPGLVAPITNGFAGVVPFPGGHPALETVYANGLVPYPAQSPTVAETLHPAFSGVQQYTAMYPTAAITPIAHSVPQPPPLLQQQQREGVWRHGADADVPTLRQYHFLQGVYGSSYQPEQVFRLREL

SEQ ID NO: 53285 - protein, 481 aa, Homo sapiens
MTPALTALLCLGLSLGPRTRVQAGPFPKPTLWAEPGSVISWGSPVTIWCQGSLEAQEYQLDKEGSPEPWDRNNPLEPKNKARFSIPSMTQHHAGRYRCHYYSSAGWSEPSDPLELVMTGFYNKPTLSALPSPVVASGGNMTLRCGSQKGYHHFVLMKEGEHQLPRTLDSQQLHSGGFQALFPVGPVTPSHRWRFTCYYYYTNTPWVWSHPSDPLEILPSGVSRKPSLLTLQGPVLAPGQSLTLQCGSDVGYDRFVLYKEGERDFLQRPGQQPQAGLSQANFTLGPVSPSHGGQYRCYGAHNLSSEWSAPSDPLNILMAGQIYDTVSLSAQPGPTVASGENVTLLCQSRGYFDTFLLTKEGAAHPPLRLRSMYGAHKYQAEFPMSPVTSAHAGTYRCYGSRSSNPHLLSHPSEPLELMVSGPSGGSSLPPTGPPSTPASHAKDYTVENLIRMGMAGLVLVFLGILLFEAQHSQRNPQDAAGR

SEQ ID NO: 53286 - protein, 465 aa, Homo sapiens
MLGICRGRRKFLAASLSLLCIPAITWIYLFSGSFEDGKPVSLSPLESQAHSPRYTASSQRERESLEVRMREVEEENRALRRQLSLAQGRAPSHRRGNHSKTYSMEEGTGDSENLRAGIVAGNSSECGQQPVVEKCETIHVAIVCAGYNASRDVVTLVKSVLFHRRNPLHFHLIADSIAEQILATLFQTWMVPAVRVDFYNADELKSEVSWIPNKHYSGIYGLMKLVLTKTLPANLERVIVLDTDITFATDIAELWAVFHKFKGQQVLGLVENQSDWYLGNLWKNHRPWPALGRGYNTGVILLLLDKLRKMKWEQMWRLTAERELMGMLSTSLADQDIFNAVIKQNPFLVYQLPCFWNVQLSDHTRSEQCYRDVSDLKVIHWNSPKKLRVKNKHVEFFRNLYLTFLEYDGNLLRRELFGCPSEADVNSENAPDAGGHLQALGGAHQPGPLPVRRRGPAVPPLRTGL

SEQ ID NO: 53287 - protein, 525 aa, Homo sapiens
MAAGLLGSEDPPWSWNLTCRALRTCQVRNIRVLQLLLKPWCISRAVYQMTEGRRCQVHLLDDRKLELLVQPKLLAKELLDLVASHFNLKEKEYFGIAFTDETGHLNWLQLDRRVLEHDFPKKSGPVVLYFCVRFYIESISYLKDNATIELFFLNAKSCIYKELIDVDSEVVFELASYILQEAKGDFSSNEVVRSDLKKLPALPTQALKEHPSLAYCEDRVIEHYKKLNGQTRGQAIVNYMSIVESLPTYGVHYYAVKDKQGIPWWLGLSYKGIFQYDYHDKVKPRKIFQWRQLENLYFREKKFSVEVHDPRRASVTRRTFGHSGIAVHTWYACPALIKSIWAMAISQHQFYLDRKQSKSKIHAARSLSEIAIDLTETGTLKTSKLANMGSKGKIISGSSGSLLSSGSQESDSSQSAKKDMLAALKSRQEALEETLRQRLEELKKLCLREAELTGKLPVEYPLDPGEEPPIVRRRIGTAFKLDEQKILPKGEEAELERLEREFAIQSQITEAARRLASDPNVSKKL

SEQ ID NO: 53288 - protein, 75 aa, Homo sapiens
MNIDDKLEGLFLKCGGIDEMQSSRTMVVMGGVSGQSTVSGELQDSVLQDRSMPHQEILAADEVLQESEMRQQDMI

SEQ ID NO: 53289 - protein, 1195 aa, Homo sapiens
MDALIIPVTMEVPCDSRGQRMWWAFLASSMVTFFGGLFIILLWRTLKYLWTVCCHCGGKTKEAQKINNGSSQADGTLKPVDEKEEAVAAEVGWMTSVKDWAGVMISAQTLTGRVLVVLVFALSIGALVIYFIDSSNPIESCQNFYKDFTLQIDMAFNVFFLLYFGLRFIAANDKLWFWLEVNSVVDFFTVPPVFVSVYLNRSWLGLRFLRALRLIQFSEILQFLNILKTSNSIKLVNLLSIFISTWLTAAGFIHLVENSGDPWENFQNNQALTYWECVYLLMVTMSTVGYGDVYAKTTLGRLFMVFFILGGLAMFASYVPEIIELIGNRKKYGGSYSAVSGRKHIVVCGHITLESVSNFLKDFLHKDRDDVNVEIVFLHNISPNLELEALFKRHFTQVEFYQGSVLNPHDLARVKIESADACLILANKYCADPDAEDASNIMRVISIKNYHPKIRIITQMLQYHNKAHLLNIPSWNWKEGDDAICLAELKLGFIAQSCLAQGLSTMLANLFSMRSFIKIEEDTWQKYYLEGVSNEMYTEYLSSAFVGLSFPTVCELCFVKLKLLMIAIEYKSANRESRILINPGNHLKIQEGTLGFFIASDAKEVKRAFFYCKACHDDITDPKRIKKCGCKRLIYFEDEQPSTLSPKKKQRNGGMRNSPNTSPKLMRHDPLLIPGNDQIDNMDSNVKKYDSTGMFHWCAPKEIEKVILTRSEAAMTVLSGHVVVCIFGDVSSALIGLRNLVMPLRASNFHYHELKHIVFVGSIEYLKREWETLHNFPKVSILPGTPLSRADLRAVNINLCDMCVILSANQNNIDDTSLQDKECILASLNIKSMQFDDSIGVLQANSQGFTPPGMDRSSPDNSPVHGMLRQPSITTGVNIPIITELAKPGKLPLVSVNQEKNSGTHILMITELVNDTNVQFLDQDDDDDPDTELYLTQPFACGTAFAVSVLDSLMSATYFNDNILTLIRTLVTGGATPELEALIAEENALRGGYSTPQTLANRDRCRVAQLALLDGPFADLGDGGCYGDLFCKALKTYNMLCFGIYRLRDAHLSTPSQCTKRYVITNPPYEFELVPTDLIFCLMQFDHNAGQSRASLSHSSHSSQSSSKKSSSVHSIPSTANRQNRPKSRESRDKQNATRMNRMGQEKKWFTDEPDNAYPRNIQIKPMSTHMANQINQYKSTSSLIPPIREVEDEC

SEQ ID NO: 53290 - protein, 102 aa, Homo sapiens
MADKVRRQRPRRRVCWALVAVLLADLLALSDTLAVMSVDLGSESMKVAIVKPGVPMEIVLNKESRRKTPVIVTLKENERFFGDSAASMAIKNPKATLRYFQH

SEQ ID NO: 53291 - protein, 721 aa, Homo sapiens
MLLPVFTLKLRHKISPRMVAIGRYDGTHPCLAAATQTGKVFIHNPHTRNQHVSASRVFQSPLESDVSLLSINQAVSCLTAGVLNPELGYDALLVGTQTNLLAYDVYNNSDLFYREVADGANAIVLGTLGDISSPLAIIGGNCALQGFNHEGSDLFWTVTGDNVNSLALCDFDGDGKKELLVGSEDFDIRVFKEDEIVAEMTETEIVTSLCPMYGSRFGYALSNGTVGVYDKTSRYWRIKSKNHAMSIHAFDLNSDGVNELITGWSNGKVDARSDRTGEVIFKDNFSSAIAGVVEGDYRMDGHIQLICCSVDGEIRGYLPGTAEMRGNLMDTSAEQDLIRELSQKKQNLLLELRNYEENAKAELASPLNEADGHRGIIPANTRLHTTLSVSLGNETQTAHTELRISTSNDTIIRAVLIFAEGIFTGESHVVHPSIHNLSSSICIPIVPPKDVPVDLHLKAFVGYRSSTQFHVFESTRQLPRFSMYALTSLDPASEPISYVNFTIAERAQRVVVWLGQNFLLPEDTHIQNAPFQVCFTSLRNGGHLHIKIKLSGEITINTDDIDLAGDIIQSMASFFAIEDLQVEADFPVYFEELRKVLVKVDEYHSVHQKLSADMADHSNLIRSLLVGAEDARLMRDMKTMKSRYMELYDLNRDLLNGYKIRCNNHTELLGNLKAVNQAIQRAGRLRVGKPKNQVITACRDAIRSNNINTLFKIMRVGTASS

SEQ ID NO: 53292 - protein, 141 aa, Homo sapiens
MSCAGRAGPARLAALALLTCSLWPARADNASQEYYTALINVTVQEPGRGAPLTFRIDRGRYGLDSPKAEVRGQVLAPLPLHGVADHLGCDPQTRFFVPPNIKQWIALLQRGNCTFKEKISRAAFHNAVAVVIYNNKSKEEN

SEQ ID NO: 53293 - protein, 205 aa, Homo sapiens
MPFDPQDTHQSRFYLSKKKWVMVPMMSLHHLTIPYFRDEELSCTVVELKYTGNASALFILPDQDKMEEVEAMLLPETLKRWRDSLEFREIGELYLPKFSISRDYNLNDILLQLGIEEAFTSKADLSGITGARNLAVSQVVHKAVLDVFEEGTEASAATAVKITLLSALVETRTIVRFNRPFLMIIVPTDTQNIFFMSKVTNPKQA

SEQ ID NO: 53294 - protein, 435 aa, Homo sapiens
MPFIEAFRQFQFKVKRENFCNIHVSLVPQPSSTGEQKTKPTQNSVRELRGLGLSPDLVVCRCSNPLDTSVKEKISMFCHVEPEQVICVHDVSSIYRVPLLLEEQGVVDYFLRRLDLPIERQPRKMLMKWKEMADRYDRLLETCSIALVGKYTKFSDSYASVIKALEHSALAINHKLEIKYIDSADLEPITSQEEPVRYHEAWQKLCSAHGVLVPGGFGVRGTEGKIQAIAWARNQKKPFLGVCLGMQLAVVEFSRNVLGWQDANSTEFDPTTSHPVVVDMPEHNPGQMGGTMRLGKRRTLFQTKNSVMRKLYGDADYLEERHRHRFEVNPVWKKCLEEQGLKFVGQDVEGERMEIVELEDHPFFVGVQYHPEFLSRPIKPSPPYFGLLLASVGRLSHYLQKGCRLSPRDTYSDRSGSSSPDSEITELKFPSINHD

SEQ ID NO: 53295 - protein, 45 aa, Homo sapiens
MEGNRDEAEKCVEIAREALNAGNREKAQRFLQKAEKLYPLPSARA

SEQ ID NO: 53296 - protein, 377 aa, Homo sapiens
  MOD_RES (1)..(1): Any amino acid
XSTKGPSVFPLAPCSRSTSGGTAALGCLVKDYFPEPVTVSWNSGALTSGVHTFPAVLQSSGLYSLSSVVTVPSSSLGTQTYTCNVNHKPSNTKVDKRVELKTPLGDTTHTCPRCPEPKSCDTPPPCPRCPEPKSCDTPPPCPRCPEPKSCDTPPPCPRCPAPELLGGPSVFLFPPKPKDTLMISRTPEVTCVVVDVSHEDPEVQFKWYVDGVEVHNAKTKPREEQYNSTFRVVSVLTVLHQDWLNGKEYKCKVSNKALPAPIEKTISKTKGQPREPQVYTLPPSREEMTKNQVSLTCLVKGFYPSDIAVEWESSGQPENNYNTTPPMLDSDGSFFLYSKLTVDKSRWQQGNIFSCSVMHEALHNRFTQKSLSLSPGK

SEQ ID NO: 53297 - protein, 126 aa, Homo sapiens
MPTSPDGRIPGEPARGPAARPGRTGGRISAPGERCTGGLPRAEPEPERAPGEASLGVAPHRNPPGCSATRSPGHAAVSNLDIESKLSVYYRAPWHQQRNIFLPATRPPCVEELHRHARQSLQALRR

SEQ ID NO: 53298 - protein, 23 aa, Homo sapiens
MAGQMPHSHQYSDRRQPNISDQQ

SEQ ID NO: 53299 - protein, 416 aa, Homo sapiens
MVPWVRTMGQKLKQRLRLDVGREICRQYPLFCFLLLCLSAASLLLNRYIHILMIFWSFVAGVVTFYCSLGPDSLLPNIFFTIKYKPKQLGLQELFPQGHSCAVCGKVKCKRHRPSLLLENYQPWLDLKISSKVDASLSEVLELVLENFVYPWYRDVTDDESFVDELRITLRFFASVLIRRIHKVDIPSIITKKLLKAAMKHIEVIVKARQKVKNTEFLQQAALEEYGPELHVALRSRRDELHYLRKLTELLFPYILPPKATDCRSLTLLIREILSGSVFLPSLDFLADPDTVNHLLIIFIDDSPPEKATEPASPLVPFLQKFAEPRNKKPSVLKLELKQIREQQDLLFRFMNFLKQEGAVHVLQFCLTVVVWARRSGSCLQSQHFGRPRQVDHLKSGVRDQPGQHSETLSRQKYKN

SEQ ID NO: 53300 - protein, 1659 aa, Homo sapiens
MLISKNMPWRRLQGISFGMYSAEELKKLSVKSITNPRYLDSLGNPSANGLYDLALGPADSKEVCSTCVQDFSNCSGHLGHIELPLTVYNPLLFDKLYLLLRGSCLNCHMLTCPRAVIHLLLCQLRVLEVGALQAVYELERILNRFLEENPDPSASEIREELEQYTTEIVQNNLLGSQGAHVKNVCESKSKLIALFWKAHMNAKRCPHCKTGRSVVRKEHNSKLTITFPAMVHRTAGQKDSEPLGIEEAQIGKRGYLTPTSAREHLSALWKNEGFFLNYLFSGMDDDGMESRFNPSVFFLDFLVVPPSRYRPVSRLGDQMFTNGQTVNLQAVMKDVVLIRKLLALMAQEQKLPEEVATPTTDEEKDSLIAIDRSFLSTLPGQSLIDKLYNIWIRLQSHVNIVFDSEMDKLMMDKYPGIRQILEKKEGLFRKHMMGKRVDYAARSVICPDMYINTNEIGIPMVFATKLTYPQPVTPWNVQELRQAVINGPNVHPGASMVINEDGSRTALSAVDMTQREAVAKQLLTPATGAPKPQGTKIVCRHVKNGDILLLNRQPTLHRPSIQAHRARILPEEKVLRLHYANCKAYNADFDGDEMNAHFPQSELGRAEAYVLACTDQQYLVPKDGQPLAGLIQDHMVSGASMTTRGCFFTREHYMELVYRGLTDKVGRVKLLSPSILKPFPLWTGKQVVSTLLINIIPEDHIPLNLSGKAKITGKAWVKETPRSVPGFNPDSMCESQVIIREGELLCGVLDKAHYGSSAYGLVHCCYEIYGGETSGKVLTCLARLFTAYLQLYRGFTLGVEDILVKPKADVKRQRIIEESTHCGPQAVRAALNLPEAASYDEVRGKWQDAHLGKDQRDFNMIDLKFKEEVNHYSNEINKACMPFGLHRQFPENSLQMMVQSGAKGSTVNTMQISCLLGQIELEGRRPPLMASGKSLPCFEPYEFTPRAGGFVTGRFLTGIKPPEFFFHCMAGREGLVDTAVKTSRSGYLQRCIIKHLEGLVVQYDLTVRDSDGSVVQFLYGEDGLDIPKTQFLQPKQFPFLASNYEVIMKSQHLHEVLSRADPKKALHHFRAIKKWQSKHPNTLLRRGAFLSYSQKIQEAVKALKLESENRNGRSPGTQEMLRMWYELDEESRRKYQKKAAACPDPSLSVWRPDIYFASVSETFETKVDDYSQEWAAQTEKSYEKSELSLDRLRTLLQLKWQRSLCEPGEAVGLLAAQSIGEPSTQMTLNTFHFAGRGEMNVTLGIPRLREILMVASANIKTPMMSVPVLNTKKALKRVKSLKKQLTRVCLGEVLQKIDVQESFCMEEKQNKFQVYQLRFQFLPHAYYQQEKCLRPEDILRFMETRFFKLLMESIKKKNNKASAFRNVNTRRATQRDLDNAGELGRSRGEQEGDEEEEGHIVDAEAEEGDADASDAKRKEKQEEEVDYESEEEEEREGEENDDEDMQEERNPHREGARKTQEQDEEVTVKLPLMKINFDMSSLVVSLAHGAVIYATKGITRCLLNETTNNKNEKELVLNTEGINLPELFKYAEVLDLRRLYSNDIHAIANTYGIEAALRVIEKEIKDVFAVYGIAVDPRHLSLVADYMCFEGVYKPLNRFGIRSNSSPLQQMTFETSFQFLKQATMLGSHDELRSPSACLVVGKVVRGGTGLFELKQPLR

SEQ ID NO: 53301 - protein, 230 aa, Homo sapiens
MMETERLVLPPPDPLDLPLRAVELGCTGHWELLNLPGAPESSLPHGLPPCAPDLQQEAEQLFLSSPAWLPLHGVEHSARKWQRKTDPWSLLAVLGAPVPSDLQAQRHPTTGQILGYKEVLLENTNLSATTSLSLRRPPGPASQSLWGNPTQYPFWPGGMDEPTITDLNTREEAEEEIDFEKDLLTIPPGFKKGMDFAPKGSVHSCIHPRGPRASISGAVGHPCGRHLPCW

SEQ ID NO: 53302 - protein, 1047 aa, Homo sapiens
MDAAGRGCHLLPLPAARGPARAPAAAAAAAASPPGPCSGAACAPSAAAGAGAMNPSSSAGEEKGATGGSSSSGSGAGSCCLGAEGGADPRGAGSAAAAGAAALDEPAAAGQKEKDEALEEKLRNLTFRKQVSYRKAISRAGLQHLAPAHPLSLPVANGPAKEPRATLDWSENAVNGEHLWLETNVSGDLCYLGEENCQVRFAKSALRRKCAVCKIVVHTACIEQLEKINFRCKPTFREGGSRSPRENFVRHHWVHRRRQEGKCKQCGKGFQQKFSFHSKEIVAISCSWCKQAFHNKVTCFMLHHIEEPCSLGAHAAVIVPPTWIIKVKKPQNSLKASNRKKKRTSFKRKASKRGMEQENKGRPFVIKPISSPLMKPLLVFVNPKSGGNQGTKVLQMFMWYLNPRQVFDLSQEGPKDALELYRKVPNLRILACGGDGTVGWILSILDELQLSPQPPVGVLPLGTGNDLARTLNWGGGYTDEPVSKILCQVEDGTVVQLDRWNLHVERNPDLPPEELEDGVCKLPLNVFNNYFSLGFDAHVTLEFHESREANPEKFNSRFRNKMFYAGAAFSDFLQRSSRDLSKHVKVVCDGTDLTPKIQELKFQCIVFLNIPRYCAGTMPWGNPGDHHDFEPQRHDDGYIEVIGFTMASLAALQVGGHGERLHQCREVMLLTYKSIPMQVDGEPCRLAPAMIRISLRNQANMVQKSKRRTSMPLLNDPQSVPDRLRIRVNKISLQDYEGFHYDKEKLREASIPLGILVVRGDCDLETCRMYIDRLQEDLQSVSSGSQRVHYQDHETSFPRALSAQRLSPRWCFLDDRSQEHLHFVMEISQDEIFILDPDMVVSQPAGTPPGMPDLVVEQASGISDWWNPALRKRMLSDSGLGMIAPYYEDSDLKDLSHSRVLQSPVSSEDHAILQAVIAGDLMKLIESYKNGGSLLIQGPDHCSLLHYAAKTGNGEIVKYILDHGPSELLDMADSETGETALHKAACQRNRAVCQLLVDAGASLRKTDSKGKTPQERAQQAGDPDLAAYLESRQNYKVIGHEDLETAV

SEQ ID NO: 53303 - protein, 58 aa, Homo sapiens
MSLHRQMGSDRDLQSSASSVSLPSVKKAPKKRRISIGSLFRRKKDNKRKSRELNGGVD

SEQ ID NO: 53304 - protein, 180 aa, Homo sapiens
  MOD_RES (1)..(1): Any amino acid
XINFPKKACPCASSAQVLQELLSRIEMLEREVSVLRDQCNANCCQESAATVAPPEDLRVAGISDRSIELEWDGPMAVTEYVISYQPTALGGLQLQQRVPGDWSGVTITELEPGLTYNISVYAVISNILSLPITAKVATHLSTPQGLQFKTITETTVEVQWEPFSFSFDGWEISFIPKNNE

SEQ ID NO: 53305 - protein, 54 aa, Homo sapiens
GSEKAEEGGETEAQKEGSEDVGNLPEAQEKNKMEAMKQHFKCLSTNQTQQNTLA

SEQ ID NO: 53306 - protein, 30 aa, Homo sapiens
  MOD_RES (1)..(1): Any amino acid
XLLRKDCFQGLIQELGQIAKAHETVADATA

SEQ ID NO: 53307 - protein, 87 aa, Homo sapiens
MKNISRYLTDIKPLPPNIKDRLIKIMSMQGQITDSNISEILHPEVQTLDLRSCDISDAALLHLSNCRKLKKLNLNASKGNRVSVTSE

SEQ ID NO: 53308 - protein, 151 aa, Homo sapiens
MVRLPLQCVLWGCLLTAVHPEPPTACREKQYLINSQCCSLCQPGQKLVSDCTEFTETECLPCGESEFLDTWNRETHCHQHKYCDPNLGLRVQQKGTSETDTICTCEEGWHCTSEACESCVLHRSCSPGFGVKQIDICQPHFPKDRGLNLLM

SEQ ID NO: 53309 - protein, 284 aa, Homo sapiens
  MOD_RES (1)..(1): Any amino acid
XGVQMKLEFLQRKFWAATRQCSTVDGPCTQSCEDSDLDCFVIDNNGFILISKRSRETGRFLGEVDGAVLTQLLSMGVFSQVTMYDYQAMCKPSSHHHSAAQPLPISAFLTATRWLLQELVLFLLEWSVWGSWYDRGAEAKSVFHHSHKHKKQDPLQPCDTEYPVFVYQPAIREANGIVECGPCQKVFVVQQIPNSNLLLLVTDPTCDCSIFPPVLQEATEVKYNASVKCDRMRSQKLRRRPDSCHAFHPEENAQDCGGASDTSASPPLLLLPVCAWGLLPQLLR

SEQ ID NO: 53310 - protein, 947 aa, Homo sapiens
MLYGMKIANLAYVTKTRVRFFRLDRWADVRFPEKRRMKLGSDISKHHKSLLAKIFYDRAEYLHGKHGVDVEVQGPHEARDGQLLIRLDLNRKEVLTLRLRNGGTQSVTLTHLFPLCRTPQFAFYNEDQELPCPLGPGECYELHVHCKTSFVGYFPATVLWELLGPGESGSEGAGTFYIARFLAAVAHSPLAAQLKPMTPFKRTRITGNPVVTNRIEEGERPDRAKGYDLELSMALGTYYPPPRLRQLLPMLLQGTSIFTAPKEIAEIKAQLETALKWRNYEVKLRLLLHLEELQMEHDIRHYDLESVPMTWDPVDQNPRLLTLEVPGVTESRPSVLRGDHLFALLSSETHQEDPITYKGFVHKVELDRVKLSFSMSLLSRFVDGLTFKVNFTFNRQPLRVQHRALELTGRWLLWPMLFPVAPRDVPLLPSDVKLKLYDRSLESNPEQLQAMRHIVTGTTRPAPYIIFGPPGTGKTVTLVEAIKQVVKHLPKAHILACAPSNSGADLLCQRLRVHLPSSIYRLLAPSRDIRMVPEDIKPCCNWDAKKGEYVFPAKKKLQEYRVLITTLITAGRLVSAQFPIDHFTHIFIDEAGHCMEPESLVAIAGLMEVKETGDPGGQLVLAGDPRQLGPVLRSPLTQKHGLGYSLLERLLTYNSLYKKGPDGYDPQFITKLLRNYRSHPTILDIPNQLYYEGELQACADVVDRERFCRWAGLPRQGFPIIFHGVMGKDEREGNSPSFFNPEEAATVTSYLKLLLAPSSKKGKARLSPRSVGVISPYRKQVEKIRYCITKLDRELRGLDDIKDLKVGSVEEFQGQERSVILISTVRSSQSFVQLDLDFNLGFLKNPKRFNVAVTRAKALLIIVGNPLLLGHDPDWKVFLEFCKENGGYTGCPFPAKLDLQQGQNLLQGLSKLSPSTSGPHSHDYLPQEREGEGGLSLQVEPEWRNEL

SEQ ID NO: 53311 - protein, 225 aa, Homo sapiens
MSRPKNQNYKGHGLSKGKEREQRASIRFKTTLMNTLMDVLRHRPGWVEVKDEGEWDFYWCDVSWLRENFDHTYMDEHVRISHFRNHYELTRKNYMVKNLKRFRKQLEREAGKLEAAKCDFFPKTFEMPCEYHLFVEEFRKNPGITWIMKPVARSQGKGIFLFRRLKDIVDWRKGTTGKSSAAWRPSLPGARSVPLAATTQEALTTRKMIFPWRTMWLSVTLKILT

SEQ ID NO: 53312 - protein, 95 aa, Homo sapiens
  MOD_RES (1)..(1): Any amino acid
XVPEWVNTPSTCCLKYYEKVLPRRLVVGYRKALNCHLPAIIFVTKRNREVCTNPNDDWVQEYIKDPNLPLLPTRNLSTVKIITAKNGQPQLLNSQ

SEQ ID NO: 53313 - protein, 732 aa, Homo sapiens
MGIKVQRPRCFFDIAINNQPAGRVVFELFSDVCPKTCENFRCLCTGEKGTGKSTQKPLHYKSCLFHRVVKDFMVQGGDFSEGNGRGGESIYGGFFEDESFAVKHNKEFLLSMANRGKDTNGSQFFITTKPTPHLDGHHVVFGQVISGQEVVREIENQKTDAASKPFAEVRILSCGELIPKSKVKKEEKKRHKSSSSSSSSSSDSDSSSDSQSSSDSSDSESATEEKSKKRKKKHRKNSRKHKKEKKKRKKSKKSASSESEAENLEAQPQSTVRPEEIPPIPENRFLMRKSPPKADEKERKNRERERERECNPPNSQPASYQRRLLVTRSGRKIKGRGPRRYRTPSRSRSRDRFRRSETPPHWRSELNEIKENQRSPVRVKERKITDHRNVSESPNRKNEKEKKVKDHKSNSKERDIRRNSEKDDKYKNKVKKRAKSKSRSKSKEKSKSKERDSKHNRNEEKRMRSRSKGRDHENVKEKEKQSDSKGKDQERSRSKEKSKQLESKSNEHDHSKSKEKDRRAQSRSRECDITKGKHSYNSRTRERSRSRDRSRRVRSRTHDRDRSRSKEYHRYREQEYRRRGRSRSRERRTPPGRSRSKDRRRRRRDSRSSEREESQSRNKDKYRNQESKSSHRKENSESEKRMYSKSRDHNSSNNSREKKADRDQSPFSKIKQSSQDNELKSSMLKNKEDEKIRSSVEKENQKSKGQENDHVHEKNKKFDHESSPGTDEDKSG

SEQ ID NO: 53314 - protein, 110 aa, Homo sapiens
MAAPPKAPIRVRNLTIRAGALTGKENNMLQPETHIFTAPEEGSSQGALLLGQAPEPLSLPCTPVTLEQQLVSPSGDPHRAPALPSICSTLILQPCATLDPLLLQPQVLGK

SEQ ID NO: 53315 - protein, 381 aa, Homo sapiens
MSDNQSWNSSGSEEDPETESGPPVERCGVLSKWTNYIHGWQDRWVVLKNNALSYYKSEDETEYGCRGSICLSKAVITPHDFDECRFDISVNDSVWYLRAQDPDHRQQWIDAIEQHKTESGYGSESSLRRHGSMVSLVSGASGYSATSTSSFKKGHSLREKLAEMETFRDILCRQVDTLQKYFDACADAVSKDELQRDKVVEDDEDDFPTTRSDGDFLHSTNGNKEKLFPHVTPKGINGIDFKGEAITFKATTAGILATLSHCIELMVKREDSWQKRLDKETEKKRRTEEAYKNAMTELKKKSHFGGPDYEEGPNSLINEEEFFDAVEAALDRQDKIEEQSLALLPRLECSGAISAYCNFHLLGSSDSSASASRVAGTTVTE

SEQ ID NO: 53316 - protein, 86 aa, Homo sapiens
MLYFSLFWAARPLQRCGQLVRMAIRAQHSNAAQTQTGEANRGWTGQESLSDSDPEMWELLQREKDRQCRGLELIASEILWGSRGGG

SEQ ID NO: 53317 - protein, 112 aa, Homo sapiens
MEASALTSSAVTSVAKVVRVASGSAVVLPLVVAMAAVPMVLSAMGFTAAGIASSSIAAKMMSAAAIANGGGVASGSLVATLQSLGATGLSGLTKFILGSIGSAIAAVIARFY

SEQ ID NO: 53318 - protein, 254 aa, Homo sapiens
MEVAEPSSPTEEEEEEEEHSAEPRPRTRSNPEGAEDRAVGAQASVGSRSEGEGEAASADDGSLNTSGAGPKSWQVPPPAPEVQIRTPRVNCPEKVIICLDLSEEMSLPKLESFNGQQKTELPVTENVQTIPPPYVVRTILVYSRPPCQPQFSLTEPMKKMFQCPYFFFDVVYIHNGTEEKEEEMSWKDMFAFMGSLDTKGTSYKYEVALAGPALELHNCMAKLLAHPLQRPCQSHASYSLLEEEDEAIEVEATV

SEQ ID NO: 53319 - protein, 72 aa, Homo sapiens
MSVIFFACVVRVRDGLPLSASTDFYHTQDFLEWRRRLKSLALRLAQYPGRGSAEGCDFSIQDKVLPCCPGWS

SEQ ID NO: 53320 - protein, 133 aa, Homo sapiens
MSGPVPSRARVYTDVNTHRPREYWDYESHVVEWGNQDDYQLVRKLGRGKYSEVFEAINITNNEKVVVKILKPVKKKKIKREIKILENLRGGPNIITLADIVKDPVSRTPALVFEHVNNTDFKQLYQTLTDYDI

SEQ ID NO: 53321 - protein, 146 aa, Homo sapiens
MCSQDYLMLATLDENEEVIDGGKKGAIDDLQQGELEAFIQNLNLAKYTKASLVEEDEPAEKENSSKKEVKIPKINNKNTAESQRTSVNKVKNKNRPEPHSDENGSTTPKVKKDKQNIFEFFERQTLLLRPGGKWYDLEYSNEYSLK

SEQ ID NO: 53322 - protein, 127 aa, Homo sapiens
  MOD_RES (1)..(1): Any amino acid
XHDDLYLNASSFLALINGERDHPNATVWRKNFLRVGHLVLIGGPDDGVITPWQSSFFGFYDANETVLEMEEQLPARPTHQSELLLLRLVCLKPPRRKKPGGNGEREEACRVQRQSESWGPGLSCALS

SEQ ID NO: 53323 - protein, 402 aa, Homo sapiens
  MOD_RES (1)..(1): Any amino acid
XGRGTRRMSPATTGTFLLTVYSIFSKVHSDRNVYPSAGVLFVHVLEREYFKGEFPPYPKPGEISNDPITFNTNLMGYPDRPGWLRYIQRTPYSDGVLYGSPTAENVGKPTIIEITAYNRRTFETARHNLIINIMSAEAEFFIKNMNVEEMLASEVLGDFLGAVKNVWQPERLNAINITSALDRGGRVPLPINDLKEGVYVMVGADVPFSSCLREVENPQNQLRCSQEMEPVITCDKKFRTQFYIDWCKISLVDKTKQVSTYQEVIRGEGILPDGGEYKPPSDSLKSRDYYTDFLITLAVPSAVALVLFLILAYIMCCRREGVEKRNMQTPDIQLVHHSAIQKSTKELRDMSKNREIAWPLSTLPVFHPVTGEIIPPLHTDNYDSTNMPLMQTQQNLPHQTQI

SEQ ID NO: 53324 - protein, 110 aa, Homo sapiens
MGCTLSAEERAALERSKAIEKNLKEDGISAAKDVKLLLLGAGESGKSTIVKQMNPSGSLNKVLRHLSSAKDTYSLTRQRCLATTHNSQGAVRRGGSSMAYKAHAPLKAGD

SEQ ID NO: 53325 - protein, 118 aa, Homo sapiens
MGEPQGSMRILVTGGSGLVGKAIQKVVADGAGLPGEDWVFVSSKDADLTDTAQTRALFEKVQPTHVIHLAAMVGGLFRNIKYNLDFWRKNVHMNDNVLHSAFEVGARKVVSCLSTCIF

SEQ ID NO: 53326 - protein, 228 aa, Homo sapiens
MQTSYFDQQRVEREKARKGPGCGAVRRPWRLHAPFRKEPRGRRILHLDLSRRPRTFCLRYQGRGVLFDPRPGRRWWPKGPAESSPNSGGRGARGDVHQLFPKKAAEEPAWEMGRPSIPLAQSEAFLTDLLEKVCERMNDYKLEEDPVTKERTFKRFAPRKGDKIYQEFKKLYFYSDAYRPLKFACETIIEEYEDEISSLIAQETHYLADKLCSEKSDLCETSANHTEL

SEQ ID NO: 53327 - protein, 64 aa, Homo sapiens
MGSWVQLITSVGVQQNHPGWTVAGQFQEKKRFTEEVIEYFQKKVSPVHLKILLTSDEAWKRFVR

SEQ ID NO: 53328 - protein, 612 aa, Homo sapiens
MARRPRHSIYSSDEDDEDFEMCDHDYDGLLPKSGKRHLGKTRWTREEDEKLKKLVEQNGTDDWKVIANYLPNRTDVQCQHRWQKVLNPELIKGPWTKEEDQRVIELVQKYGPKRWSVIAKHLKGRIGKQCRERWHNHLNPEVKKTSWTEEEDRIIYQAHKRLGNRWAEIAKLLPGRTDNAIKNHWNSTMRRKVEQEGYLQESSKASQPAVATSFQKNSHLMGFAQAPPTAQLPATGQPTVNNDYSYYHISEAQNVSSHVPYPVALHVNIVNVPQPAAAAIQRHYNDEDPEKEKRIKELELLLMSTENELKGQQVLPTQNHTCSYPGWHSTTIADHTRPHGDSAPVSCLGEHHSTPSLPADPGSLPEESASPARCMIVHQGTILDNVKNLLEFAETLQFIDSFLNTSSNHENSDLEMPSLTSTPLIGHKLTVTTPFHRDQTVKTQKENTVFRTPAIKRSILESSPRTPTPFKHALAAQEIKYGPLKMLPQTPSHLVEDLQDVIKQESDESGIVAEFQENGPPLLKKIKQEVESPTDKSGNFFCSHHWEGDSLNTQLFTQTSPVADAPNILTSSVLMAPASEDEDNVLKAFTVPKNRSLASPLQATKAQRLFQF

SEQ ID NO: 53329 - protein, 713 aa, Homo sapiens
MIEDSGKRGNTMAERRQLFAEMRAQDLDRIRLSTYRTACKLRFVQKKCNLHLVDIWNVIEALRENALNNLDPNTELNVSRLEAVLSTIFYQLNKRMPTTHQIHVEQSISLLLNFLLAAFDPEGHGKISVFAVKMALATLCGGKIMDKLRYIFSMISDSSGVMVYGRYDQFLREVLKLPTAVFEGPSFGYTEQSARSCFSQQKKVTLNGFLDTLMSDPPPQCLVWLPLLHRLANVENVFHPVECSYCHSESMMGFRYRCQQCHNYQLCQDCFWRGHAGGSHSNQHQMKEYTSWKSPAKKLTNALSKSLSCASSREPLHPMFPDQPEKPLNLAHIVPPRPVTSMNDTLFSHSVPSSGSPFITRRLPEGISASSPVAEEHSLIKLYVNQLDHGARMLESSNRLDEEHRLIARYAARLAAESSSSQPPQQRSAPDISFTIDANKQQRQLIAELENKNREILQEIQRLRLEHEQASQPTPEKAQQNPTLLAELRLLRQRKDELEQRMSALQESRRELMVQLEGLMKLLKTQGAGSPRSSPSHTISRPIPMPIRSASACSTPTHTPQDSLTGVGGDVQEAFAQSSRRNLRNDLLVAADSITNTMSSLVKELNSEVGSETESNVDSEFARTQFEDLVPSPTSEKAFLAQIHARKPGYIHSGATTSTMRGDMVTEDADPYVQPEDENYENDSVRQLENELQMEEYLKQKLQDEAYQVSLQG

SEQ ID NO: 53330 - protein, 227 aa, Homo sapiens
MAMSSGGSGGGVPEQEDSVLFRRGTGQSDDSDIWDDTALIKAYDKAVASFKHALKNGDICETSGKPKTTPKRKPAKKNKSQKKNTAASLQQNENESQVSTDESENSRSPGNKSDNIKPKSAPWNSFLPPPPPMPGPRLGPGKPGLKFNGPPPPPPPPPPHLLSCWLPPFPSGPPIIPPPPPICPDSLDDADALGSMLISWYMSGYHTGYYMGFRQNQKEGRCSHSLN

SEQ ID NO: 53331 - protein, 41 aa, Homo sapiens
MQQVLENLTELPSSTGAEEIDLIFLKGIMENPIVKSLAKGL

SEQ ID NO: 53332 - protein, 246 aa, Homo sapiens
MSSSVKTPALEELVPGSEEKPKGRSPLSWGSLFGHRSEKIVFAKSDGGTDENVLTVTITETTVIESDLGVWSSRALLYLTLWFFFSFCTLFLNKYILSLLGGEPSMLGAVQMLSTTVIGCVKTLVPCCLYQHKARLSYPPNFLMTMLFVGLMRFATVVLGLVSLKNVAVSFAETVKSSAPIFTVIMSRMILGEYTGRPSDREEWEELQLQPGRGAAASDRRSPVPPSERHGVRPHGENLPGDFQAQ

SEQ ID NO: 53333 - protein, 66 aa, Homo sapiens
MKKSPEIISGRMTFALCCYSLTFMRFAYKVQPRNWLLFACHATNEVAQLIQGGRLIKHEMTKTASA

SEQ ID NO: 53334 - protein, 286 aa, Homo sapiens
MALVLILQLLTLWPLCHTDITPSVAIIVPPASYHPKPWLGAQPATVVTPGVNVTLRCRAPQPAWRFGLFKPGEIAPLLFRDVSSELAEFFLEEVTPAQGGSYRCCYRRPDWGPGVWSQPSDVLELLVTEELPRPSLVALPGPVVGPGANVSLRCAGRLRNMSFVLYREGVAAPLQYRHSAQPWADFTLLGARAPGTYSCYYHTPSAPYVLSQRSEVLVISWEGEGPEARPASSAPGMQAPGPPPSDPGAQAPSLSSFRPRGLVLQPLLPQTQDSWDPAPPPSDPGV

SEQ ID NO: 53335 - protein, 153 aa, Homo sapiens
MAAVAAGGLVGKGRDISLAALQRHDPYINRIVDVASQVALYTFGHRANEWEKTDVEGTLFVYTRSASPKHGFTIMNRLSMENRTEPITKDLDFQLQDPFLLYRNARCESFLLQWVVLLLKFGQVFKIVQCLPLCLHLVSVAMGGVSILTNVNV

SEQ ID NO: 53336 - protein, 178 aa, Homo sapiens
MLRAGAPTGDLPRAGEVHTGTTIMAVEFDGGVVMGSDSRVSAGIELEEPPLVLAAANVVRNISYKYREDLSAHLMVAGWDQREGGQVYGTLGGMLTRQPFAIGGSGSTFIYGYVDAAYKPGMSPEECRRFTTDATSTKRRVCGYFLRTQKRENQNQRVHEYMCTSERSLSSSPLLSCS

SEQ ID NO: 53337 - protein, 50 aa, Homo sapiens
MDLVVKTVPVPDTGDSVELFIFDSAGKELFSEMLDKLWESPNVLCLVYDV

SEQ ID NO: 53338 - protein, 195 aa, Homo sapiens
MEEICSYEEVKEVFENKEKTMEFWKGYPNAVYSVRDPSQSSDAMYVVVPLLGVALLIVIALFIIWRCQLQKATRHHPSYAQNRYLASRAGHTLPRVMVYRGTVHSQGEPSGHREAANSPQVVLGPSRGGRTTVRLESTLYLPELSLSRLSSTTPPPSYEEVTAPQESSSEEASVSYSDPPPKYEEIVAANPGADK

SEQ ID NO: 53339 - protein, 325 aa, Homo sapiens
MKEMVGGCCVCSDERGWAENPLVYCDGHACSVAVHQACYGIVQVPTGPWFCRKCESQERAARVRCELCPHKDGALKRTDNGGWAHVVCALYIPEVQFANVLTMEPIVLQYVPHDRFNKTCYICEEQGRESKAASGACMTCNRHGCRQAFHVTCAQMAGLLCEEEVLEVDNVKYCGYCKYHFSKMKTSRHSSGGGGGGAGGGGGSMGGGGSGFISGRRSRSASPSTQQEKHPTHHERGQKKSRKDKERLKQKHKKRPESPPSILTPPVVPTADKPRRGHQSPTNHGIGSLGCCLPDTPICLCPEGLSPGLLSAESGGRHSGLLSKF

SEQ ID NO: 53340 - protein, 427 aa, Homo sapiens
MSLMVVSMACVGLFLVQRAGPHMGGQDKPFLSAWPSAVVPRGGHVTLRCHYRHRFNNFMLYKEDRIHIPIFHGRIFQESFNMSPVTTAHAGNYTCRGSHPHSPTGWSAPSNPVVIMVTGNHRKPSLLAHPGPLVKSGERVILQCWSDIMFEHFFLHKEGISKDPSRLVGQIHDGVSKANFSIGPMMLALAGTYRCYGSVTHTPYQLSAPSDPLDIVVTGPYEKPSLSAQPGPKVQAGESVTLSCSSRSSYDMYHLSREGGAHERRLPAVRKVNRTFQADFPLGPATHGGTYRCFGSFRHSPYEWSDPSDPLLVSVTGNPRHLHILIGTSVVIILFILLLFFLLHLWCSNKKNAAVMDQEPAGNRTANSEDSDEQDPEEVTYAQLDHCVFTQRKITRPSQRPKTPPTDTILYTELPNAKPRSKVVSCP

SEQ ID NO: 53341 - protein, 379 aa, Homo sapiens
MLNVHNLNYSSSRTLLFQRFSVIFMDVLFVYAVRECCKCIDGKKVGKELTEKPKFILSVLLLWNFGLLIVDHIHFQYNGFLFGLMLLSIARLFQKRHMEGAFLFAVLLHFKHIYLYVAPAYGVYLLRSYCFTANKPDGSIRWKSFSFVRVISLGLVVFLVSALSLGPFLALNQLPQVFSRLFPFKRGLCHAYWAPNFWALYNALDKVLSVIGLKLKFLDPNNIPKASMTSGLVQQFQHTVLPSVTPLATLICTLIAILPSIFCLWFKPQGPRGFLRCLTLCALSSFMFGWHVHEKAILLAILPMSLLSVGKAGDASIFLILTTTGHYSLFPLLFTAPELPIKILLMLLFTIYSISSLKTLFRRSFTLVAQAGVQWHDLS

SEQ ID NO: 53342 - protein, 81 aa, Homo sapiens
  MOD_RES (1)..(1): Any amino acid
XAMKAVTEQGHELSNEERNLLSVAYKNVVGARRSSWRVISSIEQKTERNEKKQQMGKEYREKIEAELQDICNDVLVHLVFR

SEQ ID NO: 53343 - protein, 205 aa, Homo sapiens
  MOD_RES (1)..(1): Any amino acid
XRSRGPRPELAPEQFVIYQVGLIPSQYYGVLGNKDLEGFKTLTFLAVMLIVLNSTLKSFDQFTCNLLYVSWRKDLTEHLHRLYFRGRAYYTLNVLRDDIDNPDQRISQDVERFCRQLSSMASKLIISPFTLVYYTYQCFQSTGWLGPVSIFGYFILGTVVNKTLMGPIVMKLVHQEKLEGDFRFKHMQIRVNAEPAAFYSRHQHL

SEQ ID NO: 53344 - protein, 615 aa, Homo sapiens
MNSPGGRGKKKGSGGASNPVPPRPPPPCLAPAPPAAGPAPPPESPHKRNLYYFSYPLFVGFALLRLVAFHLGLLFVWLCQRFSRALMAAKRSSGAAPAPASASAPAPVPGGEAERVRVFHKQAFEYISIALRIDEDEKGQKEQAVEWYKKGIEELEKGIAVIVTGQGEQCERARRLQAKMMTNLVMAKDRLQLLEKMQPVLPFSKSQTDVYNDSTNLACRNGHLQSESGAVPKRKDPLTHTSNSLPRSKTVMKTGSAGLSGHHRAPSYSGLSMVSGVKQGSGPAPTTHKGTPKTNRTNKPSTPTTATRKKKDLKNFRNVDSNLANLIMNEIVDNGTAVKFDDIAGQDLAKQALQEIVILPSLRPELFTGLRAPARGLLLFGPPGNGKTMLAKAVAAESNATFFNISAASLTSKYVGEGEKLVRALFAVARELQPSIIFIDEVDSLLCERREGEHDASRRLKTEFLIEFDGVQSAGDDRVLVMGATNRPQELDEAVLRRFIKRVYVSLPNEETRLLLLKNLLCKQGSPLTQKELAQLARMTDGYSGSDLTALAKDAALGPIRELKPEQVKNMSASEMRNIRLSDFTESLKKIKRSVSPQTLEAYIRWNKDFGDTTV

SEQ ID NO: 53345 - protein, 644 aa, Homo sapiens
MAKTPSDHLLSTLEELVPYDFEKFKFKLQNTSVQKEHSRIPRSQIQRARPVKMATLLVTYYGEEYAVQLTLQVLRAINQRLLAEELHRAAIQEYSTQENGTDDSAASSSLGENKPRSLKTPDHPEGNEGNGPRPYGGGAASLRCSQPEAGRGLSRKPLSKRREKASEGLDAQGKPRTRSPALPGGRSPGPCRALEGGQAEVRLRRNASSAGRLQGLAGGAPGQKECRPFEVYLPSGKMRPRSLEVTISTGEKAPANPEILLTLEEKTAANLDSATEPRARPTPDGGASADLKEGPGNPEHSVTDMGSCYVAQVGLELLISNNPPIFASETAGITGRPPDTAASPRCHAQEGDPVDGTCVRDSCSFPEAVSGHPQASGSRSPGCPRCQDSHERKSPGSLSPQPLPQCKRHLKQVQLLFCEDHDEPICLICSLSQEHQGHRVRPIEEVALEHKKKIQKQLEHLKKLRKSGEEQRSYGEEKAVSFLKQTEALKQRVQRKLEQVYYFLEQQEHFFVASLEDVGQMVGQIRKAYDTRVSQDIALLDALIGELEAKECQSEWELLQDIGDILHRAKTVPVPEKWTTPQEIKQKIQLLHQKSEFVEKSTKYFSETLRSEMEMFNGESSGNGVCWPGVVAVFPCAVDLRGPI

SEQ ID NO: 53346 - protein, 810 aa, Homo sapiens
MDGDIDVYKHFSWLKRSQVNHHSAASNETYQERLARLEGDKESLILQVSVLTDQVEAQGEKIRDLEVCLEGHQVKLNAAEEMLQQELLSRTSLETQKLDLMTEVSELKLKLVGMEKEQREQEEKQRKAEELLQELRHLKIKVEELENERNQYEWKLKATKAEVAQLQEQVALKDAEIERLHSQLSRTAALHSESHTERDQEIQRLKMGMETLLLANEDKDRRIEELTGLLNQYRKVKEIVMVTQGPSERTLSINEEEPEGGFSKWNATNKDPEELFKQEMPPRCSSPTVGPPPLPQKSLETRAQKKLSCSLEDLRSESVDKCMDGNQPFPVLEPKDSPFLAEHKYPTLPGKLSGATPNGEAAKSPPTICQPDATGSSLLRLNRGRSVSAPVLGDTESGWDDTAVVNDLSSTSSGTESGPQSPLTPDGKRNPKGIKKFWGKIRRTQSGNFYTDTLGMAEFRRGGLRATAGPRLSRTRDSKGQKSDANAPFAQWSTERVCAWLEDFGLAQYVIFARQWVSSGHTLLTATPQDMEKELGIKHPLHRKKLVLAVKAINTKQEEKSALLDHIWVTRWLDDIGLPQYKDQFHESRVDRRMLQYLTVNDLLFLKVTSQLHHLSIKCAIHVLHVNKFNPHCLHRRPADESNLSPSEVVQWSNHRVMEWLRSVDLAEYAPNLRGSGVHGGLIILEPRFTGDTLAMLLNIPPQKTLLRRHLTTKFNALIGPEAEQEKREKMASPAYTPLTTTAKVRPRKLGFSHFGNIRKKKFDESTDYICPMEPSDGVSDSHRVYSGYRGLSPLDAPELDGLDQVGQIS

SEQ ID NO: 53347 - protein, 85 aa, Homo sapiens
MEPEGVIESNWNEIVDSFDDMNLSESLLRGIYAYGFEKPSAIQQRAILPCIKGYDVIAQAQSGTGKTATFAISILQQIELDLKAT

SEQ ID NO: 53348 - protein, 53 aa, Homo sapiens
MNEAMATDSPRRPSRCTGGVVVRPQAVTEQSYMESVVTFLQDVVPQKSNVAKE

SEQ ID NO: 53349 - protein, 40 aa, Homo sapiens
MHIQFPSKPTLPRACWEGRITAGSPGMPPGEGSSQSLRQR

SEQ ID NO: 53350 - protein, 156 aa, Homo sapiens
MAGNAEPPPAGAACPQDRRSCSGRAGGDRVWEDGEHPAKKLKSGGDEERREKPPKRKIVLLMAYSGKGYHGMQRNVGSSQFKTIEDDLVSALVRSGCIPENHGEDMRKMSFQRCARTDKSQDLILLPRLECSGMIMAHCSLKLLGSSNPPASASRV

SEQ ID NO: 53351 - protein, 104 aa, Homo sapiens
MTTTTTFKGVDPNSRNSSRVLRPPGGGSNFSLGFDEPTEQPVRKNKMASNIFGTPEENQASWAKSAGAKSSGGREDLESSGLQRRNSSEASSGDFLDLKVSVTA

SEQ ID NO: 53352 - protein, 148 aa, Homo sapiens
MEPSSLELPADTVQRIAAELKCHPTDERVALHLDEEDKLRHFRECFYIPKIQDLPPVDLSLVNKDENAIYFLGNSLGLQPKMVKTYLEEELDKWAKIAAYGHEVGKRPWITGDESIVGLMKDIVATLTDPQHNQPGNDLSMCNLKSSC

SEQ ID NO: 53353 - protein, 95 aa, Homo sapiens
MSYQKHQQKWQLPAKCLPKYPSKWTPQAPASCPAPCPPPAPSCCVSSCCISGFGGHCSLVSLRFPRFYLRQPQHSDCCEHESSRCSTCYSSGDCS

SEQ ID NO: 53354 - protein, 130 aa, Homo sapiens
MRECISIHVGQAGVQIGNACWELYCLEHGIQPDGQMPSDKTIGGGDDSFNTFFSETGAGKHVPRAVFVDLEPTVIDEVRTGTYRQLFHPEQLITGKEDAANNYARGHYTIGKEIIDLVLDRIRKLVSIVL

SEQ ID NO: 53355 - protein, 109 aa, Homo sapiens
DFHSHLTRSEVVGYLGGRWDVNSQMLTVLRAFPCRSRLGDAETAAAIEEEMLLVEFYKGSPDLVRLQEPWSQEHTYLDKLKISLASRTPKDQSLCHVLEQVCGVLKQGS

SEQ ID NO: 53356 - protein, 117 aa, Homo sapiens
KPRFFNRVHTGFEWNKYNQTHYDFDNPPPKIVQGYKFNIFYPDLIDKRSTPEYFLEACADNKDFAILRFHAGPPYEDIAFKIVNREWEYSHRHGFRCQFANGIFQLWFHFKRYRYRR

SEQ ID NO: 53357 - protein, 138 aa, Homo sapiens
MDVTIVKTDYEGQAKKLLELMENTDVIIVAGGDGTLQEVVTGVLRRTDEATFSKIPIGFIPLGETSSLSHTLFAESGNKVQHITDATLAIVKGETVPLDVLQIKGEKEQPVFAMTGLRWGSFRDAGVKVSKYWYLGPL

SEQ ID NO: 53358 - protein, 138 aa, Homo sapiens
MQKSTNSDTSVETLNSTRQGTGAVQMRIKNANSHHDRLSQSKSMILTDVGKVTEPISRHRRNHSQHILKDVIPPLEQLMVEKEGYLQKAKIADGGKKLRKNWSTSWIVLSSRRIEFYKESKQQALSNMSFCLMCSGGT

SEQ ID NO: 53359 - protein, 126 aa, Homo sapiens
  MOD_RES (1)..(1): Any amino acid
XRSGWCRCPRRCLGSGIQFLSSHNLPHGSTYQMRRPGGELPLSKSYSSGNRKGFLSGLLDNVKQELAKNKEMKESIKKFRDEARRLEESDVLQEARRKYKTIESETVRTSEVLRKKLGELTGTVKE

SEQ ID NO: 53360 - protein, 161 aa, Homo sapiens
MVRAGAVGAHLPASGLDIFGDLKKMNKRQLYYQVLNFAMIVSSALMIWKGLIVLTGSESPIVVVLSGSMEPAFHRGDLLFLTNFREDPIRAGEIVVFKVEGRDIPIVHRVIKVHEKDNGDIKFLTKGDNNEVDDRGLYKEGQNWLEKKDVVGRARGMLFWL

SEQ ID NO: 53361 - protein, 277 aa, Homo sapiens
MGEPSREEYKIQSFDAETQQLLKTALKAPSLECTVACFETEDGEYSVCQRSYSNCSRLMPSRCNTQYRDPGAVDLEKVANVIVDHSLQDCVFSKEAGRMCYAIIQAESKQAGQSVFRRGLLNRLQQEYQAREQLRARSLQGWVCYVTFICNIFDYLRVNNMPMMALVNPVYDCLFRLAQPDSLSKEEEVGGPSPGTSTEGCRMDSPAQPCVSPLLTEVSEDCVTSGAGLWGCLRPVSYRTSCQVWSLSNREQPKPTGSVASFSVRKPTYDGSCASHG

SEQ ID NO: 53362 - protein, 142 aa, Homo sapiens
MTGTPKTQEGAKDLEVDMNKTEVTPRLWTTCRDGEVLLRLSKHGPGHETPMTIPEFFRESVNRFGTYPALASKNGKKWEILNFNQYYEACRKAAKSLIKLGLERFHGVGILGFNSAEWFITAVGAILAGGLCVGIYATNSAE

SEQ ID NO: 53363 - protein, 516 aa, Homo sapiens
MAAAGHFAGAIFQGREVVTHKTFHRYTVRAKRGTAQGLRDARGGPSHSAGANLRRYNEATLYKDVRDLLAGPSWAKALEEAGTILLRAPRSGRSLFFGGKGAPLQRGDPRLWDIPLATRRPTFQELQRVLHKLTTLHVYEEDPREAVRLHSPQTHWKTVREERKKPTEEEIRKICRDEKEALGQNEESPKQGSGSEGEDGFQVELELVELTVGTLDLCESEVLPKRRRRKRNKKEKSRDQEAGAHRTLLQQTQEEEPSTQSSQAVAAPLGPLLDEAKAPGQPELWNALLAACRAGDVGVLKLQLAPSPADPRVLSLLSAPLGSGGFTLLHAAAAAGRGSVVRLLLEAGADPTVQDSRARPPYTVAADKSTRNEFRRFMEKNPDAYDYNKAQVPGPLTPEMEARQATRKREQKAARRQREEQQQRQQEQEEREREEQRRFAALSDREKRALAAERRLAAQLGAPTSPIPDSAIVNTRRCWSCGASLQGLTPFHYLDFSFCSTRCLQDHRRQAGRPSS

SEQ ID NO: 53364 - protein, 31 aa, Homo sapiens
  MOD_RES (1)..(1): Any amino acid
XQDVVFTDEMAHFDRERIPERVVHAKGAGAC

SEQ ID NO: 53365 - protein, 110 aa, Homo sapiens
MFPVLEPHQVGLIRSYNSKTMTCFQELVTFRDVAIDFSRQEWEYLDPNQRDLYRDVMLENYRNLVSLGGHSISKPVVVDLLERGKEPWMILREETQFTEMGVSLGCSAGL

SEQ ID NO: 53366 - protein, 114 aa, Homo sapiens
MLEYALKQERAKYHKLKFGTDLNQGEKKADVSEQVSNGPVESVTLENSPLVWKEGRQLLRQYLEEVGYTDTILDMRSKRVRSLLGRSLELNGAVEPSEGAPRAPPGPAGLSGGE

SEQ ID NO: 53367 - protein, 137 aa, Homo sapiens
MCVAQVLTAHLLPPRQALGSLCSPWAAPRVGPLPPAPAMVRISKPKTFQAYLDDCHRRYSCAHCRAHLANHDDLISKSFQGSQGRAYLFNSVVNVGCGPAEERVLLTGLHAVADIHCENCKTTLGWKYVSHPPLTPG

SEQ ID NO: 53368 - protein, 157 aa, Homo sapiens
MAVGLCKAMSQGLVTFRDVALDFSQEEWEWLKPSQKDLYRDVMLENYRNLVWLDWESWCEIEELSPKWFIDEDEISQEMVMERLASHGLECSSFREAWKYKGEFELHQGNAERHFMQVTAVKEISTGKRDNEFSNSGRSIPLKSVFLTQQKVPTIQQ

SEQ ID NO: 53369 - protein, 198 aa, Homo sapiens
MADESETAVKPPAPPLPQMMEGNGNGHEHCSDCENEEDNSYNRGGLSPANDTGAKKKKKKQKKKKEKGSETDSAQDQPVKMNSLPAERIQEIQKAIELFSVGQGPAKTMEEASKRSYQFWDTQPVPKLGEVVNTHGPVEPDKDNIRQEPYTLPQGFTWDALDLGDRGVLKELYTLLNENYVEDDDNMFRFDYSPEFLL

SEQ ID NO: 53370 - protein, 329 aa, Homo sapiens
MLVRGRDQGSGSRLGPIVRRWAPRPSPLQSLAASLDAEPSSAAVPDGFPAGPTVSPRRLARPPGLEEALSALGLQGEREYAGDIFAEVMVCRVLPLRALPRAVTPEMRALVVDWLVQVHEYLGLAGDTLYLAVHLLDSYLSAGRVRLHRLQLLGVACLFVACKMEECVLPEPAFLCLLSADSFSRAELLRAERRILSRLDFRLHHPGPLLCLGLLAALAGSSPQVMLLATYFLELSLLEAEAAGWEPGRRAAAALSLAHRLLDGAGSRLQPELYSPEELGTLEPCMARAALRGPAPGRAAVFLKYARPQRQGTSLAAACLLRRLQSEPP

SEQ ID NO: 53371 - protein, 110 aa, Homo sapiens
  MOD_RES (1)..(1): Any amino acid
XVRLCYDPDFEKLKPKYLEELPEKLKLYSEFLGKRPWFAGDKITFVDFLAYDVLDMKRIFEPKCLDAFLNLKDFISRFEGVRHSGSCIDDCPILEMSAVRGLQAEQPVRV

SEQ ID NO: 53372 - protein, 48 aa, Homo sapiens
LSLTQSDISHIGSMRVEGIVHPTTAEIDLKEDIGKPWKRLGEKSSWKR

SEQ ID NO: 53373 - protein, 144 aa, Homo sapiens
METPPLPPACTKQGHQKPLDSKDDNTEKHCPVTVNPWHMKKAFKVMNELRRQSHSATQAGMQWRDLSSLQPPTPGFKRLSHLSLPSSWDYSQNLLCDVTIVAEDMEISAHRVVLAACSPYFHAMFTGEMSESRAKRVRIKEVDG

SEQ ID NO: 53374 - protein, 108 aa, Homo sapiens
MSSILPFTPPVVKRLLGWKKSAGGSGGAGGGEQNGQEEKWCEKAVKSLVKKLKKTGRLDELEKAITTQNCNTKCVTIPSTCSEIWGLSTPNTIDQWDTTGLYSFSEQT

SEQ ID NO: 53375 - protein, 121 aa, Homo sapiens
MEARFTRGKSALLERALARPRTEGAVWKALFGKEADKLEQANDDARTFYIIEREPLINTYISVPKENSTLNCASFTAGIVEAVLTHSGFPAKVTAHWHKGTTLMIKFEEAVIARDRALEGR

SEQ ID NO: 53376 - protein, 515 aa, Homo sapiens
MPNQGEDCYFFFYSTCTKGDSCPFRHCEAAIGNETVCTLWQEGRCFRQVCRFRHMEIDKKRSEIPCYWENQPTGCQKLNCAFHHNRGRYVDGLFLPPSKTVLPTVPESPEEEVKASQLSVQQNKLSVQSNPSPQLRSVMKVESSENVPSPTHPPVVINAADDDEDDDDQFSEEGDETKTPTLQPTPEVHNGLRVTSVRKPAVNIKQGECLNFGIKTLEEIKSKKMKEKSKKQGEGSSGVSSLLLHPEPVPGPEKENVRTVVRTVTLSTKQGEEPLVRLSLTERLGKRKFSAGGDSDPPLKRSLAQRLGKKVEAPETNIDKTPKKAQVSKSLKERLGMSADPDNEDATDKVNKVGEIHVKTLEEILLERASQKRGELQTKLKTEGPSKTDDSTSGARSSSTIRIKTFSEVLAEKKHRQQEAERQKSKKDTTCIKLKIDSEIKKTVVLPPIVASRGQSEEPAGKTKSMQEVHIKTLEEIKLEKALRVQQSSESSTSSPSQHEATPGARRLLRITKRT

SEQ ID NO: 53377 - protein, 65 aa, Homo sapiens
MEEQREALRKIIKTLAVKNEEIQSFIYSLKQMLLNVEANSAKVRYEPDSKAFGVGVAYRSLGRFE

SEQ ID NO: 53378 - protein, 945 aa, Homo sapiens
MVKLANPLYTEWILEAIQKIKKQKQRPSEERICHAVSTSHGLDKKTVSEQLELSVQDGSVLKVTNKGLASYKDPDNPGRFSSVKPGTFPKSAKGSRGSCNDLRNVDWNKLLRRAIEGLEEPNGSSLKNIEKYLRSQSDLTSTTNNPAFQQRLRLGAKRAVNNGRLLKDGPQYRVNYGSLDGKGAPQYPSAFPSSLPPVSLLPHEKDQPRADPIPICSFCLGTKESNREKKPEELLSCADCGSSGHPSCLKFCPELTTNVKALRWQCIECKTCSACRVQGRNADNMLFCDSCDRGFHMECCDPPLSRMPKGMWICQVCRPKKKGRKLLHEKAAQIKRRYAKPIGRPKNKLKQRLLSVTSDEGSMNAFTGRGSPGRGQKTKVCTTPSSGHAASGKDSSSRLAVTDPTRPGATTKITTTSTYISASTLKVNKKTKGLIDGLTKFFTPSPDGRRSRGEIIDFSKHYRPRKKVSQKQSCTSHVLATDTEIKINIKQESADVNVIGNKDVVTEEDLDVFKQAQELSWEKIECESGVEDCGRYPSVIEFGKYEIQTWYSSPYPQEYARLPKLYLCEFCLKYMKSKNILLRHSKKCGWFHPPANEIYRRKDLSVFEVDGNMSKIYCQNLCLLAKLFLDHKTLYYDVEPFLFYVLTKNDEKGCHLVGYFSKEKLCQQKYNVSCIMIMPQHQRQGFGRFLIDFSYLLSRREGQAGSPEKPLSDLGRLSYLAYWKSVILEYLYHHHERHISIKAISRATGMCPHDIATTLQHLHMIDKRDGRFVIIRREKLILSHMEKLKTCSRANELDPDSLRWTPILISNAAVSEEEREAEKEAERLMEQASCWEKEEQEILSTRANSRQSPAKVQSKNKYLHSPESRPVTGERGQLLELSKESSEEEEEEEDEEEEEEEEEEEEDEEEEEEEEEEEEEENIQSSPPRLTKPQSVAIKRKRPFV

SEQ ID NO: 53379 - protein, 85 aa, Homo sapiens
MALPQSCQGSVHWQHLPPECLPGHHHQPQELRWAELKGNAPKHAGSCVFLSWLLPGQYHCSHARDRQVEQQKYHEDKRSGILFCC

SEQ ID NO: 53380 - protein, 203 aa, Homo sapiens
MEEEDESRGKTEESGEDRGDGPPDRDPTLSPSAFILRAIQQAVGSSLQGDLPNDKDGSRCHGLRWRRCRSPRSEPRSQESGGTDTATVLDMATDSFLAGLVSVLDPPDTWVPSRLDLRPGESEDMLELVAEVRIGDRDPIPLPVPSLLPRLRAWRTGKTVSPQSNSSRPTCARHLTLGTGDGGPAPPPAPSSASSSPSPSPSS

SEQ ID NO: 53381 - protein, 662 aa, Homo sapiens
MGRWAWVPSPWPPPGLGPFLLLLLLLLLLPRGFQPQPGGNRTESPEPNATATPAIPTILVTSVTSETPATSAPEAEGPQSGGLPPPPRAVPSSSSPQAQALTEDGRPCRFPFRYGGRMLHACTSEGSAHRKWCATTHNYDRDRAWGYCVEATPPPGGPAALDPCASGPCLNGGSCSNTQDPQSYHCSCPRAFTGKDCGTEKCFDETRYEYLEGGDRWARVRQGHVEQCECFGGRTWCEGTRHTACLSSPCLNGGTCHLIVATGTTVCACPPGFAGRLCNIEPDERCFLGNGTGYRGVASTSASGLSCLAWNSDLLYQELHVDSVGAAALLGLGPHAYCRNPDNDERPWCYVVKDSALSWEYCRLEACDLETEGRESLTRVQLSPDLLATLPEPASPGRQACGRRHKKRTFLRPRIIGGSSSLPGSHPWLAAIYIGDSFCAGSLVHTCWVVSAAHCFSHSPPRDSVSVVLGQHFFNRTTDVTQTFGIEKYIPYTLYSVFNPSDHDLVLIRLKKKGDRCATRSQFVQPICLPEPGSTFPAGHKCQIAGWGHLDENVSGYSSSLREALVPLVADHKCSSPEVYGADISPNMLCAGYFDCKSDACQGDSGGPLACEKNGVAYLYGIISWGDGCGRLHKPGVYTRVANYVDWINDRIRPPRRLVAPS

SEQ ID NO: 53382 - protein, 133 aa, Homo sapiens
MCEQHPKRPGLQLWRGREPGWNGQQAALPTVTNMKLLAATVLLLTICSLEGALVRRQAKEPCVESLVSQYFQTVTDYGKDLMEKVKSPELQAEAKSYFEKSKEQLTPLIKKAGTELVNFLSYFVELGTQPATQ

SEQ ID NO: 53383 - protein, 517 aa, Homo sapiens
MCVCLNKEVTCKREKCPVLSRDCALAIKQRGACCEQCKGCTYEGNTYNSSFKWQSPAEPCVLRQCQEGVVTESGVRCVVHCKNPLEHLGMCCPTCPGCVFEGVQYQEGEEFQPEGSKCTKCSCTGGRTQCVREVCPILSCPQHLSHIPPGQCCPKCLGQRKVFDLPFGSCLFRSDVYDNGSSFLYDNCTACTCRDSTVVCKRKCSHPGGCDQGQEGCCEECLLRVPPEDIKVCKFGNKIFQDGEMWSSINCTICACVKGRTECRNKQCIPISSCPQGKILNRKGCCPICTEKPGVCTVFGDPHYNTFDGRTFNFQGTCQYVLTKDCSSPASPFQVLVKNDARRTRSFSWTKSVELVLGESRVSLQQHLTVRWNGSRIALPCRAPHFHIDLDGYLLKVTTKAGLEISWDGDSFVEVMAAPHLKGKLCGLCGNYNGHKRDDLIGGDGNFKFDVDDFAESWRVESNEFCNRPQRKPVPELCQGTVKVKLRAHRECQKLKSWEFQTCHSTVDYATFYRHPV

SEQ ID NO: 53384 - protein, 170 aa, Homo sapiens
MEGDGSDSPVTIKNIERELICPACKELFTHPLILPCQHSICHKCVKELLLTLDDSFNDVGSDNSNQSSPRLRLPSPSMDKIDRINRPASQRRSVGWRGWKRNSLTPRTTVFPCPGCEHDVDLGERGINGLFRNFTLETIVERYRQAARAATAIMCDLCKPPPQESTKSCM

SEQ ID NO: 53385 - protein, 250 aa, Homo sapiens
MATTKRVLYVGGLAEEVDDKVLHAAFIPFGDITDIQIPLDYETVWSDDDWLKKFSGKTLEENKEEEGSEPPKAETQEGEPIAKKARSNPQVYMDIKIGNKPAGRIQMLLRSDVVPMTAENFRCLCTHEKGFGFKGSSFHRIIPQFMCQGGDFTNHNGTGGKSIYGKKFDDENFILKHTGPGLLSMANSGPNTNGSQFFLTCDKTDWLDGKHVVFGEVTEGLDVLRQIEAQGSKDGKPKQKVIIADCGEYV

SEQ ID NO: 53386 - protein, 591 aa, Homo sapiens
  MOD_RES (1)..(1): Any amino acid
XVIYTVAKEELKKFEAFQRQVHECLTQLELINKQYRRLARENRTDSACSLKQMVHEGNQRWDNLQKRVTSILRRLKHFIGQREEFETARDSILVWLTEMDLQLTNIEHFSECDVQAKIKQLKAFQQEISLNHNKIEQIIAQGEQLIEKSEPLDAAIIEEELDELRRYCQEVFGRVERYHKKLIRLPLPDDEHDLSDRELELEDSAALSDLHWHDRSADSLLSPQPSSNLSLSLAQPLRSERSGRDTPASVDSIPLEWDHDYDLSRDLESAMSRALPSEDEEGQDDKDFYLRGAVGLSGVIDRWELLQAQALSKELRMKQNLQKWQQFNSDLNSIWAWLGDTEEELEQLQRLELSTDIQTIELQIKKLKELQKAVDHRKAIILSINLCSPEFTQADSKESRDLQDRLSQMNGRWDRVCSLLEEWRGLLQDALMQCQGFHEMSHGLLLMLENIDRRKNEIVPIDSNLDAEILQDHHKQLMQIKHELLESQLRVASLQDMSCQLLVNAEGTDCLEAKEKVHVIGNRLKLLLKEVSRHIKELEKLLDVSSSQQDLSSWSSADELDTSGSVSPTSGRSTPNRQKTVHKRWLRFLPF

SEQ ID NO: 53387 - protein, 48 aa, Homo sapiens
MSFVAGVIRRLDETVVNRIAAGEVIQRPANAIKEMIENWYGGSRAGLT

SEQ ID NO: 53388 - protein, 96 aa, Homo sapiens
MKVLKKATLKVRDRVRSKMERDILAEVNHPFIVKLHYAFQTEGKLYLILDFLRGGDLFTRLSKEVMFTEEDVKFYLAELALALDHLHSLGIIYRDL

SEQ ID NO: 53389 - protein, 110 aa, Homo sapiens
CQPTCCRTTCCRTTCWKPTTPSCCVPSCCQPCCHPTCCQNTCCRTTCCQPTCVASCCQPSCCSTPCCQPTCCGQTCNESSYCLPCCRPTCCQTTCYRTTCCRPSCCCSPC

SEQ ID NO: 53390 - protein, 291 aa, Homo sapiens
MEERTITIEIPEVLKKQLEDDCYYINRRKRLVKLPCQTNIITILESYVKHFAINAAFSANERPRHHHVMPHANMNVHYIPAEKNVDLCKEMVDGLRITFDYTLPLVLLYPYEQAQYKKVTSSKFFLPIKESATSTNRSQEELSPSPPLLNPSTPQSTESQPTTGEPATPKRRKAEPEALQSLRRSTRHSANCDRLSESSASPQPKRRQQDTSASMPKLFLHLEKTSPAVLTPSGVLLSIILLELPKVIPVPFCVQVPISLCTSCPCHIHKLLRERSDLLIVSPHHSSVLVA

SEQ ID NO: 53391 - protein, 1175 aa, Homo sapiens
MAERKGTAKVDFLKKIEKEIQQKWDTERVFEVNASNLEKQTSKGKYFVTFPYPYMNGRLHLGHTFSLSKCEFAVGYQRLKGKCCLFPFGLHCTGMPIKACADKLKREIELYGCPPDFPDEEEEEEETSVKTEDIIIKDKAKGKKSKAAAKAGSSKYQWGIMKSLGLSDEEIVKFSEAEHWLDYFPPLAIQDLKRMGLKVDWRRSFITTDVNPYYDSFVRWQFLTLRERNKIKFGKRYTIYSPKDGQPCMDHDRQTGEGVGPQEYTLLKLKVLEPYPSKLSGLKGKNIFLVAATLRPETMFGQTNCWVRPDMKYIGFETVNGDIFICTQKAARNMSYQGFTKDNGVVPVVKELMGEEILGASLSAPLTSYKVIYVLPMLTIKEDKGTGVVTSVPSDSPDDIAALRDLKKKQALRAKYGIRDDMVLPFEPVPVIEIPGFGNLSAVTICDELKIQSQNDREKLAEAKEKIYLKGFYEGIMLVDGFKGQKVQDVKKTIQKKMIDAGDALIYMEPEKQVMSRSSDECVVALCDQWYLDYGEENWKKQTSQCLKNLETFCEETRRNFEATLGWLQEHACSRTYGLGTHLPWDEQWLIESLSDSTIYMAFYTVAHLLQGGNLHGQAESPLGIRPQQMTKEVWDYVFFKEAPFPKTQIAKEKLDQLKQEFEFWYPVDLRVSGKDLVPNHLSYYLYNHVAMWPEQSDKWPTAVRANGHLLLNSEKMSKSTGNFLTLTQAIDKFSADGMRLALADAGDTVEDANFVEAMADAGILRLYTWVEWVKEMVANWDSLRSGPASTFNDRVFASELNAGIIKTDQNYEKMMFKEALKTGFFEFQAAKDKYRELAVEGMHRELVFRFIEVQTLLLAPFCPHLCEHIWTLLGKPDSIMNASWPVAGPVNEVLIHSSQYLMEVTHDLRLRLKNYMMPAKGKTDKQPLQKPSHCTIYVAKNYPPWQHTTLSVLRKHFEANNGKLPDNKVIASELGSMPELKKYMKKVMPFVAMIKENLEKMGPRILDLQLEFDEKAVLMENIVYLTNSLELEHIEVKFASEAEDKIREDCCPGKPLNVFRIEPGVSVSLVNPQPSNGHFSTKIEIRQGDNCDSIIRRLMKMNRGIKDLSKVKLMRFDDPLLGPRRVPVLGKEYTEKTPISEHAVFNVDLMSKKIHLTENGIRVDIGDTIIYLVH

SEQ ID NO: 53392 - protein, 785 aa, Homo sapiens
MPKIVLNGVTVDFPFQPYKCQQEYMTKVLECLQQKVNGILESPTGTGKTLCLLCTTLAWREHLRDGISARKIAERAQGELFPDRALSSWGNAAAAAGDPIACYTDIPKIIYASRTHSQLTQVINELRNTSYRPKVCVLGSREQLCIHPEVKKQESNHLQIHLCRKKVASRSCHFYNNVEEKSLEQELASPILDIEDLVKSGSKHRVCPYYLSRNLKQQADIIFMPYNYLLDAKSRRAHNIDLKGTVVIFDEAHNVEKMCEESASFDLTPHDLASGLDVIDQVLEEQTKAAQQGEPHPEFSADSPSPGLNMELEDIAKLKSKCCPPRLLAAGWGLLLARRWVTPPRPTVILLRLEGAIDAVELPGDDSGVTKPGSYIFELFAEAQITFQTKGCILDSLDQIIQHLAGRAGVFTNTAGLQKLADIIQIVFSVDPSEGSPGSPAGLGALQSYKVHIHPDAGHRRTAQRSDAWSTTAARKRGKVLSYWCFSPGHSMHELVRQGVRSLILTSGTLAPVSSFALEMQIPFPVCLENPHIIDKHQIWVGVVPRGPDGAQLSSAFDRRFSEECLSSLGKALGNIARVVPYGLLIFFPSYPVMEKSLEFWRARDLARKMEALKPLFVEPRSKGSFSETISAYYARVAAPGSTGATFLAVCRGKASEGLDFSDTNGRGVIVTGLPYPPRMDPRVVLKMQFLDEMKGQGGAGGQFLSGQEWYRQQASRAVNQAIGRVIRHRQDYGAVFLCDHRCQRRPPGLQHPVCVEKMLSARPSRLAPSSPPGKLRVWTCMSPA

SEQ ID NO: 53393 - protein, 51 aa, Homo sapiens
MDVLASYSIFQELQLVHDTGYFSALPSLEETWQQKIIEDHLQKENTPVSYY

SEQ ID NO: 53394 - protein, 120 aa, Homo sapiens
MAAHHRQNTAGRRKVQVSYVIRDEVEKYNRNGVNALQLDPALNRLFTAGRDSIIRIWSVNQHKQDPYIASMEHHTDWVNDIVLCCNGKTLISASSDTTVKVWNAHKGFCMSTLRTHKLLL

SEQ ID NO: 53395 - protein, 137 aa, Homo sapiens
MAADEGSAEKQAGEAHMAADGETNGSCENSDASSHANAAKHTQDSARVNPQDGTNTLTRIAENGVSERDSEAAKQNHVTADDFVQTSVIGSNGYILNKPALQAQPLRTTSTLASSLPGHAAKTLPGGAGKGRTPSAF

SEQ ID NO: 53396 - protein, 204 aa, Homo sapiens
  MOD_RES (1)..(1): Any amino acid
XDCFASGDFCNNCNCNNCCNNLHHDIERFKAIKACLGRNPEAFQPKIGKGQLGNVKPQHNKGCNCRRSGCLKNYCECYEAQIMCSSICKCIGCKNYEESPERKTLMSMPNYMQTGGLEGSHYLPPTKFSGLPRFSHDRRPSSCISWEVVEATCACLLAQGEEAEKEHCSKCLAEQMILEEFGRNKFSGWAVVIPLKISRELLNT

SEQ ID NO: 53397 - protein, 86 aa, Homo sapiens
MMRLTINRSMDPKNMFAIWRVPAPFKPITRKSVGHRMGGGKGAIDHYVTPVKAGRLVVEMGGRCEFEEVQGFLDQVAHKLPFAAKA

SEQ ID NO: 53398 - protein, 555 aa, Homo sapiens
MLIWSEVSWIPNKHYSGIYGLMKLVLTKTLPANLERVIVLDTDITFATDIAELWAVFHKFKGQQVLGLVENQSDWYLGNLWKNHRPWPALGRGYNTGVILLLLDKLRKMKWEQMWRLTAERELMGMLSTSLADQDIFNAVIKQNPFLVYQLPCFWNVQLSDHTRSEQCYRDVSDLKVIHWNSPKKLRVKNKHVEFFRNLYLTFLEYDGNLLRRELFGCPSEADVNSENLQKQLSELDEDDLCYEFRRERFTVHRTHLYFLHYEYEPAADSTDVTLVAQLSMDRLQMLEAICKHWEGPISLALYLSDAEAQQFLRYAQGSEVLMSRHNVGYHIVYKEGQFYPVNLLRNVAMKHISTPYMFLSDIDFLPMYGLYEYLRKSVIQLDLANTKKAMIVPAFETLRYRLSFPKSKAELLSMLDMGTLFTFRYHVWTKGHAPTNFAKWRTATTPYRVEWEADFEPYVVVRRDCPEYDRRFVGFGWNKVAHIMELDVQEYEFIVLPNAYMIHMPHAPSFDITKFRSNKQYRICLKTLKEEFQQDMSRRYGFAALKYLTAENNS

SEQ ID NO: 53399 - protein, 291 aa, Homo sapiens
MPLEVVVELQIRAISCPGVFLPGKQDVYLGVYLMNQYLETNSFPSAFPIMIQESMRFEKVFESAVDPGAVVDLLESFLARFELIQLVPPVWDELAYYEENTRDFLFPEPKLTPSHPRRCREVLMKTALGFPGIAPKIEFSTRTAIRECVFLHRNRFLEERHESRRPLSTSHEPIFPLNTIKMKLKENNLNRLPKGMQARAPSQYSTRHFFQDQPAQLNLGNNFKISGGSKPPFVVRHVDSAKPFGENISEHHLRRSRRKSKFSDFPFPTRRGSILVLSPHGRISMRGYAVF

SEQ ID NO: 53400 - protein, 202 aa, Homo sapiens
MGQPWAAGSTDGAPAQLPLVLTALWAAAVGLELAYVLVLGPGPPPLGPLARALQLALAAFQLLNLLGNVGLFLRSDPSIRGVMLAGRGLGQGWAYCYQCQSQVPPRSGHCSACRVCILRRDHHCRLLGRCVGFGNYRPFLCLLLHAAGVLLHVSVLLGPALSALLRAHTPLHMAALLLLPWLMLLTAPSSLRNSDLQATCTS

SEQ ID NO: 53401 - protein, 379 aa, Homo sapiens
MAPGNLWHMRNNFLFGSRCWMTRFSAENIFKSVSFRLFGVKCHNTDSEPLKNEDLLKNLLTMGVDIDMARKRQPGVFHRMITNEQDLKMFLLSKGASKEVIASIISRYPRAITRTPENLSKRWDLWRKIVTSDLEIVNILERSPESFFRSNNNLNLENNIKFLYSVGLTRKCLCRLLTNAPRTFSNSLDLNKQMVEFLQAAGLSLGHNDPADFVRKIIFKNPFILIQSTKRVKANIEFLRSTFNLNSEELLVLICGPGAEILDLSNDYARRSYANIKEKLFSLGCTEEEVQKFVLSYPDVIFLAEKKFNDKIDCLMEENISISQIIENPRVLDSSISTLKSRIKELVNAGCNLSTLNITLLSWSKKRYEAKLKKLSRFA

SEQ ID NO: 53402 - protein, 41 aa, Homo sapiens
MACGVTGSVSVALHPLVILNISDHWIRMRSQEGRPVQVIGA

SEQ ID NO: 53403 - protein, 15 aa, Homo sapiens
MDFSFSFMQGIMGNT

SEQ ID NO: 53404 - protein, 125 aa, Homo sapiens
MLEQGKEPFTLESQVQIAGNPDGWEWIKAVITALSSEFVMKDLLHKGKSNTGEVFQTVMLERQESQDIEGCSFREVQKNTHGLEYQCRDAEGNYKGVLLTQEGNLTHGRDEHDKRDARNKLIKNQ

SEQ ID NO: 53405 - protein, 1233 aa, Homo sapiens
MPPSWSPLMCGRAAEAAASSRTPGREMGQAVTRRLGAGARAAPRRAMDGRTPRPQDAPARREIAGSWRKPKAKAPLPPAETKYTDVSSAADSVESTAFIMEQKENMIDKDVELSVVLPGDIIKSTTVHGSKPMMDLLIFLCAQYHLNPSSYTIDLLSAEQNHIKFKPNTPIGMLEVEKVILKPKMLDKKKPTPIIPEKTVRVVINFKKTQKTIVRVSPHASLQELAPIICSKCEFDPLHTLLLKDYQSQEPLDLTKSLNDLGLRELYAMDVNRATSVTVFSKSSLQESCQISQNLDIMKEKENKGFFSFFQRSKKKRDQTASAPATPLVNKHRPTFTRSNTISKPYISNTLPSDAPKKRRAPLPPMPASQSVPQDLAHIQERPASCIVKSMSVDETDKSPCEAGRVRAGSLQLSSMSAGNSSLRRTKRKAPSPPSKIPPHQSDENSRVTALQPVDGVPPDSASEANSPEELSSPETFHPGLSSQEQCTAPKLMEETSVFECPGTPEAAITSLTSGISSDYSLEEIDEKEELSEVPKVEAENISPKSQDIPFVSTDIINTLKNDPDSALGNGSGEFSQNSMEEKQETKSTDGQEPHSVVYDTSNGKKVVDSIRNLKSLGPNQENVVQNEIIVYPENTEDNMKNGVKKTEINVEGVAKNNNIDMEVERPSNSEAHETDTAISYKENHLAASSVPDQKLNQPSAEKTKDAAIQTTPSCNSFDGKHQDHNLSDSKVEECVQTSNNNISTQHSCLSSQDSVNTSREFRSQGTLIIHSEDPLTVKDPICAHGNDDLLPPVDRIDKNSTASYLKNYPLYRQDYNPKPKPSNEITREYIPKIGMTTYKIVPPKSLEISKDWQSETIEYKDDQDMHALGKKHTHENVKETAIQTEDSAISESPEEPLPNLKPKPNLRTEHQVPSSVSSPDDAMVSPLKPAPKMTRDTGTAPFAPNLEEINNILESKFKSRASNAQAKPSSFFLQMQKRVSGHYVTSAAAKSVHAAPNPAPKELTNKEAERDMLPSPEQTLSPLSKMPHSVPQPLVEKTDDDVIGQAPAEASPPPIAPKPVTIPASQVSTQNLKTLKTFGAPRPYSSSGPSPFALAVVKRSQSFSKERTESPSASALVQPPANTEEGKTHSVNKFVDIPQLGVSDKENNSAHNEQNSQIPTPTDGPSFTVMRQSSLTFQSSDPEQMRQSLLTAIRSGEAAAKLKRVTIPSNTISVNGRSRLSHSMSPDAQDGH

SEQ ID NO: 53406 - protein, 780 aa, Homo sapiens
MGSGARFPSGTLRVRWLLLLGLVGPVLGAARPGFQQTSHLSSYEIITPWRLTRERREAPRPYSKQVSYVIQAEGKEHIIHLERNKDLLPEDFVVYTYNKEGTLITDHPNIQNHCHYRGYVEGVHNSSIALSDCFGLRGLLHLENASYGIEPLQNSSHFEHIIYRMDDVYKEPLKCGVSNKDIEKETAKDEEEEPPSMTQLLRRRRAVLPQTRYVELFIVVDKERYDMMGRNQTAVREEMILLANYLDSMYIMLNIRIVLVGLEIWTNGNLINIVGGAGDVLGNFVQWREKFLITRRRHDSAQLVLKKGFGGTAGMAFVGTVCSRSHAGGINVFGQITVETFASIVAHELGHNLGMNHDDGRDCSCGAKSCIMNSGASGSRNFSSCSAEDFEKLTLNKGGNCLLNIPKPDEAYSAPSCGNKLVDAGEECDCGTPKECELDPCCEGSTCKLKSFAECAYGDCCKDCRFLPGGTLCRGKTSECDVPEYCNGSSQFCQPDVFIQNGYPCQNNKAYCYNGMCQYYDAQCQVIFGSKAKAAPKDCFIEVNSKGDRFGNCGFSGNEYKKCATGNALCGKLQCENVQEIPVFGIVPAIIQTPSRGTKCWGVDFQLGSDVPDPGMVNEGTKCGAGKICRNFQCVDASVLNYDCDVQKKCHGHGVCNSNKNCHCENGWAPPNCETKGYGGSVDSGPTYNEMNTALRDGLLVFFFLIVPLIVCAIFIFIKRDQLWRSYFRKKRSQTYESDGKNQANPSRQPGSVPRHVSPVTPPREVRRGLTALARLVLNS

SEQ ID NO: 53407 - protein, 84 aa, Homo sapiens
MRRSLRAGKRRQTAGSGPVCQSLLAVIRQGKCSLVPCSPFTSPGMLRASGVWLLAWSMKAFGLNPQRLLNSTAVKALFMMEKLE

SEQ ID NO: 53408 - protein, 182 aa, Homo sapiens
  MOD_RES (1)..(1): Any amino acid
XEAKNLASYDVCSILLGTSTLLVWVGVIRYLTFFHNYNILIATLRVALPSVMRFCCCVAVIYLGYCFCGWIVLGPYHVKPLHLHGAQPLHRAHHRRLRHHQASRRRRRRGERAAGLHRTVPGQPHLRQVPPRERLGLQPSLLLRKGPLGGAFAAGELIRPDCRWTVGPGLQRPPPPTPLIYL

SEQ ID NO: 53409 - protein, 117 aa, Homo sapiens
MSRRKQSNPRQIKRSLGDMEAREEVQLVGASHMEQKATAPEAPSPPSADELEPVVQDGQRRIRARLSLATGLSWGPFHGSVQTRASSPRQAEPMRKLRLQDVKSIAQIPRIKQQREK

SEQ ID NO: 53410 - protein, 45 aa, Homo sapiens
MYGKIIFVLLLSGNFEHSAEGPSWLPLRRSPSTSTPLHLGAIPLI

SEQ ID NO: 53411 - protein, 179 aa, Homo sapiens
MAGKKNVLSSLAVYAEDSEPESDGEAGIEAVGSAAEEKGGLVSDAYGEDDFSRLGGDEDGYEEEEDENSRQSEDDDSETEKPEADDPKDNTEAEKRDPQELVASFSERVRNMSPDEIKIPPEPPGRCSNHLQDKIQKLYERKIKEGMDMNYIIQRKKEFRNPRICLIPMAGLRTPTMRH

SEQ ID NO: 53412 - protein, 534 aa, Homo sapiens
MKIFQRKMRYWLLPPFLAIVYFCTIVQGQVAPPTRLRYNVISHDSIQISWKAPRGKFGGYKLLVTPTSGGKTNQLNLQNTATKAIIQGLMPDQNYTVQIIAYNKDKESKPAQGQFRIKDLEKRKDPKPRVKVVDRGNGSRPSSPEEVKFVCQTPAIADIVILVDGSWSIGRFNFRLVRHFLENLVTAFDVGSEKTRIGLAQYSGDPRIEWHLNAFSTKDEVIEAVRNLPYKGGNTLTGLALNYIFENSFKPEAGSRTGVSKIGILITDGKSQDDIIPPSRNLRESGVELFAIGVKNADVNELQEIASEPDSTHVYNVAEFDLMHTVVESLTRTLCSRVEEQDREIKASAHAITGPPTELITSEVTARSFMVNWTHAPGNVEKYRVVYYPTRGGKPDEVVVDGTVSSTVLKNLMSLTEYQIAVFAIYAHTASEGLRGTETTLALPMASDLLLYDVTENSMRVKWDAVPGASGYLILYAPLTEGLAGDEKEMKIGETHTDIELSGLLPNTEYTVTVYAMFGEEASDPVTGQETTSP

SEQ ID NO: 53413 - protein, 93 aa, Homo sapiens
MAAKQPPPLMKKHSQTDLVSRLKTRKILGVGGEDDDGEVHRSKISQVLGNEIKFTIREPLGLRVWQFVSAVLFSGIAIMALAFPDQLYDAVFD

SEQ ID NO: 53414 - protein, 253 aa, Homo sapiens
MADTATTASAAAASAASASSDAPPFQLGKPRFQQTSFYGRFRHFLDIIDPRTLFVTERRLREAVQLLEDYKHGTLRPGVTNEQLWSAQKIKQAILHPDTNEKIFMPFRMSGYIPFGTPIVVGLLLPNQTLASTVFWQWLNQSHNACVNYANRNATKPSPASKFIQGYLGAVISAVSIAVGLNVLVQKANKFTPATRLLIQRFVPFPAVGRLSCRHAPGCSSLCKASCAWQPSAWPCRWPSASSRKCQRLKHPN

SEQ ID NO: 53415 - protein, 99 aa, Homo sapiens
MEGGGGSGDKTTGVLAGFFGAGEAGYSHADLAGVPQSGPRSVTHVGVRWHDYSSLKPGTPELKQSSPLSLLSSWESSNWYEPSVSLFKCGSTIPRAGYR

SEQ ID NO: 53416 - protein, 683 aa, Homo sapiens
MPSPRPVLAPLRLAVRQQGDLVRKLKEDKAPQVDVDKAVAELKARKRVLEAKELALQPKDDIVDRAKMEDTLKRRFFYDQAFAIYGGVSGLYDFGPVGCALKNNIIQTWRQHFIQEEQILEIDCTMLTPEPVLKTSGHVDKFADFMVKDVKNGECFRADHLLKAHLQKLMSDKKCSVEKKSEMESVLAQLDNYGQQELADLFVNYNVKSPITGNDLSPPVSFNLMFKTFIGPGGNMPGYLRPETAQGIFLNFKRLLEFNQGKLPFAAAQIGNSFRNEISPRSGLIRVREFTMAEIEHFVDPSEKDHPKFQNVADLHLYLYSAKAQVSGQSARKMRLGDAVEQGVINNTVLGYFIGRIYLYLTKVGISPDKLRFRQHMENEMAHYACDCWDAESKTSYGWIEIVGCADRSCYDLSCHARATKVPLVAEKPLKEPKTVNVVQFEPSKGAIGKAYKKDAKLVMEYLAICDECYITEMEMLLNEKGEFTIETEGKTFQLTKDMINVKRFQKTLYVEEVVPNVIEPSFGLGRIMYTVFEHTFHVREGDEQRTFFSFPAVVAPFKCSVLPLSQNQEFMPFVKELSEALTRHGVSHKVDDSSGSIGRRYARTDEIGVAFGVTIDFDTVNKTPHTATLRDRDSMRQIRAEISELPSIVQDLANGNITWADVEARYPLFEGQETGKKETIEE

SEQ ID NO: 53417 - protein, 152 aa, Homo sapiens
MNLAISIALLLTVLQVSRGQKVTSLTACLVDQSLRLDCRHENTSSSPIQYEFSLTRETKKHVLFGTVGVPEHTYRSRTNFTSKYNMKVLYLSAFTSKDEGTYTCALHHSGHSPPISSQNVTVLRDKLVKCEGISLLAQNTSWLLLLLLSLSL

SEQ ID NO: 53418 - protein, 150 aa, Homo sapiens
MAPAADREGYWGPTTSTLDWCEENYSVTWYIAEFWNTVSNLIMIIPPMFGAVQSVRDGLEKRYIASYLALTVVGMGSWCFHMTLKYEMQLLDELPMIYSCCIFVYCMFECFKIKNSVNYHLLFTLVLFSLIVTTVYLKVKEPIFHQVTAT

SEQ ID NO: 53419 - protein, 454 aa, Homo sapiens
MTMAGGRRGLVAPQNTFLENIVRRSNDTNFVLGNAQIVDWPIVYSNDGFCKLSGYHRAEVMQKSSTCSFMYGELTDKDTIEKVRQTFENYEMNSFEILMYKKNRKGDVFGDVFWKEATLAQSCANVRALTYCDLHVIKRDALQKVLEFYTAFSHSFSRNLILTYNLRKRIVFRKISDVKREEEERMKRKNEAPLILPPDHPVRRLFQRFRQQKEARLAAERGGRDLDDLDVEKGNVLTEHASANHSLVKASVVTVRESPATPVSFQAASTSGVPDHAKLQAPGSECLGPKGGGGDCAKRKSWARFKDACGKSEDWNKVSKAESMETLPERTKASGEATLKKTDSCDSGITKSDLRLDNVGEARSPQDRSPILAEVKHSFYPIPEQTLQATVLEVRHELKEDIKALNAKMTNIEKQLSEILRILTSRRSSQSPQELFEISRPQSPESERDIFGAS

SEQ ID NO: 53420 - protein, 237 aa, Homo sapiens
MNPLLILTFVAAALAAPFDDDDKIVGGYNCEENSVPYQVSLNSGYHFCGGSLINEQWVVSAGHCYKSRIQVRLGEHNINAAKIIRHPQYDRKTLNNDIMLIKLSSRAVINARVSTISLPTAPPATGTKCLISGWGNTASSGADYPDELQCLDAPVLSQAKCEASYPGKITSNMFCVGFLEGGKDSCQGDSGGPVVCNGQLQGVVSWGDGCAQKNKPGVYTKVYNYVKWIKNTIAANS

SEQ ID NO: 53421 - protein, 605 aa, Homo sapiens
MEIGTEISRKIRSAIKGKLQELGAYVDEELPDYIMVMVANKKSQDQMTEDLSLFLGNNTIRFTVWLHGVLDKLRSVTTEPSSLKSSDTNIFDSNVPSNKSNFSRGDERRHEAAVPPLAIPSARPEKRDSRVSTSSQESKTTNVRQTYDDGAATRLMSTVKPLREPAPSEDVIDIKPEPDDLIDEDLNFVQENPLSQKKPTVTLTYGSSRPSIEIYRPPASRNADSGVHLNRLQFQQQQNSIHAAKQLDMQSSWVYETGRLCEPEVLNSLEETYSPFFRNNSEKMSMEDENFRKRKLPVVSSVVKVKKFNHDGEEEEEDDDYGSRTGSISSSVSVPAKPERRPSLPPSKQANKNLILKAISEAQESVTKTTNYSTVPQKQTLPVAPRTRTSQEELLAEVVQGQSRTPRISPPIKEEETKGDSVEKNQGTQQRQLLSRLQIDPVMAETLQMSQAEMSELSVAQKPEKLLERCKYWPACKNGDECAYHHPISPCKAFPNCKFAEKCLFVHPNCKYDAKCTKPDCPFTHVSRRIPVLSPKPAVAPPAPPSSSQLCRYFPACKKMECPFYHPKHCRFNTQCTRPDCTFYHPTINVPPRHALKWIRPQTSE

SEQ ID NO: 53422 - protein, 481 aa, Homo sapiens
MLAGTVRFARHCLKFFPAQKPACVDFGASRGRAMLTFMASDSEEEVCDERTSLMSAESPTPRSCQEGRQGPEDGENTAQWRSQENEEDGEEDPDRYVCSGVPGRPPGLEEELTLKYGAKHVIMLFVPVTLCMIVVVATIKSVRFYTEKNGQLIYTPFTEDTPSVGQRLLNSVLNTLIMISVIVVMTIFLVVLYKYRCYKFIHGWLIMSSLMLLFLFTYIYLGEVLKTYNVAMDYPTLLLTVWNFGAVGMVCIHWKGPLVLQQAYLIMISALMALVFIKYLPEWSAWVILGAISVYDLVAVLCPKGPLRMLVETAQERNEPIFPALIYSSAMVWTVGMAKLDPSSQGALQLPYDPEMEEDSYDSFGEPSYPEVFEPPLTGYPGEELEEEEERGVKLGLGDFIFYSVLVGKAAATGSGDWNTTLACFVAILIGLCLTLLLLAVFKKALPALPISITFGLIFYFSTDNLVRPFMDTLASHQLYI

SEQ ID NO: 53423 - protein, 134 aa, Homo sapiens
MDASRTSRHLEETINNFERQKMKDIKTIFSEFITIEMLFHGKALEVYTAAYQNIQNIDEDEDLEVFRNSLYAPDYSSRLDIVRANSKSPLQRSLSAKCVSGTGQVSTCRLRKDQQAEDDEDDELDVTEEENFLK

SEQ ID NO: 53424 - protein, 188 aa, Homo sapiens
MGVPRTPSRTVLFERERTGLTYRVPSLLPVPPGPTLLAFVEQRLSPDDSHAHRLVLRRGTLAGGSVRWGALHVLGTAALAEHRSMNPCPVHDAGTGTVFLFFIAVLGHTPEAVQIATGRNAARLCCVASRDAGLSWGSARDLTEEAIGGAVQDWATFAVGPGHGVQLPSGRLLVPAYTYRVDRRECFG

SEQ ID NO: 53425 - protein, 259 aa, Homo sapiens
MPEAGFQATNAFTAELEFAQIIIIVVVVTVMVVVIVCLLNHYKVSTRSFINRPNQSRRREDGLPQEGCLWPSDSAAPRLGASEIMHAPRSRDRFTAPSFIQRDRFSRFQPTYPYVQHEIDLPPTISLSDGEEPPPYQGPCTLQLRDPEQQMELNRESVRAPPNRTIFDSDLIDIAMYSGGPCPPSSNSGISASTCSSNGRMEGPPPTYSEVMGHHPGASFLHHQRSNAHRGSRLQFQQNNAESTIVPIKGKDRKPGNLV

SEQ ID NO: 53426 - protein, 99 aa, Homo sapiens
MAAAGARPVELGFAESAPAWRLRSEQFPSKVGGRPAWLGAAGLPGPQALACELCGRPLSFLLQVYAPLPGRPDAFHRCIFLFCCREQPCCAGLRGFVAV

SEQ ID NO: 53427 - protein, 182 aa, Homo sapiens
METESEQNSNSTNGSSSSGGSSRPQIAQMSLYERQAVQALQALQRQPNAAQYFHQFMLQQQLSNAQLHSLAAVQQATIAASRQASSPNTSTTQQQTTTTQASVNRTLGRNVPLASQLILMPNGAVAAVQQEVPSAQSPGVHADADQVQNLAVRNQQASAQGPQMQGSTQKAIPPGASPVSSL

SEQ ID NO: 53428 - protein, 94 aa, Homo sapiens
MESTSQDRRATHVITIKPNETVLTAFPYRPHSSLLDFLKGEPRVLGATQILLALIIVGFGTIFALNYIGFSQRLPLVVLTGYPFWGALIVSTVD

SEQ ID NO: 53429 - protein, 41 aa, Homo sapiens
  MOD_RES (1)..(1): Any amino acid
XVRQVLNITDKDLSPHTSPFQAQLTDDSDIYWTAEVNEEGT

SEQ ID NO: 53430 - protein, 43 aa, Homo sapiens
MRRKNHTHQQDIDDLKRQNALLEQQVRALEKARSSAQLQTNYP

SEQ ID NO: 53431 - protein, 537 aa, Homo sapiens
MLRLPTVFRQMRPVSRVLAPHLTRAYAKDVKFGADARALMLQGVDLLADAVAVTMGPKGRTVIIEQSWGSPKVTKDGVTVAKSIDLKDKYKNIGAKLVQDVANNTNEEAGDGTTTATVLARSIAKEGFEKISKGANPVEIRRGVMLAVDAVIAELKKQSKPVTTPEEIAQVATISANGDKEIGNIISDAMKKVGRKGVITVKDGKTLNDELEIIEGMKFDRGYISPYFINTSKGQKCEFQDAYVLLSEKKISSIQSIVPALEIANAHRKPLVIIAEDVDGEALSTLVLNRLKVGLQVVAVKAPGFGDNRKNQLKDMAIATGGAVFGEEGLTLNLEDVQPHDLGKVGEVIVTKDDAMLLKGKGDKAQIEKRIQEIIEQLDVTTSEYEKEKLNERLAKLSDGVAVLKVGGTSDVEVNEKKDRVTDALNATRAAVEEGIVLGGGCALLRCIPALDSLTPANEDQKIGIEIIKRTLKIPAMTIAKNAGVEGSLIVEKIMQSSSEVGYDAMAGDFVNMVEKGIIDPTKRRGLIMLARLVLNS

SEQ ID NO: 53432 - protein, 21 aa, Homo sapiens
MASGVTVNDEVIKVFNDMKGS

SEQ ID NO: 53433 - protein, 101 aa, Homo sapiens
MASDTPESLMALCTDFCLRNLDGTLGYLLDKETLRLHPDIFLPSEICDRLVNEYVELVNAACNFEPHESFFSLFSDPRSTRLTRIHLREDLVQDQDLEAIR

SEQ ID NO: 53434 - protein, 373 aa, Homo sapiens
MAKERRRAVLELLQRPGNARCADCGAPDPDWASYTLGVFICLSCSGIHRNIPQVSKVKSVRLDAWEEAQVEFMASHGNDAARARFESKVPSFYYRPTPSDCQLLREQWIRAKYERQEFIYPEKQEPYSAGYREGFLWKRGRDNGQFLSRKFVLTEREGALKYFNRNDAKEPKAVMKIEHLNATFQPAKIGHPHGLQVTYLKDNSTRNIFIYHEDGKIVDWFNALRAARFHYLQVAFPGAGDADLVPKLSRNYLKEGYMEKTGPKQTEGFRKRWFTMDDRRLMYFKDPLDAFARGEVFIGSKESGYTVLHGFPPSTQGHHWPHGITIVTPDRKFLFACETESDQREWVAAFQKAVDRPMLPQEYAVEAHFKHKP

SEQ ID NO: 53435 - protein, 176 aa, Homo sapiens
MAGNKDALLADLESTTSHISKRPVFLSEETPYSYPTGNHTYQEIAVPPPVPPPPSSEALNGTILDPLDQWQPSSSRFIHQQPQSSSPVYGSSAKTSSVSNPQDSVGSPCSRVGEEEHVYSFPNKQKSAEPSPTVMSTSLGSNLSELDRLLLELNAVQHNPPGFPADEANSSPPLPG

SEQ ID NO: 53436 - protein, 205 aa, Homo sapiens
FQQQVLDILENIPNDCQTILVSATIPTSIEQLASQLLHNPVRIITGEKNLPCANVRQIILWVEDPAKKKKLFEILNDKKLFKPPVLVFVDCKLGADLLSEAVQKITGLKSISIHSEKSQIERKNILKGLLEGDYEVVVSTGVLGRGLDLISVRLVVNFDMPSSMDEYVHQLNIIWVVPFSGININASLIALLYSLLTTINMKFTP

SEQ ID NO: 53437 - protein, 53 aa, Homo sapiens
MLTFMASDSEEEVCDERTSLMSAESPTPRSCQEGRQGPEDGENTAQWHLHAIH

SEQ ID NO: 53438 - protein, 48 aa, Homo sapiens
  MOD_RES (1)..(1): Any amino acid
XKGHRNQVTCLSVSTDGSVLLSGSHDETVRLWDVQSKQCIRTVALKAC

SEQ ID NO: 53439 - protein, 133 aa, Homo sapiens
MSGLRPGTQVDPEIELFVKAGSDGESIGNCPFCQRLFMILWLKGVKFNVTTVDMTRYPHLSPKYKESFDVGCNLFAKFSAYIKNTQKEANKNFEKSLLKEFKRLDDYLNTPLLDEIDPDSAEEPPVSRRLFLD

SEQ ID NO: 53440 - protein, 405 aa, Homo sapiens
MSMELLQEAGVSVPKGYVAKSPDEAYAIAKKLGSKDVVIKAQVLAGGRGKGTFESGLKGGVKIVFSPEEAKAVSSQMIGKKLFTKQTGEKGRICNQVLVCERKYPRREYYFAITMERSFQGPVLIGSSHGGVNIEDVAAESPEAIIKEPIDIEEGIKKEQALQLAQKMGFPPNIVESAAENMVKLYSLFLKYDATMIEINPMVEDSDGAVLCMDAKINFDSNSAYRQKKIFDLQDWTQEDERDKDAAKANLNYIGLDGNIGCLVNGAGLAMATMDIIKLHGGTPANFLDVGGGATVHQVTEAFKLITSDKKVLAILVNIFGGIMRCDVIAQGIVMAVKDLEIKIPVVVRLQGTRVDDAKALIADSGLKILACDDLDEAARMVVKLSEIVTLAKQAHVDVKFQLPI

SEQ ID NO: 53441 - protein, 42 aa, Homo sapiens
MEKCEAAAKDIRGETLNHHVNARHLDLASLKSIREFAAKIIE

SEQ ID NO: 53442 - protein, 237 aa, Homo sapiens
EHVTCVQSILDEFLQTYGSLIPLSTDEVVEKLEDIFQQEFSTPSRKGLVLQLIQSYQRMPGNAMVRGFRVAYKRHVLTMDDLGTLYGQNWLNDQVMNMYGDLVMDTVPEKVDIFNKELLLIPIHLEVHWSLISVDVRRRTITYFDSQRTLNRRCPKHIAKYLQAEAVKKDRLDFHQGWKGYFKMNVARQNNDSDCGAFVLQYCKHLALSQPFSFTQQDMPKLRRQIYKELCHCKLTV

SEQ ID NO: 53443 - protein, 172 aa, Homo sapiens
MLKALFLTMLTLALVKSQDTEETITYTQCTDGYEWDPVRQQCKDIDECDIVPDACKGGMKCVNHYGGYLCLPKTAQIIVNNEQPQQETQPAEGTSGATTGVVAASSMATSGVLPGGGFVASAAAVAGPEMQTGRNNFVIRRNPADPQRIPSNPSHRIQCAAGYEQSEHNVCQ

SEQ ID NO: 53444 - protein, 49 aa, Homo sapiens
MGLGLLLPLLLLWTRGTQGSELDPKGQHVCVASRWVSWESDACGQQPLC

SEQ ID NO: 53445 - protein, 236 aa, Homo sapiens
MGKRRCVPPLEPKLAAGCCGVKKPKLSGSGTHSHGNQSTTVPGSSSGPLQNHQHVDSSSGRENVSDLTLGPGNSPITRMNPASGALSPLPRPNGTANTTKNLVVTAEMCCYCFDVLYCHLYGFPQPRLPRFTNDPYPLFVTWKTGRDKRLRGCIGTFSAMNLHSGLREYTLTSALKDSRFPPLTREELPKLFCSVSLLTNFEDASDYLDWEVRTAAFGTLHLSLHLGSGRGPWDSN

SEQ ID NO: 53446 - protein, 76 aa, Homo sapiens
MPEELPRWSTMEGDCLSCMKYLMFVFNFFIFLGGACLLAIGIWVMVDPTGFREIVAANPLLLTGAYILLAMGGLLF

SEQ ID NO: 53447 - protein, 47 aa, Homo sapiens
MELVRRLMPLTLLILSCLAELTMAEAEGRRSVNYLHQYNHLFCILNF

SEQ ID NO: 53448 - protein, 1261 aa, Homo sapiens [sequence omitted]

SEQ ID NO: 53449 - protein, 96 aa, Homo sapiens
MLRHSPSLWELVEEHVPLRERREVKRILGEAAVDLSLELRAEPPPFRTLPSPVARYPSSPCRWRCYGHCSKRLDPLKPPAPAPSLTPLLFWHHRLS

SEQ ID NO: 53450 - protein, 48 aa, Homo sapiens
MEDELEPSLRPRTQIQGRILLLTICAAGIGGTFQFGYNLSIINAPTLI

SEQ ID NO: 53451 - protein, 129 aa, Homo sapiens
SKSCDDGLNTFRDEGRVLRRLPNRIPSLRMLRSFFTDGSLDSWGTSEDADAPSKRHSTSDLSDATFSDIRREGWLYYKQILTKKGKKAGSGLRQWKRVYAALRARSLSLSKERREPGPAAAGAAAAGAG

SEQ ID NO: 53452 - protein, 105 aa, Homo sapiens
MRRFLRPGHDPVRERLKRDLFQFNKTVEHGFPHQPSALGYSPSLRILAIGTRSGAIKLYGAPGVEFMGLHQENNAVTQIHLLPGQCQLVTLLDDNSLHLWSLKVK

SEQ ID NO: 53453 - protein, 118 aa, Homo sapiens
MLLLLLSIIVLHVAVLVLLFVSTIVSQWIVGNGHATDLWQNCSTSSSGNVHHCFSSSPNEWLQSVQATMILSIIFSILSLFLFFCQLFTLTKGGRFYITGIFQILAESNSSQMCGYRD

SEQ ID NO: 53454 - protein, 164 aa, Homo sapiens
MESALPAAGFLYWVGAGTVAYLALRISYSLFTALRVWGVGNEAGVGPGLGEWAEEKFKVETRTIAVDFASEDIYDKIKTGLAGLEIGILVNNVGMSYEYPEYFLDVPDLDNVIKKMININILSVCKMTQLVLPGMVERSKGAILNISSGSGMLPVPLLTIYSAT

SEQ ID NO: 53455 - protein, 94 aa, Homo sapiens
MAMTAGTTTTFPMSNHTRERVTVAKLTLENFYSNLILQHEERETRQKKLEVAMEEEGLADEEKKLRRSQHARKETEFLRLKRTRLGLDDFESLK

SEQ ID NO: 53456 - protein, 149 aa, Homo sapiens
MGSLKEELLKAIWHAFTALDQDHSGKVSKSQLKVLSHNLCTVLKVPHDPVALEEHFRDDDEGPVSNQGYMPYLNRFILEKITKTLPASEPSDMLLPVLSKTTLTRLNSIGCVGPSVSKKTSQRIPCSLQKKMHLKYGLFSTFYLRTSIH

SEQ ID NO: 53457 - protein, 34 aa, Homo sapiens
RQEKLVEKHKEIRQQILDEKPKIQTVNSVMRWLP

SEQ ID NO: 53458 - protein, 258 aa, Homo sapiens
  MOD_RES (1)..(1): Any amino acid
XNWNAEKRSPTFHLGDAAHLQAEIHTGSHVPLRLFVDHCVATPTPDQNASPYHTIVDFHGCLVDGLTDASSAFKVPRPGPDTLQFTVDVFHFANDSRNMIYITCHLKVTLAEQDPDELNKACSFSKPSNRQQKSKLLLFHLSWFPVEGSADICQCCNKGDCGTPSHSRRQPHVMSQWSRSASRNRRHVTEEADVTVGPLIFLDRRGDHEVEQWALPSDTSVVLLGVGLAVVVSLTLTAVILVLTRRCRTASHPVSASE

SEQ ID NO: 53459 - protein, 48 aa, Homo sapiens
MAWFALYLLSLLWATAGTSTQTQSSCCEYDVFPRRSGKQLPWGRGCDL

SEQ ID NO: 53460 - protein, 272 aa, Homo sapiens
MGVWLNKDDYIRDLKRIILCFLIVYMAILVGTDQDFYSLLGVSKTASSREIRQAFKKLALKLHPDKNPNNPNAHGDFLKINRAYEVLKDEDLRKKYDKYGEKGLEDNQGGQYESWNYYRYDFGIYDDDPEIITLERREFDAAVNSGELWFVNFYSPGCSHCHDLAPTWRDFAKEVDGLLRIGAVNCGDDRMLCRMKGVNSYPSLFIFRSGMAPVKYHGDRSKESLVSFAMQHVRSTVTELWTGNFVNSIQTAFAAGIGWLITFCSKGGGWSC

SEQ ID NO: 53461 - protein, 150 aa, Homo sapiens
  MOD_RES (1)..(1): Any amino acid
XMHAEEREECKGKQKDGTSFGEYGGWYKACKVDSPTVTTTLKNLGALYRRQGKFEAAETLEEAAMRSRKQRSISEIPKKILSANGSNHFPLPGSQGLDNVHKQRVAEVLNDPENMEKRRSRESLNVDVVKYESGPDGGEEMRKMKLGLVN

SEQ ID NO: 53462 - protein, 190 aa, Homo sapiens
MNCRSEVLEVSVEGRQVEEAMLAVLHTVLLHRSTGKFHYKKEGTYSIGTVGTQDVDCDFIDFTYVRVSSEELDRALRKVVGEFKDALRNSGGDGLGQMSLEFYQKKKSRWPFSDECIPWEVWTVKVHVVALATEQERQICREKVGEKLCEKIINIVEVMNRHEYLPKMPTQSEVDNVFDTGLRDVQPYLY

SEQ ID NO: 53463 - protein, 550 aa, Homo sapiens
VMAFGILNYFRDAWNIFDFVTVLGSITDILVTEFGNPNNFINLSFLRLFRAARLIKLLRQGYTIRILLWTFVQSFKVFGNIGIDVEDEDSDEDEFQITEHNNFRTFFQALMLLFRSATGEAWHNIMLSCLSGKPCDKNSGILTRECGNEFAYFYFVSFIFLCSFLRLLRMDLPVADDNTVHFNSTLMALIRTALDIKIAKGGADKQQMDAELRKEMMAIWPNLSQKTLDLLVTPHKSTDLTVGKIYAAMMIMEYYRQSKAKKLQAMREEQDRTPLMFQRMEPPSPTQEGGPGQNALPSTQLDPGGALMAHESGLKESPSWVTQRAQEMFQKTGTWSPEQGPPTDMPNSQPNSQSVEMREMGRDGYSDSEHYLPMEGQGRAASMPRLPAENQRRRGRPRGNNLSTISDTSPMKRSASVLGPKARRLDDYSLERVPPEENQRHHQRRRDRSHRASERSLGRYTDVDTGLGTDLSMTTQSGDLPSKERDQERGRPKDRKHRQHHHHHHHHHHPPPPDKDRYAQERPDHGRARARDQRWSRSPSEGREHMAHRQ

SEQ ID NO: 53464 - protein, 225 aa, Homo sapiens
MVKKQQQQPPQKNHPEFAPALHAADWNKYDDRLMKAAERGDVEKVTSILAKKGVNPGKLDVEGRSVFHVVTSKGNLECLNAILIHGVDITTSDTAGRNALHLAAKYGHALCLQKLLQYNCPTEHADLQGRTALHDAAMADCPSSIQLLCDHGASVNAKDVDGRTPLVLATQMSRPTICQLLIDRGADVNSRDKQNRTALMLGCEYGCRDAVEVLIKNGADISLLD

SEQ ID NO: 53465 - protein, 177 aa, Homo sapiens
MVAELAAAELPSSQREGVISDTFAPSPDKTIDCDVITLMGTPSGTAEPYDGTKARLYSLQSDPATYCNEPDGPPELFDAWLSQFCLEEKKGEISELLVGSPSIRALYTKMVPAAVSHSEFWHRYFYKVHQLEQEQARRDALKQRAEQSISEEPGWEEEEEELMGISPISPKEAKVPV

SEQ ID NO: 53466 - protein, 307 aa, Homo sapiens
MADVLEDSKDKVQENLLANGVDLVTYITRFQWDMAKYPIKQSLKNISEIIAKGVTQIDNDLKSRASAYNNLKGNLQNLERKNAGSLLTRSLAEIVKKDDFVLDSEYLVTLLVVVPKLNHNDWIKQYETLAEMVVPRSSNVLSEDQDSYLCNVTLFRKAVDDFRHKARENKFIVRDFQYNEEEMKADKEEMNRLSTDKKKQFGPLVRWLKVNFSEAFIAWIHVKALRVFVESVLRYGLPVNFQAMLLQPNKKTLKKLREVLHELYKHLDSSAAAIIDAPMDIPGLNLSQQEYYPYVYYKIDCNLLEFK

SEQ ID NO: 53467 - protein, 121 aa, Homo sapiens
MTNVYSLDGILVFGLLFVCTCAYFKKVPRLKTWLLSEKKGVWGVFYKGEAMSGQGEETAISGQCGATNRCDWNQAACCCGNCLCCNGLLRPVYKMNSKAPKSSTANQGDGDEEPVGDLNPV

SEQ ID NO: 53468 - protein, 1990 aa, Homo sapiens
MKRLLQESEEEIMVTLGPSSRLSPDKAKAETMCGTKSKSSGPAGSLPEDNSLPPCCGSAALAIGGDRDGDLAQLCSFGQQNNSQLPLGSTAYVSGSGSQDPSSVSITTSCQEPSERNQTKTLLSRGHGQGCSREQREPLGDVVEYIIRELQGISRLQTEIAELQQHLSQVQGSVDEVSSCVDSVLSEIEGLQVSTCSLAKVCEGEKAQEPHVDRPSEEAILYLYGLPEQDGENTMELVESFLAKHLCVNGMQCNRYIKKAYRAGTSPSPRPTVVKLAHLEHRDFILQKSILLQNVGVRIATREEPSCPQGNKNPQKESISFFQQQHQDYSQTSLNQDEPVLQMETGDRGPITGTYQMKAQDQQREHQAPEQQGPCFLLKNNLSKESDVPKLGDEIKGASRTSQVISGSCDELSEKKASLSTPHQFEEPALVLISKEEASGKSQFFKQYSQKHEACKVGKPENDCHDKSEASSCLSLSGLLKTERINAEDKLLGCEAGLDILSSKELEDLLADKSRRLAALSCDSMMEEIIIGPETFSDMVHIDLNEEEECAAHVLKDVFDKSSCVLGGSQEDEDVEIKFYTSKLGRAIHHFRSALQGVFQKLENSGSISPEDLESNESGSQSENSDRLLGTVSSGGAQDCSLESPGSQGSESLLSVVSGGVGVSTQGEQTPQDPSTFSLASNNSLPSVALAPCLGSETCSRPGSPKQGRLSLEQVCTETVYLNKCINNFKNVLREKRLRQKKLLHELVQKANRLSVEDIHSEEKRGALQIPDDGDPSLPQWLPEGPAGGLYGIDSMPDLRRKKPLPLVSDLSLVQSRKAGITSAMATRTSLKDEELKSHVYKKTLQALIYPISCTTPHNFEVWTATTPTYCYECEGLLWGIARQGMRCSECGVKCHEKCQDLLNADCLQRAAEKSCKHGAEDRTQNIIMAMKDRMKIRERNKPEIFEVIRDVFTVNKAAHVQQMKTVKQSVLDGTSKWSAKITITVVCAQGLQAKDKTGSSDPYVTVQVSKTKKRTKTIFGNLNPVWEEKFHFECHNSSDRIKVRVWDEDDDIKSRVKQRLKRESDDFLGQTIIEVRTLSGEMDVWYNLEKRTDKSAVSGAIRLQISVEIKGEEKVAPYHVQYTCLHENLFHYLTDIQGSGGVRIPEARGDDAWKVYFDETAQEIVDEFAMRYGIESIYQAMTHFACLSSKYMCPGVPAVMSTLLANINAYYAHTTASTNVSASDRFAASNFGKERFVKLLDQLHNSLRIDLSTYRNNFPAGSPERLQDLKSTVDLLTSITFFRMKVQELQSPPRASQVVKDCVKACLNSTYEYIFNNCHDLYSRQYQLKQELPPEEQGPSIRNLDFWPKLITLIVSIIEEDKNSYTPVLNQFPQELNVGKVSAEVMWHLFAQDMKYALEEHEKDHLCKSADYMNLHFKVKWLHNEYVRDLPVLQGQVPEYPAWFEQFVLQWLDENEDVSLEFLRGALERDKKDGFQQTSEHALFSCSVVDVFTQLNQSFEIIRKLECPDPSILAHYMRRFAKTIGKVLMQYADILSKDFPAYCTKEKLPCILMNNVQQLRVQLEKMFEAMGGKELDLEAADSLKELQVKLNTVLDELSMVFGNSFQVRIDECVRQMADILGQVRGTGNASPDARASAAQDADSVLRPLMDFLDGNLTLFATVCEKTVLKRVLKELWRVVMNTMERMIVLPPLTDQTGTQLIFTAAKELSHLSKLKDHMVREETRNLTPKQCAVLDLALDTIKQYFHAGGNGLKKTFLEKSPDLQSLRYALSLYTQTTDTLIKTFVRSQTTQVHDGKGIRFTANEDIRPEKGSGVDDPVGEVSIQVDLFTHPGTGEHKVTVKVVAANDLKWQTAGMFRPFVEVTMVGPHQSDKKRKFTTKSKSNNWAPKYNETFHFLLGNEEGPESYELQICVKDYCFAREDRVLGLAVMPLRDVTAKGSCACWCPLGRKIHMDETGLTILRILSQRSNDEVAREFVKLKSESRSTEEGS

SEQ ID NO: 53469 - protein, 300 aa, Homo sapiens
MDIYDTQTLGVVVFGGFMVVSAIGIFLVSTFSMKETSYEEALANQRKEMAKTHHQKVEKKKKEKTVEKKGKTKKKEEKPNGKIPDHDPAPNVTVLLREPVRAPAVAVAPTPVQPPIIVAPVATVPAMPQEKLASSPKDKKKKEKKVAKVEPAVSSVVNSIQVLTSKAAILETAPKEVPMVVVPPVGAKGNTPATGTTQGKKAEGTQNQSKKAEGAPNQGRKAEGTPNQGKKTEGTPNQGKKAEGTPNQGKKAEGTPNQGKKAEGAQNQGKKVDTTPNQGKKVEGAPTQGRKAEGAQNQAK

SEQ ID NO: 53470 - protein, 62 aa, Homo sapiens
  MOD_RES (1)..(1): Any amino acid
XFQHSVLSTSTQLLFKDLLQNTDAHKRAFHEIYRTRSVNGIPVPPDQLEDMAERVKAEVLDH

SEQ ID NO: 53471 - protein, 208 aa, Homo sapiens
MNKHQKPVLTGQRFKTRKRDEKEKFEPTVFRDTLVQGLNEAGDDLEAVAKFLDSTGSRLDYRRYADTLFDILVAGSMLAPGGTRIDDGDKTKMTNHCVFSANEDHETIRNYAQVFNKLIRRYKYLEKAFEDEMKKLLLFLKAFSETEQTKLAMLSGILLGNGTLPATILTSLFTDSLVKEGIAASFAVKLFKAWMAEKDANSVTSSLR

SEQ ID NO: 53472 - protein, 888 aa, Homo sapiens
LLESKLESTLKKSLEIKEEKIAALEARLEESTNYNQQLRQELKTVKKNYEALKQRQDEERMVQSSPPISGEDNKWERESQETTRELLKVKDRLIEVERNNATLQAEKQALKTQLKQLETQNNNLQAQILALQRQTVSLQEQNTTLQTQNAKLQVENSTLNSQSTSLMNQNAQLLIQQSSLENENESVIKEREDLKSLYDSLIKDHEKLELLHERQASEYESLISKHGTLKSAHKNLEVEHRDLEDRYNQLLKQKGQLEDLEKMLKVEQEKMLLENKNHETVAAEYKKLCGENDRLNHTYSQLLKETEVLQTDHKNLKSLLNNSKLEQTRLEAEFSKLKEQYQQLDITSTKLNNQCELLSQLKGNLEEENRHLLDQIQTLMLQNRTLLEQNMESKDLFHVEQRQYIDKLNELRRQKEKLEEKIMDQYKFYDPSPPRRRGNWITLKMRKLIKSKKDINRERQKSLTLTPTRSDSSEGFLQLPHQDSQDSSSVGSNSLEDGQTLGTKKSSTMNDLVQSMVLAGQWTGSTENLEVPDDISTGKRRKELGAMAFSTTAINFSTVNSSAGFRSKQLVNNKDTTSFEDISPQGVSDDSSTGSRVHASRPASLDSGRTSTSNSNNNASLHEVKAGAVNNQSRPQSHSSGEFSLLHDHEAWSSSGSSPIQYLKRQTRSSPVLQHKISETLESRHHKIKTGSPGSEVVTLQQFLEESNKLTSVQIKSSSQENLLDEVMKSLSVSSDFLGKDKPVSCGLARSVSGKTPGDFYDRRTTKPEFLRPGPRKTEDTYFISSAGKPTPGTQGKIKLVKESSLSRQSKDSNPYATLPRASSVISTAEGTTRRTSIHDFLTKDSRLPISVDSPPAAADSNTTAASNVDKVQESRNSKSRSREQQSS

SEQ ID NO: 53473 - protein, 566 aa, Homo sapiens
MGSGARFPSGTLRVRWLLLLGLVGPVLGAARPGFQQTSHLSSYEIITPWRLTRERREAPRPYSKQVSYVIQAEGKEHIIHLERNKDLLPEDFVVYTYNKEGTLITDHPNIQNHCHYRGYVEGVHNSSIALSDCFGLRGLLHLENASYGIEPLQNSSHFEHIIYRMDDVYKEPLKCGVSNKDIEKETAKDEEEEPPSMTQLLRRRRAVLPQTRYVELFIVVDKERYDMMGRNQTAVREEMILLANYLDSMYIMLNIRIVLVGLEIWTNGNLINIVGGAGDVLGNFVQWREKFLITRRRHDSAQLVLKKGFGGTAGMAFVGTVCSRSHAGGINVFGQITVETFASIVAHELGHNLGMNHDDGRDCSCGAKSCIMNSGASGSRNFSSCSAEDFEKLTLNKGGNCLLNIPKPDEAYSAPSCGNKLVDAGEECDCGTPKECELDPCCEGSTCKLKSFAECAYGDCCKDCRFLPGGTLCRGKTSECDVPEYCNGSSQFCQPDVFIQNGYPCQNNKAYCYNGMCQYYDAQCQVIFGSKAKAAPKDCFIEVNSKGDRFGNCGFSGNEYKKCATG

SEQ ID NO: 53474 - protein, 269 aa, Homo sapiens
MGRPAGLFPPLCPFLGFRPEACWERHMQIERAPSVPPFLRWAGYRPGPVRRRGKVELIKFVRVQWRRPQVEWRRRRWGPGPGASMAGSEELGLREDTLRVLAAFLRRGEAAGSPVPTPPRSPAQEEPTDFLSRLRRCLPCSLGRGAAPSESPRPCSLPIRPCYGLEPGPATPDFYALVAQRLEQLVQEQLKSPPSPELQGPPSTEKEAILRRLVALLEEEAEVINQKVMGICPTPWQGQELRNGGHPGCFTRGLELAIGLSSFSEAATR

SEQ ID NO: 53475 - protein, 154 aa, Homo sapiens
MYGKQKIYFADQDQFDMVSDADLQVLDGKIVALTAKVQSLQQSCRYMEAELKELSSALTTPEMQKEIQELKKECAGYRERLKNIKAATNHVTPEEKEQVYRERQKYCKEWRKRKRMATELSDAILEGYPKSKKQFFEEVGIETDEDYNVTLPDP

SEQ ID NO: 53476 - protein, 90 aa, Homo sapiens
MMLMPPSQEEEKDKPVAPSNVLSMAQLRTLPLADQIKILMKNVKVMPFANLMSLLGPSIDSVAVLRGIQKVAMLVQGNWVVKSDILYPKD

SEQ ID NO: 53477 - protein, 55 aa, Homo sapiens
VKETDNEVRMRLLQFVTGTCRLPLGGFAELMGSNGPQKFCIEKVGKDTWLPRSHT

SEQ ID NO: 53478 - protein, 672 aa, Homo sapiens
MKQRFSALQLLKLLLLLQPPLPRALREALCPEPCNCVPDGALRCPGPTAGLTRLSLAYLPVKVIPSQAFRGLNEVIKIEISQIDSLERIEANAFDNLLNLSEILIQNTKNLRYIEPGAFINLPRLKYLSICNTGIRKFPDVTKVFSSESNFILEICDNLHITTIPGNAFQGMNNESVTLKLYGNGFEEVQSHAFNGTTLTSLELKENVHLEKMHNGAFRGATGPKTLDISSTKLQALPSYGLESIQRLIATSSYSLKKLPSRETFVNLLEATLTYPSHCCAFRNLPTKDYSSMLAESELSGWDYEYGFCLPKTPRCAPEPDAFNPCEDIMGYDFLRVLIWLINILAIMGNMTVLFVLLTSRYKLTVPRFLMCNLSFADFCMGLYLLLIASVDSQTKGQYYNHAIDWQTGSGCSTAGFFTVFASELSVYTLTVITLERWHTITYAIHLDQKLRLRHAILIMLGGWLFSSLIAMLPLVGVSNYMKVSICFPMDVETTLSQVYILTILILNVVAFFIICACYIKIYFAVRNPELMATNKDTKIAKKMAILIFTDFTCMAPISFFAISAAFKVPLITVTNSKVLLVLFYPINSCANPFLYAIFTKTFQRDFFLLLSKFGCCKRRAELYRRKDFSAYTSNCKNGFTGSNKPSQSTLKLSTLHCQGTALLDKTRYTEC

SEQ ID NO: 53479 - protein, 748 aa, Homo sapiens
MSQWYELQQLDSKFLEQVHQLYDDSFPMEIRQYLAQWLEKQDWEHAANDVSFATIRFHDLLSQLDDQYSRFSLENNFLLQHNIRKSKRNLQDNFQEDPIQMSMIIYSCLKEERKILENAQRFNQAQSGNIQSTVMLDKQKELDSKVRNVKDKVMCIEHEIKSLEDLQDEYDFKCKTLQNREHETNGVAKSDQKQEQLLLKKMYLMLDNKRKEVVHKIIELLNVTELTQNALINDELVEWKRRQQSACIGGPPNACLDQLQNWFTIVAESLQQVRQQLKKLEELEQKYTYEHDPITKNKQVLWDRTFSLFQQLIQSSFVVERQPCMPTHPQRPLVLKTGVQFTVKLRLLVKLQELNYNLKVKVLFDKDVNERNTVKGKFNILGTHTKVMNMEESTNGSLAAEFRHLQLKEQKNAGTRTNEGPLIVTEELHSLSFETQLCQPGLVIDLETTSLPVVVISNVSQLPSGWASILWYNMLVAEPRNLSFFLTPPCARWAQLSEVLSWQFSSVTKRGLNVDQLNMLGEKLLGPNASPDGLIPWTRFCKENINDKNFPFWLWIESILELIKKHLLPLWNDGCIMGFISKERERALLKDQQPGTFLLRFSESSREGAITFTWVERSQNGGEPDFHAVEPYTKKELSAVTFPDIIRNYKVMAAENIPENPLKYLYPNIDKDHAFGKYYSRPKEAPEPMELDGPKGTGYIKTELISVSEVHPSRLQTTDNLLPMSPEEFDEVSRIVGSVEFDSMMNTV

SEQ ID NO: 53480 - protein, 458 aa, Homo sapiens
MASGADSKGDDLSTAILKQKNRPNRLIVDEAINEDNSVVSLSQPKMDELQLFRGDTVLLKGKKRREAVCIVLSDDTCSDEKIRMNRVVRNNLRVRLGDVISIQPCPDVKYGKRIHVLPIDDTVEGITGNLFEVYLKPYFLEAYRPIRKGDIFLVRGGMRAVEFKVVETDPSPYCIVAPDTVIHCEGEPIKREDEEESLNEVGYDDIGGCRKQLAQIKEMVELPLRHPALFKAIGVKPPRGILLYGPPGTGKTLIARAVANETGAFFFLINGPEIMSKLAGESESNLRKAFEEAEKNAPAIIFIDELDAIAPKREKTHGEVERRIVSQLLTLMDGLKQRAHVIVMAATNRPNSIDPALRRFGRFDREVDIGIPDATGRLEILQIHTKNMKLADDVDLEQVANETHGHVGADLAALCSEAALQAIRKKMDLIDLEDETIDAEVMNSLAVTMDDFRFSLLF

SEQ ID NO: 53481 - protein, 121 aa, Homo sapiens
  MOD_RES (1)..(1): Any amino acid
XPGPTGAKGLRGIPGFAGADGGPGPRGLPGDAGREGFPGPPGFIGPRGSKGAVGLPGPDGSPGPIGLPGPDGPPGERGLPGEVLGAQPGPRGDAGVPGQPGLKGLPGDRGPPGFRESVQVV

SEQ ID NO: 53482 - protein, 212 aa, Homo sapiens
MQECPSGFIRNGSQSMYCIPCEGPCPKVCEEEKKTKTIDSVTSAQMLQGCTIFKGNLLINIRRGNNIASELENFMGLIEVVTGYVKIRHSHALVSLSFLKNLRLILGEEQLEGNYSFYVLDNQNLQQLWDWDHRNLTIKAGKMYFAFNPKLCVSEIYRMEEVTGTKGRQSKGDINTRNNGERASCESDVLHFTSTTTSKNRIIITWHRYRPP

SEQ ID NO: 53483 - protein, 236 aa, Homo sapiens
  MOD_RES (1)..(1): Any amino acid
XSLGPGAGPRGCREEPGPLRRREAAAEARKSHSPVKRPRKAQRLRVAYEGSDSEKGEGAEPLKVPVWEPQDWQQQLVNIRAMRNKKDAPVDHLGTEHCYDSSAPPKSKVKYIKQTSAILQQHYGGDIPASVAELVALPGVGPKMAHLAMAVAWGTVSGIAAVDTHVHRIANRLRWTKKATKSPEETRAALEEWLPRELWHEINGLLVGFGQQTCLPVHPRCHACLNQALCPAAQGL

SEQ ID NO: 53484 - protein, 273 aa, Homo sapiens
MAASKVKQDMPPPGGYGPIDYKRNLPRRGLSGYSMLAIGIGTLIYGHWSIMKWNRERRRLQIEDFEARIALLPLLQAETDRRTLQMLRENLEEEAIIMKDVPDWKAFPLPALSRKQRTVLVVCGPEQNGAVGLVCARHLRVFEYEPTIFYPTRSLDLLHRDLTTQCEKMDIPFLSYLPTEVQLINEAYGLVVDAVLGPGVEPGEVGGPCTRALATLKLLSIPLVSLDIPSGMPGRGGHIGAWGAWVEAPVPQLLVAPACLNLNLPSLDGPTLG

SEQ ID NO: 53485 - protein, 225 aa, Homo sapiens
MSKEIFPFCRVGNIPYEATEEQLKDIFSEVGPVVSFRLVYDRETGKPKGYGFCEYQDQETALSAMRNLNGREFSGRALRVDNAASEKNKEELKSLGTGAPVIESPYGETISPEDAPESISKAVASLPPEQMFELMKQMKLCVQNSPQEARNMLLQNPQLAYALLQAQVVMRIVDPEIALKILHRQTNIPTLIAGNPQPVHGAGPGSGSNVSMNQQNPQAPQAQSL

SEQ ID NO: 53486 - protein, 163 aa, Homo sapiens
MFQIPEFEPSEQEDSSSAERGLGPSPAGDGPSGSGKHHRQAPGLLWDASHQQEQPTSSSHHGGRTSYSPSWESEDSENPSAGMLAEASAGMSAPAADSEAQHAENVKLEALGLWRSGVATAPTPRGRRTTKGWGRSPAPFGAARARRPPTSGQHSAMAASSGG

SEQ ID NO: 53487 - protein, 112 aa, Homo sapiens
IIPRTEVEKAIRMSRSRINDAFRLNDNSLEFLGIQPTLGPPNQPPVSIWLIVFGVVMGVIVVGIVILIFTGIRDRKKKNKARSGENPYASIDISKGENNPGFQNTDDVQTSF

SEQ ID NO: 53488 - protein, 178 aa, Homo sapiens
MLAGGVRSMPSPLLACWQPILLLVLGSVLSGSATGCPPRCECSAQDRAVLCHRKRFVAVPEGIPTETRLLDLGKNRIKTLNQDEFASFPHLEELELNENIVSAVEPGAFNNLFNLRTLGLRSNRLKLIPLGVFTGLSNLTKLDISENKIVILLDYMFQDLYNLKSLEVGDNDLVYISH

SEQ ID NO: 53489 - protein, 860 aa, Homo sapiens
MEVDTEEKRHRTRSKGVRVPVEPAIQELFSCPTPGCDGSGHVSGKYARHRSVYGCPLAKKRKTQDKQPQEPAPKRKPFAVKADSSSVDECDDSDGTEDMDEKEEDEGEEYSEDNDEPGDEDEEDEEGDREEEEEIEEEDEDDDEDGEDVEDEEEEEEEEEEEEEEEENDPSRTEKKESKCPTPGCDGTGHVTGLYPHHRSLSGCPHKDRVPPEILAMHESVLKCPTPGCTGRGHVNSNRNSHRSLSGCPIAAAEKLAKAQEKHQSCDVSKSSQASDRVLRPMCFVKQLEIPQYGYRNNVPTTTPRSNLAKELEKYSKTSFEYNSYDNHTYGKRAIAPKVQTRDISPKGYDDAKRYCKDPSPSSSSTSSYAPSSSSNLSCGGGSSASSTCSKSSFDYTHDMEAAHMAATAILNLSTRCREMPQNLSTKPQDLCATRNPDMEVDENGTLDLSMNKQRPRDSCCPILTPLEPMSPQQQAVMNNRCFQLGEGDCWDLPVDYTKMKPRRIDEDESKDITPEDLDPFQEALEERRYPGEVTIPSPKPKYPQCKESKKDLITLSGCPLADKSIRSMLATSSQELKCPTPGCDGSGHITGNYASHRSLSGCPRAKKSGIRIAQSKEDKEDQEPIRCPVPGCDGQGHITGKYASHRSASGCPLAAKRQKDGYLNGSQFSWKSVKTEGMSCPTPGCDGSGHVSGSFLTHRSLSGCPRATSAMKKAKLSGEQMLTIKQRASNGIENDEEIKQLDEEIKELNESNSQMEADMIKLRTQITTMESNLKTIEEENKVIEQQNESLLHELANLSQSLIHSLANIQLPHMDPINEQNFDAYVTTLTEMYTNQDRYQSPENKALLENIKQAVRGIQV

SEQ ID NO: 53490 - protein, 435 aa, Homo sapiens
MSDKDDIETPLLTEAAPILEDGNCEPAKNSESVDQGISNVIEKAETSLGIPGPSEISTEVKYVAGETNAKENENSSPVAGAFGVFSTISTAVQSTGKSVISGGLDALEFIGKKTMDVIAEGDPGFKRTKGLMNRNATLSQVLREAKEKEEIRTSNEVTVETDKKTHYGLLFDEFQGLSHLEALEMLSQESEIKVKSILNSLSGEELETLKVELEQLKETFSLAEFCEEEEEEKKGDEDFTKDITELFSQLHVSSKPEKLARARNTAHEWIRKSLTKPLAENEEGEKQSEAENTEQVNKNSIEDIHAFAIRSLAELTACSIELFHKTAALVLHGRKQEVTAIERSQTLSQMTIVLCKELSSLSKEFTTCLTTAGVKEMADVLNPLITAVFLEASNSASYIQDAFQLLLPVLEISLIENKIESHRHELQGQKPLLEH

SEQ ID NO: 53491 - protein, 323 aa, Homo sapiens
MEPRVRVEGWKVPTSRCRFLLARVLGYLVVMEAVLTEELDEEEQLLRRHRKEKKELQAKIQGMKNAVPKNDKKRRKQLTEDVAKLEKEMEQKHREELEQLKLTTKENKIDSVAVNISNLVLENQPPRISKAQKRREKKAALEKEREERIAEAEIENLTGARHMESEKLAQILAARQLEIKQIPSDGHCMYKAIEDQLKEKDCALTVVALRSQTAEYMQSHVEDFLPFLTNPNTGDMYTPEEFQKYCEDIVNTAAWGGQLELRALSHILQTPIEIIQADSPPIIVGEEYSKKPLILVYMRHAYGLGEHYNSVTRLVNIVTENCS

SEQ ID NO: 53492 - protein, 343 aa, Homo sapiens
MGILEKISEIEKEIARTQKNKATEYHLGLLKAKLAKYRAQLLEPSKSASSKGEGFDVMKSGDARVALIGFPSVGKSTFLSLMTSTASEAASYEFTTLTCIPGVIEYKGANIQLLDLPGIIEGAAQGKGRGRQVIAVARTADVIIMMLDATKGEVQRSLLEKELESVGIRLNKHKPNIYFKPKKGGGISFNSTVTLTQCSEKLVQLILHEYKIFNAEVLFREDCSPDEFIDVIVGNRVYMPCLYVYNKIDQISMEEVDRLARKPNSVVISCGMKLNLDYLLEMLWEYLALTCIYTKKRGQRPDFTDAIILRKGASVEHVCHRIHRSLASQFKAPAPSTVRSGWA

SEQ ID NO: 53493 - protein, 236 aa, Homo sapiens
MALQTLQSSWVTFRKILSHFPEELSLAFVYGSGVYRQAGPSSDQKNAMLDFVFTVDDPVAWHSKNLKKNWSHYSFLKVLGPKIITSIQNNYGAGVYYNSLIMCNGRLIKYGVISTNVLIEDLLNWNNLYIAGRLQKPVKIISVNEDVTLRSALDRNLKSAVTAAFLMLPESFSEEDLFIEIAGLSYSGDFRMVVGEDKTKVLNIVKPNIAHFRELYGSILQENPQVVYKSQQGWLE

SEQ ID NO: 53494 - protein, 267 aa, Homo sapiens
MAQEKMELDLEPDTSYGGTLRRSSSAPLIHGLSDLSQVFQPYTLRTRRNSTTIMSRHSLLLSSSPNRIPSSRLHQIKREEGLDMVNRETAHEREMQTAMQISQSWDESLSLSDSDFDKPEKLYSPKRIDFTPVSPAPSPTRGFGKMFVSSSGLPPSPVPSPRRFSSRRSQSPVKCIRPSVLGPLKRKGEMETESQPKRLFQGTTNMLSPDAAQLSDLSSCSDILDGSSSSSGLSSDPLAKGSATAESPVACSNSCSSFILMDDLSPK

SEQ ID NO: 53495 - protein, 92 aa, Homo sapiens
MDMAQEPVTFRDVAIYFSREEWACLEPSQRALYRDVMLDNFSSVAALGFCSPRPDLVSRLEQWEEPWVEDRERPEFQAVQRGPRPEWDGAAM

SEQ ID NO: 53496 - protein, 132 aa, Homo sapiens
  MOD_RES (1)..(1): Any amino acid
XGKLQAISWARTKKIPFLGVCLGMQLAVIEFARNCLNLKDADSTEFRPNAPVPLVIDMPEHNPGNLGGTMRLGIRRTVFKTENSILISLSLGLASVEHTECPSAFDLRDSLFIGLFCELPMLLEMNLDWDLD

SEQ ID NO: 53497 - protein, 283 aa, Homo sapiens
MPRRSLHAAAVLLLVILKEQPSSPAPVNGSKWTYFVKLNLPSDMHIQGLQSRYSATQLHLHWGNPNDPHGSEHTVSGQHFAAELHIVHYNSDLYPDASTASNKSEGLAVLAVLIEMGSFNPSYDKIFSHLQHVKYKGQEAFVPGFNIEELLPERTAEYYRYRGSLTTPPCNPTVLWTVFRNPVQISQEQLLALETALYCTHMDDPSPREMINNFRQVQKFDERLVYTSFSQGIILSLALAGILGICIVVVVSIWLFRRKSIKKGDNKGVIYKPATKMETEAHA

SEQ ID NO: 53498 - protein, 46 aa, Homo sapiens
MAFWGWRAAAALRLWGRVVERVEAGGGVGPFQACGCRLVLGGRDDY

SEQ ID NO: 53499 - protein, 206 aa, Homo sapiens
MAQQACPRAMAKNGLVICILVITLLLDQTTSHTSRLKARKHSKRRVRDKDGDLKTQIEKLWTEVNALKEIQALQTVCLRGTKVHKKCYLASEGLKHFHEANEDCISKGGILVIPRNSDEINALQDYGKRSLPGVNDFWLGINDMVTEGKFVDVNGIAISFLNWDRAQPNGGKRENCVLFSQSAQGKWSDEACRSSKRYICEFTIPQ

SEQ ID NO: 53500 - protein, 37 aa, Homo sapiens
MPALPLDQLQITHKDPKTGKLRTSPALICTCNSMIQI

SEQ ID NO: 53501 - protein, 77 aa, Homo sapiens
MDTAEEDICRVCRSEGTPEKPLYHPCVCTGSIKFIHQECLVQWLKHSRKEYCELCKHRFAFTPRKICWQIVCRVVLW

SEQ ID NO: 53502 - protein, 112 aa, Homo sapiens
MIIPPMFGAVQSVRDGLEKRYIASYLALTVVGMGSWCFHMTLKYEMQLLDELPMIYSCCIFVYCMFECFKIKNSVNYHLLFTLVLFSLIVTTVYLKVKEPIFHQKSIALNCP

SEQ ID NO: 53503 - protein, 280 aa, Homo sapiens
MDLIDILWRQDIDLGVSREVFDFSQRRKEYELEKQKKLEKERQEQLQKEQEKAFFAQLQLDEETGEFLPIQPAQHIQSETSGSANYSQVAHIPKSDALYFDDCMQLLAQTFPFVDDNEVSSATFQSLVPDIPGHIESPVFIATNQAQSPETSVAQVAPVDLDGMQQDIEQVWEELLSIPELQCLNIENDKLVETTMVPSPEAKLTEVDNYHFYSSIPSMEKEVGNCSPHFLNAFEDSFSSILSTEDPNQLTVNSLNSDATVNTDFGDEFYSAFIAEPSIS

SEQ ID NO: 53504 - protein, 490 aa, Homo sapiens
MDNYSTGYDVKPPCLYQMPLSGQQSSIKVEDIQMHNYQQHSHLPPQSEEMMPHSGSVYYKPSSPPTPTTPGFQVQHSPMWDDPGSLHNFHQNYVATTHMIEQRKTPVSRLSLFSFKQSPPGTPVSSCQMRFDGPLHVPMNPEPAGSHHVVDGQTFAVPNPIRKPASMGFPGLQIGHASQLLDTQVPSPPSRGSPSNEGLCAVCGDNAACQHYGVRTCEGCKGFFKRTVQKNAKYVCLANKNCPVDKRRRNRCQYCRFQKCLAVGMVKEVVRTDSLKGRRGRLPSKPKSPQEPSPPSPPVSLISALVRAHVDSNPAMTSLDYSRFQANPDYQMSGDDTQHIQQFYDLLTGSMEIIRGWAEKIPGFADLPKADQDLLFESAFLELFVLRLAYRSNPVEEYEHRHFCLLLHCCPGYGHRETRAQGTQESGRTAKQDCKLSQRPRDFQQWGVEPPQLFVQTVGEAPRTSYPLHTGATAHFLPEIGRLGATASNN

SEQ ID NO: 53505 - protein, 431 aa, Homo sapiens
MSSVCDMSFLQKSCITMVHFCGLLTLHREPVPLKSISVSVNIYEFVAGVSATLNYENEEKVPLEAFFVFPMDEDSAVYSFEALVDGKKIVAELQDKMKARTNYEKAISQGHQAFLLEGDSSSRDVFSCNVGNLQPGSKAAVTLKYVQELPLEADGALRFVLPAVLNPRYQFSGSSKDSCLNVKTPIVPVEDLPYTLSMVATIDSQHGIEKVQSNCPLSPTEYLGEDKTSAQVSLAAGHKFDRDVELLIYYNEVHTPSVVLEMGMPNMKPGHLMGDPSAMVSFYPNIPEDQPSNTCGEFIFLMDRSGSMQSPMSSQDTSQLRIQAAKETLILLLKSLPIGCYFNIYGFGSSYEACFPESVKYTQQTMEEALGRVKLMQADLGGTEILAPLQNIYRGPSIPGHPLQLFVFTDGEVTDTFSVIKEVRINRQKHR

SEQ ID NO: 53506 - protein, 742 aa, Homo sapiens
MEPNDSTSTAVEEPDSLEVLVKTLDSQTRTFIVGAQMNVKEFKEHIAASVSIPSEKQRLIYQGRVLQDDKKLQEYNVGGKVIHLVERAPPQTHLPSGASSGTGSASATHGGGSPPGTRGPGASVHDRNANSYVMVGTFNLPSDGSAVDVHINMEQAPIQSEPRVRLVMAQHMIRDIQTLLSRMECRGGPQPQHSQPPPQPPAVTPEPVALSSQTSEPVESEAPPREPMEAEEVEERAPAQNPELTPGPAPAGPTPAPETNAPNHPSPAEYVEVLQELQRLESRLQPFLQRYYEVLGAAATTDYNNNHEGREEDQRLINLVGESLRLLGNTFVALSDLRCNLACTPPRHLHVVRPMSHYTTPMVLQQAAIPIQINVGTTVTMTGNGTRPPPTPNAEAPPPGPGQASSVAPSSTNVESSAEGAPPPGPAPPPATSHPRVIRISHQSVEPVVMMHMNIQDSGTQPGGVPSAPTGPLGPPGHGQTLGSTLIQLPSLPPEFMHAVAHQITHQAMVAAVASAAAGQQVPGFPTAPTRVVIARPTPPQARPSHPGGPPVSGTLQGAGLGTNASLAQMVSGLVGQLLMQPVLVAQGTPGMAPPPAPATASASAGTTNTATTAGPAPGGPAQPPPTPQPSMADLQFSQLLGNLLGPAGPGAGGPGVASPTITVAMPGVPAFLQGMTDFLQATQTAPPPPPPPPPPPPAPEQQTMPPPGSPSGGAGSPGGLGLESLSPEFFTSVVQGVLSSL

SEQ ID NO: 53507 - protein, 59 aa, Homo sapiens
  MOD_RES (1)..(1): Any amino acid
XRVRTKTVKKAARVIIEKYYTRLGNDFHTNKRVCEEIAIIPSKKLRNKIAGCSYCSRDL

SEQ ID NO: 53508 - protein, 125 aa, Homo sapiens
MRTAIWKWHRGIYRDHYVLGSLTFLSPMQRAGTSNQWNMGKVMTLDSGDEVTFHKTWPTETGSPYRLEEVSSHVGKVFMARNYEFLAYEASKDRRQPLERMWTCNYNQQKDQSCNHKEITSTKAE

SEQ ID NO: 53509 - protein, 139 aa, Homo sapiens
  MOD_RES (1)..(1): Any amino acid
XRTWTPGKRPTVPWTPPSSRTRAQKAIDEVFEGQKRASSWPSRTQNPVEISSVFSDYYDLGYNMRSNLFRGAAEETKSLMKASYTPEVIEKSVRDLEHWHGRKTDDLGRWHQKNAMNLNLQKALEEKYGENSKSKSSKY

SEQ ID NO: 53510 - protein, 105 aa, Homo sapiens
MAIHKALVMCLGLPLFLFPGAWAQGHVPPGCSQGLNPLYYNLCDRSGAWGIVLEAVAGAGIVTTFVLTIILVASLPFVQDTKKRSLLGTQLRGRCHHTAGTMGSC

SEQ ID NO: 53511 - protein, 86 aa, Homo sapiens
MKHMLAASAGEVVACLIRVPSEVVKQRAQVSASTRTFQIFSNILYEEGIQGLYRGYKSTVLREIPFSLVQFPLWESLKGWKPYNCF

SEQ ID NO: 53512 - protein, 176 aa, Homo sapiens
MEETYTDSLDPEKLLQCPYDKNHQIRACRFPYHLIKCRKNHPDVASKLATCPFNARHQVPRAEISHHISSCDDRSCIEQDVVNQTRSLRQETLAESTWQCPPCDEDWDKDLWEQTSTPFVWGTTHYSDNNSPASNIVTEHKNNLASGMRVPKSLPYVLPWKNNSDSLDFSLCYCLS

SEQ ID NO: 53513 - protein, 353 aa, Homo sapiens
MKIIFPILSNPVFRRTVKLLLCLLWIGYSQGTTHVLRFGGIFEYVESGPMGAEELAFRFAVNTINRNRTLLPNTTLTYDTQKINLYDSFEASKKACDQLSLGVAAIFGPSHSSSANAVQSICNALGVPHIQTRWKHQVSDNKDSFYVSLYPDFSSLSRAILDLVQFFKWKTVTVVYDDSTGLIRLQELIKAPSRYNLRLKIRQLPADTKDAKPLLKEMKRGKEFHVIFDCSHEMAAGILKQALAMGMMTEYYHYIFTTLDLFALDVEPYRYSGVNMTGFRILNTENTQVSSIIEKWSMERLQAPPKPDSGLLDGFMTMEFHSCCPGWSAMARSQLTATSASWVQAILLPQPPE

SEQ ID NO: 53514 - protein, 430 aa, Homo sapiens
MSLNNSSNVFLDSVPSNTNRFQVSVINENHESSAAADDNTDPPHYEETSFGDEAQKRLRISFRPGNQECYDNFLQSGETAKTDASFHAYDSHTNTYYLQTFGHNTMDAVPKIEYYRNTGSISGPKVNRPSLLEIHEQLAKNVAVTPSSADRVANGDGIPGDEQAENKEDDQAGVVKFGWVKGVLVRCMLNIWGVMLFIRLSWIVGEAGIGLGVLIILLSTMVTSITGLSTSAIATNGFVRGGGAYYLISRSLGPEFGGSIGLIFAFANAVAVAMYVVGFAETVVDLLKESDSMMVDPTNDIRIIGSITVVILLGISVAGMEWEAKAQVILLVILLIAIANFFIGTVIPSNNEKKSRGFFNYQASIFAENFGPRFTKGEGFFSVFAIFFPAATGILAGANISGDLEALRKQGASPLPQGAQSRRRRQTSLI

SEQ ID NO: 53515 - protein, 304 aa, Homo sapiens
MSLMVISMACVGFFWLQGAWPHEGFRRKPSLLAHPGRLVKSEETVILQCWSDVMFEHFLLHREGTFNDTLRLIGEHIDGVSKANFSIGRMRQDLAGTYRCYGSVPHSPYQFSAPSDPLDIVITGLYEKPSLSAQPGPTVLAGESVTLSCSSWSSYDMYHLSTEGEAHERRFSAGPKVNGTFQADFPLGPATQGGTYRCFGSFHDSPYEWSKSSDPLLVSVTGNPSNSWPSPTEPSSKTGNPRHLHVLIGTSVVKLPFTILLFFLLHRWCSNKKNASVMDQGPAGNRTVNREDSDEQDHQEVSYA

SEQ ID NO: 53516 - protein, 406 aa, Homo sapiens
MNDVRRAFLGPFAHKEGPMHQWVSYQGRVPYPRPGMCPSKTFGTFSSTKDFPDDVIQFARNHPLMYNSVLPTGGRPLFLQVGANYTFTQIAADRVAAADGHYDVLFIGTDVGTVLKVISVPKGSRPSAEGLLLEELHVFEDSAAVTSMQISSKRHQLYVASRSAVAQIALHRCAAHGRVCTECCLARDPYCAWDGVACTRFQPSAKRRFRRQDVRNGDPSTLCSGDSSRPALLEHKVFGVEGSSAFLECEPRSLQARVEWTFQRAGVTAHTQVLAEERTERTARGLLLRRLRRRDSGVYLCAAVEQGFTQPLRRLSLHVLSATQAERLARAEEAAPAAPPGPKLWYRDFLQLVEPGGGGSANSLRMCRPQPALQSLPLESRRKGRNRRTHAPEPRAERGPRSATHW

SEQ ID NO: 53517 - protein, 152 aa, Homo sapiens
TSNSSAETDSLLGGITVVGCSAEGVTGAATSPSTNGASPVMDKPPEMEAENSEVDENVPTAEEATEATEGNAGSAEDTVDISQTGVYTEHVFTDPLGVQIPEDLSPVYQSSNDSDAYKDQISVLPNEQDLVREEAQKMSSLLPTMWLGAQNG

SEQ ID NO: 53518 - protein, 78 aa, Homo sapiens
TTTRHKVLIMEFCPCGSLYTVLEEPSNAYGLPESEFLIVLRDVGEDGQSVYKLTDFGAARELEDDEQFVSLYGTEEYL

SEQ ID NO: 53519 - protein, 55 aa, Homo sapiens
  MOD_RES (1)..(1): Any amino acid
XDFRMVVGEDKTKVLNIVKPNIAHFRELYGSILQENPQVVYKSQQGWLEVTVCGK

SEQ ID NO: 53520 - protein, 533 aa, Homo sapiens
TSKKLVNSVAGCADDALAGLVACNPNLQLLQGHRVALRSDLDSLKGRVALLSGGGSGHEPAHAGFIGKGMLTGVIAGAVFTSPAVGSILAAIRAVAQAGTVGTLLIVKNYTGDRLNFGLAREQARAEGIPVEMVVIGDDSAFTVLKKAGRRGLCGTVLIHKVAGALAEAGVGLEEIAKQVNVVAKAMGTLGVSLSSCSVPGSKPTFELSADEVELGLGIHGEAGVRRIKMATADEIVKLMLDHMTNTTNASHVPVQPGSSVVMMVNNLGGLSFLELGIIADATVRSLEGRGVKIARALVGTFMSALEMPGISLTLLLVDEPLLKLIDAETTAAAWPNVAAVSITGRKRSRVAPAEPQEAPDSTAAGGSASKRMALVLERVCSTLLGLEEHLNALDRAAGDGDCGTTHSRAARAIQEWLKEGPPPASPAQLLSKLSVLLLEKMGGSSGALYGLFLTAAAQPLKAKTSLPAWSAAMDAGLEAMQKYGKAAPGDRTMLDSLWAAGQELQAWKSPGADLLQVLTKAVKEGGGLVICP

SEQ ID NO: 53521 - protein, 50 aa, Homo sapiens
MAAEEEEVDSADTGERSGWLTGWLPTWCPTSISHLKEAEEKMLKWLIISF

SEQ ID NO: 53522 - protein, 175 aa, Homo sapiens
  MOD_RES (1)..(1): Any amino acid
XFDDQRRMSLHLHGADCDPKTQNEMNICEEEFVEYKNRDAISALMPLFSEEESSDGSKHNNGLPDHISAQLQNTYTLKAFTVGSKCVVWSSLRNTWSKCEILETAEEGTRVLNLSNGMEEIVNPENVWNGIPKLDKSPPEAVSQRVGKDLYFMSVGDTTIKEKGFGGDGDLTVDL

SEQ ID NO: 53523 - protein, 170 aa, Homo sapiens
  MOD_RES (1)..(1): Any amino acid
XTRTNMLLELARSLFNRMDFEDLGLVVDWDHHLPPPAAKTVVENLPRTVIRGSQAALTVPWAQYSSFFLFMDCWGMEEEWQLGAGEGGYQLMKIRPRLEHYSTFLRQIPVPCAAMSCPLMTTLMRSTDEIRLENSSSNTDWRTSMEPCTREEVGAECWPSASSLLTLNPH

SEQ ID NO: 53524 - protein, 484 aa, Homo sapiens
MAALRALCGFRGVAAQVLRPGAGVRLPIQPSRGVRQWQPDVEWAQQFGGAVMYPSKETAHWKPPPWNDVDPPKDTIVKNITLNFGPQHPAAHGVLRLVMELSGEMVRKCDPHIGLLHRGTEKLIEYKTYLQALPYFDRLDYVSMMCNEQAYSLAVEKLLNIRPPPRAQWIRVLFGEITRLLNHIMAVTTHALDLGAMTPFFWLFEEREKMFEFYERVSGARMHAAYIRPGGVHQDLPLGLMDDIYQFSKNFSLRLDELEELLTNNRIWRNRTIDIGVVTAEEALNYGFSGVMLRGSGIQWDLRKTQPYDVYDQVEFDVPVGSRGDCYDRYLCRVEEMRQSLRIIAQCLNKMPPGEIKVDDAKVSPPKRAEMKSFTLIAQTGVQSRLTATSASQTSMESLIHHFKLYTEGYQVPPGATYTAIEAPKGEFGVYLVSDGSSRPYRCKIKAPGFAHLAGLDKMSKGHMLADVVAIIGTQDIVFGEVDR

SEQ ID NO: 53525 - protein, 4431 aa, Homo sapiens
  MOD_RES (1)..(1): Any amino acid
XTTEDTLITGSKTAAPVTSTGSTTATLEGQSTAASSRTSNQDISASSQNHQTKSTETTSKAQTDTLTQMMTSTLFSSPSVHNVMETAPPDEMTTSFPSSVTNTLMMTSKTITMTTSTDSTLGNTEETSTAGTESSTPVTSAVSITAGQEGQSRTTSWRTSIQDTSASSQNHWTRSTQTTRESQTSTLTHRTTSTPSFSPSVHNVTGTVSQKTSPSGETATSSLCSVTNTSMMTSEKITVTTSTGSTLGNPGETSSVPVTGSLMPVTSAALVTFDPEGQSPATFSRTSTQDTTAFSKNHQTQSVETTRVSQINTLNTLTPVTTSTVLSSPSGFNPSGTVSQETFPSGETTTSSPSSVSNTFLVTSKVFRMPTSRDSTLGNTEETSLSVSGTISAITSKVSTIWWSDTLSTALSPSSLPPKISTAFHTQQSEGAETTGRPHERSSFSPGVSQEIFTLHETTTWPSSFSSKGHTTWSQTELPSTSTGAATRLVTGNPSTGTAGTIPRVPSKVSAIGEPGEPTTYSSHSTTLPKTTGAGAQTQWTQETGTTGEALLSSPSYSVTQMIKTATSPSSSPMLDRHTSQQITTAPSTNHSTIHSTSTSPQESPAVSQRGHTQAPQTTQESQTTRSVSPMTDTKTVTTPGSSFTASGHSPSEIVPQDAPTISAATTFAPAPTGDGHTTQAPTTALQAAPSSHDATLGPSGGTSLSKTGALTLANSVVSTPGGPEGQWTSASASTSPDTAAAMTHTHQAESTEASGQTQTSEPASSGSRTTSAGTATPSSSGASGTTPSGSEGISTSGETTRFSSNPSRDSHTTQSTTELLSASASHGAIPVSTGMASSIVPGTFHPTLSEASTAGRPTGQSSPTSPSASPQETAAISRMAQTQRTRTSRGSDTISLASQATDTFSTVPPTPPSITSTGLTSPQTETHTLSPSGSGKTFTTALISNATPLPVTYASSASTGHTTPLHVTDASSVSTGHATPLPVTSPSSVSTGHTTPLPVTDTSSESTGHVTPLPVTSFSSASTGDSTPLPVTDTSSASTGHVTPLPVTSLSSASTGDTTPLPVTDTSSASTGHATSLPVTDTSSVSTGHTTPLPVTDTSSASTGHATSLPVTDTSSVSTGHTTPLHVTDASSASTGQATPLPVTSLSSVSTGDTTPLPVTSPSSASTGHATPLLVTDTSSASTGHATPLPVTDASSVSTDHATSLPVTIPSAASTGHTTPLPVTDTSSASTGQATSLLVTDTSSVSTGDTTPLPVTSTSSASTGHVTPLHVTSPSSASTGHATPLPVTSLSSASTGDTMPLPVTSPSSASTGDTTPLPVTDASSVSTGHTTPLHVTDASSASTGQATPLPVTSLSSVSTGDTTPLPVTSPSSASTGHATPLLVTDTSSASTGHATPLPVTDASSVSTDHATSLPVTIPSAASTGHTTPLPVTDTSSASTGQATSLLVTDTSSVSTGDTTPLPVTSTSSASTGHVTPLHVTSPSSASTGHATPLPVTSLSSASTGDTMPLPVTSPSSASTGDTTPLPVTDASSVSTGHTTPLPVTSPSSASTGHTTPLPVTDTSSASKGDTTPLPVTSPSSASTGHTTPLPVTDTSSASTGDTTPLPVTNASSLSTGHATPLHVTSPSSASTGHATPLPVTSTSSASTGHATPLPVTGLSSATTDDTTRLPVTDVSSASTGQATPLPVTSLSSVSTGDTTPLPVTSPSSASTGHASPLLVTDASSASTGQATPLPVTDTSSVSTAHATPLPVTGLSSASTDDTTRLPVTDVSSASTGQAIPLPVTSPSSASTGDTTPLPVTDASSASTGDTTSLPVTIPSSASSGHTTSLPVTDASSVSTGHATSLLVTDASSVSTGDTTPLPVTDTNSASTGDTTPLHVTDASSVSTGHATSLPVTSLSSASTGDTTPLPVTSPSSASSGHTTPLPVTDASSVPTGHATSLPVTDASSVSTGHATPLPVTDASSVSTGHATPLPVTDTSSVSTGQATPLPVTSLSSASTGDTTPLPVTDTSSASTGQDTPLPVTSLSSVSTGDTTPLPVTNPSSASTGHATPLLVTDASSISTGHATSLLVTDASSVSTGHATALHDTDASSLSTGDTTPLPVTSPSSTSTGDTTPLPVTETSSVSTGHATSLPVTDTSSASTGHATSLPVTDTSSASTGHATPLPVTDTSSASTGQATPLPVTSPSSASTGHAIPLLVTDTSSASTGQATPLPVTSLSSASTGDTTPLPVTDASSVSTGHATSLPVTSLSSVSTGDTTPLPVTSPSSASTGHATPLHVTDASSASTGHATPLPVTSLSSASTGDTTPLPVTSPSSASTGHATPLHVTDASSVSTGDTTPLPVTSSSSASSGHTTPLPVTDASSASTGDTTPLPVTDTSSASTGHATHLPVTGLSSASTGDTTRLPVTNVSSASTGHATPLPVTSTSSASTGDTTPLPGTDTSSVSTGHTTPLLVTDASSVSTGDTTRLPVTSPSSASTGHTTPLPVTDTPSASTGDTTPLPVTNASSLSTRHATSLHVTSPSSASTGHATSLPVTDTSAASTGHATPLPVTSTSSASTGDTTPLPVTDTYSASTGQATPLPVTSLSSVSTGDTTPLPVTSPSSASTGHATPLLVTDASSASTGQATPLPVTSLSSVSTGDTTPLPVTSPSSASTGHATSLPVTDTSSASTGDTTSLPVTDTSSAYTGDTTSLPVTDTSSSSTGDTTPLLVTETSSVSTGDTTPLPVTDTSSASTGHATPLPVTNTSSVSTGHATPLHVTSPSSASTGHTTPLPVTDASSVSTGHATSLPVTDASSVFTGHATSLPVTIPSSASSGHTTPLPVTDASSVSTGHATSLPVTDASSVSTGHATPLPVTDASSVSTGHATPLPLTSLSSVSTGDTTPLPVTDTSSASTGQATPLPVTSLSSVSTGDTTPLPVTDTSSASTGHATSLPVTDTSSASTGHATPLPDTDTSSASTGHATLLPVTDTSSASIGHATSLPVTDTSSISTGHATPLHVTSPSSASTGHATPLPVTDTSSASTGHANPLHVTSPSSASTGHATPLPVTDTSSASTGHATPLPVTSLSSVSTGDTTPLPVTSPSSASTGHTTPLPVTDTSSASTGQATALPVTSTSSASTGDTTPLPVTDTSSASTGQATPLPVTSLSSVSTGDTTPLPVTSPSSASTGHATPLLVTDASSASTGQATPLPVTSLSSVSTGDTTPLPVTSPSSASTGHATSLPVTDTSSASTGDTTSLPVTDTSSAYTGDTTSLPVTDTSSSSTGDTTPLLVTETSSVSTGHATPLLVTDASSASTGHATPLHVTSPSSASTGDTTPVPVTDTSSVSTGHATPLPVTGLSSASTGDTTRLPVTDISSASTGQATPLPVTNTSSVSTGDTMPLPVTSPSSASTGHATPLPVTSTSSASTGHATPVPVTSTSSASTGHTTPLPVTDTSSASTGDTTPLPVTSPSSASTGHTTPLHVTIPSSASTGDTSTLPVTGASSASTGHATPLPVTDTSSVSTGHATPLPVTSLSSVSTGDTTPLPVTDASSASTGQATPLPVTSLSSVSTGDTTPLLVTDASSVSTGHATPLPVTDTSSASTGDTTRLPVTDTSSASTGQATPLPVTSLSSVSTGDTTPLLVTDASSVSTGHATPLPVTDTSSASTGDTTRLPVTDTSSASTGQATPLPVTIPSSSSSGHTTPLPVTSTSSVSTGHVTPLHVTSPSSASTGHVTPLPVTSTSSASTGHATPLLVTDASSVSTGHATPLPVTDASSASTGDTTPLPVTDTSSASTGQATPLPVTSLSSVSTGDTTPLPVTDASSASTGHATPLPVTIPSSVSTGDTMPLPVTSPSSASTGHATPLPVTGLSSASTGDTTPLPVTDTSSASTRHATPLPVTDTSSASTDDTTRLPVTDVSSASTGHATPLPVTSTSSASTGDTTPLPVTDTSSVSTGHATSLPVTSRSSASTGHATPLPVTDTSSVSTGHATPLPVTSTSSVSTGHATPLPVTSPSSASTGHATPVPVTSTSSASTGDTTPLPVTNASSLSTGHATPLHVTSPSSASRGDTSTLPVTDASSASTGHATPLPLTSLSSVSTGDTTPLPVTDTSSASTGQATPLPVTSLSSVSTGDTTPLPVTIPSSASSGHTTSLPVTDASSVSTGHGTPLPVTSTSSASTGDTTPLPVTDTSSASTGHATPLPVTDTSSASTGHATPLPVTSLSSVSTGHATPLAVSSATSASTVSSDSPLKMETPGMTTPSLKTDGGRRTATSPPPTTSQTIISTIPSTAMHTRSTAAPIPILPERGVSLFPYGAGAGDLEFVRRTVDFTSPLFKPATGFPLGSSLRDSLYFTDNGQIIFPESDYQIFSYPNPLPTGFTGRDPVALVAPFWDDADFSTGRGTTFYQSNTYQAILSTDGSRSYALFLYQSGGMQWDVAQRSVEMAISKTAH

SEQ ID NO: 53526 - protein, 99 aa, Homo sapiens
MASQSQGIQQLLQAEKRAAEKVADARKRKARRLKQAKEEAQMEVEQYRREREHEFQSKQQATGIFQRQAWSARICITAEGPVSGPLRLRSCSQEGGRLE

SEQ ID NO: 53527 - protein, 122 aa, Homo sapiens
MAPGSRTSLLLAFALLCLPWLQEAGAVQTVPLSRLFDHAMLQAHRAHQLAIDTYQEFRLEDGSRRTGQILKQTYSKFDTNSHNHDALLKNYGLLYCFRKDMDKVETFLRMVQCRSVEGSCGF

SEQ ID NO: 53528 - protein, 80 aa, Homo sapiens
MTLLTFRDVAIEFSLEEWKCLDLAQQNLYRDVMLENYRNLFSVGLTVCKPGLITCLEQRKEPWNVKRQEAADGHPASANV

SEQ ID NO: 53529 - protein, 788 aa, Homo sapiens
MGELFRSEEMTLAQLFLQSEAAYCCVSELGELGKVQFRDLNPDVNVFQRKFVNEVRRCEEMDRKLRFVEKEIRKANIPIMDTGENPEVPFPRDMIDLEMADPDLLEESSSLLEPSEMGRGTPLRLGFVAGVINRERIPTFERMLWRVCRGNVFLRQAEIENPLEDPVTGDYVHKSVFIIFFQGDQLKNRVKKICEGFRASLYPCPETPQERKEMASGVNTRIDDLQMVLNQTEDHRQRVLQAAAKNIRVWFIKVRKMKAIYHTLNLCNIDVTQKCLIAEVWCPVTDLDSIQFALRRGTEHSGSTVPSILNRMQTNQTPPTYNKTNKFTYGFQNIVDAYGIGTYREINPAPYTIITFPFLFAVMFGDFGHGILMTLFAVWMVLRESRILSQKNENEMFSTVFSGRYIILLMGVFSMYTGLIYNDCFSKSLNIFGSSWSVRPMFTYNWTEETLRGNPVLQLNPALPGVFGGPYPFGIDPIWNIATNKLTFLNSFKMKMSVILGIIHMLFGVSLSLFNHIYFKKPLNIYFGFIPEIIFMTSLFGYLVILIFYKWTAYDAHTSENAPSLLIHFINMFLFSYPESGYSMLYSGQKGIQCFLVVVALLCVPWMLLFKPLVLRRQYLRRKHLGTLNFGGIRVGNGPTEEDAEIIQHDQLSTHSEDADEFDFGDTMVHQAIHTIEYCLGCISNTASYLRLWALSLAHAQLSEVLWTMVIHIGLSVKSLAGGLVLFFFFTAFATLTVAILLIMEGLSAFLHALRLHWVEFQNKFYSGTGFKFLPFSFEHIREGKFEE

SEQ ID NO: 53530 - protein, 228 aa, Homo sapiens
MFSEELWLENEKKCAVVRKSKQGRKRQELLAVAFGVKVGVKGGFLWPPLKLFACSQISSLVRRAALTHNDNHFNYEKTHNFKVHTFRGPHWCEYCANFMWGLIAQGVRCSGLKSEGLYRVSGFTEHIEDVKMAFDREISNADERLEAVHEVLMLLPPAHYETLRYLMIHLKKVTMNEKDNFMNAENLGIVFGPTLMRPPEDSTLTTLHDMRYQKLIVQILIENEDVLF

SEQ ID NO: 53531 - protein, 194 aa, Homo sapiens
MAPAQRCPLCRQTFFCGRGHVYSRKHQRQLKEALERLLPQVEAARKAIRAAQVERYVPEHERCCWCLCCGCEVREHLSHGNLTVLYGGLLEHLASPEHKKATNKFWWENKAEVQMKEKFLVTPQDYARFKKSMVKGLDSYEEKEDKVIKEMAAQIREVEQSRQEVVRSVLEVGFPRRIQTTSGSARPRRGLFST

SEQ ID NO: 53532 - protein, 481 aa, Homo sapiens
MKRIFSLLEKTWLGAPIQFAWQKTSGNYLAVTGADYIVKIFDRHGQKRSEINLPGNCVAMDWDKDGDVLAVIAEKSSCIYLWDANTNKTSQLDNGMRDQMSFLLWSKVGSFLAVGTVKGNLLIYNHQTSRKIPVLGKHTKRITCGCWNAENLLALGGEDKMITVSNQEGDTIRQTQVRSEPSNMQFFLMKMDDRTSAAESMISVVLGKKTLFFLNLNEPDNPADLEFQQDFGNIVCYNWYGDGRIMIGFSCGHFVVISTHTGELGQEIFQARNHKDNLTSIAVSQTLNKVATCGDNCIKIQDLVDLKDMYVILNLDEENKGLGTLSWTDDGQLLALSTQRGSLHVFLTKLPILGDACSTRIAYLTSLLEVTVANPVEGELPITVSVDVEPNFVAVGLYHLAVGMNNRAWFYVLGENAVKKLKDMEYLGTVASICLHSDYAAALFEGKVQLHLKAKSWMLKKNVRLGFSQQWMISAVSYAMP

SEQ ID NO: 53533 - protein, 1114 aa, Homo sapiens
MLKTEKTKPEVLEAHYGSAEPEKVLRVLHRDAILAQEKSIGEDVYEKPISELDRLEEKQKETYRRMLEQLLLAEKCHRRTVYELENEKHKHTDYMNKSDDFTNLLEQERERLKKLLEQEKAYQARKEKENAKRLNKLRDELVKLKSFALMLVDERQMHIEQLGLQSQKVQDLTQKLREEEEKLKAITSKSKEDRQKLLKLEVDFEHKASRFSQEHEEMNAKLANQESHNRQLRLKLVGLTQRIEELEETNKNLQKAEEELQELRDKIAKGECGNSSLMAEVENLRKRVLEMEGKDEEITKTESQCRELRKKLQEEEHHSKELRLEVEKLQKRMSELEKLEEAFSKSKSECTQLHLNLEKEKNLTKDLLNELEVVKSRVKELECSESRLEKAELSLKDDLTKLKSFTVMLVDERKNMMEKIKQEERKVDGLNKNFKVEQGKVMDVTEKLIEESKKLLKLKSEMEEKVYNLTRERDELIGKLKSEEEKSSELSCSVDLLKKRLDGIEEVEREITRGRSRKGSELTCPEDNKIKELTLEIERLKKRLQQLEVVEGDLMKTEDEYDQLEQKFRTEQDKANFLSQQLEEIKHQIAKNKAIEKGEVVSQEAELRHRFRLEEAKSRDLKAEVQALKEKIHELMNKEDQLSQLQVDYSVLQQRFMEEENKNKNMGQEVLNLTKELELSKRYSRALRPSVNGRRMVDVPVTSTGVQTDAVSGEAAEEETPAVFIRKSFQEENHIMSNLRQVGLKKPVERSSVLDRYPPAANELTMRKSWIPWMRKRENGPSITQEKGPRTNSSPGHPGEVVLSPKQGQPLHIRVTPDHENSTATLEITSPTSEEFFSSTTVIPTLGNQKPRITIIPSPNVMPQKQKSGDTTLGPERAMSPVTITTFSREKTPESGRGAFADRPTSPIQIMTVSTSAAPAEIAVSPESQEMPMGRTILKVTPEKQTVPTPVRKYNSNANIITTEDNKIHIHLGSQFKRSPGTSGEGVSPVITVRPVNVTAEKEVSTGTVLRSPRNHLSSRPGASKVTSTITITPVTTSSARGTQSVSGQDGSSQRPTPTRIPMSKGMKAGKPVVAAPGAGNLTKFEPRAETQSMKIELKKSAASSTTSLGGGKG

SEQ ID NO: 53534 - protein, 345 aa, Homo sapiens
MGLGVSAEQPAGGAEGFHLHGDVEPSSPAALAGLRPYTDYVVGSDQILQESEDFFTLIESHEGKPLKLMVYNSKSDSCREVTVTPNAAWGGEGSLGCGIGYGYLHRIPTQPPSYHKKPPGTPPPSALPLGAPPPDALPPGPTPEDSPSLETGSRQSDYMEALLQAPGSSMEDPLPGPGSPSHSAPDPDGLPHFMETPLQPPPPVQRVMDPGFLDVSGISLLDNSNASVWPSLPSSTELTTTAVSTSGPEDICSSSSSHERGGEATWSGSEFEVSFLDSPGAQAQADHLPQLTLPDSLTSAASPEDGLSAELLEAQAEEEPASTEGLDTGTEAEGLDSQAQISTTE

SEQ ID NO: 53535 - protein, 168 aa, Homo sapiens
MYCVFNRNEDACRYGSAIGVLAFLASAFFLVVDAYFPQISNATDRKYLVIGDLLFSALWTFLWFVGFCFLTNQWAVTNPKDVLVGADSVRAAITFSFFSIFSWGVLASLAYQRYKAGVDDFIQNYVDPTPDPNTAYASYPGASVDNYQQPPFTQNAETTEGYQPPPVY

SEQ ID NO: 53536 - protein, 380 aa, Homo sapiens
MSTKVYLDLEWTDYRLSWDPAEHDGIDSLRITAESVWLPDVVLLNNNDGNFDVALDISVVVSSDGSVRWQPPGIYRSSCSIQVTYFPFDWQNCTMVFSSYSYDSSEVSLQTGLGPDGQGHQEIHIHEGTFIENGQWEIIHKPSRLIQPPGDPRGGREGQRQEVIFYLIIRRKPLFYLVNVIAPCILITLLAIFVFYLPPDAVILSVVVLNLHHRSPHTHQMPLWVRQIFIHKLPLYLRLKRPKPERDLMPEPPHCSSPGSGWGRGTDEYFIRKPPSDFLFPKPNRFQPELSAPDLRRFIDGPNRAVALLPELREVVSSISYIARQLQEQEDHDALKEDWQFVAMVVDRLFLWTFIIFTSVGTLVIFLDATYHLPPPDPFP

SEQ ID NO: 53537 - protein, 1830 aa, Homo sapiens
MDARIVHALLAGRMLGSSVKSVQPEVELSSGGGDEGADEPRGAGRKAAAADGRGMLPKRAKAPGGGGGMAKASAAELKVFKSGSVDSRVPGGPPASNLRKQKSLTNLSFLTDSEKKLQLYEPEWSDDMAKAPKGLGKVGSKGREAPLMSKTLSKSEHSLFQAKGSPAGGAKTPLAPLAPNLGKPSRIPRGPYAEVKPLSKAPEAAVSEDGKSDDELLSSKAKAQKSSGPVPSAKGQEERAFLKVDPELVVTVLGDLEQLLFSQMLDPESQRKRTVQNVLDLRQNLEETMSSLRGSQVTHSSLEMTCYDSDDANPRSVSSLSNRSSPLSWRYGQSSPRLQAGDAPSVGGSCRSEGTPAWYMHGERAHYSHTMPMRSPSKLSHISRLELVESLDSDEVDLKSGYMSDSDLMGKTMTEDDDITTGWDESSSISSGLSDASDNLSSEEFNASSSLNSLPSTPTASRRNSTIVLRTDSEKRSLAESGLSWFSESEEKAPKKLEYDSGSLKMEPGTSKWRRERPESCDDSSKGGELKKPISLGHPGSLKKGKTPPVAVTSPITHTAQSALKVAGKPEGKATDKGKLAVKNTGLQRSSSDAGRDRLSDAKKPPSGIARPSTSGSFGYKKPPPATGTATVMQTGGSATLSKIQKSSGIPVKPVNGRKTSLDVSNSAEPGFLAPGARSNIQYRSLPRPAKSSSMSVTGGRGGPRPVSSSIDPSLLSTKQGGLTPSRLKEPTKVASGRTTPAPVNQTDREKEKAKAKAVALDSDNISLKSIGSPESTPKNQASHPTATKLAELPPTPLRATAKSFVKPPSLANLDKVNSNSLDLPSSSDTTHASKVPDLHATSSASGGPLPSCFTPSPAPILNINSASFSQGLELMSGFSVPKETRMYPKLSGLHRSMESLQMPMSLPSAFPSSTPVPTPPAPPAAPTEEETEELTWSGSPRAGQLDSNQRDRNTLPKKGLRYQLQSQEETKERRHSHTIGGLPESDDQSELPSPPALPMSLSAKGQLTNIVHGSVLSLASSASSTYSSAEERMQSEQIRKLRRELESSQEKVATLTSQLSANANLVAAFEQSLVNMTSRLRHLAETAEEKDTELLDLRETIDFLKKKNSEAQAVIQGALNASETTPKELRIKRQNSSDSISSLNSITSHSSIGSSKDADAKKKKKKSWLRSSFNKAFSIKKGPKSASSYSDIEEIATPDSSAPSSPKLQHGSTETASPSIKSSTSSSVGTDVTEGPAHPAPHTRLFHANEEEEPEKKEVSELRSELWEKEMKLTDIRLEALNSAHQLDQLRETMHNMQLEVDLLKAENDRLKVAPGPSSGSTPGQVPGSSALSSPRRSLGLALTHSFGPSLADTDLSPMDGISTCGPKEEVTLRVVVRMPPQHIIKGDLKQQEFFLGCSKVSGKVDWKMLDEAVFQVFKDYISKMDPASTLGLSTESIHGYSISHVKRVLDAEPPEMPPCRRGVNNISVSLKGLKEKCVDSLVFETLIPKPMMQHYISLLLKHRRLVLSGPSGTGKTYLTNRLAEYLVERSGREVTEGIVSTFNMHQQSCKDLQLYLSNLANQIDRETGIGDVPLVILLDDLSEAGSISELVNGALTCKYHKCPYIIGTTNQPVKMTPNHGLHLSFRMLTFSNNVEPANGFLVRYLRRKLVESDSDINANKEELLRVLDWVPKLWYHLHTFLEKHSTSDFLIGPCFFLSCPIGIEDFRTWFIDLWNNSIIPYLQEGAKDGIKVHGQKAAWEDPVEWVRDTLPWPSAQQDQSKLYHLPPPTVGPHSIASPPEDRTVKDSTPSSLDSDPLMAMLLKLQEAANYIESPDRETILDPNLQATL

SEQ ID NO: 53538 - protein, 79 aa, Homo sapiens
MILSVLTGLLFGSDGYYVALAWTSSALMYFIVRSLRTAALGPDSMGGPVPRQRLQLYLTLGAAAFQPLIIYWLTFHLVR

SEQ ID NO: 53539 - protein, 727 aa, Homo sapiens
MASLGANPRRTPQGPRPGAASSGFPSPAPVPGPREAEEEEVEEEEELAEIHLCVLWNSGYLGIAYYDTSDSTIHFMPDAPDHESLKLLQRVLDEINPQSVVTSAKQDENMTRFLGKLASQEHREPKRPEIIFLPSVDFGLEISKQRLLSGNYSFIPDAMTATEKILFLSSIIPFDCLLTVRALGGLLKFLGRRRIGVELEDYNVSVPILGFKKFMLTHLVNIDQDTYSVLQIFKSESHPSVYKVASGLKEGLSLFGILNRCHCKWGEKLLRLWFTRPTHDLGELSSRLDVIQFFLLPQNLDMAQMLHRLLGHIKNVPLILKRMKLSHTKVSDWQVLYKTVYSALGLRDACRSLPQSIQLFRDIAQEFSDDLHHIASLIGKVVDFEGSLAENRFTVLPNIDPEIDEKKRRLMGLPSFLTEVARKELENLDSRIPSCSVIYIPLIGFLLSIPRLPSMVEASDFEINGLDFMFLSEEKLHYRSARTKELDALLGDLHCEIRDQETLLMYQLQCQVLARAAVLTRVLDLASRLDVLLALASAARDYGYSRPRYSPQVLGVRIQNGRHPLMELCARTFVPNSTECGGDKGRVKVITGPNSSGKSIYLKQVGLITFMALVGSFVPAEEAEIGAVDAIFTRIHSCESISLGLSTFMIDLNQVAKAVNNATAQSLVLIDEFGKGTNTVDGLALLAAVLRHWLARGPTCPHIFVATNFLSLVQLQLLPQGPLVQYL

SEQ ID NO: 53540 - protein, 153 aa, Homo sapiens
MPNWGGGKKCGVCQKTVYFAEEVQCEGNSFHKSCFLCMVCKKNLDSTTVAVHGEEIYCKSCYGKKYGPKGYGYGQGAGTLSTDKGESLGIKHEEAPGHRPTTNPNASKFAQKIGGSERCPRCSQAVYAAEKDPKVRMLFDLLKHLVPCLMGGS

SEQ ID NO: 53541 - protein, 262 aa, Homo sapiens
MRARPQVCEALLFALALQTGVCYGIKWLALSKTPSALALNQTQHCKQLEGLVSAQVQLCRSNLELMHTVVHAAREVMKACRRAFADMRWNCSSIELAPNYLLDLERGTRESAFVYALSAAAISHAIARACTSGDLQELQDVAADLKTRYLSATKVVHRPMGTRKHLVPKDLDIRPVKDSELVYLQSSPDFCMKNEKVGSHGTQDRQCNKTSNGSDSCDLMCCGRGYNPYTDRVVERCHCKYHWCCYVTCRRCERTVERYVCK

SEQ ID NO: 53542 - protein, 288 aa, Homo sapiens
MATGPIPTGLCLRGLEWSAESSTAIASLISPSTPSSSPTPSTRTVLLDPADEKLLEEEIQAPTSSKRSQQHAKVVPWMRKTEYISTEFNRYGISNEKPEVKIGVSVKQQFTEEEIYKDRDSQITAIEKTFEDAQKSISQHYSKPRVTPVEVMPVFPDFKMWINPCAQVIFDSDPAPKDTSGAAALEMMSQAMIRGMMDEEGNQFVAYFLPVEETLKKRKRDQEEEMDYAPDDVYDYKIAREYNWNVKNKASKGYEENYFFIFREGDGVYYNELETSIQYSHMLYNLVA

SEQ ID NO: 53543 - protein, 140 aa, Homo sapiens
MAAAPPSYCFVAFPPRAKDGLVVFGKNSARPRDEVQEVVYFSAADHEPESKVECTYISIDQVPRTYAIMISRPAWLWGAEMGANEHGVCIANEAINTREPAAEIEALLGMDLVRNGQGELDIPVRRSWAPRERFSYKTRN

SEQ ID NO: 53544 - protein, 710 aa, Homo sapiens
MESVVKNCGQTVHDEVANKQTMEELKDLLKRQVEVNVRNKILYLIQAWAHAFRNEPKYKVVQDTYQIMKVEGHVFPEFKESDAMFAAERAPDWVDAEECHRCRVQFGVMTRKHHCRACGQIFCGKCSSKYSTIPKFGIEKEVRVCEPCYEQLNRKAEGKATSTTELPPEYLTSPLSQQSQLPPKRDETALQEEEELQLALALSQSEAEEKERLRQKSTYTSYPKAEPMPSASSAPPASSLYSSPVNSSAPLAEDIDPELARYLNRNYWEKKQEEARKSPTPSAPVPLTEPAAQPGEGHAAPTNVVENPLPETDSQPIPPSGGPFSEPQFHNGESEESHEQFLKALQNAVTTFVNRMKSNHMRGRSITNDSAVLSLFQSINGMHPQLLELLNQLDERRLYYEGLQDKLAQIRDARGALSALREEHREKLRRAAEEAERQRQIQLAQKLEIMRQKKQEYLEVQRQLAIQRLQEQEKERQMRLEQQKQTVQMRAQMPAFPLPYAQLQAMPAAGGVLYQPSGPASFPSTFSPAGSVEGSPMHGVYMSQPAPAAGPYPSMPSTAADPSMVSAYMYPAGATGAQAAPQAQAGPTASPAYSSYQPTPTAGYQNVASQAPQSLPAISQPPQSSTMGYMGSQSVSMGYQPYNMQNLMTTLPSQDASLPPQQPYIAGQQPMYQQMAPSGGPPQQQPPVAQQPQAQGPPAQGSEAQLISFD

SEQ ID NO: 53545 - protein, 86 aa, Homo sapiens
MGEEGTGGTVHLLCLAASSGVPLFCRSSRGGAPARQQLPFSVIGSLNGVHMFGQNLEVQLSSARTENTTVVWKSFHDRSFLWDLKN

SEQ ID NO: 53546 - protein, 125 aa, Homo sapiens
  MOD_RES (1)..(1): Any amino acid
XGTKPRDSGVVPVGTEEAPKDTKYISNGDIWNNSWFLWNILKLPVQTLLQDNISKENCVFRSSLIGIVCGVFYPSSLAFTKNGRLATKYHTVPLPPKGRVLIHWMTLCQTQMKLMAIPLVFQIMF

SEQ ID NO: 53547 - protein, 109 aa, Homo sapiens
MRILQLILLALATVRLPHTLRCANITIIEHQKCENAYPGNITDTMVCASVQEGGKDSCQGDSGGPLVCNQSLQGIISWGQDPCAITRKPGVYTKVCKYVDWIQETMKNN

SEQ ID NO: 53548 - protein, 1087 aa, Homo sapiens
MDISTRSKDPGSAERTAQKRKFPSPPHSSNGHSPQDTSTSPIKKKKKPGLLNSNNKEQSELRHGPFYYMKQPLTTDPVDVVPQDGRNDFYCWVCHREGQVLCCELCPRVYHAKCLRLTSEPEGDWFCPECEKITVAECIETQSKAMTMLTIEQLSYLLKFAIQKMKQPGTDAFQKPVPLEQHPDYAEYIFHPMDLCTLEKNAKKKMYGCTEAFLADAKWILHNCIIYNGGNHKLTQIAKVVIKICEHEMNEIEVCPECYLAACQKRDNWFCEPCSNPHPLVWAKLKGFPFWPAKALRDKDGQVDARFFGQHDRAWVPINNCYLMSKEIPFSVKKTKSIFNSAMQEMEVYVENIRRKFGVFNYSPFRTPYTPNSQYQMLLDPTNPSAGTAKIDKQEKVKLNFDMTASPKILMSKPVLSGGTGRRISLSDMPRSPMSTNSSVHTGSDVEQDAEKKATSSHFSASEESMDFLDKSTASPASTKTGQAGSLSGSPKPFSPQLSAPITTKTDKTSTTGSILNLNLDRSKAEMDLKELSESVQQQSTPVPLISPKRQIRSRFQLNLDKTIESCKAQLGINEISEDVYTAVEHSDSEDSEKSDSSDSEYISDDEQKSKNEPEDTEDKEGCQMDKEPSAVKKKPKPTNPVEIKEELKSTSPASEKADPGAVKDKASPEPEKDFSEKAKPSPHPIKDKLKGKDETDSPTVHLGLDSDSESELVIDLGEDHSGREGRKNKKEPKEPSPKQDAVQQKEITQSPSTSTITLVTSTQSSPLVTSSGSMSTLVSSVNADLPIATASADVAADIAKYTSKMMDAIKGTMTEIYNDLSKNTTGSTIAEIRRLRIEIEKLQWLHQQELSEMKHNLELTMAEMRQSLEQERDRLIAEVKKQLELEKQQAVDETKKKQWCANCKKEAIFYCCWNTSYCDYPCQQAHWPEHMKSCTQSATAPQQEADAEVNTETLNKSSQGSSSSTQSAPSETASASKEKETSAEKSKESGSTLDLSGSRETPSSILLGSNQGSVSKRCDKQPAYAPTTTDHQPHPNYPAQKYHSRSNKSSWSSSDEKRGSTRSDHNTSTSTKSLLPKESRLDTFWD

SEQ ID NO: 53549 - protein, 1649 aa, Homo sapiens
MTFKTFRPAAMLIERSSDFGKTWGVYRYFAYDCEASFPGISTGPMKKVDDIICDSRYSDIEPSTEGEVIFRALDPAFKIEDPYSPRIQNLLKITNLRIKFVKLHTLGDNLLDSRMEIREKYYYAVYDMVVRGNCFCYGHASECAPVDGFNEEVEGMVHGHCMCRHNTKGLNCELCMDFYHDLPWRPAEGRNSNACKKCNCNEHSISCHFDMAVYLATGNVSGGVCDDCQHNTMGRNCEQCKPFYYQHPERDIRDPNFCERCTCDPAGSQNEGICDSYTDFSTGLIAGQCRCKLNVEGEHCDVCKEGFYDLSSEDPFGCKSCACNPLGTIPGGNPCDSETGHCYCKRLVTGQHCDQCLPEHWGLSNDLDGCRPCDCDLGGALNNSCFAESGQCSCRPHMIGRQCNEVEPGYYFATLDHYLYEAEEANLGPGVSIVERQYIQDRIPSWTGAGFVRVPEGAYLEFFIDNIPYSMEYDILIRYEPQLPDHWEKAVITVQRPGRIPTSSRCGNTIPDDDNQVVSLSPGSRYVVLPRPVCFEKGTNYTVRLELPQYTSSDSDVESPYTLIDSLVLMPYCKSLDIFTVGGSGDGVVTNSAWETFQRYRCLENSRSVVKTPMTDVCRNIIFSISALLHQTGLACECDPQGSLSSVCDPNGGQCQCRPNVVGRTCNRCAPGTFGFGPSGCKPCECHLQGSVNAFCNPVTGQCHCFQGVYARQCDRCLPGHWGFPSCQPCQCNGHADDCDPVTGECLNCQDYTMGHNCERCLAGYYGDPIIGSGDHCRPCPCPDGPDSGRQFARSCYQDPVTLQLACVCDPGYIGSRCDDCASGYFGNPSEVGGSCQPCQCHNNIDTTDPEACDKETGRCLKCLYHTEGEHCQFCRFGYYGDALQQDCRKCVCNYLGTVQEHCNGSDCQCDKATGQCLCLPNVIGQNCDRCAPNTWQLASGTGCDPCNCNAAHSFGPSCNEFTGQCQCMPGFGGRTCSECQELFWGDPDVECRACDCDPRGIETPQCDQSTGQCVCVEGVEGPRCDKCTRGYSGVFPDCTPCHQCFALWDVIIAELTNRTHRFLEKAKALKISGVIGPYRETVDSVERKVSEIKDILAQSPAAEPLKNIGNLFEEAEKLIKDVTEMMAQVEVKLSDTTSQSNSTAKELDSLQTEAESLDNTVKELAEQLEFIKNSDIRGALDSITKYFQMSLEAEERVNASTTEPNSTVEQSALMRDRVEDVMMERESQFKEKQEEQARLLDELAGKLQSLDLSAAAEMTCGTPPGASCSETECGGPNCRTDEGERKCGGPGCGGLVTVAHNAWQKAMDLDQDVLSALAEVEQLSKMVSEAKLRADEAKQSAEDILLKTNATKEKMDKSNEELRNLIKQIRNFLTQDSADLDSIEAVANEVLKMEMPSTPQQLQNLTEDIRERVESLSQVEVILQHSAADIARAEMLLEEAKRASKSATDVKVTADMVKEALEEAEKAQVAAEKAIKQADEDIQGTQNLLTSIESETAASEETLFNASQRISELERNVEELKRKAAQNSGEAEYIEKVVYTVKQSAEDVKKTLDGELDEKYKKVENLIAKKTEESADARRKAEMLQNEAKTLLAQANSKLQLLKDLERKYEDNQRYLEDKAQELARLEGEVRSLLKDISQKVAVYSTCL

SEQ ID NO: 53550 - protein, 120 aa, Homo sapiens
MNTGRDSQSPDSAWRSYNDGNQETLNGDATYSSLAAKGFRSVRPNLQDKRSPTQSQITVNGNSGGAVSPMSYYQRPFSPSAYSLPASLNSSIVMQHGTSLDSTDTYPQHAQSLDGTTSSS

SEQ ID NO: 53551 - protein, 154 aa, Homo sapiens
MLLLLLLLPPLLCGRVGAKEQKDYLLTMQKSVTVQEGLCVSVLCSFSYPQNGWTASDPVHGYWFRAGDHVSRNIPVATNNPARAVQEETRDRFHLLGDPQNKDCTLSIRDTRESDAGTYVFCVERGNMKWNYKYDQLSVNVTGGERKQEMELHI

SEQ ID NO: 53552 - protein, 82 aa, Homo sapiens
  MOD_RES (1)..(1): Any amino acid
XTYLEEEEDEESLEKIIFQTDKLQSIDSHSMEEVGEVENNPVSKAIARHLGIDISAEGRLAKNRKGIAIIIHGTPLSGRQQF

SEQ ID NO: 53553 - protein, 240 aa, Homo sapiens
MWFLTTLLLWGWLLLQVSSRVFTEGEPLALRCHAWKDKLVYNVLYYRNGKAFKFFHWNSNLTILKTNISHNGTYHCSGMGKHRYTSAGISVTVKELFPAPVLNASVTSPLLEGNLVTLSCETKLLLQRPGLQLYFSFYMGSKTLRGRNTSSEYQILTARREDSGLYWCEAATEDGNVLKRSPELELQVLGLQLPTPVWFHVLFYLAVGIMFLVNTVLWVTIRKELKRKKKWDLEISLDSG

SEQ ID NO: 53554 - protein, 164 aa, Homo sapiens
  MOD_RES (1)..(1): Any amino acid
XQMGMAAAVLAMTLAPTVSGTTSKCSSRRWCPVPASSSCVSHLLGSAGGLTEQELMEQLEHCELAPPAPSAPSWGCLPSPSPRISLTSLHSASSNTSLSGHRGSPSPPQAEARRRGGGSFVERCQELVRSGPDLRRPPTPAPWPSSGLGTPLTPPKMKLNETSF

SEQ ID NO: 53555 - protein, 193 aa, Homo sapiens
MTSGANSSGSYLPSEIRSSKIDDNYLKELNEDLKLRKQELLEMLKPLEDKNNLLFQKLMSNLEEKQRSLQIMRQIMAGKGCEESSVMELLKEAEEMKQNLERKNKMLRKEMEMLWNKTFEAEELSDQQKAPQTKNKADLQDGKAPKSPSSPRKTESELEKSFAEKVKEIRKRLFLPPGKATEENGMGQVSGTK

SEQ ID NO: 53556 - protein, 13 aa, Homo sapiens
MRILHVNGFNGEI

SEQ ID NO: 53557 - protein, 105 aa, Homo sapiens
MAVPAAAMGPSALGQSGPGSMAPWCSVSSGPSRYVLGMQELFRGHSKTREFLAHSAKVHSVAWSCDGRRLASGSFDKTASVFLLEKDRLGRTLISAGVLMGRPLL

SEQ ID NO: 53558 - protein, 230 aa, Homo sapiens
MDPLGDTLRRLREAFHAGRTRPAEFRAAQLQGLGRFLQENKQLLHDALAQDLHKSAFESEVSEVAISQGEVTLALRNLRAWMKDERVPKNLATQLDSAFIRKEPFGLVLIIAPWNYPLNLTLVPLVGALAAGNCVVLKPSEISKNVEKILAEVLPQYVDQSCFAVVLGGPQETGQLLEHRFDYIFFTGSPRVGKIVMTAAAKHPSKQRLPPPSWVFPLPASASSLSRSQP

SEQ ID NO: 53559 - protein, 178 aa, Homo sapiens
MLGLDACELGAQLLELLRLALCARVLLADKEGGPPAVDEVLDEAVPEYRAPGRKSLLEIRQLDPDDRSLAKYKRVLLGPLPPAVDPSLPNVQVTRLTLLSEQAPGPVVMDLTGDLAVLKDQVFVLKEGVDYRVHREIVSGLKCLHHTYRRGLRVDKTVYMVGSYGPSAQEYEFVTPVE

SEQ ID NO: 53560 - protein, 315 aa, Homo sapiens
MRRMLVVEVANGRSLVWGAEAVQALRERLGVGGRTVGALPRGPRQNSRLGLPLLLMPEEARLLAEIGAVTLVSAPRPDSRHHSLALTSFKRQQEESFQEQSALAAEARETRRQELLEKITEGQAAKKQKLEQASGASSSQEAGSSQAAKEDETSDGQASGEQEEAGPSSSQAGPSNGVAPLPRSALLVQLATARPRPVKARPLDWRVQSKDWPHAGRPAHELRYSIYRDLWERGFFLSAAGKFGGDFLVYPGDPLRFHAHYIAQCWAPEDTIPLQDLVAAGRLGTSVRKTLLLCSPQPDGFKSQEVSINLVYKCS

SEQ ID NO: 53561 - protein, 446 aa, Homo sapiens
MLHPETSPGRGHLLAVLLALLGTTWAEVWPPQLQEQAPMAGALNRKESFLLLSLHNRLRSWVQPPAADMRRLDWSDSLAQLAQARAALCGIPTPSLASGLWRTLQVGWNMQLLPAGLASFVEVVSLWFAEGQRYSHAAGECARNATCTHYTQLVWATSSQLGCGRHLCSAGQTAIEAFVCAYSPRGNWEVNGKTIIPYKKGAWCSLCTASVSGCFKAWDHAGGLCEVPRNPCRMSCQNHGRLNISTCHCHCPPGYTGRYCQVRCSLQCVHGRFREEECSCVCDIGYGGAQCATKVHFPFHTCDLRIDGDCFMVSSEADTYYRARMKCQRKGGVLAQIKSQKVQDILAFYLGRLETTNEVIDSDFETRNFWIGLTYKTAKDSFRWATGEHQAFTSFAFGQPDNHGFGNCVELQASAAFNWNDQRCKTRNRYICQFAQEHISRWGPGS

SEQ ID NO: 53562 - protein, 295 aa, Homo sapiens
MTENTHFDKIPESCALKSWRHPGLHHGEAALRGEPRIQTLPVASALSSHRTGPPPISPSKRKFSMEPGDEDLDCDNDHVSKMSRIFNPHLNKTANGDCRRDPRERSRSPIERAVAPTMSLHGSHLYTSLPSLGLEQPLALTKNSLDASRPAGLSPTLTPGERQQNRPSVITCASAGARNCNLSHCPIAHSGCAAPGPASYRRPPSAATTCDPVVEEHFRRSLGKNYKEPEPAPNSVSITGSVDDHFAKALGDTWLQIKAAKDGASSSPESASRRGQPASPSAHMVSHSHSPSVVS

SEQ ID NO: 53563 - protein, 147 aa, Homo sapiens
MAEAEFKDHSTAMDTEPNPGTSSVSTTTSSTTTTTITTSSSRMQQPQISVYSGSDRHAVQALHRPPSSAAQYLQQMYAAQQQHLMLHTAALQQQHLSSSQLQSLAAVQASLSSGRPSTSPTGSVTQQSSMSQTSVSSLNFFFLDLKF

SEQ ID NO: 53564 - protein, 355 aa, Homo sapiens
MQIHHDQSLHTPVSPCLPEHRKPTWAAMEWDNGTGQALGLPPTTCVYRENFKQLLLPPVYSAVLAAGLPLNICVITQICTSRRALTRTAVYTLNLALADLLYACSLPLLIYNYAQGDHWPFGDFACRLVRFLFYANLHGSILFLTCISFQRYLGICHPLAPWHKRGGRRAAWLVCVAVWLAVTTQCLPTAIFAATGIQRNRTVCYDLSPPALATHYMPYGMALTVIGFLLPFAALLACYCLLACRLCRQDGPAEPVAQERRGKAARMAVVVAAAFAISFLPFHITKTAYLAVRSTPGVPCTVLEAFAAAYKGTRPFASANSVLDPILFYFTQKKFRRRPHELLQKLTAKWQRQGR

SEQ ID NO: 53565 - protein, 210 aa, Homo sapiens
SKVKRQSSTPSAPELGQQPDVNISEWKDKPTHEILQKLNDCSCLASQAILLGILLKREGPNFITKEGTVSDHIERVYRRAGSQKLWSVVRRAASLLSKVVDSLAPSITNVLVQGKQVTLGAFGHEEEVISNPLSPRVIQNIIYYKCNTHDEREAVIQQELVIHIGWIISNNPELFSGMLKIRIGFAKAVCSHKRSSPWRRGPFQPWLSPL

SEQ ID NO: 53566 - protein, 42 aa, Homo sapiens
MPTTIEREFEELDTQRRWQPLYLMITVVLNCKMLRMIILMPV

SEQ ID NO: 53567 - protein, 149 aa, Homo sapiens
  MOD_RES (1)..(1): Any amino acid
XAITKPWEVQSKVALLVAAEFWEQGDLERTVLDQQPIPMMDRNKAAELPKLQVGFIDFVCTFVYKEFSRFHEEILPMFDRLQNNRKEWKALADDRHRNLQWRPSTQVFNLLYPVSTGPMGTLWLPQSSPTRIWVLPVAICYKRLGSPRK

SEQ ID NO: 53568 - protein, 616 aa, Homo sapiens
MEDTLKRRFFYDQAFAIYGGVSGLYDFGPVGCALKNNIIQTWRQHFIQEEQILEIDCTMLTPEPVLKTSGHVDKFADFMVKDVKNGECFRADHLLKAHLQKLMSDKKCSVEKKSEMESVLAQLDNYGQQELADLFVNYNVKSPITGNDLSPPVSFNLMFKTFIGPGGNMPGYLRPETAQGIFLNFKRLLEFNQGKLPFAAAQIGNSFRNEISPRSGLIRVREFTMAEIEHFVDPSEKDHPKFQNVADLHLYLYSAKAQVSGQSARKMRLGDAVEQGVINNTVLGYFIGRIYLYLTKVGISPDKLRFRQHMENEMAHYACDCWDAESKTSYGWIEIVGCADRSCYDLSCHARATKVPLVAEKPLKEPKTVNVVQFEPSKGAIGKAYKKDAKLVMEYLAICDECYITEMEMLLNEKGEFTIETEGKTFQLTKDMINVKRFQKTLYVEEVVPNVIEPSFGLGRIMYTVFEHTFHVREGDEQRTFFSFPAVVAPFKCSVLPLSQNQEFMPFVKELSEALTRHGVSHKVDDSSGSIGRRYARTDEIGVAFGVTIDFDTVNKTPHTATLRDRDSMRQIRAEISELPSIVQDLANGNITWADVEARYPLFEGQETGKKETIEE

SEQ ID NO: 53569 - protein, 46 aa, Homo sapiens
MTLTKGSFTYSSGEEYRGEWKEGEKDPWGVSMMNTSFAGGQIHQDI

SEQ ID NO: 53570 - protein, 42 aa, Homo sapiens
MSGLHLVKQGRDRKKIDSQRDFTVASPAEFVTRFGGNKVIEK

SEQ ID NO: 53571 - protein, 380 aa, Homo sapiens
MIQKLPEWAADEPVEKTPQTQQDELYIHSEPLGVVLVIGTWNYPFNLTIQPMVGAIAAGNSVVLKPSELSENMASLLATIIPQYLDKDLYPVINGGVPETTELLKERFDHILYTGSTGVGKIIMTAAAKHLTPVTLELGGKSPCYVDKNCDLDVACRRIAWGKFMNSGQTCVAPDYILCDPSIQNQIVEKLKKSLKEFYGEDAKKSRDYGRIISARHFQRVMGLIEGQKVAYGGTGDAATRYIAPTILTDVDPQSPVMQEEIFGPVLPIVCVRSLEEAIQFINQREKPLALYMFSSNDKVIKKMIAETSSGGVAANDVIVHITLHSLPFGGVGNSGMGSYHGKKSFETFSHRRSCLVRPLMNDEGLKVRYPPSPAKMTQH

SEQ ID NO: 53572 - protein, 472 aa, Homo sapiens
PPGLPAGADCLNSFTAGVPGFVLDTNASVSNGATFLESPTVRRGWDCVRACCTTQNCNLALVELQPDRGEDAIAACFLINCLYEQNFVCKFAPREGFINYLTREVYRSYRQLRTQGFGGSGIPKAWAGIDLKVQPQEPLVLKDVENTDWRLLRGDTDVRVERKDPNQVELWGLKEGTYLFQLTVTSSDHPEDTANVTVTVLSTKQTEDYCLASNKVGRCRGSFPRWYYDPTEQICKSFVYGGCLGNKNNYLREEECILACRGVQGGPLRGSSGAQATFPQVCSGTCQPTQFRCSNGCCIDSFLECDDTPNCPDASDEAACEKYTSGFDELQRIHFPSDKGHCVDLPDTGLCKESIPRWYYNPFSEHCARFTYGGCYGNKNNFEEEQQCLESCRGISKKDVFGLRREIPIPSTGSVEMAVAVFLVICIVVVVAILGYCFFKNQRKDFHGHHHHPPPTPASSTVSTTEDTEHLV

SEQ ID NO: 53573 - protein, 138 aa, Homo sapiens
MSGILKRKFEEVDGSSPCSSVRESDDEVSSSESADSGDSVNPSTSSHFTPSSILKREKRLRTKNVHFSCVTVYYFTRRQGFTSVPSQGGSTLGMSSRHNSVRQYTLGEFAREQERLHREMLREHLREEKLNSLKLKMT

SEQ ID NO: 53574 - protein, 76 aa, Homo sapiens
SGVYQHVTGEMMGGHAIRILGWGVENGTPYWLVANSWNTDWGDNGFFKILRGQDHCGIESEVVAGIPRTDQYWEKI

SEQ ID NO: 53575 - protein, 115 aa, Homo sapiens
MAAPAAVAGAPGAQRGERPFACDWQGCDKKFARSDELARHHRTHTGEKRFSCPLCSKRFTRSDHLAKHARRHPGFHPDLLRRPGARSTSPSDSLPCSLAGSPAPSPAPSPAPAGL

SEQ ID NO: 53576 - protein, 366 aa, Homo sapiens
MPRVKAAQAGRQSSAKRHLAEQFAVGEIITDMAKKEWKVGLPIGQGGFGCIYLADMNSSESVGSDAPCVVKVEPSDNGPLFTELKFYQRAAKPEQIQKWIRTRKLKYLGVPKYWGSGLHDKNGKSYRFMIMDRFGSDLQKIYEANAKRFSRKTVLQLSLRILDILEYIHEHEYVHGDIKASNLLLNYKNPDQVYLVDYGLAYRYCPEGVHKEYKEDPKRCHDGTIEFTSIDAHNGVAPSRRGDLEILGYCMIQWLTGHLPWEDNLKDPKYVRDSKIRYRENIASLMDKCFPEKNKPGLKAIGSKDDGKLDLSVVENGGLKAKTITKKRKKEIEESKEPGVEDTEWSNTQTEEAIQTRSRTRKRVQK

SEQ ID NO: 53577 - protein, 145 aa, Homo sapiens
MSYNGGAVMAMKGKNCVAIAADRRFGIQAQMVTTDFQKIFPMGDRLYIGLAGLATDVQTVAQRLKFRLNLYELKEGRQIKPYTLMSMVANLLYEKRFGPYYTEPVIAGLDPKTFKPFICSLDLIGCPMVTDDFVVSGTCAEQMYG

SEQ ID NO: 53578 - protein, 154 aa, Homo sapiens
MMVQGQEYEAGGSVIHPLNLHMKRFVKDLGLSAVQASGGLLGIYNGETLVFEESNWFIINVIKLVWRYGFQSLRMHMWVEDVLDKFMRIYRYQSHDYAFSSVEKLLHALGGDDFLGMLNRTLLETLQKAGFSEKFLNEMIAPVMRVNYGQSTDI

SEQ ID NO: 53579 - protein, 153 aa, Homo sapiens
MTSFSTSAQCSTSDSACRISPGQINQVRPKLPLLKILHAAGAQGEMFTVKEVMHYLGQYIMVKQLYDQQEQHMVYCGGDLLGELLGRQSFSVKDPSPLYDMLRKNLVTLATATTGSQYGYSKSRPTEAKCRGKFHFQKKNYRRRYPHTAYLRA

SEQ ID NO: 53580 - protein, 648 aa, Homo sapiens
LESIFIGGDIRSQLPEEAKKFDNIDKVFKRIMGETLKDPVIKRCCEAPNRLSDLQNVSEGLEKCQKSLNDYLDSKRNAFPRFFFISDDELLSILGSSDPLCVQEHMIKMYDNIASLRFNDGDSGEKLVSAMISAEGEVMEFRKILRAEGRVEDWMTAVLNEMRRTNRLITKEAIFRYCEDRSRVDWMLLYQGMVVLAASQVWWTWEVEDVFHKAQKGEKQAMKNYGRKMHRQIDELVTRITMPLSKNDRKKYNTVLIIDVHARDIVDSFIRGSILEAREFDWESQLRFYWDREPDELNIRQCTGTFGYGYEYMGLNGRLVITPLTDRIYLTLTQALSMYLGGAPAGPAGTGKTETTKDLAKALGLLCVVTNCGEGMDYRAVGKIFSGLAQCGAWGCFDEFNRIDASVLSVISSQIQTIRNALIHQLTTFQFEGQEISLDSRMGIFITMNPGYAGRTELPESVKALFRPVVVIVPDLQQICEIMLFSEGFLEAKTLAKKMTVLYKLAREQLSKQYHYDFGLRALKSVLVMAGELKRGSSDLREDVVLMRALRDMNLPKFVFEDVPLFLGLISDLFPGLDCPRVRYPDFNDAVEQVLEENGYAVLPIQVDKVVQMFETMLTRHTTMVVGPTRGGKSVVINTLCQAQTNLS

SEQ ID NO: 53581 - protein, 92 aa, Homo sapiens
IYLNVESVCTHRERSEDAKKGPNPLMRRNSVTPLASPEPTKKPRINSFEEHVASTSAALPSCLPPEVPTQLPGQPLLGQACLNWKGVMRNAA

SEQ ID NO: 53582 - protein, 167 aa, Homo sapiens
MSRVRDAGCVAAGIVIGAGAWYCVYKYTRGRDQTKKRMAKPKNRAVAGTGARARAGLRAGFTIDLGSGFSPPTPVRAEAEDRAQDEASALDTVGAEAVAPAASSAEAQSGAGSQAQEADGAGVGPKAESVVGAAMASAIAPPPGVTEALGAAEAPAMAGAPKVAEAP

SEQ ID NO: 53583 - protein, 139 aa, Homo sapiens
MRRIVFAGVILFRLLGVILFRLLGVILFGRLGDLGTCQTKPGQYWKEEVHIQDVGGLICRACNLSLPFHGCLLDLGTCQAEPGQYCKEEVHIQGGIQWYSVKGCTKNTSECFKSTLVKRILQLHELVTTHCCNHSLCNF

SEQ ID NO: 53584 - protein, 218 aa, Homo sapiens
MEPLRDVHVGLSPPSRGPVRLALLSGHYLYYHYGCDGLDDRGWGCGYRTLQTLCSWPEGQPAGVPGLAAVQAALEDMGDKPPGFRGSRDWIGCVEASLCLAHFGGPQGRLCHVPRGVGLHGELERLYSHFAGGGGPVMVGGDADARSKALLGVCVGSGTEAYVLVLDPHYWGTPKSPSELQAAGWVGWQEVSAAFDPNSFYNLCLTSLSSQQQQRTLD

SEQ ID NO: 53585 - protein, 264 aa, Homo sapiens
MCPRAARAPATLLLALGAVLWPAAGAWELTILHTNDVHSRLEQTSEDSSKCVNASRCMGGVARLFTKVQQIRRAEPNVLLLDAGDQYQGTIWFTVYKGAEVAHFMNALRYDAMALGNHEFDNGVEGLIEPLLKEAKFPILSANIKAKGPLASQISGLYLPYKVLPVGDEVVGIVGYTSKETPFLSNPGTNLVFEDEITALQPEVDKLKTLNVNKIIALGHSGFEMDKLIAQKVRGVDVVVGGHSNTFLYTGNCFKRIAWARMSR

SEQ ID NO: 53586 - protein, 145 aa, Homo sapiens
  MOD_RES (1)..(1): Any amino acid
XMEGKRKLEGKPLRFRGVHHAFAKILAEGGIRGLWAGWVPNIQRAALVNMGDLTTYDTVKHYLVLNTPLEDNIMTHGLSSLCSGLVASILGTPADVIKSRIMNQPRDKQGRGLLYKSSTDCLIQAVQGEGFMSLYKGFLPSWLRM

SEQ ID NO: 53587 - protein, 147 aa, Homo sapiens
MEEPQTKTPSAEFPPYRAQPAQPATAPAATFATLAICPEPAPTSGPGQPCTAAMGSELETAMETLINVFHAHSGKEGDKYKLSKKELKELLQTELSGFLDAQKDVDAVDKVMKELDENGDGEVDFQEYVVLVAALTVACNNFFWENS

SEQ ID NO: 53588 - protein, 71 aa, Homo sapiens
YSAFNLLMHYPPPSGAGQHPQPQPPLHKANQPPHGVPQLSLYEHFNSPHPTPAPADISQKQGTSLGWGGAQ

SEQ ID NO: 53589 - protein, 187 aa, Homo sapiens
  MOD_RES (1)..(1): Any amino acid
XSEERDIGKPMEIFVDDETKLTLHGLQQYYVKLKDNEKNRKLFDLLDVLEFNQVVIFVKSVQRCIALAQLLVEQNFPAIAIHRGMPQEERLSRYQQFKDFQRRILVATNLFGRGMDIERVNIAFNYDMPEDSDTYLHRVARAGRFGTKGLAITFVSDENDAKILNDVQDRFEVNISELPDEIDISSY

SEQ ID NO: 53590 - protein, 358 aa, Homo sapiens
MHRKHLQEIPDLSSNVATSFTWGWDSSKTSELLSGMGVSALEKEEPDSENIPQELLSNLGHPESPPRKRLKSKGSDKDFVIVRRPKLNRENFPGVSWDSLPDELLLGIFSCLCLPELLKVSGVCKRWYRLASDESLWQTLDLTGKNLHPDVTGRLLSQGVIAFRCPRSFMDQPLAEHFSPFRVQHMDLSNSVIEVSTLHGILSQCSKLQNLSLEGLRLSDPIVNTLAKNSNLVRLNLSGCSGFSEFALQTLLSSCSRLDELNLSWCFDFTEKHVQVAVAHVSETITQLNLSGYRKNLQKSDLSTLVRRCPNLVHLDLSDSVMLKNDCFQEFFQLNYLQHLSLSRCYDIIPETLLIQNS

SEQ ID NO: 53591 - protein, 283 aa, Homo sapiens
MGADGMYDKLRMLNGQTGSWGTRPGWYPGTSVPGQPTQDGCQQQEGGGENTNSISSNGEDSDEAQMRLQLKRKLQRNRTSFTQEQIEALEKEFERTHYPDVFARERLAAKIDLPEARIQVWFSNRRAKWRREEKLRNQRRQASNTPSHIPISSSFSTSVYQPIPQPTTPVSSFTSGSMLGRTDTALTNTYSALPPMPSFTMANNLPMQPPVPSQTSSYSCMLPTSPSVNGRSYDTYTPPHMQTHMNSQPMGTSGTTSTGLISPGVSVPVQVPGSEPDMSQYWP

SEQ ID NO: 53592 - protein, 457 aa, Homo sapiens
MSKPHSEAGTAFIQTQQLHAAMADTFLEHMCRLDIDSPPITARNTGIICTIGPASRSVELKKGATLKITLDNAYMEKCDENILWLDYKNICKVVEVGSKIYVDDGLISLQVKQKGADFLVTEVENGGSLGSKKGVNLPGAAVDLPAVSEKDIQDLKFGVEQDVDMVFASFIRKASDVHEVRKVLGEKGKNIKIISKIENHEGVRRFDEILEASDGIMVARGDLGIEIPAEKVFLAQKMMIGRCNRAGKPVICATQMLESMIKKPRPTRAEGSDVANAVLDGADCIMLSGETAKGDYPLEAVRMQHLIAREAEAAIYHLQLFEELRRLAPITSDPTEATAVGAVEASFKCCSGAIIVLTKSGRSAHQVARYRPRAPIIAVTRNPQTARQAHLYRGIFPVLCKDPVQEAWAEDVDLRVNFAMNVGKARGFFKKGDVVIVLTGWRPGSGFTNTMRVVPVP

SEQ ID NO: 53593 - protein, 880 aa, Homo sapiens
GAINMVVRRRKSLGGKVVTPLHINLSGQKDSGISLENGVYAAAVLPGSPAAKEGSLAVGDRIVAINGIALDNKSLNECESLLRSCQDSLTLSLLKEQKCVPASGELSPELQEWAPYSPGHSSRHSNPPLYPSRPSVGTVPRSLTPSTTVSSILRNPIYTVRSHRVGPCSSPPAARDAGPQGLHPSVQHQGRLSLDLSHRTCSDYSEMRATHGSNSLPSSARLGSSSNLQFKAERIKIPSTPRYPRSVVGSERGSVSHSECSTPPQSPLNIDTLSSCSQSQTSASTLPRIAVNPASLGERRKDRPYVEEPRHVKVQKGSEPLGISIVSGEKGGIYVSKVTVGSIAHQAGLEYGDQLLEFNGINLRSATEQQARLIIGQQCDTITILAQYNPHVHQLSSHSRSSSHLDPAGTHSTLQGSGTTTPEHPSVIDPLMEQDEGPSTPPAKQSSSRIAGDANKKTLEPRVVFIKKSQLELGVHLCGGNLHGVFVAEVEDDSPAKGPDGLVPGDLILEYGSLDVRNKTVEEVYVEMLKPRDGVRLKVQYRPEEFTKAKGLPGDSFYIRALYDRLADVEQELSFKKDDILYVDDTLPQGTFGSWMAWQLDENAQKIQRGQIPSKYVMDQEFSRRLSMSEVKDDNSATKTLSAAARRSFFRRKHKHKRSGSKDGKDLLALDAFSSDSIPLFEDSVSLAYQRVQKVDCTALRPVLILGPLLDVVKEMLVNEAPGKFCRCPLEVMKASQQAIERGVKDCLFVDYKRRSGHFDVTTVASIKEITEKNRHCLLDIAPHAIERLHHMHIYPIVIFIHYKSAKHIKEQRDPIYLRDKVTQRHSKEQFEAAQKLEQEYSRYFTGVIQGGALSSICTQILAMVNQEQNKVLWIPACPL

SEQ ID NO: 53594 - protein, 149 aa, Homo sapiens
  MOD_RES (1)..(1): Any amino acid
XLEGASLETVKVGKTYELLNCDKHKSILLKNGRDPGEARPDITHQSLLMLMDSPLNRAGLLQVYIHTQKNVLIEVNPQTRIPRTFDRFCGLMVQLLHKLSVRAADGPQKLLKVSVEYTEKMVSISNYPLSAALTCAKLTTAFEEVWGVI

SEQ ID NO: 53595 - protein, 62 aa, Homo sapiens
MAASPHTLSSRLLTGCVGGSVWYLERRTIQDSPHKFLHLLRNVNKQWITFQHFSFLKRMLWL

SEQ ID NO: 53596 - protein, 471 aa, Homo sapiens
MNGKARKEAVQTAAKELLKFVNRSPSPFHAVAECRNRLLQAGFSELKETEKWNIKPESKYFMTRNSSTIIAFAVGGQYVPGNGFSLIGAHTDSPCLRVKRRSRRSQVGFQQVGVETYGGGIWSTWFDRDLTLAGRVIVKCPTSGRLEQQLVHVERPILRIPHLAIHLQRNINENFGPNTEMHLVPILATAIQEELEKGTPEPGPLNAVDERHHSVLMSLLCAHLGLSPKDIVEMELCLADTQPAVLGGAYDEFIFAPRLDNLHSCFCALQALIDSCAGPGSLATEPHVRMVTLYDNEEVGSESAQGAQSLLTELVLRRISASCQHPTAFEEAIPKSFMISADMAHAVHPNYLDKHEENHRPLFHKGPVIKVNSKQRYASNAVSEALIREVANKVKVPLQDLMVRNDTPCGTTIGPILASRLGLRVLDLGSPQLAMHSIREMACTTGVLQTLTLFKGFFELFPSLSHNLLVD

SEQ ID NO: 53597 - protein, 533 aa, Homo sapiens
MFEVNMKERDDGSVTITNLSSKAVKAFLDYAYTGKTKITDDNVEMFFQLSSFLQVSFLSKACSDFLIKSINLVNCLQLLSISDSYGSTSLFDHALHFVQHHFSLLFKSSDFLEMNFGVLQKCLESDELNVPEEEMVLKVVLSWTKHNLESRQKYLPHLIEKVRLHQLSEETLQDCLFNEESLLKSTNCFDIIMDAIKCVQGSGGLFPDARPSTTEKYIFIHKTEENGENQYTFCYNIKSDSWKILPQSHLIDLPGSSLSSYGEKIFLTGGCKGKCCRTVRLHIAESYHDATDQTWCYCPVKNDFFLVSTMKTPRTMHTSVMALDRLFVIGGKTRGSRDIKSLLDVESYNPLSKEWISVSPLPRGIYYPEASTCQNVIYVLGSEVEITDAFNPSLDCFFKYNATTDQWSELVAEFGQFFHATLIKAVPVNCTLYICDLSTYKVYSFCPDTCVWKGEGSFECAGFNAGAIGIEDKIYILGGDYAPDEITDEVQVYHSNRSEWEEVSPMPRALTEFYCQVIQFNKYRDPWFSNLCA

SEQ ID NO: 53598 - protein, 109 aa, Homo sapiens [sequence omitted]

SEQ ID NO: 53599 - protein, 43 aa, Homo sapiens
MKCVFVTVGTTSFDDLIACVSAPDSLQVQGFLERRHSESRSCY

SEQ ID NO: 53600 - protein, 54 aa, Homo sapiens
MPTAESEAKVKTKVRFEELLKTHSDLMREKKKLKKKLVRSEENISNQEKSMAVW

SEQ ID NO: 53601 - protein, 354 aa, Homo sapiens
MVGQLAARRAAGVVLEMIREGKIAGRAVLIAGQPGTGKTAIAMGMAQALGPDTPFTAIAGSEIFSLEMSKTEALTQAFRRSIGVRIKEETEIIEGEVVEIQIDRPATGTGSKVGKLTLKTTEMETIYDLGTKMIESLTKDKVQAGDVITIDKATGKISKLGRSFTRARDYDAMGSQTKFVQCPDGELQKRKEVVHTVSLHEIDVINSRTQGFLALFSGDTGEIKSEVREQINAKVAEWREEGKAEIIPGVLFIDEVHMLDIESFSFLNRALESDMAPVLIMATNRGITRIRGTSYQSPHGIPIDLLDRLLIVSTTPYSEKDTKQILRIRVQKCRWMTSSGSTHSSWTSPAPRST

SEQ ID NO: 53602 - protein, 158 aa, Homo sapiens
MSKDALPEKACQLDSRYWRITNAKGDVEEVQGPGVVGEFPIISPGRVYEYTSCTTFSTTSGYMEGYYTFHFLYFKDKIFNVAIPRFHMACPTFRVSIARLEMGPDEYEEMEEEEEEEEEEDEDDDSADMDESDEDDEEERRRRVFDVPIRRRRCSRLF

SEQ ID NO: 53603 - protein, 400 aa, Homo sapiens
  MOD_RES (1)..(1): Any amino acid
XHPAGISDLLAEVSAEVDGPVPGYLSSPQSITDTCLYIFTSGTTGLPKAARISHLKILQCQGFYQLCGVHQEDVIYLALPLYHMSGSLLGIVGCMGIGATVVLKSKFSAGQFWEDCQQHRVTVFQYIGELCRYLVNQPPSKAERGHKVRLAVGSGLRPDTWERFVRRFGPLQVLETYGLTEGNVATINYTGQRGAVGRASWLYKHIFPFSLIRYDVTTGEPIRDPQGHCMATSPGEPGLLVAPVSQQSPFLGYAGGPELAQGKLLKDVFRPGDVFFNTGDLLVCDDQGFLRFHDRTGDTFRWKGENVATTEVAEVFEALDFLQEVNVYGVTVPGHEGRAGMAALVLRPPHALDLMQLYTHVSENLPPYARPRFLRLQAVGAYLPLTTARYSALLAGNLRI

SEQ ID NO: 53604 - protein, 44 aa, Homo sapiens
MARPRPREYKAGDLVFAKMKGYPHWPARIGTFGRKSKLSSYLYP

SEQ ID NO: 53605 - protein, 106 aa, Homo sapiens
  MOD_RES (1)..(1): Any amino acid
XWGDPNVTVLAGLTPGNSPIFYREVLPLNQAHRVEVVLLHGKAFNSHTWEQLGTLQLLSQRGYRAVALDLPAHHAQRHDQQGSRGGAPIGDALPPVPAYPHCPAQA

SEQ ID NO: 53606 - protein, 50 aa, Homo sapiens
  MOD_RES (1)..(1): Any amino acid
XSYIALPLTLLVLLAGYNHDKGHIRPGERPAHPWGLISKRPASFELKPTH

SEQ ID NO: 53607 - protein, 136 aa, Homo sapiens
  MOD_RES (1)..(1): Any amino acid
XVARYKLRIVKPPKLPLEKKPNPDKDGPDYEPNLWMWVNPNIVYPPGKLEVSGRRKREDLTSTLPSSQPPQKEEDASCSEAAGVESLSQSSSKRSPPRKRFAFSPSTWEKALPLFPDGPGRLEEYCPSQSLFSRQL

SEQ ID NO: 53608 - protein, 23 aa, Homo sapiens
MKRMSTKHQRNNVGRPASRSNLK

SEQ ID NO: 53609 - protein, 410 aa, Homo sapiens
MSLMVVSMACVGFFLLEGPWPHVGGQDKPFLSAWPGTVVSEGQHVTLQCRSRLGFNEFSLSKEDGMPVPELYNRIFRNSFLMGPVTPAHAGTYRCCSSHPHSPTGWSAPSNPVVIMVTGVHRKPSLLAHPGPLVKSGETVILQCWSDVRFERFLLHREGITEDPLRLVGQLHDAGSQVNYSMGPMTPALAGTYRCFGSVTHLPYELSAPSDPLDIVVVGLYGKPSLSAQPGPTVQAGENVTLSCSSRSLFDIYHLSREAEAGELRLTAVLRVNGTFQANFPLGPVTHGGTYRCFGSFRALPHAWSDPSDPLPVSVTGNSRNLHVLIGTSVVIIPFAILLFFLLHRWCANKKNAVVMDQEPAGNRTVNREDSDEQDPQEVTYAQLNHCVFTQRKITRPSQRPKTPPTDTSV

SEQ ID NO: 53610 - protein, 80 aa, Homo sapiens
MLELQYHNEDLEKDKTSQNCLGRGMEQVAKKLGVAHEEIQRLTDELQVKEKEQCKLGKLWFQMTISDHALTVLISSQGGT

SEQ ID NO: 53611 - protein, 172 aa, Homo sapiens
MAAMETETAPLTLESLPTDPLLLILSFLDYRDLINCCYVSRRLSQLSSHDPLWRRHCKKYWLISEEEKTQKNQCWKSLFIDTYSDVGRYIDHYAAIKKAWDDLKKYLEPRCPRMVLSLKEGAREEDLDAVEAQIGCKLPDDYRCSYRIHNGQKLVVPGTKWLEIQLLLTCLL

SEQ ID NO: 53612 - protein, 189 aa, Homo sapiens
MTPGTQSPFFLLLLLTVLTATTAPKPATVVTGSGHASSTPGGEKETSATQRSSVPSSTEKNAFNSSLEDPSTDYYQELQRDISEMSGAGVPGWGIALLVLVCVLVALAIVYLIALAVCQCRRKNYGQLDIFPARDTYHPMSEYPTYHTHGRYVPPSSTDRSPYEKVSAGNGGSSLSYTNPAVAATSANL

SEQ ID NO: 53613 - protein, 120 aa, Homo sapiens
MKTGLFFLCLLGTAAAIPTNARLLSDHSKPTAETVAPDNTAIPSLRAEAEENEKETAVSTEDDSHHKAEKSSVLKSKEESHEQSAEQGKSSSQELGLKDQEDSDGHLSVNLEYAPTEGTL

SEQ ID NO: 53614 - protein, 115 aa, Homo sapiens
MHTQDSEVVPVPAWPFSLVVFSCGGCWSVTAKMLRNLLALRQIGQRTISTASRRHFKNKVPEKQKLFQEDDEIPLYLKGGVADALLYRATMILTVGGTAYAIYELAVASFPKKQE

SEQ ID NO: 53615 - protein, 304 aa, Homo sapiens
MEVLESKKIELPKKLAKRYPAYELYLYGEGSYAEEHKILPLTGIPVLFLPGNAGSYKQVRSIGSIALRKAEDIDFKYHFDFFSVNFNEELVALYGGSLQKQTKFVHECIKTILKLYKGQEFAPKSVAIIGHSMGGLVARALLTLKNFKHDLINLLITQATPHVAPVMPLDRFITDFYTTVNNYWILNARHINLTTLSVAGGFRDYQVRSGLTFLPKLSHHTSALSVVSSAVPKTWVSTDHLSIVWCKQLQLTTVRAFFDLIDADTKQITQNSKKKLSVLYHHFIRHPSKHFEENPAIISDLTGI

SEQ ID NO: 53616 - protein, 80 aa, Homo sapiens
MSQQDAVAALSERLLVAAYKGQTENVVQLINKGARVAVTKHGRTPLHLAANKGHLPVVQILLKAGCDLDVQDDGDQTALH

SEQ ID NO: 53617 - protein, 57 aa, Homo sapiens
MGHVWLEGDNLQNSTDSRCYGPIPYGLIRGRIFFKIWPLSDFGFLRASPNGHRFSDD

SEQ ID NO: 53618 - protein, 145 aa, Homo sapiens
MAVWLAQWLGPLLLVSLWGLLAPASLLRRLGEHIQQFQESSAQGLGLSLGPGAAALPKVGWLEQLLDPFNVSDRRSFLQRYWVNDQHWVGQDGPIFLHLGGEGSLGPGSVMRDCLAQPGPEVFKLFPSRDSGTAEEHRTSTVWCG

SEQ ID NO: 53619 - protein, 409 aa, Homo sapiens
MEGLTTSRRDFGPHKVAPVKVHQYDQFVPSEENMDLLTTYKKDYNPYPVCRVDPIKPRDSKYPCSDKMECLPTYKADYLPWNQPRREPLRLEHKYQPASVRFDNRTTHQDDYPIKGLVKTISCKPLAMPKLCNIPLEDVTNYKMSYVAHPVEKRFVHEAEKFRPCEIPFESLTTQKQSYRGLMGEPAKSLKPLARPPGLDMPFCNTTEFRDKYQAWPMPRMFSKAPITYVPPEDRMDLLTTVQAHYTCPKGAPAQSCRPALQIKKCGRFEGSSTTKDDYKQWSSMRTEPVKPVPQLDLPTEPLDCLTTTRAHYVPHLPINTKSCKPHWSGPRGNVPVESQTTYTISFTPKEMGRCLASYPEPPGYTFEEVDALGHRIYKPVSQAGSQQSSHLSVDDSENPNQRELEVLA

SEQ ID NO: 53620 - protein, 272 aa, Homo sapiens
MAEALRRIQVVHAFDIFQMLDVLQELRGTVAQQVTGSSGTVKVVVVDSVTAVVSPLLGGQQREGLALMMQLARELKTLARDLGMAVVVTNHITRDRDSGRLKPALGRSWSFVPSTRILLDTIEGAGASGGRRMACLAKSSRQSIDSEDSFVPGRRASLSDLTDLEDIEGLTVRQLKEILARNFVNYKGCCEKWELMERVTRLYKDQKGLQHLGGAVPSGLEENLCKICMDSPIDCVLLECGHMVTCTKCGKRMNECPICRQYVIRAVHVFRS

SEQ ID NO: 53621 - protein, 359 aa, Homo sapiens
MGTFCSVIKFENLQELKRLCHWGPIIALGVIAICSTMAMIDSVLWYWPLHTTGGSVNFIMLINWTVMILYNYFNAMFVGPGFVPLGWKPEISQDTMYLQYCKVCQAYKAPRSHHCRKCNRCVMKMDHHCPWINNCCGYQNHASFTLFLLLAPLGCIHAAFIFVMTMYTQLYHRMKIILRNKTSIESWIEEKAKDRIQYYQLDEVFVFPYDMGSRWRNFKQVFTWSGVPEGDGLEWPVREGCHQYSLTIEQLKQKADKRVRSVRYKVIEDYSGACCPLNKGIKTFFTSPCTEEPRIQLQKGEFILATRGLRYWLYGDKILDDSFIEGVSRIRGWFPRKCVEKCPCDAETDQAPEGEKKNR

SEQ ID NO: 53622 - protein, 1314 aa, Homo sapiens
  MOD_RES (1)..(1): Any amino acid
XAAGALERSFVELSGAERERPRHFREFTVCSIGTANAVAGAVKYSESAGGFYYVESGKLFSVTRNRFIHWKTSGDTLELMEESLDINLLNNAIRLKFQNCSVLPGGVYVSETQNRVIILMLTNQTVHRLLLPHPSRMYRSELVVDSQMQSIFTDIGKVDFTDPCNYQLIPAVPGISPNSTASTAWLSSDGEALFALPCASGGIFVLKLPPYDIPGMVSVVELKQSSVMQRLLTGWMPTAIRGDQSPSDRPLSLAVHCVEHDAFIFALCQDHKLRMWSYKEQMCLMVADMLEYVPVKKDLRLTAGTGHKLRLAYSPTMGLYLGIYMHAPKRGQFCIFQLVSTESNRYSLDHISSLFTSQETLIDFALTSTDIWALWHDAENQTVVKYINFEHNVAGQWNPVFMQPLPEEEIVIRDDQDPREMYLQSLFTPGQFTNEALCKALQIFCRGTERNLDLSWSELKKEVTLAVENELQGSVTEYEFSQEEFRNLQQEFWCKFYACCLQYQEALSHPLALHLNPHTNMVCLLKKGYLSFLIPSSLVDHLYLLPYENLLTEDETTISDDVDIARDVICLIKCLRLIEESVTVDMSVIMEMSCYNLQSPEKAAEQILEDMITIDVENVMEDICSKLQEIRNPIHAIGLLIREMDYETEVEMEKGFNPAQPLNIRMNLTQLYGSNTAGYIVCRGVHKIASTRFLICRDLLILQQLLMRLGDAVIWGTGQLFQAQQDLLHRTAPLLLSYYLIKWGSECLATDVPLDTLESNLQHLSVLELTDSGALMANRFVSSPQTIVELFFQEVARKHIISHLFSQPKAPLSQTGLNWPEMITAITSYLLQLLWPSNPGCLFLECLMGNCQYVQLQDYIQLLHPWCQVNVGSCRFMLGRCYLVTGEGQKALECFCQAASEVGKEEFLDRLIRSEDGEIVSTPRLQYYDKVLRLLDVIGLPELVIQLATSAITEAGDDWKSQATLRTCIFKHHLDLGHNSQAYEALTQIPDSSRQLDCLRQLVVVLCERSQLQDLVEFPYVNLHNEVVGIIESRARAVDLMTHNYYELLYAFHIYRHNYRKAGTVMFEYGMRLGREVRTLRGLEKQGNCYLAALNCLRLIRPEYAWIVQPVSGAVYDRPGASPKRNHDGECTAAPTNRQIEILELEDLEKECSLARIRLTLAQHDPSAVAVAGSSSAEEMVTLLVQAGLFDTAISLCQTFKLPLTPVFEGLAFKCIKLQFGGEAAQAEAWAWLAANQLSSVITTKESSATDEAWRLLSTYLERYKVQNNLYHHCVINKLLSHGVPLPNWLINSYKDYQQKVDKATRDLLYRRTL

SEQ ID NO: 53623 - protein, 52 aa, Homo sapiens
MELVRRLMPLTLLILSCLAELTMAEAEGLIQMEAVKVKTLKSLTEPPAMGLC

SEQ ID NO: 53624 - protein, 247 aa, Homo sapiens
MASRWQNMGTSVRRRSLQHQEQLEDSKELQPVVSHQETSVGALGSLCRQFQRRLPLRAVNLNLRAGPSWKRLETPEPGQQGLQAAARSAKSALGAVSQRIQESCQSGTKWLVETQVKARRRKRGAQKGSGSPTHSLSQKSTRLSGAAPAHSAADPWEKEHHRLSVRMGSHAHPLRRSRREAAFRSPYSSTEPLCSPSESDSDLEPVGAGIQHLQKLSQELDEAIMAEERTLRGSSVPCLPMELGKAT

SEQ ID NO: 53625 - protein, 147 aa, Homo sapiens
MSEEKPKEGVKTENDHINLKVAGQDGSVVQFKIKRHTPLSKLMKAYCERQGLSMRQIRFRFDGQPINETDTPAQGIILSWKELWTWKQTFFFETESRFVAQARMQWRSLSSLCKLCLLSSRHSPASASQVAGTIGAHHHSRLIFLYF

SEQ ID NO: 53626 - protein, 235 aa, Homo sapiens
MSLMVISMACVAFFLLQGAWPHEGFRRKPSLLAHPGPLVKSEETVILQCWSDVMFEHFLLHREGTFNHTLRLIGEHIDGVSKGNFSIGRMTQDLAGTYRCYGSVTHSPYQLSAPSDPLDIVITGLYEKPSLSAQPGPTVLAGESVTLSCSSRSSYDMYHLSREGEAHERRLPAGPKVNRTFQADFPLDPATHGGTYRCFGSFRDSPYEWSKSSDPLLVSVTVATILLSTFMRSTF

SEQ ID NO: 53627 - protein, 675 aa, Homo sapiens
MMQESGTETKSNGSAIQNGSGGSNHLLECGGLREGRSNGETPAVDIGAADLAHAQQQQQQALQVARQLLLQQQQQQQVSGLKSPKRNDKQPALQVPVSVAMMTPQVITPQQMQQILQQQVLSPQQLQVLLQQQQALMLQQQLQEFYKKQQEQLQLQLLQQQHAGKQPKEQQQVATQQLAFQQQLLQMQQLQQQHLLSLQRQGLLTIQPGQPALPLQPLAQGMIPTELQQLWKEVTSAHTAEETTGNNHSSLDLTTTCVSSSAPSKTSLIMNPHASTNGQLSVHTPKRESLSHEEHPHSHPLYGHGVCKWPGCEAVCEDFQSFLKHLNSEHALDDRSTAQCRVQMQVVQQLELQLAKDKERLQAMMTHLHVKSTEPKAAPQPLNLVSSVTLSKSASEASPQSLPHTPTTPTAPLTPVTQGPSVITTTSMHTVGPIRRRYSDKYNVPISSDIAQNQEFYKNAEVRPPFTYASLIRQAILESPEKQLTLNEIYNWFTRMFAYFRRNAATWKNAVRHNLSLHKCFVRVENVKGAVWTVDEVEFQKRRPQKISGNPSLIKNMQSSHAYCTPLNAALQASMAENSIPLYTTASMGNPTLGNLASAIREELNGAMEHTNSNESDSSPGRSPMQAVHPVHVKEEPLDPEEAEGPLSLVTTANHSPDFDHDRDYEDEPVNEDME

SEQ ID NO: 53628 - protein, 351 aa, Homo sapiens
MERARGPRAEADAPEEEEEAGAAMAAVVVAAAGGAGPAVLQVAGLYRGLCAVRSRALGLGLVSPAQLRVFPVRPGSGRPEGGADSSGVGAEAELQANPFYDRYRDKIQLLRRSDPAAFESRLEKRSEFRKQPVGHSRQGDFIKCVEQKTDALGKQSVNRGFTKDKTLSSIFNIEMVKEKTAEEIKQIWQQYFAAKDTVYAVIPAEKFDLIWNRAQSCPTFLCALPRREGYEFFVGQWTGTELHFTALINIQTRGEAAASQLILYHYPELKEEKGIVLMTAEMDSTFLNVAEAQCIANQVQLFYATDRKETYGLVETFNLRPNEFKYMSVIAELEQSGLGAELKCAQNQNKT

SEQ ID NO: 53629 - protein, 348 aa, Homo sapiens
MAVAQQLRAESDFEQLPDDVAISANIADIEEKRGFTSHFVFVIEVKTKGGSKYLIYRRYRQFHALQSKLEERFGPDSKSSALACTLPTLPAKVYVGVKQEIAEMRIPALNAYMKSLLSLPVWVLMDEDVRIFFYQSPYDSEQVPQALRRLRPRTRKVKSVSPQGNSVDRMAAPRAEALFDFTGNSKLELNFKAGDVIFLLSRINKDWLEGTVRGATGIFPLSFVKILKDFPEEDDPTNWLRCYYYEDTISTIKSVAWEGGACPAFLPSLRPPPLTSPSHGSLSHSKAPSGSQMSHNAVTSHQRPGWPGQPHSPFPHPTPHFQPDASLLQPVTPLGTSRWRKISAALPY

SEQ ID NO: 53630 - protein, 134 aa, Homo sapiens
MMAAMATARVRMGPRCAQALWRMPWLPVFLSLAAAAAAAAAEQQVPLVLWSSDRDLWAPAADTHEGHITSDLQLSTYLDPALELGPRNVLLFLQDKVRPPQPTLPRSSGGSQAPSPHDTDAHSPREASVTLSQL

SEQ ID NO: 53631 - protein, 88 aa, Homo sapiens
MALTQGPLTFRDVAIEFSQEEWKSLDPVQKALYWDVMLENYRNLVFLGKDNFALEVKICPRVFLYFLCCLSWEPFHYLTETEALLTHK

SEQ ID NO: 53632 - protein, 35 aa, Homo sapiens
MGGLEPCSRLLLLPLLLAVSVLSRPRPRAIAVALR

SEQ ID NO: 53633 - protein, 88 aa, Homo sapiens
MWLYLAAFVGLYYLLHWYRERQVVSHLQDKYVFITGCDSGFGNLLARQLDARGLRVLAACLTEKGAEQLRGQTSDRLETVTLDVTKME

SEQ ID NO: 53634 - protein, 138 aa, Homo sapiens
MAPWPPKGLVPAMLWGLSLFLNLPGPIWLQPSPPPQSSPPPQPHPCHTCRGLVDSFNKGLERTIRDNFGGGNTAWEEENLSKYKDSETRLVEVLEGVCSKSDFECHRLLELSEELVESWWFHNLSWGNREALRWLRAV

SEQ ID NO: 53635 - protein, 188 aa, Homo sapiens
MSNKEGSGGFRKRKHDNFPHNQRREGKDVNSSSPVMLAFKSFQQELDARHDKYERLVKLSRDITVESKRTIFLLHRITSAPDMEDILTESEIKLDGVRQKIFQVAQELSGEDMHQFHRAITTGLQEYVEAVSFQHFIKTRSLISMDEINKQLIFTTEDNGKENKTAAGIAYHLQRAFGGGGWHGGRAT

SEQ ID NO: 53636 - protein, 44 aa, Homo sapiens
MPASSTVHVLQLLRELLAFVLLSYTVLIGALLLAGWTTYFLVLK

SEQ ID NO: 53637 - protein, 595 aa, Homo sapiens
MEFSGRKWRKLRLAGDQRNASYPHCLQFYLQPPSENISLIEFENLAIDRVKLLKSVENLGVSYVKGTEQYQSKLESELRKLKFSYRENLEDEYEPRRRDHISHFILRLAYCQSEELRRWFIQQEMDLLRFRFSILPKDKIQDFLKDSQLQFEAISDEEKTLREQEIVASSPSLSGLKLGFESIYKIPFADALDLFRGRKVYLEDGFAYVPLKDIVAIILNEFRAKLSKALAAGVQWRDLGSLQPLPPGFKRFSYLSLLSCWDYRCTPPHPGLLWYPGGPLQSLVTLDFPVPGGINSEDCETAKMVVCSFLWELCASKLTARSLPAVQSDERLQPLLNHLSHSYTGQDYSTQGNVGKISLDQIDLLSTKSFPPCMRQLHKALRENHHLRHGGRMQYGLFLKGIGLTLEQALQFWKQEFIKGKMDPDKFDKGYSYNIRHSFGKEGKRTDYTPFSCLKIILSNPPSQGDYHGCPFRHSDPELLKQKLQSYKISPGGISQILDLVKGTHYQVACQKYFEMIHNVDDCGFSLNHPNQFFCESQRILNGGKDIKKEPIQPETPQPKPSVQKTKDASSALASLNSSLEMDMEGLEDYFSEDS

SEQ ID NO: 53638 - protein, 248 aa, Homo sapiens
MAGLNSLEAVKRKIQALQQQADEAEDRAQGLQRELDGERERREKAEGDVAALNRRIQLVEEELDRAQERLATALQKLEEAEKAADESERGMKVIENRAMKDEEKMEIQEMQLKEAKHIAEEADRKYEEVARKLVILEGELERAEERAEVSELKCGDLEEELKNVTNNLKSLEAASEKYSEKEDKYEEEIKLLSDKLKEAETRAEFAERTVAKLEKTIDDLEDELYAQKLKYKAISEELDHALNDMTSL

SEQ ID NO: 53639 - protein, 182 aa, Homo sapiens
MKCPSNGLCSRLPADCIDCTTNFSCTYGKPVTFDCAVKPSVTCVDQDFKSQKNFIINMTCRFCWQLPETDYECTNSTSCMTVSCPRQRYPANCTVRDHVHCLGNRTFPKMLYCNWTGGYKWSTALALSITLGGFGADRFYLGQWREGLGKLFSFGGLGIWTLIDVLLIGVGYVGPADGSLYI

SEQ ID NO: 53640 - protein, 89 aa, Homo sapiens
MGILSVDLLITLQILPVFFSNCLFLALYDSVILLKHVVLLLSRSKSTRGEWRRMLTSEGLRCVWKSFLLDAYKQLNCPPSGFSKDGHIL

SEQ ID NO: 53641 - protein, 182 aa, Homo sapiens
MAERGYSFSLTTFSPSGKLVQIEYALAAVAGGAPSVGIKAANGVVLATEKKQKSILYDERSVHKVEPITKHIGLVYSGMGPDYRVLVHRARKLAQQYYLVYQEPIPTAQLVQRVASVMQEYTQSGGVRPFGVSLLICGWNEGRPYLFQSDPSGAYFAWKATAMGKNYVNGKTFLEKSPNLSG

SEQ ID NO: 53642 - protein, 65 aa, Homo sapiens
MAARVGAFLKNAWDKEPVLVVSFVVGGLEQSHDTTPRMLHDDPTLKRAHSMTNPTAASSRPHVSL

SEQ ID NO: 53643 - protein, 77 aa, Homo sapiens
MSSSRVGLRLAACLLNVSEAGRKYIVENIAKAALLDKNGKKHPQVSVLNIFSDQDYKRSVITIATSVDKLVDKRNQA

SEQ ID NO: 53644 - protein, 67 aa, Homo sapiens
MEAEGLDWLLVPLHQLVSWGAAAAMVFGGVVPYVPQYRDIRRTQNADGFSTYVCLVLLVANILRILF

SEQ ID NO: 53645 - protein, 53 aa, Homo sapiens
MPLTPTVQGFQWTLRGPDVETSPFGAPRAASHGVGRHQELRDPTGSLGRSPNH

SEQ ID NO: 53646 - protein, 131 aa, Homo sapiens
MDSTHPQHCACNSQIRPRWDCVAHCFLWAPGLPSRDDPGADKGEASGGVGTVSLTLSQPRERSLQVKKVFVKGMKKERALGEGAAWWQSQRLVSPGKHDRVSTHRKSQSVFTGVSAGDKQFTTTFSIVFTI

SEQ ID NO: 53647 - protein, 99 aa, Homo sapiens
MPLLGLLPRRAWASLLSQLLRPPCASCTGAVRCQSQGEESLQVGGQQGQRCHRSGQCPEKPHLTFILLPGCRGSVNIPTESTSRETKFYYQDPKGYQGS

SEQ ID NO: 53648 - protein, 81 aa, Homo sapiens
  MOD_RES (1)..(1): Any amino acid
XRGAAAGAAAGSGWTQEAGVAGGGAVIRTMRPTGHHVAHRGWRGRRTRALAVAGEPAPVGFPRMRSEPAQPPLGTHGGALL

SEQ ID NO: 53649 - protein, 502 aa, Homo sapiens
MGSQEVLGHAARLASSGLLLQVLFRLITFVLNAFILRFLSKEIVGVVNVRVPLGVFWSLFLGWIWLQLLEVPDPNVVPHYATGVVLFGLSAVVELLGEPFWVLAQAHMFVKLKVIAESLSVILKSVLTAFLVLWLPHWGLYIFSLAQLFYTTVLVLCYVIYFTKLLGSPESTKLQTLPVSRITDLLPNITRNGAFINWKEAKLTWSFFKQSFLKQILTEGERYVMTFLNVLNFGDQGVYDIVNNLGSLVARLIFQPIEESFYIFFAKVLERGKDATLQKQEDVAVAAAVLESLLKLALLAGLTITVFGFAYSQLALDIYGGTMLSSGSGPVLLRSYCLYVLLLAINGVTECFTFAAMSKEEVDRYNFVMLALSSSFLVLSYLLTRWCGSVGFILANCFNMGIRITQSLCFIHRYYRRSPHRPLAGLHLSPVLLGTFALSGGVTAVSEVFLCCEQGWPARLAHIAVGAFCLGATLGTAFLTETKLIHFLRTQLGVPRRTDKMT

SEQ ID NO: 53650 - protein, 380 aa, Homo sapiens
MSASAPAAEGEGTPTQPASEKEPEMPGPREESEEEEDEDDEEEEEEEKEKSLIVEGKREKKKVERLTMQVSSLQREPFTIAQGKGQKLCEIERIHFFLSKKKTDELRNLHKLLYNRPGTVSSLKKNVGQFSGFPFEKGSVQYKKKEEMLKKFRNAMLKSICEVLDLERSGVNSELVKRILNFLMHPKPSGKPLPKSKKTCSKGSKKERNSSGMARKAKRTKCPEILSDESSSDEDEKKNKEESSDDEDKESEEEPPKKTAKREKPKQKATSKSKKSVKSANVKKADSSTTKKNQNSSKKESESEDSSDDEPLIKKLKKPPTDEELKETIKKLLASANLEEVTMKQICKKVYENYPTYDLTERKDFIKTTVKEVNISVFQV

SEQ ID NO: 53651 - protein, 329 aa, Homo sapiens
MRPPPALALAGLCLLALPAAAASYFGLTGREVLTPFPGLGTAAAPAQGGAHLKQCDLLKLSRRQKQLCRREPGLAETLRDAAHLGLLECQFQFRHERWNCSLEGRMGLLKRGFKETAFLYAVSSAALTHTLARACSAGRMERCTCDDSPGLESRQAWQWGVCGDNLKYSTKFLSNFLGSKRGNKDLRARADAHNTHVGIKAVKSGLRTTCKCHGVSGSCAVRTCWKQLSPFRETGQVLKLRYDSAVKVSSATNEALGRLELWAPARQGSLTKGLAPRSGDLVYMEDSPSFCRPSKYSPGTAGWSAVARSQLITTSTSRIQAILPSQLPE

SEQ ID NO: 53652 - protein, 186 aa, Homo sapiens
ALLERTGYTLDVTTGQRKYGGPPPDSVYSGVQPGIGTECDSYEIRPGKHLGVCISVANNRLFVGSIPKNKTKENILEEFSKVTEGLVDVILYHQPDDKKKNRGFCFLEYEDHKSAAQARRRLMSGKVKVWGNVVTVEWADPVEEPDPEVMAKVKVLFVRNLATTVTEEILEKSFSEFGKLERVKKL

SEQ ID NO: 53653 - protein, 139 aa, Homo sapiens
MKVLLLKDAKEDDCGQDPYIRELGLYGLEATLIPVLSFEFLSLPSFSEKLSHPEDYGGLIFTSPRAVEAAELCLEQNNKTEVWERSLKEKWNAKSVYVVGNATASLVSKIGLDTEGETCGNAEKLAEYICSSEEVKGIF

SEQ ID NO: 53654 - protein, 507 aa, Homo sapiens
MQDDSIEASTSISQLLRESYLAETRHRGNNERSRAEPSSNPCHFGSPSGAAEGGGGQDDLPDLSAFLSQEELDESVNLARLAINYDPLEKADETQARKRLSPDQMKHSPNLSFEPNFCQDNPRSPTSSKESPQEAKRPQYCSETQSKKVFLNKAADFIEELSSLFKSHSSKRIRPRACKNHKSKLESQNKVMQENSSSFSDLSERRERSSVPIPIPADTRDNEVNHALEQQEAKRREAEQAASEAAGGDTTPGSSPSSLYYEEPLGQPPRFTQKLRSREVPEGTRVQLDCIVVGIPPPQVRWYCEGKELENSPDIHIVQAGNLHSLTIAEAFEEDTGRYSCFASNIYGTDSTSAEIYIEGVSSSDSEGDPNKEEMNRIQKPNEVSSPPTTSAVIPPAVPQAQHLVAQPRVATIQQCQSPTNYLQGLDGKPIIAAPVFTKMLQNLSASEGQLVVFECRVKGAPSPKVEWYREGTLIEDSPDFRILQKKPRSMAEPGKDDFNFNLLVYE

SEQ ID NO: 53655 - protein, 152 aa, Homo sapiens
MMNPRAKRDFYLAAPDLLDPKSAAQNSKPRLSFSTKPTVLASRVESDTTINVMKWKTVSTIFLVVVLYLIIGATVFKALEQPHEISQRTTIVIQKQTFISQHSCVNSTELDELIQDLETSHHAQKAAKYSVSSMPYWEFPSLVFSWLELEIS

SEQ ID NO: 53656 - protein, 164 aa, Homo sapiens
MMEGNGTENSCSRTRGWLQQDNDAKPWLWKFSNCFSRPEQTLPHSPQTKEYMENKKVAVELKDVPSPLHAGSKLFPAVPLPDIRSLQQPKIQLSSVPKVSCCAHCPNEPSTSPMRFGGGGGGSGGTSSLIHPGALLDSQSTRTITCQVGSGFAFQSASSLQNAS

SEQ ID NO: 53657 - protein, 137 aa, Homo sapiens
MADESETAVKPPAPPLPQMMEGNGNGHEHCSDCENEEDNSYNRGGLSPANDTGAKKKKKKQKKKKEKGSETDSAQDQPVKMNSLPAERIQEIQKAIELFSVGQGPAKTMEEASKRSYQFWDTQPVPKLAKRTVHPPE

SEQ ID NO: 53658 - protein, 395 aa, Homo sapiens
MAERAALEELVKLQGERVRGLKQQKASAELIEEEVAKLLKLKAQLGPDESKQKFVLKTPKDFDIAGNFDPMIPDAECLKIMCEILSSLQIGDFLVKVNDRRILDGMFAICGVSDSKFRTICSSVDKLDKVSWEEVKNEMVGEKGLAPEVADRIGDYVQQHGGVSLVEQLLQDPKLSQNKQALEGLGDLKLLFEYLTLFGIDDKISFDLSLARGLDYYTGVIYEAVLLQTPAQAGEEPLGVGSVAAGGRYDGLVGMFDPKGRKVPCVGLSIGVERIFSIVEQRLEALEEKIRTTETQVLVASAQKKLLEERLKLVSELWDAGIKAELLYKKNPKLLNQLQYCEEAGIPLVAIIGEQELKDGVIKLRSVTSREEVDVRREDLVEEIKRRTGQPLCIC

SEQ ID NO: 53659 - protein, 20 aa, Homo sapiens
ETKNWHTDVIEMNGVSRGWE

SEQ ID NO: 53660 - protein, 240 aa, Homo sapiens
MTCAYAPSGNYVACGGLDNICSIYNLKTREGNVRVSRELAGHTGYLSCCRFLDDNQIVTSSGDTTCALWDIETGQQTTTFTGHTGDVMSLSLAPDTRLFVSGACDASAKLWDVREGMCRQTFTGHESDINAICFFPNGNAFATGSDDATCRLFDLRADQELMTYSHDNIICGITSVSFSKSGRLLLAGYDDFNCNVWDALKADRAGVLAGHDNRVSCLGVTDDGMAVATGSWDSFLKIWN

SEQ ID NO: 53661 - protein, 84 aa, Homo sapiens
  MOD_RES (1)..(1): Any amino acid
XTSDFPVLDPSWTAQEEMALLEAVMDCGFGNWQDVANQMCTKTKEECEKHYMKHFINNPLFASTLLNLKQAEEAKTADTAIPFH

SEQ ID NO: 53662 - protein, 224 aa, Homo sapiens
MDVCTFEKVGIRGTNIVVLGVEKKSVAKLQDERTVRKICALDDHVCMAFAGLTADARVVINRARVECQSHKLTVEDPVTVEYITRFIATLKQKYTQSNGRRPFGISALIVGFDDDGISRLYQTDPSGTYHAWKANAIGRSAKTVREFLEKNYTEDAIASDSEAIKLAIKALLEVVQSGGKNIELAIIRRNQPLKMFSAKEVELYVTEIEKEKEEAEKKKSKKSV

SEQ ID NO: 53663 - protein, 70 aa, Homo sapiens
MNPIVVVHGGGAGPISKDRKERVHQGMVRAATVGYGILREGGSAVDAVEGAVVALEDDPEFNADTSLLSD

SEQ ID NO: 53664 - protein, 444 aa, Homo sapiens
MSLMVVSMACVGLFLVQRAGPHMGGQDKPFLSAWPSAVLPRGGHVTLRCHYRHRFNNFMLYKEDRIHIPIFHGRIFQESFNMSPVTTAHAGNYTCRGSHPHSPTGWSAPSNPVVIMVTGNHRKPSLLAHPGPLVKSGERVILQCWSDIMFEHFFLHKEGISKDPSRLVGQIHDGVSKANFSIGPMMLALAGTYRCYGSVTHTTYQLSAPSDPLDIVVTGPYEKPSLSAQPGPKVQAGESVTLSCSSRSSYDMYHLSREGGAHERRLPAVRKVNRTFQADFPLGPATHGGTYRCFGSFRHSPYELSDPSDPLLVSVTGNPSSSWPSPTEPSSKSGNPRHLHILIGTSVVIILFILLLFFLLHLWCSNKKNAAVMDQEPAGNRTANSEDSDEQDPEEVTYAQLDHCVFTQRKITRPSQRPKTPPTDTILYTELPNAKPRSKVVSCP

SEQ ID NO: 53665 - protein, 132 aa, Homo sapiens
MRLPLVSRSTVSKSIKDNIRLSELLSNPNMLTNELKAEFLILLHMLQRKLGRKLNPEWFDVKPTVGEVTLNHLPAQASGRRYNLKVKRGRVVPVLPNIGSGGSSHREIHVKQAGQHSYYSAMKPIRNMDKKP

SEQ ID NO: 53666 - protein, 758 aa, Homo sapiens
MAEPRQEFEVMEDHAGTYGLGDRKDQGGYTMHQDQEGDTDAGLKESPLQTPTEDGSEEPGSETSDAKSTPTAEDVTAPLVDEGAPGKQAAAQPHTEIPEGTTAEEAGIGDTPSLEDEAAGHVTQEPESGKVVQEGFLREPGPPGLSHQLMSGMPGAPLLPEGPREATRQPSGTGPEDTEGGRHAPELLKHQLLGDLHQEGPPLKGAGGKERPGSKEEVDEDRDVDESSPQDSPPSKASPAQDGRPPQTAAREATSIPGFPAEGAIPLPVDFLSKVSTEIPASEPDGPSVGRAKGQDAPLEFTFHVEITPNVQKEQAHSEEHLGRAAFPGAPGEGPEARGPSLGEDTKEADLPEPSEKQPAAAPRGKPVSRVPQLKARMVSKSKDGTGSDDKKAKTSTRSSAKTLKNRPCLSPKHPTPGSSDPLIQPSSPAVCPEPPSSPKHVSSVTSRTGSSGAKEMKLKGADGKTKIATPRGAAPPGQKGQANATRIPAKTPPAPKTPPSSGEPPKSGDRSGYSSPGSPGTPGSRSRTPSLPTPPTREPKKVAVVRTPPKSPSSAKSRLQTAPVPMPDLKNVKSKIGSTENLKHQPGGGKVQIINKKLDLSNVQSKCGSKDNIKHVPGGGSVQIVYKPVDLSKVTSKCGSLGNIHHKPGGGQVEVKSEKLDFKDRVQSKIGSLDNITHVPGGGNKKIETHKLTFRENAKAKTDHGAEIVYKSPVVSGDTSPRHLSNVSSTGSIDMVDSPQLATLADEVSASLAKQGL

SEQ ID NO: 53667 - protein, 48 aa, Homo sapiens
MDPLTKVPCGSQIAQTILWKAKSSLSFGIQPLQTWPTKDPELESQVNL

SEQ ID NO: 53668 - protein, 94 aa, Homo sapiens
MLSSAYISDHMKVHSQGPHHVCELCNKGFTTAAYLRIHAVKDHGLQAPRADRILCKLCSVHCKTPAQLAGHMQTHLGGAAPPVPGDAPQPQPTC

SEQ ID NO: 53669 - protein, 174 aa, Homo sapiens
MTIVDKASESSDPSAYQNQPGSSEAVSPGDMDAGSASWGAVSSLNDVSNHTLSLGPVPGAVVYSSSSVPDKSKPSPQKDQALGDGIAPPQKVLFPSEKICLKWQQTHRVGAGLQNLGNTCFANAALQCLTYTPPLANYMLSHEHSKTFHNSFPTDSFPITFALNESRVWMKTQH

SEQ ID NO: 53670 - protein, 153 aa, Homo sapiens
MVNKDMNGFPVKKCSAFQFFKKRVRRWIKSPMVSVDKHQSPSLKYTGSSMVHIPPGEPDFESSLCQTCLGEHAFQRGVLPQENESCSWETQSGCEVSSCSLWIYSPGKILGLCFSCISARVYPKNNFLMHIYKASEEDLELWSLLAHYVIFLK

SEQ ID NO: 53671 - protein, 55 aa, Homo sapiens
MEGLSDVASFATKLKNTLIQYHSIEEDKWRVAKKTKDVTVWRKPSEEFNGYLIAV

SEQ ID NO: 53672 - protein, 121 aa, Homo sapiens
MFRRPVLQVLRQFVRHESETTTSLVLERSLNRVHLLGRVGQDPVLRQVEGKNPVTIFSLATNEMWRSGDSEVYQLGDVSQKTTWHRISVFRPGLRDVAYQYVKKGSRIYLEGKIDYGEYMD

SEQ ID NO: 53673 - protein, 39 aa, Homo sapiens
MKNVMVMILVVDTKILILIMKVNFDILEREKHHMLKIMQ

SEQ ID NO: 53674 - protein, 805 aa, Homo sapiens
MAPYSLLVTRLQKALGVRQYHVASVLCQRAKVAMSHFEPNEYIHYDLLEKNINIVRKRLNRPLTLSEKIVYGHLDDPASQEIERGKSYLRLRPDRVAMQDATAQMAMLQFISSGLSKVAVPSTIHCDHLIEAQVGGEKDLRRAKDINQEVYNFLATAGAKYGVGFWKPGSGIIHQIILENYAYPGVLLIGTDSHTPNGGGLGGICIGVGGADAVDVMAGIPWELKCPKVIGVKLTGSLSGWSSPKDVILKVAGILTVKGGTGAIVEYHGPGVDSISCTGEEGGQATWPLPCAGPDGSPVGSRSGMATICNMGAEIGATTSVFPYNHRMKKYLSKTGREDIANLADEFKDHLVPDPGCHYDQLIEINLSELKPHINGPFTPDLAHPVAEVGKVAEKEGWPLDIRVGLIGSCTNSSYEDMGRSAAVAKQALAHGLKCKSQFTITPGSEQIRATIERDGYAQILRDLGGIVLANACGPCIGQWDRKDIKKGEKNTIVTSYNRNFTGRNDANPETHAFVTSPEIVTALAIAGTLKFNPETDYLTGTDGKKFRLEAPDADELPKGEFDPGQDTYQHPPKDSSGQHVDVSPTSQRLQLLEPFDKWDGKDLEDLQILIKVKGKCTTDHISAAGPWLKFRGHLDNISNNLLIGAINIENGKANSVRNAVTQEFGPVPDTARYYKKHGIRWVVIGDENYGEGSSREHAALEPRHLGGRAIITKSFARIHETNLKKQGLLPLTFADPADYNKIHPVDKLTIQGLKDFTPGKPLKCIIKHPNGTQETILLNHTFNETQIEWFRAGSALNRMKELQQ

SEQ ID NO: 53675 - protein, 107 aa, Homo sapiens
MTTATRQEVLGLYRSIFRLARKWQATSGQMEDTIKEKQYILNEARTLFRKNKNLTDTDLIKQCIDECTARIEIGLHYKIPYPRPVSVTPVNKCWVLTLINLVISKNV

SEQ ID NO: 53676 - protein, 243 aa, Homo sapiens
MCNTNMSVPTDGAVTTSQIPASEQETLVRPKPLLLKLLKSVGAQKDTYTMKEVLFYLGQYIMTKRLYDEKQQHIVYCSNDLLGDLFGVPSFSVKEHRKIYTMIYRNLVVVNQQESSDSGTSVSENRCHLEGGSDQKDLVQELQEEKPSSSHLVSRPSTSSRRRAISETEETQDKEESVESSLPLNAIEPCVICQGRPKNGCIVHGKTGHLMACFTCAKKLKKRNKPCPVCRQPIQMIVLTYFP

SEQ ID NO: 53677 - protein, 87 aa, Homo sapiens
MFQAAGAAQATPSHDAKGGGSSTVQRSKHCHTKLSLGSYAALHGEFYCKPHFQQLFKSKGNYDEGFGRKQHKELWAHKEVDPGTKTA

SEQ ID NO: 53678 - protein, 895 aa, Homo sapiens
MSKSFQQSSLSRDSQGHGRDLSAAGIGLLAAATQSLSMPASLGRMNQGTARLASLMNLGMSSSLNQQGAHSALSSASTSSHNLQSIFNIGSRGPLPLSSQHRGDADQASNILASFGLSARDLDELSRYPEDKITPENLPQILLQLKRRRTEEGPTLSYGRDGRSATREPPYRVPRDDWEEKRHFRRDSFDDRGPSLNPVLDYDHGSRSQESGYYDRMDYEDDRLRDGERCRDDSFFGETSHNYHKFDSEYERMGRGPGPLQERSLFEKKRGAPPSSNIEDFHGLLPKGYPHLCSICDLPVHSNKEWSQHINGASHSRRCQLLLEIYPEWNPDNDTGHTMGDPFMLQQSTNPAPGILGPPPPSFHLGGPAVGPRGNLGAGNGNLQGPRHMQKGRVETSRVVHIMDFQRGKNLRYQLLQLVEPFGVISNHLILNKINEAFIEMATTEDAQAAVDYYTTTPALVFGKPVRVHLSQKYKRIKKPEGKPDQKFDQKQELGRVIHLSNLPHSGYSDSAVLKLAEPYGKIKNYILMRMKSQAFIEMETREDAMAMVDHCLKKALWFQGRCVKVDLSEKYKKLVLRIPNRGIDLLKKDKSRKRSYSPDGKESPSDKKSKTDGSQKTESSTEGKEQEEKSGEDGEKDTKDDQTEQEPNMLLESEDELLVDEEEAAALLESGSSVGDETDLANLGDVASDGKKEPSDKAVKKDGSASAAAKKKLKKRRFPGSMEGFVTLDEVGDEEDSELQKLRKSGMAFKSGDKNDDGLVEIKVDKIEELDQENEAALENGIKNEENTEPGAESSENADDPNKDTSENADGQSDENKDDYTIPDEYRIGPYQPNVPVGIDYVIPKTGFYCKLCSLFYTNEEVAKNTHCSSLPHYQKLKKFLNKLAEERRQKKET

SEQ ID NO: 53679 - protein, 41 aa, Homo sapiens
TQPPNAEEESGSSSASEEEDTKPKPTKRKRKGSSAVGSDSD

SEQ ID NO: 53680 - protein, 124 aa, Homo sapiens
  MOD_RES (1)..(1): Any amino acid
XVEQNSEPCAGSSSESDLQKMYGDLDVLFLTDEYDTVLAYENKGKIAQATDRSDPLMDTLSSMNRVQQVELICEYNDLKTELKDYLKRFADEGTVVKREDIQQFFEEFQSKKRRRVDGMQYYCS

SEQ ID NO: 53681 - protein, 742 aa, Homo sapiens
MEPNDSTSTAVEEPDSLEVLVKTLDSQTRTFIVGAQMNVKEFKEHIAASVSIPSEKQRLIYQGRVLQDDKKLQEYNVGGKVIHLVERAPPQTHLPSGASSGTGSASATHGGGSPPGTRGPGASVHDRNANSYVMVGTFNLPSDGSAVDVHINMEQAPIQSEPRVRLVMAQHMIRDIQTLLSRMECRGGPQPQHSQPPPQPPAVTPEPVALSSQTSEPVESEAPPREPMEAEEVEERAPAQNPELTPGPAPAGPTPAPETNAPNHPSPAEYVEVLQELQRLESRLQPFLQRYYEVLGAAATTDYNNNHEGREEDQRLINLVGESLRLLGNTFVALSDLRCNLACTPPRHLHVVRPMSHYTTPMVLQQAAIPIQINVGTTVTMTGNGTRPPPTPNAEAPPPGPGQASSVAPSSTNVESSAEGAPPPGPAPPPATSHPRVIRISHQSVEPVVMMHMNIQDSGTQPGGVPSAPTGPLGPPGHGQTLGSTLIQLPSLPPEFMHAVAHQITHQAMVAAVASAAAGQQVPGFPTAPTRVVIARPTPPQARPSHPGGPPVSGTLQGAGLGTNASLAQMVSGLVGQLLMQPVLVAQGTPGMAPPPAPATASASAGTTNTATTAGPAPGGPAQPPPTPQPSMADLQFSQLLGNLLGPAGPGAGGSGVASPTITVAMPGVPAFLQGMTDFLQATQTAPPPPPPPPPPPPAPEQQTMPPPGSPSGGAGSPGGLGLESLSPEFFTSVVQGVLSSL

SEQ ID NO: 53682 - protein, 153 aa, Homo sapiens
MESTSQDRRATHVITIKPNETVLTAFPYRPHSSLLDFLKGEPRVLGATQILLALIIVGFGTIFALNYIGFSQRLPLVVLTGYPFWGALIGQGVTGMNVISSLVAITGITFTILSYRHQDKYCQMPSFEEICVFSRTLFIDFILLTPPHSSHFL

SEQ ID NO: 53683 - protein, 48 aa, Homo sapiens
MAAGVDCGDGVGARQHVFLVSEYLKDASKKMKNGLMFVKLVNPCSDLS

SEQ ID NO: 53684 - protein, 74 aa, Homo sapiens
MWRSRWDASVLKAEALALLPCGLGMAFSQSHVMAARRHQHSRLIIEVDEYSSNPTQAFTFYNINQGRFQPPHVQ

SEQ ID NO: 53685 - protein, 94 aa, Homo sapiens
MSVACVLKRKAVLWQDSFSPHLKHHPQEPANPNMPVVLTSGTGSQAQPQPAANQALAAGTHSSPVPGSIGVAGRSQDDAMVDYFFQRQHGAFHG

SEQ ID NO: 53686 - protein, 308 aa, Homo sapiens
MVPEVRVLSSLLGLALLWFPLDSHARARPDMFCLFHGKRYSPGESWHPYLEPQGLMYCLRCTCSEGAHVSCYRLHCPPVHCPQPVTEPQQCCPKCVEPHTPSGLRAPPKSCQHNGTMYQHGEIFSAHELFPSRLPNQCVLCSCTEGQIYCGLTTCPEPGCPAPLPLPDSCCQACKDEASEQSDEEDSVQSLHGVRHPQDPCSSDAGRKRGPGTPAPTGLSAPLSFIPRHFRPKGAGSTTVKIVLKEKHKKEDKADPGHSEISSTRCPKAPGRVLVHTSVSPSPDNLRRFALEHEASDLVEIYLWKLVK

SEQ ID NO: 53687 - protein, 374 aa, Homo sapiens
MAPWPPKGLVPAMLWGLSLFLNLPGPIWLQPSPPPQSSPPPQPHPCHTCRGLVDSFNKGLERTIRDNFGGGNTAWEEENLSKYKDSETRLVEVLEGVCSKSDFECHRLLELSEELVESWWFHKQQEAPDLFQWLCSDSLKLCCPAGTFGPSCLPCPGGTERPCGGYGQCEGEGTRGGSGHCDCQAGYGGEACGQCGLGYFEAERNASHLVCSACFGPCARCSGPEESNCLQCKKGWALHHLKCVDIDECGTEGANCGADQFCVNTEGSYECRDCAKACLGCMGAGPGRCKKCSPGYQQVGSKCLDVDECETEVCPGENKQCENTEGGYRCICAEGYKQMEGICVKEQIPGWLSAALYLPGYKGNQTWHQISLPP

SEQ ID NO: 53688 - protein, 178 aa, Homo sapiens
MEDLEETLFEEFENYSYDLDYYSLESDLEEKVQLGVVHWVSLVLYCLAFVLGIPGNAIVIWFTGFKWKKTVTTLWFLNLAIADFIFLLFLPLYISYVAMNFHWPFGIWLCKANSFTAQLNMFASVFFLTVISLDHYIHLIHPVLSHRHRTLKNSLIVIIFIWLLASLIGGPALYFRDT

SEQ ID NO: 53689 - protein, 228 aa, Homo sapiens
MKPGFSPRGGGFGGRGGFGDRGGRGGFHSGGNRGRGRGGKRGNQSGKNVMVEPHRHEGVFICRGKEDALVTKNLVPGESVYGEKRVSISEGDDKIEYRAWNPFRSKLAAAILGGVDQIHIKPGAKVLYLGAASGTTVSHVSDIVGPDGLVYAVEFSHRSGRDLINLAKKRTNIIPVIEDARHPHKYRMLIAMVDVIFADVAQPDQTRIVALNAHTFLRNGGHFVISIK

SEQ ID NO: 53690 - protein, 1070 aa, Homo sapiens
MEQDTAAVAATVAAADATATIVVIEDEQPGPSTSQEEGAAAAATEATAATEKGEKKKEKNVSSFQLKLAAKAPKSEKEMDPEYEEKMKADRAKRFEFLLKQTELFAHFIQPSAQKSPTSPLNMKLGRPRIKKDEKQSLISAGDYRHRRTEQEEDEELLSESRKTSNVCIRFEVSPSYVKGGPLRDYQIRGLNWLISLYENGVNGILADEMGLGKTLQTIALLGYLKHYRNIPGPHMVLVPKSTLHNWMNEFKRWVPSLRVICFVGDKDARAAFIRDEMMPGEWDVCVTSYEMVIKEKSVFKKFHWRYLVIDEAHRIKNEKSKLSEIVREFKSTNRLLLTGTPLQNNLHELWALLNFLLPDVFNSADDFDSWFDTKNCLGDQKLVERLHAVLKPFLLRRIKTDVEKSLPPKKEIKIYLGLSKMQREWYTKILMKDIDVLNSSGKMDKMRLLNILMQLRKCCNHPYLFDGAEPGPPYTTDEHIVSNSGKMVVLDKLLAKLKEQGSRVLIFSQMTRLLDILEDYCMWRGYEYCRLDGQTPHEEREDKFLEVEFLGQREAIEAFNAPNSSKFIFMLSTRAGGLGINLASADVVILYDSDWNPQVDLQAMDRAHRIGQKKPVRVFRLITDNTVEERIVERAEIKLRLDSIVIQQGRLIDQQSNKLAKEEMLQMIRHGATHVFASKESELTDEDITTILERGEKKTAEMNERLQKMGESSLRNFRMDIEQSLYKFEGEDYREKQKLGMVEWIEPPKRERKANYAVDAYFREALRVSEPKIPKAPRPPKQPNVQDFQFFPPRLFELLEKEILYYRKTIGYKVPRNPDIPNPALAQREEQKKIDGAEPLTPEETEEKEKLLTQGFTNWTKRDFNQFIKANEKYGRDDIDNIAREVEGKSPEEVMEYSAVFWERCNELQDIEKIMAQIERGEARIQRRISIKKALDAKIARYKAPFHQLRIQYGTSKGKNYTEEEDRFLICMLHKMGFDRENVYEELRQCVRNAPQFRFDWFIKSRTAMEFQRRCNTLISLIEKENMEIEERERAEKKKRATKTPMSQKRKAESATESSGKKDVKKVKS

SEQ ID NO: 53691 - protein, 191 aa, Homo sapiens
MDVGSKEVLMESPPDYSAAPRGRFGIPCCPVHLKRLLIVVVVVVLIVVVIVGALLMGLHMSQKHTEMVLEMSIGAPEAQQRLALSEHLVTTATFSIGSTGLVVYDYQQLLIAYKPAPGTCCYIMKIAPESIPSLEALTRKVHNFQAKPAVPTSKLGQAEGRDAGSAPSGGDPAFLGMAVSTLCGEVPLYYI

SEQ ID NO: 53692 - protein, 455 aa, Homo sapiens
MSLTVVSMACVGFFLLQGAWPLMGGQDKPFLSARPSTVVPRGGHVALQCHYRRGFNNFMLYKEDRSHVPIFHGRIFQESFIMGPVTPAHAGTYRCRGSRPHSLTGWSTPSNPLVIMVTGNHRKPSLLAHPGPLLKSGETVILQCWSDVMFEHFFLHREGISEDPSRLVGQIHDGVSKANFSIGPLMPVLAGTYRCYGSVPHSPYQLSAPSDPLDIVITGLYEKPSLSAQPGPTVQAGENVTLSCSSWSSYDIYHLSREGEAHERRLRAVPKVNRTFQADFPLGPATHGGTYRCFGSFRALPCVWSNSSDPLLVSVTGNPSSSWPSPTEPSSKSGICRHLHVLIGTSVVIFLFILLLFFLLYRWCSNKKNAAVMDQEPAGDRTVNRQDSDEQDPQEVMYAQLDHCVFIQRKISRPSQRPKTPLTDTSVYTELPNAEPRSKVVSCPRAPQSGLEGVF

SEQ ID NO: 53693 - protein, 566 aa, Homo sapiens
MPEDQAGAAMEEASPYSLLDICLNFLTTHLEKFCSARQDGTLCLQEPGVFPQEVADRLLRTMAFHGLLNDGTVGIFRGNQMRLKRACIRKAKISAVAFRKAFCHHKLVELDATGVNADITITDIISGLGSNKWIQQNLQCLVLNSLTLSLEDPYERCFSRLSGLRALSITNVLFYNEDLAEVASLPRLESLDISNTSITDITALLACKDRLKSLTMHHLKCLKMTTTQILDVVRELKHLNHLDISDDKQFTSDIALRLLEQKDILPNLVSLDVSGRKHVTDKAVEAFIQQRPSMQFVGLLATDAGYSEFLTGEGHLKVSGEANETQIAEALKRYSERAFFVREALFHLFSLTHVMEKTKPEILKLVVTGMRNHPMNLPVQLAASACVFNLTKQDLAAGMPVRLLADVTHLLLKAMEHFPNHQQLQKNCLLSLCSDRILQDVPFNRFEAAKLVMQWLCNHEDQNMQRMAVAIISILAAKLSTEQTAQLGTELFIVRQLLQIVKQKTNQNSVDTTLKFTLSALWNLTDESPTTCRHFIENQGLELFMRVLESFPTESSIQQKVLGLLG

SEQ ID NO: 53694 - protein, 260 aa, Homo sapiens
MNLDSDGMDDIISQESSLDMEGNYKKAQKNERESIRQKLALGSFFDDGPGIYTSCSKSGKPSLSSRLQSGMNLQICFVNDSGSDKDSDADDSKTETSLDTPLSPMSKQSSSYSDRDTTEEESESLDDMDFLTRQKKLQAEAKMALAMAKPMAKMQVEVEKQNRKKSPVADLLPHMPHISECLMKRSLKPTDLRDMTIGQLQVIVNDLHSQIESLNEELVQLLLIRDELHTEQDAMLVDIEDLTRHAESQQKHMAEKMPAK

SEQ ID NO: 53695 - protein, 1705 aa, Homo sapiens
MASGSRWRPTPPPLLLLLLLALAARADGLEFGGGPGQWARYARWAGAASSGELSFSLRTNATRALLLYLDDGGDCDFLELLLVDGRLRLRFTLSCAEPATLQLDTPVADDRWHMVLLTRDARRTALAVDGEARAAEVRSKRREMQVASDLFVGGIPPDVRLSALTLSTVKYEPPFRGLLANLKLGERPPALLGSQGLRGATADPLCAPARNPCANGGLCTVLAPGEVGCDCSHTGFGGKFCSEEEHPMEGPAHLTLNSEVGSLLFSEGGAGRGGAGDVHQPTKGKEEFVATFKGNEFFCYDLSHNPIQSSTDEITLAFRTLQRNGLMLHTGKSADYVNLSLKSGAVWLVINLGSGAFEALVEPVNGKFNDNAWHDVRVTRNLRQHAGIGHAMVTISVDGILTTTGYTQEDYTMLGSDDFFYIGGSPNTADLPGSPVSNNFMGCLKDVVYKNNDFKLELSRLAKEGDPKMKLQGDLSFRCEDVAALDPVTFESPEAFVALPRWSAKRTGSISLDFRTTEPNGLLLFSQGRRAGGGAGSHSSAQRADYFAMELLDGHLYLLLDMGSGGIKLRASSRKVNDGEWCHVDFQRDGRKGSISVNSRSTPFLATGDSEILDLESELYLGGLPEGGRVDLPLPPEVWTAALRAGYVGCVRDLFIDGRSRDLRGLAEAQGAVGVAPFCSRETLKQCASAPCRNGGVCREGWNRFICDCIGTGFLGRVCEREATVLSYDGSMYMKIMLPNAMHTEAEDVSLRFMSQRAYGLMMATTSRESADTLRLELDGGQMKLTVNLDCLRVGCAPSKGPETLFAGHKLNDNEWHTVRVVRRGKSLQLSVDNVTVEGQMAGAHMRLEFHNIETGIMTERRFISVVPSNFIGHLSGLVFNGQPYMDQCKDGDITYCELNARFGLRAIVADPVTFKSRSSYLALATLQAYASMHLFFQFKTTAPDGLLLFNSGNGNDFIVIELVKGYIHYVFDLGNGPSLMKGNSDKPVNDNQWHNVVVSRDPGNVHTLKIDSRTVTQHSNGARNLDLKGELYIGGLSKNMFSNLPKLVASRDGFQGCLASVDLNGRLPDLIADALHRIGQVERGCDGPSTTCTEESCANQGVCLQQWDGFTCDCTMTSYGGPVCNDPGTTYIFGKGGALITYTWPPNDRPSTRMDRLAVGFSTHQRSAVLVRVDSASGLGDYLQLHIDQGTVGVIFNVGTDDITIDEPNAIVSDGKYHVVRFTRSGGNATLQVDSWPVNERYPAGNFDNERLAIARQRIPYRLGRVVDEWLLDKGRQLTIFNSQAAIKIGGRDQGRPFQGQVSGLYYNGLKVLALAAESDPNVRTEGHLRLVGEGPSVLLSAETTATTLLADMATTIMETTTTMATTTTRRGRSPTLRDSTTQNTDDLLVASAECPSDDEDLEECEPSTGGELILPIITEDSLDPPPVATRSPFVPPPPTFYPFLTGVGATQDTLPPPAARRPPSGGPCQAERDDSDCEEPIEASGFASGEVFDSSLPPTDDEDFYTTFPLVTDRTTLLSPRKPAPRPNLRTDGATGAPGVLFAPSAPAPNLPAGKMNHRDPLQPLLENPPLGPGAPTSFEPRRPPPLRPGVTSAPGFPHLPTANPTGPGERGPPGAVEVIRESSSTTGMVVGIVAAAALCILILLYAMYKYRNRDEGSYQVDQSRNYISNSAQSNGAVVKEKAPAAPKTPSKAKKNKDKEYYV

SEQ ID NO: 53696 - protein, 7 aa, Homo sapiens
GYSSGWY

SEQ ID NO: 53697 - protein, 269 aa, Homo sapiens
MQLAARIRPRDLEDFFSAVGKVRDVRIISDRNSRRSKGIAYVEFCEIQSVPLAIGLTGQRLLGVPIIVQASQAEKNRLAAMANNLQKGNGGPMRLYVGSLHFNITEDMLRGIFEPFGKIDNIVLMKDSDTGRSKGYGFITFSDSECARRALEQLNGFELAGRPMRVGHVTERLDGGTDITFPDGDQELDLGSAGGRFQLMAKLAEGAGIQLPSTAAAAAAAAAQAAALQLNGAVPLGALNPAALTALSPALNLASQCFQLSSLFTPQTM

SEQ ID NO: 53698 - protein, 140 aa, Homo sapiens
MATPLVAGPAALRFAAAASWQVVRGRCVEHFPRVLEFLRSLRAVAPGLVRYRHHERLCMGLKAKVVVELILQGRPWAQVLKALNHHFPESGPIVRDPKATKQDLRKILEAQETFYQQVKQLSEAPVDLASKLQSALLLTQ

SEQ ID NO: 53699 - protein, 185 aa, Homo sapiens
  MOD_RES (1)..(1): Any amino acid
XLACTPPRHLHVVRPMSHYTTPMVLQQAAIPIQINVGTTVTMTGNGTRPPPTPNAEAPPPGPGQASSVAPSSTNVESSAEGAPPPGPAPPPATSHPRVIRISHQSVEPVVMMHMNIQGQQVPGFPTAPTRVVIARPTPPQARPSHPGGPPVSGTLQGAGLGTNASLAQMVSGLVGQLLMQPVLVA

SEQ ID NO: 53700 - protein, 158 aa, Homo sapiens
MAPEVVEAFSEEASIYDKRCDLWSLGVILYILLSGYPPFVGRCGSDCGWDRGEACPACQNMLFESIQEGKYEFPDKDWAHISCAAKDLISKLLVRDAKQRLSAAQVLQHPWVQGCAPENTLPTPMVLQRWDSHFLLPPHPCRIHVRPGGLVRTVTVNE

SEQ ID NO: 53701 - protein, 122 aa, Homo sapiens
MDVRRLKVNELREELQRRGLDTRGLKAELAERLQAALEAEEPDDERELDADDEPGRPGHINEEAELQPATLQPGRLQPGLHSPTASTSTTTCLQLWELRRLQPGPLYPTATPHCTDLPSAQL

SEQ ID NO: 53702 - protein, 544 aa, Homo sapiens
MEELVVEVRGSNGAFYKAFVKDVHEDSITVAFENNWQPDRQIPFHDVRFPPPVGYNKDINESDEVEVYSRANEKEPCCWWLAKVRMIKGEFYVIEYAACDATYNEIVTIERLRSVNPNKPATKDTFHKIKLDVPEDLRQMCAKEAAHKDFKKAVGAFSVTYDPENYQLVILSINEVTSKRAHMLIDMHFRSLRTKLSLIMRNEEASKQLESSRQLASRFHEQFIVREDLMGLAIGTHGANIQQARKVPGVTAIDLDEDTCTFHIYGEDQDAVKKARSFLEFAEDVIQVPRNLVGKVIGKNGKLIQEIVDKSGVVRVRIEAENEKNVPQEEGMVPFVFVGTKDSIANATVLLDYHLNYLKEVDQLRLERLQIDEQLRQIGASSRPPPNRTDKEKSYVTDDGQGMGRGSRPYRNRGHGRRGPGYTSGTNSEASNASETESDHRDELSDWSLAPTEEERESFLRRGDGRRRGGGGRGQGGRGRGGGFKGNDDHSRTDNRPRNPREAKGRTTDGSLQIPPVKVVGCARVKIVTRRKRSQTAWMVSNHS

SEQ ID NO: 53703 - protein, 144 aa, Homo sapiens
MERYAGALEEVADGARQQERHYQLLSALQSLVKELPSSFQQRLSYTTLSDLALALLDGTVFEIVQGLLEIQHLTEKSLYNQRLRLQNEHRGARGQREEVPPPRGRRLPAALGICAARLLPWECSEEVPKINKIKGAETETAPFW

SEQ ID NO: 53704 - protein, 358 aa, Homo sapiens
MSCNPSFGGIGKGHLMREVDALDGLCSRICDQSGVHYKVLNRRKGPAVWGLRAQIDRKLYKQNMQKEILNTPLLTVQEGAVEDLILTEPEPEHTGKCRVSGVVLVDGSTVYAESVILTTGTFLRGMIVIGLETHPAGRLGDQPSIGLAQTLEKLGFVVGRLKTGTPPRIAKESINFSILNKHIPDNPSIPFSFTNETVWIKPEDQLPCYLTHTNPRVDEIVLKNLHLNSHVKETTRGPRYCPSIESKVLRFPNRLHQVWLEPEGMDSDLIYPQGLSMTLPAELQEKMITCIRGLEKAKVIQPGYGVQYDYLDPRQITPSLETHLVQRLFFAGQINGTTGYEEAAAQSVALLPGWSAVI

SEQ ID NO: 53705 - protein, 319 aa, Homo sapiens
MPGPLPGRPHTASMPSGTSVSCSSLLLFLPLLLCLVCAVLFHFCLSMAWSGRLLWLSLTLPGSGMPRSFAKPPKQVQTVCECILIMKGYKELNWKTAKGVMSDPNFLRSLMEIDFDSITQSQVKNIKGLLKTLNTTTEEMEAVSKAGLGMLKFVEAVMGYCDVFREIKPKREKVARLERNFYLTKRELERIQNELAAIQKELETLGAKYEAAILEKQKLQEEAEIMERRLIAADKLISGLGSENIRWLNDLDELMHRRVKLLGDCLLCAAFLSYEGAFTWEFRDEMVNRIWQNDILEREIPLSQPFRLESLLTDDVEIS

SEQ ID NO: 53706 - protein, 72 aa, Homo sapiens
MKLLAATVLLLTICSLEGLATKGLKRKIIPSLKPRKPIQRSGWIPFWGGGRELGWVLAEVWQEARIHCCGPS

SEQ ID NO: 53707 - protein, 584 aa, Homo sapiens
MGWESHLTAASADIDLIDILWRQDIDLGAGREVFDYSHRQKEQDVEKELRDGGEQDTWAGEGAEALARNLLVDGETGESFPAQFPADISSITEAVPSESEPPALQNNLLSPLLTGTESPFDLEQQWQDLMSIMEMQAMEVNTSASEILYSAPPGDPLSTNYSLAPNTPINQNVSLHQASLGGCSQDFLLFSPEVESLPVASSSTLLPLAPSNSTSLNSTFGSTNLTGLFFPPQLNGTANDTAGPELPDPLGGLLDEAMLDEISLMDLAIEEGFNPVQASQLEEEFDSDSGLSLDSSHSPSSLSSSEGSSSSSSSSSSSSSSASSSASSSFSEEGAVGYSSDSETLDLEEAEGAVGYQPEYSKFCRMSYQDPAQLSCLPYLEHVGHNHTYNMAPSALDSADLPPPSALKKGSKEKQADFLDKQMSRDEHRARAMKIPFTNDKIINLPVEEFNELLSKYQLSEAQLSLIRDIRRRGKNKMAAQNCRKRKLDTILNLERDVEDLQRDKARLLREKVEFLRSLRQMKQKVQSLYQEVFGRLRDENGRPYSPSQYALQYAGDGSVLLIPRTMADQQARRQERKPKDRRK

SEQ ID NO: 53708 - protein, 101 aa, Homo sapiens
MADHSFSDGVPSDSVEAAKNASNTEKLTDQVMQNPRVLAALQERLDNVPHTPSSYIETHEDVVFLTPFFSLPKAVKRRINALKQLQVRCAHIEAKFYEEVH

SEQ ID NO: 53709 - protein, 18 aa, Homo sapiens
MARLPAGIRFIISFSRDQ

SEQ ID NO: 53710 - protein, 211 aa, Homo sapiens
MSEFRIHHDVNELLSLLRVHGGDGAEVYIDLLQKNRTPYVTTTVSAHSAKVKIAEFSRTPEDFLKKYDELKSKNTRNLDPLVYLLSKLTEDKETLQYLQQNAKERAELAAAAVGSSTTSINVPAAASKISMQELEELRKQLGSVATGSTLQQSLELKRKMLRDKQNKKNSGQHLPIFPAWVYERPALIGDFLIGAGISTDTALPIGSHFVA

SEQ ID NO: 53711 - protein, 120 aa, Homo sapiens
MALLCYNRGCGQRFDPETNSDDACTYHPGVPVFHDALKGWSCCKRRTTDFSDFLSIVGCTKGRHNSEKPPEPVKPEVKTTEKKELCELKPKFQEHIIQAPKPVEAIKRPRFQNSPAQMNQ

SEQ ID NO: 53712 - protein, 1072 aa, Homo sapiens
MPAARRFPGLELSFPLLARLRRRLYTRLGGGRMQPEEGTGWLLELLSEVQLQQYFLRLRDDLNVTRLSHFEYVKNEDLEKIGMGRPGQRRLWEAVKRRKALCKRKSWMSKVFSGKRLEAEFPPHHSQSTFRKTSPAPGGPAGEGPLQSLTCLIGEKDLRLLEKLGDGSFGVVRRGEWDAPSGKTVSVAVKCLKPDVLSQPEAMDDFIREVNAMHSLDHRNLIRLYGVVLTPPMKMVTELAPLGSLLDRLRKHQGHFLLGTLSRYAVQVAEGMGYLESKRFIHRDLAARNLLLATRDLVKIGDFGLMRALPQNDDHYVMQEHRKVPFAWCAPESLKTRTFSHASDTWMFGVTLWEMFTYGQEPWIGLNGSQILHKIDKEGERLPRPEDCPQDIYNVMVQCWAHKPEDRPTFVALRDFLLEAQPTDMRALQDFEEPDKLHIQMNDVITVIEGRAENYWWRGQNTRTLCVGPFPRNVVTSVAGLSAQDISQPLQNSFIHTGHGDSDPRHCWGFPDRIDELYLGNPMDPPDLLSVELSTSRPPQHLGGVKKPTYDPVSEDQDPLSSDFKRLGLRKPGLPRGLWLAKPSARVPGTKASRGSGAEVTLIDFGEEPVVPALRPCAPSLAQLAMDACSLLDETPPQSPTRALPRPLHPTPVVDWDARPLPPPPAYDDVAQDEDDFEICSINSTLVGAGVPAGPSQGQTNYAFVPEQARPPPPLEDNLFLPPQGGGKPPSSAQTAEIFQALQQECMRQLQAPAGSPAPSPSPGGDDKPQVPPRVPIPPRPTRPHVQLSPAPPGEEETSQWPGPASPPRVPPREPLSPQGSRTPSPLVPPGSSPLPPRLSSSPGKTMPTTQSFASDPKYATPQVIQAPGPRAGPCILPIVRDGKKVSSTHYYLLPERPSYLERYQRFLREAQSPEEPTPLPVPLLLPPPSTPAPAAPTATVRPMPQAALDPKANFSTNNSNPGARPPPPRATARLPQRGCPGDGPEAGRPADKIQMLQAMVHGVTTEECQAALQCHGWSVQRAAQYLKVEQLFGLGLRPRGECHKVLEMFDWNLEQAGCHLLGSWGPAHHKR

SEQ ID NO: 53713 - protein, 498 aa, Homo sapiens
MYVIESARQRPPKRKYLSSGRKSVFQKLYDLYIEECEKEPEVKKLRRNVNLLEKLVMQETLSCLVVNLYPGNEGYSLMLRGKNGSDSETIRLPYEEGELLEYLDAEELPPILVDLLEKSQVNIFHCGCVIAEIRDYRQSSNMKSPGYQSRHILLRPTMQTLICDVHSITSDNHKWTQEDKLLLESQLILATAEPLCLDPSIAVTCTANRLLYNKQKMNTRPMKRCFKRYSRSSLNRQQDLSHCPPPPQLRLLDFLQKRKERKAGQHYDLKISKAGNCVDMWKRSPCNLAIPSEVDDVKDDYVFECEAGTQYQKTKLTILQSLGDPLYYGKIQPCKADEESDSQMSPSHSSTDDHSNWFIIGSKTDAERVVNQYQELVQNEAKCPVKMSHSSSGSASLSQVSPGKETDQTETVSVQSSVLGKGVKHRPPPIKLPSSSGNSSSGNYFTPQQTSSFLKSPTPPPSSKPSSIPRKSSVDLNQVSMLSPAALSPASSSQRHES

SEQ ID NO: 53714 - protein, 1056 aa, Homo sapiens
MMKFRFRRQGADPQREKLKQELFAFNKTVEHGFPNQPSALAFDPELRIMAIGTRSGAVKIYGAPGVEFTGLHRDAATVTQMHFLTGQGRLLSLLDDSSLHLWEIVHHNGCAHLEEALSFQLPSRPGFDGASAPLSLTRVTVVLLVAASDIAALGTEGSSVFFLDVTTLTLLEGQTLAPGEVLRSVPDDYRCGKALGPVESLQGHLRDPTKILIGYSRGLLVIWNQASQCVDHIFLGNQQLESLCWGRDSSTVVSSHSDGSYAVWSVDAGSFPTLQPTVATTPYGPFPCKAINKILWRNCESGGHFIIFSGGMPRASYGDRHCVSVLRAETLVTLDFTSRIIDFFTVHSTRPEDEFDDPQALAVLLEEELVVLDLQTPGWPAVPAPYLAPLHSSAITCSAHVASVPAKLWARIVSAGEQQSPQPVSSALSWPITGGRNLAQEPSQRGLLLTGHEDGTVRFWDASGVALRPLYKLSTAGLFQTDCEHADSLAQAAEDDWPPFRKVGCFDPYSDDPRLGVQKVALCKYTAQMVVAGTAGQVLVLELSDVPVEQAVSVAIIDLLQDREGFTWKGHERLSPRTGPLPWPAGFQPRVLVQCLPPAAVTAVTLHTEWSLVAFGTSHGFGLLDPVFPRCTLHPNDSLAMEGPLSRVKSLKKSLRQSFRRIRKSRVSGKKRAANASSKLQEANAQLAEQACPHDVEMTPVQRRIEPRSADDSLSGVVRCLYFADTFLRDGAHHGPTMWAGTNSGSVFAYALEVPAAAVGGEKRPEQAVEAVLGKEVQLMHRAPVVAIAVLDGRGRPLPEPYEASRDLAQAPDMQGGHAVLIASEEQFKVFTLPKVSAKTKFKLTAHEGCRVRKVALATFASVACEDYAETCLACLTNLGDVHVFSVPGLRPQVHYSCIRKEDISGIASCVFTRHGQGFYLISPSEFERFSLSARNITEPLCSLDINWPRDATQASYRIRESPKLSQANGTPSILLAPQSLDGSPDPAHSMGPDTPEPPEAALSPMSIDSATSADTTLDTTGDVTVEDVKDFLGSSEESEKNLRNLAEDEAHACAI

SEQ ID NO: 53715 - protein, 41 aa, Homo sapiens
MDKQNSQMNASHPETNLPVGYPPQYPPTAFQDRSDTDSSAN

SEQ ID NO: 53716 - protein, 920 aa, Homo sapiens
MADDDVLFEDVYELCEVIGKGPFSVVRRCINRETGQQFAVKIVDVAKFTSSPGLSTEDLKREASICHMLKHPHIVELLETYSSDGMLYMVFEFMDGADLCFEIVKRADAGFVYSEAVASHYMRQILEALRYCHDNNIIHRDVKPHCVLLASKENSAPVKLGGFGVAIQLGESGLVAGGRVGTPHFMAPEVVKREPYGKPVDVWGCGVILFILLSGCLPFYGTKERLFEGIIKGKYKMNPRQWSHISESAKDLVRRMLMLDPAERITVYEALNHPWLKERDRYAYKIHLPETVEQLRKFNARRKLKGAVLAAVSSHKFNSFYGDPPEELPDFSEDPTSSGAVSQVLDSLEEIHALTDCSEKDLDFLHSVFQDQHLHTLLDLYDKINTKSSPQIRNPPSDAVQRAKEVLEEISCYPENNDAKELKRILTQPHFMALLQTHDVVAHEVYSDEALRVTPPPTSPYLNGDSPESANGDMDMENVTRVRLVQFQKNTDEPMGITLKMNELNHCIVARIMHGGMIHRQGTLHVGDEIREINGISVANQTVEQLQKMLREMRGSITFKIVPSYRTQSSSCERDSPSTSRQSPANGHSSTNNSVSDLPSTTQPKGRQIYVRAQFEYDPAKDDLIPCKEAGIRFRVGDIIQIISKDDHNWWQGKLENSKNGTAGLIPSPELQEWRVACIAMEKTKQEQQASCTWFGKKKKQYKDKYLAKHNAVFDQLDLVTYEEVVKLPAFKRKTLVLLGAHGVGRRHIKNTLITKHPDRFAYPIPHTTRPPKKDEENGKNYYFVSHDQMMQDISNNEYLEYGSHEDAMYGTKLETIRKIHEQGLIAILDVEPQALKVLRTAEFAPFVVFIAAPTITPGLNEDESLQRLQKESDILQRTYAHYFDLTIINNEIDETIRHLEEAVELVCTAPQWVPVSWVY

SEQ ID NO: 53717 - protein, 126 aa, Homo sapiens
MASAVLSSVPTTASRFALLQVDSGSGSDSEPGKGKGRNTGKSQTLGSKSTTNEKKREKRRKKKEQQQSEANELRNLAFKKIPQKSSHAVCNAQHDLPLSNPVQKDSREENWQEWRQRDEQMGSRRQ

SEQ ID NO: 53718 - protein, 156 aa, Homo sapiens
MDQEEGLKALDNIVTQFNAYEDFLDSQITTVDLYYLEDETLARQLVELGYRGTGERVKREDFEARKAAIEIARLAERAQQKTLTSAGKDLQDNFLTALAMREEDNRSGKLSAGVQWHHLGSLQPLPPGFKEFSCFSLPSSWDYRHAPPHPVRDLYS

SEQ ID NO: 53719 - protein, 104 aa, Homo sapiens
MGAWFLFQPAEVGVLVGKDRSSFYVNGLTLGGQKCSVIRDSLLQDGEFSMDLRTKSTGGAPTFNVTVTKTDKTLVLLMGKEGVHGGLINKKCYEMASHLRRSQY

SEQ ID NO: 53720 - protein, 36 aa, Homo sapiens
MDAAEPGLPPGPEGRKRYSDIFRSLDNLEISLGNDP

SEQ ID NO: 53721 - protein, 101 aa, Homo sapiens
MAMNAEGLLYSSPHFTAECRFKECVFENYYVLYASALYRQRRSGRAWYLGLDKEGQVMKGNRVKKTKAAAHFLPKLLEVAMYQEPSLHSVPEASPSSPPAP

SEQ ID NO: 53722 - protein, 142 aa, Homo sapiens
MAPGVARGPTPYWRLRLGGAALLLLLIPVAAAQEPPGAACSQNTNKTCEECLKNVSACLKKKTRMLDLKTTKALQHISPDASCEVHAPQPSPAGRPRGHCGLLTLASEPASLPGQAAGELPLKDSPLVLQTGDLLFPVHLCF

SEQ ID NO: 53723 - protein, 175 aa, Homo sapiens
MKQYQGSGGVAMDVERSRFPYCVVWTPIPVLTWFFPIIGHMGICTSTGVIRDFAGPYFVSEDNMAFGKPAKYWKLDPAQVYASGPNAWDTAVHDASEEYKHRMHNLCCDNCHSHVALALNLMRYNNSTNWNMVTLCFFCLLYGKYVSVGAFVKTWLPFILLLGIILTVSLVFNLR

SEQ ID NO: 53724 - protein, 596 aa, Homo sapiens
MSDNQSWNSSGSEEDPETESGPPVERCGVLSKWTNYIHGWQDRWVVLKNNALSYYKSEDETEYGCRGSICLSKAVITPHDFDECRFDISVNDSVWYLRAQDPDHRQQWIDAIEQHKTESGYGSESSLRRHGSMVSLVSGASGYSATSTSSFKKGHSLREKLAEMETFRDILCRQVDTLQKYFDACADAVSKDELQRDKVVEDDEDDFPTTRSDGDFLHSTNGNKEKLFPHVTPKGINGIDFKGEAITFKATTAGILATLSHCIELMVKREDSWQKRLDKETEKKRRTEEAYKNAMTELKKKSHFGGPDYEEGPNSLINEEEFFDAVEAALDRQDKIEEQSEKVRLHWPTSLPSGDAFSSVGTHRFVQKVEEMVQNHMTYSLQDVGGDANWQLVVEEGEMKVYRREVEENGIVLDPLKATHAVKGVTGHEVCNYFWNVDVRNDWETTIENFHVVETLADNAIIIYQTHKRVWPASQRDVLYLSVIRKIPALTENDPETWIVCNFSVDHDSAPLNNRCVRAKINVAMICQTLVSPPEGNQEISRDNILCKITYVANVNPGGWAPASVLRAVAKREYPKFLKRFTSYVQEKTAGKPILF

SEQ ID NO: 53725 - protein, 307 aa, Homo sapiens
MAASQAVEEMRSRVVLGEFGVRNVHTTDFPGNYSGYDDAWDQDRFEKNFRVDVVHMDENSLEFDMVGIDAAIANAFRRILLAEVPTMAVEKVLVYNNTSIVQDEILAHRLGLIPIHADPRLFEYRNQGDEEGTEIDTLQFRLQVRCTRNPHAAKDSSDPNELYVNHKVYTRHMTWIPLGNQADLFPEGTIRPVHDDILIAQLRPGQEIDLLMHCVKGIGKDHAKFSPVATASYRLLPDITLLEPVEGEAAEELSRCFSPGVIEVQEVQGKKVARVANPRLDTFSREIFRNEKLKKVVRLARVRDHYI

SEQ ID NO: 53726 - protein, 1639 aa, Homo sapiens
MAAEEGVASAASAGGSWGTAAMGRVLPMLLVPVPAEAMGQLGSRAQLRTQPEALGSLTAAGSLQVLSLTPGSRGGGRCCLEGPFWHFLWEDSRNSSTPTEKPKLLALGENYELLIYEFNLKDGRCDATILYSCSREALQKLIDDQDISISLLSLRILSFHNNTSLLFINKCVILHIIFPERDAAIRVLNCFTLPLPAQAVDMIIDTQLCRGILFVLSSLGWIYIFDVVDGTYVAHVDLALHKEDMCNEQQQEPAKISSFTSLKVSQDLDVAVIVSSSNSAVALNLNLYFRQHPGHLLCERILEDLPIQGPKGVDEDDPVNSAYNMKLAKFSFQIDRSWKAQLSSLNETIKNSKLEVSCCAPWFQDILHLESPESGNHSTSVQSWAFIPQDIMHGQYNVLQKDHAKTSDPGRSWKIMHISEQEEPIELKCVSVTGFTALFTWEVERMGYTITLWDLETQGMQCFSLGTKCIPVDSSGDQQLCFVLTENGLSLILFGLTQEEFLNRLMIHGSASTVDTLCHLNGWGRCSIPIHALEAGIENRQLDTVNFFLKSKENLFNPSSKSSVSDQFDHLSSHLYLRNVEELIPALDLLCSAIRESYSEPQSKHFSEQLLNLTLSFLNNQIKELFIHTEELDEHLQKGVNILTSYINELRTFMIKFPWKLTDAIDEYDVHENVPKVKESNIWKKLSFEEVIASAILNNKIPEAQTFFRIDSHSAQKLEELIGIGLNLVFDNLKKNNIKEASELLKNMGFDVKGQLLKICFYTTNKNIRDFLVEILKEKNYFSEKEKRTIDFVHQVEKLYLGHFQENMQIQSFPRYWIKEQDFFKHKSVLDSFLKYDCKDEFNKQDHRIVLNWALWWDQLTQESILLPRISPEEYKSYSPEALWRYLTARHDWLNIILWIGEFQTQHSYASLQQNKWPLLTVDVINQNTSCNNYMRNEILDKLARNGVFLASELEDFECFLLRLSRIGGVIQDTLPVQNYKTKEGWDFHSQFILYCLEHSLQHLLYVYLDCYKLSPENCPFLEKKELHEAHPWFEFLVQCRQVASNLTDPKLIFQASLANAQILIPTNQASVSSMLLEGHTLLALATTMYSPGGVSQVVQNEENENCLKKVDPQLLKMALTPYPKLKTALFPQCTPPSVLPSDITIYHLIQSLSPFDPSRLFGWQSANTLAIGDAWSHLPHFSSPDLVNKYAIVERLNFAYYLHNGRPSFAFGTFLVQELIKSKTPKQLIQQVGNEAYVIGLSSFHIPSIGAACVCFLELLGLDSLKLRVDMKVANIILSYKCRNEDAQYSFIRESVAEKLSKLADGEKTTTEELLVLLEEGTWNSIQQQEIKRLSSESSSQWALVVQFCRLHNMKLSISYLRECAKANDWLQFIIHSQLHNYHPAEVKSLIQYFSPVIQDHLRLAFENLPSVPTSKMDSDQVCNKCPQELQGSKQEMTDLFEILLQCSEEPDSWHWLLVEAVKQQAPILSVLASCLQGASAISCLCVWIITSVEDNVATEAMGHIQDSTEDHTWNLEDLSVIWRTLLTRQKSKTLIRGFQLFFKDSPLLLVMEMYELCMFFRNYKEAEAKLLEFQKSLETLNTAATKVHPVIPAMWLEDQVCFLLKLMLQQCKTQYELGKLLQLFVEREHLFSDGKED

SEQ ID NO: 53727 - protein, 178 aa, Homo sapiens
MKPGFSPRGGGFGGRGGFGDRGGRGGFRGRGRGGGGGGGGGGGGGRGGGGFHSGGNRGRGRGGKRGNQSGKNVMVEPHRHEGVFICRGKEDALVTKNLVPGESVYGEKRVSISEGDDKIEYRAWNPFRSKLAAAILGGVDQIHIKPGAKVLYLGAASGTTVSHVSDIVGPDGLVYAVE

SEQ ID NO: 53728 - protein, 241 aa, Homo sapiens
MMMVDLKVAAYLDPQIRALWETKGPARESSGQSKKSPQMDCLDPKSSCWHFRNFTYDEAGGPREAVSKLQELCHLWLKPEIHSKEQILELLVLEQFLTILPRETQTQMQKHHPQSIEEAVALVEHLQRESGQTWNGVAVHELGKEAVLLGETAEASSFGLKPTESQPVGVSQDEEFWNTYEGLQEQLSRNTHKETEPVYERAVPTQQILAFPEQTNTKDWTVTPEHVLPESQHCLCSPNLK

SEQ ID NO: 53729 - protein, 114 aa, Homo sapiens
MLTRKIKLWDINAHITCRLCSGYLIDATTVTECLHTSQARQKQEPGPGAETILKISQKSHFTLKVLWVVSEQMRPRLGERNTGETPHSSHGAARPVAAVTVLTAGSFQISRGVP

SEQ ID NO: 53730 - protein, 282 aa, Homo sapiens
MKNGLMFVKLVNPCSGEGAIYLFNMCLQQLFEVKVFKEKHHSWFINQSVQSGGLLHFATPVDPLFLLLHYLIKADKEGKFQPLDQVVVDNVFPNCILLLKLPGLEKLLHHVTEEKGNPEIDNKKYYKYSKEKTLKWLEKKVNQTVAALKTNNVNVSSRVQSTAFFSGDQASTDKEEDYIRYAHGLISDYIPKELSDDLSKYLKLPEPSASLPNPPSKKIKLSDEPVEAKEDYTKFNTKDLKTEKKNSKMTAAQKALAKVDKSGMKSIDTFFGVKNKKKIGKV

SEQ ID NO: 53731 - protein, 376 aa, Homo sapiens
MDMVENADSLQAQERKDILMKYDKGHRAGLPEDKGPEPVGINSSIDRFGILHETELPPVTAREAKKIRREMTRTSKWMEMLGEWETYKHSSKLIDRVYKGIPMNIRGPVWSVLLNIQEIKLKNPGRYQIMKERGKRSSEHIHHIDLDVRTTLRNHVFFRDRYGAKQRELFYILLAYSEYNPEVGYCRDLSHITALFLLYLPEEDAFWALVQLLASERHSLPGFHSPNGGTVQGLQDQQEHVVPKSQPKTMWHQDKEGLCGQCASLGCLLRNLIDGISLGLTLRLWDVYLVEGEQVLMPITSIALKVQQKRLMKTSRCGLWARLRNQFFDTWAMNDDTVLKHLRASTKKLTRKQGDLPPPGPTALGRRCVAGSPQPV

SEQ ID NO: 53732 - protein, 75 aa, Homo sapiens
MKVLLLTGLGALFFAYYWDDNFDPASLQGARVLLTGANAGVGEELAYHYARLGSHLVLTAHTEALLQKAGWTTSC

SEQ ID NO: 53733 - protein, 95 aa, Homo sapiens
MNIFDRKINFDALLKFSHITPSTQQHLKKVYASFALCMFVAAAGAYVHMVTHFIQAGLLSALGSLILMIWLMATPHSHETEQKRLGLLAGFAFLT

SEQ ID NO: 53734 - protein, 229 aa, Homo sapiens
MISAQRNHHLPDSSDSSTSAYRVARITDVIKEQNRELRGTQRAIIRDRAALEKQEKQLELEIKKMAKIGNKEACKVLAKQLVHLRKQKTRTFAVSSKVTSMSTQTKVMNSQMKMAGAMSTTAKTMQAVNKKMDPQKTLQTMQNFQKENMKMEMTEEMINDTLDDIFDGSDDEEESQDIVNQVLDEIGIEISGKMAKAPSAARSLPSASTSKATISDEEIERQLKALGVD

SEQ ID NO: 53735 - protein, 34 aa, Homo sapiens
  MOD_RES (1)..(1): Any amino acid
XKYSVMINKATPYNYPVEAGFHRVSQDCLDLLTL

SEQ ID NO: 53736 - protein, 120 aa, Homo sapiens
MAPAKKGGEKKKGRSAINEVVTREYTINIHKRIHGVGFKKRAPRALKEIRKFAMKEMGTPDVRIDTRLNKAVWAKGIRNVPYRIRVRLSRKRNEDEDSPNKLYTLVTYVPVTTFKNCHHQ

SEQ ID NO: 53737 - protein, 496 aa, Homo sapiens
TVYSALGLRDACRSLPQSIQLFRDIAQEFSDDLHHIASLIGKVVDFEGSLAENRFTVLPNIDPEIDEKKRRLMGLPSFLTEVARKELENLDSRIPSCSVIYIPLIGFLLSIPRLPSMVEASDFEINGLDFMFLSEEKLHYRSARTKELDALLGDLHCEIRDQETLLMYQLQCQVLARAAVLTRVLDLASRLDVLLALASAARDYGYSRPRYSPQVLGVRIQNGRHPLMELCARTFVPNSTECGGDKGRVKVITGPNSSGKSIYLKQVGLITFMALVGSFVPAEEAEIGAVDAIFTRIHSCESISLGLSTFMIDLNQVAKAVNNATAQSLVLIDEFGKGTNTVDGLALLAAVLRHWLARGPTCPHIFVATNFLSLVQLQLLPQGPLVQYLTMETCEDGNDLVFFYQVCEGVAKASHASHTAAQAGLPDKLVARGKEVSDLIRSGKPIKPVKDLLKKNQMENCQTLVDKFMKLDLEDPNLDLNVFMSQEVLPAATSIL

SEQ ID NO: 53738 - protein, 67 aa, Homo sapiens
MSRINKNVVLALLTLTSSAFLLFQLYYYKHYLSTKNGAGLSKSKGSRIGFDSTQWHISPYIENVHLS

SEQ ID NO: 53739 - protein, 27 aa, Homo sapiens
MKLLAATVLLLTICSLEGLTLKSQRSS

SEQ ID NO: 53740 - protein, 37 aa, Homo sapiens
VLGTPTREQIREMNPNYTEFKFPQIKAHPWTKNQRPQ

SEQ ID NO: 53741 - protein, 655 aa, Homo sapiens
MWHEARKHERKLRGMMVDYKKRAERRREYYEKIKKDPAQFLQVHGRACKVHLDSAVALAAESPVNMMPWQGDTNNMIDRFDVRAHLDHIPDYTPPLLTTISPEQESDERKCNYERYRGLVQNDFAGISEEQCLYQIYIDELYGGLQRPSEDEKKKLAEKKASIGYTYEDSTVAEVEKAAEKPEEEESAAEEESNSDEDEVIPDIDVEVDVDELNQEQVADLNKQATTYGMADGDFVRMLRKDKEEAEAIKHAKALEEEKAMYSGRRSRRQRREFREKRLRGRKISPPSYARRDSPTYDPYKRSPSESSSESRSRSRSPTPGREEKITFITSFGGSDEEAAAAAAAAAASGVTTGKPPAPPQPGGPAPGRNASARRRSSSSSSSSSASRTSSSRSSSRSSSRSRRGGGYYRSGRHARSRSRSWSRSRSRSRRYSRSRSRGRRHSGGGSRDGHRYSRSPARRGGYGPRRRSRSRSHSGDRYRRGGRGLRHHSSSRSRSSWSLSPSRSRSLTRSRSHSPSPSQSRSRSRSRSQSPSPSPAREKLTRPAASPAVGEKLKKTEPAAGKETGAAKVIKADKKAAQEKMIQQEHERQEREDELRAMARKIRMKERERREKEREEWERQYSRQSRSPSPRYSREYSSSRRRSRSRSRSPHYRH

SEQ ID NO: 53742 - protein, 108 aa, Homo sapiens
MASCVGSRTLSKDDVNYKMHFRMINEQQVEDITIDFFYRPHTITLLSFTIVSLMYFAFTRDDSVPEDNIWRGILSVIFFFLIISVLAFPNGVCCELPCDHLGEDYQPL

SEQ ID NO: 53743 - protein, 338 aa, Homo sapiens
MARDLIGPALPPGFKARGTAEDEERDPSPGPALPPNYKSSSSDSSDSDEDSSSLYEEGNQESEEDDSGPTARKQRKNQDDDDDDDDGFFGPALPPGFKKQDDSPPRPIIGPALPPGFIKSTQKSDKGRDDPGQQETDSSEDEDIIGPMPAKGPVNYNVTTEFEKRAQRMKEKLTKGDDDSSKPIVRESWMTELPPEMKDFGLGPRTFKRRADDTSGDRSIWTDTPADRERKAKETQEARKSSSKKDEEHILSGRDKRLAEQVSSYNESKRSESLMDIHHKKLKSKAAEDKNKPQERIPFDRDKDLKVNRFDEAQKKALIKKSRELNTRFSHGKGNMFL

SEQ ID NO: 53744 - protein, 1217 aa, Homo sapiens
MGNAPSQDPERSSPPMLSADDAEYPREYRTLGGGGGGGSGGRRFSNVGLVHTSERRHTVIAAQSLEALSGLQKADADRKRDAFMDHLKSKYPQHALALRGQQDRMREQVGGWTVDPVCLLSSLCSHLHGDSAPSGAGQPAQQPNYWSFKTRSSRHTQGAQPGLADQAAKLSYASAESLETMSEAELPLGFSRMNRFRQSLPLSRSASQTKLRSPGVLFLQFGEETRRVHITHEVSSLDTLHALIAHMFPQKLTMGMLKSPNTAILIKDEARNVFYELEDVRDIQDRSIIKIYRKEPLYAAFPGSHLTNGDLRREMVYASRESSPTRRLNNLSPAPHLASGSPPPGLPSGLPSGLQSGSPSRSRLSYAGGRPPSYAGSPVHHAAERLGGAPAAQGVSPSPSAILERRDVKPDEDLASKAGGMVLVKGEGLYADPYGLLHEGRLSLAAAAGDPFAYPGAGGLYKRGSVRSLSTYSAAALQSDLEDSLYKAAGGGGPLYGDGYGFRLPPSSPQKLADVAAPPGGPPPPHSPYSGPPSRGSPVRQSFRKDSGSSSVFAESPGGKTRSAGSASTAGAPPSELFPGPGERSLVGFGPPVPAKDTETRERMEAMEKQIASLTGLVQSALLRGSEPETPSEKIEGSNGAATPSAPCGSGGRSSGATPVSGPPPPSASSTPAGQPTAVSRLQMQLHLRGLQNSASDLRGQLQQLRKLQLQNQESVRALLKRTEAELSMRVSEAARRQEDPLQRQRTLVEEERLRYLNDEELITQQLNDLEKSVEKIQRDVSHNHRLVPGPELEEKALVLKQLGETLTELKAHFPGLQSKMRVVLRVEVEAVKFLKEEPQRLDGLLKRCRGVTDTLAQIRRQVDEGVWPPPNNLLSQSPKKVTAETDFNKSVDFEMPPPSPPLNLHELSGPAEGASLTPKGGNPTKGLDTPGKRSVDKAVSVEAAERDWEEKRAALTQYSAKDINRLLEETQAELLKAIPDLDCASKAHPGPAPTPDHKPPKAPHGQKAAPRTEPSGRRGSDELTVPRYRTEKPSKSPPPPPPRRSFPSSHGLTTTRTGEVVVTSKKDSAFIKKAESEELEVQKPQVKLRRAVSEVARPASTPPIMASAIKDEDDEDRIIAELESGGGSVPPMKVVTPGASRLKAAQGQAGSPDKSKHGKQRAEYMRIQAQQQATKPSKEMSGSNETSSPVSEKPSASRTSIPVLTSFGARNSSISF

SEQ ID NO: 53745 - protein, 130 aa, Homo sapiens
EQCLLAKDMLDITTLLHSLEQGMKVLATRELISRKLNLGQYKGPIQYMVWREMQDTLCPGLSPLTLDPKTAHPNLVLSKSQTSVWHGDIKKIMPDDPERFDSSVAVLGSRGFTSGKWYWEVEVAKKTKWT

SEQ ID NO: 53746 - protein, 151 aa, Homo sapiens
MAECGASGSGSSGDSLDKSITLPPDEIFRNLENAKRFAIDIGFLSSSSPKPLIYRDFSLQDTQRVWGMDPQAPLCPGPESCPVCVSPAGGSLTKLAYYSTVQHKVAKVRSFDHSGKVSLHCGHPGQGSRFSVVLDLALVSQSSLCCCRPRL

SEQ ID NO: 53747 - protein, 334 aa, Homo sapiens
MVSGTFRATPTSTAKQKQKVTEHIPPYDVVPSMRPVVLVGPSLKGYEVTDMMQKALFDFLKHRFDGRISITRVTADISLAKRSVLNNPSKRAIIERSNTRSSLAEVQSEIERIFELARSLQLVVLDADTINHPAQLIKTSLAPIIVHVKVSSPKVLQRLIKSRGKSQSKHLNVQLVAADKLAQCPPEMFDVILDENQLEDACEHLGEYLEAYWRATHTTSSTPMTPLLGRNLGSTALSPYPTAISGLQSQRMRHSNHSTENSPIERRSLMTSDENYHNERARKSRNRLSSSSQHSRDHYPLVEEDYPDSYQDTYKPHRNRGSPGGYSHDSRHRL

SEQ ID NO: 53748 - protein, 184 aa, Homo sapiens
MFRLWLLLAGLCGLLASRPGFQNSLLQIVIPEKIQTNTNDSSEIEYEQISYIIPIDEKLYTVHLKQRYFLADNFMIYLYNQGSMNTYSSDIQTQCYYQGNIEGYPDSMVTLSTCSGLRGILQFENVSYGIEPLESAVEFQHVLYKLKNEDNDIAIFIDRSLKEQPMDDNIFISEKYDYWGSDSM

SEQ ID NO: 53749 - protein, 374 aa, Homo sapiens
MRSPAVPTPARGQLGVAFVLLPPHSEGARVFGALGPIGPSSPGLTLGGLAVSEHRLSNKLLAWSGVLEWQEKRRPYSDSTAKLKRTLPCQAYVNQGENLETDQWPQKLIMQLIPQQLLTTLGPLFRNSQLAQFHFTNRDCDSLKGLCRIMGNGFAGCMLFPHISPCEVRVLMLLYSSKKKIFMGLIPYDQSGFVSAIRQVITTRKQAVGPGGVNSGPVQIVNNKFLAWSGVMEWQEPRPEPNSRSKRWLPSHVYVNQGEILRTEQWPRKLYMQLIPQQLLTTLVPLFRNSRLVQFHFTKDLETLKSLCRIMDNGFRRKSSLASSPMTRATLSTASGVSLPTSSRSCSGTWSRSNSNEGWGGSGYPGLGPSRSHR

SEQ ID NO: 53750 - protein, 40 aa, Homo sapiens
MSNKEGSGGFRKRKHDNFPHNQRREGKDVNSSSPVMLAFK

SEQ ID NO: 53751 - protein, 97 aa, Homo sapiens
  MOD_RES (1)..(1): Any amino acid
XGWKCARCDLRENLWLNLTDGSVLCGKWFFDSSGGNGHALEHYRDMGYPLAVKLGTITPDGAEYTWTNLDGIASFTTKLYDVTCCSSATNLYSTVLY

SEQ ID NO: 53752 - protein, 43 aa, Homo sapiens
MKMANSLRGEVLKLYKNVSNYVANFIKMLLYDMDCLEIYNLSF

SEQ ID NO: 53753 - protein, 164 aa, Homo sapiens
MSSGLRAADFPRWKRHISEQLRRRDRLQRQAFEEIILQYNKLLEKSDLHSVLAQKLQAEKHDVPNRHEIRRRQARLQKELAEAAKEPLPVEQDDDIEVIVDETSDHTEETSPVRAISRAATRRSVSSFPVPQDNVDTHPGSGKEVRVPATALCVFDAHDGEVNA

SEQ ID NO: 53754 - protein, 46 aa, Homo sapiens
  MOD_RES (1)..(1): Any amino acid
XFMIMDRFGSDLQKIYEANAKRFSRKTVLQLSLRIVSGYSGIYSRA

SEQ ID NO: 53755 - protein, 70 aa, Homo sapiens
MNGPEDLPKSYDYDLIIIGGGSGGLAAAKEAAQYGKKVMVLDFVTPTPLGTRWGLGGTCVNVGCIPKKLM

SEQ ID NO: 53756 - protein, 1032 aa, Homo sapiens
MDLRDFYLLAALIACLRLDSAIAQELIYTIREELPENVPIGNIPKDLNISHINAATGTSASLVYRLVSKAGDAPLVKVSSSTGEIFTTSNRIDREKLCAGASYAEENECFFELEVVILPNDFFRLIKIKIIVKDTNDNAPMFPSPVINISIPENTLINSRFPIPSATDPDTGFNGVQHYELLNGQSVFGLDIVETPEGEKWPQLIVQQNLDREQKDTYVMKIKVEDGGTPQKSSTAILQVTVSDVNDNRPVFKEGQVEVHIPENAPVGTSVIQLHATDADIGSNAEIRYIFGAQVAPATKRLFALNNTTGLITVQRSLDREETAIHKVTVLASDGSSTPARATVTINVTDVNDNPPNIDLRYIISPINGTVYLSEKDPVNTKIALITVSDKDTDVNGKVICFIEREVPFHLKAVYDNQYLLETSSLLDYEGTKEFSFKIVASDSGKPSLNQTALVRVKLEDENDNPPIFNQPVIELSVSENNRRGLYLTTISATDEDSGKNADIVYQLGPNASFFDLDRKTGVLTASRVFDREEQERFIFTVTARDNGTPPLQSQAAVIVTVLDENDNSPKFTHNHFQFFVSENLPKYSTVGVITVTDADAGENKAVTLSILNDNDNFVLDPYSGVIKSNVSFDREQQSSYTFDVKATDGGQPPRSSTAKVTINVMDVNDNSPVVISPPSNTSFKLVPLSAIPGSVVAEVFAVDVDTGMNAELKYTIVSGNNKGLFRIDPVTGNITLEEKPAPTDVGLHRLVVNISDLGYPKSLHTLVLVFLYVNDTAGNASYIYDLIRRTMETPLDRNIGDSSQPYQNEDYLTIMIAIIAGAMVVIVVIFVTVLVRCRHASRFKAAQRSKQGAEWMSPNQENKQNKKKKRKKRKSPKSSLLNFVTIEESKPDDAVHEPINGTISLPAELEEQSIGRFDWGPAPPTTFKPNSPDLAKHYKSASPQPAFHLKPDTPVSVKKHHVIQELPLDNTFVGGCDTLSKRSSTSSDHFSASECSSQGGFKTKGPLHTRQVNEHFYWSISTAYKCPVNQY

SEQ ID NO: 53757 - protein, 442 aa, Homo sapiens
MSNDGRSRNRDRRYDEVPSDLPYQDTTIRTHPILHDSERAVSADPLPPPPLPLQPPFGPDFYSSDTEEPAIAPDLKPVRRFVPDSWKNFFRGKKKDPEWDKPVSDIRYISDGVECSPPASPARPNHRSPLNSCKDPYGGSEGTFSSRKEADAVFPRDPYGSLDRHTQTVRTYSEKVEEYNLRYSYMKSWAGLLRILGVVELLLGAGVFACVTAYIHKDSEWYNLFGYSQPYGMGGVGGLGSIALVCLKLWRHEAARRHREYMEQQEINEPSLSSKRKMCEMATSGDRQRDSEVNFKELRTAKMKPELLSGHIPPGHIPKPIVMPDYVAKYPVIQTDDERERYKAVFQDQFSEYKELSAEVQAVLRKFDELDAVMSRLPHHSESRQEHERISRIHEEFKKKKNDPTFLEKKERCDYLKNKLSHIKQRIQEYDKVMNWDVQGYS

SEQ ID NO: 53758 - protein, 273 aa, Homo sapiens
MSMSPTVIILACLGFFLDQSVWAHVGGQDKPFCSAWPSAVVPQGGHVTLRCHCRRGFNIFTLYKKDGVPVPELYNRIFWNSFLISPVTPAHAGTYRCRGFHPHSPTEWSAPSNPLVIMVTGLYEKPSLTARPGPTVRAGENVTLSCSSQSSFDIYHLSREGEAHELRLPAVPSINGTFQADFPLGPATHGETYRCFGSFHGSPYEWSDPSDPLPVSVTGNPSSSWPSPTEPSFKTGIARHLHAVIRYSVAIILFTILPFFLLHRWCSKKKMLL

SEQ ID NO: 53759 - protein, 229 aa, Homo sapiens
MEAREPGRPTPTYHLVPNTSQSQVEEDVSSPPQRSSETMQLKKEISLLNGVSLVVGNMIGSGIFVSPKGVLVHTASYGMSLIVWAIGGLFSVVGALCYAELGTTITKSGASYAYILEAFGGFIAFIRLWVSLLVVEPTGQAIIAITFANYIIQPSFPSCDPPYLACRLLAAACICLLTFVNCAYVKWGTRVQDTFTYAKVVALIAIIVMGLVKLCQEICPWPLGFLCQL

SEQ ID NO: 53760 - protein, 287 aa, Homo sapiens
MASLEVSRSPRRSRRELEVRSPRQNKYSVLLPTYNERENLPLIVWLLVKSFSESGINYEIIIIDDGSPDGTRDVAEQLEKIYGSDRILLRPREKKLGLGTAYIHGMKHATGNYIIIMDADLSHHPKFIPEFIRKQKEGNFDIVSGTRYKGNGGVYGWDLKRKIISDGVLPCCPGWSLLGSSDPAILASWDYSRGANFLTQILLRPGASDLTGSFRLYRKEVLEKLIEKCVSKGYVFQMEMIVRARQLNYTIGEVPISFVDRVYGESKLGGNEIVSFLKGLLTLFATT

SEQ ID NO: 53761 - protein, 99 aa, Homo sapiens
MLQSIIKNIWIPMKPYYTKVYQEIWIGMGLMGFIVYKIRAAEMGFCHVTQAGLELLGSSSPPILASQSAGINKREPQHLAQLGNFEQDFNIRIIKEVRL

SEQ ID NO: 53762 - protein, 142 aa, Homo sapiens
  MOD_RES (1)..(1): Any amino acid
XQFRVIGPRHPIRALVGDEVELPCRISPGKNATGMEVGWYRPPFSRVVHLYRNGKDQDGDQAPEYRGRTELLKDAIGEGKVTLRIRNVRFSDEGGFTCFFRDHSYQEEAAMELKVEVSHSVTQDWLQWHDHGSLQPPPPRLK

SEQ ID NO: 53763 - protein, 247 aa, Homo sapiens
MDGLKDGIILCEFINKLQPGSVKKINESTQNWHQLENIGNFIKAITKYGVKPHDIFEANDLFENTNHTQVQSTLLALASMAKTKGNKVNVGVKYAEKQERKFEPGKLREGRNIIGLQMGTNKFASQQGMTAYGTRRHLYDPKLGTDQPLDQATISLQMGTNKGASQAGMTAPGTKRQIFEPGLGMEHCDTLNVSLQMGSNKGASQRGMTVYGLPRQVYDPKYCLTPEYPELGEPAHNHHAHNYYNSA

SEQ ID NO: 53764 - protein, 109 aa, Homo sapiens
NVLALSICTREAYQSMKERNVDDGHIININSMSGHRVLPLSVTHFYSATKYAVTALTEGLRQELREAQTHIRATCLKPEDVAEAVIYVLSTPAHIQIGDIQMRPTEQVT

SEQ ID NO: 53765 - protein, 206 aa, Homo sapiens
  MOD_RES (1)..(1): Any amino acid
XGGGFFSGVLTALTGVAAVNPGRSLFLLYALKSSPRLSLLYLYLFDYTDTFLPFIHTICPLQEDSSGEDIVTKLLDLKEPTWKQWREFLVKYSFLPYQLIAEFAWDWLEVHYWTSRFLIINAMLLSVLELFSFWRIWSRSELKTVPQRMWSHFWKVSTQGLFVAMFWPLIPQFVCNCLFYWALYFNPIINIDLVVKELRRLETQVL

SEQ ID NO: 53766 - protein, 46 aa, Homo sapiens
MDPNCSCSPVGSCACAGSCKCKECKCTSCKKSECRAFPANLGDGPS

SEQ ID NO: 53767 - protein, 245 aa, Homo sapiens
PPRHLHVVRPMSHYTTPMVLQQAAIPIQINVGTTVTMTGPAPPPATSHPRVIRISHQSVEPVVMMHMNIQDSGTQPGGVPSAPTGPLGPPGHGQTLGQQVPGFPTAPTRVVIARPTPPQARPSHPGGPPVSGTLQGAGLGTNASLAQMVSGLVGQLLMQPVLVAQGTPGMAPPPAPATASASAGTTNTATTAGPAPGGPAQPPPTPQPSMADLQFSQLLGNLLGPAGPGAGGPGVASPTITVAMP

SEQ ID NO: 53768 - protein, 566 aa, Homo sapiens
MASTEGANNMPKQVEVRMHDSHLGSEEPKHRHLGLRLCDKLGKNLLLTLTVFGVILGAVCGGLLRLASPIHPDVVMLIAFPGDILMRMLKMLILPLIISSLITGLSGLDAKASGRLGTRAMVYYMSTTIIAAVLGVILVLAIHPGNPKLKKQLGPGKKNDEVSSLDAFLDLIRNLFPENLVQACFQQIQTVTKKVLVAPPPDEEANATSAVVSLLNETVTEVPEETKMVIKKGLEFKDGMNVLGLIGFFIAFGIAMGKMGDQAKLMVDFFNILNEIVMKLVIMIMWYSPLGIACLICGKIIAIKDLEVVARQLGMYMVTVIIGLIIHGGIFLPLIYFVVTRKNPFSFFAGIFQAWITALGTASSAGTLPVTFRCLEENLGIDKRVTRFVLPVGATINMDGTALYEAVAAIFIAQMNGVVLDGGQIVTVSLTATLASVGAASIPSAGLVTMLLILTAVGLPTEDISLLVAVDWLLDRMRTSVNVVGDSFGAGIVYHLSKSELDTIDSQHRVHEDIEMTKTQSIYDDMKNHRESNSNQCVYAAHNSVIVDECKHVVCGHDACISLPLG

SEQ ID NO: 53769 - protein, 216 aa, Homo sapiens [sequence omitted]

SEQ ID NO: 53770 - protein, 46 aa, Homo sapiens
MAANKSKGQSSLALHKVIMVGSGGVGKSALTLQFMYDEECFKIIGI

SEQ ID NO: 53771 - protein, 149 aa, Homo sapiens
MEPSPLSPSGAALPLPLSLAPPPLPLPAAAVVHVSFPEVTSALLESLNQQRLQGQLCDVSIRVQGREFRAHRAVLAASSPYFHDQVLLKGMTSISLPSVMDPGAFETVLASAYTGRLSMAAADIVNFLTVGSVLQMWHIVDKCTELLRE

SEQ ID NO: 53772 - protein, 191 aa, Homo sapiens
ETDAVFLLESINGKSESPDHMVSQYQQALEEIERLKKQCSALQHVKAECSQCSNNESKSEMDEMAVQLDDVFRQLDKCSIERDQYKSEVELLEMEKSQIRSQCEELKTEVEQLKSTNQQTATDVSTSSNIEESVNHMDGESLKLRSLRVNVGQLLAMIVPDLDLQQVNYDVDVVDEILGQVVEQMSEISST

SEQ ID NO: 53773 - protein, 112 aa, Homo sapiens
MASLRVERAGGPRLPRTRVGRPAALRLLLLLGAVLNPHEALAQPLPTTGTPGSEGLIAPCEIAWSTLQSCLTWASPIPWQRGSSLRLTRSTLPTAPWCSPPSLTPQRMYSWP

SEQ ID NO: 53774 - protein, 139 aa, Homo sapiens
MHGNEAVGRELLIFLAQYLCNEYQKGNETIVNLIHSTRIHIMPSLNPDGFEKAASQPGELKDWFVGRSNAQGIDLNRNFPDLDRIVYVNEKEGGPNNHLLKNMKKIVDQNTKLAPETKAVIHWIMDIPFVLSANLHGGD

SEQ ID NO: 53775 - protein, 48 aa, Homo sapiens
MPGPPESLDMVRVLGPTSRERGRSCSEPVGSGCGGTQASPQSAPQSAP

SEQ ID NO: 53776 - protein, 169 aa, Homo sapiens
MSGRGKQGGKARAKAKTRSSRAGLQFPVGRVHRLLRKGNYSERVGAGAPVYLAAVLEYLTAEILELAGNAARDNKKTRIIPRHLQLAIRNDEELNKLLGKVTIAQGGVLPNIQAVLLPKKTESHHKAKGFRSSQWLVPSRLLASPRVGKRHASSWPPRLLERALQPPAA

SEQ ID NO: 53777 - protein, 114 aa, Homo sapiens
MRCWVILIILGIVFLLMPLSFLPIYTNIPRSERAPINTLLSSTLPGTLDQSAALSPALARRPAAWYARGVAVGAQCVLGVEGSCSACDDLYSQDKDAVCQTVLLRRSSRERERV

SEQ ID NO: 53778 - protein, 40 aa, Homo sapiens
MRKPRAAVGSGHRKQAASQEGRQKHAKNNSQAKPSACDET

SEQ ID NO: 53779 - protein, 257 aa, Homo sapiens
MPLNVSFTNRNYDLDYDSVQPYFYCDEEENFYQQQQQSELQPPAPSEDIWKKFELLPTPPLSPSRRSGLCSPSYVAVTPFSLRGDNDGGGGSFSTADQLEMVTELLGGDMVNQSFICDPDDETFIKNIIIQDCMWSGFSAAAKLVSEKLASYQAARKDSGSPNPARGHSVCSTSSLYLQDLSAAASECIDPSVVFPYPLNDSSSPKSCASQDSSAFSPSSDSLLSSTESSPQGSPEPLVLHEETPPTTSSDSGGTRR

SEQ ID NO: 53780 - protein, 127 aa, Homo sapiens
  MOD_RES (1)..(1): Any amino acid
XTYEMIGGLDKQIKEIKEVIELPVKHPELFEALGIAQPKGVLLYGPPGTGKTLLARAVAHHTDCTFIRVSGSELVQKFIGEARPPHRGKNGEGAVCHGTGTCSIYHLHGRNRLHRLLAAGGGFWRGQ

SEQ ID NO: 53781 - protein, 46 aa, Homo sapiens
MTGLALLYSGVFVAFWACALAVAVLSPGGSLRTPLQGGGPSARQLL

SEQ ID NO: 53782 - protein, 114 aa, Homo sapiens
MWWSTLMSILRARSFWKWISTQTVRIIRAVRAHFGGIMDEPSPLAQPLELNQHSRFIIGSVSEDNSEDEISNLVKLDLLEEKEGSLSPASVGSDTLSDLGISSLQDGLALHIRL

SEQ ID NO: 53783 - protein, 212 aa, Homo sapiens
DFGYCPRVYCENQPMLPIGVLVMVGFTVGKVPVPDIRTCHFCLVEDPSVGCISGSEKCTISSSSLCMVITIYYDVKVRFIVRGCGQYISYRCQEKRNTYFAEYWYQAQCCQYDYCNSWSSPQLQSSLPEPHDRPLALPLSDSQIQWFYQALNLSLPLPNFHAGTEPDGLDPMVTLSLNLGLSFAELRRMYLFLNSSGLLVLPQAGLLTPHPS

SEQ ID NO: 53784 - protein, 334 aa, Homo sapiens
HFQSPPPVPGEVLKLDDVIDNIMRLDDVLGYINPEMQMPNTLPLSSSHLNVYSSDPQVTASLVGVTSSSCPADLTQKRELTDAESRALAKERQKKDNHNLIERRRRFNINDRIKELGMLIPKANDLDVRWNKGTILKASVDYIRRMQKDLQKSRELENHSRRLEMTNKQLWLRIQELEMQARVHGLPTTSPSGMNMAELAQQVVKQELPSEEGPGEALMLGAEVPDPEPLPALPPQAPLPLPTQPPSPFHHLDFSHSLSFGGREDEGPPGYPEPLAPGHGSPFPSLSKKDLDLMLLDDSLLPLASDPLLSTMSPEASKASSRRSSFSMEEGDVL

SEQ ID NO: 53785 - protein, 167 aa, Homo sapiens
MILLRASEVRQLLHNKFVVILGDSVHRAVYKDLVLLLQKDRLLTPGQLRARGELNFEQDELVDGGQRGHMHNGLNYREVREFRSDHHLVRFYFLTRVYSDYLQTILKELQSGEHAPDLVIMNSCLWDISRYGPNSWRSYLENLENLFQCLGQVLPESCLLVWNTAMP

SEQ ID NO: 53786 - protein, 74 aa, Homo sapiens
MKATGFFLGGVFVVLIGWPLIGMIFEIYGFFLLFRGFFPVVVGFIRRVPVLGSLLNLPGIRSFVDKVGESNNMV

SEQ ID NO: 53787 - protein, 271 aa, Homo sapiens
MSPEMGELTQTRLQKIWIPHSSGSSRLQRRRGSSIPQFTNSPTMVIMVGLPARGKTYISTKLTRYLNWIGTPTKDNMEALQIRKQCALAALKDVHNYLSHEEGHVAVFDATNTTRERRSLILQFAKEHGYKGVCEEMTYEEIQEHYPEEFALRDQDKYRYRYPKGESYEDLVQRLEPVIMELERQENVLVICHQAVMRCLLAYFLDKSSDELPYLKCPLHTVLKLTPVAYGCKVESIYLNVEAVNTHREKPENVDITREPEEALDTVPAHY

SEQ ID NO: 53788 - protein, 167 aa, Homo sapiens
MGRVIRGQRKGAGSVFRAHVKHRKGAARLRAVDFAERHGYIKGIVKDIIHDPGRGAPLAKVVFRDPYRFKKRTELFIAAEGIHTGQFVYCGKKAQLNIGNVLPVGTMPEGTIVCCLEEKPGDRGKLARASGNYATVISHNPETKKTRVKLPSGSKKVISSANRAVVG

SEQ ID NO: 53789 - protein, 165 aa, Homo sapiens
MNDTVTIRTRKFMTNRLLQRKQMVIDVLHPGKATVPKTEIREKLAKMYKTTPDVIFVFGFRTHFGGGKTTGFGMIYDSLDYAKKNEPKHRLARHGLYEKKKTSRKQRKERKNRMKKVRGTAKANVGAGKKASLERGRRALQFLWHLHAACKTGCFFFCLWMRHRG

SEQ ID NO: 53790 - protein, 203 aa, Homo sapiens
MLTLQTWLVQALFIFLTTESTGELLDPCGYISPESPVVQLHSNFTAVCVLKEKLKPNPPHNLSVINSEELSSILKLTWTNPSIKSVIILKYNIQYRTKDASTWSQIPPEDTASTRSSFTVQDLKPFTEYVFRIRCMKEDGKGYWSDWSEEASGITYEDKLKNTSGLMFQILQRVILPSGHLTLLQGTILIQKIKCIQMAISLM

SEQ ID NO: 53791 - protein, 121 aa, Homo sapiens
  MOD_RES (1)..(1): Any amino acid
XLLGTLAVSRGLGDHQLRVLDTNIQLKPFLLSVPQVTVLDVDQLELQEDDVVVMATDGLWDVLSNEQVAWLVRSFLPGNQEDPHSLSAGWSSQVLKAGPDADTQHTGKGRQSHRGRAGVLR

SEQ ID NO: 53792 - protein, 83 aa, Homo sapiens
MLSRSRCVSRAFSRSLSAFQKGNCPLGRRSLPALTTVSSVFAFSELQLYADDLVTVKTPAFAESVTEGDVRWEKGSITSKWRD

SEQ ID NO: 53793 - protein, 38 aa, Homo sapiens
MSSRVGDLSPQQQEALARILLRSVPGEPPGPAAHTAQC

SEQ ID NO: 53794 - protein, 61 aa, Homo sapiens
MDAALLLNVEGVKKTILHGGTGELPNFITGSRVSGAPPEQTGSPTAAFNIPGDLSFPHHEM

SEQ ID NO: 53795 - protein, 52 aa, Homo sapiens
MRGKTFRFEMQRDLVSFPLSPAVRVKLVSAGFQTAEELLEVKPSELSKGNDS

SEQ ID NO: 53796 - protein, 37 aa, Homo sapiens
MERARDRLHLRRTTEQHVPEVEVQVKRRRTASLSNQE

SEQ ID NO: 53797 - protein, 648 aa, Homo sapiens
FLQLQILSQQQQQQQHRFSYLGMHQAQLKEPNEQMVRNPNSSSTPLSNTPLSPVKNSFSGQTGVSSFKPGPLPPNLDDLKVSELRQQLRIRGLPVSGTKTALMDRLRPFQDCSGNPVPNFGDITTVTFPVTPNTLPNYQSSSSTSALSNGFYHFGSTSSSPPISPASSDLSVAGSLPDTFNDASPSFGLHPSPVHVCTEESLMSSLNGGSVPSELDGLDSEKDKMLVEKQKVINELTWKLQQEQRQVEELRMQLQKQKRNNCSEKKPLPFLAASIKQEEAVSSCPFASQVPVKRQSSSSECHPPACEAAQLQPLGNAHCVESSDQTNVLSSTFLSPQCSPQHSPLGAVKSPQHISLPPSPNNPHFLPSSSGAQGEGHRVSSPISSQVCTAQNSGAHDGHPPSFSPHSSSLHPPFSGAQADSSHGAGGNPCPKSPCVQQKQMTRSQQMDELLDVLIESGEMPADAREDHSCLQKVPKIPRSSRSPTAVLTKPSASFEQASSGSQIPFDPYATDSDEHLEVLLNSQSPLGKMSDVTLLKIGSEEPHFDGIMDGFSGKAAEDLFNAHEILPGPLSPMQTQFSPSSVDSNGLQLSFTESPWETMEWLDLTPPNSTPGFSALTTSSPSIFNIDFLDVTDLNLNSSMDLHLQQW

SEQ ID NO: 53798 - protein, 96 aa, Homo sapiens
  MOD_RES (1)..(1): Any amino acid
XSRHGSSIPVTQKQFLHHTDIIPGIMHWKSFQSLVLSSLPDPSKMETTKSCDSFNSFMLPIDVPAILDALPEEDRLETVERSTWICCCICDDRVGV

SEQ ID NO: 53799 - protein, 544 aa, Homo sapiens
MPGRCQSDAAMRVNGPASRAPAGWTSGSLHTGPRAGRPRAQARGVRGRGLLLRPRPAKELPLPRKGGAWAPAGNPGPLHPLGVAVGMAGSGRLVLRPWIRELILGSETPSSPRAGQLLEVLQDAEAAVAGPSHAPDTSDVGATLLVSDGTHSVRCLVTREALDTSDWEEKEFGFRGTEGRLLLLQDCGVHVQVAEGGAPAEFYLQVDRFSLLPTEQPRLRVPGCNQDLDVQKKLYDCLEEHLSESTSSNAGLSLSQLLDEMREDQEHQGALVCLAESCLTLEGPCTAPPVTHWAASRCKATGEAVYTVPSSMLCISENDQLILSSLGPCQRTQGPELPPPDPALQDLSLTLIASPPSSPSSSGTPALPGHMSSEESGTSISLLPALSLAAPDPGQRSSSQPSPAICSAPATLTPRSPHASRTPSSPLQSCTPSLSPRSHVPSPHQALVTRPQKPSLEFKEFVGLPCKNRPPFPRTGATRGAQEPCSVWEPPKRHRDGSAFQYEYEPPCTSLCARVQAVRLPPQLMAWALHFLMDAQPGSEPTPM

SEQ ID NO: 53800 - protein, 230 aa, Homo sapiens
MSMSPTVIILACLGFFLDQSVWAHVGLYEKPSLTARPGPTVRTGENVTLSCSSQSSFDIYHLSREGEAHELRLPAVPSINGTFQADFPLGPATHGETYRCFGSFHGSPYEWSDASDPLPVSVTDAAVMNQEPAGHRTVNREDSDEQDPQEVTYAQLDHCIFTQRKITGPSQRSKRPSTDTSVCIELPNAEPRALSPAHEHHSQALMGSSRETTALSQTQLASSNVPAAGI

SEQ ID NO: 53801 - protein, 64 aa, Homo sapiens
MAAKQPPPLMKKHSQTDLVSRLKTRKILGVGGEDDDGEVHRSKGLAVRLCCALLRHCHHGACLP

SEQ ID NO: 53802 - protein, 418 aa, Homo sapiens
MEPSDMPAGYHCPLDSAPWDETRDPQSTELIPRRAISRSPTCARCRNHGVTAHLKGHKRLCLFQACECHKCVLILERRRVMAAQVALRRQQEAQLKKHLMRRGEASPKAPNHFRKGTTQPQVPSGKENIAPQPQTPHGAVLLAPTPPGKNSCGPLLLSHPPEASPLSWTPVPPGPWVPGHWLPPGFSMPPPVVCRLLYQEPAVSLPPFPGFDPGTSLQLPTHGPFTTCPGSHPVLTAPLSGEPQGPPSQPRTHSTLILQPCGTPDPLQLQPQVLGKKWDLGPWEEVEPGEGKSRKLKEAGAEEHLEGGQKRGFPVCLSPFPLQASGASCLARTSGPSEWQLQQEAAEALVGLKDSSQAPRVTPSVPPNPAWISLLHPCGPPAPAGGRGFQPVGPCLRPSPAPSVALHIGRLGSISLLS

SEQ ID NO: 53803 - protein, 467 aa, Homo sapiens
MKQIDIMVAHKKSEWEGRTHALETCLKIREQELKSLRSQLDVTHKEVGMLHQQVEEHEKIKQEMTMEYKQELKKLHEELCILKRSYEKLQKKQMREFRGNTKNHREDRSEIERLTAKIEEFRQKSLDWEKQRLIYQQQVSSLEAQRKALAEQSEIIQAQLVNRKQKLESVELSSQSEIQHLSSKLERANDTICANELEIERLTMRVNDLVGTSMTVLQEQQQKEEKLRESEKLLEALQEEKRELKAALQSQENLIHEARIQKEKLQEKVKATNTQHAVEAISLESVSATCKQLSQELMEKYEELKRMEAHNNEYKAEIKKLKEQILQGEQSYSSALEGMKMEISHLTQELHQRDITIASTKGSSSDMEKRLRAEMQKAEDKAVEHKEILDQLESLKLENRHLSEMVMKLELGLHECSLPVSPLGSIATRFLEEEELRSHHILERLDAHIEELKRESEKTVRQFTALK

SEQ ID NO: 53804 - protein, 83 aa, Homo sapiens
LKSALAKFKEGAEMESSKEDKMDNAQDLLSFGGLQVVINGLNSTEPLVKEYAAFVLGAAFSSNPKVQVEAIEGGALQKLLVIL

SEQ ID NO: 53805 - protein, 552 aa, Homo sapiens
MNAYLTKQHSCSRGSDGMDAVRSAPTLIRDAHCACGWQRNCQGLGYSSQTMPSSGPGGPASNRTGGSSFNRTLWDSVRKSPHKTSTKGKGTCGEHCTCPHGWFSPAQASPAPIIVNTDTLDTIPYVNGTEIEYEFEEITLERGNSGLGFSIAGGTDNPHIGDDPGIFITKIIPGGAAAEDGRLRVNDCILRVNEVDVSEVSHSKAVEALKEAGSIVRLYVRRRRPILETVVEIKLFKGPKGLGFSIAGGVGNQHIPGDNSIYVTKIIDGGAAQKDGRLQVGDRLLMVNNYSLEEVTHEEAVAILKNTSEVVYLKVGKPTTIYMTDPYGPPDITHSYSPPMENHLLSGNNGTLEYKTSLPPISPGRYSPIPKHMLVDDDYTRPPEPVYSTVNKLCDKPASPRHYSPVECDKSFLLSAPYSHYHLGLLPDSEMTSHSQHSTATRQPSMTLQRAVSLEGEPRKVVLHKGSTGLGFNIVGGEDGEGIFVSFILAGGPADLSGELQRGDQILSVNGIDLRGASHEQAAAALKGAGQTVTIIAQYQPEGQSELKLIMF

SEQ ID NO: 53806 - protein, 58 aa, Homo sapiens
IVRAKRRGTSYLTDIVWWAGTIAMAVGQIGNFLAYTAVPTVLVTPLGALGVPFGCYSL

SEQ ID NO: 53807 - protein, 41 aa, Homo sapiens
MVDKKLVVVFGGTEAGFHQAKIVPLHFSLGDRVRLHLKKIK

SEQ ID NO: 53808 - protein, 349 aa, Homo sapiens; identical to SEQ ID NO: 18287

SEQ ID NO: 53809 - protein, 90 aa, Homo sapiens
MQPILLLLAFLLLPRADAGEIIGGHEAKPHSRPYMAYLMIWDQKSLKRCGGFLIRDDFVLTAAHCWGSWRERPSGPELCSPSGYLATRPR

SEQ ID NO: 53810 - protein, 538 aa, Homo sapiens
MGTASSLVSPAGGEVIEDTYGAGGGEACEIPVEALQKTYQKILREKESALEAKYQAMERAATFEHDRDKVKRQFKIFRETKENEIQDLLRAKRELESKLQRLQAQGIQVFDPGESDSDDNCTDVTAAGTQCEYWTGGALGSEPSIGSMIQLQQSFRGPEFAHSSIDVEGPFANVNRDDWDIAVASLLQVTPLFSHSLWSNTVRCYLIYTDETQPEMDLFLKDYSPKLKRMCETMGYFFHAVYFPIDVENQYLTVRKWEIEKSSLVILFIHLTLPSLLLEDCEEAFLKNPEGKPRLIFHRLEDGKVSSDSVQQLIDQVSNLNKTSKAKIIDHSGDPAEGVYKTYICVEKIIKQDILGFENTDLETKDLGSEDSIPEEDDFGDVLWDIHDEQEQMETFQQASNSAHELGFEKYYQRLNDLVAAPAPIPPLLVSGGPGSGKSLLLSKWIQLQQKNSPNTLILSHFVGRPMSTSSESSLIIKRLTLKLMQHSWSVSALTLDPAKLLEEFPRWLEKLSARHQGSIIIVIDSIDQVQVVAYTSS

SEQ ID NO: 53811 - protein, 271 aa, Homo sapiens
MAPVGVEKKLLLGPNGPAVAAAGDLTSEEEEGQSLWSSILSEVSTRARSKLPSGKNILVFDHTRCNVWILDGDLYHKGLLKFAVSAESLPETLVIFVADMSRPWTVMESLQKWASVLREHIDKMKIPPEKMRELERKFVKDFQDYMEPEEGCQGSPQRRGPLTSGSDEENVALPLGDNVLTHNLGIPVLVVCTKCDAVSVLEKEHDYRDEHLDFIQSHLRRFCLQYGAALIYTSVKEEKNLDLLYKYIVHKTYGFHFTTPALVVEKDAVFM

SEQ ID NO: 53812 - protein, 187 aa, Homo sapiens
MDPTALVEAIVEEVACPICMTFLREPMSIDCGHSFCHSCLSGLWEIPGESQNWGYTCPLCRAPVQPRNLRPNWQLANVVEKVRLLRLHPGMGLKGDLCERHGEKLKMFCKEDVLIMCEACSQSPEHEAHSVVPMEDVAWEYKWELHEALEHLKKEQEEAWKLEVGERKRTATWKAGGNPKTEYCMGV

SEQ ID NO: 53813 - protein, 50 aa, Homo sapiens
MLRPGAQLLRGLLLRSCPLQGSPGRPRSVCGREGFNNLLSSWNKLEENTL

SEQ ID NO: 53814 - protein, 165 aa, Homo sapiens
MMFVGFLGCYGAIQESQCLLGTFFTCLVILFACEVAAGIWGFVNKDQIAKDVKQFYDQALQQAVVDDDANNAKAVVKTFHETLDCCGSSTLTALTTSVLKNNLCPSGSNIISNLFKEDCHQKIDDLFSGKLYLIGIAAIVVAVIMIFEMILSMVLCCGIRNSSVY

SEQ ID NO: 53815 - protein, 58 aa, Homo sapiens
MLPAVGSVDEEEDPAEEDCPELVPIETTQSEEEEKSGLGAKIPVTIITGYLVIQRLLY

SEQ ID NO: 53816 - protein, 742 aa, Homo sapiens
MAQWNQLQQLDTRYLEQLHQLYSDSFPMELRQFLAPWIESQDWAYAASKESHATLVFHNLLGEIDQQYSRFLQESNVLYQHNLRRIKQFLQSRYLEKPMEIARIVARCLWEESRLLQTAATAAQQGGQANHPTAAVVTEKQQMLEQHLQDVRKRVQDLEQKMKVVENLQDDFDFNYKTLKSQGDMQDLNGNNQSVTRQKMQQLEQMLTALDQMRRSIVSELAGLLSAMEYVQKTLTDEELADWKRRQQIACIGGPPNICLDRLENWITSLAESQLQTRQQIKKLEELQQKVSYKGDPIVQHRPMLEERIVELFRNLMKSAFVVERQPCMPMHPDRPLVIKTGVQFTTKVRLLVKFPELNYQLKIKVCIDKDSGDVAALRGSRKFNILGTNTKVMNMEESNNGSLSAEFKHLTLREQRCGNGGRANCDTHSLPVVVISNICQMPNAWASILWYNMLTNNPKNVNFFTKPPIGTWDQVAEVLSWQFSSTTKRGLSIEQLTTLAEKLLGPGVNYSGCQITWAKFCKENMAGKGFSFWVWLDNIIDLVKKYILALWNEGYIMGFISKERERAILSTKPPGTFLLRFSESSKEGGVTFTWVEKDISGKTQIQSVEPYTKQQLNNMSFAEIIMGYKIMDATNILVSPLVYLYPDIPKEEAFGKYCRPESQEHPEADPGSAAPYLKTKFICVTPTTCSNTIDLPMSPRTLDSLMQFGNNGEGAEPSAGGQFESLTFDMELTSECATSPM

SEQ ID NO: 53817 - protein, 147 aa, Homo sapiens
MADKVRRQRPRRRVCWALVAVLLADLLALSDTLAVMSVDLGSESMKVAIVKPGVPMEIVLNKESRRKTPVIVTLKENERFFGDSAASMAIKNPKATLRYFQHLLGKQADNPHVALYQARFPEHELTFDPQRQTVHFQISSQLQFSPL

SEQ ID NO: 53818 - protein, 364 aa, Homo sapiens
MGAPACALALCVAVAIVAGASSESLGTEQRVVGRAAEVPGPEPGQQEQLVFGSGDAVELSCPPPGGGPMGPTVWVKDGTGLVPSERVLVGPQRLQVLNASHEDSGAYSCRQRLTQRVLCHFSVRVTDAPSSGDDEDGEDEAEDTGVDTGAPYWTRPERMDKKLLAVPAANTVRFRCPAAGNPTPSISWLKNGREFRGEHRIGGIKLRHQQWSLVMESVVPSDRGNYTCVVENKFGSIRQTYTLDVLERSPHRPILQAGLPANQTAVLGSDVEFHCKVYSDAQPHIQWLKHVEVNGSKVGPDGTPYVTVLKSWISESVEADVRLRLANVSERDGGEYLCRATNFIGVAEKAFWLSVHGPRADGGR

SEQ ID NO: 53819 - protein, 231 aa, Homo sapiens
MASLLKVDQEVKLKVDSFRERITSEAEDLVANFFPKKLLELDSFLKEPILNIHDLTQIHSDMNLPVPDPILLTNSHDGLDGPTYKKRRLDECEEAFQGTKVFVMPNGMLKSNQQLVDIIEKVKPEIRLLIEKCNTEETVAELRTVESEAASYLDQISRYYITRAKLVSKIAKYPHVEDYRRTVTEIDEKEYISLRLIISELRNQYVTLHDMILKNIEKIKRPRSSNAETLY

SEQ ID NO: 53820 - protein, 286 aa, Homo sapiens
MEDRHVSLPSFNQLFGLSDPVNRAYFAVFDGHGGVDAARYAAVHVHTNAARQPELPTDPEGALREAFRRTDQMFLRKAKRERLQSGTTGVCALIAGATLHVAWLGDSQVILVQQGQVVKLMEPHRPERQDEKARIEALGGFVSHMDCWRVNGTLAVSRAIGDVFQKPYVSGEADAASRALTGSEDYLLLACDGFFDVVPHQEVVGLVQSHLTRQQGSGLRVAEELVAAARERGSHDNITVMVVFLRDPQELLEGGNQGEGDPQAEGRRQDLPSSLPEPETQAPPRS

SEQ ID NO: 53821 - protein, 700 aa, Homo sapiens
MLAPFLLLLTHSRSPLSFRPCSHVPGALIAQKPMGSSRLAALLLPLLLIVIDLSDSAGIGFRHLPHWNTRCPLASHTDDSFTGSSAYIPCRTWWALFSTKPWCVRVWHCSRCLCQHLLSGGSGLQRGLFHLLVQKSKKSSTFKFYRRHKMPAPAQRKLLPRRHLSEKSHHISIPSPDISHKGLRSKRTQPSDPETWESLPRLDSQRHGGPEFSFDLLPEARAIRVTISSGPEVSVRLCHQWALECEELSSPYDVQKIVSGGHTVELPYEFLLPCLCIEASYLQEDTVRRKKCPFQSWPEAYGSDFWKSVHFTDYSQHTQMVMALTLRCPLKLEAALCQRHDWHTLCKDLPNATARESDGWYVLEKVDLHPQLCFKFSFGNSSHVECPHQTGSLTSWNVSMDTQAQQLILHFSSRMHATFSAAWSLPGLGQDTLVPPVYTVSQARGSSPVSLDLIIPFLRPGCCVLVWRSDVQFAWKHLLCPDVSYRHLGLLILALLALLTLLGVVLALTCRRPQSGPGPARPVLLLHAADSEAQRRLVGALAELLRAALGGGRDVIVDLWEGRHVARVGPLPWLWAARTRVAREQGTVLLLWSGADLRPVSGPDPRAAPLLALLHAAPRPLLLLAYFSRLCAKGDIPPPLRALPRYRLLRDLPRLLRALDARPFAEATSWGRLGARQRRQSRLELCSRLEREAARLADLG

SEQ ID NO: 53822 - protein, 236 aa, Homo sapiens
MLGLWGQRLPAAWVLLLLPFLPLLLLAAPAPHRESYKPVIVVHGLFDSSYSFRHLLEYINETHPGTVVTVLDLFDGRESLRPLWEQVQGFREAVVPIMAKAPQGVHLICYSQGGLVCRALLSVMDDHNVDSFISLSSPQMGQYGDTDYLKWLFPTSMRSNLYRICYSPWGQEFSICNYWHDPHHDDLYLNASSFLALINGERDHPNATVWRKNFLRVGHLVLIGGPDDGVITPWQS

SEQ ID NO: 53823 - protein, 41 aa, Homo sapiens
MVDTEMPFWPTNFGISSVDLSVMEDHSHSFDIKPFTTVDFS

SEQ ID NO: 53824 - protein, 185 aa, Homo sapiens
MVDMMKEALEKLQLNIVEMKDENATLDGGDVLFTGREFFVGLSKRTNQRGAEILADTFKDYAVSTVPVADGLHLKSFCSMAGPNLIAIGSSESAQKALKIMQQMSDHRYDKLTVPDDIAANCIYLNIPNKGHVLLHRTPEEYPESAKVYEKLKDHMLIPVSMSELEKVDGLLTCCSVLINKKVDS

SEQ ID NO: 53825 - protein, 189 aa, Homo sapiens
MEVPTAYMISPKEREKASNLKLSSRPPATSHLIRTPKDTHYCGASKGLGNSFIGNESFLPEFINGDFDSIRPEVREYYATKGCELISTPDQDHTDFTKCLKMLQKKIEEKDLKGKHRLHVDTGMEGDWCGLIPVGQPCMQVTTTGLKWNLTNDVLAFGTLVSTSNTYDGSGVVTVETDHPLLWTMAIKS

SEQ ID NO: 53826 - protein, 229 aa, Homo sapiens
MAGLRNESEQEPLLGDTPGSREWDILETEEHYKSRWRSIRILYLTMFLSSVGFSVVMMSIWPYLQKIDPTADTSFLGWVIASYSLGQMVASPIFGLWSNYRPRKEPLIVSILISVAANCLYAYLHIPASHNKYYMLVARGLLGIGAGNVAVVRSYTAGATSLQERTSSMANISMCQALGFILGPENIVWMTQEDSVKVLILKKQVQMKLRFPKEILTRLLLWPSMFCFL

SEQ ID NO: 53827 - protein, 158 aa, Homo sapiens
MKVIENRAMKDEEKMEIQEMQLKEAKHIAEEADRKYEEVARKLVILEGELERAEERAEVSELKCGDLEEELKNVTNNLKSLEAASEKYSEKEDKYEEEIKLLSDKLKEAETRAEFAERTVAKLEKTIDDLEEKLAQAKEENVGLHQTLDQTLNELNCI

SEQ ID NO: 53828 - protein, 268 aa, Homo sapiens
MASRIGLRMQLMREQAQQEEQRERMQQQAVMHYMQQQQQQQQQQLGGPPTPAINTPVHFQSPPPVPGEVLKVQSYLENPTSYHLQQSQHQKVREYLSETYGNKFAAHISPAQGSPKPPPAASPGVRAGHVLSSSAGNSAPNSPMAMLHIGSNPERELDDVIDNIMRLDDVLGYINPEMQMPNTLPLSSSHLNVYSSDPQVTASLVGVTSSSCPADLTQKRELTDAESRALAKERQKKDNHNLIERRRRFNINDRIKELGMLIPKANDL

SEQ ID NO: 53829 - protein, 46 aa, Homo sapiens
MVSHSELRKLFYSADAVCFDVDSTVIREEGIDELAKICGVEDAVSE

SEQ ID NO: 53830 - protein, 341 aa, Homo sapiens
MSLMVVSMVCVGFFLLQGAWPHEGVHRKPSLLAHPGPLVKSEETVILQCWSDVRFQHFLLHREGKFKDTLHLIGEHHDGVSKANFSIGPMMQDLAGTYRCYGSVTHSPYQLSAPSDPLDIVITGLYEKPSLSAQPGPTVLAGESVTLSCSSRSSYDMYHLSREGEAHERRFSAGPKVNGTFQADFPLGPATHGGTYRCFGSFRDSPYEWSNSSDPLLVSVTGNPSNSWLSPTEPSSETGNPRHLHVLIGTSVVIILFILLLFFLLHRWCCNKKNAVVMDQEPAGNRTVNREDSDEQDPQEVTYAQLNHCVFTQRKITHPSQRPKTPPTDIIVYTELPNAEP

SEQ ID NO: 53831 - protein, 711 aa, Homo sapiens
MNRESSRSHAVFTITIESMEKSNEIVNIRTSLLNLVDLAGSERQKDTHAEGMRLKEAGNINRSLSCLGQVITALVDVGNGKQRHVCYRDSKLTFLLRDSLGGNAKTAIIANVHPGSRCFGETLSTLNFAQRAKLIKNKAVVNEDTQGNVSQLQAEVKRLKEQLAELASGQTPPESFLTRDKKKTNYMEYFQEAMLFFKKSEQEKKSLIEKVTQLEDLTLKKEKFIQSNKMIVKFREDQIIRLEKLHKESRGGFLPEEQDRLLSELRNEIQTLREQIEHHPRVAKYAMENHSLREENRRLRLLEPVKRAQEMDAQTIAKLEKAFSEISGMEKSDKNQQGFSPKAQKEPCLFANTEKLKAQLLQIQTELNNSKQEYEEFKELTRKRQLELESELQSLQKANLNLENLLEATKACKRQEVSQLNKIHAETLKIITTPTKAYQLHSRPVPKLSPEMGSFGSLYTQNSSILDNDILNEPVPPEMNEQAFEAISEELRTVQEQMSALQAKLDEEEHKNLKLQQHVDKLEHHSTQMQELFSSERIDWTKQQEELLSQLNVLEKQLQETQTKNDFLKSEVHDLRVVLHSADKELSSVKLEYSSFKTNQEKEFNKLSERHMHVQLQLDNLRLENEKLLESKACLQDSYDNLQEIMKFEIDQLSRNLQNFKKENETLKSDLNNLMELLEAEKERNNKLSLQFEEDKENSSKEILKVLEAVR

SEQ ID NO: 53832 - protein, 222 aa, Homo sapiens
  MOD_RES (1)..(1): Any amino acid
XKERVEAGDVIYIEANSGAVKRQGRCDTYATEFDLEAEEYVPLPKGDVHKKKEIIQDVTLHDLDVANARPQGGQDILSMMGQLMKPKKTEITDKLRGEINKVVNKYIDQGIAELVPGVLFVDEVHMLDIECFTYLHRALESSIAPIVIFASNRGNCVIRSHDSMNMLVQLIWKPAAFKYHLIVSTQYDDSAPHRVGDCTQGILKLKSRPWKLPGVGSGHTWK

SEQ ID NO: 53833 - protein, 59 aa, Homo sapiens
MTAEDSTAAMSSDSAAGSSAKVPEGVAGAPNEAALLALMERTGYSMVQENGQRKYGGPP

SEQ ID NO: 53834 - protein, 609 aa, Homo sapiens
MDTMVQIQQTGGLKKLLSFAENSTIPDIQKNAAKAITKAAYDPENRKLFHEQEVEKCLVALLGSENDGTKIAASQAISAMCENSGSKDFFNNQGIPQLIQLLKSDNEEVREAAALALANLTTCNPANANAAAEADGIDPLINLLSSKRDGAIANAATVLTNMAMQEPLRLNIQNHDIMHAIISPLRSANTVVQSKAALAVTATACDVEARTELRNSGGLEPLVELLRSKNDEVRKHASWAVMVCAGDELTANELCRLGALDILEEVNVSGTRKNKFSEAAYNKLLNNNLSLKYSQTGYLSSSNIINDGFYDYGRINPGTKLLPLKELCLQEPSDLRAVLLINSKSYVSPPSSMEDKSDVGYGRSISSSSSLRRSSKEKNKKNSYHFSAGFGSPIEDKSEPASGRNTVLSKSATKEKGWRKSKGKKEEEKVKEEEEVMVVPKFVGEGSSDKEWCPPSDPDFSMYVYEVTKSILPITNIKEQIEDLAKYVAEKMGGKIPKEKLPDFSWELHISELKFQLKSNVIPIGHVKKGIFYHRALLFKALADRIGIGCSLVRGEYGRAWNEVMLQNDSRKGVIGGLPAPEMYVIDLMFHPGGLMKLRSREADLYRFI

SEQ ID NO: 53835 - protein, 146 aa, Homo sapiens
MADTIFGSGNDQWVCPNDRQLALRAKLQTGWSVHTYQTEKQRRKQHLSPAEVEAILQVIQRAERLDVLEQQRIGRLVERLETMRRNVMGNGLSQCLLCGEVLGFLGSSSVFCKDCRKKVCTKCGIEASPGQKRPLWLCKICSEQRE

SEQ ID NO: 53836 - protein, 270 aa, Homo sapiens
MQRARPTLWAAALTLLVRCEPCDARALAQCAPPPAVCAELVREPGCGCCLTCALSEGQPCGIYTERCGSGLRCQPSPDEARPLQALLDGRGLCVNASAVSRLRAYLLPAPPAPGNASESEEDRSAGSVESPSVSSTHRVSDPKFHPLHSKIIIIKKGHAKDSQRYKVDYESQSTDTQNFSSESKRETEYGPCRREMEDTLNHLKFLNVLSPRGVHIPNCDKKGFYKKKQCRPSKGRKRGFCWCVDKYGQPLPGYTTKGKEDVHCYSMQSK

SEQ ID NO: 53837 - protein, 397 aa, Homo sapiens
  MOD_RES (1)..(1): Any amino acid
XAAPGSQDAFYPTRAKQARVSQELKKAAKRTVSISEGPDTLGDGMRERRETLALAPEPEPLEKEACEKWKRPFSFKKRRGHSIGGAPEQRYQIIPVCVAARLPTRAQDVLDAHLSEVNAVRFGPNSSLLATGGADRLIHLWNVVGSRLEANQTLEGAGGSITSVDFDPSGYQVLAATYNQAAQLWKVGEAQSKETLSGHKDKVTAAKFKLTRHQAVTGSRDRTVKEWDLGRAYCSRTINVLSYCNDVVCGDHIIISGHNDQKIRFWDSRGPHCTQVIPVQGRVTSLSLSHDQLHLLSCSRDNTLKVIDLRVSNIRQVFRADGFKCGSDWTKAVFSPDRSYALAGSCDGALYIWDVDTGKLESRLQGPHCAAVNAVAWCYSGSHMVSVDQGRKVVLWQ

SEQ ID NO: 53838 - protein, 315 aa, Homo sapiens
MAGRAVLLAGPPGTGKTALALAIAQELGSKVPFCPMVGSEVYSTEIKKTEVLMENFRRAIGLRIKETKEVYEGEVTELTPCETENPMGGYGKTISHVIIGLKTAKGTKQLKLDPSIFESLQKERVEAGDVIYIEANSGAVKRQGRCDTYATEFDLEAEEYVPLPKGDVHKKKEIIQDVTLHDLDVANARPQGGQDILSMMGQLMKPKKTEITDKLRGEINKVVNKYIDQGIAELVPGVLFVDEVHMLDIECFTYLHRALESSIAPIVIFASNRGNCVIRGTEDITSPHGIPLDLLDRVMIIRTMLYTPQEMKQVP

SEQ ID NO: 53839 - protein, 191 aa, Homo sapiens
MFHGTVTEELTSHEEWSHYNENIREGQKDFVFVKFNGLHLKSMENLQSCISLRVCIFSNNFITDIHPLQSCIKLIKLDLHGNQGTTYEEEINNIKHITSKINAILAHNSPVLIVQRWIRGFLVRKNLSPVFFHKKKQQEKIIRGYEAKWIYITKGYEDKLLKDLFFKPETNIKGKLAYWKHDKKKLWVNFH

SEQ ID NO: 53840 - protein, 449 aa, Homo sapiens
MARRPRHSIYSSDEDDEDFEMCDHDYDGLLPKSGKRHLGKTRWTREEDEKLKKLVEQNGTDDWKVIANYLPNRTDVQCQHRWQKVLNPELIKGPWTKEEDQRVIELVQKYGPKRWSVIAKHLKGRIGKQCRERWHNHLNPEVKKTSWTEEEDRIIYQAHKRLGNRWAEIAKLLPGRTDNAIKNHWNSTMRRKVEQEGYLQESSKASQPAVATSFQKNSHLMGFAQAPPTAQLPATGQPTVNNDYSYYHISEAQNVSSHVPYPVALHVNIVNVPQPAAAAIQRHYNDEDPEKEKRIKELELLLMSTENELKGQQVLPTQNHTCSYPGWHSTTIADHTRPHGDSAPVSCLGEHHSTPSLPADPGSLPEESASPARCMIVHQGTILDNVKNLLEFAETLQFIDSFLNTSSNHENSDLEMPSLTSTPLIGHKLTVTTPFHRDQTVKTQKENTV

SEQ ID NO: 53841 - protein, 537 aa, Homo sapiens
MLARETYEEDREYESQAKRLKTEEGEIDYSAEEGENRREATPRGGGDGGGGGRSFSQPEAGGSHHKVSVSPVVHVRGLCESVVEADLVEALEKFGTICYVMMMPFKRQALVEFENIDSAKECVTFAADEPVYIAGQQAFFNYSTSKRITRPGNTDDPSGGNKVLLLSIQNPLYPITVDVLYTVCNPVGKVQRIVIFKRNGIQAMLMFESVLCAQKAKAALNGADIYAGCCTLKIEYARPTRLNVIRNDNDSWDYTKPYLGRRDRGKGRQRQAILGEHPSSFRHDGYGSHGPLLPLPSRYRMGSRDTPELVAYPLPQASSSYMHGGNPSGSVVMVSGLHQLKMNCSRVFNLFCLYGNIEKVKFMKTIPGTALVEMGDEYAVERAVTHLNNVKLFGKRLNVCVSKQHSVVPSQIFELEDGTSSYKDFAMSKNNRFTSAGQASKNIIQPPSCVLHYYNVPLCVTEETFTKLCNDHEVLTFIKYKVFDAKPSAKTLSGLLEWECKTDAVEALTALNHYQIRVPNGSNPYTLKLCFSTSSHL

SEQ ID NO: 53842 - protein, 342 aa, Homo sapiens
MKIIDPDEEKAKQDPSYYLKNTNAETRETLQELYKEFKGDEILAATMKAPEKKKVDKLNAAHYSTGKVSASFTSTAMVPETTHEAAAIDEDVLRYQFVKKKGYVRLHTNKGDLNLELHCDLTPKTCENFIRLCKKHYYDGTIFHRSIRNFVIQGGDPTGTGTGGESYWGKPFKDEFRPNLSHTGRGILSMANSGPNSNRSQFFITFRSCAYLDKKHTIFGRVVGGFDVLTAMENVESDPKTDRPKEEIRIDATTVFVDPYEEADAQIAQERKTQLKVAPETKVKSSQPQAGSQGPQTFRQGVGKYINPAATKRAAEEEPSTSATVPMSKKKPSRGFGDFSSW

SEQ ID NO: 53843 - protein, 135 aa, Homo sapiens
RFKHLRKYTYNYEAESSSGVPGTADSRSATRINCKVELEVPQLCSFILKTSQCTLKEVYGFNPEGKALLKKTKNSEEFAAAMSRIPCMETAPLTLPSRRGRAMWQQKYPLKETWGSVIASSPSAQASAHLLSSKA

SEQ ID NO: 53844 - protein, 147 aa, Homo sapiens
MTSPEIASLSWGQMKVKGSNTTYKDCKVWPGGSRTWDWRETGTEHSPGVQPADVKEVVEKGVQTLVIGRGMSEALKAPTQQLPSGVHVRAVVQFHLATASWHILERCKTGAGLSIKHVCELAMSHLSTFLYQIYDAIILKMHLYFMK

SEQ ID NO: 53845 - protein, 914 aa, Homo sapiens
  MOD_RES (1)..(1): Any amino acid
XILYPPLKQEQVQVLIEKYEPNNSLARKGQISVDGFMRYLSGEENGVVSPEKLDLNEDMSQPLSHYFINSSHNTYLTAGQLAGNSSVEMYRQVLLSGCRCVELDCWKGRTAEEEPVITHGFTMTTEISFKEVIEAIAECAFKTSPFPILLSFENHVDSPKQQAKMAEYCRLIFGDALLMEPLEKYPLESGVPLPSPMDLMYKILVKNKKKSHKSSEGSGKKKLSEQASNTYSDSSSMFEPSSPGAGEADTESDDDDDDDDCKKSSMDEGTAGSEAMATEEMSNLVNYIQPVKFESFEISKKRNKSFEMSSFVETKGLEQLTKSPVEFVEYNKMQLSRIYPKGTRVDSSNYMPQLFWNAGCQMVALNFQTMDLAMQINMGMYEYNGKSGYRLKPEFMRRPDKHFDPFTEGIVDGIVANTLSVKIISGQFLSDKKVGTYVEVDMFGLPVDTRRKAFKTKTSQGNAVNPVWEEEPIVFKKVVLPTLACLRIAVYEEGGKFIGHRILPVQAIRPGYHYICLRNERNQPLTLPAVFVYIEVKDYVPDTYADVIEALSNPIRYVNLMEQRAKQLAALTLEDEEEVKKEADPGETPSEAPSEARTTPAENGVNHTTTLTPKPPSQALHSQPAPGSVKAPAKTEDLIQSVLTEVEAQTIEELKQQKSFVKLQKKHYKEMKDLVKRHHKKTTDLIKEHTTKYNEIQNDYLRRRAALEKSAKKDSKKKSEPSSPDHGSSTIEQDLAALDAEMTQKLIDLKDKQQQQLLNLRQEQYYSEKYQKREHIKLLIQKLTDVAEECQNNQLKKLKEICEKEKKELKKKMDKKRQEKITEAKSKDKSQMEEEKTEMIRSYIQEVVQYIKRLEEAQSKRQEKLVEKHKEIRQQILDEKPKGEGSSSFLSETCHEDPSVSPNFTPPNPQALKW

SEQ ID NO: 53846 - protein, 68 aa, Homo sapiens
MDALEDYVWPRATSELILLPVTGLECVGDRLLAESGFGFPKCPDYRREPPHPAETKDFLRFKLQDCVS

SEQ ID NO: 53847 - protein, 80 aa, Homo sapiens
MCRIQRADGDCDLAAVILHVKRRRICVSPHNHTVKQWMKVQAAKKNGKGNVCHRKKHHGKRNSNRAHQGKHETYGHKTPY

SEQ ID NO: 53848 - protein, 206 aa, Homo sapiens
MPLSDFILALKDNPYFGAGFGLVGVGTALALARKGVQLGLVAFRRHYMITLEVPARDRSYAWLLSWLTRHSTRTQHLSVETSYLQHESGRISTKFEFVPSPGNHFIWYRGKWIRVERSREMQMIDLQTGTPWESVTFTALGTDRKVFFNILEEARELALQQEEGKTVMYTAVGSEWRPFGYPRRRRPLNSVVLQQGLADRIVRDVQ

SEQ ID NO: 53849 - protein, 291 aa, Homo sapiens
MPALHRHEEEKFFLNAKGQKETLPSIWDSPTKQLSVVVPSYNEEKRLPVMMDEALSYLEKRQKRDPAFTYEVIVVDDGSKDQTSKVAFKYCQKYGSDKVRVITLVKNRGKGGAIRMGIFSSRGEKILMADADGATKFPDVEKLEKGLNDLQPWPNQMAIACGSRAHLEKESIAQRSYFRTLLMYGFHFLVWFLCVKGIRDTQCGFKLFTREAASRTFSSLHVERWAFDVELLYIAQFFKIPIAEIAVNWTEIEGSKLVPFWSWLQMGKDLLFIRLRYLTGAWRLEQTRKMN

SEQ ID NO: 53850 - protein, 236 aa, Homo sapiens
MAGLRNESEQEPLLGDTPGSREWDILETEEHYKSRWRSIRILYLTMFLSSVGFSVVMMSIWPYLQKIDPTADTSFLGWVIASYSLGQMVASPIFGLWSNYRPRKEPLIVSILISVAANCLYAYLHIPASHNKYYMLVARGLLGIGAGNVAVVRSYTAGATSLQERTSSMANISMCQALGFILGPVFQTCFTFLGEKGVTWDVIKLQINMYTTPVLLSAFLGILNIILILAILSKYR

SEQ ID NO: 53851 - protein, 107 aa, Homo sapiens
MEALLEGIQNRGHGGGFLTSCEAELQELMKQIDIMVAHKKSEWEGRTHALETCLKIREQELKSLRSQLDVTHKEVGMLHQQVEEHEKIKQEMTMEYKQELKKLHEEK

SEQ ID NO: 53852 - protein, 481 aa, Homo sapiens
MGCSAKARWAAGALGVAGLLCAVLGAVMIVMVPSLIKQQVLKNVRIDPSSLSFNMWKEIPIPFYLSVYFFDVMNPSEILKGEKPQVRERGPYVYREFRHKSNITFNNNDTVSFLEYRTFQFQPSKSHGSESDYIVMPNILVLGAAVMMENKPMTLKLIMTLAFTTLGERAFMNRTVGEIMWGYKDPLVNLINKYFPGMFPFKDKFGLFAELNNSDSGLFTVFTGVQNISRIHLVDKWNGLSKVDFWHSDQCNMINGTSGQMWPPFMTPESSLEFYSPEACRSMKLMYKESGVFEGIPTYRFVAPKTLFANGSIYPPNEGFCPCLESGIQNVSTCRFSAPLFLSHPHFLNADPVLAEAVTGLHPNQEAHSLFLDIHPVTGIPMNCSVKLQLSLYMKSVAGIGQTGKIEPVVLPLLWFAESGAMEGETLHTFYTQLVLMPKEKCYLFWSSSKKGSKDKEAIQAYSESLMTSAPKGSVLQEAKL

SEQ ID NO: 53853 - protein, 103 aa, Homo sapiens
MSSMARAAFSEDGALMDGGMDLNMEQGMAEHLKDVILLTAIVQVLSCFSLYVWSFWLLAPGRALYLLWVNVLGPWFTADSGTPAPEHNEKRQRRQERRQMKRL

SEQ ID NO: 53854 - protein, 185 aa, Homo sapiens; identical to SEQ ID NO: 19927

SEQ ID NO: 53855 - protein, 337 aa, Homo sapiens
MVNAGAIVVSSLIKMDCNKAEKFDFVLQYLNKMAGNEYMGFSNATFQSEKETGDRNYAIGYYLKEKKCFPKGVDMMAALDLYFQLCSVEVTCESGSVMAATLANGGICPITGESVLSAEAVRNTLSLMHSCGMYDFSGQFAFHVGLPAKSAVSGAILLVVPNVMGMMCLSPPLDKLGNSHRGTSFCQKLVSLFNFHNYDNLRHCARKLDPRREGAEIRNKTVVNLLFAAYSGDVSALRRFALSAMDMEQKDYDSRTALHVAAAEGHIEVVKFLIEACKVNPFAKDRWGNIPLDDAVQFNHLEVVKLLQDYQDSYTLSETQAEAAAEALSKENLESMV

SEQ ID NO: 53856 - protein, 724 aa, Homo sapiens
MPLAQLKEPWPLMELVPLDPENGQTSGEEAGLQPSKDEGVLKEISITHHVKAGSEKADPSHFELLKVLGQGSFGKVFLVRKVTRPDSGHLYAMKVLKKATLKVRDRVRTKMERDILADVNHPFVVKLHYAFQTEGKLYLILDFLRGGDLFTRLSKEVMFTEEDVKFYLAELALGLDHLHSLGIIYRDLKPENILLDEEGHIKLTDFGLSKEAIDHEKKAYSFCGTVEYMAPEVVNRQGHSHSADWWSYGVLMGKDRKETMTLILKAKLGMPQFLSTEAQSLLRALFKRNPANRLGSGPDGAEEIKRHVFYSTIDWNKLYRREIKPPFKPAVAQPDDTFYFDTEFTSRTPKDSPGIPPSAGAHQLFRGFSFVATGLMEDDGKPRAPQAPLHSVVQQLHGKNLVFSDGYVVKETIGVGSYSECKRCVHKATNMEYAVKVIDKSKRDPSEEIEILLRYGQHPNIITLKDVYDDGKHVYLVTELMRGGELLDKILRQKFFSEREASFVLHTIGKTVEYLHSQGVVHRDLKPSNILYVDESGNPECLRICDFGFAKQLRAENGLLMTPCYTANFVAPEVLKRQGYDEGCDIWSLGILLYTMLAGYTPFANGPSDTPEEILTRIGSGKFTLSGGNWNTVSETAKDLVSKMLHVDPHQRLTAKQVLQHPWVTQKDKLPQSQLSHQDLQLVKGAMAATYSALNSSKPTPQLKPIESSILAQRRVRKLPSTTL

SEQ ID NO: 53857 - protein, 484 aa, Homo sapiens
MLFPISMSATEFLLASVIFCLVFWVIRASRPQVPKGLKNPPGPWGWPLIGHMLTLGKNPHLALSRMSQQYGDVLQIRIGSTPVVVLSGLDTIRQALVRQGDDFKGRPDLYTFTLISNGQSMSFSPDSGPVWAARRRLAQNGLKSFSIASDPASSTSCYLEEHVSKEAEVLISTLQELMAGPGHFNPYRYVVVSVTNVICAICFGRRYDHNHQELLSLVNLNAFKDLNEKFYSFMQKMVKEHYKTFEKGHIRDITDSLIEHCQEKQLDENANVQLSDEKIINIVLDLFGAGFDTVTTAISWSLMYLVMNPRVQRKIQEELDTVIGRSRRPRLSDRSHLPYMEAFILETFRHSSFVPFTIPHSTTRDTSLKGFYIPKGRCVFVNQWQINHDQKLWVNPSEFLPERFLTPDGAIDKVLSEKVIIFGMGKRKCIGETIARWEVFLFLAILLQRVEFSVPLGVKVDMTPIYGLTMKHACCEHFQMQLRS

SEQ ID NO: 53858 - protein, 413 aa, Homo sapiens
MASRSSDKDGDSVHTASEVPLTPRTNSPDGRRSSSDTSKSTYSLTRRISSLESRRPSSPLIDIKPIEFGVLSAKKEPIQPSVLRRTYNPDDYFRKFEPHLYSLDSNSDDVDSLTDEEILSKYQLGMLHFSTQYDLLHNHLTVRVIEARDLPPPISHDGSRQDMAHSNPYVKICLLPDQKNSKQTGVKRKTQKPVFEERYTFEIPFLEAQRRTLLLTVVDFDKFSRHCVIGKVSVPLCEVDLVKGGHWWKALIPSSQNEVELGELLLSLNYLPSAGRLNVDVIRAKQLLQTDVSQGSDPFVKIQLVHGLKLVKTKKTSFLRGTIDPFYNESFSFKVPQEELENASLVFTVFGHNMKSSNDFIGRIVIGQYSSGPSETNHWRRMLNTHRTAVEQWHSLRSRAECDRVSPASLEVT

SEQ ID NO: 53859 - protein, 342 aa, Homo sapiens
MSLMVVSMACVGFFLLQGAWPHEGVHRKPSLLAHPGPLVKSEETVILQCWSDVRFEHFLLHREGKYKDTLHLIGEHHDGVSKANFSIGPMMQDLAGTYRCYGSVTHSPYQLSAPSDPLDIVITGLYEKPSLSAQPGPTVLAGESVTLSCSSRSSYDMYHLSREGEAHERRFSAGPKVNGTFQADFPLGPATHGGTYRCFGSFRDSPYEWSNSSDPLLVSVTGNPSNSWPSPTEPSSKTGNPRHLHVLIGTSVVKIPFTILLFFLLHRWCSNKKNAAVMDQEPAGNRTVNSEDSDEQDPQEVTYTQLNHCVFTQRKITRPSQRPKTPPTDIIVYTELPNAESR

SEQ ID NO: 53860 - protein, 17 aa, Homo sapiens
  MOD_RES (1)..(1): Any amino acid
XNTGELFFGEGSRLTVL

SEQ ID NO: 53861 - protein, 203 aa, Homo sapiens
MKPASISEEELLNLINKLNNDDNVDGLLVQLPLPEHIDERRICNAVSPDKDVDGFHVINVGRMCLDQYSMLPATPWGVWEIIKRTGIPTLGKNVVVAGRSKNVGMPIAMLLHTDGAHERPGGDATVTISHRYTPKEQLKKHTILADIVISAAGIPNLITADMIKEGAAVIDVGINRVHDPVTAKPKLVGDVDFEDGSLTLLPR

SEQ ID NO: 53862 - protein, 153 aa, Homo sapiens
MNSRMRAHSPAEGASVESSSPGPKKSDMCEGCRSLAAGHPGYISHDKETSIKYVSHQHPSHPQLFSIVRQACVRSLSCEVCPGREGPIFFGDEQHGFVFSHTFFIKDSLARGFQRWYSIITIMMDRIYLINSWPFLLGKVRGIIDELQGKALK

SEQ ID NO: 53863 - protein, 395 aa, Homo sapiens
MEKSTDTDEDNVTRTEYSDKTTQFPSVYAVPGTEQTEAVGGLSSKPATPKTTTPPSSPPPTAVSPEFAYVPADPAQLAAQMLGKVSSIHSDQSDVLMVDVATSMPVVIKEVPSSEAAEDVMVAAPLVCSGKVLEVQVVNQTSVHVDLGSQPKENEAEPSTASSVPLQDEQEPPAYDQAPEVTLQADIEVMSTVHISSVYNDVPVTEGVVYIEQLPEQIVIPFTDQVACLKENEQSKENEQSPRVSPKSVVEKTTSGMSKKSVESVKLAQLEENAKYSSVYMEAEATALLSDTSLKGQPEVPAQLLDAEGAIKIGSEKSLHLEVEITSIVSDNTGQEESGENSVPQEMEGKPVLSGEAAEAVHSGTSVKSSSGPFPPAPEGLTAPEIEPEGESTAE

SEQ ID NO: 53864 - protein, 1318 aa, Homo sapiens
MQAQQLPYEFFSEENAPKWRGLLVPALKKVQGQVHPTLESNDDALQYVEELILQLLNMLCQAQPRSASDVEERVQKSFPHPIDKWAIADAQSAIEKRKRRNPLSLPVEKIHPLLKEVLGYKIDHQVSVYIVAVLEYISADILKLVGNYVRNIRHYEITKQDIKVAMCADKVLMDMFHQDVEDINILSLTDEEPSTSGEQTYYDLVKAFMAEIRQYIRELNLIIKVFREPFVSNSKLFSANDVENIFSRIVDIHELSVKLLGHIEDTVEMTDEGSPHPLVGSCFEDLAEELAFDPYESYARDILRPGFHDRFLSQLSKPGAALYLQSIGEGFKEAVQYVLPRLLLAPVYHCLHYFELLKQLEEKSEDQEDKECLKQAITALLNVQSGMEKICSKSLAKRRLSESACRFYSQQMKGKQLAIKKMNEIQKNIDGWEGKDIGQCCNEFIMEGTLTRVGAKHERHIFLFDGLMICCKSNHGQPRLPGASNAEYRLKEKFFMRKVQINDKDDTNEYKHAFEIILKDENSVIFSAKSAEEKNNWMAALISLQYRSTLERMLDVTMLQEEKEEQMRLPSADVYRFAEPDSEENIIFEENMQPKAGIPIIKAGTVIKLIERLTYHMYADPNFVRTFLTTYRSFCKPQELLSLIIERFEIPEPEPTEADRIAIENGDQPLSAELKRFRKEYIQPVQLRVLNVCRHWVEHHFYDFERDAYLLQRMEEFIGTVRGKAMKKWVESITKIIQRKKIARDNGPGHNITFQSSPPTVEWHISRPGHIETFDLLTLHPIEIARQLTLLESDLYRAVQPSELVGSVWTKEDKEINSPNLLKMIRHTTNLTLWFEKCIVETENLEERVAVVSRIIEILQVFQELNNFNGVLEVVSAMNSSPVYRLDHTFEQIPSRQKKILEEAHELSEDHYKKYLAKLRSINPPCVPFFGIYLTNILKTEEGNPEVLKRHGKELINFSKRRKVAEITGEIQQYQNQPYCLRVESDIKRFFENLNPMGNSMEKEFTDYLFNKSLEIEPRNPKPLPRFPKKYSYPLKSPGVRPSNPRPGTMRHPTPLQQEPRKISYSRIPESETESTASAPNSPRTPLTPPPASGASSTTDVCSVFDSDHSSPFHSRSASVSSISLTKGTDEVPVPPPVPPRRRPESAPAESSPSKIMSKHLDSPPAIPPRQPTSKAYSPRYSISDRTSISDPPESPPLLPPREPVRTPDVFSSSPLHLQPPPLGKKSDHGNAFFPNSPSPFTPPPPQTPSPHGTRRHLPSPPLTQEVDLHSIAGPPVPPRQSTSQHIPKLPPKTYKREHTHPSMHRDGPPLLENAHSS

SEQ ID NO: 53865 - protein, 61 aa, Homo sapiens
MAKNKLRGPKSRNVFHIASQKNFKAKNKAKPVTTNLKKIPQQRHESKPVNVDEATRLMALL

SEQ ID NO: 53866 - protein, 181 aa, Homo sapiens
MIRAFSFPVSPERGRLRGWLEGSLAGLCELHWLRERQEYRVQQALRLAQPGMGGAEAEDEEDADEDEDAAAARRAAAALEEQLEALPGLVWDLGQQLGDLSLESGGLEQESGRSSGFYEDPSSTGGPDSPPSTFCGDSGFSGSSSYGRLGPSEPRGIYASERPKSLGKVGEGGALGPGKGQ

SEQ ID NO: 53867 - protein, 44 aa, Homo sapiens
MATVELQLSKSSWRNGRFRSPWRQCVMRRVVGPCASSHLGALDC

SEQ ID NO: 53868 - protein, 340 aa, Homo sapiens
MAAAEDEFLPPPRLPELFDSSKQLLDEVEGATEPTGSRIVQEKVFKGLDLLDKVAKMLSQLDLFSRNEDLEEITSTDLKYLMVPAFQGALTMKQVNPRKRLDHLQQAREHFIKYLTQCHYYRVAEFELPQTKTNSAENHGAITSTAYPSLVAMASQRQAKIERYKQKKVLEHKLSTMKSAVESGQADNERVREYYLLHLQRWIDISLEEIESIDQEIKILGEKDSSREASTSNSCHQKRPPMKPFILTRNMAQAKVFGAGYPSLASMTVSDWYDQHQKHGVLPDQGIAKATPEEFRKATQQQEDQEKEEEDDEQTLQRAREWDDWKDTHPRGYGNRQNMG

SEQ ID NO: 53869 - protein, 236 aa, Homo sapiens
MSDPSQLTQNVCLTQEMELSKAFSGQRTLLSAILSMLSLSFSTTSLLSNYWFVGTQKVPKPLCEKGLAAKCFDMPVSLDGDTNTSTQEVVQYNWETGDDRFSFRSFRSGMWLSCEETVEEPGERCRSFIELTPPAKRGEKGLLEFATLQGPCHPTLRFGGKRLMEKASLPSPPLGLCGKNPMVIPGNADHLHRTSIHQLPPATNRLATHWEPCLWAQTERLCCCFLCPVRSPGDGG

SEQ ID NO: 53870 - protein, 218 aa, Homo sapiens
MVQHWPETVCEKIQNDCRDPPDYWTIHGLWPDKSEGCNRSWPFNLEEIKDLLPEMRAYWPDVIHSFPNRSRFWKHEWEKHGTCAAQVDALNSQKKYFGRSLELYRELDLNSVLLKLGIKPSINYYQVADFKDALARVYGVIPKIQCLPPSQDEEVQTIGQIELCLTKQDQQLQNCTEPGEQPSPKQEVWLANGAAESRGLRVCEDGPVFYPPPKKTKH

SEQ ID NO: 53871 - protein, 167 aa, Homo sapiens
MAMSYVKDDIFRIYIKEKKECRRDHRPPCAQEAPRNMVHPNVICDGCNGPVVGTRYKCSVCPDYDLCSVCEGKGLHRGHTKLAFPSPFGHLSEGFSHSRWLRKVKHGHFGWPGWEMGPPGNWSPRPPRAGEARPGPTAESASGPSEDPSVNFLKNVGESVAAALSPL

SEQ ID NO: 53872 - protein, 59 aa, Homo sapiens
MLGSGFKAERLRVNLRLVINRLKLLEKKKTELAQKARKEIADYLAAGKDERARIRVEHI

SEQ ID NO: 53873 - protein, 183 aa, Homo sapiens
MGKATGRKAPLWLRAKFQRLLFKLGCYIQKNCGKFLVVGLLIFGAFAVGLKAANLETNVEELWVEVGGRVSRELNYTRQKIGEEAMFNPQLMIQTPKEEGANVLTTEALLQHLDSALQASRVHVYMYNRQWKLEHLCYKSGELITETGYMDQIIEYLYPCLIITPLDCFWEGAKLQSGTAYLL

SEQ ID NO: 53874 - protein, 37 aa, Homo sapiens
MAAACGPGAAGYCLLLGLHLFLLTAGPALGWNDPVGM

SEQ ID NO: 53875 - protein, 184 aa, Homo sapiens
MPEGPELHLASQFVNEACRALVFGGCVEKSSVSRNPEVPFESSAYRISASARGKELRLILSPLPGAQPQQEPLALVFRFGMSGSFQLVPREELPRHAHLRFYTAPPGPRLALCFVDIRRFGRWDLGGKWQPGRGPCVLQEYQQFRENVLRNLADKAFDRPICEALLDQRFFNGIGNYLRAEILY

SEQ ID NO: 53876 - protein, 143 aa, Homo sapiens
MPFGCVTLGDKKNYNQPSEVTDRYDLGQVIKTEEFCEIFRAKDKTTGKLHTCKKFQKRDGRKVRKAAKNEIGILKMVKHPNILQLVDVFVTRKEYFIFLELATTRSETQATWYGKSWRPWPICTHSRSCTGISSWRTWFTTTG

SEQ ID NO: 53877 - protein, 71 aa, Homo sapiens
MGRDKVREMFMKNAHVTDPRVVDLLVIKGKIELEETIKVWKQRTHVMRFFHETEAPRPKDFLSKFYVGHDP

SEQ ID NO: 53878 - protein, 591 aa, Homo sapiens
MSLENEDKRARTRSKALRGPPETTAADLSCPTPGCTGSGHVRGKYSRHRSLQSCPLAKKRKLEGAEAEHLVSKRKSHPLKLALDEGYGVDSDGSEDTEVKDASVSDESEGTLEGAEAETSGQDEIHRPETAEDPSRAEKREIKCPTPGCDGTGHVTGLYPHHRSLSGCPHKDRIPPEILAMHENVLKCPTPGCTGQGHVNSNRNTHRSLSGCPIAAAEKLAKSHEKQQPQTGDPSKSSSNSDRILRPMCFVKQLEVPPYGSYRPNVAPATPRANLAKELEKFSKVTFDYASFDAQVFGKRMLAPKIQTSETSPKAFQCFDYSQDAEAAHMAATAILNLSTRCWEMPENLSTKPQDLPSKSVDIEVDENGTLDLSMHKHRKRENAFPSSSSCSSSPGVKSPDASQRHSSTSAPSSSMTSPQSSQASRQDEWDRPLDYTKPSRLREEEPEESEPAAHSFASSEADDQEVSEENFEERKYPGEVTLTNFKLKFLSKDIKKELLTCPTPGCDGSGHITGNYASHRRCPTPGCDGSGHITGNYASHRSLSGCPRAKKSGVKVAPTKDDKEDPELMKYVGPCWLFHCIAELRFSCVL

SEQ ID NO: 53879 - protein, 77 aa, Homo sapiens
MSLDIQSLDIQCEELSDARWAELLPLLQQCQVVRLDDCGLTEARCKDISSALRVNPALAELNLRSNELGDVGCPTAV

SEQ ID NO: 53880 - protein, 664 aa, Homo sapiens
MPPRAPPAPGPRPPPRAAAATDTAAGAGGAGGAGGAGGPGFRPLAPRPWRWLLLLALPAACSAPPPRPVYTNHWAVQVLGGPAEADRVAAAHGYLNLGQIGNLEDYYHFYHSKTFKRSTLSSRGPHTFLRMDPQVKWLQQQEVKRRVKRQVRSDPQALYFNDPIWSNMWYLHCGDKNSRCRSEMNVQAAWKRGYTGKNVVVTILDDGIERNHPDLAPNYDSYASYDVNGNDYDPSPRYDASNENKHGTRCAGEVAASANNSYCIVGIAYNAKIGGIRMLDGDVTDVVEAKSLGIRPNYIDIYSASWGPDDDGKTVDGPGRLAKQAFEYGIKKGRQGLGSIFVWASGNGGREGDYCSCDGYTNSIYTISVSSATENGYKPWYLEECASTLATTYSSGAFYERKIVTTDLRQRCTDGHTGTSVSAPMVAGIIALALEANSQLTWRDVQHLLVKTSRPAHLKASDWKVNGAGHKVSHFYGFGLVDAEALVVEAKKWTAVPSQHMCVAASDKRPRSIPLVQVLRTTALTSACAEHSDQRVVYLEHVVVRTSISHPRRGDLQIYLVSPSGTKSQLLAKRLLDLSNEGFTNWEFMTVHCWGEKAEGQWTLEIQDLPSQVRNPEKQGDLETPVANQLTTEERFVSTLSILFHWSVYLSWSQYHIVLITVAL

SEQ ID NO: 53881 - protein, 274 aa, Homo sapiens
MDLFGDLPEPERSPRPAAGKEAQKGPLLFDDLPPASSTDSGSGGPLLFDDLPPASSGDSGDVISVEKTVKRCLLDTFKHTDEEFLKQASSQKPAWKDGSTATCVLAVDNILYIANLGDSRAILCRYNEESQKHAALSLSKEHNPTQYEERMRIQKAGGNVRDGRVLGVLEVSRSIGDGQYKRCGVTSVPDIRRCQLTPNDRFILLACDGLFKVFTPEEAVNFILSCLEDEKIQTREGKSAADARYEAACNRLANKAVQRGSADNVTVMVVRIGH

SEQ ID NO: 53882 - protein, 168 aa, Homo sapiens
MEEEAEKLKELQNEVEKQMNMSPPPGNAGPVIMSIEEKMEADARSIYVGNVDYGATAEELEAHFHGCGSVNRVTILCDKFSGHPKGFAYIEFSDKESVRTSLALDESLFRGRQIKVIPKRTNRPGISTTDRGFPRARYRARTTNYNSSRSRFYSGFNSRPRGRVYRSG

SEQ ID NO: 53883 - protein, 171 aa, Homo sapiens
MWRCGGRQGLCVLRRLSGGHAHHRAWRWNSNRACERALQYKLGDKIHGFTVNQVTSVPELFLTAVKLTHDDTGARYLHLAREDTNNLFSVQFRTTPMDSTGVPHILEHTVLCGSQKYPCRDPFFKMLNRSLSTFMNAFTGLSESPLGVFGCHLFPMFTRAGFLAGRMAAGT

SEQ ID NO: 53884 - protein, 120 aa, Homo sapiens
MDEPSPLAQPLELNQHSRFIIGSVSEDNSEDEISNLVKLDLLEEKEGSLSPASVGSDTLSDLGISSLQDGLALHIRSSMSGLHLVKQGRDRKKIDSQRDFTVASPAEFVTRFGGNKVIEK

SEQ ID NO: 53885 - protein, 291 aa, Homo sapiens
MTTAKEPSASGKSVQQQEQELVGSNPPQRNWKGIAIALLVILVICSLIVTSVILLTPAEDNSLSQKKKVTVEDLFSEDFKIHDPEAKWISDTEFIYREQKGTVRLWNVETNTSTVLIEGKKIESLRAIRYEISPDREYALFSYNVEPMKKVKSRKLTLPHSKSCDSLAVSQACSPACHQGCFLHYITMSLPLHCLRDYVSAVNGYSTALPACHVQGGPVSDIPWRPWLEDCRRVPGGRTANGTRLRSHAPAALRQHCPLSYECGRCEASHLLTPGIMHSSYRQISGQRATE

SEQ ID NO: 53886 - protein, 28 aa, Homo sapiens
MQALVLLLCIGALLGHSSCQNPASPPEE

SEQ ID NO: 53887 - protein, 154 aa, Homo sapiens
MVKLTAELIEQAAQYTNAVRDRELDLRGYKIPVIENLGATLDQFDAIDFSDNEIRKLDGFPLLRRLKTLLVNNNRICRIGEGLDQALPCLTELILTNNSLVELGDLDPLASLKSLTYLSILRNPVTNKKHYRLYVIYKVPQVRVLDFQKVKLKF

SEQ ID NO: 53888 - protein, 109 aa, Homo sapiens
MAAEADGPLKRLLVPILLPEKCYDQLFVQWDLLHVPCLKILLSKGLGLGIVAGSLLVKLPQVFKILGAKSAEGLSLQSVMLELVALTGTMVYSITNNFPFRPAFLPPNS

SEQ ID NO: 53889 - protein, 153 aa, Homo sapiens
MLVSLKMSYKAAAGEDYKADCPPGNPAPTSNHGPDATEAEEDFVDPWTVQTSSAKGIDYDKLIVRFGSSKIDKELINRIERATGQRPHHFLRRGIFFSHRDMNQVLDAYENKKPFYLYTGRGPSSEAMHVGHLIPFIFTKWLQDVFNVPLVIQ

SEQ ID NO: 53890 - protein, 152 aa, Homo sapiens
MNGRVDYLVTEEEINLTRGPSGLGFNIVGGTDQQYVSNDSGIYVSRIKENGAAALDGRLQEGDKILSVNGQDLKNLLHQDAVDLFRNAGYAVSLRVQHRMDPELEKKLKENKISLESEYEKIKDSKFDDWKNIRGPRPWEDPDLLQGRNPES

SEQ ID NO: 53891 - protein, 535 aa, Homo sapiens
MAAVATCGSVAASTGSAVATASKSNVTSFQRRGPRASVTNDSGPRLVSIAGTRPSVRNGQLLVSTGLPALDQLLGGGLAVGTVLLIEEDKYNIYSPLLFKYFLAEGIVNGHTLLVASAKEDPANILQELPAPLLDDKCKKEFDEDVYNHKTPESNIKMKIAWRYQLLPKMEIGPVSSSRFGHYYDASKRMPQELIEASNWHGFFLPEKISSTLKVEPCSLTPGYTKLLQFIQNIIYEEGFDGSNPQKKQRNILRIGIQNLGSPLWGDDICCAENGGNSHSLTKFLYVLRGLLRTSLSACIITMPTHLIQNKAIIARVTTLSDVVVGLESFIGSERETNPLYKDYHGLIHIRQIPRLNNLICDESDVKDLAFKLKRKLFTIEAGVQWHDLGSRQPRLLGSSNSPASASLVAGITGAHHHTQLIFVFLVEMGFHHVGQAGLELLTSGDSSASASQSAGITGMSYRARPRALYFKENKSKVGARQLLETREEHLSSRLLILTQAERLCMGRRFFTAFHIFNELPCKGDCICLQTCQTQ

SEQ ID NO: 53892 - protein, 75 aa, Homo sapiens
MSKLGRAARGLRKPEVGGVIRAIVRAGLAMPGPPLGPVLGQRGVSINQFCKEFNERTKDIKEGIPLPTKILVKDI

SEQ ID NO: 53893 - protein, 401 aa, Homo sapiens
MEPQGTLDITQQDTAKGDQLERISNGPVLTLGGSSVSSIQEASNAATQQFSGTDLLNGPLASSLNSDVPQQRPSVVVSPHSTTSVIQGHQIIAVPDSGSKVSHSPALSSDVRSTNGTAECKTVKRPAEDTDRETVAGIPNKVGVRIVTISDPNNAGCSATMVAVPAGADPSTVAKVAIESAVQQKQQHPPTYVQNVVPQNTPMPPSPAVQVQGQPNSSQPSPFSGSSQPGDPMRKPGQNFMCLWQSCKKWFQTPSQVFYHAATEHGGKDVYPGQCLWEGCEPFQRQRFSFITHLQDKHCSKDALLAGLKQDEPGQAGSQKSSTKQPTVGGTSSTPRAQKAIVNHPSAALMALRRGSRNLVFRDFTDEKEGPITKHIRLTAALILKNIGKYSECGRRNMNED

SEQ ID NO: 53894 - protein, 128 aa, Homo sapiens
MSLLGPKVLLFLAAFIITSDWIPLGVNSQRGDDVTQATPETFTEDPNLVNDPATDETVLAVLADIAPSTDDLECWDEKFTCTRLYSVHRPVKQCIHQLCFTSLRRMYIVNKEICSRLVCKEHEAMKDP

SEQ ID NO: 53895 - protein, 385 aa, Homo sapiens
MDLLPTSILLASLWICSHLHPPGVSVDLPPTSILLVSLWICSHLHPPGVSVDRPPPPSSWCLCGSPPTSILLVSLWICSPPPSSWCLCGSAPTSILLVSLWIWRLWGLTEGESWFFRWLPGKKKTEAYLPDDKNKSIVWDEKKNQWVNLNEPEEEKKAPPPPPTSMPKTVQAAPPALPGPPGAPVNMYSRRAAGTRARYVDVLNPSGTQRSEPALAPADFVAPLAPLPIPSNLFVPTPVSSVRPQGRSGRNDGLLALSSPDAEEPQLPDGTGREGPAAARGLANPEPAPEPKVLSSAASLPGSELPSSRPEGSQGGELSRCSSMSSLSREVSQHFNQAPGDLPAAGGPPSGAMPFYNPAQLAQACATSGSSRLGRIGQRKHLVLN

SEQ ID NO: 53896 - protein, 290 aa, Homo sapiens
MDVRALPWLPWLLWLLCRGGGDADSRAPFTPTWPRSREREAAAFRESLNRHRYLNSLFPSENSTAFYGINQFSYLFPEEFKAIYLRSKPSKFPRYSAEVHMSIPNVSLPLRFDWRDKQVVTQVRNQQMCGGCWAFSVVGAVESAYAIKGKPLEDLSVQQVIDCSYNNYGCNGGSTLNALNWLNKMQVKLVKDSEYPFKAQNGLCHYFSGSHSGFSIKGYSAYDFSDQEDEMAKALLTFGPLVVIVDAVSWQDYLGGIIQHHCSSGEANHAVLITGFDKTGIADSVSSIFV

SEQ ID NO: 53897 - protein, 166 aa, Homo sapiens
  MOD_RES (1)..(1): Any amino acid
XPRRFEFCAAGVRWFSELCPRLPRAGARERVRGFLTQTRVRSAQSPEMESSSSDYYNKDNEEESLLANVASLRHELKITEWSLQSLGEELSSVSPSENSDYAPNPSRSEKLILDVQPSHPGLLNYSPYENVCKISGSSTDFQKKPRDKMFSSSAPVDQEIKSLREK

SEQ ID NO: 53898 - protein, 1445 aa, Homo sapiens
MRGMEILGNLCKAEDNGVLICEYVDQDSYREIICHLTLPDVLLVISTLEVLYMLTEMGDVACTKIAKVEKSIAAVKLIEHPSSSHQMLSEIRPQAIEQVQTQTHVASAPASRAVVAQHVAPPPGIVEIDSEKFACQWLNAHFEVNPDCSVSRAEMYSEYLSTCSKLARGGILTSTGFYKCLRTVFPNHTVKRVEDSSSNGQAHIHVVGVKRRAIPLPIQMYYQQQPVSTSVVRVDSVPDVSPAPSPAGIPHGSQTIGNHFQRTPVANQSSNLTATQMSFPVQGVHTVAQTVSRIPQNPSPHTHQQQNAPVTVIQSKAPIPCEVVKATVIQNSIPQTGVPVSIAVGGGPPQSSVVQNHSTGPQPVTVVNSQTLLHHPSVIPQQSPLHTVVPGQIPSGTPVTVIQQAVPQSHMFGRVQNIPACTSTVSQGQQLITTSPQPVQTSSQQTSAGSQSQDTVIIAPPQYVTTSASNIVSATSVQNFQVATGQMVTIAGVPSPQASRVGFQNIAPKPLPSQQVSSTVVQQPIQQPQQPTQQSVVIVSQPAQQGQTYAPAIHQIVLANPAALPAGQTVQLTGQPNITPSSSPSPVPATNNQVPTAMSSSSTPQSQGPPPTVSQMLSVKRQQQQQHSPAPPPQQVQVQVQQPQQVQMQVQPQQSNAGVGQPASGESSLIKQLLLPKRGPSTPGGKLILPAPQIPPPNNARAPSPQVVYQVASNQAAGFGVQGQTPAQQLLVGQQNVQLVPSAMPPSGGVQTVPISNLQILPGPLISNSPATIFQGTSGNQVTITVVPNTSFAPATVSQGNATQLIAPAGITMSGTQTGVGLPVQTLPATQASPAGQSSCTTATPPFKGDKIICQKEEEAKEATGLHVHERKIEVMENPSCRRGATNTSNGDTKENEMHVGSLLNGRKYSDSSLPPSNSGKIQSETNQCSLISNGPSLELGENGASGKQNSEQIDMQDIKSDLRKPLVNGICDFDKGDGSHLSKNIPNHKTSNHVGNGEISPMEPQGTLDITQQDTAKGDQLERISNGPVLTLGGSSVSSIQEASNAATQQFSGTDLLNGPLASSLNSDVPQQRPSVVVSPHSTTSVIQGHQIIAVPDSGSKVSHSPALSSDVRSTNGTAECKTVKRPAEDTDRETVAGIPNKVGVRIVTISDPNNAGCSATMVAVPAGADPSTVAKVAIESAVQQKQQHPPTYVQNVVPQNTPMPPSPAVQVQGQPNSSQPSPFSGSSQPGDPMRKPGQNFMCLWQSCKKWFQTPSQVFYHAATEHGGKDVYPGQCLWEGCEPFQRQRFSFITHLQDKHCSKDALLAGLKQDEPGQAGSQKSSTKQPTVGGTSSTPRAQKAIVNHPSAALMALRRGSRNLVFRDFTDEKEGPITKHIRLTAALILKNIGKYSECGRRLLKRHENNLSVLAISNMEASSTLAKCLYELNFTVQSKEQEKDSEMLQ

SEQ ID NO: 53899 - protein, 129 aa, Homo sapiens
  MOD_RES (1)..(1): Any amino acid
XVNVLEWIHGLSLFLRGSLEEKMKYCFEVFDLNGDGFISKEEMFHMLKNSLLKQPSEEDPDEGIKDLVEITLKKMDHDHDGKLSFADYELAVREETLLLEAFGPCLPDPKSQMEFEAQVFKDPNEFNDM

SEQ ID NO: 53900 - protein, 98 aa, Homo sapiens
MAAGELEGGKPLSGLLNALAQDTFHGYPGITEELLRSQLYPEVPPEEFRPFLAKMRGILKTGSCCVAQDRVQWVFIGTIMAHRGLELLGSSDSPASAS

SEQ ID NO: 53901 - protein, 77 aa, Homo sapiens
  MOD_RES (1)..(1): Any amino acid
XVHIMQHHVLPIQARLGSIAEIDLGVPPPVMKTFKEFLLSLDDSVDETEAVKRYNDYKLDFRRQQMQDFFLAHKDEE

SEQ ID NO: 53902 - protein, 747 aa, Homo sapiens
MELFQAKDHYILQQGERALWCSRRDGGLQLRPATDLLLAWNPICLGLVEGVIGKIQLHSDLPWWLILIRQKALVGKLPGDHEVCKVTKIAVLSLSEMEPQDLELELCKKHHFGINKPEKIIPSPDDSKFLLKTFTHIKSNVSAPNKKKVKESKEKEKLERRLLEELLKMFMDSESFYYSLTYDLTNSVQRQSTGERDGRPLWQKVDDRFFWNKYMIQDLTEIGTPDVDFWIIPMIQGFVQIEELVVNYTESSDDEKSSPETPPQESTCVDDIHPRFLVALISRRSRHRAGMRYKRRGVDKNGNVANYVETEQLIHVHNHTLSFVQTRGSVPVFWSQVGYRYNPRPRLDRSEKETVAYFCAHFEEQLNIYKKQVIINLVDQAGREKIIGDAYLKQVLLFNNSHLTYVSFDFHEHCRGMKFENVQTLTDAIYDIILDMKWCWVDEAGVICKQEGIFRVNCMDCLDRTNVVQAAIARVVMEQQLKKLGVMPPEQPLPVKCNRIYQIMWANNGDSISRQYAGTAALKGDFTRTGERKLAGVMKDGVNSANRYYLNRFKDAYRQAVIDLMQGIPVTEDLYSIFTKEKEHEALHKENQRSHQELISQLLQSYMKLLLPDDEKFHGGWALIDCDPSLIDATHRDVDVLLLLSNSAYYVAYYDDEVDKVNQYQRLSLENLEKIEIGPEPTLFGKPKFSCMRLHYRYKEASGYFHTLRAVMRNPEEDGKGRAVNLTKTSLVSGLKTKVLWPRERIF

SEQ ID NO: 53903 - protein, 165 aa, Homo sapiens
MTGRARARARGRARGQETAQLVGSTASQQPGYIQPRPQPPPAEGELFGRGRQRGTAGGTAKSQGLQISAGFQELSLAERGGRRRDFHDLGVNTRQNLDHVKESKTGSSGIIVRLSTNHFRLTSRPQWALYQYHIDYNPLMEARRLRSALLFQHEDLIGKCHAFDG

SEQ ID NO: 53904 - protein, 153 aa, Homo sapiens
MQRLQVVLGHLRGPADSGWMPQAAPCLSGAPQASAADVVVVHGRRTAICRAGRGGFKDTTPDELLSAVMTAVLKDVNLRPEQLGDICVGNVLQPGAGAIMARIAQFLSDIPETVPLSTVNRQCSSGLQAVASIAGWSPCPWLTEGTLEILLRA

SEQ ID NO: 53905 - protein, 184 aa, Homo sapiens
LPAVSLTGMDDIPGLLPPPPVGRHQTGGGVEILLEKRLLGHGLGMAGQWLARKQEIIKTTEQLIEAVNNGDFEAYAKICDPGLTSFEPEALGNLVEGMDFHRFYFENLLAKNSKPIHTTILNPHVHVIGEDAACIAYIRLTQYIDGQGRPRTSQSEETRVWHRRDGKWQNVHFHCSGAPVAPLQ

SEQ ID NO: 53906 - protein, 447 aa, Homo sapiens
MKVLLRLICFIALLISSLEADKCKEREEKIILVSSANEIDVRPCPLNPNEHKGTITWYKDDSKTPVSTEQASRIHQHKEKLWFVPAKVEDSGHYYCVVRNSSYCLRIKISAKFVENEPNLCYNAQAIFKQKLPVAGDGGLVCPYMEFFKNENNELPKLQWYKDCKPLLLDNIHFSGVKDRLIVMNVAEKHRGNYTCHASYTYLGKQYPITRVIEFITLEENKPTRPVIVSPANETMEVDLGSQIQLICNVTGQLSDIAYWKWNGSVIDEDDPVLGEDYYSVENPANKRRSTLITVLNISEIESRFYKHPFTCFAKNTHGIDAAYIQLIYPVTNFQKHMIGICVTLTVIIVCSVFIYKIFKIDIVLWYRDSCYDFLPIKASDGKTYDAYILYPKTVGEGSTSDCDIFVFKVLPEVLEKQCGYKLFIYGRDDYVGEGMCVMEQSKGLLL

SEQ ID NO: 53907 - protein, 52 aa, Homo sapiens
MTTRQATKDPLLRGVSPTPSKIPVRSQKRTPFPTVTSCAVDQENQDPRVRGA

SEQ ID NO: 53908 - protein, 40 aa, Homo sapiens
MLLLADMDVVNQLVAGGQFRVVKEPLGFVKVLQWAAPSVL

SEQ ID NO: 53909 - protein, 1052 aa, Homo sapiens
MAPAGVVTRAVRSGELPLTSMASAENEACAVRSVACPSQAWRLQKVLCGRCGAASCPSQTWRPRGAGSGGVRMGSRADGPRTSGHVTGKMAVFPWHSRNRNYKAEFASCRLEAVPLEFGDYHPLKPITVTESKTKKVNRKGSTSSTSSSSSSSVVDPLSSVLDGTDPLSMFAATADPAALAAAMDSSRRKRDRDDNSVVGSDFEPWTNKRGEILARYTTTEKLSINLFMGSEKGKAGTATLAMSEKVRTRLEELDDFEEGSQKELLNLTQQDYVNRIEELNQSLKDAWASDQKVKALKIVIQCSKLLSDTSVIQFYPSKFVLITDILDTFGKLVYERIFSMCVDSRSVLPDHFSPENANDTAKETCLNWFFKIASIRELIPRFYVEASILKCNKFLSKTGISECLPRLTCMIRGIGDPLVSVYARAYLCRVGMEVAPHLKETLNKNFFDFLLTFKQIHGDTVQNQLVVQGVELPSYLPLYPPAMDWIFQCISYHAPEALLTEMMERCKKLGNNALLLNSVMSAFRAEFIATRSMDFIGMIKECDESGFPKHLLFRSLGLNLALADPPESDRLQILNEAWKVITKLKNPQDYINCAEVWVEYTCKHFTKREVNTVLADVIKHMTPDRAFEDSYPQLQLIIKKVIAHFHDFSVLFSVEKFLPFLDMFQKESVRVEVCKCIMDAFIKHQQEPTKDPVILNALLHVCKTMHDSVNALTLEDEKRMLSYLINGFIKMVSFGRDFEQQLSFYVESRSMFCNLEPVLVQLIHSVNRLAMETRKVMKGNHSRKTAAFVRACVAYCFITIPSLAGIFTRLNLYLHSGQVALANQCLSQADAFFKAAISLVPEVPKMINIDGKMRPSESFLLEFLCNFFSTLLIVPDHPEHGVLFLVRELLNVIQDYTWEDNSDEKIRIYTCVLHLLSAMSQETYLYHIDKVDSNDSLYGGDSKFLAENNKLCETVMAQILEHLKTLAKDEALKRQSSLGLSFFNSILAHGDLRNNKLNQLSVNLWHLAQRHGCADTRTMVKTLEYIKKQSKQPDMTHLTELALRLPLQTRT

SEQ ID NO: 53910 - protein, 448 aa, Homo sapiens
MEGENSLDDFEDKVFYRTEFQNREFKATMCNLLAYLKHLKGQNEAALECLRKAEELIQQEHADQAEIRSLVTWGNYAWVYYHMGRLSDVQIYVDKVKHVCEKFSSPYRIESPELDCEEGWTRLKCGGNQNERAKVCFEKALEKKPKNPEFTSGLAIASYRLDNWPPSQNAIDPLRQAIRLNPDNQYLKVLLALKLHKMREEGEEEGEGEKLVEEALEKAPGVTDVLRSAAKFYRRKDEPDKAIELLKKALEYIPNNAYLHCQIGCCYRAKVFQVMNLRENGMYGKRKLLELIGHAVAHLKKADEANDNLFRVCSILASLHALADQYEDAEYYFQKEFSKELTPVAKQLLHLRYGNFQLYQMKCEDKAIHHFIEGVKINQKSREKEKMKDKLQKIAKMRLSKNGADSEALHVLAFLQELNEKMQQADEDSERGLESGSLIPSASSWNGE

SEQ ID NO: 53911 - protein, 85 aa, Homo sapiens
MKMWLLVSHLVIISITTCLAEFTWYRRYGHGVSEEDKGFGPIFEEQPINTIYPEESLEGKVSLNCRARASPFPVYKWRMNNGDVD

SEQ ID NO: 53912 - protein, 44 aa, Homo sapiens
MGKKGKKEKKGRGAEKTAAKMEKKVSKRSRKEERANNHHSSPEQ

SEQ ID NO: 53913 - protein, 97 aa, Homo sapiens
GGPAQGTRGDSRGHTTAPRSRELVSYPKLKLKIMIRDKLVRDGIHLSKPPYSRKVLLCRYLQEVICVLFIGAVNLIISIPRYYRMTIRRCIDISLDT

SEQ ID NO: 53914 - protein, 288 aa, Homo sapiens
ANLLIFILLLTLTILTIWLFKHRRARFLHETGLAMIYGLLVGLVLRYGIHVPSDVNNVTLSCEVQSSPTTLLVNVSGKFYEYMLKGEISSHELNNVQDNEMLRKVTFDPEVFFNILLPPIIFYAGYSLKRRHFFRNLGSILAYAFLGTAISCFVIGSIMYGCVTLMKVTGQLAGDFYFTDCLLFGAIVSATDPVTVLAIFHELQVDVELYALLFGESVLNDAVAIVLSSSIVAYQPAGDNSHTFDVTAMFKSIGIFLGIFSGSFAMGAATGVVTALISFCYIYLFLLT

SEQ ID NO: 53915 - protein, 98 aa, Homo sapiens
MTIVDKASESSDPSAYQNQPGSSEAVSPGDMDAGSASWGAVSSLNDVSNHTLSLGPVPGAVVYSSSSVPDKSKPSPQKDQVETGVHHVSQDGLDLLTS

SEQ ID NO: 53916 - protein, 57 aa, Homo sapiens
MPAKPFLSSVLLSWKVLDFSGPGPQGTGQPCSCGHWAEGQGGPPEPAGGPVSQGSSD

SEQ ID NO: 53917 - protein, 447 aa, Homo sapiens
MMLSRAKPAVGRGVQHTDKRKKKGRKIPKLEELLSKRDFTGAITLLEFKRHVGEEEEDTNLWIGYCAFHLGDYKRALEEYENATKEENCNSEVWVNLACTYFFLGMYKQAEAAGFKASKSRLQNRLLFHLAHKAELKSLMDNASSSFEFAKELIRHNLVVFRGGEGALQVLPPLVDVIPEARLNLVIYYLRQDVQEAYNLIKDLEPTTPQEYILKGVVNAALGQEMGSRDHMKIAQQFFQLVGGSASECDTIPGRQCMASCFFLLKQFDDVLIYLNSFKSYFYNDDIFNFNYAQAKAATGNTSEGEEAFLLIQSEKMKNDYIYLSWLARCYIMNKKPRLAWELYLKMETSGESFSLLQLIANDCYKMGQFYYSAKAFDVLERLDPNPEYWEGKRGACVGIFQMIIAGREPKETLREVLHLLRSTGNTQVEYMIRIMKKWAKENRVSI

SEQ ID NO: 53918 - protein, 342 aa, Homo sapiens
MTGWVHDVLGRNWACFTGKKVGTASENVYVNIAHLKNSQEKYSNRLYKYDHNFVKAINAIQKSWTATTYMEYETLTLGDMIRRSGGHSRKIPRPKPAPLTAEIQQKILHLPTSWDWRNVHGINFVSPVRNQASCGSCYSFASMGMLEARIRILTNNSQTPILSPQEVVSCSQYAQGCEGGFPYLIAGKYAQDFGLVEEACFPYTGTDSPCKMKEDCFRYYSSEYHYVGGFYGGCNEALMKLELVHHGPMAVAFEVYDDFLHYKKGIYHHTGLRDPFNPFELTNHAVLLVGYGTDSASGMDYWIVKNSWGTGWGENGYFRIRRGTDECAIESIAVAATPIPKL

SEQ ID NO: 53919 - protein, 97 aa, Homo sapiens
DSSGEDIVTKLLDLKEPTWKQWREFLVKYSFLPYQLIAEFAWDWLEVHYWTSRFLIINAMLLSVLELFSFWRIWSRSELNVNTAGVRCHLGRQALQK

SEQ ID NO: 53920 - protein, 136 aa, Homo sapiens
  MOD_RES (1)..(1): Any amino acid
XRMSRGVNPSLVSWLTTMMGLRLQVVLEHMPVGPDAILRYVRRVGDPPQPLPEEPMEVQGAERASPEPQEWVPIIQQDIQSQRKVKPQPPLSDAYLSGMPAKRRKLRSDIQKRLQEDPNYSPQRFPNAQRAFADDP

SEQ ID NO: 53921 - protein, 209 aa, Homo sapiens
MTPKSKLGLAPNKFFMAIPFIRPLRDWLSRRFGDSSDSDNGFSSTGSTPAKPTVEKLSRTKFRHSQQLFPDGSPGDQWVKHRQPLQQKPYNNHSEMSDLLKGKNQSMRGNGRKQYQDSPNQKKRTNGLQPAKQQNSLMKCEKKLHPRKLQDNFETDAVYDLPSSSEDQLLEHAEGQPVACNGHCKFPFSSRAFLSFKFDHNAIMKILDL

SEQ ID NO: 53922 - protein, 113 aa, Homo sapiens
  MOD_RES (1)..(1): Any amino acid
XKLLGDYLGLCRSGALKELSKRLNHRNYLLESPHRFSVADLQQHVYHCDLCTQRGFICQICQHHDIIFPFEFDTTVRCAECKTVFHQSCQAVVKKGCPRCARRRKYQEQNIFA

SEQ ID NO: 53923 - protein, 375 aa, Homo sapiens
MLQRIGLIFLHNIVVVSNCFYFQAFLDEFTNWSRINPNKARIPMAGDTQGVVGTVSKPCFTAYEMKIGAITFQVATGDIATEQVDVIVNSTARTFNRKSGVSRAILEGAGQAVESECAVLAAQPHRDFIITPGGCLKCKIIIHVPGGKDVRKTVTSVLEECEQRKYTSVSLPAIGTGNLPEHWTDMNHQLFCMVQLEPGQSEYNTIKDKFTRTCSSYAIEKIERIQNAFLWQSYQVKKRQMDIKNDHKNNERLLFHGTDADSVPYVNQHGFNRSCAGKNAVSYGKGTYFAVDASYSAKDTYSKPDSNGRKHMYVVRVLTGVFTKGRAGLVTPPPKNPHNPTDLFDSVTNNTRSPKLFVVFFDNQAYPEYLITFTA

SEQ ID NO: 53924 - protein, 64 aa, Homo sapiens
MRDRTHELRQGDDSSDEEDKERVALVVHPGTARLGSPDEEFFHKPSRSPSPGPDNSADYCQTGE

SEQ ID NO: 53925 - protein, 94 aa, Homo sapiens
PEDVLPALQLPAPSAECQVEMGFHHVGQDGLQLPTSSDPPALASQSAGITGVSHRPPGRHLSNDLRTTTMPASPVGSSIGQTSTTLPSCPQRQT

SEQ ID NO: 53926 - protein, 102 aa, Homo sapiens
  MOD_RES (1)..(1): Any amino acid
XRIQVDAYFSPIHSQLDHLLDPSSFTGRASQQVQRFLEEEVYPLLKPYESVMKCKQVPLDKNVVCVIPCCISNSKSTSDTWQLGSLPASATAPDFLVAWIYS

SEQ ID NO: 53927 - protein, 113 aa, Homo sapiens
MTLAESYAQYVHNLCNSLSIKVEESYAMPTKTIEVLQLQDQGSKMLLDSVLTTHERVVQISGLSATFAEIFLEIIQSSLPEGVRLSVKEHTEEDFKGRFKARPELEELLAKLK

SEQ ID NO: 53928 - protein, 262 aa, Homo sapiens
MEHFDASLSTYFKALLGPRDTRVKGWFLLDNYIPTFICSVIYLLIVWLGPKYMRNKQPFSCRGILVVYNLGLTLLSLYMFCELVTGVWEGKYNFFCQGTRTAGESDMKIIRVLWWYYFSKLIEFMDTFFFILRKNNHQITVLHVYHHASMLNIWWFVMNWVPCGHSSVCADNHPDQLRGHLAVHIPSWLVVFPDWIHDFPDCSLHKLLHSDLQQERGLPKERPPEGPPEWVHGCCEWTHQQLFTPGKQCEAKEAAEGLKSKN

SEQ ID NO: 53929 - protein, 285 aa, Homo sapiens
MADPDPRYPRSSIEDDFNYGSSVASATVHIRMVLQRDCTFSKQYMRIPSAPSATLNIIRFFHLRQSGRSGMVNIFYKGPTFLRKVYSILSLQVLLTTVTSTVFLYFESVRTFVHESPALILLFALGSLGLIFALILNRHKYPLNLYLLFGFTLLEALTVAVVVTFYDVYIILQAFILTTTVFFGLTVYTLQSKKDFSKFGAGLFALLWILCLSGFLKFFFYSEIMELVLAAAGALLFCGFIIYDTHSLMHKLSPEEYVLAAISLYLDIINLFLHLLRFLEAVNKK

SEQ ID NO: 53930 - protein, 180 aa, Homo sapiens
  MOD_RES (1)..(1): Any amino acid
XDAYKSQLSCVVVDDIERLLDYVPIGPRFSNLVLQALLVLLKKAPPQGRKLLIIGTTSRKDVLQEMEMLNAFSTTIHVPNIATGEQLLEALELLGNFKDKERTTIAQQVKGKKVWIGIKKLLMLIEMSLQMDPEYRVRKFLALLREEGASERPSKEVGCTVGLLSLSCFAKLPCHNAGKT

SEQ ID NO: 53931 - protein, 431 aa, Homo sapiens
MHYDAEIILKRETLLEIQKFLNGEDWKPGALDDALSDILINFKFHDFETWKWRFEDSFGVDPYNVLMVLLCLLCIVVLVATELWTYVRWYTQLRRVLIISFLFSLGWNWMYLYKLAFAQHQAEVAKMEPLNNVCAKKMDWTGSIWEWFRSSWTYKDDPCQKYYELLLVNPIWLVPPTKALAVTFTTFVTEPLKHIGKGTGEFIKALMKEIPALLHLPVLIIMALAILSFCYGAGKSVHVLRHIGGPESEPPQALRPRDRRRQEEIDYRPDGGAGDADFHYRGQMGPTEQGPYAKTYEGRREILRERDVDLRFQTGNKSPEVLRAFDVPDAEAREHPTVVPSHKSPVLDTKPKETGGILGEGTPKESSTESSQSAKPVSGQDTSGNTEGSPAAEKAQLKSEAAGSPDQGSTYSPARGVAGPRGQDPVSSPCG

SEQ ID NO: 53932 - protein, 143 aa, Homo sapiens
MTERRVPFSLLRGPSWDPFRDWYPHSRLFDQAFGLPRLPEEWSQWLGGSSWPGYVRPLPPAAIESPAVAAPAYSRALSRQLSSGVSEIRHTADRWRVSLDVNHFAPDELTVKTKDGVVEITGKHEERQDEHGYISRCFTRKYT

SEQ ID NO: 53933 - protein, 148 aa, Homo sapiens
MPGEATETVPATEQELPQPQAETESDSDESVPELEEQDSTQATTQQAQLAAAAEIDEEPVSKAKQSRSEKKARKAMSKLGLRQVTGVTRVTIRKSKNILFVITKPDVYKSPASDTYIVFGEAKIEDLSQQAQLAAAEKFKVQGEAVSN

SEQ ID NO: 53934 - protein, 805 aa, Homo sapiens
MEVPAAGRVPAEGAPTAAVAEVRCPGPAPLRLLEWRVAAGAAVRIGSVLAVFEAAASAQSSGASQSRVASGGCVRPARPERRLRSERAGVVRELCAQPGQVVAPGAVLVRLEGCSHPVVMKGLCAECGQDLTQLQSKNGKQQVPLSTATVSMVHSVPELMVSSEQAEQLGREDQQRLHRNRKLVLMVDLDQTLIHTTEQHCQQMSNKGIFHFQLGRGEPMLHTRLRPHCKDFLEKIAKLYELHVFTFGSRLYAHTIAGFLDPEKKLFSHRILSRDECIDPFSKTGNLRNLFPCGDSMVCIIDDREDVWKFAPNLITVKKYVYFQGTGDMNAPPGSRESQTRKKVNHSRGTEVSEPSPPVRDPEGVTQAPGVEPSNGLEKPARELNGSEAATPRDSPRPGKPDERDIWPPAQAPTSSQELAGAPEPQGSCAQGGRVAPGQRPAQGATGTDLDFDLSSDSESSSESEGTKSSSSASDGESEGKRGRQKPKAAPEGAGALAQGSSLEPGRPAAPSLPGEAEPGAHAPDKEPELGGQEEGERDGLCGLGNGCADRKEAETESQNSELSGVTAGESLDQSMEEEEEEDTDEDDHLIYLEEILVRVHTDYYAKYDRYLNKEIEEAPDIRKIVPELKSKVLADVAIIFSGLHPTNFPIEKTREHYHATALGAKILTRLVLSPDAPDRATHLIAARAGTEKVLQAQECGHLHVVNPDWLWSCLERWDKVEEQLFPLRDDHTKAQRENSPAAFPDREGVPPTALFHPMPVLPKAQPGPEVRIYDSNTGKLIRTGARGPPAPSSSLPIRQEPSSF

SEQ ID NO: 53935 - protein, 192 aa, Homo sapiens
MKSFLPVHTIVLIRENVCKCGYAQSQHMEGTQINQSEKWNYKKHTKEFPTDAFGDIQFETLGKKGKYIRLSCDTDAEILYELLTQHWHLKTPNLVISVTGGAKNFALKPRMRKIFSRLIYIAQSKGAWILTGGTHYGLMKYIGEVVRDNTISRSSEENIVAIGIAAWGMVSNRDTLIRNCDAEVPVGQEEVC

SEQ ID NO: 53936 - protein, 386 aa, Homo sapiens
MSGVRAVRISIESACEKQVHEVGLDGTETYLPPLSMSQNLARLAQRIDFSQGSGSEEEEAAGTEGDAQEWPGAGSSADQDDEEGVVKFQPSLWPWDSVRNNLRSALTEMCVLYDVLSIVRDKKFMTLDPVSQDALPPKQNPQTLQLISKKKSLAGAAQILLKGAERLTKSVTENQENKLQRDFNSELLRLRQHWKLRKVGDKILGDLSYRSAGSLFPHHGTFEVIKNTDLDLDKKIPEDYCPLDVQIPSDLEGSAYIKVSIQKQAPDIGDLGTVNLFKRPLPKSKPGSPHWQTKLEAAQNVLLCKEIFAQLSREAVQIKSQVPHIVVKNQIISQPFPSLQLSISLCHSSNDKKSQKFATEKQCPEDHLYVLEHNLHLLIRESCCNH

SEQ ID NO: 53937 - protein, 274 aa, Homo sapiens
MNGQLDLSGKLIIKAQLGEDIRRIPIHNEDITYDELVLMMQRVFRGKLLSNDEVTIKYKDEDGDLITIFDSSDLSFAIQCSRILKLTLFVNGQPRPLESSQVKYLRRELIELRNKVNRLLDSLEPPGEPGPSTNIPENDTVDGREEKSASDSSGKQSTQVMAASMSAFDPLKNQDEINKNVMSAFGLTDDQVSGPPSAPAEDRSGTPDSIASSSSAAHPPGVQPQQPPYTGAQTQAGQIEDVPTVPATGRLWCTAAAGSTSAASTVWYSVFSKL

SEQ ID NO: 53938 - protein, 322 aa, Homo sapiens
MFLVNSFLKGGGGGGGGGGGLGGGLGNVLGGLISGAGGGGGGGGGGGGGGGGGGGGTAMRILGGVISAISEAAAQYNPEPPPPRTHYSNIEANESEEVRQFRRLFAQLAGDDMEVSATELMNILNKVVTRHPDLKTDGFGIDTCRSMVAVMDSDTTGKLGFEEFKYLWNNIKRWQAIYKQFDTDRSGTICSSELPGAFEAAGFHLNEHLYNMIIRRYSDESGNMDFDNFISCLVRLDAMFRAFKSLDKDGTGQIQVNIQEVRTPILGYGCLGGPHPSALHTSSELQSPSSYFASRPWVRAKGLVLLGFPVLTLHPPLPSGCS

SEQ ID NO: 53939 - protein, 436 aa, Homo sapiens
MDAMKRGLCCVLLLCGAVFVSPSQEIHARFRRGARSYQVICRDEKTQMIYQQHQSWLRPVLRSNRVEYCWCNSGRAQCHSVPVKRNSDCYFGNGSAYRGTHSLTESGASCLPWNSMILIGKVYTAQNPSAQALGLGKHNYCRNPDGDAKPWCHVLKNRRLTWEYCDVPSCSTCGLRQYSQPQFRIKGGLFADIASHPWQAAIFAKHRRSPGERFLCGGILISSCWILSAAHCFQERFPPHHLTVILGRTYRVVPGEEEQKFEVEKYIVHKEFDDDTYDNDIALLQLKSDSSRCAQESSVVRTVCLPPADLQLPDWTECELSGYGKHEALSPFYSERLKEAHVRLYPSSRCTSQHLLNRTVTDNMLCAGDTRSGGPQANLHDACQGDSGGPLVCLNDGRMTLVGIISWGLGCGQKDVPGVYTKVTNYLDWIRDNMRP

SEQ ID NO: 53940 - protein, 167 aa, Homo sapiens
MGGCAGSRRRFSDSEGEETVPEPRLPLLDHQGAHWKNAVGFWLLGLCNNFSYVVMLSAAHDILSHKRTSGNQSHPPGSRQWDLCCWKLRPGCLFSFCGDQPVCYFLLLTSPEAQDPGGEEEAESAARQPLIRTEAPESKPGSSSSLSLRERWTVFKGLLWYIVPLVV

SEQ ID NO: 53941 - protein, 290 aa, Homo sapiens
MQRRVLRPKDSAKARKRGLGRGARRPAGDRVAPLGVPSLALTRHLPGPATSGAVLIPSPVKSYRGWLVMGEPSREEYKIQSFDAETQQLLKTALKDPGAVDLEKVANVIVDHSLQDCVFSKEAGRMCYAIIQAESKQAGQSVFRRGLLNRLQQEYQAREQLRARSLQGWVCYVTFICNIFDYLRVNNMPMMALVNPVYDCLFRLAQPDSLSKEEEVDCLVLQLHRVGEQLEKMNGQRMDELFVLIRDGFLLPTGLSSLAQLLLLEIIEFRAAGWKTTPAAHKYYYSEVSD

SEQ ID NO: 53942 - protein, 86 aa, Homo sapiens
MKVNRETKRLYVGGLSQDISEADLQNQFSRFGEVSDVEIITRKDDQGNPQKVFAYINISVAEADLKKSIFHVIQRDSSDEENSSIV

SEQ ID NO: 53943 - protein, 144 aa, Homo sapiens
MPLENLEEEGLPKNPDLRIAQLRFLLSLPEHRGDAAVRDELMAAVRDNNFWNRIRQEQTEDCPPSSPSRDMAPYYEALCKSLDWQIDVDLLNKMKKANEDELKRLDEELEDAEKNLGESEIRDAMMAKAEYLCRIGDKEGALTA

SEQ ID NO: 53944 - protein, 307 aa, Homo sapiens
MGENQTMVTEFLLLGFLLGPRIQMLLFGLFSLFYIFTLLGNGAILGLISLDSRLHTPMYFFLSHLAVVDIAYACNTVPQMLANLLHPAKPISFAGCMTQTFLCLSFGHSECLLLVLMSYDRYVAICHPLRYSVIMTWRVCITLAVTSWTCGSLLALAHVVLILRLPFCGPHEINHFFCEILSVLRLACADTWLNQVVIFAACVFFLVGPPSLVLVSYSHILAAILRIQSGEGRRKAFSTCSSHLCVVGLFFGSAIIMYMAPKSRHPEEQQKVFFLFYSFFNPTLNPLIYSLRNGEVKGALRRALGKE

SEQ ID NO: 53945 - protein, 360 aa, Homo sapiens
MLSAAHDILSHKRTSGNQSHAVLLADILPTLVIKLLAPLGLHLLPYSPRVLVSGICAAGSFVLVAFSHSVGTSLCGVVFASISSGLGEVTFLSLTAFYPRAVISWWSSGTGGAGLLGALSYLGLTQAGLSPQQTLLSMLGIPALLLASYFLLLTSPEAQDPGGEEEAESAARQPLIRTEAPESKPGSSSSLSLRERWTVFKGLLWYIVPLVVVYFAEYFINQGLFELLFFWNTSLSHAQQYRWYQMLYQAGVFASRSSLRCCRIRFTWALALLQCLNLVFLLADVWFGFLPSIYLVFLIILYEGLLGGAAYVNTFHNIALETSDEHREFAMAATCISDTLGISLSGLLALPLHDFLCQLS

SEQ ID NO: 53946 - protein, 39 aa, Homo sapiens
MAAAAECDVVMAATEPELLDDQEAKSPTPLTSHPSVPLL

SEQ ID NO: 53947 - protein, 189 aa, Homo sapiens
MQPDMSLNVIKMKSSDFLESAELDSGGFGKVSLCFHRTQGLMIMKTVYKGPNCIEHNEALLEEAKMMNRLRHSRVVKLLGVIIEEGKYSLVMEYMEKGNLMHVLKAEMSTPLSVKGRIILEIIEGMCYLHGKGVIHKDLKPENILVDNDFHIKVQATAQNKQHCSPYPQCVFGILGHLHPWASGRHLGK

SEQ ID NO: 53948 - protein, 314 aa, Homo sapiens
MAERQEEQRGSPPLRAEGKADAEVKLILYHWTHSFSSQKVRLVIAEKALKCEEHDTFLDERTPRLMPDKESMYYPRVQHYRELLDSLPMDAYTHGCILHPELTVDSMIPAYATTRIRSQIGNTESELKKLAEENPDLQEAYIAKQKRLKSKLLDHDNVKYLKKILDELEKVLDQVETELQRRNEETPEEGQQPWLCGESFTLADVSLAVTLHRLKFLGFARRNWGNGKRPNLETYYERVLKRKTFNKVLGHVNNILISAVLPTAFRVAKKRAPKVLGTTLVVGLLAGVGYFAFMLFRKRLGSMILAFRPRPNYF

SEQ ID NO: 53949 - protein, 245 aa, Homo sapiens
MSPTVIILACLGFFLDQSVWAHVGLYEKPSLTARPGPTVRAGENVTLSCSSQSSFDIYHLSREGEAHELRLPAVPSINGTFQADFPLGPATHGETYRCFGSFHGSPYEWSDPSDPLPVSVTGNPSSSWPSPTEPSFKTDAAVMNQEPAGHRTVNREDSDEQDPQEVTYAQLDHCIFTQRKITGPSQRSKRPSTDTSVCIELPNAEPRALSPAHEHHSQALMGSSRETTALSQTQLASSNVPAAGI

SEQ ID NO: 53950 - protein, 143 aa, Homo sapiens
MNKAPQSTGPPPAPSPGLPQPAFPPGQTAPVVFSTPQATQMNTPSQPRQHFYPSRAQPPSSAASRVQSAAPARPGPAAHVYPAGSQVMMIPSQISYPASQGAYYIPGQYPVQPGAPGFYPGASPTEFGTYAGAYYPAQGVQQF

SEQ ID NO: 53951 - protein, 57 aa, Homo sapiens
MADGKAGDEKPEKSQRAGAAGVMEGKVPVAALRSDQLKKKLPTSQQSLQRSPSLDLP

SEQ ID NO: 53952 - protein, 117 aa, Homo sapiens
MRDLYIKNGQGFILVYSLVNQQSFQDIKPMRDQIVRVKRYEKVPLILVGNKVDLEPEREVMSSEGRALAQEWGCPFMETSAKSKSMVDELFAEIVRQMNYSSLPEKQDQCCTTCVVQ

SEQ ID NO: 53953 - protein, 114 aa, Homo sapiens
MDLYSTPAAALDRFVARRLQPRKEFVEKARRALGALAAALRERGGRLGAAAPRVLKTVKAPRAGAQLSRVAVILNLSSSSTASRAMWTRGPAVQRSSVRCGHRWNPGGRTQSLV

SEQ ID NO: 53954 - protein, 115 aa, Homo sapiens
MPHLPLASFRPPFWGLRHSRGLPRFHSVSTQSEPHGSPISRRNREAKQKRLREKQATLEAEIAGESKSPAESIKAWRPKELVLYEIPTKPGEKKDVSGPLPPAYSPRYVEAAWYP

SEQ ID NO: 53955 - protein, 459 aa, Homo sapiens
MGAARGSPARPRRLPLLSVLLLPLLGGTQTAIVFIKQPSSQDALQGRRALLRCEVEAPGPVHVYWLLDGAPVQDTERRFAQGSSLSFAAVDRLQDSGTFQCVARDDVTGEEARSANASFNIKWIEAGPVVLKHPASEAEIQPQTQVTLRCHIDGHPRPTYQWFRDGTPLSDGQSNHTVSSKERNLTLRPAGPEHSGLYSCCAHSAFGQACSSQNFTLSIADESFARVVLAPQDVVVARYEEAMFHCQFSAQPPPSLQWLFEDETPITNRSRPPHLRRATVFANGSLLLTQVRPRNAGIYRCIGQGQRGPPIILEATLHLAEIEDMPLFEPRVFTAGSEERVTCLPPKGLPEPSVWWEHAGVRLPTHGRVYQKGHELVLANIAESDAGVYTCHAANLAGQRRQDVNITVASEHLCPEGQGEVEGNTGLGVMDRGFPGTHLRSSQFWALQAWESVHYWESV

SEQ ID NO: 53956 - protein, 81 aa, Homo sapiens
MPNFCAAPNCTRKSTQSDLAFFRFPRDPARCQKWVENCRRADLEDKTPDQLNKHYRLCAKHFETSMICRTVSNRRAWCLSV

SEQ ID NO: 53957 - protein, 589 aa, Homo sapiens
MASSQRDMEDWVQAIRRVIWAPLGGGTARRSHAHPLEPLPPGIFGQRLEETVHHERKYGPRLAPLLVEQCVDFIRERGLTEEGLFRMPGQANLVRDLQDSFDCGEKPLFDSTTDVHTVASLLKLYLRELPEPVVPFARYEDFLSCAQLLTKDEGEGTLELAKQVSNLPQANYNLLRYICKFLDEVQAYSNVNKMSVQNLATVFGPNILRPQVEDPVTIMEGTSLVQHLMTVLIRKHSQLFTAPVPEGPTSPRGGLQCAVGWGSEEVTRDSQGEPGGPGLPAHRTSSLDGAAVAVLSRTAPTGPGSRCSPGKKVQTLPSWKSSFRQPRSLSGSPKGGGSSLEVPIISSGGNWLMNGLSSLRGHRRASSGDRLKDSGSVQRLSTYDNVPAPGLVPGIPSVASMAWSGASSSESSVGGSLSSCTACRASDSSARSSLHTDWALEPSPLPSSSEDPKSLDLDHSMDEAGAGASNSEPSEPDSPTREHARRSEALQGLVTELRAELCRQRTEYERSVKRIEEGSADLRKRMSRLEEELDQEKKKYIMLEIKLRNSERAREDAERRNQLLQREMEEFFSTLGSLTVGAKGARAPK

SEQ ID NO: 53958 - protein, 67 aa, Homo sapiens
NEPNSQSKFPIFRFPSSFSSPVGMVFHPRSHFLYAYGNQEWEDTVQSEVLLREFSHYTMITWDSYIS

SEQ ID NO: 53959 - protein, 47 aa, Homo sapiens
MKIAVIGQSLFGQEVYCHLRKEGHEVVGVFTVPDKDGKADPLDTRTE

SEQ ID NO: 53960 - protein, 277 aa, Homo sapiens
MEGSLEREAPAGALAAVLKHSSTLPPESTQVRGYDFNRGVNYRALLEAFGTTGFQATNFGRAVQQVNAMIEKKLEPLSQDEDQHADLTQSRRPLTSCTIFLGYTSNLISSGIRETIRYLVQHNMVDVLVTTAGGVEEDLIKCLAPTYLGEFSLRGKELRENGINRIGNLLVPNENYCKFEDWLMPILDQMVMEQNTEGVKWTPSKMIARLGKEINNPESVYYWAQKNHIPVFSPALTDGSLGDMIFFHSYKNPGLVLDIVEAERGRLRCLHQHSPGV

SEQ ID NO: 53961 - protein, 101 aa, Homo sapiens
MKLHCCLFTLVASIIVPAAFVLEDVDFDQMVSLEANRSSYNASFPSSFELSASSHSDDDVIIAKEGTSVSIECLLTASHYEDVHWHNSKGQQLDGRSRGLR

SEQ ID NO: 53962 - protein, 171 aa, Homo sapiens
MAATGANAEKAESHNDCPVRLLNPNIAKMKEDILYHFNLTTSRHNFPALFGDVKFVCVGGSPSRMKAFIRCVGAELGLDCPGRDYPNICAGTDRYAMYKVGPVLSVSHGMGIPSISIMLHELIKLLYYARCSNVTIIRIGTSGGIGILKHLRRKDTGKSKGGRERRSTKLR

SEQ ID NO: 53963 - protein, 312 aa, Homo sapiens
MEPVETWTPGKVATWLRGLDDSLQDYPFEDWQLPGKNLLQLCPQSLEALAVRSLGHQELILGGVEQLQALSSRLQTENLQSLTEGLLGATHDFQSIVQGCLGDCAKTPIDVLCAAVELLHEADALLFWLSRYLFSHLNDFSACQEIRDLLEELSQVLHEDGPAAEKEGTVLRICSHVAGICHNILVCCPKELLEQKAVLEQVQLDSPLGLEIHTTSNCQHFVSQVDTQVPTDSRLQIQPGDEVVQINEQVVVGWPRKNMVRELLREPAGLSLVLKKIPIPETPPQVTGSVQVCLGGETVGSSHPPCPPQGPI

SEQ ID NO: 53964 - protein, 262 aa, Homo sapiens
MDAALLLNVEGVKKTILHGGTGELPNFITGSRVIFHFRTMKCDEERTVIDDSRQVGQPMHIIIGNMFKLEVWEILLTSMRVHEVAEFWCDTIHTGVYPILSRSLRQMAQGKDPTEWHVHTCGLANMFAYHTLGYEDLDELQKEPQPLVFVIELLQRETWNLSNHEKMKAVPVLHGEGNRLFKLGRYEEASSKYQEAIICLRNLQTKEKPWEVQWLKLEKMINTLILNYCQCLLKKEEYYEVLEHTSDILRHHPGARGCRGGQ

SEQ ID NO: 53965 - protein, 117 aa, Homo sapiens
  MOD_RES (1)..(1): Any amino acid
XCLSSMVTMFPKLQLEWNVHLNIPEVTSPKPKKCKLPAASPRHIRPSGPTYKQPFLSRHRACVPLQMARQQGKQMEAVWKTEVASSSYAIEKKTPASLPRDQLRGHPDIPRLLTLDV

SEQ ID NO: 53966 - protein, 905 aa, Homo sapiens
MVRSGARPGQVLSSGRHTGPAKLTNGKKATYLRKIPRFNADSGYSIHSDSESQAETVHGLDGCASLLRDILRNEDSGSETAYLENRSNSRPLESKRYGSKKKRHEKHTIPLVVQKETSSSDNKKQIPNEASARSERDTSDLEQNWSLQDHYRMYSPIIYQALCEHVQTQMSLMNDLTSKNIPNGIPAVPCHAPSHSESQATPHSSYGLCTSTPVWSLQRPPCPPKVHSEVQTDGNSQFASQGKTVSATCTDVLRNSFNTSPGVPCSLPKTDISAIPTLQQLGLVNGILPQQGIHKETDLLKCIQTYLSLFRSHGKETHLDSQTHRSPTQSQPAFLATNEEKCAREQIREATSERKDLNIHVRDTKTVKDVQKAKNVNKTAEKVRIIKYLLGELKALVAEQEDSEIQRLITEMEACISVLPTVSGNTDIQVEIALAMQPLRSENAQLRRQLRILNQQLREQQKTQKPSGAVDCNLELFSLQSLNMSLQNQLEESLKSQELLQSKNEELLKVIENQKDENKKFSSIFKDKDQTILENKQQYDIEITRIKIELEEALVNVKSSQFKLETAEKENQILGITLRQRDAEVTRLRELTRTLQTSMAKLLSDLSVDSARCKPGNNLTKSLLNIHDKQLQHDPAPAHTSIMSYLNKLETNYSFTHSEPLSTIKNEETIEPDKTYENVLSSRGPQNSNTRGMEEASAPGIISALSKQDSDEGSETMALIEDEHNLDNTIYIPFARSTPEKKSPLSKRLSPQPQIRAATTQLVSNSGLAVSGKENKLCTPVICSSSTKEAEDAPEKLSRASDMKDTQLLKKIKEAIGKIPAATKEPEEQTACHGPSGCLSNSLQVKGNTVCDGSVFTSDLMSDWSISSFSTFTSRDEQDFRNGLAALDANIARLQKSLRTGLLEK

SEQ ID NO: 53967 - protein, 50 aa, Homo sapiens
MSQQRPARKLPSLLLDPTEETVRRRCRDPINVEGLLLFIQANLACWARLS

SEQ ID NO: 53968 - protein, 78 aa, Homo sapiens
MAGSQDIFDAIVMADESRKMKVLESLIGMIQKFPYDDPTYDKLHEDLDKIRGKFKQFCSLLNVQPDFKISAEGSGLSF

SEQ ID NO: 53969 - protein, 176 aa, Homo sapiens
  MOD_RES (1)..(1): Any amino acid
XGCYLSAEELNVFHERGASIAHCPNSNLSLSSGFLNVLEVLKHEVKIGLGTDVAGGYSYSMLDAIRRAVMVSNILLINKVNEKSLTLKEVFRLATLGGSQALGLDGEIGNFEVGKEFDAILINPKASDSPIDLFYGDFFGDISEAVIQKFLYLGDDRNIEEVYVGGKQVVPFSSSV

SEQ ID NO: 53970 - protein, 79 aa, Homo sapiens
MRPLQIVPSRLISQLYCGLKPPASTRNQICLKMARPSSRPGDSPGLCPQPVPGVGVLPLPAGGHGEQGAQRRAPRHSRV

SEQ ID NO: 53971 - protein, 80 aa, Homo sapiens
MYLQVETRTSSRLHLKRAPGIRSWSLLVGILSIGLAAAYYSGGSHLRQEHREGCFEDVQPLQEAADSFQSWPRPGGGPAP

SEQ ID NO: 53972 - protein, 388 aa, Homo sapiens
MSTQRLRNEDYHDYSSTDVSPEESPSEGLNNLSSPGSYQRFGQSNSTTWFQTLIHLLKGNIGTGLLGLPLAVKNAGIVMGPISLLIIGIVAVHCMGILVKCAHHFCRRLNKSFVDYGDTVMYGLESSPCSWLRNHAHWGRRVVDFFLIVTQLGFCCVYFVFLADNFKQVIEAANGTTNNCHNNETVILTPTMDSRLYMLSFLPFLVLLVFIRNLRALSIFSLLANITMLVSLVMIYQFIVQRIPDPSHLPLVAPWKTYPLFFGTAIFSFEGIGMVLPLENKMKDPRKFPLILYLGMVIVTILYISLGCLGYLQFGANIQGSITLNLPNCWLYQSVKLLYSIGIFFTYALQFYVPAEIIIPFFVSRAPEHCELVVDLFVRTVLVCLTCE

SEQ ID NO: 53973 - protein, 961 aa, Homo sapiens
MLLLLLLAPLFLRPPGAGGVQTPNATSEGCQIIHPPWEGGIRYRGLTRDQVKAINFLPVDYEIEYVCRGEREVVGPKVRKCLANGSWTDMDTPSRCVRICSKSYLTLENGKVFLTGGDLPALDGARVDFRCDPDFHLVGSSRSICSQGQWSTPKPHCQVNRTPHSERRAVYIGALFPMSGGWPGGQACQPAVEMALEDVNSRRDILPDYELKLIHHDSKCDPGQATKYLYELLYNDPIKIILMPGCSSVSTLVAEAARMWNLIVLSYGSSSPALSNRQRFPTFFRTHPSATLHNPTRVKLFEKWGWKKIATIQQTTEVFTSTLDDLEERVKEAGIEITFRQSFFSDPAVPVKNLKRQDARIIVGLFYETEARKVFCEVYKERLFGKKYVWFLIGWYADNWFKIYDPSINCTVDEMTEAVEGHITTEIVMLNPANTRSISNMTSQEFVEKLTKRLKRHPEETGGFQEAPLAYDAIWALALALNKTSGGGGRSGVRLEDFNYNNQTITDQIYRAMNSSSFEGVSGHVVFDASGSRMAWTLIEQLQGGSYKKIGYYDSTKDDLSWSKTDKWIGGSPPADQTLVIKTFRFLSQKLFISVSVLSSLGIVLAVVCLSFNIYNSHVRYIQNSQPNLNNLTAVGCSLALAAVFPLGLDGYHIGRNQFPFVCQARLWLLGLGFSLGYGSMFTKIWWVHTVFTKKEEKKEWRKTLEPWKLYATVGLLVGMDVLTLAIWQIVDPLHRTIETFAKEEPKEDIDVSILPQLEHCSSRKMNTWLGIFYGYKGLLLLLGIFLAYETKSVSTEKINDHRAVGMAIYNVAVLCLITAPVTMILSSQQDAAFAFASLAIVFSSYITLVVLFVPKMRRLITRGEWQSEAQDTMKTGSSTNNNEEEKSRLLEKENRELEKIIAEKEERVSELRHQLQSRQQLRSRRHPPTPPEPSGGLPRGPPEPPDRLSCDGSRVHLLYK

SEQ ID NO: 53974 - protein, 25 aa, Homo sapiens
  MOD_RES (1)..(1): Any amino acid
XGTLEECQHQTNWPNHMCEKKKAKG

SEQ ID NO: 53975 - protein, 248 aa, Homo sapiens
  MOD_RES (1)..(1): Any amino acid
XIESGPLASEDKPLSCGTNSGKEQEINETLPITTVAQSSVLLHPQEAAARIRMSARQKQIMEIEEQKQKQLELLEQIEQQKLRLETDCFRAQLEEEKRKKTQPTGVGCRKSHHYINHLVGIAPASCPVISDEDSHRQMIRNYQHQLLQQNRLHRQSVETARKQLLEYQTMLKGRCPSVSAPSLITDSVISVPSWKSERPTAISEHWDQGQRLKLSPNKYQPIQPIQTSKLEQDHFQVARQNHFPQRQV

SEQ ID NO: 53976 - protein, 66 aa, Homo sapiens
MKIFLPVLLAALLGVERASSLMCFSCLNQKSNLYCLKPTICSDQDNYCVTVSASAGIGGFAGGTDS

SEQ ID NO: 53977 - protein, 345 aa, Homo sapiens
MANYIHVPPGSPEVPKLNVTVQDQEEHRCREGALSLLQHLRPHWDPQEVTLQLFTDGITNKLIGCYVGNTMEDVVLVRIYGNKTELLVDRDEEVKSFRVLQAHGCAPQLYCTFNNGLCYEFIQGEALDPKHVCNPAIFRLIARQLAKIHAIHAHNGWIPKSNLWLKMGKYFSLIPTGFADEDINKRFLSDIPSSQILQEEMTWMKEILSNLGSPVVLCHNDLLCKNIIYNEKQGDVQFIDYEYSGYNYLAYDIGNHFNEFAGVSDVDYSLYPDRELQSQWLRAYLEAYKEFKGFGTEVTEKEVEILFIQVNQFALGENLNFIIGNKYCQLFSLKWLLISFGDCGL

SEQ ID NO: 53978 - protein, 462 aa, Homo sapiens
MASPRELTQNPLKKIWMPYSNGRPALHACQRGVCMTNCPTLIVMVGLPARGKTYISKKLTRYLNWIGVPTREFNVGQYRRDVVKTYKSFEFFLPDNEEGLKIRKQCALAALRDVRRFLSEEGGHVAVFDATNTTRERRATIFNFGEQNGYKTFFVESICVDPEVIAANIVQVKLGSPDYVNRDSDEATEDFMRRIECYENSYESLDEDLDRDLSYIKIMDVGQSYVVNRVADHIQSRIVYYLMNIHVTPRSIYLCRHGESELNLKGRIGGDPGLSPRGREFAKSLAQFISDQNIKDLKVWTSQMKRTIQTAEALGVPYEQWKGVCEEMTYEEIQDNYPLEFALRDQDKYRYRYPKGESYEDLVQRLEPVIMELERQENVLVICHQAVMRCLLAYFLDKAAEQLPYLKCPLHTVLKLTPVAYGCKVESIFLNVAAVNTHRDRPQNVDISRPPEEALVTVPAHQ

SEQ ID NO: 53979 - protein, 646 aa, Homo sapiens
MAAPAQPKKIVAPTVSQINAEFVTQLACKYWAPHIKKKSPFDIKVIEDIYEKEIVKSRFAIRKIMLLEFSQYLENYLWMNYSPEVSSKAYLMSICCMVNEKFRENVPAWEIFKKKPDHFPFFFKHILKAALAETDGEFSLHEQTVLLLFLDHCFNSLEVDLIRSQVQQLISLPMWMGLQLARLELELKKTPKLRKFWNLIKKNDEKMDPEAREQAYQERRFLSQLIQKFISVLKSVPLSEPVTMDKVHYCERFIELMIDLEALLPTRRWFNTILDDSHLLVHCYLSNLVRREEDGHLFSQLLDMLKFYTGFEINDQTGNALTENEMTTIHYDRITSLQRAAFAHFPELYDFALSNVAEVDTRESLVKFFGPLSSNTLHQVASYLCLLPTLPKNEDTTFDKEFLLELLVSRHERRISQIQQLNQMPLYPTEKIIWDENIVPTEYYSGEGCLALPKLNLQFLTLHDYLLRNFNLFRLESTYEIRQDIEDSVSRMKPWQSEYGGVVFGGWARMAQPIVAFTVVEVAKPNIGENWPTRVRADVTINLNVRDHIKDEWEGLRKHDVCFLITVRPTKPYGTKFDRRRPFIEQVGLVYVRGCEIQGMLDDKGRVIEDGMVTYIFERDLNPDPILEENQGHLECFWIQTSINKI

SEQ ID NO: 53980 - protein, 328 aa, Homo sapiens
MAGVEEVAASGSHLNGDLDPDDREEGAASTAEEAAKKKRRKKKKSKGPSAAGEQEPDKESGASVDEVARQLERSALEDKERDEDDEDGDGDGDGATGKKKKKKKKKRGPKVQTDPPSVPICDLYPNGVFPKGQECEYPPTQDGRTAAWRTTSEEKKALDQASEEIWNDFREAAEAHRQVRKYVMSWIKPGMTMIEICEKLEDCSRKLIKENGLNAGLAFPTGCSLNNCAAHYTPNAGDTTVLQYDDICKIDFGTHISGRIIDCAFTVTFNPKYDTLLKAVKDATNTGIKCAGIDVRLCDVGEAIQEVMESYEVEIDGKTYQGRRSICN

SEQ ID NO: 53981 - protein, 462 aa, Homo sapiens
  MOD_RES (1)..(1): Any amino acid
XRYWRRWNRFCRRKCRAAVKSNVFYWLVIFLVFLNTLTIASEHYNQPNWLTEVQDTANKALLALFTAEMLLKMYSLGLQAYFVSLFNRFDCFVVCGGILETILVETKIMSPLGISVLRCVRLLRIFKITRYWNSLSNLVASLLNSVRSIASLLLLLFLFIIIFSLLGMQLFGGKFNFDEMQTRRSTFDNFPQSLLTVFQILTGEDWNSVMYDGIMAYGGPSFPGMLVCIYFIILFICGNYILLNVFLAIAVDNLADAESLTSAQKEEEEEKERKKLARTASPEKKQELVEKPAVGESKEEKIELKSITADGESPPATKINMDDLQPNENEDKSPYPNPETTGEEDEEEPEMPVGPRPRPLSELHLKEKAVPMPEASAFFIFSSNNRFRLQCHRIVNDTIFTNLILFFILLSSISLAAEDPVQHTSFRNHVCIACVFCTPSPWGCARPTASVADIIVQSGAQF

SEQ ID NO: 53982 - protein, 148 aa, Homo sapiens
MYSSFPIWQGHVVFEDVAIYFSQEEWGHLDEAQRLLYRDVMLENLALLSSLGCCHGAEDEEAPLEPGVSVGVSQVMAPKPCLSTQNTQPCETCSSLLKDILRLAEHDGTHPEQGLYTCPAHLHQHQKEQIREKLSRGDGGRPTFVKNH

SEQ ID NO: 53983 - protein, 98 aa, Homo sapiens
MLPPQKKPWESMAKGLVLGALFTSFLLLVYSYAVPPLHAGLASTTPEAAASCSPPALEPEAVIRANGSAGECQPRRNIVFLKTHKTASSTLLNILFRF

SEQ ID NO: 53984 - protein, 153 aa, Homo sapiens
MALGLKCFRMVHPTFRNYLAASIRPVSEVTLKTVHERQHGHRQYMAYSAVPVRHFATKKAKAKGKGQSQTRVNINAALVEDIINLEEVNEEMKSVIEALKDNFNKTLNIRTSPGSLDKIAVVTADGKLALNQISQISMKSPQLILVNMASFPE

SEQ ID NO: 53985 - protein, 210 aa, Homo sapiens
MQIDVDPQEDPQNAPDVNYVVENPSLDLEQYAASYSGLMRIERLQFIADHCPTLRVEALKMALSFVQRTFNVDMYEEIHRKLSEATRELQNAPDAIPESGVEPPALDTAWVEATRKKALLKLEKLDTDLKNYKGNSIKESIRRGHDDLGDHYLDCGDLSNALKCYSRARDYCTSAKHVINMCLNVIKVSVYLQNWSHVLSYVSKAESTPE

SEQ ID NO: 53986 - protein, 78 aa, Homo sapiens
MNEENMTELLSSGLKNDYNKETFTLKHKIDEQMFPCRFIKIVPLLSWGPSFNFSIWYVELSGIDDPDIVQPCLNWYSK

SEQ ID NO: 53987 - protein, 133 aa, Homo sapiens
GLRLQSKTIKVSYARPSSEVIKDANLYISGLPRTMTQKDVEDMFSRFGRIINSRVLVDQTTESQILRKSQNRGPLPGFDTKEGPCSVAREQSASWDQNAFLEKEAFQVSLGQHLLMEGGSQHPSDGRWEPTPF

SEQ ID NO: 53988 - protein, 238 aa, Homo sapiens
LEDKYRYLFKQVASSTGFCDQRRLGLLLHDSIQIPRQLGEVASFGGSNIEPSVRSCFQFANNKPEIEAALFLDWMRLEPQSMVWLPVLHRVAAAETAKHQAKCNICKECPIIGFRYRSLKHFNYDICQSCFFSGRVAKGHKMHYPMVEYCTPTTSGEDVRDFAKVLKNKFRTKRYFAKHPRMGYLPVQTVLEGDNMETPVTLINFWPVDSAPASSPQLSHDDTHSRIEHYASRDDEHL

SEQ ID NO: 53989 - protein, 32 aa, Homo sapiens
  MOD_RES (1)..(1): Any amino acid
XFWSNGHQLCEERSLTDQHCVHKFHSLPKSGS

SEQ ID NO: 53990 - protein, 766 aa, Homo sapiens
MVQKSRNGGVYPGPSGEKKLKVGFVGLDPGAPDSTRDGALLIAGSEAPKRGSILSKPRAGGAGAGKPPKRNAFYRKLQNFLYNVLERPRGWAFIYHAYVFLLVFSCLVLSVFSTIKEYEKSSEGALYILEIVTIVVFGVEYFVRIWAAGCCCRYRGWRGRLKFARKPFCVIDIMVLIASIAVLAAGSQGNVFATSALRSLRFLQILRMIRMDRRGGTWKLLGSVVYAHSKELVTAWYIGFLCLILASFLVYLAEKGENDHFDTYADALWWGLITLTTIGYGDKYPQTWNGRLLAATFTLIGVSFFALPAGILGSGFALKVQEQHRQKHFEKRRNPAAGLIQSAWRFYATNLSRTDLHSTWQYYERTVTVPMYRLIPPLNQLELLRNLKSKSGLAFRKDPPPEPSPSQKVSLKDRVFSSPRGVAAKGKGSPQAQTVRRSPSADQSLEDSPSKVPKSWSFGDRSRARQAFRIKGAASRQNSEEASLPGEDIVDDKSCPCEFVTEDLTPGLKVSIRAVCVMRFLVSKRKFKESLRPYDVMDVIEQYSAGHLDMLSRIKSLQSRIDMIVGPPPPSTPRHKKYPTKGPTAPPRESPQYSPRVDQIVGRGPAITDKDRTKGPAEAELPEDPSMMGRLGKVEKQVLSMEKKLDFLVNIYMQRMGIPPTETEAYFGAKEPEPAPPYHSPEDSREHVDRHGCIVKIVRSSSSTGQKNFSAPPAAPPVQCPPSTSWQPQSHPRQGHGTSPVGDHGSLGRAPETRAGQEGSHGGVSH

SEQ ID NO: 53991 - protein, 590 aa, Homo sapiens
MIEESGNKRKTMAEKRQLFIEMRAQNFDVIRLSTYRTACKLRFVQKRCNLHLVDIWNMIEAFRDNGLNTLDHTTEISVSRLETVISSIYYQLNKRLPSTHQISVEQSISLLLNFMIAAYDSEGRGKLTVFSVKAMLATMCGGKMLDKLRYVFSQMSDSNGLMIFSKFDQFLKEVLKLPTAVFEGPSFGYTEHSVRTCFPQQRKIMLNMFLDTMMADPPPQCLVWLPLMHRLAHVENVFHPVECSYCRCESMMGFRYRCQQCHNYQLCQNCFWRGHAGGPHSNQHQMKEHSSWKSPAKKLSHAISKSLGCVPTREPPHPVFPEQPEKPLDLAHIVPPRPLTNMNDTMVSHMSSGVPTPTKSVLDSPSRLDEEHRLIARYAARLAAEAGNVTRPPTDLSFNFDANKQQRQLIAELENKNREILQEIQRLRLEHEQASQPTPEKAQQNPTLLAELRLLRQRKDELEQRMSALQESRRELMVQLEELMKLLKAQATGSPHTSPTHGGGRPMPMPVRSTSAGSTPTHCPQDSLSGVGGDVQEAFAQGTRRNLRNDLLVAADSITNTMSSLVKELHSAEEGAEEEEEKMQNGKDRG

SEQ ID NO: 53992 - protein, 114 aa, Homo sapiens
MEQCACVERELDKVLQKFLTYGQHCERSLEELLHYVGQLRAELASAALQGTPLSATLSLVMSQCCRKIKDTVQKLASDHKDIHSSVSRVGKAIDRNFDSEICGVVSDAVWDARE

SEQ ID NO: 53993 - protein, 54 aa, Homo sapiens
MEEDSLEDSNLPPKVWHSEMTVSVTGEPPSTVEEEGIPKETDIEIIPEIPETLE

SEQ ID NO: 53994 - protein, 137 aa, Homo sapiens
MSDEGSRGSRLPLALPPASQGCSSGGGGGGSSAGGSGNSRPPRNLQGLLQMAITAGSEEPDPPPEPMSEERRQWLQEAMSAAFRGQREEVEQMKSCLRVLSQPMPPTAGEAEQAADQQEREGALELLADLCENMDNA

SEQ ID NO: 53995 - protein, 454 aa, Homo sapiens
QMPNAVQKLLLVMDKRASGMNDSLELLQCNENLPSSPGYNSCDEHMELDDLPELQAVQSDPTQSGMYQLSSDVSHQEYPRSSWNQNTSDIPETTYRENEVDWLTELANIATSPQSPLMQCSFYNRSSPVHIIATSKSLHSYARPPPVSSSSKSEPAFPHHHWKEETPVRHERANSESESGIFCMSSLSDDDDLGWCNSWPSTVWHCFLKGTRLCFHKGSNKEWQDVEDFARAEGCDNEEDLQMGIHKGYGSDGLKLLSHEESVSFGESVLKLTFDPGTVEDGLLTVECKLDHPFYVKNKGWSSFYPSLTVVQHGIPCCEVHIGDVCLPPGHPDAINFDDSGVFDTFKSYDFTPMDSSAVYVLSSMARQRRASLSCGGPGGQDFARSGFSKNCGSPGSSQLSSNSLYAKAVKNHSSGTVSATSPNKCKRPMNAFMLFAKKYRVEYTQMYPGKDNR

SEQ ID NO: 53996 - protein, 540 aa, Homo sapiens
MGPLQFRDVAIEFSLEEWHCLDTAQRNLYRNVMLENYSNLVFLGITVSKPDLITCLEQGRKPLTMKRNEMIAKPSVMCSHFAQDLWPEQSMKDSFQKVVLRRYEKCEHDNLQLKKGCISVDECKVHKEGYNELNQCLTTTPRKICQCDKYVKVLHQFPNSNGQKRGHTGKKPFKYIECGKAFKQFSTLTTHKKIHTGGKPYKCEECGKAFNHSCSLTRHKKIHTGEKPYKCEECGKAFKHSSTLTTHKRNHTGEKPYKCDKCGKAFMSSSTLSKHEIIHTEKKPYKCEECGKAFNRSSTLTTHKIIHTGEKPYKCEECDKAFKYSYTLTTHKRIHTEDKPYKCEECGKAFKYSSTLTTHKRIHTGEKPYKCEECGKAFKRSSDLTTHKIIHTGEKPYKCEECGKAFKYSSNLTTHKKIHTGERPYKCEECGKAFNQSSILTTHRRIHTGEKFYKCEECGKAFKRSSHLTTHKIIHTGEKFYKCEECDKAFKHFSNLTTHKKIHTGKKPYRCEECGKAFKHSSKLTTHKRFHTGEKPYRCE

SEQ ID NO: 53997 - protein, 389 aa, Homo sapiens
MVPWVRTMGQKLKQRLRLDVGREICRQYPLFCFLLLCLSAASLLLNRYIHILMIFWSFVAGVVTFYCSLGPDSLLPNIFFTIKYKPKLGLQELFPQGHSCAVCGKVKCKRHRPSLLLENYQPWLDLKISSKVDASLSEVLELVLENFVYPWYRDVTDDESFVDELRITLRFFASVLIRRIHKVDIPSIITKKLLKAAMKHIEVIVKARQKVKNTEFLQQAALEEYGPELHVALRSRRDELHYLRKLTELLFPYILPPKATDCRSLTLLIREILSGSVFLPSLDFLADPDTVNHLLIIFIDDSPPEKATEPASPLVPFLQKFAEPRNKKPSVLKLELKQIREQQDLLFRFMNFLKQEGAVHVLQFCLTVVFQTTFKRCRITNTQFKIEQR

SEQ ID NO: 53998 - protein, 25 aa, Homo sapiens
LNENTDFPDVTVKNPKVKKKEETDL

SEQ ID NO: 53999 - protein, 439 aa, Homo sapiens
MAAPTPARPVLTHLLVALFGMGSWAAVNGIWVELPVVVKELPEGWSLPSYVSVLVALGNLGLLVVTLWRRLAPGKDEQVPIRVVQVLGMVGTALLASLWHHVAPVAGQLHSVAFLALAFVLALACCASNVTFLPFLSHLPPRFLRSFFLGQGLSALLPCVLALVQGVGRLECPPAPINGTPGPPLDFLERFPASTFFWALTALLVASAAAFQGLLLLLPPPPSVPTGELGSGLQVGAPGAEEEVEESSPLQEPPSQAAGTTPGPDPKAYQLLSARSACLLGLLAATNALTNGVLPAVQSFSCLPYGRLAYHLAVVLGSAANPLACFLAMGVLCRAGRPLSAGRVLWGLPDGAGSPEPLPAPGGHLGGGGPRGAVVGAVSWRVLLREGGSQLPAAWRGPAGIAGSRRGHPGGLSARRCCYVPPDQHLSRVPQQKGLCRPL

SEQ ID NO: 54000 - protein, 68 aa, Homo sapiens
MAYQLYRNTTLGNSLQESLDELIQSQQITPQLALQVLLQFDKAINAALAQRVRNRVNFRILAPILQNE

SEQ ID NO: 54001 - protein, 281 aa, Homo sapiens
MAEKGDCIASVYGYDLGGRFVDFQPLGFGVNGLVLSAVDSRACRKVAVKKIALSDARSMKHALREIKIIRRLDHDNIVKVYEVLGPKGTDLQGELFKFSVAYIVQEYMETDLARLLEQGTLAEEHAKLFMYQLLRGLKYIHSANVLHRDLKPANIFISTEDLVLKIGDFGLARIVDQHYSHKSTDCITSIVGHIPEPSEKGEVREVPFVLLSVLCKSNWGEFQSCGVGAAVKRLESEGTLGPGGLMEDSVMLDYVVSLPSLPLHPLLWSRDNDSSHPGRAS

SEQ ID NO: 54002 - protein, 3476 aa, Homo sapiens
  MOD_RES (1)..(1): Any amino acid
XIGPVTDDPSSLPQPNVNQSSRPLSEEQLDGILSPELDKMVTDGAILGKLYKIPELGGKDVEDLFTAVLSPANTQPTPLPQPPPPTQLLPIHNQDAFSRMPLMNGLIGSSPHLPHNSLPPGSGLGTFSAIAQSSYPDARDKNSAFNPMASDPNNSWTSSAPTVEGENDTMSNAQRSTLKWEKEEALGEMATVAPVLYTNINFPNLKEEFPDWTTRVKQIAKLWRKASSQERAPYVQKARDNRAALRINKVQMSNDSMKRQQQQDSIDPSSRIDSELFKDPLKQRESEHEQEWKFRQQMRQKSKQQAKIEATQKLEQVKNEQQQQQQQQFGSQHLLVQSGSDTPSSGIQSPLTPQPGNGNMSPAQSFHKELFTKQPPSTPTSTSSDDVFVKPQAPPPPPAPSRIPIQDSLSQAQTSQPPSPQVFSPGSSNSRPPSPMDPYAKMVGTPRPPPVGHSFSRRNSAAPVENCTPLSSVSRPLQMNETTANRPSPVRDLCSSSTTNNDPYAKPPDTPRPVMTDQFPKSLGLSRSPVVSEQTAKGPIAAGTSDHFTKPSPRADVFQRQRIPDSYARPLLTPAPLDSGPGPFKTPMQPPPSSQDPYGSVSQASRRLSVDPYERPALTPRPIDNFSHNQSNDPYSQPPLTPHPAVNESFAHPSRAFSQPGTISRPTSQDPYSQPPGTPRPVVDSYSQSSGTARSNTDPYSQPPGTPRPTTVDPYSQQPQTPRPSTQTDLFVTPVTNQRHSDPYAHPPGTPRPGISVPYSQPPATPRPRISEGFTRSSMTRPVLMPNQDPFLQAAQNRGPALPGPLVRPPDTCSQTPRPPGPGLSDTFSRVSPSAARDPYDQSPMTPRSQSDSFGTSQTAHDVADQPRPGSEGSFCASSNSPMHSQGQQFSGVSQLPGPVPTSGVTDTQNTVNMAQADTEKLRQRQKLREIILQQQQQKKIAGRQEKGSQDSPAVPHPGPLQHWQPENVNQAFTRPPPPYPGNIRSPVAPPLGPRYAVFPKDQRGPYPPDVASMGMRPHGFRFGFPGGSHGTMPSQERFLVPPQQIQGSGVSPQLRRSVSVDMPRPLNNSQMNNPVGLPQHFSPQSLPVQQHNILGQAYIELRHRAPDGRQRLPFSAPPGSVVEASSNLRHGNFIPRPDFPGPRHTDPMRRPPQGLPNQLPVHPDLEQVPPSQQEQGHSVHSSSMVMRTLNHPLGGEFSEAPLSTSVPSETTSDNLQITTQPSDGLEEKLDSDDPSVKELDVKDLEGVEVKDLDDEDLENLNLDTEDGKVVELDTLDNLETNDPNLDDLLRSGEFDIIAYTDPELDMGDKKSMFNEELDLPIDDKLDNQCVSVEPKKKEQENKTLVLSDKHSPQKKSTVTNEVKTEVLSPNSKVESKCETEKNDENKDNVDTPCSQASAHSDLNDGEKTSLHPCDPDLFEKRTNRETAGPSANVIQASTQLPAQDVINSCGITGSTPVLSSLLANEKSDNSDIRPSGSPPPPTLPASPSNHVSSLPPFIAPPGRVLDNAMNSNVTVVSRVNHVFSQGVQVNPGLIPGQSTVNHSLGTGKPATQTGPQTSQSGTSSMSGPQQLMIPQTLAQQNRERPLLLEEQPLLLQDLLDQERQEQQQQRQMQAMIRQRSEPFFPNIDFDAITDPIMKAKMVALKGINKVMAQNNLGMPPMVMSRFPFMGQVVTGTQNSEGQNLGPQAIPQDGSITHQISRPNPPNFGPGFVNDSQRKQYEEWLQETQQLLQMQQKYLEEQIGAHRKSKKALSAKQRTAKKAGREFPEEDAEQLKHVTEQQSMVQKQLEQIRKQQKEHAELIEDYRIKQQQQCAMAPPTMMPSVQPQPPLIPGATPPTMSQPTFPMVPQQLQHQQHTTVISGHTSPVRMPSLPGWQPNSAPAHLPLNPPRIQPPIAQLPIKTCTPAPGTVSNANPQSGPPPRVEFDDNNPFSESFQERERKERLREQQERQRIQLMQEVDRQRALQQRMEMEQHGMVGSEISSSRTSVSQIPFYSSDLPCDFMQPLGPLQQSPQHQQQMGQVLQQQNIQQGSINSPSTQTFMQTNERRQVGPPSFVPDSPSIPVGSPNFSSVKQGHGNLSGTSFQQSPVRPSFTPALPAAPPVANSSLPCGQDSTITHGHSYPGSTQSLIQLYSDIIPEEKGKKKRTRKKKRDDDAESTKAPSTPHSDITAPPTPGISETTSTPAVSTPSELPQQADQESVEPVGPSTPNMAAGQLCTELENKLPNSDFSQATPNQQTYANSEVDKLSMETPAKTEEIKLEKAETESCPGQEEPKLEEQNGSKVEGNAVACPVSSAQSPPHSAGAPAAKGDSGNELLKHLLKNKKSSSLLNQKPEGSICSEDDCTKDNKLVEKQNPAEGLQTLGAQMQGGFGCGNQLPKTDGGSETKKQRSKRTQRTGEKAAPRSKKRKKDEEEKQAMYSSTDTFTHLKQQLSLLPLMEPIIGVNFAHFLPYGSGQFNSGNRLLGTFGSATLEGVSDYYSQLIYKQNNLSNPPTPPASLPPTPPPMACQKMANGFATTEELAGKAGVLVSHEVTKTLGPKPFQLPFRPQDDLLARALAQGPKTVDVPASLPTPPHNNQEELRIQDHCGDRDTPDSFVPSSSPESVVGVEVSRYPDLSLVKEEPPEPVPSPIIPILPSTAGKSSESRRNDIKTEPGTLYFASPFGPSPNGPRSGLISVAITLHPTAAENISSVVAAFSDLLHVRIPNSYEVSSAPDVPSMGLVSSHRINPGLEYRQHLLLRGPPPGSANPPRLVSSYRLKQPNVPFPPTSNGLSGYKDSSHGIAESAALRPQWCCHCKVVILGSGVRKSFKDLTLLNKDSRESTKRVEKDIVFCSNNCFILYSSTAQAKNSENKESIPSLPQSPMRETPSKAFHQYSNNISTLDVHCLPQLPEKASPPASPPIAFPPAFEAAQVEAKPDELKVTVKLKPRLRAVHGGFEDCRPLNKKWRGMKWKKWSIHIVIPKGTFKPPCEDEIDEFLKKLGTSLKPDPVPKDYRKCCFCHEEGDGLTDGPARLLNLDLDLWVHLNCALWSTEVYETQAGALINVELALRRGLQMKCVFCHKTGATSGCHRFRCTNIYHFTCAIKAQCMFFKDKTMLCPMHKPKGIHEQELSYFAVFRRVYVQRDEVRQIASIVQRGERDHTFRVGSLIFHTIGQLLPQQMQAFHSPKALFPVGYEASRLYWSTRYANRRCRYLCSIEEKDGRPVFVIRIVEQGHEDLVLSDISPKGVWDKILEPVACVRKKSEMLQLFPAYLKGEDLFGLTVSAVARIAESLPGVEACENYTFRYGRNPLMELPLAVNPTGCARSEPKMSAHVKRPHTLNSTSTSKSFQSTVTGELNAPYSKQFVHSKSSQYRKMKTEWKSNVYLARSRIQGLGLYAARDIEKHTMVIEYIGTIIRNEVANRKEKLYESQNRGVYMFRMDNDHVIDATLTGGPARYINHSCAPNCVAEVVTFERGHKIIISSSRRIQKGEEVRV

SEQ ID NO: 54003 - protein, 37 aa, Homo sapiens
MGVTGAHGFPCCGKGSVEVAEMRDDLSQHQIQEEQEL

SEQ ID NO: 54004 - protein, 64 aa, Homo sapiens
EDCIITACQEGLICTWARPGKAFTDEETEAQTGEGSWPRSPSKSVVEVGLSLSSFPSTSGSLPS

SEQ ID NO: 54005 - protein, 62 aa, Homo sapiens
ALSGYCCVAALTLRGVGPCRKDGLQGQLEEMTELESPKCKRQENEQLLDQNQEIRASQRSWV

SEQ ID NO: 54006 - protein, 652 aa, Homo sapiens
FVKFANIEEDTPSYHRSYDFFVSRFSEMCHSSHDDLEIKTKIRMSGIKGLQGVVRKTVNDELQANIWDPQHMDKIVPSLLFNLQHVEEAESRSPSPLQAPEKEKESPAELAERCLRELLGRAAFGNIKNAIKPVLIHLDNHSLWEPKVFAIRCFKIIMYSIQPQHSHLVIQQLLGHLDANSRSAATVRAGIVEVLSEAAVIAATGSVGPTVLEMFNTLLRQLRLSIDYALTGSYDGAVSLGTKIIKEHEERMFQEAVIKTVGSFASTLPTYQRSEVILFIMSKVPRPSLHQAVDTGRTGENRNRLTQIMLLKSLLQVSTGFQCNNMMSALPSNFLDRLLSTALMEDAEIRLFVLEILISFIDRHGNRHKFSTISTLSDISVLKLKVDKCSRQDTVFMKKHSQQLYRHIYLSCKEETNVQKHYEALYGLLALISIELANEEVVVDLIRLVLAVQVIETRKKEAPYMLPEDVFVERPRLSQNLDGVVIELLFRQSKISEVLGGSGYNSDRLCLPYIPQLTDEDRLSKRRSIGETISLQVEVESRNSPEKEERVPAEEITYETLKKAIVDSVAVEEQERERRRQVVEKFQKAPFEEIAAHCGARASLLQSKLNQIFEITIRPPPSPSGTITAAYGQPQNHSIPVYEMKFPDLCVY

SEQ ID NO: 54007 - protein, 122 aa, Homo sapiens
  MOD_RES (1)..(1): Any amino acid
XLFAVAFNLVKSYMSEETRRKVVILGDNWKQELTKFISPDQLPVEFGGTMTDPDGNPKCLTKINYGGEVPKSYYLCKQVRLQYEHTRSVGRGSSLQVENEILFPGCVLRCPEVLQHLQPGSF

SEQ ID NO: 54008 - protein, 50 aa, Homo sapiens
MEFPDLGAHCSEPSCQRLDFLPLKCDACSGIFCADHVAYAQHHCGSAYQK

SEQ ID NO: 54009 - protein, 156 aa, Homo sapiens
MLSDLQESVASSRPQEVSAYLTRFCDQCKQDKACRFLAAQKGAYPIIFTAWKLATAGDQGLLLQSLNALSVLTDGQPDLLDAQGLQLLVATLTQNADEADLTCSGIRCVRHACLKHEQNRQDLVKAGVLPLLTGAITHHGHHTDVVREACWALRVM

SEQ ID NO: 54010 - protein, 22 aa, Homo sapiens
MEGTAGTITSNEWSSPTSPEGS

SEQ ID NO: 54011 - protein, 2191 aa, Homo sapiens
MRKKELSATKKDRVNHCLTICENIVAQSVRNSPEFQKLLGIAMELFLLCSDDAESDVRMVADECLNKVIKALMDSNLPRLQLELYKEIKKNGAPRSLRAALWRFAELAHLVRPQKCRPYLVNLLPCLTRTSKRPEESVQETLAAAVPKIMASFGNFANDNEIKVLLKAFIANLKSSSPTIRRTAAGSAVSICQHSRRTQYFYSWLLNVLLGLLVPVEDEHSTLLILGVLLTLRYLVPLLQQQVKDTSLKGSFGVTRKEMEVSPSAEQLVQVYELTLHHTQHQDHNVVTGALELLQQLFRTPPPELLQTLTAVGGIGQLTAAKEESGGRSRSGSIVELIAGGGSSCSPVLSRKQKGKVLLGEEEALEDDSESRSDVSSSALTASVKDEISGELAASSGVSTPGSAGHDIITEQPRSQHTLQADSVDLASCDLTSSATDGDEEDILSHSSSQVSAVPSDPAMDLNDGTQASSPISDSSQTTTEGPDSAVTPSDSSEIVLDGTDNQYLGLQIGQPQDEDEEATGILPDEASEAFRNSSMALQQAHLLKNMSHCRQPSDSSVDKFVLRDEATEPGDQENKPCRIKGDIGQSTDDDSAPLVHCVRLLSASFLLTGGKNVLVPDRDVRVSVKALALSCVGAAVALHPESFFSKLYKVPLDTTEYPEEQYVSDILNYIDHGDPQVRGATAILCGTLICSILSRSRFHVGDWMGTIRTLTGNTFSLADCIPLLRKTLKDESSVTCKLACTAVRNCVMSLCSSSYSELGLQLIIDVLTLRNSSYWLVRTELLETLAEIDFRLVSFLEAKAENLHRGAHHYTGLLKLQERVLNNVVIHLLGDEDPRVRHVAAASLIRLVPKLFYKCDQGQADPVVAVARDQSSVYLKLLMHETQPPSHFSVSTITRIYRGYNLLPSITDVTMENNLSRVIAAVSHELITSTTRALTFGCCEALCLLSTAFPVCIWSLGWHCGVPPLSASDESRKSCTVGMATMILTLLSSAWFPLDLSAHQDALILAGNLLAASAPKSLRSSWASEEEANPAATKQEEVWPALGDRALVPMVEQLFSHLLKVINICAHVLDDVAPGPAIKAALPSLTNPPSLSPIRRKGKEKEPGEQASVPLSPKKGSEASAASRQSDTSGPVTTSKSSSLGSFYHLPSYLKLHDVLKATHANYKVTLDLQNSTEKFGGFLRSALDVLSQILELATLQDIGKCVEEILGYLKSCFSREPMMATVCVQQLLKTLFGTNLASQFDGLSSNPSKSQGRAQRLGSSSVRPGLYHYCFMAPYTHFTQALADASLRNMVQAEQENDTSGWFDVLQKVSTQLKTNLTSVTKNRADKNAIHNHIRLFEPLVIKALKQYTTTTCVQLQKQVLDLLAQLVQLRVNYCLLDSDQVFIGFVLKQFEYIEVGQFRESEAIIPNIFFFLVLLSYERYHSKQIIGIPKIIQLCDGIMASGRKAVTHAIPALQPIVHDLFVLRGTNKADAGKELETQKEVVVSMLLRLIQYHQVLEMFILVLQQCHKENEDKWKRLSRQIADIILPMLAKQQMHIDSHEALGVLNTLFEILAPSSLRPVDMLLRSMFVTPNTMASVSTVQLWISGILAILRVLISQSTEDIVLSRIQELSFSPYLISCTVINRLRDGDSTSTLEEHSEGKQIKNLPEETFSRFLLQLVGILLEDIVTKQLKVEMSEQQHTFYCQELGTLLMCLIHIFKSGMFRRITAAATRLFRSDGCGGSFYTLDSLNLRARSMITTHPALVLLWCQILLLVNHTDYRWWAEVQQTPKRHSLSSTKLLSPQMSGEEEDSDLAAKLGMCNREIVRRGALILFCDYVCQNLHDSEHLTWLIVNHIQDLISLSHEPPVQDFISAVHRNSAASGLFIQAIQSRCENLSTPTMLKKTLQCLEGIHLSQSGAVLTLYVDRLLCTPFRVLARMVDILACRRVEMLLAANLQSSMAQLPMEELNRIQEYLQSSGLAQRHQRLYSLLDRFRLSTMQDSLSPSPPVSSHPLDGDGHVSLETVSPDKDWYVHLVKSQCWTRSDSALLEGAELVNRIPAEDMNAFMMNSEFNLSLLAPCLSLGMSEISGGQKSALFEAAREVTLARVSGTVQQLPAVHHVFQPELPAEPAAYWSKLNDLFGDAALYQSLPTLARALAQYLVVVSKLPSHLHLPPEKEKDIVKFVVATLEVHEWAFCDSVLPFRPCPGI

SEQ ID NO: 54012 - protein, 22 aa, Homo sapiens
MKPTAASNTTTPGMVSTNMTST

SEQ ID NO: 54013 - protein, 1207 aa, Homo sapiens
MVSSGCRMRSLWFIIVISFLPNTEGFSRAALPFGLVRRELSCEGYSIDLRCPGSDVIMIESANYGRTDDKICDADPFQMENTDCYLPDAFKIMTQRCNNRTQCIVVTGSDVFPDPCPGTYKYLEVQYECVPYIFVCPGTLKAIVDSPCIYEAEQKAGAWCKDPLQAADKIYFMPWTPYRTDTLIEYASLEDFQNSRQTTTYKLPNRVDGTGFVVYDGAVFFNKERTRNIVKFDLRTRIKSGEAIINYANYHDTSPYRWGGKTDIDLAVDENGLWVIYATEQNNGMIVISQLNPYTLRFEATWETVYDKRAASNAFMICGVLYVVRSVYQDNESETGKNSIDYIYNTRLNRGEYVDVPFPNQYQYIAAVDYNPRDNQLYVWNNNFILRYSLEFGPPDPAQVPTTAVTITSSAELFKTIISTTSTTSQKGPMSTTVAGSQEGSKGTKPPPAVSTTKIPPITNIFPLPERFCEALDSKGIKWPQTQRGMMVERPCPKGTRGTASYLCMISTGTWNPKGPDLSNCTSHWVNQLAQKIRSGENAASLANELAKHTKGPVFAGDVSSSVRLMEQLVDILDAQLQELKPSEKDSAGRSYNKAIVDTVDNLLRPEALESWKHMNSSEQAHTATMLLDTLEEGAFVLADNLLEPTRVSMPTENIVLEVAVLSTEGQIQDFKFPLGIKGAGSSIQLSANTVKQNSRNGLAKLVFIIYRSLGQFLSTENATIKLGADFIGRNSTIAVNSHVISVSINKESSRVYLTDPVLFTLPHIDPDNYFNANCSFWNYSERTMMGYWSTQGCKLVDTNKTRTTCACSHLTNFAILMAHREIAYKDGVHELLLTVITWVGIVISLVCLAICIFTFCFFRGLQSDRNTIHKNLCINLFIAEFIFLIGIDKTKYAIACPIFAGLLHFFFLAAFAWMCLEGVQLYLMLVEVFESEYSRKKYYYVAGYLFPATVVGVSAAIDYKSYGTEKACWLHVDNYFIWSFIGPVTFIILLNIIFLVITLCKMVKHSNTLKPDSSRLENIKSWVLGAFALLCLLGLTWSFGLLFINEETIVMAYLFTIFNAFQGVFIFIFHCALQKKVRKEYGKCFRHSYCCGGLPTESPHSSVKASTTRTSARYSSGTQSRIRRMWNDTVRKQSESSFISGDINSTSTLNQGMTGNYLLTNPLLRPHGTNNPYNTLLAETVVCNAPSAPVFNSPATLRPDSLSRQT

SEQ ID NO: 54014 - protein, 91 aa, Homo sapiens
MLLNGDCPESLKKEAAAAEPPRENGLDEAGPGDETTGQEVIVIQDTGFSVKILAPGIEPFSLQVSPQEMVQEIHQVLMDREDTCHRTCFSL

SEQ ID NO: 54015 - protein, 200 aa, Homo sapiens
  MOD_RES (1)..(1): Any amino acid
XKLTTQPKKQKHLKYYLVRSSQGVLSKGPLICWKECRSRQSSASCHSIKPSSSVSSTVTPENGTTNGYKSGFTQTDSPILSPANSAINLSGAQDLTRNNNVVKPLALSLQVVGKTFAADAANGNSSHGGKGSASSSTPAHTGNYSLSPRPSYASGDQATMFISGPPKKRHRGWYPGSPLPQPGLVVPVPTVRPLSRTEPL

SEQ ID NO: 54016 - protein, 574 aa, Homo sapiens
MKATWIRLLKRAKGGRLKNSDICGSADSYTSRPSDSDVSLEEDREAVRREAERQAQAQLEKAKTKPVAFAVRTNVSYSAAHEDDVPVPGMAISFEAKDFLHVKEKFNNDWWIGRLVKEGCEIGFIPSPVKLENMRLQHEQRAKQGKFYSSKSGGNSSSSLGDIVPSSRKSTPPSSAKQKQKSTEHTPPYDVVPSMRPVVLVGPSLKGYEVTDMMQKALFDFLKHRFEGRISITRVTADISLAKRSVLNNPSKHAIIERSNTRSSLAEVQSEIERIFELARTLQLVVLDADTINHPAQLSKTSLAPIIVYVKISSPKVLQRLIKSRGKSQAKHLNVQMVAADKLAQCPPELFDVILDENQLEDACEHLADYLEAYWKATHPPSSSLPNPLLSRTLATSSLPLSPTLASNSQGSQGDQRTDRSAPIRSASQAEEEPSVEPVKKSQHRSSSSAPHHNHRSGTSRGLSRQETFDSETQESRDSAYVEPKEDYSHDHVDHYASHRDHNHRDETHGSSDHRHRESRHRSRDVDREQDHNECNKQRSRHKSKDRYCEKDGEVISKKRNEAGEWNRDVYIRQ

SEQ ID NO: 54017 - protein, 334 aa, Homo sapiens
MAPRSLLLLLSGALALTDTWAGSHSLRYFSTAVSRPGRGEPRYIAVEYVDDTQFLRFDSDAAIPRMEPREPWVEQEGPQYWEWTTGYAKANAQTDRVALRNLLRRYNQSEAGSHTLQGMNGCDMGPDGRLLRGYHQHAYDGKDYISLNEDLRSWTAADTVAQITQRFYEAEEYAEEFRTYLEGECLELLRRYLENGKETLQRADPPKAHVAHHPISDHEATLRCWALGFYPAEITLTWQRDGEEQTQDTELVETRPAGDGTFQKWAAVVVPSGEEQRYTCHVQHEGLPQPLILRWEQSPQPTIPIVGIVAGLVVLGAVVTGAVVAAVMWRKKSS

SEQ ID NO: 54018 - protein, 233 aa, Homo sapiens
MESMAVATDGGERPGVPAGSGLSASQRRAELRRRKLLMNSEQRINRIMGFHRPGSGAEEESQTKSKQQDSDKLNSLSVPSVSKRVVLGDSVSTGTTDQQGGVAEVKGTQLGDKLDSFIKPPECSSDVNLELRQRNRGDLTADSVQRGSRHGLEQYLSRFEEAMKLRKQLISEKPSQEDGNTTEEFDSFRIFRLVGCALLALGVRAFVCKYLSIFAPFLTLQLAYMGLYKYFPK

SEQ ID NO: 54019 - protein, 145 aa, Homo sapiens
MSEGVDLIDIYADEEFNQDPEFNNTDQIDLYDDVLTATSQPSDDRSSSTEPPPPVRQEPSPKPNNKTPAILYTYSGLRNRRAAVYVGSFSWWTTDQQLIQVIRSIGVYDVVELKFAENRANGQSKGYAEVVVASENSVHKLLELL

SEQ ID NO: 54020 - protein, 1438 aa, Homo sapiens
MQRSPLEKASVVSKLFFSWTRPILRKGYRQRLELSDIYQIPSVDSADNLSEKLEREWDRELASKKNPKLINALRRCFFWRFMFYGIFLYLGEVTKAVQPLLLGRIIASYDPDNKEERSIAIYLGIGLCLLFIVRTLLLHPAIFGLHHIGMQMRIAMFSLIYKKGLALAHFVWIAPLQVALLMGLIWELLQASAFCGLGFLIVLALFQAGLGRMMMKYRDQRAGKISERLVITSEMIENIQSVKAYCWEEAMEKMIENLRQTELKLTRKAAYVRYFNSSAFFFSGFFVVFLSVLPYALIKGIILRKIFTTISFCIVLRMAVTRQFPWAVQTWYDSLGAINKIQDFLQKQEYKTLEYNLTTTEVVMENVTAFWEEGFGELFEKAKQNNNNRKTSNGDDSLFFSNFSLLGTPVLKDINFKIERGQLLAVAGSTGAGKTSLLMVIMGELEPSEGKIKHSGRISFCSQFSWIMPGTIKENIIFGVSYDEYRYRSVIKACQLEEDISKFAEKDNIVLGEGGITLSGGQRARISLARAVYKDADLYLLDSPFGYLDVLTEKEIFESCVCKLMANKTRILVTSKMEHLKKADKILILHEGSSYFYGTFSELQNLQPDFSSKLMGCDSFDQFSAERRNSILTETLHRFSLEGDAPVSWTETKKQSFKQTGEFGEKRKNSILNPINSIRKFSIVQKTPLQMNGIEEDSDEPLERRLSLVPDSEQGEAILPRISVISTGPTLQARRRQSVLNLMTHSVNQGQNIHRKTTASTRKVSLAPQANLTELDIYSRRLSQETGLEISEEINEEDLKECFFDDMESIPAVTTWNTYLRYITVHKSLIFVLIWCLVIFLAEVAASLVVLWLLGNTPLQDKGNSTHSRNNSYAVIITSTSSYYVFYIYVGVADTLLAMGFFRGLPLVHTLITVSKILHHKMLHSVLQAPMSTLNTLKAGGILNRFSKDIAILDDLLPLTIFDFIQLLLIVIGAIAVVAVLQPYIFVATVPVIVAFIMLRAYFLQTSQQLKQLESEGRSPIFTHLVTSLKGLWTLRAFGRQPYFETLFHKALNLHTANWFLYLSTLRWFQMRIEMIFVIFFIAVTFISILTTGEGEGRVGIILTLAMNIMSTLQWAVNSSIDVDSLMRSVSRVFKFIDMPTEGKPTKSTKPYKNGQLSKVMIIENSHVKKDDIWPSGGQMTVKDLTAKYTEGGNAILENISFSISPGQRVGLLGRTGSGKSTLLSAFLRLLNTEGEIQIDGVSWDSITLQQWRKAFGVIPQKVFIFSGTFRKNLDPYEQWSDQEIWKVADEVGLRSVIEQFPGKLDFVLVDGGCVLSHGHKQLMCLARSVLSKAKILLLDEPSAHLDPVTYQIIRRTLKQAFADCTVILCEHRIEAMLECQQFLVIEENKVRQYDSIQKLLNERSLFRQAISPSDRVKLFPHRNSSKCKSKPQIAALK

SEQ ID NO: 54021 - protein, 125 aa, Homo sapiens
PINNADFIVPIEIEGTTHQVYVLKRPYVDEFLRRMGELFECVLFTASLAKGCYVKDLSRLGRDLRKTLILDNSPASYIFHPENAVPVQSWFDDMADTELLNLIPIFEELSGAEDVYTSLGQLRAP

SEQ ID NO: 54022 - protein, 624 aa, Homo sapiens
MERCSRCHRLLLLLPLVLGLSAAPGWAGAPPVDVLRALRFPSLPDGVRRAKGICPADVAYRVARPAQLSAPTRQLFPGGFPKDFSLLTVVRTRPGLQAPLLTLYSAQGVRQLGLELGPPVRFLYEDQTGRPQPPSQPVFRGLSLADGKWHRVAVAVKGQSVTLIVDCKKRVTRPLPRSARPVLDTHGVIIFGARILDEEVFEGDVQELAIVPGVQAAYESCEQKELECEGGQRERPQNQQPHRAQRSPQQQPSRLHRPQNQEPQSQPTESLYYDYKPPYYDVMTTGTTPDYQDPTPGEEEEILESSLLPPLEEEQTDLQVPPTADRFQAEEYGEGGTDPPEGPYDYTYGYGDDYREETELGPALSAETAHSGAAAHGPRGLKGEKGEPAVLEPGMLVEGPPGPEGPAGLIGPPGIQGNPGPVGDPGERGPPGRAGLPGSDGAPGPPGTSLMLPFRFGSGGGDKGPVVAAQEAQAQAILQQARLALRGPPGPMGYTGRPGPLGQPGSPGLKGESGDLGPQGPRGPQGLTGPPGKAGRRGRAGADGARGMPGDPGVKGDRGFDGLPGLPGEKGHRGDTGAQGLPGPPGEDGERGDDGEIGPRGLPGESGPRGLLGPKGPPGIPGPP

SEQ ID NO: 54023 - protein, 118 aa, Homo sapiens
MGRHCGYLALVSALACGADWVFLPESPPEEGWEEQMCVKLSENRARKKRLNIIIVAEGAIDTQNKPITSEKIKELVVTQLGYDTRVTILGHVQRGGTPSAFDRILASRMGVEAVIALL

SEQ ID NO: 54024 - protein, 394 aa, Homo sapiens; identical to SEQ ID NO: 13636

SEQ ID NO: 54025 - protein, 87 aa, Homo sapiens
MFSLMASCCGWFKRWREPVRKVTLLMVGLDNAGKTATAKGIQGEMGSPYVAQAGLECLASSYSSALASKSAGITGMSHHAQPGQVGK

SEQ ID NO: 54026 - protein, 895 aa, Homo sapiens
MGDMANSSIEFHPKPQQQRDVPQAGGFGCTLAELRTLMELRGAEALQKIEEAYGDVSGLCRRLKTSPTEGLADNTNDLEKRRQIYGQNFIPPKQPKTFLQLVWEALQDVTLIILEVAAIVSLGLSFYAPPGEESEACGNVSGGAEDEGEAEAGWIEGAAILLSVICVVLVTAFNDWSKEKQFRGLQSRIEQEQKFTVIRNGQLLQVPVAALVVGDIAQVKYGDLLPADGVLIQANDLKIDESSLTGESDHVRKSADKDPMLLSGTHVMEGSGRMVVTAVGVNSQTGIIFTLLGAGGEEEEKKDKKGKQQDGAMESSQTKAKKQDGAVAMEMQPLKSAEGGEMEEREKKKANAPKKEKSVLQGKLTKLAVQIGKAGLVMSAITVIILVLYFVIETFVVEGRTWLAECTPVYVQYFVKFFIIGVTVLVVAVPEGLPLAVTISLAYSVKKMMKDNNLVRHLDACETMGNATAICSDKTGTLTTNRMTVVQSYLGDTHYKEIPAPSALTPKILDLLVHAISINSAYTTKILPPEKEGALPRQVGNKTECALLGFVLDLKRDFQPVREQIPEDKLYKVYTFNSVRKSMSTVIRMPDGGFRLFSKGASEILLKKCTNILNSNGELRGFRPRDRDDMVRKIIEPMACDGLRTICIAYRDFSAGQEPDWDNENEVVGDLTCIAVVGIEDPVRPEVPEAIRKCQRAGITVRMVTGDNINTARAIAAKCGIIQPGEDFLCLEGKEFNRRIRNEKGEIEQERLDKVWPKLRVLARSSPTDKHTLVKGIIDSTTGEQRQVVAVTGDGTNDGPALKKADVGFAMGIAGTDVAKEASDIILTDDNFTSIVKAVMWGRNVYDSISKFLQFQLTVNVVAVIVAFTGACITQFWKFPMNGIRQYVALCVWLL

SEQ ID NO: 54027 - protein, 219 aa, Homo sapiens
MPQKQAEKVVIKKEKDISAPNDGTAQRTENHGAPACHRLKEEEDEYETSGEGQDIWDMLDKGNPFQFYLTRVSGVKPKYNSGALHIKDILSPLFGTLVSSAQFNYCFDVDWLVKQYPPEFRKKPILLVHGDKREAKAHLHAQAKPYENISLCQAKLDIAFGTHHTKMMLLLYEEGLRVVIHTSNLIHADWHQKTQGIWLSPLYPRIADGTHKSGESPTH

SEQ ID NO: 54028 - protein, 61 aa, Homo sapiens
MEPSQCVEELEDDVFQPEDGEPVTQPGSLLSADLFAQSLLDCPLSRLQLFPLTHCCGPGLR

SEQ ID NO: 54029 - protein, 63 aa, Homo sapiens
MSQQRPARKLPSLLLDPTEETVRRRCRDPINVEGLLPSKIRINLEDNVQYVSMRNLLPGVFLT

SEQ ID NO: 54030 - protein, 555 aa, Homo sapiens
  MOD_RES (1)..(1): Any amino acid
XETTAKESLRRVLQEKIEVVRKLSEVERSLSNTEDECTHLKEMNERTQEELRELANKYNGAVNEIKDLSDKLKVAEGKQEEIQQKGQAEKKELQHKIDEMEEKEQELQAKIEALQADNDFTNERLTALQVRLEHLQEKTLKECSSLEKLIVEGHLTKAVEETKLSKENQTRAKESDFSDTLSPSKEKSSDDTTDAQMDEQDLNEPLAKVSLLKDDLQGAQSEIEAKQEIQHLRKELIEAQELARTSKQKCFELQALLEEERKAYRNQVEESTKQIQVLQAQLQRLHIDTENLREEKDSEITSTRDELLSARDEILLLHQAAAKVASERDTDIASLQEELKKVRAELERWRKAASEYEKEITSLQNSFQLRCQQCEDQQREEATRLQGELEKLRKEWNALETECHSLKRENVLLSSELQRQEKELHNSQKQSLELTSDLSILQMSRKELENQVGSLKEQHLRDSADLKTLLSKAENQAKDVQKEYEKTQTVLSELKLKFEMTEQEKQSITDELKQCKNNLKLLREKGNNPSILQPVPAVFIGLFLAFLFWCFGPLW

SEQ ID NO: 54031 - protein, 239 aa, Homo sapiens
  MOD_RES (1)..(1): Any amino acid
XGRRAQSALAQLRGILEGELEGIRGAGTWKSERVITSRQGPHIRVDGVSGGILNFCANNYLGLSSHPEVIQAGLQALEEFGAGLSSVRFICGTQSIHKNLEAKIARFHQREDAILYPSCYDANAGLFESRALVQPGTETRGPQREAQNTLPLYPEERPGWQYSFLICWSPGQGRSPGWLNDGSTLTASLQALLTPEDAVLSDELNHASIIDGIRLCKAHKYRYRHLDMADLEAKLQEAQ

SEQ ID NO: 54032 - protein, 265 aa, Homo sapiens
MDLIDILWRQDIDLGVSREVFDFSQRRKEYELEKQKKLEKERQEQLQKEQEKAFFAQLQLDEETAEFNDSDSGISLNTSPSVASPEHSVESSSYGDTLLGLSDSEVEELDSAPGSVKQNGPKTPVHSSGDMVQPLSPSQGQSTHVHDAQCENTPEKELPVSPGHRKTPFTKDKHSSRLEAHLTRDELRAKALHIPFPVEKIINLPVVDFNEMMSKEQFNEAQLALIRDIRRRGKNKVAAQNCRKRKLENIVELEQDLDHLKDEKE

SEQ ID NO: 54033 - protein, 285 aa, Homo sapiens
MAEAVFHAPKRKRRVYETYESPLPIPFGQDHGPLKEFKIFRAEMINNNVIVRNAEDIEQLYGKGYFGKGILSRSRPSFTISDPKLVAKWKDMKTNMPIITSKRYQHSVEWAAELMRRQGQDESTVRRILKDYTKPLEHPPVKRNEEAQVHDKLNSGMVSNMEGTAGGERPSVVNGDSGKSGGVGDPREPLGCLQEGSGCHPTTESFEKSVREDASPLPHVCCCKQDALILQRGLHHEDGSQHIGLLHPGDRGPDHEYVLVEEAECAMSEREAAPNEELFCHYRAS

SEQ ID NO: 54034 - protein, 1685 aa, Homo sapiens
MSYWNLEKRNCVQYRRHFLVDNSVFHVERCMSVMQSGTQMIKLKRGTKGLVRLFYLDEHRTRLRWRPSRKSEKAKILIDSIYKVTEGRQSEIFHRQAEGNFDPSCCFTIYHGNHMESLDLITSNPEEARTWITGLKYLMAGISDEDSLAKRQRTHDQWVKQTFEEADKNGDGLLNIEEIHQLMHKLNVNLPRRKVRQMFQEADTDENQGTLTFEEFCVFYKMMSLRRDLYLLLLSYSDKKDHLTVEELAQFLKVEQKMNNVTTDYCLDIIKKFEVSEENKVKNVLGIEGFTNFMRSPACDIFNPLHHEVYQDMDQPLCNYYIASSHNTYLTGDQLLSQSKVDMYARVLQEGCRCVEVDCWDGPDGEPVVHHGYTLTSKILFRDVVETINKHAFVKNEFPVILSIENHCSIQQQRKIAQYLKGIFGDKLDLSSVDTGECKQLPSPQSLKGKILVKGKKLPYHLGDDAEEGEVSDEDSADEIEDECKFKLHYSNGTTEHQVESFIRKKLESLLKESQIRDKEDPDSFTVRALLKATHEGLNAHLKQSPDVKESGKKSHGRSLMTNFGKHKKTTKSRSKSYSTDDEEDTQQSTGKEGGQLYRLGRRRKTMKLCRELSDLVVYTNSVAAQDIVDDGTTGNVLSFSETRAHQVVQQKSEQFMIYNQKQLTRIYPSAYRIDSSNFNPLPYWNAGCQLVALNYQSEGRMMQLNRAKFKANGNCGYVLKPQQMCKGTFNPFSGDPLPANPKKQLILKVISGQQLPKPPDSMFGDRGEIIDPFVEVEIIGLPVDCCKDQTRVVDDNGFNPVWEETLTFTVHMPEIALVRFLVWDHDPIGRDFVGQRTVTFSSLVPGYRHVYLEGLTEASIFVHITINEIYGKNRQLQGLKGLFNKNPRHSSSENNSHYVRKRSIGDRILRRTASAPAKGRKKSKMGFQEMVEIKDSVSEATRDQDGVLRRTTRSLQARPVSMPVDRNLLGALSLPVSETAKDIEGKENSLAEDKDGRRKGKASIKDPHFLNFNKKLSSSSSALLHKDTSQGDTIVSTAHMSVTGEQLGMSSPRGGRTTSNATSNCQENPCPSKSLSPKQHLAPDPVVNPTQDLHGVKIKEKGNPEDFVEGKSILSGSVLSHSNLEIKNLEGNRGKGRAATSFSLSDVSMLCSDIPDLHSTAILQESVISHLIDNVTLTNENEPGSSISALIGQFDETNNQALTVVSHLHNTSVMSGHCPLPSLGLKMPIKHGFCKGKSKSSFLCSSPELIALSSSETTKHATNTVYETTCTPISKTKPDDDLSSKAKTAALESNLPGSPNTSRGWLPKSPTKGEDWETLKSCSPASSPDLTLEDVIADPTLCFNSGESSLVEIDGESENLSLTTCEYRREGTSQLASPLKLKYNQGVVEHFQRGLRNGYCKETLRPSVPEIFNNIQDVKTQSISYLAYQGAGFVHNHFSDSDAKMFQTCVPQQSSAQDMHVPVPKQLAHLPLPALKLPSPCKSKSLGDLTSEDIACNFESKYQCISKSFVTTGIRDKKGVTVKTKSLEPIDALTEQLRKLVSFDQEDNCQVLYSKQDANQLPRALVRKLSSRSQSRVRNIASRAKEKQEANKQKVPNPSNGAGVVLRNKPSAPTPAVNRHSTGSYIAGYLKNTKGGGLEGRGIPEGACTALHYGHVDQFCSDNSVLQTEPSSDDKPEIYFLLRL

SEQ ID NO: 54035 - protein, 131 aa, Homo sapiens
MSSEPPPPPQPPTHQASVGLLDTPRSRERSPSPLRGNVVPSPLPTRRTRTFSATVRASQGPVYKGVCKCFCRSKGHGFITPADGGPDIFLHISDVEGEYVPVEGDEVTYKMCSIPPKNEKLQAVEVVITHL

SEQ ID NO: 54036 - protein, 80 aa, Homo sapiens
MILKLILSLKNFLRRYKCSSDHWIGLKMAKNRTGQWVDGATFTKSFGMRGSEGCAYLSDDGAATARCYTERKWICRKRIH

SEQ ID NO: 54037 - protein, 11 aa, Homo sapiens
MTAPSCAFPVQ

SEQ ID NO: 54038 - protein, 139 aa, Homo sapiens
MALFQQLTCVLPILDNLLKANVINKQEHDIIKQKTQIPLQARELIDTILVKGNAAANIFKNCLKEIDSTLYKNLFVDKNMKYIPTEDVSGLSLEEQLRRLQEERTCKVCMDKEVSVVFIPCGHLVVCQECAPSLRKCPI

SEQ ID NO: 54039 - protein, 169 aa, Homo sapiens
MRTAGRDPVSAGLQFPKDGSTQRPANRARFVPARTRPSPLHPCCFCFEGGGSMLSPQRVAAAASRGADDAMESSKPGPVQVVLVQKDQHSFELDEKALASILLQDHIRDLDVVVVSVAGAFRKGKSFILDFMLRYLYSQKESGHSNWLGDPEEPLTGFSWRGGSDPETT

SEQ ID NO: 54040 - protein, 29 aa, Homo sapiens
AQKEICKMLSPWYDEFLDEEDYWFLLFTT

SEQ ID NO: 54041 - protein, 317 aa, Homo sapiens
MARRGPGWRPLLLLVLLAGAAQGGLYFRRGQTCYRPLRGDGLAPLGRSTYPRPHEYLSPADLPKSWDWRNVDGVNYASITRNQHIPQYCGSCWAHASTSAMADRINIKRKGAWPSTLLSVQNVIDCGNAGSCEGGNDLSVWDYAHQHGIPDETCNNYQAKDQEMRSRSVVQAGLRLLVSSHLPASASRSAGITECDKFNQCGTCNEFKECHAIRNYTLWRVGDYGSLSGREKMMAEIYANGPISCGIMATERLANYTGGIYAEYQDTTYINHVVSVAGWGISDGTEYWIVRNSWGEPWVRCFHFLKVIPRKKRPGTP

SEQ ID NO: 54042 - protein, 49 aa, Homo sapiens
  MOD_RES (1)..(1): Any amino acid
XSQGSPVKSYDYLLKFLLVGDSDVGKGEILESLQDGAAESPYAYSNDCS

SEQ ID NO: 54043 - protein, 436 aa, Homo sapiens
MSSPGTESAGKSLQYRVDHLLSAVENELQAGSEKGDPTERELRVGLEESELWLRFKELTNEMIVTKNGRRMFPVLKVNVSGLDPNAMYSFLLDFVAADNHRWKYVNGEWVPGGKPEPQAPSCVYIHPDSPNFGAHWMKAPVSFSKVKLTNKLNGGGQIMLNSLHKYEPRIHIVRVGGPQRMITSHCFPETQFIAVTAYQNEEITALKIKYNPFAKAFLDAKERSDHKEMMEEPGDSQQPGYSQSGGWLLPGTSTLCPPANPHPQFGGALSLPSTHSCDRYPTLRSHRSSPYPSPYAHRNNSPTYSDNSPACLSMLQSHDNWSSLGMPAHPSMLPVSHNASPPTSSSQYPSLWSVSNGAVTPGSQAAAVSNGLGAQFFRGSPAHYTPLTHPVSAPSSSGSPLYEGAAAATDIVDSQYDAAAQGRLIASWTPVSPPSM

SEQ ID NO: 54044 - protein, 2822 aa, Homo sapiens [sequence omitted]

SEQ ID NO: 54045 - protein, 480 aa, Homo sapiens
  MOD_RES (1)..(1): Any amino acid
XWGQPSRAGPLDGVAKELGSHLLQTLDGFVFVVASDGKIMYISETASVHLGLSQVELTGNSIYEYIHPSDHDEMTAVLTAHQPLHHHLLQEYEIERSFFLRMKCVLAKRNAGLTCSGYKVIHCSGYLKIRQYMLDMSLYDSCYQIVGLVAVGQSLPPSAITEIKLYSNMFMFRASLDLKLIFLDSRVTEVTGYEPQDLIEKTLYHHVHGCDVFHLRYAHHLLLVKGQVTTKYYRLLSKRGGWVWVQSYATVVHNSRSSRPHCIVSVNYVLTEIEYKELQLSLEQVSTAKSQDSWRTALSTSQETRKLVKPKNTKMKTKLRTNPYPPQQYSSFQMDKLECGQLGNWRASPPASAAAPPELQPHSESSDLLYTPSYSLPFSYHYGHFPLDSHVFSSKKPMLPAKFGQPQGSPCEVARFFLSTLPASGECQWHYANPLVPSSSSPAKNPPEPPANTARHSLVPSYEGKQMSSAEIPPAPQDAD

SEQ ID NO: 54046 - protein, 133 aa, Homo sapiens
MLGMIKNSLFGSVETWPWQVLSKGDKEEVAYEERACEGGKFATVEVTDKPVDEALREAMPKVAKYAGGTNDKGIGMGMTVPISFAVFPNEDGSLQKKLKVWFRIPNQFQSDPPAPSDKSVKIEEREGITVYSM

SEQ ID NO: 54047 - protein, 68 aa, Homo sapiens
MVDSGTEARARGKAEAGLQDGISGPATARVNGKTQAEAVAEAELKTESVTQAKAGDGAMTRTHTVTYR

SEQ ID NO: 54048 - protein, 216 aa, Homo sapiens
MLTCNKAGSRMVVDAANSNGPFQPVVLLHIRDVPPADQEKLFIQKLRQCCVLFDFVSDPLSDLKWKEVKRAALSEMVEYITHNRNVITEPIYPEVVHMFAVNMFRTLPPSSNPTGAEFDPEEDEPTLEAAWPHLQLLELFDSEDPRERDFLKTTLHRIYGKFLGLRAYIRKQINNIFYRFIYETEHHNGIAELLEILGSIINGFALPLKEEHKIFL

SEQ ID NO: 54049 - protein, 82 aa, Homo sapiens
MSDNDDIEVESDSVHWRRRGQVPNCRPTTPPQTTASTPTPRAAPSLPSMGARTPARSLSLKSPKAGRSSGWRPAKPLGAGQQ

SEQ ID NO: 54050 - protein, 888 aa, Homo sapiens
  MOD_RES (1)..(1): Any amino acid
XSVGASGQRPVFCPVHKQEQLKLFCETCDRLTCRDCQLLEHKEHRYQFLEEAFQNQKGAIENLLAKLLEKKNYVHFAATQVQNRIKEVNETNKRVEQEIKVAIFTLINEINKKGKSLLQQLENVTKERQMKLLQQQNDITGLSRQVKHVMNFTNWAIASGSSTALLYSKRLITFQLRHILKARCDPVPAANGAIRFHCDPTFWAKNVVNLGNLVIESKPAPGYTPNVVVGQVPPGTNHISKTPGQINLAQLRLQHMQQQVYAQKHQQLQQMRMQQPPAPVPTTTTTTQQHPRQAAPQMLQQQPPRLISVQTMQRGNMNCGAFQAHQMRLAQNAARIPGIPRHSGPQYSMMQPHLQRQHSNPGHAGPFPVVSVHNTTINPTSPTTATMANANRGPTSPSVTAIELIPSVTNPENLPSLPDIPPIQANVVPMMHSWYEFGAREKTQDQNVLEDAGSSSLDNLLSRYISGSHLPPQPTSTMNPSPGPSALSPGSSGLSNSHTPVRPPSTSSTGSRGSCGSSGRTAEKTSLSFKSDQVKVKQEPGTEDEICSFSGGVKQEKTEDGRRSACMLSSPESSLTPPLSTNLHLESELDALASLENHVKIEPADMNESCKQSGLSSLVNGKSPIRSLMHRSARIGGDGNNKDDDPNEDWCAVCQNGGDLLCCEKCPKVFHLTCHVPTLLSFPSGDWICTFCRDIGKPEVEYDCDNLQHSKKGKTAQGLSPVDQRKCERLLLYLYCHELSIEFQEPVPASIPNYYKIIKKPMDLSTVKKKLQKKHSQHYQIPDDFVADVRLIFKNCERFNEMMKVVQVYADTQEINLKADSEVAQAGKAVALYFEDKLTEIYSDRTFAPLPEFEQEEDDGEVTEDSDEDFIQPRRKRLKSDERPVHIK

SEQ ID NO: 54051 - protein, 121 aa, Homo sapiens
MFRFMRDVEPEDPMFLMDPFAIHRQHMSRMLSGGFGYSPFLSITDGNMPGTRPASRRMQQAGAVSPFGMLGMSGGFMDMFGMMNDMIGNMEHMTAGGNCQTFSSSTVISYSNTGDGAPKVY

SEQ ID NO: 54052 - protein, 223 aa, Homo sapiens
MAAEEEDEVEWVVESIAGFLRGPDWSIPILDFVEQKCEVFDDEEESKLTYTEIHQEYKELVEKLLEGYLKEIGINEDQFQEACTSPLAKTHTSQAILQPVLAAEDFTIFKAMMVQKNIEMQLQAIRIIQERNGVLPDCLTDGSDVVSDLEHEEMKILREVLRKSKEEYDQEEERKRKKQVPTEHITEVFYCCYLLLSLHLDLTIKIYTYVELHNFKYNVNIDQ

SEQ ID NO: 54053 - protein, 33 aa, Homo sapiens
MRTLEDSSGTVLHRLIQEQLRYGNLTETRTLLA

SEQ ID NO: 54054 - protein, 525 aa, Homo sapiens
  MOD_RES (1)..(1): Any amino acid
XCGVKLSALMVATGRARGARRAGQQPPPPLRVNVVLSGLLGKLFPGPARASQLRHEGNRLYRERQVEAALLKYNEAVKLAPNDHLLYSNRSQIYFTLESHENALHDAEIACKLRPMGFKDNLELPHCSSQEEAAARGDGSSLMDPAKVKGDGQQHHMKDQEEEEEKWDATSPKAASSKTGKCQEKKRKHCQIESQEETGMPNKASKQDPPTDQGDKPALSLPLASFDASDLECALCMRLFYEPVTTPCGHTFCLKCLERCLDHNAKCPLCKDGLSQCLASRKYSKNVIMEELIAKFLPEELKERRKLYEEEMEELSNLNKNVPIFVCTMAYPTVPCPLHIFEPCYRLMIRRCIETGTRQFGMCLGDPVKGFAEYGCILEIRNVQFFADGRSVVDSIGKRRFRVLHQSQRDGYNTADIEYIEDQKVQGEDCAELMGLHNCVYQQASLWFHSLKLSLKNRILNHFGPMPEKDADPQMNPNGPAWCWWMLAVLPLESRAQLPFLAMRSLKDRLNGIRRVLAFISRNQN

SEQ ID NO: 54055 - protein, 149 aa, Homo sapiens
MPPPADIVKVAIEWPGAYPKLMEIDQKKPLSAIIKEVCDGWSLANHEYFALQHADSSNFYITEKNRNEIKNGTILRLTTSPAQNAQQLHERIQSSSMDAKLEALKDLASLSRDVTFAQEFINLDGISLLTQMVESGTERYQKLQKIMKP

SEQ ID NO: 54056 - protein, 119 aa, Homo sapiens
MGCVYSCCLEDYDEDLVQEASSEDVLGVHMVDKDTERDIEMKRQLRRLRELHLYSTWKKYQEAMKTSLGVPQCERDEGSLGKPLCPPEILSETLPGSVKKRVCFPSEDHLEEFIAEHLP

SEQ ID NO: 54057 - protein, 67 aa, Homo sapiens
MEAAVKEEISLEDEAVDKNIFRDCNKIAFYRRQKQWLSKKSTYQALLDSVTTDEDSTRFQIINEASK

SEQ ID NO: 54058 - protein, 70 aa, Homo sapiens
MGSQHSAAARPSSCRRKQEDDRDGLLAEREQEEAIAQFPYVEFTGRDSITCLTCQGTGYIPTGDHGGMIP

SEQ ID NO: 54059 - protein, 63 aa, Homo sapiens
MASLQRSRVLRCCSCRLFQAHQVKKSVKWTCKACGEKQSFLQTVQSDSLLQVHRISFQANWKS

SEQ ID NO: 54060 - protein, 40 aa, Homo sapiens
VVWWLNLLSIALYLLSGSIIAVAMQRGARLPAEVAERWLL

SEQ ID NO: 54061 - protein, 211 aa, Homo sapiens
MKDCPMPRNAARISEKRKEYMDACGEANNQNFQQRYHAEEVEERFGRFKPGVISEELQDALGVTDKSLPPFIYRMRQLGYPPGWLKEAELENSGLALYDGKDGTDGETEVGEIQQNKSVTYDLSKLVNYPGFNISTPRGIPDEWRIFGSIPMQACQQKDVFANYLTSNFQAPGVKSGNKRSSSHSSPGSPKKQKNESNSAGSPADMELDSG

SEQ ID NO: 54062 - protein, 581 aa, Homo sapiens
MEIIRSNFKSNLHKVYQAIEEADFFAIDGEFSGISDGPSVSALTNGFDTPEERYQKLKKHSMDFLLFQFGLCTFKYDYTDSKYITKSFNFYVFPKPFNRSSPDVKFVCQSSSIDFLASQGFDFNKVFRNGIPYLNQEEERQLREQYDEKRSQANGAGALSYVSPNTSKCPVTIPEDQKKFIDQVVEKIEDLLQSEENKNLDLEPCTGFQRKLIYQTLSWKYPKGIHVETLETEKKERYIVISKVDEEERKRREQQKHAKEQEELNDAVGFSRVIHAIANSGKLVIGHNMLLDVMHTVHQFYCPLPADIINNTSLAELEKRLKETPFNPPKVESAEGFPSYDTASEQLHEAGYDAYITGLCFISMANYLGSFLSPPKIHVSARSKLIEPFFNKLFLMRVMDIPYLNLEGPDCNIQISWIDDTSAFVSLSQPEQVKIAVNTSKYAESYRIQTYAEYMGRKQEEKQIKRKWTEDSWKEADSKRLNPQCIPYTLQNHYYRNNSFTAPSTVGKRNLSPSQEEAGLEDGVSGEISDTELEQTDSCAEPLSEGRKKAKKLKRMKKELSPAGSISKNSPATLFEVPDTW

SEQ ID NO: 54063 - protein, 609 aa, Homo sapiens
  MOD_RES (588)..(588): Any amino acid
MATAAYEQLKLHITPEKFYVEACDDGADDVLTIDRVSTEVTLAVKKDVPPSAVTRPIFGILGTIHLVAGNYLIVITKKIKVGEFFSHVVWKATDFDVLSYKKTMLHLTDIQLQDNKTFLAMLNHVLNVDGFYFSTTYDLTHTLQRLSNTSPEFQEMSLLERADQRFVWNGHLLRELSAQPEVHRFALPVLHGFITMHSCSINGKYFDWILISRRSCFRAGVRYYVRGIDSEGHAANFVETEQIVHYNGSKASFVQTRGSIPVFWSQRPNLKYKPLPQISKVANHMDGFQRHFDSQVIIYGKQVIINLINQKGSEKPLEQTFATMVSSLGSGMMRYIAFDFHKECKNMRWDRLSILLDQVAEMQDELSYFLVDSAGQVVANQEGVFRSNCMDCLDRTNVIQSLLARRSLQAQLQRLGVLHVGQKLEEQDEFEKIYKNAWADNANACAKQYAGTGALKTDFTRTGKRTHLGLIMDGWNSMIRYYKNNFSDGFRQDSIDLFLGNYSVDELESHSPLSVPRDWKFLALPIIMVVAFSMCIICLLMAGDTWTETLAYVLFWGVASIGTFFIILYNGKDFVDAPRLVQKEKIDXICICGKRLGLEDSIVQNWSLY

SEQ ID NO: 54064 - protein, 63 aa, Homo sapiens
MSESKSGPDPGRCLWHSQERYRHCGHVCHAAGADHEVHHPSGHGWHHRHLRPGGGSPHRQLPE

SEQ ID NO: 54065 - protein, 135 aa, Homo sapiens
MRRSKADVERYVASVLGLTPSPRQSMKGFYFAKLYYEAKEYDLAKKYICTYINVQERDPKAHRFLGLLYELEENTEKAVECYRRSVELNPTQKDLVLKIAELLCKNDVTDGRAKYWVERAAKLFPGSPAIYKLKE

SEQ ID NO: 54066 - protein, 1323 aa, Homo sapiens
MDSQELKTLINYYCQERYFHHVLLVASEGIKRYGSDPVFRFYHAYGTLMEGKTQEALREFEAIKNKQDVSLCSLLALIYAHKMSPNPDREAILESDARVKEQRKGAGEKALYHAGLFLWHIGRHDKAREYIDRMIKISDGSKQGHVLKAWLDITRGKEPYTKKALKYFEEGLQDGNDTFALLGKAQCLEMRQNYSGALETVNQIIVNFPSFLPAFVKKMKLQLALQDWDQTVETAQRLLLQDSQNVEALRMQALYYVCREGDIEKASTKLENLGNTLDAMEPQNAQLFYNITLAFSRTCGRSQLILQKIQTLLERAFSLNPQQSEFATELGYQMILQGRVKEALKWYKTAMTLDETSVSALVGFIQCQLIEGQLQDADQQLEFLNEIQQSIGKSAELIYLHAVLAMKKNKRQEEVINLLNDVLDTHFSQLEGLPLGIQYFEKLNPDFLLEIVMEYLSFCPMQPASPGQPLCPLLRRCISVLETVVRTVPGLLQTVFLIAKVKYLSGDIEAAFNNLQHCLEHNPSYADAHLLLAQVYLSQEKVKLCSQSLELCLSYDFKVRDYPLYHLIKAQSQKKMGEIADAIKTLHMAMSLPGMKRIGASTKSKDRKTEVDTSHRLSIFLELIDVHRLNGEQHEATKVLQDAIHEFSGTSEEVRVTIANADLALAQGDIERALSILQNVTAEQPYFIEAREKMADIYLKHRKDKMLYITCFREIAERMANPRSFLLLGDAYMNILEPEEAIVAYEQALNQNPKDGTLASKMGKALIKTHNYSMAITYYEAALKTGQKNYLCYDLAELLLKLKWYDKAEKVLQHALAHEPVNELSALMEDGRCQVLLAKVYSKMEKLGDAITALQQARELQARVLKRVQMEQPDAVPAQKHLAAEICAEIAKHSVAQRDYEKAIKFYREALVHCETDNKIMLELARLYLAQDDPDSCLRQCALLLQSDQDNEAATMMMADLMFRKQDYEQAVFHLQQLLERKPDNYMTLSRLIDLLRRCGKLEDVPRFFSMAEKRNSRAKLEPGFQYCKGLYLWYTGEPNDALRHFNKARKDRDWGQNALYNMIEICLNPDNETVGGEVFENLDGDLGNSTEKQESVQLAVRTAEKLLKELKPQTVQGHVQLRIMENYCLMATKQKSNVEQALNTFTEIAASEKEHIPALLGMATAYMILKQTPRARNQLKRIAKMNWNAIDAEEFEKSWLLLADIYIQSAKYDMAEDLLKRCLRHNRSCCKAYEYMGYIMEKEQAYTDAALNYEMAWKYSNRTNPAVGEFGNHLDFSQKNYVVFINFHLNAFDFFQNKINIESIFIVNLSERRINFIFIIYY

SEQ ID NO: 54067 - protein, 209 aa, Homo sapiens
MASGILVNVKEEVTCPICLELLTQPLSLDCGHSFCQACLTANHKKSMLDKGESSCPVCRISYQPENIRPNRHVANIVEKLREVKLSPEGQKVDHCARHGEKLLLFCQEDGKVICWLCERSQEHRGHHTFLTEEVAREYQVKLQAALEMLRQKQQEAEELEADIREEKASWKTQIQYDKTNVLADFEQLRDILDWEESNELQNLEKEEED

SEQ ID NO: 54068 - protein, 23 aa, Homo sapiens
MATSAVPSDNLPTYKLVVVGDGG

SEQ ID NO: 54069 - protein, 75 aa, Homo sapiens
MELSDVTLIEGVGNEQILPWTRKPDETDLPGPPATRPSPHTAFSEHYRQLCDSLPPLTPRVSCSRPLSLLGPLGH

SEQ ID NO: 54070 - protein, 36 aa, Homo sapiens
MPAEGGKTDMERIGLFSEMEYITVGDKYVSQFNHVA

SEQ ID NO: 54071 - protein, 1105 aa, Homo sapiens
MLQSALLSTRKHLYGLFHYNPMMLGLESLPDPTDTWEIIETIGKGTYGKVYKVTNKRDGSLAAVKILDPVSDMDEEIEAEYNILQFLPNHPNVVKFYGMFYKADHCVGGQLWLVLELCNGGSVTELVKGLLRCGQRLDEAMISYILYGALLGLQHLHNNRIIHRDVKGNNILLTTEGGVKLVDFGVSAQLTSTRLRRNTSVGTPFWMAPEVIACEQQYDSSYDARCDVWSLGITAIELGDGDPPLFDMHPVKTLFKIPRNPPPTLLHPEKWCEEFNHFISQCLIKDFERRPSVTHLLDHPFIKGVHGKVLFLQKQLAKVLQDQKHQNPVAKTRHERMHTRRPYHVEDAEKYCLEDDLVNLEVLDEDTIIHQLQKRYADLLIYTYVGDILIALNPFQNLSIYSPQFSRLYHGVKRASNPPHIFASADAAYQCMVTLSKDQCIVISGESGSGKTESAHLIVQHLTFLGKANNQTLREKILQVNSLVEAFGNSCTAINDNSSRFGKYLEMMFTPTGVVMGARISEYLLEKSRVIKQAAREKNFHIFYYIYAGLHHQKKLSDFRLPEEKPPRYIADETGRVMHDITSKESYRRQFEAIQHCFRIIGFTDKEVHSVYRILAGILNIGNIEFAAISSQHQTDKSEVPNAEALQNAASVLCISPEELQEALTSHCVVTRGETIIRANTVDRAADVRDAMSKALYGRLFSWIVNRINTLLQPDENICSAGGGMNVGILDIFGFENFQRNSFEQLCINIANEQIQYYFNQHVFALEQMEYQNEGIDAVPVEYEDNRPLLDMFLQKPLGLLALLDEESRFPQATDQTLVDKFEDNLRCKYFWRPKGVELCFGIQHYAGKVLYDASGVLEKNRDTLPADVVVVLRTSENKLLQQLFSIPLTKTGNLAQTRARITVASSSLPPHFSAGKAKVDTLEVIRHPEETTNMKRQTVASYFRYSLMDLLSKMVVGQPHFVRCIKPNDDREALQFSRERVLAQLRSTGILETVSIRRQGYSHRILFEEFVKRYYYLAFTAHQTPLASKESCVAILEKSRLDHWVLGKTKVFLKYYHVEQLNLLLREVIGRVVVLQAYTKGWLGARRYKRVREKREKGAIAIQS

SEQ ID NO: 54072 - protein, 44 aa, Homo sapiens
MWRGLWTLAAQAARGPRRTSNLCIPQPQNPPTWSISRSSSPRST

SEQ ID NO: 54073 - protein, 161 aa, Homo sapiens
MDVGSKEVLMESPPDYSAAPRGRFGIPCCPVHLKRLLIVVVVVVLIVVVIVGALLMGLHMSQKHTEMVLEMSIGAPEAQQRLALSEHLVTTATFSIGSTGLVVYDYQQLLIAYKPAPGTCCYIMKIAPESIPSLEALTRKVHNFQHSPSLLMRKLRLREIA

SEQ ID NO: 54074 - protein, 338 aa, Homo sapiens
MGAGLFSVVGTLLLPGLAALVQDWRLLQGLGALMSGLLLLFWGFPALFPESPCWLLATGQVARARKILWRFAEASGVGPGDSSLEENSLATELTMLSARSPQPRYHSPLGLLRTRVTWRNGLILGFSSLVGGGIRASFRRSLAPQVPTFYLPYFLEAGLEAAALVFLLLTADCCGRRPVLLLGTMVTGLASLLLLAGAQYLPGWTVLFLSVLGLLASRAVSALSSLFAAEVFPTVIRGAGLGLVLGAGFLGQAAGPLDTLHGRQGFFLQQVVFASLAVLALLCVLLLPESRSRGLPQSLQDADRLRRSPLLRGRPRQDHLPLLPPSNSYWAGHTPEQH

SEQ ID NO: 54075 - protein, 117 aa, Homo sapiens
MEFGLSWVFLVALLRGVQCQVQLVESGGGVVQPGGSLRLSCAASGFTFSSYGMHWVRQAPGKGLEWVAFIRYDGSNKYYADSVKGRFTISRDNSKNTLYLQMNSLRAEDTAVYYCAK

SEQ ID NO: 54076 - protein, 419 aa, Homo sapiens
MAQPPRLSRSGASSLWDPASPAPTSGPRPRLWEGQDVLARWTDGLLYLGTIKKVDSAREVCLVQFEDDSQFLVLWKDISPAALPGEELLCCVCRSETVVPGNRLVSCEKCRHAYHQDCHVPRAPAPGEGEGTSWVCRQCVFAIATKRGGALKKGPYARAMLGMKLSLPYGLKGLDWDAGHLSNRQQSYCYCGGPGEWNLKMLQCRSCLQWFHEACTQCLSKPLLYGDRFYEFECCVCRGGPEKVRRLQLRWVDVAHLVLYHLSVCCKKKYFDFDREILPFTSENWDSLLLGELSDTPKGERSSRLLSALNSHKDRFISGREIKKRKCLFGLHARMPPPVEPPTGDGALTRAGPWGRGLTSPGEAPEAGARAPEEEAEGESGGAGATLSSAQSARAPGAEGAGSSAEGTAGLSVSTIPQP

SEQ ID NO: 54077 - protein, 72 aa, Homo sapiens
MNGPEDLPKSYDYDLIIIGGGSGGLAAAKEAAQYGKKVMVLDFVTPTPLGTRWGLGGTCVNVGCIPKKLMHQ

SEQ ID NO: 54078 - protein, 445 aa, Homo sapiens
MENQAHNTMGTSPCEAELQELMEQIDIMVSNKKMDWERKMRALETRLDLRDQELANAQTCLDQKGQEVGLLRQKLDSLEKCNLAMTQNYEGQLQSLKAQFSKLTNNFEKLRLHQMKQNKVPRKELPHLKEEIPFELSNLNQKLEEFRAKSREWDKQEILYQTHLISLDAQQKLLSEKCNQFQKQAQSYQTQLNGKKQCLEDSSSEIPRLICDPDPNCEINERDEFIIEKLKSAVNEIALSRNKLQDENQKLLQELKMYQRQCQAMEAGLSEVKSELQSRDDLLRIIEMERLQLHRELLKIGECQNAQGNKTRLESSYLPSIKEPERKIKELFSVMQDQPNHEKELNKIRSQLQQVEEYHNSEQERMRNEISDLTEELHQKEITIATVTKKAALLEKQLKMELEIKEKMLAKQKVSDMKYKAVRTENTHLKGMMGDLDPGEYMVIC

SEQ ID NO: 54079 - protein, 218 aa, Homo sapiens
GNGNAAATAEENSPKMRVIRVGTRKSQLARIQTDSVVATLKASYPGLQFEIIAMSTTGDKILDTALSKIGEKSLFTKELEHALEKNEVDLVVHSLKDLPTVLPPGFTIGAICKRENPHDAVVFHPKFVGKTLETLPEKSVVGTSSLRRAAQLQRKFPHLEFRSIDVTLLSCTLRNACMLWARGPWAWKCEPRTRTSWIWWVCCTIPRLCFAASLKGPS

SEQ ID NO: 54080 - protein, 1067 aa, Homo sapiens
MMPNEARLRNLTYSAPLYVDITKTVIKEGEEQLQTQHQKTFIGKIPIMLRSTYCLLNGLTDRDLCELNECPLDPGGYFIINGSEKVLIAQEKMATNTVYVFAKKDSKYAYTGECRSCLENSSRPTSTIWVSMLARGGQGAKKSAIGQRIVATLPYIKQEVPIIIVFRALGFVSDRDILEHIIYDFEDPEMMEMVKPSLDEAFVIQEQNVALNFIGSRGAKPGVTKEKRIKYAKEVLQKEMLPHVGVSDFCETKKAYFLGYMVHRLLLAALGRRELDDRDHYGNKRLDLAGPLLAFLFRGMFKNLLKEVRIYAQKFIDRGKDFNLELAIKTRIISDGLKYSLATGNWGDQKKAHQARAGVSQVLNRLTFASTLSHLRRLNSPIGRDGKLAKPRQLHNTLWGMVCPAETPEGHAVGLVKNLALMAYISVGSQPSPILEFLEEWSMENLEEISPAAIADATKIFVNGCWVGIHKDPEQLMNTLRKLRRQMDIIVSEVSMIRDIREREIRIYTDAGRICRPLLIVEKQKLLLKKRHIDQLKEREYNNYSWQDLVASGVVEYIDTLEEETVMLAMTPDDLQEKEVAYCSTYTHCEIHPSMILGVCASIIPFPDHNQSPRNTYQSAMGKQAMGVYITNFHVRMDTLAHVLYYPQKPLVTTRSMEYLRFRELPAGINSIVAIASYTGYNQEDSVIMNRSAVDRGFFRSVFYRSYKEQESKKGFDQEEVFEKPTRETCQGMRHAIYDKLDDDGLIAPGVRVSGDDVIIGKTVTLPENEDELESTNRRYTKRDCSTFLRTSETGIVDQVMVTLNQEGYKFCKIRVRSVRIPQIGDKFASRHGQKGTCGIQYRQEDMPFTCEGITPDIIINPHAIPSRMTIGHLIECLQGKVSANKGEIGDATPFNDAVNVQKISNLLSDYGYHLRGNEVLYNGFTGRKITSQIFIGPTYYQRLKHMVDDKIHSRARGPIQILNRQPMEGRSRDGGLRFGEMERDCQIAHGAAQFLRERLFEASDPYQVHVCNLCGIMAIANTRTHTYECRGCRNKTQISLVRMPYACKLLFQELMSMSIAPRMMSV

SEQ ID NO: 54081 - protein, 195 aa, Homo sapiens
MQRNASVPNLRGSEERLLALKKPALPALSRTTELQDELSHLRSQIAKIVAADAASASLTPDFLSPGSSNVSSPLPCFGSSFHSTTSFVISDITEETEVEVPELPSVPLLCSASPECCKPEHKAACSSSEEDDCVSLSKASSFADMMGILKDFHRMKQSQDLNRSLLKEEDPAVLISEVLRRKFALKEEDISRKGN

SEQ ID NO: 54082 - protein, 54 aa, Homo sapiens
MCAASASPDNLVFHMKNEMRNIKYKPVDYQQLRALTEAKKLASASAKLKKLSTK

SEQ ID NO: 54083 - protein, 85 aa, Homo sapiens
  MOD_RES (1)..(1): Any amino acid
XRIADISQVYTQNAEMRPLGCCMILIGIDEEQGPQTAITCLSTVLSIDFKPSEIEVGVVTVENPKFRILTEAEIDAHLVALAERD

SEQ ID NO: 54084 - protein, 88 aa, Homo sapiens
MGENEDEKQAQAGQVFENFVQASTCKGTLQAFNILTRHLDLDPLDHRNFYSKLKSKVTTWKAKALWYKLDKRGSHKEYKRGKSCTNTK

SEQ ID NO: 54085 - protein, 92 aa, Homo sapiens
MSTQSTHPLKPEAPRLPPGIPESPSCQRRHTLPASEFRCLTPEDAVSAFEIEREDSGREAQRLPVTHLSLLPQPSSPSWASAPCTWMRSGTS

SEQ ID NO: 54086 - protein, 110 aa, Homo sapiens
MEGKAKYILPTETIYVGEMKDGMFHGEGTLYFPSGSQYDAIWENGLAIKGTYTFSDGLHYDEKNWHYCDGYDRRFYTEILNGLKPAGMAQLTNMDPPRKIPKGYYDCGDG

SEQ ID NO: 54087 - protein, 151 aa, Homo sapiens
MKNYKAIGKIGEGTFSEVMKMQSLRDGNYYACKQMKQRFESIEQVNNLREIQALRRLNPHPNILMLHEVVFDRKSGSLALICELMDMNIYELIRGRRYPLSEKKIMHYMYQLCKSLDHIHRNGIFHRDVKPENILIKVVKNGLFNKCHQHN

SEQ ID NO: 54088 - protein, 265 aa, Homo sapiens
MVEKEEAGGGISEEEAAQYDRQIRLWGLEAQKRLRASRVLLVGLKGLGAEIAKNLILAGVKGLTMLDHEQVTPEDPGAQFLIRTGSVGRNRAEASLERAQNLNPMVDVKVDTEDIEKKPESFFTQFDAKVVFCPVKEALEVDWSSEKAKAALKRTTSDYFLLQVLLKFRTDKGRDPSSDTYEEDSELLLQIRNDVLDSLGISPDLLPEDFVRYCFSEMAPVCAVVGGILAQEIVKALSQRDPPHNNFFFFDGMKGNGIVECLGPK

SEQ ID NO: 54089 - protein, 692 aa, Homo sapiens
MKMADAKQKRNEQLKRWIGSETDLEPPVVKRQKTKVKFDDGAVFLAACSSGDTDEVLKLLHRGADINYANVDGLTALHQACIDDNVDMVKFLVENGANINQPDNEGWIPLHAAASCGYLDIAEFLIGQGAHVGAVNSEGDTPLDIAEEEAMEELLQNEVNRQGVDIEAARKEEERIMLRDARQWLNSGHINDVRHAKSGGTALHVAAAKGYTEVLKLLIQAGYDVNIKDYDGWTPLHAAAHWGKEEACRILVDNLCDMEMVNKVGQTAFDVADEDILGYLEELQKKQNLLHSEKRDKKSPLIESTANMDNNQSQKTFKNKETLIIEPEKNASRIESLEQEKVDEEEEGKKDESSCSSEEDEEDDSESEAETDKTKPLASVTNANTSSTQAAPVAVTTPTVSSGQATPTSPIKKFPTTATKISPKEEERKDESPATWRLGLRKTGSYGALAEITASKEGQKEKDTAGVTRSASSPRLSSSLDNKEKEKDSKGTRLAYVAPTIPRRLASTSDIEEKENRDSSSLRTSSSYTRRKWEDDLKKNSSVNEGSTYHKSCSFGRRQDDLISSSVPSTTSTPTVTSAAGLQKSLLSSTSTTTKITTGSSSAGTQSRSYLTPVRDEESESQRKARSRQARQSRRSTQGVTLTDLQEAEKTIGRSRSTRTREQENEEKEKEEKEKQDKEKQEEKKESETSRE

SEQ ID NO: 54090 - protein, 131 aa, Homo sapiens
MQKAGAGGRRASDCGLAPHRPRCITKFAQYVGSFPVDDLDTQESVWLVQQQLWALKDCPRRRAVILKFSLQGLKIYSGEGEVLLMAHALRRILYSTWCPADCQFAFMARNPRSPASKLFCHLFVGSQPGEV

SEQ ID NO: 54091 - protein, 738 aa, Homo sapiens
MEIPNPPTSKCITYWKRKVKSEYMRLRQLKRLQANMGAKALYVANFAKVQEKTQILNEEWKKLRVQPVQSMKPCTIESIFPGFASQHMLMRSLNTVALVPIMYSWSPLQQNFMVEDETVLCNIPYMGDEVKEEDETFIEELINNYDGKVHGEEEMIPGSVLISDAVFLELVDALNQYSDEEEEGHNDTSDGKQDDSKEDLPVTRKRKRHAIEGNKKSSKKQFPNDMIFSAIASMFPENGVPDDMKERYRELTEMSDPNALPPQCTPNIDGPNAKSVQREQSLHSFHTLFCRRCFKYDCFLHPFHATPNVYKRKNKEIKIEPEPCGTDCFLLLEGAKEYAMLHNPRSKCSGRRRRRHHIVSASCSNASASAVAETKEGDSDRDTGNDWASSSSEANSRCQTPTKQKASPAPPQLCVVEAPSEPVEWTGAEESLFRVFHGTYFNNFCSIARLLGTKTCKQVFQFAVKESLILKLPTDELMNPSQKKKRKHRLWAAHCRKIQLKKDNSSTQVYNYQPCDHPDRPCDSTCPCIMTQNFCEKFCQCNPDCQNRFPGCRCKTQCNTKQCPCYLAVRECDPDLCLTCGASEHWDCKVVSCKNCSIQRGLKKHLLLAPSDVAGWGTFIKESVQKNEFISEYCGELISQDEADRRGKVYDKYMSSFLFNLNNDFVVDATRKGNKIRFANHSVNPNCYAKVVMVNGDHRIGIFAKRAIQAGEELFFDYRYSQADALKYVGIERETDVL

SEQ ID NO: 54092 - protein, 105 aa, Homo sapiens
MDKNIGEQLNKAYEAFRQACMDRDSAVKELQQKTENYEQRIREQQEQLSLQQTIIDKLKSQLLLVNSTQDNNYGCVPLLEDSETRKNNLTLDQPQDKVISGIARE

SEQ ID NO: 54093 - protein, 407 aa, Homo sapiens
MNMIWRNSISCLRLGKVPHRYQSGYHPVAPLGSRILTDPAKVFEHNMWDHMQWSKEEEAAARKKVKENSAVRVLLEEQVKYEREASKYWDTFYKIHKNKFFKDRNWLLREFPEILPVDQKPEEKARESSWDHVKTSATNRFSRMHCPTVPDEKNHYEKSSGSSEGQSKTESDFSNLDSEKHKKGPMETGLFPGSNATFRILEVGCGAGNSVFPILNTLENSPESFLYCCDFASGAVELVKSHSSYRATQCFAFVHDVCDDGLPYPFPDGILDVILLVFVLSSIHPDRMQGVVNRLSKLLKPGGMLLFRDYGRYDKTQLRFKKGHCLSENFYVRGDGTRAYFFTKGEVHSMFCKASLDEKQNLVDRRLQVNRKKQVKMHRVWIQGKFQKPLHQTQNSSNMVSTLLSQD

SEQ ID NO: 54094 - protein, 97 aa, Homo sapiens
MIHTNLKKKFSCCVLVFLLFAVICVWKEKKKGSYYDSFKLQTKEFQVLKSLGKLAMGSDSQSVSSSSTQDPHRGRQTLGSLRGLAKAKPEASFQVWN

SEQ ID NO: 54095 - protein, 46 aa, Homo sapiens
MAHELVMFRDVAIDVSQEEWECLNPAQRNLYKEVMLENYSNLVSLG

SEQ ID NO: 54096 - protein, 156 aa, Homo sapiens
MSDGEGPSADDSASAASSMEVTDRIASLEQRVQMQEDDIQLLKSALADVVRRLNITEEQQAVLNRKGPTKARPLMQTLPLRTTVNNGTVLPKKPTGSLPSPSGVRKETAVPATKRLNRSVSLLNACKLNRSTPSNIKRTSSSERVSPGGRRESNGD

SEQ ID NO: 54097 - protein, 47 aa, Homo sapiens
MAIQFRSLFPLALPGMLALLGWWWFFSRKKGHVSSHDEQQVEAGAVQ

SEQ ID NO: 54098 - protein, 1177 aa, Homo sapiens
MANGGGGGGGSSGGGGGGGGSSLRMSSNIHANHLSLDASSSSSSSSSSSSSSSSSSSSSSVHEPKMDALIIPVTMEVPCDSRGQRMWWAFLASSMVTFFGGLFIILLWRTLKYLWTVCCHCGGKTKEAQKINNGSSQADGTLKPVDEKEEAVAAEVGWMTSVKDWAGVMISAQTLTGRVLVVLVFALSIGALVIYFIDSSNPIESCQNFYKDFTLQIDMAFNVFFLLYFGLRFIAANDKLWFWLEVNSVVDFFTVPPVFVSVYLNRSWLGLRFLRALRLIQFSEILQFLNILKTSNSIKLVNLLSIFISTWLTAAGFIHLVENSGDPWENFQNNQALTYWECVYLLMVTMSTVGYGDVYAKTTLGRLFMVFFILGGLAMFARYVPEIAALILSRNKFGGTFNKHGGRKHIVVCGHITLESVSNFLKDFLHKDRDDVNVEIVFLHNISPNLELEALFKRHFTQVEFYQGSVLNPHDLARVKIESADACLILANKYCADPDAEDASNIMRVISIKNYHPKIRIITQMLQYHNKAHLLNIPSWNWKEGDDAICLAELKLGFIAQSCLAQGLSTMLANLFSMRSFIKIEEDTWQKYYLEGVSNEMYTEYLSSAFVGLSFPTVCELCFVKLKLLMIAIEYKSANRESRILINPGNHLKIQEGTLGFFIASDAKEVKRAFFYCKACHDDITDPKRIKKCGCKRLEDEQPSTLSPKKKQRNGGMRNSPNTSPKLMRHDPLLIPGNDQIDNMDSNVKKYDSTGMFHWCAPKEIEKVILTRSEAAMTVLSGHVVVCIFGDVSSALIGLRNLVMPLRASNFHYHELKHIVFVGSIEYLKREWETLHNFPKVSILPGTPLSRADLRAVNINLCDMCVILSANQNNIDDTSLQDKECILASLNIKSMQFDDSIGVLQANSQGFTPPGMDRSSPDNSPVHGMLRQPSITTGVNIPIITELVNDTNVQFLDQDDDDDPDTELYLTQPFACGTAFAVSVLDSLMSATYFNDNILTLIRTLVTGGATPELEALIAEENALRGGYSTPQTLANRDRCRVAQLALLDGPFADLGDGGCYGDLFCKALKTYNMLCFGIYRLRDAHLSTPSQCTKRYVITNPPYEFELVPTDLIFCLMQFDHNAGQSRASLSHSSHSSQSSSKKSSSVHSIPSTANRQNRPKSRESRDKQKKEMVYR

SEQ ID NO: 54099 - protein, 144 aa, Homo sapiens
MQSISFASGGDPDTTDYVAYVAKDPVNQRACHILECHNGMAQDVISTIGQAFELRFKQYLKNPSLNTSCESEEVHIDSHAEEREDHEYYNEIPGKQPPVGGVSDMRIKVQATEQMAYCPIQCEKLCYLVMSIQEGCSPSEIPHY

SEQ ID NO: 54100 - protein, 227 aa, Homo sapiens
MEEEGVKEAGEKPRGAQMVDKAGWIKKSSGGLLGFWKDRYLLLCQAQLLVYENEDDQKCVETVELGSYEKCQDLRALLKRKHRFILLRSPGNKVSDIKFQAPTGEEKESWIKALNEGINRGKNKAFDEVKVDKSCALEHVTRDRVRGGQRRRPPTRVHLKEFGMNALLLSAWFGHLRILQILVNSGAKIHCESKEGNTALHLAAGRGHMAVLQRLVDIGLDLEEQNA

SEQ ID NO: 54101 - protein, 2058 aa, Homo sapiens
LVRLTGDLIVWSDEMNPPQVIRTLLPLLLESSTESVAEISSNSLERILGPAESDEFLARVYEKLITGCYNILANHADPNSGLDESILEECLQYLEKQLESSQARKAMEEFFSDSGELVQIMMATANENLSAKFCNRVLKFFTKLFQLTEKSPNPSLLHLCGSLAQLACVEPVRLQAWLTRMTTSPPKDSDQLDVIQENRQLLQLLTTYIVRENSQVGEGVCAVLLGTLTPMATEMLANGDGTGFPELMVVMATLASAGQGAGHLQLHNAAVDWLSRCKKYLSQKNVVEKLNANVMHGKHVMILECTCHIMSYLADVTNALSQSNGQGPSHLSVDGEERAIEVDSDWVEELAVEEEDSQAEDSDEDSLCNKLCTFTITQKEFMNQHWYHCHTCKMVDGVGVCTVCAKVCHKDHEISYAKYGSFFCDCGAKEDGSCLALVKRTPSSGMSSTMKESAFQSEPRISESLVRHASTSSPADKAKVTISDGKVADEEKPKKSSLCRTVEGCREELQNQANFSFAPLVLDMLNFLMDAIQTNFQQASAVGSSSRAQQALSELHTVEKAVEMTDQLMVPTLGSQEGAFENVRMNYSGDQGQTIRQLISAHVLRRVAMCVLSSPHGRRQHLAVSHEKGKITVLQLSALLKQADSSKRKLTLTRLASAPVPFTVLSLTGNPCKEDYLAVCGLKDCHVLTFSSSGSVSDHLVLHPQLATGNFIIKAVWLPGSQTELAIVTADFVKIYDLCVDALSPTFYFLLPSSKIRDVTFLFNEEGKNIIVIMSSAGYIYTQLMEEASSAQQGPFYVTNVLEINHEDLKDSNSQVAGGGVSVYYSHVLQMLFFSYCQGKSFAATISRTTLEVLQLFPINIKSSNGGSKTSPALCQWSEVMNHPGLVCCVQQTTGVPLVVMVKPDTFLIQEIKTLPAKAKIQDMVAIRHTACNEQQRTTMILLCEDGSLRIYMANVENTSYWLQPSLQPSSVISIMKPVRKRKTATITTRTSSQVTFPIDFFEHNQQLTDVEFGGNDLLQVYNAQQIKHRLNSTGMYVANTKPGGFTIEISNNNSTMVMTGMRIQIGTQAIERAPSYIEIFGRTMQLNLSRSRWFDFPFTREEALQADKKLNLFIGASVDPAGVTMIDAVKIYGKTKEQFGWPDEPPEEFPSASVSNICPSNLNQSNGTGDSDSAAPTTTSGTVLESSETESLTKLDRLVVSSLEALESCFAVGPIIEKERNKNAAQELATLLLSLPAPASVQQQSKSLLASLHTSRSAYHSHKDQALLSKAVQCLNTSSKEGKDLDPEVFQRLVITARSIAIMRPNNLVHFTESKLPQMETEGMDEGKEPQKQLEGDCCSFITQLVNHFWKLHASKPKNAFLAPACLPGLTHIEATVNALVDIIHGYCTCELDCINTASKIYMQMLLCPDPAVSFSCKQALIRVLRPRNKRRHVTLPSSPRSNTPMGDKDDDDDDDADEKMQSSGIPNGGHIRQESQEQSEVDHGDFEMVSESMVLETAENVNNGNPSPLEALLAGAEGFPPMLDIPPDADDETMVELAIALSLQQDQQAPASDDEGSTAATDGSTLRTSPADHGGSVGSESGGSAVDSVAGEHSVSGRSSAYGDATAEGHPAGPGSVSSSTGAISTTTGHQEGDGSEGEGEGETEGDVHTSNRLHMVRLMLLERLLQTLPQLRNVGGVRAIPYMQVILMLTTDLDGEDEKDKGALDNLLSQLIAELGMDKKDVSKKNERSALNEVHLVVMRLLSVFMSRTKSGSKSSICESSSLISSATAAALLSSGAVDYCLHVLKSLLEYWKSQQNDEEPVATSQLLKPHTTSSPPDMSPFFLRQYVKGHAADVFEAYTQLLTEMVLRLPYQIKKITDTNSRIPPPVFDHSWFYFLSEYLMIQQTPFVRRQVRKLLLFICGSKEKYRQLRDLHTLDSHVRGIKKLLEEQGIFLRASVVTASSGSALQYDTLISLMEHLKACAEIAAQRTINWQKFCIKDDSVLYFLLQVSFLVDEGVSPVLLQLLSCALCGSKVLAALAASSGSSSASSSSAPVAASSGQATTQSKSSTKKSKK

SEQ ID NO: 54102 - protein, 595 aa, Homo sapiens
MVKLSIVLTPQFLSHDQGQLTKELQQHVKSVTCPCEYLRKVINTLADHHHRGTDFGGSPWLHVIIAFPTSYKVVITLWIVYLWVSLLKTIFWSRNGHDGSTDVQQRAWRSNRRRQEGLRSICMHTKKRVSSFRGNKIGLKDVITLRRHVETKVRAKIRKRKVTTKINHHDKINGKRKTARKQKMFQRAQELRRRAEDYHKCKIPPSARKALCNWVRMAAAEHRHSSGLPYWPYLTAETLKNRMGHQPPPPTQQHSITDNSLSLKTPPECLLTPLPPSADDNLKTPPECVLTPLPPSADDNLKTPPECVLTPLPPSADDNLKTPPECLLTPLPPSADDNLKTPPECLLTPLPPSALPSAPPSADDNLKTRAECLLHPLPPSADDNLKTPSERQLTPLPPSAPPSADDNIKTPAERLRGPLPPSADDNLKTPSERQLTPLPPSAPPSADDNIKTPAERLRGPLPPSADDNLKTPSERQLTPLPPSAPPSADDNIKTPAERLRGPLPPSADDNLKTPSERQLTALPPSADDNIKTPAERLRGPLPPSADDNLKTPSERQLTPLPPSAPPSADDNIKTPAFHPQRMISRHLPSVSSLPF

SEQ ID NO: 54103 - protein, 91 aa, Homo sapiens
MMQLRQLDMKRITEKKRLTINNVARQWDLQQQRVANIATNEDRKDSDSPQDPCQIDGSTLSAFPEETGPLDSGLNNALQGLSVIDTYLVEV

SEQ ID NO: 54104 - protein, 64 aa, Homo sapiens
MLKVSAVLCVCAAAWCSQSLAAAAAVAAAGGRSDGGNFLDDKQWLTTISQYDKEVGQWNKFRDL

SEQ ID NO: 54105 - protein, 290 aa, Homo sapiens
MLLSGAPPAGSRPGPRTQGSAGGGPGGSRRGAGGAGAGPGGGGSGGVAKWLREHLGFRGGGGGGGGSKPAPPEPDYRPPAPSPAAPPAPPPDILAAYRLQRERDFEDPYSGGSSGSAALATPVAPGPTPPPRHGSPPHRLIRVETPGPPAPPADERISGPPASSDRLAILEDYADPFDVQETGEGSAGASGAPEKVPENDGYMEPYEAQKMMAEIRGSKETATQPLPLYDTPYEPEEDGATAEGEGAPWPRESRLPEDDERPPEEYDQPWEWKKERISKAFAGAARDSCT

SEQ ID NO: 54106 - protein, 374 aa, Homo sapiens
MVTCFHVPYSALTMFISTEQTERDSATAYRMTVEVLGTVLGTAIQGQIVGQADTPCFQDLNSSTVASQSANHTHGTTSHRETQKAYLLAAGVIVCIYIICAVILILGVREQREPYEAQQSEPIAYFRGLRLVMSHGPYIKLITGFLFTSLAFMLVEGNFVLFCTYTLGFRNEFQNLLLAIMLSATLTIPIWQWFLTRFGKKTAVYVGISSAVPFLILVALMESNLIITYAVAVAAGISVAAAFLLPWSMLPDVIDDFHLKQPHFHGTEPIFFSFYVFFTKFASGVSLGISTLSLDFAGYQTRGCSQPERVKFTLNMLVTMAPIVLILLGLLLFKMYPIDEERRRQNKKALQALRDEASSSGCSETDSTELASIL

SEQ ID NO: 54107 - protein, 150 aa, Homo sapiens
MAPAGCCCCCCFWGGAVAAAGAARRVLLLLLLGVLSAGLRPGALATEHYSPLSLLKQELQHRQQQEAPAGGGGCSPQSGDWGDQYSAECGESSFLNFHDSDCEPKGSSPCDSLLSLNTEKILSQAKSIAEQKRFPFATDNDSTNEELDIY

SEQ ID NO: 54108 - protein, 64 aa, Homo sapiens
MTKKTRDLRRQLRKAVMDHVSDSFLETNVPLLVLIEAAKNGNEKEVKEYAQVFREHANKLIEGI

SEQ ID NO: 54109 - protein, 633 aa, Homo sapiens
MSDCCSAPGISWEAGVGRPAVPGLELQIRRGAMSEETVSESQFSLKTAALRVFDLPLTWYYSLSQIKFSPVAKKLFVVTAVSAISVIFLAHHFKRKRGKKKGKILPWEPEHLILEYTKRAASDKGSSCSSSRQNLTLSLSSTKDKGSQVCNYANGGLFSKYSGSAQSLASVQSVNSCHSCACGNSNSWDKADEDDIKLVNIPVTTPENLYLMGMELFEEALRRWEQALTFRNRQAEDEACGSIKLGAGDAIAEENVDDIISTEFIHKLEALLQRAYRLQEEFEATLGASDPNSLADDIDKDTDITMKGNVEDFGLRDTLSIASTDSFASAAELAEHREVRHTYSLESLCHCPFYEEAMHLVEEGKIYSRVLRTEMLECLGDSDFLAKLHCIRQAFQVILSESANRIFLAESGRKILSALIVKARKNPKKFEDVFDEMIYFLEQTDHWGSTEMELAARGVKNLNFYDVVLDFILMDSFEDLENPPTSIQNVVNNRWLNSSFKETAVASSCWSVLKQKRQQMKQIPDGFFAHFYAICEHISPVLAWGFLGPRNSLYDLCCFFKNQVLLFLKDIFDFEKVRYSSTETLAEDLMQLLIRRTELLMAYLEADALRHTSSCLSSHGHVMSTGLLEAKVQ

SEQ ID NO: 54110 - protein, 625 aa, Homo sapiens
  MOD_RES (1)..(1): Any amino acid
XIEAKLQELCLKNLNDLSSLDLIKMDEGVNFKPTEAGRLMAWYYITFETVKKFYTISGKETLSDLVTLIAGCKEFLDIQLRINEKKTLNTLNKDPNRITIRFPMEGRIKTREMKVNCLIQAQLGCIPIQDFALTQDTAKIFRHGSRITRCITLSNAIVNAGLTSFKKIEETDARELELILNRHPPFGTQIKETVMYLPKYELKVEQITRYSDTTAEILVTVILRNFEQLQTKRTASDSHYVTLIIGDADNQVVYLHKITDSVLLKAGSWAKKIAVKRALKSEDLSINLISSEFVGLDIQQKLTVFYLEPKRFGNQITMQRKSETQISHSKHSDISTIAGPNKGTTASKKPGNRECNHLCKSKHTCGHDCCKIGVAQKSEIKESTISSYLSDLRNRNAVSSVPPVKRLKIQMNKSQSVDLKEFGFTPKPSLPSISRSEYLNISELPIMEQWDQPEIYGKVRQEPSEYQDKEVLNVNFELGNEVWDDFDDENLEVTSFSTDTEKTKISGFGNTLSSSTRGSKLPLQESKSKFQREMSNSFVSSHEMSDISLSNSAMPKFSASSMTKLPQQAGNAVIVHFQERKPQNLSPEIEKQCFTFSEKNPNSSNYKKVDFFIRNSECKKEVDFR

SEQ ID NO: 54111 - protein, 170 aa, Homo sapiens
IITNKVSAQEQRICRHHMISFVDPLVTNYTVVDFRNRATALIEDIFARDKIPIVVGGTNYYIESLLWKVLVNTKPQEMGTEKVIDRKVELEKEDGLVLHKRLSQVDPEMAAKLHPHDKRKVARSLQVFEETGISHSEFLHRQHTEEGGGPLGGPLKFSNPCILWLHADQF

SEQ ID NO: 54112 - protein, 271 aa, Homo sapiens
  MOD_RES (1)..(1): Any amino acid
XTFLYWHLEDLNGTTTLFGVCSVLSHVSELTAYFFSHKLIELIGHIRVLYIGLACNTARYIYISYLENAWTVLPMEVLQGVTHAAIWAACISYLSAAVPPELRTSAQGILQGLHLGLGRGCGAMIGGVLVNYFGAAATFRGIGMACLVILLLFALIQWLAVPDEEEDKTMLAERIPVPSSPVPIATIDLVQQQTEDVMPRIEPRLPPKKTKHQEEQEDVNKPAWGVSSSPWVTFVYALYQIKEMMQLTRDNRASEIQPLQLHIGKEMKGDQ

SEQ ID NO: 54113 - protein, 286 aa, Homo sapiens
MGVWLNKDDYIRDLKRIILCFLIVYMAILVGTDQDFYSLLGVSKTASSREIRQAFKKLALKLHPDKNPNNPNAHGDFLKINRAYEVLKDEDLRKKYDKYGEKGLEDNQGGQYESWNYYRYDFGIYDDDPEIITLERREFDAAVNSGELWFVNFYSPGCSHCHDLAPTWRDFAKEVDGLLRIGAVNCGDDRMLCRMKGVNSYPSLFIFRSGMAPVKYHGDRSKESLVSFAMQHVRSTVTELWTGNFVNSIQTAFAAGIGWLITFCSKGGDCLTSQTRLRLSGMLLLH

SEQ ID NO: 54114 - protein, 224 aa, Homo sapiens
MAELQEVQITEEKPLLPGQTPEAAKTHSVETPYGSVTFTVYGTPKPKRPAILTYHDVGLNYKSCFQPLFQFEDMQEIIQNFVRVHVDAPGMEEGAPVFPLGYQYPSLDQLADMIPCVLQYLNFSTIIGVGVGAGAYILARYALNHPDTVEGLVLINIDPNAKGWMDWAAHKLTGLTSSIPEMILGHLFSQEELSGNSELIQKYRNIITHAPNLDNIELYWNSYN

SEQ ID NO: 54115 - protein, 255 aa, Homo sapiens
MHGNKQHLQKDFFLYNASKARSKTYINMREVSQRFRLPPSEYVIVPSTYEPHQEGEFILRVFSEKRNLSEEVENTISVDRPVPQPGSSDQESEEQQQFRNIFKQIAGDDMEICADELKKVLNTVVNKHKDLKTHGFTLESCRSMIALMDTDGSGKLNLQEFHHLWNKIKAWQKIFKHYDTDQSGTINSYEMRNAVNDAGFHLNNQLYDIITMRYADKHMNIDFDSFICCFVRLEGMFRAFHAFDKDGDGIIKLNV

SEQ ID NO: 54116 - protein, 188 aa, Homo sapiens
MAAPALSWRLPLLILLLPLATSWASAAVNGTSQFTCFYNSRANISCVWSQDGALQDTSCQVHAWPDRRRWNQTCELLPVSQASWACNLILGAPDSQKLTTVDIVTLRVLCREGVRWRVMAIQDFKPFENLRLMAPISLQVVHVETHRCNISWEISQASHYFERHLEFEARTLSPGHTWEEAPLLTLKQ

SEQ ID NO: 54117 - protein, 155 aa, Homo sapiens
MALSQGLLTFRDVAIEFSQEEWKCLDPAQRTLYRDVMLENYRNLVSLGQGNTEVIHTGTLQRQASYHIGAFCSQEIEKDIHDFVFQWQEDETNDHEAPMTEIKKLTSSTDRYDQRHAGNKPIKGQLESRFHLHLRRHRRIHTGEKPYKCEECEKV

SEQ ID NO: 54118 - protein, 134 aa, Homo sapiens
MEICDIINETEEGPKDALRAVKKRIVGNKNFHEVMLALTVLETCVKNCGHRFHVLVASQDFVESVLVRTILPKNNPPTIVHDKVLNLIQSWADAFRSSPDLTGVVTIYEDLRRKGLEFPMTDLDMLSPIHTPQR

SEQ ID NO: 54119 - protein, 501 aa, Homo sapiens
MRNNMTASMFDLSMKDKSRNPFGKLKDKIKGKNKDSGSDTASAIIPSTTPSVDSDDESVVKDKKKKSKIKTLLSKSNLQKTPLSQSMSVLPTSKPEKVLLRPGDFQSQWDEDDNEDESSSASDVMSHKRTASTDLKQLNQVNFTLPKKEGLSFLGGLRSKNDVLSRSNVCINGNHVYLEQPEAKGEIKDSSPSSSPSPKGFRKKHLFSSTENLAAGSWKEPAEGGGLSSDRQLSESSTKDSLKSMTLPSYRPAPLVSGDLRENMAPANSEATKEAKESKKPESRRSSLLSLMTGKKDVAKGSEGENPLTVPGREKEGMLMGVKPGEDASGPAEDLVRRSEKDTAAVVSRQGSSLNLFEDVQITEPEAEPESKSEPRPPISSPRAPQTRAVKPRLHPVKPMNAMATKVANCSLGTATIISENLNNEVMMKKYSPSDPAFAYAQLTHDELIQLVLKQKETISKKEFQVRELEDYIDNLLVRVMEETPNILRIPTQVGKKAGKM

SEQ ID NO: 54120 - protein, 70 aa, Homo sapiens
MGIELLCLFFLFLGRNDHVQGGCALGGAETCEDCLLIGPQCAWCAQENFTHPSGVGERWCADSAGACPPD

SEQ ID NO: 54121 - protein, 35 aa, Homo sapiens
MGSGCVAQADLELLGSSDPPPSASQSARIPGLSGF

SEQ ID NO: 54122 - protein, 237 aa, Homo sapiens
MATGADVRDILELGGPEGDAASGTISKKDIINPDKKKSKKSSETLTFKRPEGMHREVYALLYSDKKDAPPLLPSDTGQGYRTVKAKLGSKKVRPWKWMPFTNPARKDGAMFFHWRRAAEEGKDYPFARFNKTVQVPVYSEQEYQLYLHDDAWTKAETDHLFDLSRRFDLRFVVIHDRYDHQQFKKRSVEDLKERYYHICAKLANVRAVPGTDLKIPVFDAGHERRRKEQLERLYNRT

SEQ ID NO: 54123 - protein, 946 aa, Homo sapiens
MSGMGENTSDPSRAETRKRKECPDQLGPSPKRNTEKRNREQENKYIEELAELIFANFNDIDNFNFKPDKCAILKETVKQIRQIKEQEKAAAANIDEVQKSDVSSTGQGVIDKDALGPMMLEALDGFFFVVNLEGNVVFVSENVTQYLRYNQEELMNKSVYSILHVGDHTEFVKNLLPKSIVNGGSWSGEPPRRNSHTFNCRMLVKPLPDSEEEGHDNQEAHQKYETMQCFAVSQPKSIKEEGEDLQSCLICVARRVPMKERPVLPSSESFTTRQDLQGKITSLDTSTMRAAMKPGWEDLVRRCIQKFHAQHEGESVSYAKRHHHEVLRQGLAFSQIYRFSLSDGTLVAAQTKSKLIRSQTTNEPQLVISLHMLHREQNVCVMNPDLTGQTMGKPLNPISSNSPAHQALCSGNPGQDMTLSSNINFPINGPKEQMGMPMGRFGGSGGMNHVSGMQATTPQGSNYALKMNSPSQSSPGMNPGQPTSMLSPRHRMSPGVAGSPRIPPSQFSPAGSLHSPVGVCSSTGNSHSYTNSSLNALQALSEGHGVSLGSSLASPDLKMGNLQNSPVNMNPPPLSKMGSLDSKDCFGLYGEPSEGTTGQAESSCHPGEQKETNDPNLPPAVSSERADGQSRLHDSKGQTKLLQLLTTKSDQMEPSPLASSLSDTNKDSTGSLPGSGSTHGTSLKEKHKILHRLLQDSSSPVDLAKLTAEATGKDLSQESSSTAPGSEVTIKQEPVSPKKKENALLRYLLDKDDTKDIGLPEITPKLERLDSKTDPASNTKLIAMKTEKEEMSFEPGDQPGSELDNLEEILDDLQNSQLPQLFPDTRPGAPAGSVDKQAIINDLMQLTAENSPVTPVGAQKTALRISQSRMIGNSASRPTMPSGEWAPQSSAVRVTCAATTSAMNRPVQGGMIRNPAASIPMRPSSQPGQRQTLQSQVMNIGKGHLN

SEQ ID NO: 54124 - protein, 1065 aa, Homo sapiens
MDVVLHHVPEAKLVECIGQELIFLLPNKNFKHRAYASLFRELEETLADLGLSSFGISDTPLEEIFLKVTEDSDSGPLFAGGAQQKRENVNPRHPCLGPREKAGQTPQDSNVCSPGAPAAHPEGQPPPEPECPGPQLNTGTQLVLQHVQALLVKRFQHTIRSHKDFLAQIVLPATFVFLALMLSIVIPPFGEYPALTLHPWIYGQQYTFFSMDEPGSEQFTVLADVLLNKPGFGNRCLKEGWLPEYPCGNSTPWKTPSVSPNITQLFQKQKWTQVNPSPSCRCSTREKLTMLPECPEGAGGLPPPQRTQRSTEILQDLTDRNISDFLVKTYPALIRSSLKSKFWVNEQRYGGISIGGKLPVVPITGEALVGFLSDLGRIMNVSGGPITREASKEIPDFLKHLETEDNIKVWFNNKGWHALVSFLNVAHNAILRASLPKDRSPEEYGITVISQPLNLTKEQLSEITVLTTSVDAVVAICVIFSMSFVPASFVLYLIQERVNKSKHLQFISGVSPTTYWVTNFLWDIMNYSVSAGLVVGIFIGFQKKAYTSPENLPALVALLLLYGWAVIPMMYPASFLFDVPSTAYVALSCANLFIGINSSAITFILELFENNRTLLRFNAVLRKLLIVFPHFCLGRGLIDLALSQAVTDVYARFGEEHSANPFHWDLIGKNLFAMVVEGVVYFLLTLLVQRHFFLSQWIAEPTKEPIVDEDDDVAEERQRIITGGNKTDILRLHELTKIYPGTSSPAVDRLCVGVRPGECFGLLGVNGAGKTTTFKMLTGDTTVTSGDATVAGKSILTNISEVHQNMGYCPQFDAIDELLTGREHLYLYARLRGVPAEEIEKVANWSIKSLGLTVYADCLAGTYSGGNKRKLSTAIALIGCPPLVLLDEPTTGMDPQARRMLWNVIVSIIREGRAVVLTSHSMEECEALCTRLAIMVKGAFRCMGTIQHLKSKFGDGYIVTMKIKSPKDDLLPDLNPVEQFFQGNFPGSVQRERHYNMLQFQVSSSSLARIFQLLLSHKDSLLIEEYSVTQTTLDQVFVNFAKQQTESHDLPLHPRAAGASRQAQD

SEQ ID NO: 54125 - protein, 111 aa, Homo sapiens
MPWNVRMQSPKQRTSRCWDHHIAEGCFCLPWKKILIFEKRQDSQNENERMSSTPIQDNVDQTYSEELCYTLINHRVLCTRPSGNSAEEYYENVPCKAERPRESLGGTETEY

SEQ ID NO: 54126 - protein, 1577 aa, Homo sapiens
MMEGNGTENSCSRTRGWLQQDNDAKPWLWKFSNCFSRPEQTLPHSPQTKEYMENKKVAVELKDVPSPLHAGSKLFPAVPLPDIRSLQQPKIQLSSVPKVSCCAHCPNEPSTSPMRFGGGGGGSGGTSSLIHPGALLDSQSTRTITCQVGSGFAFQSASSLQNASARNNLAGIASDFPSMCLESNLSSCKHLPCCGKLHFQSCHGNVHKLHQFPSLQGCTSAGYFPCSDFTSGAPGHLEEHISQSELTPHLCTNSLHLNVVPPVCLKGSLYCEDCLNKPARNSIIDAAKVWPNIPPPNTQPAPLAVPLCNGCGTKGTGKETTLLLATSLGKAASKFGSPEVAVAGQVLENLPPIGVFWDIENCSVPSGRSATAVVQRIREKFFKGHREAEFICVCDISKENKEVIQELNNCQVTVAHINATAKNAADDKLRQSLRRFANTHTAPATVVLVSTDVNFALELSDLRHRHGFHIILVHKNQASEALLHHANELIRFEEFISDLPPRLPLKMPELCRMESKTGHRNSEHQQGHLRLVVPTHGNSSAAVSTPKNSGVAEPVYKTSQKKENLSARSVTSSPVEKKDKEETVFQVSYPSAFSKLVASRQVSPLLASQSWSSSEADCPDPFANGADVQVSNIDYRLSRKELQQLLQEAFARHGKVKSVELSPHTDYQLKAVVQMENLQDAIGAVNSLHRYKIGSKKILVSLATGAASKSLSLLSAETMSVLQDAPACCLPLFKFTDIYEKKFGHKLNVSDLYKLTDTVAIREQGNGRLVCLLPSSQARQSPLGSSQSHDGSSTNCSPIIFEELEYHEPVCRQHCSNKDFSEHEFDPDSYKIPFVILSLKTFAPQVHSLLQTHEGTVPLLSFPDCYIAEFGDLEVVQENQGGVPLEHFITCVPGVNIATAQNGIKVVKWIHNKPPPPNTDPWLLRSKSPVGNPQLIQFSREVIDLLKSQPSCVIPISHFIPSYHHHFAKQCRVSDYGYSKLIELLEAVPHVLQILGMGSKRLLTLTHRAQVKRFTQDLLKLLKSQASKQVIVREFSQAYHWCFSKDWDVTEYGVCELIDIVSEIPDTTICLSQQDNEMVICIPKRERTQDEIERTKQFSKDVVDLLRHQPHFRMPFNKFIPSYHHHFGRQCKLAYYGFTKLLELFEAIPDTLQVLECGEEKILTLTEVERFKALAAQFVKLLRSQKDNCLMMTDLLTEYAKTFGYTFRLQDYDVSSISALTQKLCHVVKVADIESGRQIQLINRKSLRSLTAQLLVLLMSWEGTTHLSVEELKRHYESTHNTPLNPCEYGFMTLTELLKSLPYLVEVFTNDKMEECVKLTSLYLFAKNVRSLLHTYHYQQIFLHEFSMAYTKYVGETLQPKTYGHSSVEELLGAIPQVVWIKGHGHKRIVVLKNDMKSRLSSLSLSPANHENQPSEGERILEVPESHTASELKLGADGSGPSHTEQELLRLTDDSPVDLLCAPVPSCLPSPQLRPDPVILQSADLIQFEERPQEPSEIMILNQEEKMEIPIPGKSKTLTSDSSSSCISAAVPVPPCPSSETSESLLSKDPVESPAKKQPKNRVKLAANFSLAPITKL

SEQ ID NO: 54127 - protein, 72 aa, Homo sapiens
MARLLQASCLLSLLLAGFVSQSRGQEKSKMDCHGGISGTIYEYGALTIDGEEYIPFKQYAGKYVLFVNVASY

SEQ ID NO: 54128 - protein, 917 aa, Homo sapiens
  MOD_RES (1)..(1): Any amino acid
XKSKEAEIKRINKELANIRSKFKGDKALDGYSKKKYVCKLLFIFLLGHDIDFGHMEAVNLLSSNRYTEKQIGYLFISVLVNSNSELIRLINNAIKNDLASRNPTFMGLALHCIASVGSREMAEAFAGEIPKVLVAGDTMDSVKQSAALCLLRLYRTSPDLVPMGDWTSRVVHLLNDQHLGVVTAATSLITTLAQKNPEEFKTSVSLAVSRLSRIVTSASTDLQDYTYYFVPAPWLSVKLLRLLQCYPPPDPAVRGRLTECLETILNKAQEPPKSKKVQHSNAKNAVLFEAISLIIHHDSEPNLLVRACNQLGQFLQHRETNLRYLALESMCTLASSEFSHEAVKTHIETVINALKTERDVSVRQRAVDLLYAMCDRSNAPQIVAEMLSYLETADYSIREEIVLKVAILAEKYAVDYTWYVDTILNLIRIAGDYVSEEVWYRVIQIVINRDDVQGYAAKTVFEALQAPACHENLVKVGGYILGEFGNLIAGDPRSSPLIQFHLLHSKFHLCSVPTRALLLSTYIKFVNLFPEVKPTIQDVLRSDSQLRNADVELQQRAVEYLRLSTVASTDILATVLEEMPPFPERESSILAKLKKKKGPSTVTDLEDTKRDRSVDVNGGPEPAPASTSAVSTPSPSADLLGLGAAPPAPAGPPPSSGGSGLLVDVFSDSASVVAPLAPGSEDNFARFVCKNNGVLFENQLLQIGLKSEFRQNLGRMFIFYGNKTSTQFLNFTPTLICSDDLQPNLNLQTKPVDPTVEGGAQVQQVVNIECVSDFTEAPVLNIQFRYGGTFQNVSVQLPITLNKFFQPTEMASQDFFQRWKQLSNPQQEVQNIFKAKHPMDTEVTKAKIIGFGSALLEEVDPNPANFVGAGIIHTKTTQIGCLLRLEPNLQAQMYRLTLRTSKEAVSQRLCELLSAQF

SEQ ID NO: 54129 - protein, 128 aa, Homo sapiens
  MOD_RES (1)..(1): Any amino acid
XPTMDIATKGPFPTSRDPLPSVPPTTTNSSRGTNSTLAKITTSAKTTMKPPTATPTTARTRPTTDVSAGENGGFLLLRLSVASPEDLTDPRVAERLMQQLMTQGTHSAHVPSMVGVNPLPIVPGGFQH

SEQ ID NO: 54130 - protein, 1237 aa, Homo sapiens
MDSKKRSSTEAEGSKERGLVHIWQAGSFPITPERLPGWGGKTVLQAALGVKHGVLLTEDGEVYSFGTLPWRSGPVEICPSSPILENALVGQYVITVATGSFHSGAVTDNGVAYMWGENSAGQCAVANQQYVPEPNPVSIADSEASPLLAVRILQLACGEEHTLALSISREIWAWGTGCQLGLITTAFPVTKPQKVEHLAGRVVLQVACGAFHSLALVQCLPSQDLKPVPERCNQCSQLLITMTDKEDHVIISDSHCCPLGVTLTESQAENHASTALSPSTETLDRQEEVFENTLVANDQSVATELNAVSAQITSSDAMSSQQNVMGTTEISSARNIPSYPDTQAVNEYLRKLSDHSVREDSEHGEKPVPSQPLLEEAIPNLHSPPTTSTSALNSLVVSCASAVGVRVAATYEAGALSLKKVMNFYSTTPCETGAQAGSSAIGPEGLKDSREEQVKQESMQGKKSSSLVDIREEETEGGSRRLSLPGLLSQVSPRLLRKAARVKTRTVVLTPTYSGEADALLPSLRTEVWTWGKGKEGQLGHGDVLPRLQPLCVKCLDGKEVIHLEAGGYHSLALTAKSQVYSWGSNTFGQLGHSDFPTTVPRLAKISSENGVWSIAAGRDYSLFLVDTEDFQPGLYYSGRQDPTEGDNLPENHSGSKTPVLLSCSKLGYISRVTAGKDSYLALVDKNIMGYIASLHELATTERRFYSKLSDIKSQILRPLLSLENLGTTTTVQLLQEVASRFSKLCYLIGQHGASLSSFLHGVKEARSLVILKHSSLFLDSYTEYCTSITNFLVMGGFQLLAKPAIDFLNKNQELLQDLSEVNDENTQLMEILNTLFFLPIRRLHNYAKVLLKLATCFEVASPEYQKLQDSSSCYECLALHLGRKRKEAEYTLGFWKTFPGKMTDSLRKPERRLLCESSNRALSLQHAGRFSVNWFILFNDALVHAQFSTHHVFPLATLWAEPLSEEAGGVNGLKITTPEEQFTLISSTPQEKTKWLRAISQAVDQALRGMSDLPPYGSGSSVQRQEPPISRSAKYTFYKDPRLKDATYDGRWLSGKPHGRGVLKWPDGKMYSGMFRNGLEDGYGEYRIPNKAMNKEDHYVGHWKEGKMCGQGVYSYASGEVFEGCFQDNMRHGHGLLRSGKLTSSSPSMFIGQWVMDKKAGYGVFDDITRGEKYMGMWQDDVCQGNGVVVTQFGLYYEGNFHLNKMMGNGVLLSEDDTIYEGEFSDDWTLSGKVGN

SEQ ID NO: 54131 - protein, 100 aa, Homo sapiens
MESSDVELDLQRSVQAVLRELSTQAPALQSNQGMWRWSLHKKVERDPGKSPVLVRILLRELEKVSSWTSGRKTGMKGREGPIGQGLSPGSAISHKLWLPA

SEQ ID NO: 54132 - protein, 311 aa, Homo sapiens
MEVSNMTTVTVFILLGLSNNPQVQALLFVLFLVIYLLTLLGNLLMVLVISTDSHLCTPMYFFLRQLSFLDAFYSSIIVPKLLENLLSKGETISFLECFTQISLVIFSGATEACLLSVMAYDRFQAMCHPLLYVVIINRRVCAGLVGASWAIGMGTGLINTLLLAQQHFCGPNVIHSFACELPPVLLLTCSDPCASIVSILTTMSVLGLGTLVLLLGSYSCIIMTALRINSATGRSKIFSTCSSHFLVVTIFYTSGVLRYMIPASGSALEQVLSVQYSVITPLLNPLIYSLKSQEVKVALRRMLARKSRLPL

SEQ ID NO: 54133 - protein, 262 aa, Homo sapiens
MLNNLTDCEDGDGGANPGDGNPKESSPFINSTDTEKGKEYDGKNMALFEEEMDTSPMVSSLLSGLANYTNLPQGSREHEEAENNEGGKKKPVQAPRMGTFMGVYLPCLQNIFGVILFLRLTWVVGIAGIMESFCMVFICCSCTMLTAISMSAIATNGVVPAGGSYYMISRSLGPEFGGAVGLCFYLGTTFAGAMYILGTIEILLSLTLLPRLEGSGAVTDSLDFPGSNDPPHQFSLPSSWLTSSQPWPSSRQKMPVGRQQPC

SEQ ID NO: 54134 - protein, 782 aa, Homo sapiens
MQKRQGYCSYCRVQYNNLEQHLFSAQHRSLTRQSRRQICTSSLMERFLQDVLQHHPYHCQESSSTQDETHVNTGSSSEVVHLDDAFSEEEEEDEDKVEDEDATEERPSEVSEPIEELHSRPHKSQEGTQEVSVRPSVIQKLEKGQQQPLEFVHKIGASVRKCNLVDIGQATNNRSNLVRPPVICNAPASCLPESSNDRPVTANTTSLPPAAHLDSVSKCDPNKVEKYLEQPDGASRNPVPSSHVETTSFSYQKHKESNRKSLRMNSDKLVLWKDVKSQGKTLSAGLKFHERMGTKGSLRVKSPSKLAVNPNKTDMPSNKGIFEDTIAKNHEEFFSNMDCTQEEKHLVFNKTAFWEQKCSVSSEMKFDCISLQSASDQPQETAQDLSLWKEEQIDQEDNYESRGSEMSFDCSSSFHSLTDQSKVSAKEVNLSKEVRTDVQYKNNKSYVSKISSDCDDILHLVTNQSQMIVKEISLQNARHISLVDQSYESSSSETNFDCDASPQSTSDYPQQSVTEVNLPKEVHIGLVDKNYGSSSSEVSADSVFPLQSVVDRPPVAVTETKLRKKAHTSLVDNYGSSCSETSFDCDVSLESVVDHPQLTVKGRNLKGRQVHLKHKKRKPSSAKAHLDCDVSLGTVADESQRAVEKINLLKEKNADLMDMNCESHGPEMGFQADAQLADQSQVAEIERQKVDVDLENKSVQSSRSSLSSDSPASLYHSAHDEPQEALDEVNLKELNIDMEVRSYDCSSSELTFDSDPPLLSVTEQSHLDAEGKERHIDLEDES

SEQ ID NO: 54135 - protein, 205 aa, Homo sapiens
MLQQDSNDDTEDVSLFDAEEETTNRPRKAKIRHPVASFFHLFFRVSAIIVCLLCELLSSSFITCMVTIILLLSCDFWAVKNVTGRLMVGLRWWNHIDEDGKSHWVFESRKESSQENKTVSEAESRIFWLGLIACSVLWVIFAFSALFSFTVKWLAVVIMGVVLQGANLYGYIRCKVRSRKHLTSMATSYFGKQFLRQNTGDDQTS

SEQ ID NO: 54136 - protein, 1051 aa, Homo sapiens
MERRRRFEFDFRDRDDERGYRRVRSGSGSIDDDRDSLPEWCLEDAEEEMGTFDSSGAFLSLKKVQKEPIPEEQEMDFRPVDEGEECSDSEGSHNEEAKEPDKTNKKEGEKTDRVGVEASEETPQTSSSSARPGTPSDHQSQEASQFERKDEPKTEQTEKAEEETRMENSLPAKVPSRGDEMVADVQQPLSQIPSDTASPLLILPPPVPNPSPTLRPVETPVVGAPGMGSVSTEPDDEEGLKHLEQQAEKMVAYLQDSALDDERLASKLQEHRAKGVSIPLMHEAMQKWYYKDPQGEIQGPFNNQEMAEWFQAGYFTMSLLVKRACDESFQPLGDIMKMWGRVPFSPGPAPPPHMGELDQERLTRQQELTALYQMQHLQYQQFLIQQQYAQVLAQQQKAALSSQQQQQLALLLQQFQTLKMRISDQNIIPSVTRSVSVPDTGSIWELQPTASQPTVWEGGSVWDLPLDTTTPGPALEQLQQLEKAKAAKLEQERREAEMRAKREEEERKRQEELRRQQEEILRRQQEEERKRREEEELARRKQEEALRRQREQEIALRRQREEEERQQQEEALRRLEERRREEEERRKQEELLRKQEEEAAKWAREEEEAQRRLEENRLRMEEEAARLRHEEEERKRKELEVQRQKELMRQRQQQQEALRRLQQQQQQQQLAQMKLPSSSTWGQQSNTTACQSQATLSLAEIQKLEEERERQLREEQRRQQRELMKALQQQQQQQQQKLSGWGNVSKPSGTTKSLLEIQQEEARQMQKQQQQQQQHQQPNRARNNTHSNLHTSIGNSVWGSINTGPPNQWASDLVSSIWSNADTKNSNMGFWDDAVKEVGPRNSTNKNKNNASLSKSVGVSNRQNKKVEEEEKLLKLFQGVNKAQDGFTQWCEQMLHALNTANNLDVPTFVSFLKEVESPYEVHDYIRAYLGDTSEAKEFAKQFLERRAKQKANQQRQQQQLPQQQQQQPPQQPPQQPQQQDSVWGMNHSTLHSVFQTNQSNNQQSNFEAVQSGKKKKKQKMVRADPSLLGFSVNASSERLNMGEIETLDDY

SEQ ID NO: 54137 - protein, 71 aa, Homo sapiens
GFHPSDIEVDLLKNGERIEKVEHSDLSFSKDWSFYLLYYTEFTPTEKDEYACRVNHVTLSQPKIVKWDRDM

SEQ ID NO: 54138 - protein, 884 aa, Homo sapiens
MRIISRQIVLLFSGFWGLAMGAFPSSVQIGGLFIRNTDQEYTAFRLAIFLHNTSPNASEAPFNLVPHVDNIETANSFAVTNAFCSQYSRGVFAIFGLYDKRSVHTLTSFCSALHISLITPSFPTEGESQFVLQLRPSLRGALLSLLDHYEWNCFVFLYDTDRGYSILQAIMEKAGQNGWHVSAICVENFNDVSYRQLLEELDRRQEKKFVIDCEIERLQNILEQIVSVGKHVKGYHYIIANLGFKDISLERFIHGGANVTGFQLVDFNTPMVIKLMDRWKKLDQREYPGSETPPKYTSALTYDGVLVMAETFRSLRRQKIDISRRGNAGDCLANPAAPWGQGIDMERTLKQVRIQGLTGNVQFDHYGRRVNYTMDVFELKSTGPRKVGYWNDMDKLVLIQDVPTLGNDTAAIENRTVVVTTIMESPYVMYKKNHEMFEGNDKYEGYCVDLASEIAKHIGIKYKIAIVPDGKYGARDADTKIWNGMVGELVYGKAEIAIAPLTITLVREEVIDFSKPFMSLGISIMIKKPQKSKPGVFSFLDPLAYEIWMCIVFAYIGVSVVLFLVSRFSPYEWHTEEPEDGKEGPSDQPPNEFGIFNSLWFSLGAFMQQGCDISPRSLSGRIVGGVWWFFTLIIISSYTANLAAFLTVERMVSPIESAEDLAKQTEIAYGTLDSGSTKEFFRRSKIAVYEKMWTYMRSAEPSVFTRTTAEGVARVRKSKGKFAFLLESTMNEYIEQRKPCDTMKVGGNLDSKGYGVATPKGSSLRNAVNLAVLKLNEQGLLDKLKNKWWYDKGECGSGGGDSKDKTSALSLSNVAGVFYILVGGLGLAMLVALIEFCYKSRAEAKRMKVAKSAQTFNPTSSQNTQNLATYREGYNVYGTESIKI

SEQ ID NO: 54139 - protein, 173 aa, Homo sapiens
MAALGEPVRLERDICRAIELLEKLQRSGEVPPQKLQALQRVLQSEFCNAVREATVAAFAASEGHSHPRVVELPKTEEGLGFNIMGGKEQNSPIYISRIIPGGIADRHGGLKRGDQLLSVNGVSVEGEHHEKAVELLKAAQGKVKLVVRYTPKVLEEMESRFEKMRSAKRRQQT

SEQ ID NO: 54140 - protein, 115 aa, Homo sapiens
MTMTLHTKASGMALLHQIQGNELEPLNRPQLKIPLERPLGEVYLDSSKPAVYNYPEGAAYEFNAAAAANAQVYGQTGLPYGPGSEAAAFGSNGLGGFPPLNSVSPSPLMLLHPPP

SEQ ID NO: 54141 - protein, 56 aa, Homo sapiens
MYQVPLPLDRDGTLVRLRFTMVALVTVCCPLVAFLFCILWSLLFHFKETTATHCGD

SEQ ID NO: 54142 - protein, 80 aa, Homo sapiens
MNGRADFREPNAEVPRPIPHIGPDYIPTEEERRVFAECNDESFWFRSVPLAATSMLITQGLISKGILSSHPKYGSIPKLI

SEQ ID NO: 54143 - protein, 155 aa, Homo sapiens
MAPVAVWAALAVGLELWAAAHALPAQVAFTPYAPEPGSTCRLREYYDQTAQMCCSKCSPGQHAKVFCTKTSDTVCDSCEDSTYTQLWNWVPECLSCGSRCSSDQVETQACTREQNRICTCRPGWYCALSKQEGCRLCAPLRKCRPGFGVARPDLS

SEQ ID NO: 54144 - protein, 204 aa, Homo sapiens
MQGPRTRARLGANEVLLVVGGFGSQQSPIDVVEKYDPKTQEWSFLPSITRKRRYVASVSLHDRIYVIGGYDGRSRLSSVECLDYTADEDGVWYSVAPMNVRRGLAGATTLGDMIYVSGGFDGSRRHTSMERYDPNIDQWSMLGDMQTAREGAGLVVASGVIYCLGGYDGLNILNSVEKYDPHTGHWTNVTPMATKRSDMMVIPC

SEQ ID NO: 54145 - protein, 466 aa, Homo sapiens
MKSLSLLLAVALGLATAVSAGPAVIECWFVEDASGKGLAKRPGALLLRQGPGEPPPRPDLDPELYLSVHDPAGALQAAFRRYPRGAPAPHCEMSRFVPLPASAKWASGLTPAQNCPRALDGAWLMVSISSPVLSLSSLLRPQPEPQQEPVLITMATVEMGFHHVGQAALELLTSVVLTVLTHTPAPRVRLGQDALLDLSFAYMPPTSEAASSLAPGPPPFGLEWRRQHLGKGHLLLAATPGLNGQMPAAQEGAVAFAAWDDDEPWGPWTGNGTFWLPRVQPFQEGTYLATIHLPYLQGQVTLELAVYKPPKVSLMPATLARAAPGEAPPELLCLVSHFYPSGGLEVEWELRGGPGGRSQKAEGQRWLSALRHHSDGSVSLSGHLQPPPVTTEQHGARYACRIHHPSLPASGRSAEVTLEVAGLSGPSLEDSVGLFLSAFLLLGLFKALGWAAVYLSTCKDSKKKAE

SEQ ID NO: 54146 - protein, 222 aa, Homo sapiens
MPPVTAQSASSHPAPSASQPSSPAAASRGSLSVPQEVTATLLASASSPTLDATRDAPATPRIAAPPGSATSSRGLGSQAQGSSLGTKESISDSFGLGSPAVTQRTTAPPDSAALSQDTRPEAAGSWPGPQTAVASVGSGTDRRDTAAATEAQHLSSESKEKTSAQKSGHPFGILKADFTISTLMDPEEMKDQFLRQIQEVLKLTLGHEQFRLKWVSFEVNKK

SEQ ID NO: 54147 - protein, 2003 aa, Homo sapiens
MQPPSLLLLLLLLLLLCVSVVRPRGLLCGSFPEPCANGGTCLSLSLGQGTCQCAPGFLGETCQFPDPCQNAQLCQNGGSCQALLPAPLGLPSSPSPLTPSFLCTCLPGFTGERCQAKLEDPCPPSFCSKRGRCHIQASGRPQCSCMPGWTGEQCQLRDFCSANPCVNGGVCLATYPQIQCHCPPGFEGHACERDVNECFQDPGPCPKGTSCHNTLGSFQCLCPVGQEGPRCELRAGPCPPRGCSNGGTCQLMPEKDSTFHLCLCPPGFIGPDCEVNPDNCVSHQCQNGGTCQDGLDTYTCLCPETWTGWDCSEDVDECETQGPPHCRNGGTCQNSAGSFHCVCVSGWGGTSCEENLDDCIAATCAPGSTCIDRVGSFSCLCPPGRTGLLCHLEDMCLSQPCHGDAQCSTNPLTGSTLCLCQPGYSGPTCHQDLDECLMAQQGPSPCEHGGSCLNTPGSFNCLCPPGYTGSRCEADHNECLSQPCHPGSTCLDLLATFHCLCPPGLEGQLCEVETNECASAPCLNHADCHDLLNGFQCICLPGFSGTRCEEDIDECRSSPCANGGQCQDQPGAFHCKCLPGFEGPRCQTEVDECLSDPCPVGASCLDLPGAFFCLCPSGFTGQLCEVPLCAPNLCQPKQICKDQKDKANCLCPDGSPGCAPPEDNCTCHHGHCQRSSCVCDVGWTGPECEAELGGCISAPCAHGGTCYPQPSGYNCTCPTGYTGPTCSEEMTACHSGPCLNGGSCNPSPGGYYCTCPPSHTGPQCQTSTDYCVSAPCFNGGTCVNRPGTFSCLCAMGFQGPRCEGKLRPSCADSPCRNRATCQDSPQGPRCLCPTVYTGGSCQTLMDLCAQKPCPRNSHCLQTGPSFHCLCLQGWTGPLCNLPLSSCQKAALSQGIDVSSLCHNGGLCVDSGPSYFCHCPPGFQGSLCQDHVNPCESRPCQNGATCMAQPSGYLCQCAPGYDGQNCSKELDACQSQPCHNHGTCTPKPGGFHCACPPGFVGLRCEGDVDECLDQPCHPTGTAACHSLANAFYCQCLPGHTGQWCEVEIDPCHSQPCFHGGTCEATAGSPLGFICHCPKGFEGPTCSHRAPSCGFHHCHHGGLCLPSPKPGFPPRCACLSGYGGPDCLTPPAPKGCGPPSPCLYNGSCSETTGLGGPGFRCSCPHSSPGPRCQKPGAKGCEGRSGDGACDAGCSGPGGNWDGGDCSLGVPDPWKGCPSHSRCWLLFRDGQCHPQCDSEECLFDGYDCETPPACTPAYDQYCHDHFHNGHCEKGCNTAECGWDGGDCRPEDGDPEWGPSLALLVVLSPPALDQQLFALARVLSLTLRVGLWVRKDRDGRDMVYPYPGARAEEKLGGTRDPTYQERAAPQTQPLGKETDSLSAGFVVVMGVDLSRCGPDHPASRCPWDPGLLLRFLAAMAAVGALEPLLPGPLLAVHPHAGTAPPANQLPWPVLCSPVAGVILLALGALLVLQLIRRRRREHGALWLPPGFTRRPRTQSAPHRRRPPLGEDSIGLKALKPKAEVDEDGVVMCSGPEEGEEVGQAEETGPPSTCQLWSLSGGCGALPQAAMLTPPQESEMEAPDLDTRGPDGVTPLMSAVCCGEVQSGTFQGAWLGCPEPWEPLLDGGACPQAHTVGTGETPLHLAARFSRPTAARRLLEAGANPNQPDRAGRTPLHAAVAADAREVCQLLLRSRQTAVDARTEDGTTPLMLAARLAVEDLVEELIAAQADVGARDKWGKTALHWAAAVNNARAARSLLQAGADKDAQDNREQTPLFLAAREGAVEVAQLLLGLGAARELRDQAGLAPADVAHQRNHWDLLTLLEGAGPPEARHKATPGREAGPFPRARTVSVSVPPHGGGALPRCRTLSAGAGPRGGGACLQARTWSVDLAARGGGAYSHCRSLSGVGAGGGPTPRGRRFSAGMRGPRPNPAIMRGRYGVAAGRGGRVSTDDWPCDWVALGACGSASNIPIPPPCLTPSPERGSPQLDCGPPALQEMPINQGGEGKK

SEQ ID NO: 54148 - protein, 1011 aa, Homo sapiens
MPAARPPAAGLRGISLFLALLLGSPAAALERDALPEGDASPLGPYLLPSGAPERGSPGKEHPEERVVTAPPSSSQSAEVLGELVLDGTAPSAHHDIPALSPLLPEEARPKHALPPKKKLPSLKQVNSARKQLRPKATSAATVQRAGSQPASQGLDLLSSSTEKPGPPGDPDPIVASEEASEVPLWLDRKESAVPTTPAPLQISPFTSQPYVAHTLPQRPEPGEPGPDMAQEAPQEDTSPMALMDKGENELTGSASEESQETTTSTIITTTVITTEQAPALCSVSFSNPEGYIDSSDYPLLPLNNFLECTYNVTVYTGYGVELQVKSVNLSDGELLSIRGVDGPTLTVLANQTLLVEGQVIRSPTNTISVYFRTFQDDGLGTFQLHYQAFMLSCNFPRRPDSGDVTVMDLHSGGVAHFHCHLGYELQGAKMLTCINASKPHWSSQEPICSAPCGGAVHNATIGRVLSPSYPENTNGSQFCIWTIEAPEGQKLHLHFERLLLHDKDRMTVHSGQTNKSALLYDSLQTESVPFEGLLSEGNTIRIEFTSDQARAASTFNIRFEAFEKGHCYEPYIQNGNFTTSDPTYNIGTIVEFTCDPGHSLEQGPAIIECINVRDPYWNDTEPLCRAMCGGELSAVAGVVLSPNWPEPYVEGEDCIWKIHVGEEKRIFLDIQFLNLSNSDILTIYDGDEVMPHILGQYLGNSGPQKLYSSTPDLTIQFHSDPAGLIFGKGQGFIMNYIEVSRNDSCSDLPEIQNGWKTTSHTELVRGARITYQCDPGYDIVGSDTLTCQWDLSWSSDPPFCEKIMYCTDPGEVDHSTRLISDPVLLVGTTIQYTCNPGFVLEGSSLLTCYSRETGTPIWTSRLPHCVSEESLACDNPGLPENGYQILYKRLYLPGESLTFMCYEGFELMGEVTIRCILGQPSHWNGPLPVCKEAAAETSLEGGNMALAIFIPVLIISLLLGGAYIYITRCRYYSNLRLPLMYSHPYSQITVETEFDNPIYETGETREYEVSI

SEQ ID NO: 54149 - protein, 44 aa, Homo sapiens
ERNFHTVPYMVGINKQEFGWLIPMMLEHPPTCMSFSTVQASHQT

SEQ ID NO: 54150 - protein, 274 aa, Homo sapiens
MLPKRSRRTVSKSIGPTCPFAGSCEVSKTQRRHCPACRLQKCLDAGMRKDMILSAEALALRRAKQAQRRAQQTPVQLSKEQEELIRTLLGAHTRHMGTMFEQFVQFRPPAHLFIHHQPLPTLAPVLPLVTHFADINTFMVLQVIKFTKDLPVFRSLPIEDQISLLKGAAVEICHIVLNTTFCLQTQNFLCGPLRYTIEDGARVSPTVGFQVEFLELLFHFHGTLRKLQLQEPEYVLLAAMALFSPGEHLPKPRAFCCTTSAQILSSLSPSTQAF

SEQ ID NO: 54151 - protein, 111 aa, Homo sapiens
MQTPADFPRVERDLVPCPRKVQQQEPTALPLTPSWGSLPCCLPVCLPGVRPICPRMRASSRRSPSRTTSRLALRRLIHPISSSSRFWARDPLAKSSWCGKSPGLTVGTCML

SEQ ID NO: 54152 - protein, 242 aa, Homo sapiens
MSPGAMRRSLPSTSSTSSTKRLKSVEDEMDSPGEEPFYTGQGRSPGSGSQSSGWHEVEPGMPSPTTLKKSEKSGFSSPSPSQTSSLGTAFTQHHRPVITGPRASPHATPSTLHFPTSPIIQQPGPYFSHPAIRYHPQETLKEFVQLVCPDAGQQAGQVGFLNPNGSSQGKVHNPFLPTPMLPPPPPPPMARPVPLPVPDTKPPTTSTEGGAASPTSPILVPGIKVAASHHPPDRPPDPFSTL

SEQ ID NO: 54153 - protein, 74 aa, Homo sapiens
MDLIPNFAMETWVLVATSLVLLYIYGTHSHKLFKKLGIPGPTPLPFLGTILFYLRGLWNFDRECNEKYGEMWGP

SEQ ID NO: 54154 - protein, 95 aa, Homo sapiens
MAAVQLAPGQTFDGEKLYQHVRAWLPAYATPHFIRIQDAMEVTSTFKLMKTRLVREGFNVGIVVDPLFVLDNRAQSFRPLTAEMYQAVCEGTWRL

SEQ ID NO: 54155 - protein, 109 aa, Homo sapiens
MKVDKDRQMVVLEEEFQNISPEELKMELPERQPRFVVYSYKYVHDDGRVSYPLCFIFSSPVGCKPEQQMMYAGSKNRLVQTAELTKVFEIRTTDDLTEAWLQEKLSFFR

SEQ ID NO: 54156 - protein, 373 aa, Homo sapiens
MERAPPDGPLNASGALAGEAAAAGGARGFSAAWTAVLAALMALLIVATVLGNALVMLAFVADSSLRTQNNFFLLNLAISDFLVGAFCIPLYVPYVLTGRWTFGRGLCKLWLVVDYLLCTSSAFNIVLISYDRFLSVTRAVSYRAQQGDTRRAVRKMLLVWVLAFLLYGPAILSWEYLSGGSSIPEGHCYAEFFYNWYFLITASTLEFFTPFLSVTFFNLSIYLNIQRRTRLRLDGAREAAGPEPPPEAQPSPPPPPGCWGCWQKGHGEAMPLHRKVAKSLAVIVSIFGLCWAPYTLLMIIRAACHGHCVPDYWYETSFWLLWANSAVNPVLYPLCHHSFRRAFTKLLCPQKLKIQPHSSLEHCWKKMKKKTCL

SEQ ID NO: 54157 - protein, 80 aa, Homo sapiens
MFANLKYVSLGILVFQTTSLVLTMRYSRTLKEEGPRYLSSTAVVVAELLKIMACILLVYKDSSHVSVKNSYNSIIFCVYA

SEQ ID NO: 54158 - protein, 577 aa, Homo sapiens
MRQDAPKPTPAACRCSGLARRVLTIAFALLILGLMTWAYAAGVPLASDRYGLLAFGLYGAFLSAHLVAQSLFAYLEHRRVAAAARGPLDAATARSVALTISAYQEDPAYLRQCLASARALLYPRARLRVLMVVDGNRAEDLYMVDMFREVFADEDPATYVWDGNYHQPWEPAAAGAVGAGAYREVEAEDPGRLAVEALVRTRRCVCVAQRWGGKREVMYTAFKALGDSVDYVQVCDSDTRLDPMALLELVRVLDEDPRVGAVGGDVRILNPLDSWVSFLSSLRYWVAFNVERACQSYFHCVSCISGPLGLYRNNLLQQFLEAWYNQKFLGTHCTFGDDRHLTNRMLSMGYATKYTSRSRCYSETPSSFLRWLSQQTRWSKSYFREWLYNALWWHRHHAWMTYEAVVSGLFPFFVAATVLRLFYAGRPWALLWVLLCVQGVALAKAAFAAWLRGCLRMVLLSLYAPLYMCGLLPAKFLALVTMNQSGWGTSGRRKLAANYVPLLPLALWALLLLGGLVRSVAHEARADWSGPSRAAEAYHLAAGAGAYVGYWVAMLTLYWVGVRRLCRRRTGGYRVQV

SEQ ID NO: 54159 - protein, 748 aa, Homo sapiens
MASEGTNIPSPVVRQIDKQFLICSICLERYKNPKVLPCLHTFCERCLQNYIPAHSLTLSCPVCRQTSILPEKGVAALQNNFFITNLMDVLQRTPGSNAEESSILETVTAVAAGKPLSCPNHDGNVMEFYCQSCETAMCRECTEGEHAEHPTVPLKDVVEQHKASLQVQLDAVNKRLPEIDSALQFISEIIHQLTNQKASIVDDIHSTFDELQKTLNVRKSVLLMELEVNYGLKHKVLQSQLDTLLQGQESIKSCSNFTAQALNHGTETEVLLVKKQMSEKLNELADQDFPLHPRENDQLDFIVETEGLKKSIHNLGTILTTNAVASETVATGEGLRQTIIGQPMSVTITTKDKDGELCKTGNAYLTAELSTPDGSVADGEILDNKNGTYEFLYTVQKEGDFTLSLRLYDQHIRGSPFKLKVIRSADVSPTTEGVKRRVKSPGSGHVKQKAVKRPASMYSTGKRKENPIEDDLIFRVGTKGRNKGEFTNLQGVAASTNGKILIADSNNQCVQIFSNDGQFKSRFGIRGRSPGQLQRPTGVAVHPSGDIIIADYDNKWVSIFSSDGKFKTKIGSGKLMGPKGVSVDRNGHIIVVDNKACCVFIFQPNGKIVTRFGSRGNGDRQFAGTLDGPHFAAVNSNNEIIITDFHNHSVKVFNQEGEFMLKFGSNGEGNGQFNAPTGVAVDSNGNIIVADWGNSRIQVFDGSGSFLSYINTSADPLYGPQGLALTSDGHVVVADSGNHCFKVYRYLQ

SEQ ID NO: 54160 - protein, 270 aa, Homo sapiens
MANVPWAEVCEKFQAALALSRVELHKNPEKEPYKSKYSARALLEEVKALLGPAPEDEDERPEAEDGPGAGDHALGLPAEVVEPEGPVAQRAVRLAVIEFHLGVNHIDTEELSAGEEHLVKCLRLLRRYRLSHDCISLCIQAQNNLGILWSEREEIETAQAYLESSEALYNQYMKEVGSPPLDPTERFLPEEEKLTEQERSKRFEKVYTHNLYYLAQVYQHLEMFEKAAHYCHSTLKRQLEHNAYHPIEWAINAATLSQFYINKNFIQKSY

SEQ ID NO: 54161 - protein, 35 aa, Homo sapiens
MAAAARARVAYLLRQLQRAAWLFQILDMEQQLQRK

SEQ ID NO: 54162 - protein, 78 aa, Homo sapiens
MKFITEIWHPNVDKNGDVCISILHEPGEDKYGYEKPEERWLPIHTVETIMISVISMLADPNGDSPANVDAAKEWREDR

SEQ ID NO: 54163 - protein, 51 aa, Homo sapiens
MAAGMYLEHYLDSIENLPFELQRNFQLMRDLDQRTEGGQTHSAAGHRPGPF

SEQ ID NO: 54164 - protein, 473 aa, Homo sapiens
MDLSALRVEEVQNVINAMQKILECPICLELIKEPVSTKCDHIFCKFCMLKLLNQKKGPSQCPLCKNDITKRSLQESTRFSQLVEELLKIICAFQLDTGLEYANSYNFAKKENNSPEHLKDEVSIIQSMGYRNRAKRLLQSEPENPSLQETSLSVQLSNLGTVRTLRTKQRIQPQKTSVYIELGSDSSEDTVNKATYCSVGDQELLQITPQGTRDEISLDSAKKAACEFSETDVTNTEHHQPSNNDLNTTEKRAAERHPEKYQGSSVSNLHVEPCGTNTHASSLQHENSSLLLTKDRMNVEKAEFCNKSKQPGLARSQHNRWAGSKETCNDRRTPSTEKKVDLNADPLCERKEWNKQKLPCSENPRDTEDVPWITLNSSIQKVNEWFSRSDELLGSDDSHDGESESNAKVADVLDVLNEVDEYSGSSEKIDLLASDPHEALICKSERVHSKSVESNIEDKIFGKTYRKKASLPN

SEQ ID NO: 54165 - protein, 440 aa, Homo sapiens
MDPLETPIKDGILYQQHVKFGKKCWRKVWALLYAGGPSGVARLESWEVRDGGLGAAGDRSAGPGRRGERRVIRLADCVSVLPADGESCPRDTGAFLLTTTERSHLLAAQHRQAWMGPICQLAFPGTGEASSGSTDAQSPKRGLVPMEENSIYSSWQEVGEFPVVVQRTEAATRCQLKGPALLVLGPDAIQLREAKGTQALYSWPYHFLRKFGSDKGVFSFEAGRRCHSGEGLFAFSTPCAPDLCRAVAGAIARQRERLPELTRPQPCPLPRATSLPSLDTPGELREMPPGPEPPTSRKMHLAEPGPQSLPLLLGPEPNDLASGLYASVCKRASGPPGNEHLYENLCVLEASPTLHGGEPEPHEGPGSRSPTTSPIYHNGQDLSWPGPANDSTLEAQYRRLLELDQVEGTGRPDPQAGFKAKLVTLLSRERRKGPAPCDRP

SEQ ID NO: 54166 - protein, 68 aa, Homo sapiens
MAEAHQAVGFRPSLTSDGAEVELSAPVLQEIYLSGLRSWKRHLSRFWGLTYFVTQAGVQCHHHSSLHP

SEQ ID NO: 54167 - protein, 275 aa, Homo sapiens
MALQIPGGFWAAAVTVMLVMLSTPVAEARDFPKDFLVQFKGMCYFTNGTERVRGVARYIYNREEYGRFDSDVGEFQAVTELGRSIEDWNNYKDFLEQERAAVDKVCRHNYEAELRTTLQRQVEPTVTISPSRTEALNHHNLLVCSVTDFYPAQIKVRWFRNDQEETAGVVSTSLIRNGDWTFQILVMLEITPQRGDIYTCQVEHPSLQSPITVEWRAQSESAQSKMLSGIGGFVLGLIFLGLGLIIRHRGQKGPRGPPPAGNISAMIQSGERAQA

SEQ ID NO: 54168 - protein, 373 aa, Homo sapiens
MTSSRLWFSLLLAAAFAGRATALWPWPQNFQTSDQRYVLYPNNFQFQYDVSSAAQPGCSVLDEAFQRYRDLLFGSGSWPRPYLTGKRHTLEKNVLVVSVVTPGCNQLPTLESVENYTLTINDDQCLLLSETVWGALRGLETFSQLVWKSAEGTFFINKTEIEDFPRFPHRGLLLDTSRHYLPLSSILDTLDVMAYNKLNVFHWHLVDDPSFPYESFTFPELMRKGSYNPVTHIYTAQDVKEVIEYARLRGIRVLAEFDTPGHTLSWGPGIPGLLTPCYSGSEPSGTFGPVNPSLNNTYEFMSTFFLEVSSVFPDFYLHLGGDEVDFTCWKSNPEIQDFMRKKGFGEDFKQLESFYIQTFSQTQSYRCGERIFQ

SEQ ID NO: 54169 - protein, 182 aa, Homo sapiens
MLSSVVFWGLIALIGTSRGSYPFSHSMKPHLHPRLYHGCYGDIMTMKTSGATCDANSVMNCGIRGSEMFAEMDLRAIKPYQTLIKEVGQRHCVDPAVIAAIISRESHGGSVLQDGWDHRGLKFGLMQLDKQTYHPVGAWDSKEHLSQATGILTERIKAIQKKFPTWSVAQHLKGRLYSEYFV

SEQ ID NO: 54170 - protein, 42 aa, Homo sapiens
MLLLKKHTEDISSVYEIRERLGSGAFSEVVLAQERGSAHLVA

SEQ ID NO: 54171 - protein, 82 aa, Homo sapiens
MELCSTNITLTNLVSVNERLVYTPHPENPEMTVLTQEAIITVKGISLGSYLESLMANTISSNAKKGWAAIEWIIEHSESAVS

SEQ ID NO: 54172 - protein, 100 aa, Homo sapiens
MYKETVYSAFNLLMHYPPPSGAGQHPQPQPPLVSGPRSQCRPVLAASLTSTRPISPPTVSPNSLSTNISTAHIPPLHLRTSARSKFTGLCRPLTSLASTP

SEQ ID NO: 54173 - protein, 85 aa, Homo sapiens
MKPSGEDQAALAAGPWEECFQAAVQLALRAGQIIRKALTEEKRVSTKTSAADLVTETDHLVEDLIISELRERFPSHRSPFSLVHM

SEQ ID NO: 54174 - protein, 392 aa, Homo sapiens
MPKPIMVIPTLASLASPTTLQSQMLGGLGQDVLLNNSLTPKYLGCKQDNSSSPKPSSVFRNGFSGIKKPWHRCHVCNHHFQFKQHLRDHMNTHTNRRPYSCRICRKSYVRPGSLSTHMKLHHGENRLKKLMCCEFCAKVFGHIRVYFGHLKEVHRVVISTEPAPSELQPGDIPKNRDMSVRGMEGSLERENKSNLEEDFLLNQADEVKLQIKCGRCQITAQSFAEIKFHLLDVHGEEIEGRLQEGTFPGSKGTQEELVQHASPDWKRHPERGKPEKVHSSSEESHACPRLKRQLHLHQNGVEMLMENEGPQSGTNKPRETCQGPECPGLHTFLLWSHSGFNCLLCAEMLGRKEDLLHHWKHQHNCEDPSKLWAILNTVSNQGVIELSSEAEK

SEQ ID NO: 54175 - protein, 172 aa, Homo sapiens
MYLDNSSIEEASGVYPIDDDDYASASGSGADEDVESPELTTSRPLPKILLTSAAPKVETTTLNIQNKIPAQTKSPEETDKEKVHLSDSERKMDPAEEDTNVYTEKHSDSLFKRTEVLAAVIAGGVIGFLFAIFLILLLVYRMRKKDEGSYDLGERKPSSAAYQKAPTKEFYA

SEQ ID NO: 54176 - protein, 451 aa, Homo sapiens
  MOD_RES (1)..(1): Any amino acid
XRFKQLLNPAQVFDLMNGGPHLGLRLFQKFDTFRILVCGGDGSVGWVLSEIDSLNLHKQCQLGVLPLGTGNDLARVLGWGSACDDDTQLPQILEKLERASTKMLDRWSVMAYEAKLPRQASSSTVTEDFSEDSEVQQILFYEDSVAAHLSKILTSDQHSVVISSAKVLCETVKDFVARVGKAYEKTTESSEESEVMAKKCSVLKEKLDSLLKTLDDESQASSSLPNPPPTIAEEAEDGDGSGSICGSTGDRLVASACPARPQIFRPREQLMLRANSLKKAIRQIIEHTEKAVDEQNAQTQEQEGFVLGLSESEEKMDHRVCPPLSHSESFGVPKGRSQRKVSKSPCEKLISKGSLSLGSSASLPPQPGSRDGLPALNTKILYPNVRAGMSGSLPGGSVISRLLINADPFNSEPETLERSQTQSPRPHDPIPVNCLEEAPPWRWKVDERRQG

SEQ ID NO: 54177 - protein, 69 aa, Homo sapiens
MMAFAPPKNTDGPKMQTKMSTWTPLNHQLLNDRVFEERRALLGKWMGCCSGWFQIPGLKRFSCLCLPKC

SEQ ID NO: 54178 - protein, 257 aa, Homo sapiens
MAVFSDKGDYFWWLLLPVCAMSMTCPIFSSALNSMLSKWDLPVFTLPFNMALSMYLSATGHYNPFFPAKLVIPITTAPNISWSDLSALELLKSIPVGVGQIYGCDNPWTGGIFLGAILLSSPLMCLHAAIGSLLGIAAGLSLSAPFEDIYFGLWGFNSSLACIAMGGMFMALTWQTHLLALGCALFTAYLGVGMANFMAEVGLPACTWPFCLATLLFLIMTTKNSNIYKMPLSKVTYPEENRIFYLQAKKRMVESPL

SEQ ID NO: 54179 - protein, 140 aa, Homo sapiens
EEEEASTEEEDKEGAVVSAPSVKLTLTILRQTGGLGISIAGGKGSTPYKGDDEGIFISRVSEEGPAARAGVRVGDKLLEVNGVALQGAEHHEAVEALRGAGTAVQMRVWRERMVEPENAVTITPLRPEDDYSPRERRGGG

SEQ ID NO: 54180 - protein, 127 aa, Homo sapiens
MAAGGDHGSPDSYRSPLASRYASPEMCFVFSDRYKFRTWRQLWLWLAEAEQTLGLPITDEQIQEMKSNLENIDFKMAAEEEKRLRHDVMAHVHTFGHCCPKAAGIIHLGATSCYVGDNTVGACVVYT

SEQ ID NO: 54181 - protein, 66 aa, Homo sapiens
MLNVHNLNYSSSRTLLFQRFSVIFMDVLFVYAVRAVNALMEKKWVKNLQKSQNLFCRYYFCGTSGY

SEQ ID NO: 54182 - protein, 192 aa, Homo sapiens
MGPEAAPAATHAAPQATREKIRSRFHGSHDLIHRLFVCISGVADQLQTNYASDLRSILKTLFEVMATKPETDDKEKLRKVTQTLRSAALEDCALCQETLSSSELAAKTRDGDFEDPPEWVPDEACGFCTACKAPFTVIRRKHHCRSCGKIFCSRCSSHSAPLPRYGQVKPVRVCTHCYMFHVTPFYSDKAGL

SEQ ID NO: 54183 - protein, 92 aa, Homo sapiens
MAAGERSWCLCKLLRFFYSLFFPGLIVCGTLCVCLVIVLWGIRLLLQRKKKLVSTSKNGKNQMVIAFFHPYCNAGGGGERVLWCALRALQKK

SEQ ID NO: 54184 - protein, 482 aa, Homo sapiens
MPTVVVMDVSLSMTRPVSIEGSEEYQRKHLAAHGLTMLFEHMATNYKLEFTALVVFSSLWELMVPFTRDYNTLQVVLVTDGCLGIGRGSLRHSLATQNQRSESNRFPLPFPFPSKLYIMCMANLEELQSTDSLECLERLIDLNNGEGQIFTIDGPLCLKNVQSMFGKLIDLAYTPFHAVLKCGHLTADVQVFPRPEPFVVDEEIDPIPKVINTDLEIVGFIDIADISSPPVLSRHLVLPIALNKEGDEVGTGITDDNEDENSANQIAGKIPNFCVLLHGSLKVEGMVAIVQLGPEWHGMLYSQADSKKKSNLMMSLFEPGPEPLPWLGKMAQLGPISDAKENPYGEDDNKSPFPLQPKNKRSYAQNVTVWIKPSGLQTDVQKILRNARKLPEKTQTFYKELNRLRKAALAFGFLDLLKGVADMLERECTLLPETAHPDAAFQLTHAAQQLKLASTGTSEYAAYDQNITPLHTDFSGSSTERI

SEQ ID NO: 54185 - protein, 107 aa, Homo sapiens
MALAMLVLVVSPWSAARGVLRNYWERLLRKLPQSRPGFPSPPWGPALAVQGPAMFTEPANDTSGSKENSSLLDSIFWMAAPKNRRTIEVNRCRRRNPQKLIKVKVMH

SEQ ID NO: 54186 - protein, 352 aa, Homo sapiens
MPRSFLVKSKKAHTYHQPRVQEDEPLWPPALTPVPRDQAPSNSPVLSTLFPNQCLDWTNLKREPELEQDQNLARMAPAPEGPIVLSRPQDGDSPLSDSPPFYKPSFSWDTLATTYGHSYRQAPSTMQSAFLEHSVSLYGSPLVPSTEPALDFSLRYSPGMDAYHCVKCNKVFSTPHGLEVHVRRSHSGTRPFACDICGKTFGHAVSLEQHTHVHSQGIPAGSSPEPAPDPPGPHFLRQERSFECRMCGKAFKRSSTLSTHLLIHSDTRPYPCQFCGKRFHQKSDMKKHTYIHTGEKPHKCQVCGKAFSQSSNLITHSRKHTGFKPFSCELCTKGFQRKVDLRRHRESQHNLK

SEQ ID NO: 54187 - protein, 247 aa, Homo sapiens
MTAGSVCVPQIIPLRVPQPGKANHEIDNNTLLEMKSDTPDVNIYYTLDGSKPEFLKRIGYGENNTFKYIKPITLPDGKIQVKAIAVSKDCRQSGIVTKVFHVDYEPPNIVSPEDNVENVLKDSSRQEFKNGFVGSKLKKKYKNSENQRSWNVNLRKFPVPRFCTRKRSEVFDKHGDNENSKGDRLSQVCPLPCPPAIRSLCSLLSRMWLSCPTHIWLSSPTPRRSSDGLVCRMQKLGTHEHSHLCGV

SEQ ID NO: 54188 - protein, 362 aa, Homo sapiens
MRVTAPRTLLLLLWGAVALTETWAGSHSMRYFYTAMSRPGRGEPRFITVGYVDDTLFVRFDSDATSPRKEPRAPWIEQEGPEYWDRETQISKTNTQTYRENLRTALRYYNQSEAGSHIIQRMYGCDVGPDGRLLRGYDQDAYDGKDYIALNEDLSSWTAADTAAQITQRKWEAARVAEQLRAYLEGLCVESLRRYLENGKETLQRADPPKTHVTHHPISDHEVTLRCWALGFYPAEITLTWQRDGEDQTQDTELVETRPAGDRTFQKWAAVVVPSGEEQRYTCHVQHEGLPKPLTLRWEPSSQSTVPIVGIVAGLAVLAVVVIGAVVAAVMCRRKSSGGKGGSYSQAACSDSAQGSDVSLTA

SEQ ID NO: 54189 - protein, 35 aa, Homo sapiens
IACVSAPDSLQVSEGGEQAAAWLATRHLRPYCQPR

SEQ ID NO: 54190 - protein, 427 aa, Homo sapiens
MSLMVVSMACVGLFLVQRAGPHMGGQDKPFLSAWPSAVVPRGGHVTLRCHYRHRFNNFMLYKEDRIHIPIFHGRIFQESFNMSPVTTAHAGNYTCRGSHPHSPTGWSAPSNPVVIMVTGNHRKPSLLAHPGPLVKSGERVILQCWSDIMFEHFFLHKEGISKDPSRLVGQIHDGVSKANFSIGPMMLALAGTYRCYGSVTHTSYQLSAPSDPLDIVVTGPYEKPSLSAQPGPKVQAGESVTLSCSSRSSYDMYHLSREGGAHERRLPAVRKVNRTFQADFPLGPATHGGTYRCFGSFRHSPYELSDPSDPLLVSVTGNPRHLHILIGTSVVIILFILLLFFLLHLWCSNKKNAAVMDQEPAGNRTANSEDSDEQDPEEVTYAQLDHCVFTQRKITRPSQRPKTPPTDTILYTELPNAKPRSKVVSCP

SEQ ID NO: 54191 - protein, 694 aa, Homo sapiens
MEGPHLPNKKKHKKQAVKTEPEKKSQSTKLSVVHEKKSQEGKPKEHTEPKSLPKQASDTGSNDAHNKKAVSRSAEQQPSEKSTEPKTKPQDMISAGGESVAGITAISGKPGDKKKEKKSLTPAVPVESKPDKPSGKSGMDAALDDLIDTLGGPEETEEENTTYTGPEVSDPMSSTYIEELGKREVTIPPKYRELLAKKEGITGPPADSSKPIGPDDAIDALSSDFTCGSPTAAGKKTEKEESTEVLKAQSAGTVRSAAPPQEKKRKVEKDTMSDQALEALSASLGTRQAEPELDLRSIKEVDEAKAKEEKLEKCGEDDETIPSEYRLKPATDKDGKPLLPEPEEKPKPRSESELIDELSEDFDRSECKEKPSKPTEKTEESKAAAPAPVSEAVCRTSMCSIQSAPPEPATLKGTVPDDAVEALADSLGKKEADPEDGKPVMDKVKEKAKEEDREKLGEKEETIPPDYRLEEVKDKDGKPLLPKESKEQLPPMSEDFLLDALSEDFSGPQNASSLKFEDAKLAAAISEVVSQTPASTTQAGAPPRDTSQSDKDLDDALDKLSDSLGQRQPDPDENKPMEDKVKEKAKAEHRDKLGERDDTIPPEYRHLLDDNGQDKPVKPPTKKSEDSKKPADDQDPIDALSGDLDSCPSTTETSQNTAKDKCKKAASSSKAPKNGGKAKDSAKTTEETSKPKDD

SEQ ID NO: 54192 - protein, 35 aa, Homo sapiens
MGRVSGLVPSRFLTLLAHLVVVITLFWSRCPSSCH

SEQ ID NO: 54193 - protein, 1629 aa, Homo sapiens
MERCSRCHRLLLLLPLVLGLSAAPGWAGAPPVDVLRALRFPSLPDGVRRAKGICPADVAYRVARPAQLSAPTRQLFPGGFPKDFSLLTVVRTRPGLQAPLLTLYSAQGVRQLGLELGRPVRFLYEDQTGRPQPPSQPVFRGLSLADGKWHRVAVAVKGQSVTLIVDCKKRVTRPLPRSARPVLDTHGVIIFGARILDEEVFEGDVQELAIVPGVQAAYESCEQKELECEGGQRERPQNQQPHRAQRSPQQQPSRLHRPQNQEPQSQAAHGPRGLKGEKGEPAVLEPGMLVEGPPGPEGPAGLIGPPGIQGNPGPVGDPGERGPPGRAGLPGSDGAPGPPGTSLMLPFRFGSGGGDKGPVVAAQEAQAQAILQQARLALRGPPGPMGYTGRPGPLGQPGSPGLKGESGDLGPQGPRGPQGLTGPPGKAGRRGRAGADGARGMPGDPGVKGDRGFDGLPGLPGEKGHRGDTGAQGLPGPPGEDGERGDDGEIGPRGLPGESGPRGLLGPKGPPGIPGPPGVRGMDGPQGPKGSLGPQGEPGPPGQQGTPGTQGLPGPQGAIGPHGEKGPQGKPGLPGMPGSDGPPGHPGKEGPPGTKGNQGPSGPQGPLGYPGPRGVKGVDGIRGLKGHKGEKGEDGFPGFKGDIGVKGDRGEVGVPGSRGEDGPEGPKGRTGPTGDPGPPGLMGEKGKLGVPGLPGYPGRQGPKGSLGFPGFPGASGEKGARGLSGKSGPRGERGPTGPRGQRGPRGATGKSGAKGTSGGDGPHGPPGERGLPGPQGPNGFPGPKGPPGPPGKDGLPGHPGQRGEVGFQGKTGPPGPPGVVGPQGAAGETGPMGERGHPGPPGPPGEQGLPGTAGKEGTKGDPGPPGAPGKDGPAGLRGFPGERGLPGTAGGPGLKGNEGPSGPPGPAGSPGERGAAGSGGPIGPPGRPGPQGPPGAAGEKGVPGEKGPIGPTGRDGVQGPVGLPGPAGPPGVAGEDGDKGEVGDPGQKGTKGNKGEHGPPGPPGPIGPVGQPGAAGADGEPGARGPQGHFGAKGDEGTRGFNGPPGPIGLQGLPGPSGEKGETGDVGPMGPPGPPGPRGPAGPNGADGPQGPPGGVGNLGPPGEKGEPGESGSPGIQGEPGVKGPRGERGEKGESGQPGEPGPPGPKGPTGDDGPKGNPGPVGFPGDPGPPGEGGPRGQDGAKGDRGEDGEPGQPGSPGPTGENGPPGPLGKRGPAGSPGSEGRQGGKGAKGDPGAIGAPGKTGPVGPAGPAGKPGPDGLRGLPGSVGQQGRPGATGQAGPPGPVGPPGLPGLRGDAGAKGEKGHPGLIGLIGPPGEQGEKGDRGLPGPQGSPGQKGEMGIPGASGPIGPGGPPGLPGPAGPKGAKGATGPGGPKGEKGVQGPPGHPGPPGEVIQPLPIQMPKKTRRSVDGSRLMQEDEAIPTGGAPGSPGGLEEIFGSLDSLREEIEQMRRPTGTQDSPARTCQDLKLCHPELPDGEYWVDPNQGCARDAFRVFCNFTAGGETCVTPRDDVTQFSYVDSEGSPVGVVQLTFLRLLSVSAHQDVSYPCSGAARDGPLRLRGANEDELSPETSPYVKEFRDGCQTQQGRTVLEVRTPVLEQLPVLDASFSDLGAPPRRGGVLLGPVCFMG

SEQ ID NO: 54194 - protein, 118 aa, Homo sapiens
LKQFDAYPKTLEDFRVKTCGGATVTIVSGLLMLLLFLSELQYYLTTEVHPELYVDKSRGDKLKINIDVLFPHMPCAYLSIDAMDVAGEQQLDVEHNLFKQRLDKDGIPVSSEAERHAD

SEQ ID NO: 54195 - protein, 303 aa, Homo sapiens
MAASCLVLLALCLLLPLLLLGGWKRWRRGRAARHVVAVVLGDVGRSPRMQYHALSLAMHGFSVTLLGFCNSKPHDELLQNNRIQIVGLTELQSLAVGPRVFQYGVKVVLQAMYLLWKLMWREPGAYIFLQNPPGLPSIAVCWFVGCLCGSKLVIDWHNYGYSIMGLVHGPNHPLVLLAKWYEKFFGRLSHLNLCVTNAMREDLADNWHIRAVTVYDKPASFFKETPLDLQHRLFMKLGSMHSPFRARSEPEDPVTERSAFTERDAGSGLVTRLRERPALLVSSTSWTEDEDFSILLAALESRV

SEQ ID NO: 54196 - protein, 98 aa, Homo sapiens
MLQLSERQVKTWFQNRRAKWRRLKQENPQSNKKEELESLDSSCDQRQDLPSEQNKGASLDSSQCSPSPASQEDLESEISEDSDQEVDIEGDKSYFNAG

SEQ ID NO: 54197 - protein, 104 aa, Homo sapiens
MVRSRLTAVSASWVQAHPPADMGRRKSKRKPPPKKKMTGTLETQFTCPFCNHEKSCDVKMDRARNTGVISCTVCLEEFQTPITYLSEPVDVYSDWIDACEAANQ

SEQ ID NO: 54198 - protein, 644 aa, Homo sapiens
MDLTKMGMIQLQNPSHPTGLLCKANQMRLAGTLCDVVIMVDSQEFHAHRTVLACTSKMFEILFHRNSQHYTLDFLSPKTFQQILEYAYTATLQAKAEDLDDLLYAAEILEIEYLEEQCLKMLETIQASDDNDTEATMADGGAEEEEDRKARYLKNIFISKHSSEESGYASVAGQSLPGPMVDQSPSVSTSFGLSAMSPTKAAVDSLMTIGQSLLQGTLQPPAGPEEPTLAGGGRHPGVAEVKTEMMQVDEVPSQDSPGAAESSISGGMGDKVEERGKEGPGTPTRSSVITSARELHYGREESAEQVPPPAEAGQAPTGRPEHPAPPPEKHLGIYSVLPNHKADAVLSMPSSVTSGLHVQPALAVSMDFSTYGGLLPQGFIQRELFSKLGELAVGMKSESRTIGEQCSVCGVELPDNEAVEQHRKLHSGMKTYGCELCGKRFLDSLRLRMHLLAHSGTDMAVFCLLCGKRFQAQSALQQHMEVHAGVRSYICSECNRTFPSHTALKRHLRSHTGDHPYECEFCGSCFRDESTLKSHKRIHTGEKPYECNGCGKKFSLKHQLETHYRVHTGEKPFECKLCHQRSRDYSAMIKHLRTHNGASPYQCTICTEYCPSLSSMQKHMKGHKPEEIPPDWRIEKTYLYLCYV

SEQ ID NO: 54199 - protein, 43 aa, Homo sapiens
MELSQMSELMGLSVLLGLLALMATAAVARGWLRAGEERSGRPA

SEQ ID NO: 54200 - protein, 566 aa, Homo sapiens
MSSRLGAVPATSGPTTFKQQRSTRIVGAKNRTQCSIKDNSFQYTIPHDDSLSGSSSASSCEPVSDFPASFRKSTYWMKMRRIKPAATSHVEGSGGVSAKGKRKPRQEEDEDYREFPQKKHKLYGRKQRPKTQPNPKSQARRIRKEPPVYAAGSLEEQWYLEIVDKGSVSCPTCQAVGRKTIEGLKKHMENCKQEMFTCHHCGKQLRSLAGMKYHVMANHNSLPILKAGDEIDEPSERERLRTVLKRLGKLRCMRESCSSSFTSIMGYLYHVRKCGKGAAELEKMTLKCHHCGKPYRSKAGLAYHLRSEHGPISFFPESGQPECLKEMNLESKSGGRVQRRSAKIAVYHLQELASAELAKEWPKRKVLQDLVPDDRKLKYTRPGLPTFSQEVLHKWKTDIKKYHRIQCPNQGCEAVYSSVSGLKAHLGSCTLGNFVAGKYKCLLCQKEFVSESGVKYHINSVHAEDWFVVNPTTTKSFEKLMKIKQRQQEEEKRRQQHRSRRSLRRRQQPGIELPETELSLRVGKDQRRNNEELVVSASCKEPEQEPVPAQFQKVKPPKTNHKRGRK

SEQ ID NO: 54201 - protein, 79 aa, Homo sapiens
MAPAKKGGEKKKGRSAINEVVTREYTINIHKRIHGVGFKKRAPRALKEIRKFAMKEMGTPDVRIDTRLNKAVWAKGIRC

SEQ ID NO: 54202 - protein, 146 aa, Homo sapiens
MTDVPATFTQAECNGDKPPENGQQTITKISEELTDVDSPLPHYRVEPSLEGALTKGSQEERRKLQGNMLLNSSMEDKMLKENPEEKLFIVHKAITDLSLQETSADEMTFREDGVSLLLPRLECNGAISADCNLCLQGSSDSPASAS

SEQ ID NO: 54203 - protein, 459 aa, Homo sapiens
MEEKGEGMLPAPSPDITLPSCSLAQSLWALFTSSLAISLVFAVIPFCRDVKVLASVMALAGLAMGCIDTVANMQLVRMYQKDSAVFLQVLHFFVGFGALLSPLIADPFLSEANCLPANSTANTTSRGHLFHVSRVLGQHHVDAKPWSNQTFPGLTPKDGAGTRVSYAFWIMALINLPVPMAVLMLLSKERLLTCCPQRRPLLLSADELALETQPPEKEDASSLPPKFQSHLGHEDLFSCCQRKNLRGAPYSFFAIHITGALVLFMTDGLTGAYSAFVYSYAVEKPLSVGHKVAGYLPSLFWGFITLGRLLSIPISSRMKPATMVFINVVGVVVTFLVLLIFSYNVVFLFVGTASLGLFLSSTFPSMLAYTEDSLQYKGCATTVLVTGAGVGEMVLQMLVGSIFQAQGSYSFLVCGVIFGCLAFTFYILLLFFHRMHPGLPSVPTQDRSIGMENSECYQR

SEQ ID NO: 54204 - protein, 63 aa, Homo sapiens
MDRRSMGETESGDAFLDLKKPPASKCPHRYTKEELLDIKELPHSKQRPSCLSEKYDSDGVWDP

SEQ ID NO: 54205 - protein, 55 aa, Homo sapiens
MLTLQTWLVQALFIFLTTESTGQHTSLLIAKQNVTPPPHALLIILLCILSTLKSG

SEQ ID NO: 54206 - protein, 92 aa, Homo sapiens
MAEQEPTAEQLAQIAAENEEDEHSVNYKPPAQKSIQEIQELDKDDESLRKYKEALLGRVAVSADPNVPNVVVTGLTLVCSSAPGPLELDLTG

SEQ ID NO: 54207 - protein, 107 aa, Homo sapiens
MAVQESAAQLSMTLKVQEYPTLKVPYETLNKRFRAAQKNIDRETSHVTMVVAELEKTLSGCPAVDSVVSLLDGVVEKLSVLKRKVGPAWRSLFSLGHGHPFCLENES

SEQ ID NO: 54208 - protein, 153 aa, Homo sapiens
PSSVEAERTDTAVQATGSVPSTPIAHRGPSSSLNTPGSFRRGLDDSTGGTPLTPAARISALNIVGDLLRKVGALESKLASCRNLVYDQSPNRTGGPASGRSSKNRDGGERRPSSTSVPLGDKGLGKRLEFGKPPSHMSSSPLPSAQGVVKMLL

SEQ ID NO: 54209 - protein, 175 aa, Homo sapiens
MQKMVKEHYKTFEKGHIRDITDSLIEHCQEKQLDENANVQLSDEKIINIVLDLFGAGFDTVTTAISWSLMYLVMNPRVQRKIQEELDTVIGRSRRPRLSDRSHLPYMEAFILETFRHSSFVPFTIPHSTTRDTSLKGFYIPKGRCVFVNQWQINHDQKLWVNPSEFLPERFLTPD

SEQ ID NO: 54210 - protein, 235 aa, Homo sapiens
MEEGERSPLLSQETAGQKPLSVHRPPTSGCLGPVPREDQAEAWGCSCCPPETKHQALSGTPKKGPAPSLSPGSSCVKYLIFLSNFPFSLLGLLALAIGLWGLAVKGSLGSDLGGPLPADPMLGLALGGLVVSAVSLAGYLGALCENTCLLRGFSGGILAFLVLEAVAGALVVALWGPLQDSLEHTLRVAIAHYQDDPDLRFLLDQVQLGLRCCGAASYQDWQQNLYCLSSPCSSQ

SEQ ID NO: 54211 - protein, 427 aa, Homo sapiens
MLLMVVSMACVGFFLVQRAGPHVGGQDKPFLSAWPSAVVPRGGHVTLRCHYRHRFNNFMLYKEDRIHVPIFHGRLFQESFNMSPVTTAHAGNYTCRGSHPHSPTGWSAPSNPVVIMVTGNHRKPSLLAHPGPLVKSGERVILQCWSDIMFEHFFLHKEGISKDPSRLVGQIHDGVSKANFSIGPMMLALAGTYRCYGSVTHTPYQLSAPSDPLDIVVTGPYEKPSLSAQPGPKVQAGESVTLSCSSRSSYDMYHLSREGGAHERRLPAVRKVNRTFQADFPLGPATHGGTYRCFGSFRHSPYEWSDPSDPLLVSVTGNPRHLHILIGTSVVIILFILLLFFLLHLWCSNKKNAAVMDQEPAGNRTANSEDSDEQDPEEVTYAQLDHCVFTQRKITRPSQRPKTPPTDTILYTELPNAKPRSKVVSCP

SEQ ID NO: 54212 - protein, 277 aa, Homo sapiens
MSGVTTETGSLDSATVATSQPLAEWQLCKASVSRGIIEIAACHSTHTSAAKTQGGHVYMWGQCRGQSVILPHLTHFSCTDDVFACFATPAVTWRLLSVEPDDHLTVAESLKREFDNPDTADLKFLVDGKYIYAHKVLLKIRCEHFRSSLEDNEDDIVEMSEFSYPVYRAFLEYLYTDSISLSPEEAVGLLDLATFYRENRLKKLCQQTIKQGICEENAIALLSAAVKYDAQDLEEFCFRFCINHLTVVTQTSGFAEMDHDLLKNFISKASRVGAFKN

SEQ ID NO: 54213 - protein, 329 aa, Homo sapiens
MLRKVIQQYLSGGMCGYDLDGCPVWYDIIGPLDAKGLLFSASKQDLLRTKMRECELLLQECAHQTTKLGRKVETITIIYDCEGLGLKHLWKPAVEAYGEFLCMFEENYPETLKRLFVVKAPKLFPVAYNLIKPFLSEDTRKKIMVLGANWKEVLLKHISPDQVPVEYGGTMTDPDGNPKCKSKINYGGDIPRKYYVRDQVKQQYEHSVQISRGSSHQVEYEILFPGCVLRWQFMSDGADVGFGIFLKTKMGERQRAGEMTEVLPNQRYNSHLVPEDGTLTCSDPGIYVLRFDNTYSFIHAKKVNFTVEVLLPDKASEEKMKQLGAGTPK

SEQ ID NO: 54214 - protein, 146 aa, Homo sapiens
MGLKAAQKTLFPLRSIDDVVRLFAAELGREEPDLVLLSLVLGFVEHFLAVNRVIPTNVPELTFQPSPAPDPPGGLTYFPVADLSIIAALYARFTAQIRGAVDLSLYPREGGVSSRELVKKVSDVIWNSLSRSYFKDRAHIQSLFSF

SEQ ID NO: 54215 - protein, 129 aa, Homo sapiens
MAELQEVQITEEKPLLPGQTPEAAKEAELAARILLDQGQTHSVETPYGSVTFTVYGTPKPKRPAILTYHDVGLNYKSCFQPLFQFEDMQEIIQNFVRVHVDAPGMEEGAPVFPLGYQYPSLDQLADMIP

SEQ ID NO: 54216 - protein, 888 aa, Homo sapiens
MLTEASLSIWGWGSLGIVLFLITFGPFVIFYLTFYILCFVGGGLVVTLLFGKTNSEKYLEQCEHSFLPPTSPGVPKCLEEMKREARTIKIDRRLTGANIIDEPLQQVIQFSLRDYVQYWYYTLSDDESFLLEIRQTLQNALIQFATRSKEIDWQPYFTTRIVDDFGTHLRVFRKAQQKITEKDDQVKGTAEDLVDTFFEVEVEMEKEVCRDLVCTSPKDEEGFLRDLCEVLLYLLLPPGDFQNKIMRYFVREILARGILLPLINQLSDPDYINQYVIWMIRDSNCNYEAFMNIIKLSDNIGELEAVRDKAAEELQYLRSLDTAGDDINTIKNQINSLLFVKKVCDSRIQRLQSGKEINTVKLAANFGKLCTVPLDSILVDNVALQFFMDYMQQTGGQAHLFFWMTVEGYRVTAQQQLEVLLSRQRDGKHQTNQTKGLLRAAAVGIYEQYLSEKASPRVTVDDYLVAKLADTLNHEDPTPEIFDDIQRKVYELMLRDERFYPSFRQNALYVRMLAELDMLKDPSFRGSDDGDGESFNGSPTGSINLSLDDLSNVSSDDSVQLHAYISDTVYADYDPYAVAGVCNDHGKTYALYAITVHRRNLNSEEMWKTYRRYSDFHDFHMRITEQFESLSSILKLPGKKTFNNMDRDFLEKRKKDLNAYLQLLLAPEMMKASPALAHYVYDFLENKAYSKGKGDFARKMDTFVNPLRNSMRNVSNAVKSLPDSLAEGMTKMSDNMGKMSERLGQDIKQSFFKVPPLIPKTDSDPEHRRVSAQLDDNVDDNIPLRVMLLLMDEVFDLKERNQWLRRNIKNLLQQLIRATYGDTINRKIVDHVDWMTSPEQVADSVKRFRDAFWPNGILAEAVPCRDKSIRMRTRVAGKTKLLAIMPGE

SEQ ID NO: 54217 - protein, 514 aa, Homo sapiens
MAAFKLDFLPEMMVDHCSLNSSPVSKKMNGTLDHPDQPDLDAIKMFVGQVPRTWSEKDLRELFEQYGAVYEINVLRDRSQNPPQSKGCCFVTFYTRKAALEAQNALHNMKVLPGMHHPIQMKPADSEKNNAVEDRKLFIGMISKKCTENDIRVMFSSFGQIEECRILRGPDGLSRGCAFVTFTTRAMAQTAIKAMHQAQTMEGCSSPMVVKFADTQKDKEQKRMAQQLQQQMQQISAASVWGNLAGLNTLGPQYLALYLQLLQQTASSGNLNTLSSLHPMGGLNAMQLQNLAALAAAASAAQNTPSGTNALTTSSSPLSVLTSSAGSSPSSSSSNSVNPIASLGALQTLAGATAGLNVGSLAGMAALNGGLGSSGLSNGTGSTMEALTQAYSGIQQYAAAALPTLYNQNLLTQQSIGAAGSQKEGPEGANLFIYHLPQEFGDQDLLQMFMPFGNVVSAKVFIDKQTNLSKCFGFVSYDNPVSAQAAIQSMNGFQIGMKRLKVQLKRSKNDSKPY

SEQ ID NO: 54218 - protein, 144 aa, Homo sapiens
IPVFQRGGSVIPIKTTVGKSTGWMTESSYGLRVALSTKGSSVGELYLDDGHSFQYLHQKQFLHRKFSFCSSVLINSFADQRGHYPSKCVVEKILVLGFRKEPSSVTTHSSDGKDQPVAFTYCAKTSILSLEKLSLNIATDWEGS

SEQ ID NO: 54219 - protein, 392 aa, Homo sapiens
MKLQSTPGSGPLVSSGCQAQQLAVRLEPQGLLYAKLTLSEQQEAPATAEPRVFGLPLPLLVERERPPGQVPLIIQKCVGQIERRGLRVVGLYRLCGSAAVKKELRDAFERDSAAVCLSEDLYPDINVITGILKDYLRELPTPLITQPLYKVVLEAMARDPPNRVPPTTEGTRGLLSCLPDVERATLTLLLDHLRLVSSFHAYNRMTPQNLAVCFGPVLLPARQAPTRPRARSSGPGLASAVDFKHHIEVLHYLLQSWPDPRLPRQSPDVAPYLRPKRQPPLHLPLADPEVVTRPRGRGGPESPPSNRYAGDWSVCGRDFLPCGRDFLSGPDYDHVTGSDSEDEDEEVGEPRVTGDFEDDFDAPFNPHLNLKDFDALILDLERELSKQINVCL

SEQ ID NO: 54220 - protein, 538 aa, Homo sapiens
MENGTQILRPTQDPSECTKEVKSLMWVYVLVGNIVRGMGETPILPLGISYIEDFAKFENSPLYIGLVETGAIIGPLIGLLLASFCANVYVDTGFVNTDDLIITPTDTRWVGAWWFGFLICAGVNVLTAIPFFFLPNTLPKEGLETNADIIKNENEDKQKEEVKKEKYGITKDFLPFMKSLSCNPIYMLFILVSVIQFNAFVNMISFMPKYLEQQYGISSSDAIFLMGIYNLPPICIGYIIGGLIMKKFKITVKQAAHIGCWLSLLEYLLYFLSFLMTCENSSVVGINTSYEGIPQDLYVENDIFADCNVDCNCPSKIWDPVCGNNGLSYLSACLAGCETSIGTGINMVFQNCSCIQTSGNSSAVLGLCDKGPDCSLMLQYFLILSAMSSFIYSLAAIPGYMVLLRCMKSEEKSLGVGLHTFCTRVFAGIPAPIYFGALMDSTCLHWGTLKCGESGACRIYDSTTFRYIYLGLPAALRGSSFVPALIILILLRKCHLPGENASSGTELIETKVKGKENECKDIYQKSTVLKDDELKTKL

SEQ ID NO: 54221 - protein, 84 aa, Homo sapiens
  MOD_RES (1)..(1): Any amino acid
XRQKTEEELLETTLKMKFLSLDLQGDPRESQPLLGTVIDGMLLLKTPEELQAERNFHTVPYMVGINKQEFGWLIPMGTADISVY

SEQ ID NO: 54222 - protein, 91 aa, Homo sapiens
MELAMDNSYAFNQRSTCNGIPSEKKNNFLVSEDHGQKILSVLQNFREQNVFYDFKIIMKDEIIPCHRCVLAACSDFFRSSQVSISQSSLEH

SEQ ID NO: 54223 - protein, 112 aa, Homo sapiens
MRTKAAGCAERRPLQPRTEAAAAPAGRAMPSEYTYVKLRSDCSRPSLQWYTRAQSKMRRPSLLLKDILKCTLLVFGVWILYILKLNYTTEECDMKKMHYVDPDHVKVVSSSF

SEQ ID NO: 54224 - protein, 77 aa, Homo sapiens
MSRPQLRRWRLVSSPPSGVPGLALLALLALLALRLAAGTDCPCPEPELCRPIRHHPDFEVSAFLCSSRSGLQGTKRS

SEQ ID NO: 54225 - protein, 514 aa, Homo sapiens
MAHKQREDYLNLSPCVFTWYRTFSQLAFDGEKLSHSASEEASGSDSGSQSESEQGSDPGSGHGSESNSSSESSESQSESESESAGSKSQPVLPEAKEKPASKKERIADVKKMWEEYPDVYGVRRSNRSRQEPSRFNIKEEASSGSESGSPKRRGQRQLKKQEKWKQEPSEDEQEQGTSAESEPEQKKVKARRPVPRRTVPKPRVKKQPKTQRGKRKKQDSSDEDDDDDEAPKRQTRRRAAKNVSYKEDDDFETDSDDLIEMTGEGVDEQQDNSETIEKVLDSRLGKKGATGASTTVYAIEANGDPSGDFDTEKDEGEIQYLIKWKGWSYIHSTWESEESLQQQKVKGLKKLENFKKKEDEIKQWLGKVSPEDVEYFNCQQELASELNKQYQIVERVIAVKTSKSTLGQTDFPAHSRKPAPSNEPEYLCKWMGLPYSECSWEDEALIGKKFQNCIDSFHSRNNSKTIPTRECKALKQRPRFVALKKQPAYLGGENLELRDYQLEGLNWLAHSWCK

SEQ ID NO: 54226 - protein, 316 aa, Homo sapiens
MSDASLRSTSTMERLVARGTFPVLVRTSACRSLFGPVDHEELSRELQARLAELNAEDQNRWDYDFQQDMPLRGPGRLQWTEVDSDSVPAFYRETVQVGRCRLLLAPRPVAVAVAVSPPLEPAAESLDGLEEAPEQLPSVPVPAPASTPPPVPVLAPAPAPAPAPVAAPVAAPVAVAVLAPAPAPAPAPAPAPAPVAARAPAPARARAPAPAPAPAPDAAPQESAEQGANQGQRGQEPLADQLHSGISGRPAAGTAAASANGAAIKKLSGPLISDFFAKRKRSAPEKSSGDVPAPCPSPSAAPGVGSVEQTPRKRLR

SEQ ID NO: 54227 - protein, 323 aa, Homo sapiens
MHFHKLFLSVPTEEPLKQSFTCALQKEILYQGKLFVSENWICFHSKVFGKDTKISIPAFSVTLIKKTKTALLVPNALIIATVTDRYIFVSLLSRDSTYKLLKSVCGHLENTSVGNSPNPSSAENSFRADRPSSLPLDFNDEFSDLDGVVQQRRQDMEGYSSSGSQTPESENSRDFHATESQTVLNVSKGEAKPTRADAHVNRVPEGKAKSLPVQGLSETVGILHKVKSQKCPMLHHILIFYAIVVCALIISTFYMRYRINTLEEQLGLLTSIVDTHNTEQAAPSGLRSQVQFNVEVLCQELTANIVKLEKIQNNLQKLLENGD

SEQ ID NO: 54228 - protein, 199 aa, Homo sapiens
MALRSAQGDGPTSGHWDGGAEKADFNAKRKKKVAEIHQALNSDPTDVAALRRMAISEGGLLTDEIRRKVWPKLLNVNANDPPPISGKNLRQMSKDYQQVLLDVRRSLRRFPPGMPEEQREGLQEELIDIILLILERNPQLHYYQGYHDIVVTFLLVVGERLATSLVEKLSTHHLRDFMDPTMDNTKHILNYLMPIIDQC

SEQ ID NO: 54229 - protein, 127 aa, Homo sapiens
MAPGRGLWLGRLFGVPGGPAENENGALKSRRPSSWLPPTVSVLALVKRGAPPEMPSPQELEASAPRMVQTHRAVRALCDHTAARPDQLSFRRGEVLRVITTVDEDWLRCGRDGMEGLVPVGYTSLVL

SEQ ID NO: 54230 - protein, 236 aa, Homo sapiens
MAYFHELSSRVSFQEARLACESEGGVLLSLENEAEQKLIESMLQNLTKPGTGISDGDFWIGLWRNGDGQTSGACPDLYQWSDGSNSQYRNWYTDEPSCGSEKCVVMYHQPTANPGLGGPYLYQWNDDRCNMKHNYICKYEPEINPTAPVEKPYLTNQPGDTHQNVVVTEAVKEEQKLVQTSLHCGFQRVPEKKVAWKYNNSLTWFQNFVILDLYKEWHQNNSLEWLEITKDLQDEL

SEQ ID NO: 54231 - protein, 535 aa, Homo sapiens
MEDELEPSLRPRTQIQGRILLLTICAAGIGGTFQFGYNLSIINAPTLHIQEFTNETWQARTGEPLPDHLVLLMWSLIVSLYPLGGLFGALLAGPLAITLGRKKSLLVNNIFVVSAAILFGFSRKAGSFEMIMLGRLLVGVNAGVSMNIQPMYLGESAPKELRGAVAMSSAIFTALGIVMGQVVGLRELLGGPQAWPLLLASCLVPGALQLASLPLLPESPRYLLIDCGDTEACLAALRRLRGSGDLAGELEELEEERAACQGCRARRPWELFQHRALRRQVTSLVVLGSAMELCGNDSVYAYASSVFRKAGVPEAKIQYAIIGTGSCELLTAVVSVAGVDEGWGVQAGLTSTSPPPRPRQSSFPWTLYLAMACIFAFILSFGIGPAGVTGILATELFDQMARPAACMVCGALMWIMLILVGLGFPFIMVLGSFLIRRRPCPTSSMSLSLVSVSVGPSTLACSFLRPKARPSKRSPRNYTDSTSPGGPRAPRGGAWRLSSQQNSSPKGVARAKASYCPVLCFLPGPWSSLPPAFLI

SEQ ID NO: 54232 - protein, 133 aa, Homo sapiens
MEDERSFSDICGGRLALQRRYYSPSCREFCLSCPRLSLRSLTAVTCTVWLAAYGLFTLCENSMILSAAIFITLLGLLGYLHFVKIDQETLLIIDSLGIQMTSSYASGKESTTFIEMGKVKDIVINEAIYMVSI

SEQ ID NO: 54233 - protein, 680 aa, Homo sapiens
MGALTSRQHAGVEEVDIPSNSVYRYPPKSGSYFASHFIMGGEKFDSTHPEGYLFGENSDLNFLGNRPVVFPYAAPPPQEPVKTLRSLVNIRKDTLRLVKCAEEVKSPGEEASKAKVHYNVEFTFDTDARVAITIYYQATEEFQNGIASYIPKDNSLQSETVQYKRGVCQQFCLPSHTVDPSEWAEEELGFDLDREVYPLVVHAVVDEGDEYFGHCHVLLGTFEKHTDGTFCVKPLKQKQVVDGVSYLLQEIYGIENKYNTQDSKVAEDEVSDNSAECVVCLSDVRDTLILPCRHLCLCNTCADTLRYQANNCPICRLPFRALLQIRAMRKKLGPLSPTSFNPIISSQTSDSEEHPSSENIPPGYEVVSLLEALNGPLTPSPAVPPLHVLGDGHLSGMLPSYGSDGHLPPVRTISPLDRLSDSSSQGLKLKKSLSKSTSQNSSVLHEEEDEHSCSESETQLSQRPSVQHLGEECGVTPESENLTLSSSGAIDQSSCTGTPLSSTISSPEGPASSSLAQSVMSMASSQISTDTVSSMSGSYIAPGTEEEGEALSSPQPASRAPSEEGEGLPAESPDSNFAGLPAGEQDAEGNDVIEEEDGSPTQEGGQRTCAFLGMECDNNNDFDIASVKALDNKLCSEVCLPGAWQADDNAVSRNAQRRRLSSSSLEDSETRPCVWGPLAV

SEQ ID NO: 54234 - protein, 93 aa, Homo sapiens
MGCDRNCGLIAGAVIGAVLAVFGGILMPVGDLLIQKTIKKQVVLEEGTIAFKNWVKTGTEVYRQFWIFDVQNPQEVMMNSSNIQVKQRGPYTY

SEQ ID NO: 54235 - protein, 738 aa, Homo sapiens
MAQWNQLQQLDTRYLEQLHQLYSDSFPMELRQFLAPWIESQDWAYAASKESHATLVFHNLLGEIDQQYSRFLQESNVLYQHNLRRIKQFLQSRYLEKPMEIARIVARCLWEESRLLQTAATAAQQGGQANHPTAAVVTEKQQMLEQHLQDVRKRVQDLEQKMKVVENLQDDFDFNYKTLKSQGDMQDLNGNNQSVTRQKMQQLEQMLTALDQMRRSIVSELAGLLSAMEYVQKTLTDEELADWKRRQQIACIGGPPNICLDRLENWITSLAESQLQTRQQIKKLEELQQKVSYKGDPIVQHRPMLEERIVELFRNLMKSAFVVERQPCMPMHPDRPLVIKTGVQFTTKVRLLVKFPELNYQLKIKVCIDKDSGDVAALRGSRKFNILGTNTKVMNMEESNNGSLSAEFKHLTLREQRCGNGGRANCDASLIVTEELHLITFETEVYHQGLKIDLETHSLPVVVISNICQMPNAWASILWYNMLTNNPKNVNFFTKPPIGTWDQVAEVLSWQFSSTTKRGLSIEQLTTLAEKLLGPGVNYSGCQITWAKFCKENMAGKGFSFWVWLDNIIDLVKKYILALWNEGYIMGFISKERERAILSTKPPGTFLLRFSESSKEGGVTFTWVEKDISGKTQIQSVEPYTKQQLNNMSFAEIIMGYKIMDATNILVSPLVYLYPDIPKEEAFGKYCRPESQEHPEADPDSLMQFGNNGEGAEPSAGGQFESLTFDMELTSECATSPM

SEQ ID NO: 54236 - protein, 409 aa, Homo sapiens
MSLHFLYYCSEPTLDVKIAFCQGFDKQVDVSYIAKHYNMSKSKVDNQFYSVEVGDSTFTVLKRYQNLKPIGSGAQGIVCAAYDAVLDRNVAIKKLSRPFQNQTHAKRAYRELVLMKCVNHKNIISLLNVFTPQKTLEEFQDVYLVMELMDANLCQVIQMELDHERMSYLLYQMLCGIKHLHSAGIIHRDLKPSNIVVKSDCTLKILDFGLARTAGTSFMMTPYVVTRYYRAPEVILGMGYKENVDIWSVGCIMGEMVRHKILFPGRDYIDQWNKVIEQLGTPCPEFMKKLQPTVRNYVENRPKYAGLTFPKLFPDSLFPADSEHNKLKASQARDLLSKMLVIDPAKRISVDDALQHPYINVWYDPAEVEAPPPQIYDKQLDEREHTIEEWKAVSYRTYLQGSNEFRRKD

SEQ ID NO: 54237 - protein, 225 aa, Homo sapiens
MVFPVMYNLIILVCRACFPDLQHGYLVAWLVLDYTSDLLYLLDMVVRFHTDHALVKKYMKLQHVNRKLERRVIDWYQHLQINKKMTNEVAILQHLPERLRAEVAVSVHLSTLSRVQIFQNCEASLLEELVLKLQPQTYSPGEYVCRKGDIGQEMYIIREGQLAVVADDGITQYAVLGAGLYFGEISIINIKGGYPSICSRDKDGWGRGEQQSPVLGPDSTSGLNF

SEQ ID NO: 54238 - protein, 57 aa, Homo sapiens
MRRVTLFLNGSPKNGKVVAVYGTLSDLLSVASSKLGIKATSVYNGKGGLIDDIALIR

SEQ ID NO: 54239 - protein, 464 aa, Homo sapiens
MKTYRQREKQGTKVADSSKGPDEAKIKALLERTGYTLDVTTGQRKYGGPPPDSVYSGQQPSVGTEIFVGKIPRDLFEDELVPLFEKAGPIWDLRLMMDPLTGLNRGYAFVTFCTKEAAQEAVKLYNNHEIRSGKHIGVCISVANNRLFVGSIPKSKTKEQILEEFSKVTEGLTDVILYHQPDDKKKNRGFCFLEYEDHKTAAQARRRLMSGKVKVWGNVGTVEWADPIEDPDPEVMAKVKVLFVRNLANTVTEEILEKAFSQFGKLERVKKLKDYAFIHFDERDGAVKAMEEMNGKDLEGENIEIVFAKPPDQKRKERKAQRQAAKNQMYDDYYYYGPPHMPPPTRGRGRGGRGGYGYPPDYYGYEDYYDYYGYDYHNYRGGYEDPYYGYEDFQVGARGRGGRGARGAAPSRGRGAAPPRGRAGYSQRGGPGSARGVRGARGGAQQQRGRGQGKGVEAGPDLLQ

SEQ ID NO: 54240 - protein, 82 aa, Homo sapiens
MTLHATRGAALLSWVNSLHVADPVEAVLQLQDCSIFIKIIDRIHGTEEGQQILKQPVSERLDFVCSFLQKNRKHPSSPECLV

SEQ ID NO: 54241 - protein, 215 aa, Homo sapiens
MGKTFSQLGSWREDENKSILSSKPAIGSKAVNYSSTGSSKSFCSCVPCEGTADASFVTCPTCQGSGKIPQELEKQLVALIPYGDQRLKPKHTKLFVFLAVLICLVTSSFIVFFLFPRSVIVQPAGLNSSTVAFDEADIYLNITMFYAVATKIRDENTYKICTWLEIKVHHVLLHIQGTLTCSYLSHSEQLVFQSYEYVDCRGNASVPHQLTPHPP

SEQ ID NO: 54242 - protein, 157 aa, Homo sapiens
MSTRTPLPTVNERDTENHTSHGDGRQEVTSRTSRSGARCRNSIASCADEQPHIGNYRLLKTIGKGNFAKVKLARHILTGREVAIKIIDKTQLNPTSLQKLFREVRIMKILNHPNIVKLFEVIETEKTLYLIMEYASGDCVCSSILPSETDRTSRPQG

SEQ ID NO: 54243 - protein, 652 aa, Homo sapiens
MSSQGSPSVALSTTTVSSVAVQAGDSKIVIAVIKCGKWVQLQLAESQPNLLEIGSSQDETKKLLHDHELLLAKLKALEDRVWELLQEADKTAEENKDQSQVYDAMAETLGEAWAALVSMLERRTELLRLTSEFFENALEFAIKIDQAEDFLQNTHEFESAESLKSLLQLHEHHTKELLERSLALLNKSQQLTDFIEKFKCEGPNVNPELTQGAHSSCLKVDRLLELLQDRRRQLDKYLKQQWQELSQVLQICQWDQQENQVTCWFQKTIRNLQEQSLGSSLSDNEDRIHKQEELIIKAKEWNSAVEKLKSEALRILLSKDYVEKEHLQLSHQKLSQLQEEFGQLMVERNTWLKKANEFFNSANKAFDVLGRVEAYLKLLKSEGLSLAVLAVRHEELHRKIKDCTTDALQKGQTLISQVDSCSSQVSGIHEMMGCIKRRVDHLTEQCSAHKEYALKKQQLTASVEGYLRKVEMSIQKISPVLSNAMDVGSTRSESEKILNKYLELDIQAKETSHELEAAAKTMMEKNEFVSDEMVSLSSKARWLAEELNLFGQSIDYRSQVLQTYVAFLKSSEEVEMQFQSLKEFYETEIPQKEQDDAKAKHCSDSAEKQWQLFLKKSFITQDLGLEFLNLINMVRMALNGSHLLQGYSSKSK

SEQ ID NO: 54244 - protein, 79 aa, Homo sapiens
MDAGFFRGTSAEQDNRFSNKQKKLLKQLKFAECLEKKVDMSKVNLEVIKPWITKRVTEILGFEDDVVIEFIFNQLEVKA

SEQ ID NO: 54245 - protein, 63 aa, Homo sapiens
MATNFLAHEKIWFDKFKYDDAERRFYEQMNGPVAGASRQENGASVILRDIARARENIQKSLAG

SEQ ID NO: 54246 - protein, 139 aa, Homo sapiens
MFLATLYFALPLLDLLLSAEVSGGDRLDCVKASDQCLKEQSCSTKYRTLRQCVAGKETNFSLASGLEAKDECRSAMEALKQKSLYNCRCKRGMKKEKNCLRIYWSMYQSLQGNDLLEDSPYEPVNSRLSDIFRVVPFIS

SEQ ID NO: 54247 - protein, 450 aa, Homo sapiens
MELAGCPWKKLRLLEELEDTWLPYLTPKDDEFYQQWQLKYPKLILREASSVSEELHKEVQEAFLTLHKHGCLFRDLVRIQGKDLLTPVSRILIGNPGCTYKYLNTRLFTVPWPVKGSNIKHTEAEIAAACETFLKLNDYLQIETIQALEELAAKEKANEDAVPLCMSADFPRVGMGSSYNGQDEVDIKSRAAYNVTLLNFMDPQKMPYLKEEPYFGMGKMAVSWHHDENLVDRSAVAVYSYSCEGPEEESEDDSHLEGRDPDIWHVGFKISWDIETPGLAIPLHQGDCYFMLDDLNATHQHCVLAGSQPRFSSTHRVAECSTGTLDYILQRCQLALQNVCDDVDNDDVSLKSFEPAVLKQGEEIHNEVEFEWLRQFWFQGNRYRKCTDWWCQPMAQLEALWKKMEGVTNAVLHEVKREGLPVEQRNEILTAILASLTARQNLRREWHASV

SEQ ID NO: 54248 - protein, 600 aa, Homo sapiens
MADANKAEVPGATGGDSPHLQPAEPPGEPRREPHPAEAEKQQPQHSSSSNGVKMENDESAKEEKSDLKEKSTGSKKANRFHPYSKDKNSGAGEKKGPNRNRVFISNIPYDMKWQAIKDLMREKVGEVTYVELFKDAEGKSRGCGVVEFKDEEFVKKALETMNKYDLSGRPLNIKEDPDGENARRALQRTGGSFPGGHVPDMGSGLMNLPPSILNNPNIPPEVISNLQAGRLGSTIFVANLDFKVGWKKLKEVFSIAGTVKRADIKEDKDGKSRGMGTVTFEQAIEAVQAISMFNGQFLFDRPMHVKMDDKSVPHEEYRSHDGKTPQLPRGLGGIGMGLGPGGQPISASQLNIGGVMGNLGPGGMGMDGPGFGGMNRIGGGIGFGGLEAMNSMGGFGGVGRMGELYRGAMTSSMERDFGRGDIGINRGFGDSFGRLGSAMIGGFAGRIGSSNMGPVGSGISGGMGSMNSVTGGMGMGLDRMSSSFDRMGPGIGAILERSIDMDRGFLSGPMGSGMRERIGSKGNQIFVRNLPFDLTWQKLKEKFSQCGHVMFAEIKMENGKSKGCGTVRFDSPESAEKACRIMNGIKISGREIDVRLDRNA

SEQ ID NO: 54249 - protein, 64 aa, Homo sapiens
MDPNTIIEALRGTMDPALREAAERQLNETEFRSCCPDWSAMAQSRLATTSASRIRAILLPQPLE

SEQ ID NO: 54250 - protein, 538 aa, Homo sapiens
MVKINQNLHRLQVAWRDAQQSSSPAADNLREQFERLMTIYLSTKTAMTEPQMLQNCLNLQVSMAVLLVQLAIGNEGSQPIELTFPLPDGYSSLAYVPEFFADNLGDFLIFLRRFADDILETSADSLEHVLHFITIFTGSIERMKNPHLRAKLAEVLEAVMPHLDQTPNPLVSSVFHRKRVFCNFQYAPQLAEALIKVFVDIEFTGDPHQFEQKFNYRRPMYPILRYMWGTDTYRESIKDLADYASKNLEAMNPPLFLRFLNLLMNDAIFLLDEAIQYLSKIKIQQIEKDRGEWDSLTPEARREKEAGLQMFGQLARFHNIMSNETIGTLAFLTSEIKSLFVHPFLAERIISMLNYFLQHLVGPKMGALKVKDFSEFDFKPQQLVSDICTIYLNLGDEENFCATVPKDGRSYSPTLFAQTVRVLKKINKPGNMIMAFSNLAERIKSLADLQQQEEETYADACDEFLDPIMSTLMCDPVVLPSSRVTVDRSTIARHLLSDQTDPFNRSPLTMDQIRPNTELKEKIQRWLAERKQQKEQLE

SEQ ID NO: 54251 - protein, 53 aa, Homo sapiens
MDFNGLADPYVKLHLLPGACKANKLKTKTQRNTLNPVWNEDLTYSGITDDDIT

SEQ ID NO: 54252 - protein, 836 aa, Homo sapiens
MLRPQGLLWLPLLFTSVCVMLNSNVLLWITALAIKFTLIDSQAQYPVVNTNYGKIQGLRTPLPSEILGPVEQYLGVPYASPPTGERRFQPPESPSSWTGIRNATQFSAVCPQHLDERFLLHDMLPIWFTTSLDTLMTYVQDQNEDCLYLNIYVPMEDGTNIKRNADDITSNDHGEDKDIHEQNSKKPVMVYIHGGSYMEGTGNMIDGSILASYGNVIVITINYRLGILGFLSTGDQAAKGNYGLLDQIQALRWIEENVGAFGGDPKRVTIFGSGAGASCVSLLTLSHYSEGLFQKAIIQSGTALSSWAVNYQPAKYTRILADKVGCNMLDTTDMVECLKNKNYKELIQQTITPATYHIAFGPVIDGDVIPDDPQILMEQGEFLNYDIMLGVNQGEGLKFVDGIVDNEDGVTPNDFDFSVSNFVDNLYGYPEGKDTLRETIKFMYTDWADKENPETRRKTLVALFTDHQWVAPAVATADLHAQYGSPTYFYAFYHHCQSEMKPSWADSAHGDEVPYVFGIPMIGPTELFSCNFSKNDVMLSAVVMTYWTNFAKTGDPNQPVPQDTKFIHTKPNRFEEVAWSKYNPKDQLYLHIGLKPRVRDHYRATKVAFWLELVPHLHNLNEIFQYVSTTTKVPPPDMTSFPYGTRRSPAKIWPTTKRPAITPANNPKHSKDPHKTGPEDTTVLIETKRDYSTELSVTIAVGASLLFLNILAFAALYYKKDKRRHETHRHPSPQRNTTNDITHIQNEEIMSLQMKQLEHDHECESLQAHDTLRLTCPPDYTLTLRRSPDDIPFMTPNTITMIPNTLMGMQPLHTFKTFSGGQNSTNLPHGHSTTRV

SEQ ID NO: 54253 - protein, 152 aa, Homo sapiens
MADTIFGSGNDQWVCPNDRQLALRAKLQTGWSVHTYQTEKQRRKQHLSPAEVEAILQVIQRAERLDVLEQQRIGRLVERLETMRRNVMGNGLSQCLLCGEVLGFLGSSSVFCKDCRKKVCTKCGIEASPGQKRPLWLCKICSEQREVWKRSG

SEQ ID NO: 54254 - protein, 339 aa, Homo sapiens
MVLMAPRTLLLLLSGALALTQTWARSHSMRYFSTAVSRPGRGEPRFIAVGYVDDTQFVRFDSDAASQKMEPRAPWIEQEGPEYWDQETRNMKAHSQTDRANLGTLRGYYNQSEDGSHTIQIMYGCDVGPDGRFLRGYRQDAYDGKDYIALNEDLRSWTAADMAAQITKRKWEAVHAAEQRRVYLEGRCVDGLRRYLENGKETLQRTDPPKTHMTHHPISDHEATLRCWALGFYPAEITLTWQRDGEDQTQDTELVETRPAGDGTFQKWAAVVVPSGEEQRYTCHVQHEGLPKPLTLRWELSSQPTIPIMGIIAGLVLLGAVVTGAVVTAVMWRKKSSDR

SEQ ID NO: 54255 - protein, 370 aa, Homo sapiens
MPVRKQDTQRALHLLEEYRSKLSQTEDRQLRSSIERVINIFQSNLFQALIDIQEFYEVTLLDNPKCIDRSKPSEPIQPVNTWEISSLPSSTVTSETLPSSLSPSVEKYRYQDEDTPPQEHISPQITNEVIGPELVHVSEKNLSEIENVHGFVSHSHISPIKVNGTDADYEYEEITLERGNSGLGFSIAGGTDNPHIGDDSSIFITKIITGGAAAQDGRLRVNDCILRVNEVDVRDVTHSKAVEALKEAGSIVRLYVKRRKPVSEKIMEIKLIKGPKGLGFSIAGGVGNQHIPGDNSIYVTKIIEGGAAHKDGKLQIGDKLLAVNNVCLEEVTHEEAVTALKNTSDFVYLKVAKPTSMYMNDGYAPPDITN

SEQ ID NO: 54256 - protein, 1176 aa, Homo sapiens
MAAAAGAAAAAAAEGEAPAEMGALLLEKETRGATERVHGSLGDTPRSEETLPKANPDSLEPAGPSSPASVTVTVGDEGADTPVGATPLIGDESENLEGDGDLRGGRILLGHATKSFPSSPSKGGSCPSRAKMSMTGAGKSPPSVQSLAMRLLSMPGAQGAAAAGSEPPPATTSPEGQPKVHRARKTMSKPGNGQPPVPEKRPPEIQHFRMSDDVHSLGKVTSDLAKRRKLNSGGGLSEELGSARRSGEVTLTKGDPGSLEEWETVVGDDFSLYYDSYSVDERVDSDSKSEVEALTEQLSEEEEEEEEEEEEEEEEEEEEEEEEDEESGNQSDRSGSSGRRKAKKKWRKDSPWVKPSRKRRKREPPRAKEPRGVSNDTSSLETERGFEELPLCSCRMEAPKIDRISERAGHKCMATESVDGELSGCNAAILKRETMRPSSRVALMVLCETHRARMVKHHCCPGCGYFCTAGTFLECHPDFRVAHRFHKACVSQLNGMVFCPHCGEDASEAQEVTIPRGDGVTPPAGTAAPAPPPLSQDVPGRADTSQPSARMRGHGEPRRPPCDPLADTIDSSGPSLTLPNGGCLSAVGLPLGPGREALEKALVIQESERRKKLRFHPRQLYLSVKQGELQKVILMLLDNLDPNFQSDQQSKRTPLHAAAQKGSVEICHVLLQAGANINAVDKQQRTPLMEAVVNNHLEVARYMVQRGGCVYSKEEDGSTCLHHAAKIGNLEMVSLLLSTGQVDVNAQDSGGWTPIIWAAEHKHIEVIRMLLTRGADVTLTDNEENICLHWASFTGSAAIAEVLLNARCDLHAVNYHGDTPLHIAARESYHDCVLLFLSRGANPELRNKEGDTAWDLTPERSDVWFALQLNRKLRLGVGNRAIRTEKIICRDVARGYENVPIPCVNGVDGEPCPEDYKYISENCETSTMNIDRNITHLQHCTCVDDCSSSNCLCGQLSIRCWYDKDGRLLQEFNKIEPPLIFECNQACSCWRNCKNRVVQSGIKVRLQLYRTAKMGWGVRALQTIPQGTFICEYVGELISDAEADVREDDSYLFDLDNKDGEVYCIDARYYGNISRFINHLCDPNIIPVRVFMLHQDLRFPRIAFFSSRDIRTGEELGFDYGDRFWDIKSKYFTCQCGSEKCKHSAEAIALEQSRLARLDPHPELLPELGSLPPVNT

SEQ ID NO: 54257 - protein, 655 aa, Homo sapiens
MADYSTVPPPSSGSAGGGGGGGGGGGVNDAFKDALQRARQIAAKIGGDAGTSLNSNDYGYGGQKRPLEDGDQPDAKKVAPQNDSFGTQLPPMHQQQSRSVMTEEYKVPDGMVGFIIGRGGEQISRIQQESGCKIQIAPDSGGLPERSCMLTGTPESVQSAKRLLDQIVEKGRPAPGFHHGDGPGNAVQEIMIPASKAGLVIGKGGETIKQLQERAGVKMVMIQDGPQNTGADKPLRITGDPYKVQQAKEMVLELIRDQGGFREVRNEYGSRIGGNEGIDVPIPRFAVGIVIGRNGEMIKKIQNDAGVRIQFKPDDGTTPERIAQITGPPDRCQHAAEIITDLLRSVQAGNPGGPGPGGRGRGRGQGNWNMGPPGGLQEFNFIVPTGKTGLIIGKGGETIKSISQQSGARIELQRNPPPNADPNMKLFTIRGTPQQIDYARQLIEEKIGGPVNPLGPPVPHGPHGVPGPHGPPGPPGPGTPMGPYNPAPYNPGPPGPAPHGPPAPYAPQGWGNAYPHWQQQAPPDPAKAGTDPNSAAWAAYYAHYYQQQAQPPPAAPAGAPTTTQTNGQGDQQNPAPAGQVDYTKAWEEYYKKMGQAVPAPTGAPPGGQPDYSAAWAEYYRQQAAYYAQTSPQGMPQHPPAPQGFANHARSHHHLY

SEQ ID NO: 54258 - protein, 374 aa, Homo sapiens
MSLLFVSMACVGFFLLQGAWPHEGVHRKPSLLAHPGPLVKSEETVILQCWSDVMFEHFLLHREGMFNDTLRLIGEHHDGVSKANFSISRMTQDLAGTYRCYGSVTHSPYQVSAPSDPLDIVIIGLYEKPSLSAQPGPTVLAGENVTLSCSSRSSYDMYHLSREGEAHERRLPAGPKVNGTFQADFPLGPATHGGTYRCFGSFHDSPYEWSKSSDPLLVSVTGNPSNSWPSPTEPSSKTERMFHHVGQACLKLPTSSDPTVSACQSNPRHLHILIGTSVVIILFILLFFLLHRWCSNKKNAAVMDQESAGNRTANSEDSDEQDPQEVTYTQLNHCVFTQRKITRPSQRPKTPPTDIIVYTELPNAESRSKVVSCP

SEQ ID NO: 54259 - protein, 387 aa, Homo sapiens
MGIKVLQQSKSQKQKEEAYLLFAKAADMGNLKAMEKMADALLFGNFGVQNITAAIQLYESLAKEGSCKAQNALGFLSSYGIGMEYDQAKALIYYTFGSAGGNMMSQMILGYRYLSGINVLQNCEVALSYYKKVADYIADTFEKSEGVPVEKVRLTERPENLSSNSEILDWDIYQYYKFLAERGDVQIQVSLGQLHLIGRKGLDQDYYKALHYFLKAAKAGSANAMAFIGKMYLEGNAAVPQNNATAFKYFSMAASKGNAIGLHGLGLLYFHGKGVPLNYAEALKYFQKAAEKGWPDAQFQLGFMYYSGSGIWKDYKLAFKYFYLASQSGQPLAIYYLAKMYATGTGVVRSCRTAVEKRLTFLKKRRCIQWRFSYGIELPFKAMHLLE

SEQ ID NO: 54260 - protein, 13 aa, Homo sapiens
MALPRCTWPNYVW

SEQ ID NO: 54261 - protein, 455 aa, Homo sapiens
MSLTVVSMACVGFFLLQGAWPLMGGQDKPFLSARPSTVVPQGGHVALQCHYRRGFNNFMLYKEDRSHVPIFHGRIFQESFIMGPVTPAHAGTYRCRGSRPHSLTGWSAPSNPLVIMVTGNHRKPSLLAHPGTLLKSGETVILQCWSDVMFEHFFLHREGISEDPSRLVGQIHDGVSKANFSIGPLMPVLAGTYRCYGSVPHSPYQLSAPSDPLDIVITGLYEKPSLSAQPGPTVQAGENVTLSCSSWSSYDIYHLSREGEAHERRLRAVPKVNRTFQADFPLGPATHGGTYRCFGSFRALPCVWSNSSDPLLVSVTGNPSSSWPSPTEPSSKSGICRHLHVLIGTSVVIFLFILLLFFLLYRWCSNKKNAAVMDQEPAGDRTVNRQDSDEQDPQEVTYAQLDHCVFIQRKISRPSQRPKTPPTDTSVYTELPNAEPRSKVVSCPRAPQSGLEGVF

SEQ ID NO: 54262 - protein, 114 aa, Homo sapiens
MGFRLLCCVAFCLLGAGPVDSGVTQTPKHLITATGQRVTLRCSPRSGDLSVYWYQQSLDQGLQFLIQYYNGEERAKGNILERFSAQQFPDLHSELNLSSLELGDSALYFCASSV

SEQ ID NO: 54263 - protein, 167 aa, Homo sapiens
MPGRWRWQRDMHPARKLLSLLFLILMGTELTQNKRENKAEKMGGPESERKTTGEKTLNELPLFCLEAHAGSLALPRMCSPNPNPAVGLCRPAYPQSPSPGAAQTISQSLLERFCMASRRGFLGPRKAWWRVVVVHCCWTDAFIHVHTHTHTCTHRGADTCREEPTRS

SEQ ID NO: 54264 - protein, 69 aa, Homo sapiens
MEKNPPDDTGPVHVPLGHIVANEKWRGSQLAQEMQDAAFFMSPKLIWWQEMATERGLFGLEIPIILKEL

SEQ ID NO: 54265 - protein, 618 aa, Homo sapiens
MSCNPSFGGIGKGHLMREVDALDGLCSRICDQSGVHYKVLNRRKGPAVWGLRAQIDRKLYKQNMQKEILNTPLLTVQEGAVEDLILTEPEPEHTGKCRVSGVVLVDGSTVYAESVILTTGTFLRGMIVIGLETHPAGRLGDQPSIGLAQTLEKLGFVVGRLKTGTPPRIAKESINFSILNKHIPDNPSIPFSFTNETVWIKPEDQLPCYLTHTNPRVDEIVLKNLHLNSHVKETTRGPRYCPSIESKVLRFPNRLHQVWLEPEGMDSDLIYPQGLSMTLPAELQEKMITCIRGLEKAKVIQPGYGVQYDYLDPRQITPSLETHLVQRLFFAGQINGTTGYEEAAAQGVIAGINASLRVSRKPPFVVSRTEGYIGVLIDDLTTLGTSEPYRMFTSRVEFRLSLRPDNADSRLTLRGYKDAGCVSQQRYERACWMKSSLEEGISVLKSIEFLSSKWKKLIPEASISTSRSLPVRALDVLKYEEVDMDSLAKAVPEPLKKYTKCRELAERLKIEATYESVLFHQLQEIKGVQQDEALQLPKDLDYLTIRDVSLSHEVREKLHFSRPQTIGAASRIPGVTPAAIINLLRFVKTTQRRQSAMNESSKTDQYLCDADRLQEREL

SEQ ID NO: 54266 - protein, 1851 aa, Homo sapiens
MTTMLQKSDSNASFLRAARAGNLDKVVEYLKGGIDINTCNQNGLNALHLAAKEGHVGLVQELLGRGSSVDSATKKGNTALHIASLAGQAEVVKVLVKEGANINAQSQNGFTPLYMAAQENHIDVVKYLLENGANQSTATEDGFTPLAVALQQGHNQAVAILLENDTKGKVRLPALHIAARKDDTKSAALLLQNDHNADVQSKMMVNRTTESGFTPLHIAAHYGNVNVATLLLNRGAAVDFTARNGITPLHVASKRGNTNMVKLLLDRGGQIDAKTRDGLTPLHCAARSGHDQVVELLLERGAPLLARTKNGLSPLHMAAQGDHVECVKHLLQHKAPVDDVTLDYLTALHVAAHCGHYRVTKLLLDKRANPNARALNGFTPLHIACKKNRIKVMELLVKYGASIQAITESGLTPIHVAAFMGHLNIVLLLLQNGASPDVTNIRGETALHMAARAGQVEVVRCLLRNGALVDARAREEQTPLHIASRLGKTEIVQLLLQHMAHPDAATTNGYTPLHISAREGQVDVASVLLEAGAAHSLATKKGFTPLHVAAKYGSLDVAKLLLQRRAAADSAGKNGLTPLHVAAHYDNQKVALLLLEKGASPHATAKNGYTPLHIAAKKNQMQIASTLLNYGAETNIVTKQGVTPLHLASQEGHTDMVTLLLDKGANIHMSTKSGLTSLHLAAQEDKVNVADILTKHGADQDAHTKLGYTPLIVACHYGNVKMVNFLLKQGANVNAKTKNGYTPLHQAAQQGHTHIINVLLQHGAKPNATTANGNTALAIAKRLGYISVVDTLKVVTEEVTTTTTTITEKHKLNVPETMTEVLDVSDEEGDDTMTGDGGEYLRPEDLKELGDDSLPSSQFLDGMNYLRYSLEGGRSDSLRSFSSDRSHTLSHASYLRDSAVMDDSVVIPSHQVSTLAKEAERNSYRLSWGTENLDNVALSSSPIHSGFLVSFMVDARGGAMRGCRHNGLRIIIPPRKCTAPTRVTCRLVKRHRLATMPPMVEGEGLASRLIEVGPSGAQFLGKLHLPTAPPPLNEGESLVSRILQLGPPGTKFLGPVIVEIPHFAALRGKERELVVLRSENGDSWKEHFCDYTEDELNEILNGMDEVLDSPEDLEKKRICRIITRDFPQYFAVVSRIKQDSNLIGPEGGVLSSTVVPQVQAVFPEGALTKRIRVGLQAQPMHSELVKKILGNKATFSPIVTLEPRRRKFHKPITMTIPVPKASSDVMLNGFGGDAPTLRLLCSITGGTTPAQWEDITGTTPLTFVNECVSFTTNVSARFWLIDCRQIQESVTFASQVYREIICVPYMAKFVVFAKSHDPIEARLRCFCMTDDKVDKTLEQQENFAEVARSRDVEVLEGKPIYVDCFGNLVPLTKSGQHHIFSFFAFKENRLPLFVKVRDTTQEPCGRLSFMKEPKSTRGLVHQAICNLNITLPIYTKESESDQEQEEEIDMTSEKNPQDEQERIEERLAYIADHLGFSWTELARELDFTEEQIHQIRIENPNSLQDQSHALLKYWLERDGKHATDTNLVECLTKINRMDIVHLMETNTEPLQERISHSYAEIEQTITLDHSEGFSVLQEELCTAQHKQKEEQAVSKESETCDHPPIVSEEDISVGYSTFQDGVPKTEGDSSATALFPQTHKEQVQQDFSGKMQDLPEESSLEYQQEYFVTTPGTETSETQKAMIVPSSPSKTPEEVSTPAEEEKLYLQTPTSSERGGSPIIQEPEEPSEHREESSPRKTSLVIVESADNQPETCERLDEDAAFEKGDDMPEIPPETVTEEEYIDEHGHTVVKKVTRKIIRRYVSSEGTEKEEIMVQGMPQEPVNIEEGDGYSKVIKRVVLKSDTEQSEDNNE

SEQ ID NO: 54267 - protein, 74 aa, Homo sapiens
MGRRSSKCCCIYEKPRAFGESSTESDEEEEEGCGHTHCVRGHRKGRRRATLGPTPTTPPQPPDPSQPPPGPMQH

SEQ ID NO: 54268 - protein, 112 aa, Homo sapiens
MRHFCLISEQLVFFSLLATAILGAVSWQPTNGIFLSMFLIVLPLESMAHGLFHELGNCLGGTSVGYAIVIPTNFCSPDGQPTLLPPEHVQELNLRSTGMLNAIQRFFAYHMI

SEQ ID NO: 54269 - protein, 101 aa, Homo sapiens
MSEQGDLNQAIAEEGGTEQETATPENGIVKSESLDEEEKLELQRRLEAQNQERRKSKSGAGKGKLTRSLAVCEESSARPGGESLQDQVYPLAIIINCMNGI

SEQ ID NO: 54270 - protein, 129 aa, Homo sapiens
MATANSIIVLDDDDEDEAAAQPGPSHPLPNAASPGAEAPSSSEPHGARGSSSSGGKKCYKLENEKLFEEFLELCKMQTADHPEVVPFLYNRQQRAHSLFLASAEFCNILSRVLSRARSRPAKLYVYINE

SEQ ID NO: 54271 - protein, 1133 aa, Homo sapiens
LAAANSGRENATATAHSRSSWRQPVNVFLSSGRPPSVEELLREAQLNLQSLLQEEYEEQYSEARLVGQTFRSSDEATKPTPNPRPQSARRLEFILMPTKRQLSEDETTTQGVRAPEASLSLSTTADKQTAWNSLFPLPILEEKRWPQLCSTQSDIVPINISGQQFDKHASLRHSLFNTETAVNPKSTLRRRRTIIGFSNFSQRDQGHSNSPAGSVAHSTTSDIRPSHSVPEGVHGRVAVGQDARFPSLTSPVLRTPSSEPDEPHQARSGPNPPGMESMGMVYSVPSSCNGPTESTFSTSWKGDAFTYMTPSATSQSNQVNENGKNPSCGNSWVSLNKVPPLVPKEAATLLVARDNPAGCSGSAGYPERLIQQRHMPERPSKIGLLTSGTSRLETGPGGASRFRERSLSVPTDSGTTDVDYDEEQKANEACALPFASTSSEGSNSADNIASLSAQQEAQHRRQRSKSISLRKAKKKPSPPTRSVSLVKDEPGLLPEGGSALPKDQRPKSLCLSLEHQGHHSSHPDAQGHPAIPNHKDPESTQFSHHWYLTDWKSGDTYQSLSSSSTATGTTVIECTQVQGSSESLASPSTSRATTPSQLSIEVEAREISSPGRPPGLMSPSSGYSSQSETPTPTVSMSLTLGHLPPPSSSVRVRPVVPERKSSLPPTSPMEKFPKSRLSFDLPLTSSPNLDLSGMSISIRSKTKVSRHHSETNFGVKLAQKTNPNQPIMPMVTQSDLRSVRLRSVSKSEPEDDIESPEYAEEPRAEEVFTLPERKTKPPVAEKPPVARRPPSLVHKPPSVPEEYALTSPTLAMPPRSSIQHARPLPQDSYTVVRKPKPSSFPDGRSPGESTAPSSLVFTPFASSSDAFFSGTQQPPQGSVEDEGPKVRVLPERISLQSQEEAEKKKGKIPPPVPKKPSVLYLPLTSPTAQMEAYVAEPRLPLSPIITLEEDTKCPATGDDLQSLGQRVTSTPQADSEREASPLGSSVEPGTEEKSLISDKTAEWIAEDDDDVFVASRTTEDLFTVIHRSKRKLLGWKEPGEAFVGGRTSSHSPIKNTAESPISESTATAGSGSSANLDAGRNDDFKALLQKKGSKATPRSRPSAAELLKTTNPLARRIIAQFSKDYETTDNPST

SEQ ID NO: 54272 - protein, 209 aa, Homo sapiens
MSSPTTSSLDTPLPGNGPPQPGAPSSSPTVKEEGPEPWPGGPDPDVPGTDEASSACSTDWVIPDPEEEPERKRKKGPAPKMLGHELCRVCGDKASGFHYNVLSCEGCKGFFRRSVVRGGARRYACRGGGTCQMDAFMRRKCQQCRLRKCKEAGMREQCVLSEEQIRKKKIRKQQQESQSQSQSPVGPQGSSSSASGPGASPGGSEAGSQ

SEQ ID NO: 54273 - protein, 232 aa, Homo sapiens
MITSELPVLQDSTNETTAHSDAGSELEETEVKGKRKRGRPGRPPSTNKKPRKSPGEKSRIEAGIRGAGRGRANGHPQQNGEGEPVTLFEVVKLGKSAMQSVVDDWIESYKQDRDIALLDLINFFIQCSGCRGTVRIEMFRNMQNAEIIRKMTEEFDEDSGDYPLTMPGPQWKKFRSNFCEFIGVLIRQCQYSIIYDEYMMDTVISLLTGLSDSQVRAFRHTSTLAGQVLGTR

SEQ ID NO: 54274 - protein, 325 aa, Homo sapiens
MRVMAPRTLILLLSGALALTETWAGSHSMRYFYTAVSRPGRGEPRFIAVGYVDDTQFVRFDSDAASPRGEPRAPWVEQEGPEYWDRETQKYKRQAQTDRVSLRNLRGYYNQSEAGSHTLQWMYGCDLGPDGRLLRGYDQSAYDGKDYIALNEDLRSWTAADTAAQITQRKWEAARAAEQQRAYLEGTCVEWLRRYLENGKETLQRAEHPKTHVTHHLVSDHEATLRCWALGFYPAEITLTWQRDGEDQTQDTELVETRPAGDGTFQKWAAVVVPSGEEQRYTCHVQHEGLPEPLTLRWGGKGGSCSQAAASNSAQGSDESLIACK

SEQ ID NO: 54275 - protein, 536 aa, Homo sapiens
MAGPQPLALQLEQLLNPRPSEADPEADPEEATAARVIDRFDEGEDGEGDFLVVGSIRKLASASLLDTDKRYCGKTTSRKAWNEDHWEQTLPGSSDEEISDEEGSGDEDSEGLGLEEYDEDDLGAAEEQECGDHRESKKSRSHSAKTPGFSVQSISDFEKFTKGMDDLGSSEEEEDEESGMEEGDDAEDSQGESEEDRAGDRNSEDDGVVMTFSSVKVSEEVEKGRAVKNQIALWDQLLEGRIKLQKALLTTNQLPQPDVFPLFKDKGGPEFSSALKNSHKALKALLRSLVGLQEELLFQYPDTRYLVDGTKPNAGSEEISSEDDELVEEKKQQRRRVPAKRKLEMEDYPSFMAKRFADFTVYRNRTLQKWHDKTKLASGKLGKGFGAFERSILTQIDHILMDKERLLRRTQTKRSVYRVLGKPEPAAQPVPESLPGEPEILPQAPANAHLKDLDEEIFDDDDFYHQLLRELIERKTSSLDPNDQVAMGRQWLAIQKLRSKIHKKVDRKASKGRKLRTELYRSLFGQLHPPDEGHGD

SEQ ID NO: 54276 - protein, 235 aa, Homo sapiens
MNKLRQSLRRRKPAYVPEASRPHQWQADEDAVRKGTCSFPVRYLGHVEVEESRGMHVCEDAVKKLKAMGRKSVKSVLWVSADGLRVVDDKTKDLLVDQTIEKVSFCAPDRNLDKAFSYICRDGTTRRWICHCFLALKDSGERLSHAVGCAFAACLERKQRREKECGVTAAFDASRTSFAREGSFRLSGGGRPAEREAPDKKKAEAAAAPTVAPGPAQPGHVSPTPATTSPGEKGE

SEQ ID NO: 54277 - protein, 1008 aa, Homo sapiens
MSSVSGNASFILGTGKIVTPQKHAELPPNPCTPDTFKSPLNFSTVTVEQLGITPESFVRNSAGKSSSYLKKCRRRSAVGARGSPETNHLIRFIARQQNIKNARKSPLAQDSPSQGSPALYRNVNTLRERISAFQSAFHSIKENEKMTGCLEFSEAGKESEMTDLTRKEGLSACQQSGFPAVLSSKRRRISYQRDSDENLTDAEGKVIGLQIFNIDTDRACAVETSVDLSEISSKLGSTQSGFLVEESLPLSELTETSNALKVADCVVGKGSSDAVSPDTFTAEVSSDAVPDVRSPATPACRRDLPTPKTFVLRSVLKKPSVKMCLESLQEHCNNLYDDDGTHPSLISNLPNCCKEKEAEDEENFEAPAFLNMRKRKRVTFGEDLSPEVFDESLPANTPLRKGGTPVCKKDFSGLSSLLLEQSPVPEPLPQPDFDDKGENLENIEPLQVSFAVLSSPNKSSISETLSGTDTFSSSNNHEKISSPKVGRITRTSNRRNQLVSVVEESVCNLLNTEVQPCKEKKINRRKSQETKCTKRALPKKSQVLKSCRKKKGKGKKSVQKSLYGERDIASKKPLLSPIPELPEVPEMTPSIPSIRRLGSGYFSSNGKLEEVKTPKNPVKRKDLLRHDPDLHMHQGYDKYDVSEFCSYIKSSSSLGNATSDEDPNTNIMNINENKNIPKAKNKSESENEPKAGTDSPVSCASVTEERVASDSPKPALTLQQGQEFSAGGQNAENLCQFFKISPDLNIKCERKDDFLGAAEGKLQCNRLMPNSQKDCHCLGDVLIENTKESKSQSEDLGRKPMESSSVVSCRDRKDRRRSMCYSDGRSLHLEKNGNHTPSSSVGSSVEISLENSELFKDLSDAIEQTFQRRNSETKVRRSTRLQKDLENEGLVWISLPLPSTSQKAKRRTICTFDSSGFESMSPIKETVSSRQKPQMAPPVSDPENSQGPAAGSSDEPGKRRKSFCISTLANTKATSQFKGYRRRSSLNGKGESSLTALERIEHNGERKQ

SEQ ID NO: 54278 - protein, 188 aa, Homo sapiens
GERITLLRQVDENWYEGRIPGTSRQGIFPITYVDVIKRPLVKNPVDYMDLPFSSSPSRSATASPQEAVCNEIINIAEKSVHYCSTVSHPLDFHHKVSPSDNKSSLIISQQPQAQQRRVTPDRSQTSQDLFSYQALYSYIPQNDDELELRDGDIVDVMEKCDDGWFVGTSRRTKQFGTFPGNYVKPLYL

SEQ ID NO: 54279 - protein, 210 aa, Homo sapiens
  MOD_RES (1)..(1): Any amino acid
XRAGLRRADGEAPSALPYCYFLQKDAEAPWLSKPAYDSAECRHHAAEALRVAWCLEAASLSHRPGPRSGLSVSSLRPNRKMATNFLAHEKIWFDKFKYDDAERRFYEQMNGPVAGASRQENGASVILRDIARARENIQKSLAGSSGPGASSGTSGDHGELVVRIASLEVENQSLRGVVQELQQAISKLEARLNVLEKSSPGHRATAPQTQ

SEQ ID NO: 54280 - protein, 1768 aa, Homo sapiens
MSARAAAAKSTAMEETAIWEQHTVTLHRAPGFGFGIAISGGRDNPHFQSGETSIVISDVLKGGPAEGQLQENDRVAMVNGVSMDNVEHAFAVQQLRKSGKNAKITIRRKKKVQIPVSRPDPEPVSDNEEDSYDEEIHDPRSGRSGVVNRRSEKIWPRDRSASRERSLSPRSDRRSVASSQPAKPTKVTLVKSRKNEEYGLRLASHIFVKEISQDSLAARDGNIQEGDVVLKINGTVTENMSLTDAKTLIERSKGKLKMVVQRDERATLLNVPDLSDSIHSANASERDDISEIQSLASDHSGRSHDRPPRRSRSRSPDQRSEPSDHSRHSPQQPSNGSLRSRDEERISKPGAVSTPVKHADDHTPKTVEEVTVERNEKQTPSLPEPKPVYAQVGQPDVDLPVSPSDGVLPNSTHEDGILRPSMKLVKFRKGDSVGLRLAGGNDVGIFVAGVLEDSPAAKEGLEEGDQILRVNNVDFTNIIREEAVLFLLDLPKGEEVTILAQKKKDVYRRIVESDVGDSFYIRTHFEYEKESPYGLSFNKGEVFRVVDTLYNGKLGSWLAIRIGKNHKEVERGIIPNKNRAEQLASVQYTLPKTAGGDRADFWRFRGLRSSKRNLRKSREDLSAQPVQTKFPAYERVVLREAGFLRPVTIFGPIADVAREKLAREEPDIYQIAKSEPRDAGTDQRSSGIIRLHTIKQIIDQDKHALLDVTPNAVDRLNYAQWYPIVVFLNPDSKQGVKTMRMRLCPESRKSARKLYERSHKLRKNNHHLFTTTINLNSMNDGWYGALKEAIQQQQNQLVWVSEGKADGATSDDLDLHDDRLSYLSAPGSEYSMYSTDSRHTSDYEDTDTEGGAYTDQELDETLNDEVGTPPESAITRSSEPVREDSSGMHHENQTYPPYSPQAQPQPIHRIDSPGFKPASQQKAEASSPVPYLSPETNPASSTSAVNHNVNLTNVRLEEPTPAPSTSYSPQADSLRTPSTEAAHIMLRDQEPSLSSHVDPTKVYRKDPYPEEMMRQNHVLKQPAVSHPGHRPDKEPNLTYEPQLPYVEKQASRDLEQPTYRYESSSYTDQFSRNYEHRLRYEDRVPMYEEQWSYYDDKQPYPSRPPFDNQHSQDLDSRQHPEESSERGYFPRFEEPAPLSYDSRPRYEQAPRASALRHEEQPAPGYDTHGRLRPEAQPHPSAGPKPAESKQYFEQYSRSYEQVPPQGFTSRAGHFEPLHGAAAVPPLIPSSQHKPEALPSNTKPLPPPPTQTEEEEDPAMKPQSVLTRVKMFENKRSASLETKKDVNDTGSFKPPEVASKPSGAPIIGPKPTSQNQFSEHDKTLYRIPEPQKPQLKPPEDIVRSNHYDPEEDEEYYRKQLSYFDRRSFENKPPAHIAASHLSEPAKPAHSQNQSNFSSYSSKGKPPEADGVDRSFGEKRYEPIQATPPPPPLPSQYAQPSQPVTSASLHIHSKGAHGEGNSVSLDFQNSLVSKPDPPPSQNKPATFRPPNREDTAQAAFYPQKSFPDKAPVNGTEQTQKTVTPAYNRFTPKPYTSSARPFERKFESPKFNHNLLPSETAHKPDLSSKTPTSPKTLVKSHSLAQPPEFDSGVETFSIHAEKPKYQINNISTVPKAIPVSPSAVEEDEDEDGHTVVATARGIFNSNGGVLSSIETGVSIIIPQGAIPEGVEQEIYFKVCRDNSILPPLDKEKGETLLSPLVMCGPHGLKFLKPVELRLPHCASMTPDGWSFALKSSDSSSGDPKTWQNKCLPGDPNYLVGANCVSVLIDHF

SEQ ID NO: 54281 - protein, 208 aa, Homo sapiens
MWAVLRLALRPCARASPAGPRAYHGDSVASLGTQPDLGSALYQENYKQMKALVNQLHERVEHIKLGGGEKARALHISRGKLLPRERIDNLIDPGSPFLELSQFAGYQLYDNEEVPGGGIITGIGRVSGVECMIIANDATVKGGAYYPVTVKKQLRAQEIAMQNRLPCIYLVDSGGAYLPRQADVFPDRDHFGRTFYNQAIMSSKNIAQ

SEQ ID NO: 54282 - protein, 222 aa, Homo sapiens
MLWFSGVGALAERYCRRSPGITCCVLLLLNCSGVPMSLASSFLTGSVAKCENEGEVLQIPFITDNPCIMCVCLNKEVTCKREKCPVLSRDCALAIKQRGACCEQCKGCTYEGNTYNSSFKWQSPAEPCVLRQCQEGVVTESGVRCVVHCKNPLEHLGMCCPTCPGCVFEGVQYQEGEEFQPEGSKCTKCSCTSPAFARCLEIPTTTLLTVGHLTFRGRVSTF

SEQ ID NO: 54283 - protein, 133 aa, Homo sapiens
  MOD_RES (1)..(1): Any amino acid
XFLKMQHLNPDPQLIPEQITTDITPECLVSPRYLKKYKNKQITARILEAHQNVAQMSLIEAKMRFIQAWQSLPEFGITHFIARFQGGKKEELIGIAYNRLIRMDASTGDAIKTWRFSNMKQWNVNWEIKMVNS

SEQ ID NO: 54284 - protein, 532 aa, Homo sapiens
MHCTLTMETEAIDGYITCDNELSPEREHSNMAIDLTSSTPNGQHASPSHMTSTNSVKLEMQSDEECDRKPLSREDEIRGHDEGSSLEEPLIESSEVADNRKVQELQGEGGIRLPNGKLKCDVCGMVCIGPNVLMVHKRSHTGERPFHCNQCGASFTQKGNLLRHIKLHSGEKPFKCPFCSYACRRRDALTGHLRTHSVGKPHKCNYCGRSYKQRSSLEEHKERCHNYLQNVSMEAAGQVMSHHVPPMEDCKEQEPIMDNNISLVPFERPAVIEKLTGNMGKRKSSTPQKFVGEKLMRFSYPDIHFDMNLTYEKEAELMQSHMMDQAINNAITYLGAEALHPLMQHPPSTIAEVAPVISSAYSQVYHPNRIERPISRETADSHENNMDGPISLIRPKSRPQEREASPSNSCLDSTDSESSHDDHQSYQGHPALNPKRKQSPAYMKEDVKALDTTKAPKGSLKDIYKVFNGEGEQIRAFKCEHCRVLFLDHVMYTIHMGCHGYRDPLECNICGYRSQDRYEFSSHIVRGEHTFH

SEQ ID NO: 54285 - protein, 444 aa, Homo sapiens
MLLMVVSMACVGFFLVQRAGPHVGGQDKPFLSAWPSAVVPRGGHVTLRCHYRHRFNNFMLYKEDRIHVPIFHGRLFQESFNMSPVTTAHAGNYTCRGSHPHSPTGWSAPSNPVVIMVTGNHRKPSLLAHPGPLVKSGERVILQCWSDIMFEHFFLHKEGISKDPSRLVGQIHDGVSKANFSIGPMMLALAGTYRCYGSVTHTPYQLSAPSDPLDIVVTGPYEKPSLSAQPGPKVQAGESVTLSCSSRSSYDMYHLSREGGAHERRLPAVRKVNRTFQADFPLGPATHGGTYRCFGSFRHSPYEWSDPSDPLLVSVTGNPSSSWPSPTEPSSKSGNPRHLHVLIGTSVVIILFILLLFFLLHLWCSNKKNAAVMDQEPAGNRTANSEDSDEQDPQEVTYAQLDHCVFTQRKITRPSQRPKTPPTDTILYTELPNAKPRSKVVSCP

SEQ ID NO: 54286 - protein, 84 aa, Homo sapiens
MLKLEAEKKKLRTILQVQYVLQNLTQEHVQKDFKGGLNGAVYLPSKELDYLIKFSKLTCPERNESLSVEDQMEQSSLYFWDLLE

SEQ ID NO: 54287 - protein, 645 aa, Homo sapiens
MGFSGNGVTICEDDNECGNLTQSCGENANCTNTEGSYYCMCVPGFRSSSNQDRFITNDGTVCIENVNANCHLDNVCIAANINKTLTKIRSIKEPVALLQEVYRNSVTDLSPTDIITYIEILAESSSLLGYKNNTISAKDTLSNSTLTEFVKTVNNFVQRDTFVVWDKLSVNHRRTHLTKLMHTVEQATLRISQSFQKTTEFDTNSTDIALKVFFFDSYNMKHIHPHMNMDGDYINIFPKRKAAYDSNGNVAVAFVYYKSIGPLLSSSDNFLLKPQNYDNSEEEERVISSVISVSMSSNPPTLYELEKITFTLSHRKVTDRYRSLCAFWNYSPDTMNGSWSSEGCELTYSNETHTSCRCNHLTHFAILMSSGPSIGIKDYNILTRITQLGIIISLICLAICIFTFWFFSEIQSTRTTIHKNLCCSLFLAELVFLVGINTNTNKLFCSIIAGLLHYFFLAAFAWMCIEGIHLYLIVVGVIYNKGFLHKNFYIFGYLSPAVVVGFSAALGYRYYGTTKVCWLSTENNFIWSFIGPACLIILVNLLAFGVIIYKVFRHTAGLKPEVSCFENIRSCARGALALLFLLGTTWIFGVLHVVHASVVTAYLFTVSNAFQGMFIFLFLCVLSRKIQEEYYRLFKNVPCCFGCLR

SEQ ID NO: 54288 - protein, 77 aa, Homo sapiens
MAAAPALKHWRTTLERVEKFVSPLYFTDCNLRGRLFGASCPVAVLSSFLTPERLPYQEAVQRDFRPAQVGDSFGPTW

SEQ ID NO: 54289 - protein, 47 aa, Homo sapiens
MPPLLPLRLCRLWPRNPPSRLLGAAAGQRRLPGLSQVTLAFPAEDQR

SEQ ID NO: 54290 - protein, 95 aa, Homo sapiens
QFDMQRITLEELKHILYHAFRDHLTMKDIENIIINEEESLNETSGNCQTEFEGVHSQKQNRQTCVRKSLICAFAMAFIISVMLIAANQILRSGME

SEQ ID NO: 54291 - protein, 118 aa, Homo sapiens
MSEDLAKQLASYKAQLQQVEAALSGNGENEDLLKLKKDLQWLSASPKRLPSVSRVLECTPFDLLICRSQHLMLPGIADYCNCCPSVDEGAVSELRLEGGKVINGSYRTNQRPSVNSTF

SEQ ID NO: 54292 - protein, 237 aa, Homo sapiens
SATGFHREGPTSSATLKDLESPCQERAVVLDSRSVEISQLKNTIKSLICTLKKEKQQDMRRVEELERSLSKLKNQMAEPLPPEPPAVPSEVELQHLRKELERVAGELQAQVKKNQRISLLNQRQEERIQEQEERLRKQEERIQEQHKSLQQLAKPQSVFEEPNNENKNALQLEQQVKELQEKLGEVKETETSTPSKKGWEAGSRLWGGEVRGQRQLPAWGLVTTAPPRAVLFLASCL

SEQ ID NO: 54293 - protein, 100 aa, Homo sapiens
MAALDSLSLFTSLGLSEQKARETLKNSALSAQLREAATQAQQTLGSTIDKATGILLYGLASRLRDTRRLSFLLPLSMCGVTPWTPSTLWTSSGNVAWVSL

SEQ ID NO: 54294 - protein, 561 aa, Homo sapiens
MTVLEITLAVILTLLGLAILAILLTRWARRKQSEMYISRYSSEQSARLLDYEDGRGSRHAYSTQSDTSYDNRERSKRDYTPSTNSLALSRSSIALPQGSMSSIKCLQTTEEPPSRTAGAMMQFTAPIPGATGPIKLSQKTIVQTLGPIVQYPGSNAGPPSAPRGPPMAPIIISQRTASQLAAPIIISQRTARIPQVHTMDSSGKITLTPVVILTGYMDEELAKKSCSKIQILKCGGTARSQNSREENKEALKNDIIFTNSVESLKSAHIKEPEREGKGTDLEKDKIGMEVKVDSDAGIPKRQETQLKISEMSIPQGQGAQIKKSVSDVPRGQESQVKKSESGVPKGQEAQVTKSGLVVLKGQEAQVEKSEMGVPRRQESQVKKSQSGVSKGQEAQVKKRESVVLKGQEAQVEKSELKVPKGQEGQVEKTEADVPKEQEVQEKKSEAGVLKGPESQVKNTEVSVPETLESQVKKSESGVLKGQEAQEKKESFEDKGNNDKEKERDAEKDPNKKEKGDKNTKGDKGKDKVKGKRESEINGEKSKGSKRAKANTGRKYNKKVEE

SEQ ID NO: 54295 - protein, 513 aa, Homo sapiens
MSVVGQDRKSGSGCYLRWLLFLSLLFLGLVAAVCLGLNLIFLVAYLVCACHCRRDDAVQTKQHHSCCITWTAVVAGLICCAAVGVGFYGNSETNDGAYQLMYSLDDANHTFSGIDALVSGTTQKMKVDLEQHLARLSEIFAARGDYLQTLKFIQQMAGSVVVQLSGLPVWREVTMELTKLSDQTGYVEYYRWLSYLLLFILDLVICLIACLGLAKRSKCLLASMLCCGALSLLLSWASLAADGSAAVATSDFCVAPDTFILNVTEGQISTEVTRYYLYCSQSGSSPFQQTLTTFQRALTTMQIQVAGLLQFAVPLFSTAEEDLLAIQLLLNSSESSLHQLTAMVDCRGLHKDYLDALAGICYDGLQGLLYLGLFSFLAALAFSTMICAGPRAWKHFTTRNRDYDDIDDDDPFNPQAWRMAAHSPPRGQLHSFCSYSSGLGSQTSLQPPAQTISNAPVSEYMNQAMLFGRNPRYENVPLIGRASPPPTYSPSMRATYLSVADEHLRHYGNQFPA

SEQ ID NO: 54296 - protein, 153 aa, Homo sapiens
MNMIWRNSISCLRLGKVPHRYQSGYHPVAPLGSRILTDPAKVFEHNMWDHMQWSKEEEAAARKKVKENSAVRVLLEEQVKYEREASKYWDTFYKIHKNKFFKDRNWLLREFPEILPVDQKPEEKARESSWDHVKTSATNRFSRMHCPTVPDEK

SEQ ID NO: 54297 - protein, 103 aa, Homo sapiens
MAVLAPLIALVYSVPRLSRWLAQPYYLLSALLSAAFLLVRKLPPLCHGLPTQREDGNPCDFDWREVEILMFLSAIVMMKNRRSTLSFLLPPCCGGWDASSMIF

SEQ ID NO: 54298 - protein, 82 aa, Homo sapiens
MEDLEETLFEEFENYSYDLDYYSLESDLEEKVQLGVVHWVSLVLYCLAFVLGIPGNAIVIWFTGFKWKKTVTTLWFLNLAIA

SEQ ID NO: 54299 - protein, 17 aa, Homo sapiens
MACTQAGERTAIYCLTQ

SEQ ID NO: 54300 - protein, 142 aa, Homo sapiens
MAMATKGGTVKAASGFNAMEDAQTLRKAMKGLGTDEDAIISVLAYRNTAQRQEIRTAYKSTIGRDLIDDLKSELSGNFEQGAGTDEGCLIEILASRTPEEIRRISQTYQQQYGRSLEDDIRSDTSFMFQRVLVSLSAVSDCF

SEQ ID NO: 54301 - protein, 87 aa, Homo sapiens
MEEECRVLSIQSHVIRGYVGNRAATFPLQVLGFEIDAVNSVQFSNHTETRSVSVAQAGVKWRNQLTAALTSWAEAIFLPPPPEWLGL

SEQ ID NO: 54302 - protein, 144 aa, Homo sapiens
MDPKGLLSLTFVLFLSLAFGASYGTGGRMMNCPKILRQLGSKVLLPLTYERINKSMNKSIHIVVTMAKSLENSVENKIVSLDPSEAGPPRYLGDRYKFYLENLTLGIRESRKEDEGWYLMTLEKSLHFGYLYFVLGADHDNLQT

SEQ ID NO: 54303 - protein, 47 aa, Homo sapiens
MGNSLLRENRRQQNTQEMPWNVRMQSPKQRTSRKTKAFYHERCVQVI

SEQ ID NO: 54304 - protein, 654 aa, Homo sapiens
MDSLPDEFFVRHPAVEDQRKEETENKLEKSSGQLNKQENDIPTDLVPVNLLLEVKKLLNAINTLPKGVVPHIKKFLQEDFSFQTMQREVAANSQNGEEIVPALTLRFLITQLEAALRNIQAGNYTAHQINIGYYLTLLFLYGVALTERGKKEDYTEAENKFLVMKMMIQENEICENFMSLVYFGRGLLRCAQKRYNGGLLEFHKSLQEIGDKNDHWFDIDPTEDEDLPTTFKDLLNNFIKTTESNIMKQTICSYLDCERSCEADILKNTSYKGFFQLMCSKSCCVYFHKICWKKFKNLKYPGENDQSFSGKKCLKEGCTGDMVRMLQCDVPGIVKILFEVVRKDEYITIENLGASYRKLISLKITDTDIRPKISLKFNTKDEMPIFKLDYNYFYHLLHIIIISGTDIVRQIFDEAMPPPLLKKELLIHKNVLESYYNHLWTNHPLGGSWHLLYPPNKELPQSKQFDLCLLLALIKHLNVFPAPKKGWNMEPPSSDISKSADILRLCKYRDILLSEILMNGLTESQFNSIWKKVSDILLRLGMMQEDIDKVKENPIENISLDYHQLSVYLGIPVPEIIQRMLSCYQQGIALQSITGSQRIEIEELQNEEEELSPPLMEYNINVKSHPEIQFAEINKDGTSIPSESSTESLKDLQE

SEQ ID NO: 54305 - protein, 118 aa, Homo sapiens
MKTPWKVLLGLLGAAALVTIITVPVVLLNKGTDDATADSRKTYTLTDYLKNTYRLKLYSLRWISDHEYLYKQENNILVFNAEYGNSSVFLENSTFHMAKWIFLSFLKCSLPWLLFSLL

SEQ ID NO: 54306 - protein, 156 aa, Homo sapiens
MEALIPVINKLQDVFNTVGADIIQLPQIVVVGTQSSGKSSVLESLVGRDLLPRGTGIVTRRPLILQLVHVSQEDKRKTTGEENGVEAEEWGKFLHTKNKLYTDFDEIRQEIENETERISGNNKGVSPEPIHLKIFSPNVVNLTLVDLPGMTKVAEP

SEQ ID NO: 54307 - protein, 791 aa, Homo sapiens
MYAFYSLLIYIFYSLFRRDGGAAAAAEPGDPAQRARKPRGRRRPDLPAPELWTELTGLAASSEPEDGSEGAAEGRAAAVSLEEALLRLAEFLSVQLGAEESCGGPADLGQSGEVPSLLTVTSQLLALLAWLRSPRGRQALLQGTQPAPRVRPPSPDGSTSQEESPSHFTAVPGEPLGDETQGQQPLQLEEDQRAWQRLEQLILGQLEELKQQLEQQEEELGRLRLGVGATDSEKRVQHLTLENEALKQSLSLMRDLLLHWGPGPPIRAPQEEAEALLELQGRLQEAQDTTEALRAQLGVQEVQLQGLQGALQQLQQETEQNCRRELQQMHGQLAGLRARMASLRQGCGDLRGLVSTFTQSCQGSLSEARGQVSWALGALSSGGPGTQLPEGQQGPPAGCPGRLPELKGNIRVLCRLRPGTSSSLVSVEPGPGGTVTTCYRGRHRRFRLDWVFPPDASQEEVFRELEPAVLSCLRGYSVCIFTYGQTGTGKTYSMEGPPEDPGIVPRALQSLFREMGAGRQHRVTLSMVEIYNEAVRDLLAPGPPERLAVRQGPEGQGGIQVAGLTHWDVPNLETLHQMLKLGRSNRATAATAMNQRSSRSHALVTLTLRAASPPRAPGTAGTLHLVDLAGSERARKAGAAGPPRGDPDGARRLREAQTINRSLLALGGVMAALRAHRPHVPFRDSQLTRLLQPALGPGTTAVLLLQISTRPEDLGETVCSLKFADRVGQVELGPARRRRVPRSSGTPSSLSTDTPLTGTPCTPTPSPGSPPCPSPDNGSGSALAPAEGLPL

SEQ ID NO: 54308 - protein, 64 aa, Homo sapiens
MASQSQGIQQLLQAEKRAAEKVSEARKSEFQGGAARRGASRRKTAGPQVVGRLGPKNCGVRACV

SEQ ID NO: 54309 - protein, 142 aa, Homo sapiens
GQKHNQDARILNCFSRLPGSCHEQKDRKPKRSTWRFNLDLTHPVEDGIFDSGNFEQFLREKVKVNGKTGNLGNVVHIERFKNKITVVSEKQFSKRYLKYLTKKYLKKNNLRDWLRVVASDKETYELRYFQISQDEDESESED

SEQ ID NO: 54310 - protein, 548 aa, Homo sapiens
MRMCTPIRGLLMALAVMFGTAMAFAPIPRITWEHREVHLVQFHEPDIYNYSALLLSEDKDTLYIGAREAVFAVNALNISEKQHEVYWKVSEDKKAKCAEKGKSKQTECLNYIRVLQPLSATSLYVCGTNAFQPACDHLNLTSFKFLGKNEDGKGRCPFDPAHSYTSVMVDGELYSGTSYNFLGSEPIISRNSSHSPLRTEYAIPWLNEPSFVFADVIRKSPDSPDGEDDRVYFFFTEVSVEYEFVFRVLIPRIARVCKGDQGGLRTLQKKWTSFLKARLICSRPDSGLVFNVLRDVFVLRSPGLKVPVFYALFTPQLNNVGLSAVCAYNLSTAEEVFSHGKYMQSTTVEQSHTKWVRYNGPVPKPRPGACIDSEARAANYTSSLNLPDKTLQFVKDHPLMDDSVTPIDNRPRLIKKDVNYTQIVVDRTQALDGTVYDVMFVSTDRGALHKAISLEHAVHIIEETQLFQDFEPVQTLLLSSKKVLQTFALSGRRMGELWRPVSLCRPMHCPMAGPMHSAGCRTPSGKALSIAALSSPQQGTRLRRCRLL

SEQ ID NO: 54311 - protein, 103 aa, Homo sapiens
MLQKPKSVKLRALRSPRKFGVAGRSCQEVLRKGCLRFQLPERGSRLCLYEDGTELTEDYFPSVPDNAELVLLTLGQAWQGWFRHVSQDSLTLLGSSCPPALVS

SEQ ID NO: 54312 - protein, 67 aa, Homo sapiens
PPVSDTPDEGDEPMPIPEDLSTTSGGQQSSKSDRVVGDKGLSDTPYDSSASYEKENEMMKSHVMDQA

SEQ ID NO: 54313 - protein, 112 aa, Homo sapiens
MSLPPEKASELKQLIHQQLSKMDVHGRIREILAETIREELAPDQQHLSTEDLIKALRRRGIIDDVMKELNFVTDSVEQELPSSPKQPICFDRQSTLKKSFGWKSFLGTSART

SEQ ID NO: 54314 - protein, 110 aa, Homo sapiens
MYLVAGDRGLAGCGHLLVSLLGLLLLLARSGTRALVCLPCDESKCEEPRNCPGSIVQGVCGCCYTCASQRNESCGGTFGIYGTCDRGLRCVIRPPLNGDSLTEYEAGVCE

SEQ ID NO: 54315 - protein, 420 aa, Homo sapiens
MSQLVECVPNFSEGKNQEVIDAISGAITQTPGCVLLDVDAGPSTNRTVYTFVGPPECVVEGALNAARVASRLIDMSRHQGEHPRMGALDVCPFIPVRGVSVDECVLCAQAFGQRLAEELDVPVYLYGEAARMDSRRTLPAIRAGEYEALPKKLQQADWAPDFGPSSFVPSWGATATGARKFLIAFNINLLGTKEQAHRIALNLREQGRGKDQPGRLKKVQGIGWYLDEKNLAQVSTNLLDFEVTALHTVYEETCREAQELSLPVVGSQLVGLVPLKALLDAAAFYCEKENLFILEEEQRIRLVVSRLGLDSLCPFSPKERIIEYLVPERGPERGLGSKSLRAFVGEVGARSAAPGGGSVAAAAAAMGAALGSMVGLMTYGRRQFQSLDTTMRRLIPPFREASAKLTTLVDADAEAFTAYL

SEQ ID NO: 54316 - protein, 71 aa, Homo sapiens
MEKILILLLVALSVAYAAPGPRGIIINLTLYGIYYKCPCERGLTCEGDKTIVGSITNTNFGICHDAGRSKQ

SEQ ID NO: 54317 - protein, 211 aa, Homo sapiens [sequence omitted]

SEQ ID NO: 54318 - protein, 207 aa, Homo sapiens
VPFESEDNQGIVYAWVGRASDPDEAKLAEDILNTMFDTSYSKQVINEGEEPENFFWVGIGAQKPYDDDAEYMKHTRLFRCSNEKGYFAVTEKCSDFCQDDLADDDIMLLDNGQEVYMWVGTQTSQVEIKLSLKACQVIWVEGGPRWACGQGRVITQGSLSPCQVYIQHMRSKEHERPRRLRLVRKGNEQHAFTRCFHAWSAFCKALA

SEQ ID NO: 54319 - protein, 43 aa, Homo sapiens
  MOD_RES (1)..(1): Any amino acid
XTELPHHGKHRPEEGPPGPLGRTAMQVRCATRGFVCICVCVHA

SEQ ID NO: 54320 - protein, 722 aa, Homo sapiens
MRKAGVAHSKSSKDMESHVFLKAKTRDEYLSLVARLIIHFRDIHNKKSQASVSDPMNALQSLTGGPAAGAAGIGMPPRGPGQSLGGMGSLGAMGQPMSLSGQPPPGTSGMAPHSMAVVSTATPQTQLQLQQVALQQQQQQQQFQQQQQAALQQQQQQQQQQQFQAQQSAMQQQFQAVVQQQQQLQQQQQQQQHLIKLHHQNQQQIQQQQQQLQRIAQLQLQQQQQQQQQQQQQQQQALQAQPPIQQPPMQQPQPPPSQALPQQLQQMHHTQHHQPPPQPQQPPVAQNQPSQLPPQSQTQPLVSQAQALPGQMLYTQPPLKFVRAPMVVQQPPVQPQVQQQQTAVQTAQAAQMVAPGVQVSQSSLPMLSSPSPGQQVQTPQSMPPPPQPSPQPGQPSSQPNSNVSSGPAPSPSSFLPSPSPQPSQSPVTARTPQNFSVPSPGPLNTPVNPSSVMSPAGSSQAEEQQYLDKLKQLSKYIEPLRRMINKIDKNEDRKKDLSKMKSLLDILTDPSKRCPLKTLQKCEIALEKLKNDMAVPTPPPPPVPPTKQQYLCQPLLDAVLANIRSPVFNHSLYRTFVPAMTAIHGPPITAPVVCTRKRRLEDDERQSIPSVLQGEVARLDPKFLVNLDPSHCSNNGTVHLICKLDDKDLPSVPPLELSVPADYPAQSPLWIDRQWQYDANPFLQSVHRCMTSRLLQLPDKHSVTALLNTWAQSVHQACLSAA

SEQ ID NO: 54321 - protein, 47 aa, Homo sapiens
  MOD_RES (1)..(1): Any amino acid
XDPLPKKMKDSVTDVLKWDLIVCAVVAVLSFAVSASTVFLSLRMLPI

SEQ ID NO: 54322 - protein, 24 aa, Homo sapiens
  MOD_RES (1)..(1): Any amino acid
XHPEDIKFHLYLVPSDALLTKTLF

SEQ ID NO: 54323 - protein, 132 aa, Homo sapiens
MGEEANDDKKPTTKFELERETELRFEVEASQSVQLELLTGMAEIFGTELTRNKKFTFDAGAKVAVFTWHGCSVQLSGRTEVAYVSKDTPMLLYLNTHTALEQMRRQAEKEEERGPRVMVVGPTDVGKSTVCR

SEQ ID NO: 54324 - protein, 765 aa, Homo sapiens
MLRSTSTVTLLSGGAARTPGAPSRRANVCRLRLTVPPESPVPEQCEKKIERKEQLLDLSNGEPTRKLPQGVVYGVVRRSDQNQQKEMVVYGWSTSQLKEEMNYIKDVRATLEKVRKRMYGDYDEMRQKIRQLTQELSVSHAQQEYLENHIQTQSSALDRFNAMNSALASDSIGLQKTLVDVTLENSNIKDQIRNLQQTYEASMDKLREKQRQLEVAQVENQLLKMKVESSQEANAEVMREMTKKLYSQYEEKLQEEQRKHSAEKEALLEETNSFLKAIEEANKKMQAAEISLEEKDQRIGELDRLIERMEKERHQLQLQLLEHETEMSGELTDSDKERYQQLEEASASLRERIRHLDDMVHCQQKKVKQMVEEIESLKKKLQQKQLLILQLLEKISFLEGENNELQSRLDYLTETQAKTEVETREIGVGCDLLPRKFICKLPDKGKKIFDSFAKLKAAIAECEEVRRKSELFNPVSLDCKLRQKAIAEVDVGTDKAQNSDPILDTSSLVPGCSSVDNIKSSQTSQNQGLGRPTLEGDEETSEVEYTVNKGPASSNRDRVPPSSEASEHHPRHRVSSQAEDTSSSFDNLFIDRLQRITIADQGEQQSEENASTKNLTGLSSGTEKKPHYMEVLEMRAKNPVPQLRKFKTNVLPFRQNDSSSHCQKSGSPISSEERRRRDKQHLDDITAARLLPLHHMPTQLLSIEESLALQKQQKQNYEEMQAKLAAQKLAERLNIKMRSYNPEGESSGRYREVRDEDDDWSSDEF

SEQ ID NO: 54325 - protein, 652 aa, Homo sapiens
MSGVRAVRISIESACEKQVHEVGLDGTETYLPPLSMSQNLARLAQRIDFSQGSGSEEEEAAGTEGDAQEWPGAGSSADQDDEEGVVKFQPSLWPWDSVRNNLRSALTEMCVLYDVLSIVRDKKFMTLDPVSQDALPPKQNPQTLQLISKKKSLAGAAQILLKGAERLTKSVTENQENKLQRDFNSELLRLRQHWKLRKVGDKILGDLSYRSAGSLFPHHGTFEVIKNTDLDLDKKIPEDYCPLDVQIPSDLEGSAYIKVSIQKQAPDIGDLGTVNLFKRPLPKSKPGSPHWQTKLEAAQNVLLCKEIFAQLSREAVQIKSQVPHIVVKNQIISQPFPSLQLSISLCHSSNDKKSQKFATEKQCPEDHLYVLEHNLHLLIREFHKQTLSSIMMPHPASAPFGHKRMRLSGPQAFDKNEINSLQSSEGLLEKIIKQAKHIFLRSRAAATIDSLASRIEDPQIQAHWSNINDVYESSVKVLITSQGYEQICKSIQLQLNIGVEQIRVVHRDGRVITLSYQEQELQDFLLSQFVMDLKVAARLWFSFLVTNVKTFQKVMFYKITNGVIFVGHSKKFSGIKWKVEILFIKWSCLCLHLALVYYDFFQMFPKEVSRNFDLKCLQINYKHKEEITSKRVLFLKIIIRKCLFSTFKLFTL

SEQ ID NO: 54326 - protein, 615 aa, Homo sapiens
MNAAASSYPMASLYVGDLHSDVTEAMLYEKFSPAGPVLSIRVCRDMITRRSLGYAYVNFQQPADAERALDTMNFDVIKGKPIRIMWSQRDPSLRKSGVGNVFIKNLDKSIDNKALYDTFSAFGNILSCKVVCDENGSKGYAFVHFETQEAADKAIEKMNGMLLNDRKVFVGRFKSRKEREAELGAKAKEFTNVYIKNFGEEVDDESLKELFSQFGKTLSVKVMRDPNGKSKGFGFVSYEKHEDANKAVEEMNGKEISGKIIFVGRAQKKVERQAELKRKFEQLKQERISRYQGVNLYIKNLDDTIDDEKLRKEFSPFGSITSAKVMLEDGRSKGFGFVCFSSPEEATKAVTEMNGRIVGSKPLYVALAQRKEERKAHLTNQYMQRVAGMRALPANAILNQFQPAAGGYFVPAVPQAQGRPPYYTPNQLAQMRPNPRWQQGGRPQGFQGMPSAIRQSGPRPTLRHLAPTGVPTAVQNLAPRAAVAAAAPRAVAPYKYASSVRSPHPAIQPLQAPQPAVHVQGQEPLTASMLAAAPPQEQKQMLGERLFPLIQTMHSNLAGKITGMLLEIDNSELLHMLESPESLRSKVDEAVAVLQAHHAKKEAAQKVGAVAAATS

SEQ ID NO: 54327 - protein, 308 aa, Homo sapiens
MADVFPGNDSTASQDVANRFARKGALRQKNVHEVKDHKFIARFFKQPTFCSHCTDFIWGFGKQGFQCQVCCFVVHKRCHEFVTFSCPGADKGPDTDDPRSKHKFKIHTYGSPTFCDHCGSLLYGLIHQGMKCDTCDMNVHKQCVINVPSLCGMDHTEKRGRIYLKAEVADEKLHVTVRDAKNLIPMDPNGLSDPYVKLKLIPDPKNESKQKTKTIRSTLNPQWNESFTFKLKPSDKDRRLSVEIWDWDRTTRNDFMGSLSFGVSELMKMPASGWYKLLNQEEGEYYNVPIPEGDEEGNMELRQKFEWR

SEQ ID NO: 54328 - protein, 988 aa, Homo sapiens
AKDGTKDGLERTRAAVKRGRSFIRTKSLIAQDHRSSLEEEQNLFIDVDCKHPEAILTPMPEGLSQQQVVRRYILGSVVDSEKNYVDALKRILEQYEKPLSEMEPKVLSERKLKTVFYRVKEILQCHSLFQIALASRVSEWDSVEMIGDVFVASFSKSMVLDAYSEYVNNFSTAVAVLKKTCATKPAFLEFLKQEQEASPDRTTLYSLMMKPIQRFPQFILLLQDMLKNTSKGHPDRLPLQMALTELETLAEKLNERKRDADQRCEVKQIAKAINERYLNKLLSSGSRYLIRSDDMIETVYNDRGEIVKTKERRVFMLNDVLMCATVSSRPSHDSRVMSSQRYLLKWSVPLGHVDAIEYGSSAGTGEHSRHLAVHPPESLAVVANAKPNKVYMGPGQLYQDLQNLLHDLNVIGQITQLIGNLKGNYQNLNQSVAHDWTSGLQRLILKKEDEIRAADCCRIQLQLPGKQDKSGRPTFFTAVFNTFTPAIKESWVNSLQMAKLALEEENHMGWFCVEDDGNHIKKEKHPLLVGHMPVMVAKQQEFKIGSCTHQMGQIAIVSFQNSTPKVIECFNVESRILCMLYVPVEEKRREPGAPPDPETPAVRASDVPTICVGTEEGSISIYKSSQGSKKVRLQHFFTPEKSTVMSLACTSQSLYAGLVNGAVASYARAPDGSWDSEPQKVIKLGVLPVRSLLMMEDTLWAASGGQVFIISVETHAVEGQLEAHQEEGMVISHMAVSGVGIWIAFTSGSTLRLFHTETLKHLQDINIATPVHNMLPGHQRLSVTSLLVCHGLLMVGTSLGVLVALPVPRLQGIPKVTGRGMVSYHAHNSPVKFIVLATALHEKDKDKSRDSLAPGPEPQDEDQKDALPSGGAGSSLSQGDPDAAIWLGDSLGSMTQKSDLSSSSGSLSLSHGSSSLEHRSEDSTIYDLLKDPVSLRSKARRAKKAKASSALVVCGGQGHRRVHRKARQPHQEELAPTVMVWQIPLLNI

SEQ ID NO: 54329 - protein, 71 aa, Homo sapiens
MSGVWGAGGPRCQEALAVLASLCRARPPPLGLDVETCRSFELQPPERSPSAAGAAVLDALEEQGGLQSLFC

SEQ ID NO: 54330 - protein, 170 aa, Homo sapiens
MSPEEWTYLVVLLISIPIGFLFKKAGPGLKRWGAAAVGLGLTLFTCGPHTLHSLVTILGTWALIQAQPCSCHALALAWTFSYLLFFRALSLLGLPTPTPFTNAVQLLLTLKLVSLASEVQDLHLAQRKEMASGFSKGPTLGLLPDVPSLMETLSYSYCYVGIMTGPFFRY

SEQ ID NO: 54331 - protein, 228 aa, Homo sapiens
MEEQPQMQDADEPADSGGEGRAGGPPQVAGAQAACSEDRMTLLLRLRAQTKQQLLEYKSMVDASEEKTPEQIMQEKQIEAKIEDLENEIEEVKVAFEIKKLALDSVLMDNMKHLLELNKLIMKSQQESWDLEEKLLDIRKKRLQLKQASESKLLEIQTEKNKQKIDLDSMENSERIKIIRQNLQMEIKITTVIQHVFQNLILGSKVNWAEDPALKEIVLQLEKNVDMM

SEQ ID NO: 54332 - protein, 316 aa, Homo sapiens
MFYFRGCGRWVAVSFTKQQFPLARLSSDSAAPRTPHFDVIVIGGGHAGTEAATAAARCGSRTLLLTHRVDTIGQMSCNPSFGGIGKGHLMREVDALDGLCSRICDQSGVHYKVLNRRKGPAVWGLRAQIDRKLYKQNMQKEILNTPLLTVQEGAVEDLILTEPEPEHTGKCRVSGVVLVDGSTVYAESVILTTGTFLRGMIVIGLETHPAGRLGDQPSIGLAQTLEKLGFVVGRLKTGTPPRIAKESINFSILNKHIPDNPSIPFSFTNETVWIKPEDQLPCYLTHTNPRVDEIVLKNLHLNSHVKETTRGPRGYL

SEQ ID NO: 54333 - protein, 32 aa, Homo sapiens
MESSGSQGGRAPSYDQPDYGQQDSYDQQSGYD

SEQ ID NO: 54334 - protein, 494 aa, Homo sapiens
ASTQSPSVFPLTRCCKNIPSNATSVTLGCLATGYFPEPVMVTWDTGSLNGTTMTLPATTLTLSGHYATISLLTVSGAWAKQMFTCRVAHTPSSTDWVDNKTFSVCSRDFTPPTVKILQSSCDGGGHFPPTIQLLCLVSGYTPGTINITWLEDGQVMDVDLSTASTTQEGELASTQSELTLSQKHWLSDRTYTCQVTYQGHTFEDSTKKCADSNPRGVSAYLSRPSPFDLFIRKSPTITCLVVDLAPSKGTVNLTWSRASGKPVNHSTRKEEKQRNGTLTVTSTLPVGTRDWIEGETYQCRVTHPHLPRALMRSTTKTSGPRAAPEVYAFATPEWPGSRDKRTLACLIQNFMPEDISVQWLHNEVQLPDARHSTTQPRKTKGSGFFVFSRLEVTRAEWEQKDEFICRAVHEAASPSQTVQRAVSVNPELDVCVEEAEGEAPWTWTGLCIFAALFLLSVSYSAAITLLMVQRFLSATRQGRPQTSLDYTNVLQPHA

SEQ ID NO: 54335 - protein, 928 aa, Homo sapiens
  MOD_RES (1)..(1): Any amino acid
XFPQKLTMGMLKSPNTAILIKDEARNVFYELEDVRDIQDRSIIKIYRKEPLYAAFPGSHLTNGDLRREMVYASRESSPTRRLNNLSPAPHLASGSPPPGLPSGLPSGLQSGSPSRSRLSYAGGRPPSYAGSPVHHAAERLGGAPAAQGVSPSPSAILERRDVKPDEDLASKAGGMVLVKGEGLYADPYGLLHEGRLSLAAAAGDPFAYPGAGGLYKRGSVRSLSTYSAAALQSDLEDSLYKAAGGGGPLYGDGYGFRLPPSSPQKLADVAAPPGGPPPPHSPYSGPPSRGSPVRQSFRKDSGSSSVFAESPGGKTRSAGSASTAGAPPSELFPGPGERSLVGFGPPVPAKDTETRERMEAMEKQIASLTGLVQSALLRGSEPETPSEKIEGSNGAATPSAPCGSGGRSSGATPVSGPPPPSASSTPAGQPTAVSRLQMQLHLRGLQNSASDLRGQLQQLRKLQLQNQESVRALLKRTEAELSMRVSEAARRQEDPLQRQRTLVEEERLRYLNDEELITQQLNDLEKSVEKIQRDVSHNHRLVPGPELEEKALVLKQLGETLTELKAHFPGLQSKMRVVLRVEVEAVKFLKEEPQRLDGLLKRCRGVTDTLAQIRRQVDEGVWPPPNNLLSQSPKKVTAETDFNKSVDFEMPPPSPPLNLHELSGPAEGASLTPKGGNPTKGLDTPGKRSVDKAVSVEAAERDWEEKRAALTQYSAKDINRLLEETQAELLKAIPDLDCASKAHPGPAPTPDHKPPKAPHGQKAAPRTEPSGRRGSDELTVPRYRTEKPSKSPPPPPPRRSFPSSHGLTTTRTGEVVVTSKKDSAFIKKAESEELEVQKPQVKLRRAVSEVARPASTPPIMASAIKDEDDEDRIIAELESGGGSVPPMKVVTPGASRLKAAQGQAGSPDKSKHGKQRAEYMRIQAQQQV

SEQ ID NO: 54336 - protein, 245 aa, Homo sapiens
MQWLNTMKELALGVRTSKTCTFSAAMTTMQGMEQAMPGAGPGVPQLGNMAVIHSHLWKGLQEKFLKGEPKVLGVVQILTALMSLSMGITMMCMASNTYGSNPISVYIGYTIWGSVMFIISGSLSIAAGIRTTKGLVRGSLGMNITSSVLAASGILINTFSLAFYSFHHPYCNYYGNSNNCHGTMSILMGLDGMVLLLSVLEFCIAVSLSAFGCKVLCCTPGGVVLILPSHSHMAETASPTPLNEV

SEQ ID NO: 54337 - protein, 66 aa, Homo sapiens
MDGTEGSAGQPGPAERSHRSSVSSVGARGGSHPHLLFHTLLGPQPWRSSSGLSSFSLKIIYVSTKK

SEQ ID NO: 54338 - protein, 127 aa, Homo sapiens
MGSMSPPSAWPCVLDGPETRQDLCQPPKPCVHSHAHMEECLSAGLQCPHPHLLLVHSCFIPASGLGVPSQLPHPIWSSSPAPCGDLFVKSLGTGQPGEVRLHHSPPLPSCVALVNQPPHSPWSFSRV

SEQ ID NO: 54339 - protein, 59 aa, Homo sapiens
MKDKFLKHLTGPLYFSPKCSKHFHRLYHNTRDCTIPAYYKRCARLLTRLAVSPVCMEDK

SEQ ID NO: 54340 - protein, 88 aa, Homo sapiens
MSSSGYPPNQGAFSTEQSRYPPHSVQYTFPNTRHQQEFAVPDYRSSHLEVSQASQLLQQQQQQQLRRRPSLLSEFHPGSDSVYFLCMY

SEQ ID NO: 54341 - protein, 81 aa, Homo sapiens
MSSVAVLTQESFAEHRSGLVPQQIKVATLNSEEESDPPTYKDAFPPLPEKAACLESAQEPAGAWGNKIRPIKASVITQVFH

SEQ ID NO: 54342 - protein, 1704 aa, Homo sapiens
MSDPRQSQEEKHKLGRASSKFKDPPRIMQSDDYFARKFKAINGNMGPTTSLNASNSNETGGGGPANGTPAVPKMGVRARVSEWPPKKDCSKELTCKALWESRSQTSYESITSVLQNGQSDQSEGQQDEQLDLDFVEAKYTIGDIFVHSPQRGLHPIRQRSNSDVTISDIDAEDVLDQNAVNPNTGAALHREYGSTSSIDRQGLSGENFFAMLRGYRVENYDHKAMVPFGFPEFFRCDPAISPSLHAAAQISRGEFVRISGLDYVDSALLMGRDRDKPFKRRLKSESVETSLFRKLRTVKSEHETFKFTSELEESRLERGIRPWNCQRCFAHYDVQSILFNINEAMATRANVGKRKNITTGASAASQTQMPTGQTGNCESPLGSKEDLNSKENLDADEGDGKSNDLVLSCPYFRNETGGEGDRRIALSRANSSSFSSGESCSFESSLSSHCTNAGVSVLEVPRENQPIHREKVKRYIIEHIDLGAYYYRKFFYGKEHQNYFGIDENLGPVAVSIRREKVEDAKEKEGSQFNYRVAFRTSELTTLRGAILEDAIPSTARHGTARGLPLKEVLEYVIPELSIQCLRQASNSPKVSEQLLKLDEQGLSFQHKIGILYCKAGQSTEEEMYNNETAGPAFEEFLDLLGQRVRLKGFSKYRAQLDNKTDSTGTHSLYTTYKDYELMFHVSTLLPYMPNNRQQLLRKRHIGNDIVTIVFQEPGALPFTPKSIRSHFQHVFVIVKVHNPCTENVCYSVGVSRSKDVPPFGPPIPKGVTFPKSAVFRDFLLAKVINAENAAHKSEKFRAMATRTRQEYLKDLAENFVTTATVDTSVKFSFITLGAKKKEKVKPRKDAHLFSIGAIMWHVIARDFGQSADIECLLGISNEFIMLIEKDSKNVVFNCSCRDVIGWTSGLVSIKVFYERGECVLLSSVDNCAEDIREIVQRLVIVTRGCETVEMTLRRNGLGQLGFHVNFEGIVADVEPFGFAWKAGLRQGSRLVEICKVAVATLTHEQMIDLLRTSVTVKVVIIQPHDDGSPRRGCSELCRIPMVEYKLDSEGTPCEYKTPFRRNTTWHRVPTPALQPLSRASPIPGTPDRLPCQQLLQQAQAAIPRSTSFDRKLPDGTRSSPSNQSSSSDPGPGGSGPWRPQVGYDGCQSPLLLEHQGSGPLECDGAREREDTMEASRHPETKWHGPPSKVLGSYKERALQKDGSCKDSPNKLSHIGDKSCSSHSSSNTLSSNTSSNSDDKHFGSGDLMDPELLGLTYIKGASTDSGIDTAPCMPATILGPVHLAGSRSLIHSRAEQWADAADVSGPDDEPAKLYSVHGYASTISAGSAAEGSMGDLSEISSHSSGSHHSGSPSAHCSKSSGSLDSSKVYIVSHSSGQQVPGSMSKPYHRQGAVNKYVIGWKKSEGSPPPEEPEVTECPGMYSEMDVMSTATQHQTVVGDAVAETQHVLSKEDFLKLMLPDSPLVEEGRRKFSFYGNLSPRRSLYRTLSDESICSNRRGSSFGSSRSSVLDQALPNDILFSTTPPYHSTLPPRAHPAPSMGSLRNEFWFSDGSLSDKSKCADPGLMPLPDTATGLDWTHLVDAARAFEDQRVASFCTLTDMQHGQDLEGAQELPLCVDPGSGKEFMDTTGERSPSPLTGKVNQLELILRQLQTDLRKEKQDKAVLQAEVQHLRQDNMRLQEESQTATAQLRKFTEWFFTTIDKKS

SEQ ID NO: 54343 - protein, 427 aa, Homo sapiens
MFYFRGCGRWVAVSFTKQQFPLARLSSDSAAPRTPHFDVIVIGGGHAGTEAATAAARCGSRTLLLTHRVDTIGQMSCNPSFGGIGKGHLMREVDALDGLCSRICDQSGVHYKVLNRRKGPAVWGLRAQIDRKLYKQNMQKEILNTPLLTVQEGAVEDLILTEPEPEHTGKCRVSGVVLVDGSTVYAESVILTTGTFLRGMIVIGLETHPAGRLGDQPSIGLAQTLEKLGFVVGRLKTGTPPRIAKESINFSILNKHIPDNPSIPFSFTNETVWIKPEDQLPCYLTHTNPRVDEIVLKNLHLNSHVKETTRGPRYCPSIESKVLRFPNRLHQVWLEPEGMDSDLIYPQGLSMTLPAELQEKMITCIRGLEKAKVIQPGYGVQYDYLDPRQITPSLETHLVQRLFFAGQINGTTGYEEAAAQSSRCSEV

SEQ ID NO: 54344 - protein, 74 aa, Homo sapiens
MLEPQENGVIDLPDYEHVEDETFPPFPPPASPERQDGEGTEPDEESGNGAPVRVPPKRTVKRNIPKLDAQRLKT

SEQ ID NO: 54345 - protein, 183 aa, Homo sapiens
PYKILVISADSGMIEPVVNAVSIHQVKKQSQLSLLDYFLQEHGSYTTEAFLSAQRNFVQSCAGYCLVCYLLQVKDRHNGNILLDAEGHIIHIDFGFILSSSPRNLGFETSAFKLTTEFVDVMGGLDGDMFNYYKMLMLQGLIAARKHMDKVVQIVEIMQQGGAGVRSGAIVPQASPLSRSPGA

SEQ ID NO: 54346 - protein, 114 aa, Homo sapiens
MAAVGAGGSTAAPGPGAVSAGALEPGTASAAHRRLKYISLAVLVVQNASLILSIRYARTLPGDRFFATTAVVMAEVLKGLTCLLLLFAQKRGCPGAVCGHAQARSALSHLHLAE

SEQ ID NO: 54347 - protein, 227 aa, Homo sapiens
MAASAKKKNKKGKTISLTDFLAEDGGTGGGSTYVSKPVSWADETDDLEGDVSTTWHSNDDDVYRAPPIDRSILPTAPRAAREPNIDRSRLPKSPPYTAFLGNLPYDVTEESIKEFFRGLNISAVRLPREPSNPERLKGFGYAEFEDLDSLLSALSLNEESLGNRRIRVDVADQAQDKDRDDRSFGRDRNRDSDKTDTDWRARPATDSFDDYPPRRGDDSFGDRRNGS

SEQ ID NO: 54348 - protein, 154 aa, Homo sapiens
MEPSTAARAWALFWLLLPLLGAVCASGPRTLVLLDNLNVRETHSLFFRSLKDRGFELTFKTADDPSLSLIKYGEFLYDNLIIFSPSVEGDPLRELGSECGIEFDEEKTAVIDHHNYDISDLGQHTLIVADTENLLKAPTIVGKSSLNPILFRGV

SEQ ID NO: 54349 - protein, 579 aa, Homo sapiens
MKRPKDHIWRSANNMPKQVEVRMHDSHLGSEEPKHRHLGLRLCDKLGKNLLLTLTVFGVILGAVCGGLLRLASPIHPDVVMLIAFPGDILMRMLKMLILPLIISSLITGLSGLDAKASGRLGTRAMVYYMSTTIIAAVLGVILVLAIHPGNPKLKKQLGPGKKNDEVSSLDAFLDLIRNLFPENLVQACFQQIQTVTKKVLVAPPPDEEANATSAVVSLLNETVTEVPEETKMVIKKGLEFKDGMNVLGLIGFFIAFGIAMGKMGDQAKLMVDFFNILNEIVMKLVIMIMWYSPLGIACLICGKIIAIKDLEVVARQLGMYMVTVIIGLIIHGGIFLPLIYFVVTRKNPFSFFAGIFQAWITALGTASSAGTLPVTFRCLEENLGIDKRVTRFVLPVGATINMDGTALYEAVAAIFIAQMNGVVLDGGQIVTVSLTATLASVGAASIPSAGLVTMLLILTAVGLPTEDISLLVAVDWLLDRMRTSVNVVGDSFGAGIVYHLSKSELDTIDSQHRVHEDIEMTKTQSIYDDMKNHRESNSNQCVYAAHNSVIVDECKVTLAANGKSADCSVEEEPWKREK

SEQ ID NO: 54350 - protein, 73 aa, Homo sapiens
MNGGNESSGADRAGGPVATSVPIGWQRCVREGAVLYISPSGTELSSLEQTRSYLLSDGTCKCGLECPLNVPKV

SEQ ID NO: 54351 - protein, 40 aa, Homo sapiens
MQSTSNHLWLLSDILGQGATANVFRGRHKILSVLHVSDYT

SEQ ID NO: 54352 - protein, 110 aa, Homo sapiens
MRSNIKPAKLLLFDYDKVELANMNRLFFQPHQAGLSKVQAAEHTLRNINPDVLFEVHNYNITTVENFQHFMDRISNGGLEEGKPVDLVLSCVDNFEARMTINTACNELGQ

SEQ ID NO: 54353 - protein, 210 aa, Homo sapiens
MEGKWLLCMLLVLGTAIVEAHDGHDDDVIDIEDDLDDVIEEVEDSKPDTTAPPSSPKVTYKAPVPTGEVYFADSFDRGTLSGWILSKAKKDDTDDEIAKYDGKWEVEEMKESKLPGDKGLVLMSRAKHHAISAKLNKPFLFDTKPLIVQYEVNFQNGIECGGAYVKLLSKTPELNLINVERTINCTSSSDTKTPKRVSMKKNMLRGQMQI

SEQ ID NO: 54354 - protein, 30 aa, Homo sapiens
MAAETQTLNFGPECLLQMCLDPEYGILMEF

SEQ ID NO: 54355 - protein, 772 aa, Homo sapiens
MDSTLTASEIRQRFIDFFKRNEHTYVHSSATIPLDDPTLLFANAGMNQFKPIFLNTIDPSHPMAKLSRAANTQKCIRAGGKHNDLDDVGKDVYHHTFFEMLGSWSFGDYFKELACKMALELLTQEFGIPIERLYVTYFGGDEAAGLEADLECKQIWQNLGLDDTKILPGNMKDNFWEMGDTGPCGPCSEIHYDRIGGRDAAHLVNQDDPNVLEIWNLVFIQYNREADGILKPLPKKSIDTGMGLERLVSVLQNKMSNYDTDLFVPYFEAIQKGTGARPYTGKVGAEDADGIDMAYRVLADHARTITVALADGGRPDNTGRGYVLRRILRRAVRYAHEKLNASRGFFATLVDVVVQSLGDAFPELKKDPDMVKDIINEEEVQFLKTLSRGRRILDRKIQSLGDSKTIPGDTAWLLYDTYGFPVDLTGLIAEEKGLVVDMDGFEEERKLAQLKSQGKGAGGEDLIMLDIYAIEELRARGLEVTDDSPKYNYHLDSSGSYVFENTVATVMALRREKMFVEEVSTGQECGVVLDKTCFYAEQGGQIYDEGYLVKVDDSSEDKTEFTVKNAQVRGGYVLHIGTIYGDLKVGDQVWLFIDEPRRRPIMSNHTATHILNFALRSVLGEADQKGSLVAPDRLRFDFTAKGAMSTQQIKKAEEIANEMIEAAKAVYTQDCPLAAAKAIQGLRAVFDETYPDPVRVVSIGVPVSELLDDPSGPAGSLTSVEFCGGTHLRNSSHAGAFVIVTEEAIAKGIRRIVAVTGAEAQKVSRPSGKQRA

SEQ ID NO: 54356 - protein, 504 aa, Homo sapiens
MISAVSSPWLTQLSHFCDVAAFTASSLSSLGAAGGFPGAASPGADPYGPREPPPPPPRYDPCAAAAPGAPGPPPPPHAYPFAPAAGAATSAAAEPEGPGASCAAAAKAPVKKNAKVAGVSVQLEMKALWDEFNQLGTEMIVTKAGRRMFPTFQVKLFGMDPMADYMLLMDFVPVDDKRYRYAFHSSSWLVAGKADPATPGRVHYHPDSPAKGAQWMKQIVSFDKLKLTNNLLDDNGHIILNSMHRYQPRFHVVYVDPRKDSEKYAEENFKTFVFEETRFTAVTAYQNHRITQLKIASNPFAKGFRDCDPEDWPRNHRPGALPLMSAFARSRNPVASPTQPSGTEKDAAEARREFQRDAGGPAVLGDPAHPPQLLARVLSPSLPGAGGAGGLVPLPGAPGGRPSPPNPELRLEAPGASEPLHHHPYKYPAAAYDHYLGAKSRPAPYPLPGLRGHGYHPHAHPHHHHHPVSPAAAAAAAAAAAAAAANMYSSAGAAPPGSYDYCPR

SEQ ID NO: 54357 - protein, 249 aa, Homo sapiens
MPTESASCSTARQTKQKRKSHSLSIRRTNSSEQERTGLPRDMLEGQDSKLPSSVRSTLLELFGQIEREFENLYIENLELRREIDTLNERLAAEGQAIDGAELSKGQLKTKASHSTSQLSQKLKTTYKASTSKIVSSFKTTTSRAACQLVKEYIGHRDGIWDVSVAKTQPVVLGTASADHTALLWSIETGKCLVKYAGHVGSVNSIKFHPSEQLALTASGDQTAHIWRYAVQLPTPQPVADTSVSTFPYL

SEQ ID NO: 54358 - protein, 255 aa, Homo sapiens
MAEEKKLKLSNTVLPSESMKVVAESMGIAQIQEETCQLLTDEVSYRIKEIAQDALKFMHMGKRQKLTTSDIDYALKLKNVEPLYGFHAQEFIPFRFASGGGRELYFYEEKEVDLSDIINTPLPRVPLDVCLKAHWLSIEGCQPAIPENPPPAPKEQQKAEATEPLKSAKPGQEEDGPLKGKGQGATTADGKGKEKKAPPLLEGAPLRLKPRSIHELSVEQQLYYKEITEACVGSCEAKRAEALQSIATDPGLYQM

SEQ ID NO: 54359 - protein, 668 aa, Homo sapiens
PSRTEKKESKCPTPGCDGTGHVTGLYPHHRSLSGCPHKDRVPPEILAMHESVLKCPTPGCTGRGHVNSNRNSHRSLSGCPIAAAEKLAKAQEKHQSCDVSKSSQASDRVLRPMCFVKQLEIPQYGYRNNVPTTTPRSNLAKELEKYSKTSFEYNSYDNHTYGKRAIAPKVQTRDISPKGYDDAKRYCKDPSPSSSSTSSYAPSSSSNLSCGGGSSASSTCSKSSFDYTHDMEAAHMAATAILNLSTRCREMPQNLSTKPQDLCATRNPDMEVDENGTLDLSMNKQRPRDSCCPILTPLEPMSPQQQAVMNNRCFQLGEGDCWDLPVDYTKMKPRRIDEDESKDITPEDLDPFQEALEERRYPGEVTIPSPKPKYPQCKESKKDLITCPTPGCDGSGHITGNYASHRSLSGCPRAKKSGIRIAQSKEDKEDQEPIRCPVPGCDGQGHITGKYASHRSASGCPLAAKRQKDGYLNGSQFSWKSVKTEGMSCPTPGCDGSGHVSGSFLTHRSLSGCPRATSAMKKAKLSGEQMLTIKQRASNGIENDEEIKQLDEEIKELNESNSQMEADMIKLRTQITTMESNLKTIEEENKVIEQQNESLLHELANLSQSLIHSLANIQLPHMDPINEQNFDAYVTTLTEMYTNQDRYQSPENKALLENIKQAVRGIQV

SEQ ID NO: 54360 - protein, 121 aa, Homo sapiens
MAAAAAATAAAAASIRERQTVALKRMLNFNVPHIKNSTGEPVWKVLIYDRFGQDIISPLLSVKELRDMGITLHLFLTNISILLLWKMICLYYVIKIRSLFHIVPLTGQISQTRKWKLLWTL

SEQ ID NO: 54361 - protein, 247 aa, Homo sapiens
MQAKYSSTRDMLDDDGDTTMSLHSQGSATTRHPEPRRTVFQYYQLSNTGQDTISQMEERLGNTSQELQSLQVQNIKLAGSLQHVAEKLCRELYNKAGAHRCSPCTEQWKWHGDNCYQFYKDSKSWEDCKYFCLSENSTMLKINKQEDLEFAASQSYSEFFYSYWTGLLRPDSGKAWLWMDGTPFTSELFHIIIDVTSPRSRDCVAILNGMIFSKDCKELKRCVCERRAGMVKPESLHVPPETLGEGD

SEQ ID NO: 54362 - protein, 113 aa, Homo sapiens
MSQATKRKHVVKEVLGEHIVPSDQQQIVRVLRTPGNNLHEVETAQGQRFLVSMPSKYRKNIWIKRGDFLIVDPIEEGEKVKAEISFVLCKDHVRSLQKEGFWPEAFSEVAEKH

SEQ ID NO: 54363 - protein, 244 aa, Homo sapiens
  MOD_RES (1)..(1): Any amino acid
XASGTVYTAMDVATGQEVAIKQMNLQQQPKKELIINEILVMRENKNPNIVNYLDSYLVGDELWVVMEYLAGGSLTDVVTETCMDEGQIAAVCRECLQALEFLHSNQVIHRDIKSDNILLGMDGSVKLTDFGFCAQITPEQSKRSTMVGTPYWMAPEVVTRKAYGPKVDIWSLGIMAIEMIEGEPPYLNENPLRALYLIATNGTPELQNPEKLSAIFRDFLNRCLEMDVEKRGSAKELLQALVSG

SEQ ID NO: 54364 - protein, 146 aa, Homo sapiens
MTVFFKTLRNHWKKTTAGLCLLTWGGHWLYGKHCDNLLRRAACQEAQVFGNQLIPPNAQVKKATVFLNPAACKGKARTLFEKNAAPILHLSGMDVTIVKTDYEGQAKKLLELMENTDVIIVAGGDGTLQEVVTGVLRRTDEVSIKE

SEQ ID NO: 54365 - protein, 222 aa, Homo sapiens
MSLMVIIMACVGFFLLQGAWPQEGVHRKPSFLALPGHLVKSEETVILQCWSDVMFEHFLLHREGKFNNTLHLIGEHHDGVSKANFSIGPMMPVLAGTYRCYGSVPHSPYQLSAPSDPLDMVIIGLYEKPSLSAQPGPTVQAGENVTLSCSSIYPGKGRPMNVGSLQCAASTEHSRPTFLWALPPTEGPTDASALSVTLPTSGQTRVIHCLFPSQVTPDTYMF

SEQ ID NO: 54366 - protein, 221 aa, Homo sapiens
MAAAGARPVELGFAESAPAWRLRSEQFPSKVGGRPAWLGAAGLPGPQALACELCGRPLSFLLQVYAPLPGRPDAFHRCIFLFCCREQPCCAGLRVFRNQLPRKNDFYSYEPPSENPPPETGESVCLQLKSGAHLCRVCGCLGPKTCSRCHKAYYCSKEHQTLDWRLGHKQACAQPDHLDHIIPDHNFLFPEFEIVIETEDEIMPEVVEKEDYSEIIGSMGI

SEQ ID NO: 54367 - protein, 173 aa, Homo sapiens
MSAEASGPAAAAAPSLEAPKPSGLEPGPAAYGLKPLTPNSKYVKLNVGGSLHYTTLRTLTGQDTMLKAMFSGRVEVLTDAGGWVLIDRSGRHFGTILNYLRDGSVPLPESTRELGELLGEARYYLVQGLIEDCQLALQSLSVAQAGVQWRDLGSPQPLPPRFKQFSCLSLPSS

SEQ ID NO: 54368 - protein, 54 aa, Homo sapiens
MSQSRHRAEAPPLEREDSGTFSLGKMITAKPGKTPIQVKVQVRSWRNIELQRLP

SEQ ID NO: 54369 - protein, 85 aa, Homo sapiens
MTTYLEFIQQNEERDGVRFSWNVWPSSRLEATRMVVPVAALFTPLKERPDLPPIQYEPVLCSRTTCRAVLNPLCLFSTQKLEFYE

SEQ ID NO: 54370 - protein, 112 aa, Homo sapiens
MEEIPAQEAAGSPRVQFQSLETQSECLSPEPQFVQDTDMEQGLTGGFPISKPDGISQLEQDLQVFDLETKTREVLRDDCSDGETREENKLLIPKQKISEEVHSYKVRVGRLK

SEQ ID NO: 54371 - protein, 146 aa, Homo sapiens
MAASEVAGVVANAPSPPESSSLCASKSDEGLPDGLSTKDSAQKQKNSPLLSVSSQTITKENNRNVHLEHSEQNPGSSAGDTSAAHQVVLGENLIATALCLSGSGSQSDLKDVASTAGEEGDTSLRESLHPVTRSLKAGCHTKQLAS

SEQ ID NO: 54372 - protein, 374 aa, Homo sapiens
MLSLRVPLAPITDPQQLQLSPLKGLSLVDKENTPPALSGTRVLASKTARRIFQEPTEPKTKAAAPGVEDEPLLRENPRRFVIFPIEYHDIWQMYKKAEASFWTAEEVDLSKDIQHWESLKPEERYFISHVLAFFAASDGIVNENLVERFSQEVQITEARCFYGFQIAMENIHSEMYSLLIDTYIKDPKEREFLFNAIETMPCVKKKADWALRWIGDKEATYGERVVAFAAVEGIFFSGSFASIFWLKKRGLMPGLTFSNELISRDEGLHCDFACLMFKHLVHKPSEERVREIIINAVRIEQEFLTEALPVKLIGMNCTLMKQYIEFVADRLMLELGFSKVLGDREVQSRWSPGPRGDSTPVREMETNHPPSVRG

SEQ ID NO: 54373 - protein, 128 aa, Homo sapiens
MGWKPSEARGQSQSFQASGLQPRSLKAARRATGRPDRSRAARPTMDPSAHRSRAAPPNMDPDPQAGVQASGTPTSSVTAARSTGCGGCAGSAVCAWTTTSARSATCTTSMSSPTPSTATRPLTRALSH

SEQ ID NO: 54374 - protein, 145 aa, Homo sapiens
MTLLWCVVSLYFYGILQSDASERCDDWGLDTMRQIQVFEDEPARIKCPLFEHFLKFNYSTAHSAGLTLIWYWTRQDRDLEEPINFRLPENRISKEKDVLWFRPTLLNDTGNYTCMLRNTTYCSKVAFPLEVVQKDSCFNSPMKLP

SEQ ID NO: 54375 - protein, 1003 aa, Homo sapiens
MKSEDYPHETMAPDIHEERQYRCEDCDQLFESKAELADHQKFPCSTPHSAFSMVEEDFQQKLESENDLQEIHTIQECKECDQVFPDLQSLEKHMLSHTEEREYKCDQCPKAFNWKSNLIRHQMSHDSGKHYECENCAKVFTDPSNLQRHIRSQHVGARAHACPECGKTFATSSGLKQHKHIHSSVKPFICEVCHKSYTQFSNLCRHKRMHADCRTQIKCKDCGQMFSTTSSLNKHRRFCEGKNHFAAGGFFGQGISLPGTPAMDKTSMVNMSHANPGLADYFGANRHPAGLTFPTAPGFSFSFPGLFPSGLYHRPPLIPASSPVKGLSSTEQTNKSQSPLMTHPQILPATQDILKALSKHPSVGDNKPVELQPERSSEERPFEKISDQSESSDLDDVSTPSGSDLETTSGSDLESDIESDKEKFKENGKMFKDKVSPLQNLASINNKKEYSNHSIFSPSLEEQTAVSGAVNDSIKAIASIAEKYFGSTGLVGLQDKKVGALPYPSMFPLPFFPAFSQSMYPFPDRDLRSLPLKMEPQSPGEVKKLQKGSSESPFDLTTKRKDEKPLTPVPSKPPVTPATSQDQPLDLSMGSRSRASGTKLTEPRKNHVFGGKKGSNVESRPASDGSLQHARPTPFFMDPIYRVEKRKLTDPLEALKEKYLRPSPGFLFHPQMSAIENMAEKLESFSALKPEASELLQSVPSMFNFRAPPNALPENLLRKGKERYTCRYCGKIFPRSANLTRHLRTHTGEQPYRCKYCDRSFSISSNLQRHVRNIHNKEKPFKCHLCDRCFGQQTNLDRHLKKHENGNMSGTATSSPHSELESTGAILDDKEDAYFTEIRNFIGNSNHGSQSPRNVEERMNGSHFKDEKALVTSQNSDLLDDEEVEDEVLLDEEDEDNDITGKTGKEPVTSNLHEGNPEDDYEETSALEMSCKTSPVRYKEEEYKSGLSALDHIRHFTDSLKMRKMEDNQYSEAELSSFSTSHVPEELKQPLHRKSKSQEESKA

SEQ ID NO: 54376 - protein, 75 aa, Homo sapiens
MTSSGPGPRFLLLLPLLLPPAASASDRPRGRDPVNPEKLLVITVATAETEGYLRFLRSAEFFNYTVRTLGLGEEW

SEQ ID NO: 54377 - protein, 363 aa, Homo sapiens
MNIRGDTGHKACECQEYGPKPWKSQQPKKAFRYHPSLRTQERDHTGKKPYACKECGKNIIYHSSIQRHMVVHSGDGPYKCKFCGKAFHCLSLYLIHERTHTGEKPYECKQCGKSFSYSATHRIHERTHIGEKPYECQECGKAFHSPRSCHRHERSHMGEKAYQCKECGKAFMCPRYVRRHERTHSRKKLYECKQCGKALSSLTSFQTHIRMHSGERPYECKTCGKGFYSAKSFQRHEKTHSGEKPYKCKQCGKAFTRSGSFRYHERTHTGEKPYECKQCGKAFRSAPNLQLHGRTHTGEKPYQCKECGKAFRSASQLRIHRRIHTGEKPYECKKCGKAFRYVQNFRFHERTQTHKNALWRKTL

SEQ ID NO: 54378 - protein, 103 aa, Homo sapiens
AKKKSVAMHTNYLSACSFTNSDMQILTASGDGTCALWDVESGQLLQSFHGHGADVLCLDLAPSETGNTFVSGGCDKKAMVWDMRSGQCVQAFETHESDINSVR

SEQ ID NO: 54379 - protein, 188 aa, Homo sapiens
MGRTVVVLGGGISGLAASYHLSRAPCPPKVVLVESSERLGGWIRSVRGPNGAIFELGPRGIRPAGALGARTLLLVMLGGSWLQTLEASGCVLSQELFQQRAQEAAATQLGLKEMPSHCLVHLHKTKNQLKWRQSHDRTVEWPKEYPGRSRKQAPSILHVPGCQLLRCRDRDHLGAVSEQPRSSAESRV

SEQ ID NO: 54380 - protein, 121 aa, Homo sapiens
MQDYNKDDMSYRRISAVEPKTALPFNRFLPNKSRQPSYVPAPLRKKKPDKHEDNRRSWASPVYTEADGTFSRLFQKIYGENGSKSMSDVSAEDVQNLRQLRYEEMQKIKSQLKEQDQKWQD

SEQ ID NO: 54381 - protein, 222 aa, Homo sapiens
MSALTSPIPENSPEIVVAVFSVSDPDSGNNGKTISSIQEDLPFLLKPSVKNFYTLVTERALDREARAEYNITLTVTDMGTPRLKTEHNITVQISDVNDNAPTFTQTSYTLFVRENNSPALHIGSVSATDRDSGTNAQVTYSLLPPQDPHLPLASLVSINADNGHLFALRSLDYEALQAFEFRVGATDRGSPALSREALVRVLVLDANDNSPFVLYPLQNGSA

SEQ ID NO: 54382 - protein, 36 aa, Homo sapiens
MAGRPHPYDGNSSDPENWDRKLHSRPRKLYKHSRRS

SEQ ID NO: 54383 - protein, 363 aa, Homo sapiens
MAGSSTGGGGVGETKVIYHLDEEETPYLVKIPVPAERITLGDFKSVLQRPAGAKYFFKSMDQDFGVVKEEISDDNARLPCFNGRVVSWLVSSDNPQPEMAPPVHEPRAELAPPAPPLPPLPPERTSGIGDSRPPSFHPNVSSSHENLEPETETESVVSLRRERPRRRDSTGGHRTGGPSRLERHLAGYESSSTLMTSELESTSLGDSDEEDTMSRFSSSTEQSSASRLLKRHRRRRKQRPPRLERTSSFSSVTDSTMSLNIITVTLNMEKYNFLGISIVGQSNERGDGGIYIGSIMKGGAVAADGRIEPGDMLLQVNDMNFENMSNDDAVRVLRDIVHKPGPIVLTVAKCWDPSPQAYFTLPR

SEQ ID NO: 54384 - protein, 619 aa, Homo sapiens
MSKGILQVHPPICDCPGCRISSPVNRGRLADKRTVALPAARNLKKERTPSFSASDGDSDGSGPTCGRRPGLKQEDGPHIRIMKRRVHTHWDVNISFREASCSQDGNLPTLISSVHRSRHLVMPEHQSRCEFQRGSLEIGLRPAGDLLGKRLGRSPRISSDCFSEKRARSESPQDLLRVRQEVAAAALRGPSGLEAHLPSSTAGQRRKQGLAQHREGAAPAAAPSFSERELPQPPPLLSPQNAPHVALGPHLRPPFLGVPSALCQTPGYGFLPPAQAEMFAWQQELLRKQNLARLELPADLLRQKELESARPQLLAPETALRPNDGAEELQRRGALLVLNHGAAPLLALPPQGPPGSGPPTPSRDSARRAPRKGGPGPASARPSESKEMTGARLWAQDGSEDEPPKDSDGEDPETAAVGCRGPTPGQAPAGGAGAEGKGLFPGSTLPLGFPYAVSPYFHTGAVGGLSMDGEEAPAPEDVTKWTVDDVCSFVGGLSGCGEYTRVFREQGIDGETLPLLTEEHLLTNMGLKLGPALKIRAQVARRLGRVFYVASFPVALPLQPPTLRAPERELGTGEQPLSPTTATSPYGGGHALAGQTSPKQENGTLALLPGAPDPSQPLC

SEQ ID NO: 54385 - protein, 344 aa, Homo sapiens
MRRGCAVLGALGLLAGAGVGSWLLVLYLCPAASQPISGTLQDEEITLSCSEASAEEALLPALPKTVSFRINSEDFLLEAQVRDQPRWLLVCHEGWSPALGLQICWSLGHLRLTHHKGVNLTDIKLNSSQEFAQLSPRLGGFLEEAWQPSFRLARLSSWRVHAGLVSHSAVRPHQGALVERIIPHPLYSAQNHDYDVALLRLQTALNFSDTVGAVCLPAKEQHFPKGSRCWVSGWGHTHPSHTYSSDMLQDTVVPLFSTQLCNSSCVYSGALTPRMLCAGYLDGRADACQGDSGGPLVCPDGDTWRLVGVVSWGRGCAEPNHPGVYAKVAEFLDWIHDTAQDSLL

SEQ ID NO: 54386 - protein, 180 aa, Homo sapiens
MNGEEEFFDAVTGFDSDNSSGEFSEANQKVTGMIDLDTSKNNRIGKTGERPSQENGIQKHRTSLPAPMFSRSDFSVWTILKKCVGLELSKITMPIAFNEPLSFLQRITEYMEHVYLIHRASCQPQPLERMQSVAAFAVSAVASQWERTGKPFNPLLGETYELIREDLGFRFISEQVSHHP

SEQ ID NO: 54387 - protein, 38 aa, Homo sapiens
AAAGSRETPLNQESARKSEPPAPVRRQSYSSTSRDWHA

SEQ ID NO: 54388 - protein, 76 aa, Homo sapiens
MAAGFGRCCRVLRSISRFHWRSQHTKANRQREPGLGFSFEFTEQQKEFQATARKFAREEIIPVAAEYDKTGEFFFF

SEQ ID NO: 54389 - protein, 571 aa, Homo sapiens
MEPAERAGVGEPPEPGGRPEPGPRGFVPQKEIVYNKLLPYAERLDAESDLQLAQIKCNLGRAVQLQELWPGGLFWTRKLSTYIRLYGRKFSKEDHVLFIKLLYELVSIPKLEISMMQGFARLLINLLKKKELLSRADLELPWRPLYDMVERILYSKTEHLGLNWFPNSVENILKTLVKSCRPYFPADATAEMLEEWRPLMCPFDVTMQKAITYFEIFLPTSLPPELHHKGFKLWFDELIGLWVSVQNLPQWEGQLVNLFARLATDNIGYIDWDPYVPKIFTRILRSLNLPVGSSQVLVPRFLTNAYDIGHAVIWITAMMGGPSKLVQKHLAGLFNSITSFYHPSNNGRWLNKLMKLLQRLPNSVVRRLHRERYKKPSWLTPVPDSHKLTDQDVTDFVQCIIQPVLLAMFSKTGSLEAAQALQNLALMRPELVIPPVLERTYPALETLTEPHQLTATLSCVIGVARSLVSGGRWFPEGPTHMLPLLMRALPGVDPNDFSKCMITFQFIATFSTLVPLVDCSSVLQERNDLTEVERELCSATAEFEDFVLQFMDRWPFRRFLIFLLHIYLKQE

SEQ ID NO: 54390 - protein, 230 aa, Homo sapiens
  MOD_RES (1)..(1): Any amino acid
XCRNGLLVIRDDPEGLEFPWGPKPFREVIAGPLLRNNGQSLESSSLEGSHVGVYFSAHWCPPCRSLTRVLVESYRKIKEAGQNFEIIFVSADRSEESFKQYFSEMPWLAVPYTDEARRSRLNRLYGIQDSEDDGESEAAKQLIQPIAEKIIAKYKAKEEEAPLLFFVAGEDDMTDSLRDYTNLPEAAPLLTILDMSARAKYVMDVEEITPAIVEAFVNDFLAEKLKPEPI

SEQ ID NO: 54391 - protein, 609 aa, Homo sapiens
MAADKPADQGAEKHEGTGQSSGITDQEKELSTNAFQAFTVHSAVEEMDGLDDVENSMLYYNQAVILYHLRQYTEAISVGEKLYQFIEPFEEKFAQAVCFLLVDLYILTYQAEKALHLLAVLEKMISQGNNNKNGKNETGNNNNKDGSNHKAESGALIEAAKSKIHQYKVRAYIQMKSLKACKREIKSVMNTAGNSAPSLFLKSNFEYLRGNYRKAVKLLNSSNIAEHPGFMKTGECLRCMFWNNLGCIHFAMSKHNLGIFYFKKALQENDNVCAQLSAGSTDPGKKFSGRPMCTLLTNKRYELLYNCGIQLLHIGRPLAAFECLIEAVQVYHANPRLWLRLAECCIAANKGTSEQETKGLPSKKGIVQSIVGQGYHRKIVLASQSIQNTVYNDGQSSAIPVASMEFAAICLRNALLLLPEEQQDPKQENGAKNSNQLGGNTESSESSETCRCSILACSAYVALALGDNLMALNHADKLLQQPKLSGSLKFLGHLYAAEALISLDRISDAITHLNPENVTDVSLGISSNEQDQGSDKGENEAMESSGKRAPQCYPSSVNSARTVMLFNLGSAYCLRSEYDKARKCLHQAQWLMPPSTLGGRGRRIMRSGV

SEQ ID NO: 54392 - protein, 511 aa, Homo sapiens
MLQVHRTGLGRLGVSLSKGLHHKAVLAVRREDVNAWERRAPLAPKHIKGITNLGYKVLIQPSNRRAIHDKDYVKAGGILQEDISEACLILGVKRPPEEKLMSRKTYAFFSHTIKAQEANMGLLDEILKQEIRLIDYEKMVDHRGVRVVAFGQWAGVAGMINILHGMGLRLLALGHHTPFMHIGMAHNYRNSSQAVQAVRDAGYEISLGLMPKSIGPLTFVFTGTGNVSKGAQAIFNELPCEYVEPHELKEVSQTGDLRKVYGTVLSRHHHLVRKTDAVYDPAEYDKHPERYISRFNTDIAPYTTCLINGIYWEQNTPRLLTRQDAQSLLAPGKFSPAGVEGCPALPHKLVAICDISADTGGSIEFMTECTTIEHPFCMYDADQHIIHDSVEGSGILMCSIDNLPAQLPIEATECFGDMLYPYVEEMILSDATQPLESQNFSPVVRDAVITSNGTLPDKYKYIQTLRESRERAQSLSMGTRRKVLVLGSGYISEPVLEYLSRDGNIEITDLT

SEQ ID NO: 54393 - protein, 139 aa, Homo sapiens
  MOD_RES (1)..(1): Any amino acid
XAGADFVMLGGMLAGHSESGGELIERDGKKYKLFYGMSSEMAMKKYAGGVAEYRASEGKTVEVPFKGDVEHTIRDILGGIRSTCTYVGAAKLKELSRRTTFIRVTQQGSCSNSVLLYLHTQNAQGTHWGGSKEANSLRK

SEQ ID NO: 54394 - protein, 224 aa, Homo sapiens
MHPGLPSTLTCSCSLMSDLPTPQAIEPQAIVQQVPAPSRMQMPQGNPLLLSHTLQELLARDTVQVELIPEKKGLFLKHVEYEVSSQRFKSSVYRRYNDFVVFQEMLLHKFPYRMVPALPPKRMLGADREFIEARRRALKRFVNLVARHPLFSEDVVLKLFLSFSGSDVQNKLKESAQCVGDEFLNCKLATRAKDFLPADIQAQFAISRELIRNIYNSFHKLRDR

SEQ ID NO: 54395 - protein, 185 aa, Homo sapiens
  MOD_RES (1)..(1): Any amino acid
XCRRTTTGDVQVLGLVHTQKLGVIGDKVVVTYSKGYPCGGNKTASSVIELTCTKTVGRPAFKRFDIDSCTYYFSWDSRAACAVKPQEVQMVNGTITNPINGKSFSLGDIYFKLFRASGDMRTNGDNYLYEIQLSSITSSRNPACSGANICQVKPNDQHFSRKVGTSDKTKYYLQGNPWLPTKFHI

SEQ ID NO: 54396 - protein, 73 aa, Homo sapiens
MKKMSNIYESAANTLGIFNSPCLTKVELRVACKGISDRDALSKPDPCVILKMQSHGQWFEVDRTEVIRTCINP

SEQ ID NO: 54397 - protein, 166 aa, Homo sapiens
MQFFGRLVNTFSGVTNLFSNPFRVKEVAVADYTSSDRVREEGQLILFQNTPNRTWDCVLVNPRNSQSGFRCANCAENEEGCTPLHLACRKGDGEILVELVQYCHTQMDVTDYKGETVFHYAVQGDNSQVLQLLGRNAVAGLNQVNNQGLTPLHLACQLGKQEMVRV

SEQ ID NO: 54398 - protein, 176 aa, Homo sapiens
  MOD_RES (1)..(1): Any amino acid
XKEHKVDKNEAFSSEDSLGENKTISPKSTVYPIFSASSVNSKRSLGEEQFSVGSVNFMKQTNIQKNTNTRDTSKKTKDQLIIDAGQKHFGATVCKSCGMIYTASNPEDEMQHVQHHHRFLEGIKYVGWKKERVVAEFWDGKIVLVLPHDPSFAIKKAFRVLSEPIGPESPSSTECP

SEQ ID NO: 54399 - protein, 66 aa, Homo sapiens
MRLFLWNAVLTLFVTSLIGALIPEPEVKIEVLQKPFICHRKTKGGDLMLVHYEGYLEKDGSLFHST

SEQ ID NO: 54400 - protein, 120 aa, Homo sapiens
MFYAHFVLSKRGPLAKIWLAAHWDKKLTKAHVFECNLESSVESIISPKVKMALRTSGHLLLGVVRIYHRKAKYLLADCNEAFIKIKMAFRPGVVDLPEENREAAYNAITLPEEFHDFDQP

SEQ ID NO: 54401 - protein, 459 aa, Homo sapiens
SYLPWFEVFYKLLNILADYTTKRQENQWNELLETLHKLPIPDPGVSVHLSVHSYFTVPDTRELPSIPENRNLTEYFVAVDVNNMLHLYASMLYERRILIICSKLSTLTACIHGSAAMLYPMYWQHVYIPVLPPHLLDYCCAPMPYLIGIHLSLMEKVRNMALDDVVILNVDTNTLETPFDDLQSLPNDVISSLKNRLKKVSTTTGDGVARAFLKAQAAFFGSYRNALKIEPEEPITFCEEAFVSHYRSGAMRQFLQNATQLQLFKQFIDGRLDLLNSGEGFSDVFEEEINMGEYAGSDKLYHQWLSTVRKGSGAILNTVKTKANPAMKTVYKFAKDHAKMGIKEVKNRLKQKDIAENGCAPTPEEQLPKTAPSPLVEAKDPKLREDRRPITVHFGQVRPPRPHVVKRPKSNIAVEGRRTSVPSPEQNTIATPATLHILQKSITHFAAKFPTRGWTSSSH

SEQ ID NO: 54402 - protein, 174 aa, Homo sapiens
MSTLYVSPHPDAFPSLRALIAARYGEAGEGPGWGGAHPRICLQPPPTSRTSFPPPRLPALEQGPGGLWVWGATAVAQLLWPAGLGGPGGSRAAVLVQQWVSYADTELIPAACGATLPALGLRSSAQDPQAVLGALGRALSPLEEWLRLHTYLAGEAPTLADLAAVTALLLPFRY

SEQ ID NO: 54403 - protein, 179 aa, Homo sapiens
MPNEGIPHSSQTQEQDCLQSQPVSNNEEMAIKQESGGDGEVEEYLSFRSVGDGLSTSAVGCASAAPRRGPALLHIDRHQIQAVEPSAQALELQGLGVDVYDQDVLEQGVLQQVDNAIHEASRASQLVDVEKEYRSVLDDLTSCTTSLRQINKIIEQLSPQAATSRDINRKLDSVKRQKY

SEQ ID NO: 54404 - protein, 23 aa, Homo sapiens
RSIYIQSIGKYWGHPEVLEKEET

SEQ ID NO: 54405 - protein, 63 aa, Homo sapiens
MASVLSYESLVHAVAGAVGSVTAMTVFFPLDTARLRLQVDEKRKSKTTHMVLLEIIKEEGLSG

SEQ ID NO: 54406 - protein, 100 aa, Homo sapiens
MSNRVVCREASHAGSWYTASGPQLNAQLEGWLSQVQSTKRPARAIIAPHAGYTYCGSCAAHAYKQVDPSITFSRSALMLNILSLCLFIFSSIRKMPFLII

SEQ ID NO: 54407 - protein, 136 aa, Homo sapiens
MAAASIANIVKSSLGPVGLDKMLVDDIGDVTITNDGATILKLLEVEHPAAKVLCELADLQDKEVGDGTTSVVIIAAELLKNADELVKQKIHPTSVISGYRLACKEAVRYINENLIVNTDELGRDCLINAAKTSMSS

SEQ ID NO: 54408 - protein, 210 aa, Homo sapiens
  MOD_RES (1)..(1): Any amino acid
XSKHIIIHTGEKPYLCDKCGRGFNRVDNLRSHVKTVHQGKAGIKILEPEEGSEVSVVTVDDMVTLATEALAATAVTQLTGPATLPAVVPVGAAVTADETEVLKAEISKAVKQVQEEDPNTHILYACDSCGDKFLDANSLAQHVRIHTAQALVMFQTDADFYQQYGPGGTWPAGQVLQAGELVFRPRDGAEGQPALAETSPTAPECPPPAE

SEQ ID NO: 54409 - protein, 232 aa, Homo sapiens
MPCAQRSWLANLSVVAQLLNFGALCYGRQPQPGPVRFPDRRQEHFIKGLPEYHVVGPVRVDASGHFLSYGLHYPITSSRRKRDLDGSEDWVYYRISHEEKDLFFNLTVNQGFLSNSYIMEKRYGNLSHVKMMASSAPLCHLSGTVLQQGTRVGTAALSACHGLTGFFQLPHGDFFIEPVKKHPLVEGGYHPHIVYRRQKVPETKEPTCGLKGIVTHMSSWVEESVLFFWLFY

SEQ ID NO: 54410 - protein, 191 aa, Homo sapiens
MHLKHLRTLLSPQDGAAKVTCMAWSQNNAKFAVCTVDRVVLLYDEHGERRDKFSTKPADMKYGRKSYMVKGMAFSPDSTKIAIGQTDNIIYVYKIGEDWGDKKVICNKFIQTSAVTCLQWPAEYIIVFGLAEGKVRLANTKTNKSSTIYGTESYVVSLTTNCSGKGILSGHADGTIVRYFFDDEGSGESQP

SEQ ID NO: 54411 - protein, 94 aa, Homo sapiens
  MOD_RES (1)..(1): Any amino acid
XSSKNLASWTQESIAPNPLAKEELNFLARLMGGMEIKKPSGPEPGFRLNLFTTDEEEEQAALTRPEELSYEVINIQATQSLFSNLATIQGGLTG

SEQ ID NO: 54412 - protein, 918 aa, Homo sapiens
MVPWVRTMGQKLKQRLRLDVGREICRQYPLFCFLLLCLSAASLLLNRYIHILMIFWSFVAGVVTFYCSLGPDSLLPNIFFTIKYKPKQLGLQELFPQGHSCAVCGKVKCKRHRPSLLLENYQPWLDLKISSKVDASLSEVLELVLENFVYPWYRDVTDDESFVDELRITLRFFASVLIRRIHKVDIPSIITKKLLKAAMKHIEVIVKARQKVKNTEFLQQAALEEYGPELHVALRSRRDELHYLRKLTELLFPYILPPKATDCRSLTLLIREILSGSVFLPSLDFLADPDTVNHLLIIFIDDSPPEKATEPASPLVPFLQKFAEPRNKKPSVLKLELKQIREQQDLLFRFMNFLKQEGAVHVLQFCLTVEEFNDRILRPELSNDEMLSLHEELQKIYKTYCLDESIDKIRFDPFIVEEIQRIAEGPYIDVVKLQTMRCLFEAYEHVLSLLENVFTPMFCHSDEYFRQLLRGAESPTRNSKLNRGSLSLDDFRNTQKRGESFGISRIGSKIKGVFKSTTMEGAMLPNYGVAEGEDDFIEEGIVVMEDDSPVEAVSTPNTPRNLAAWKISIPYVDFFEDPSSERKEKKERIPVFCIDVERNDRRAGAFPDAQLPSKRIIGPKNYEFLKSKREEFQEYLQKLLQHPELSNSQLLADFLSPNGGETQFLDKILPDVNLGKIIKSVPGKLMKEKGQHLEPFIMNFINSCESPKPKPSRPELTILSPTSENNKKLFNDLFKNNANRAENTERKQNQNYFMEVMTVEGVYDYLMYVGRVVFQVPDWLHHLLMGTRILFKNTLEMYTDYYLQCKLEQLFQEHRLVSLITLLRDAIFCENTEPRSLQDKQKGAKQTFEEMMNYIPDLLVKCIGEETKYESIRLLFDGLQQPVLNKQLTYVLLDIVIQELFPELNKVQKEVTSVTSWM

SEQ ID NO: 54413 - protein, 97 aa, Homo sapiens
  MOD_RES (1)..(1): Any amino acid
XVGASRPDWRELDDELMKEAVLYVDSQEAALKESGDVLLSGAEIFAELGEVIKGVKPAHCEKTTVFKSLGMAVEDTVAAKLIYDSWSSAAPISLNLK

SEQ ID NO: 54414 - protein, 603 aa, Homo sapiens
MGRRSGLLGLRPGPEPVALERVINKVHLKANHVVKRDVDEHLRIKTVYDKSVEELLPEKKNLVKNKLFPQAISYLEKTFQVRRPAGTILLSRQCATNQYLRKENDPHRYCTGECAAHTKCGPVIVPEEHLQQCRVYRGGKWPHGAVGVPDQEGISDADFVLYVGALATERCSHENIISYAAYCQQEANMDRPIAGYANLCPNMISTQPQEFVGMLSTVKHEVIHALGFSAGLFAFYHDKDGNPLTSRFADGLPPFNYSLGLYQWSDKVVRKVERLWDVRDNKIVRHTVYLLVTPRVVEEARKHFDCPVLEGMELENQGGVGTELNHWEKRLLENEAMTGSHTQNRVLSRITLALMEDTGRQMLSPYCDTLRSNPLQLTCRQDQRAVAVCNLQKFPKPLPQEYQYFDELSGIPAEDLPYYGGSVEIADYCPFSQEFSWHLSGEYQRSSDCRILENQPEIFKNYGAEKYGPHSVCLIQKSAFVMEKCERKLSYPDWGSGCYQVSCSPQGLKVWVQDTSYLCSRAGQVLPVSIQMNGWIHDGNLLCPSCWDFCELCPPETDPPATNLTRALPLDLCSCSSSLVVTLWLLLGNLFPLLAGFLLCIWH

SEQ ID NO: 54415 - protein, 185 aa, Homo sapiens
VRVWPRRIEEIACKSKEAEIKRINKELANIRSKFKGDKALDGYSKKKYVCKLLFIFLLGHDIDFGHMEAVNLLSSNRYTEKQIGYLFISVLVNSNSELIRLINNAIKNDLASRNPTFMGLALHCIASVGSREMAEAFAGEIPKVLVAGDTMDSVKQSAALCLLRLYRTSPDLVPMGDWTSRVVHL

SEQ ID NO: 54416 - protein, 308 aa, Homo sapiens
MLTFLWQRDSGQSGSPSHNDPAKNPPGYLEDSFVKSGVFNVSELVRVSRTPITQGTGVNFPIGEIPSQPYYHDMNSGVNLQRSLSSPPSSKRPKTISIDENMEPSPTGDFYPSPSSPAAGSRTWHERDQDMSSPTTMKKPEKPLFSSASPQDSSPRLSTFPQHHHPGIPGVAHSVISTRTPPPPSPLPFPTQAILPPAPSSYFSHPTIRYPPHLNPQDTLKNYVPSYDPSSPQTSQLRICDWTMNQNGRHLYPSTSEDTLGITWQSPGTWASLVPFQVSNRTPILPANVQNYGLNIIGEPFLQAETSN

SEQ ID NO: 54417 - protein, 256 aa, Homo sapiens
MPAAPRGPAQGEAAARTRSRDASTSRRFTPPSTALSPGKMSEALPLGAPDAGAALAGKLRSGDRSMVEVLADHPGELVRTDSPNFLCSVLPTHWRCNKTLPIAFKVVALGDVPDGTLVTVMAGNDENYSAELRNATAAMKNQVARFNDLRFVGRSGRGKSFTLTITVFTNPPQVATYHRAIKITVDGPREPRRHRQKLDDQTKPGSLSFSERLSELEQLRRTAMRVSPHHPAPTPNPRASLNHSTAFNPQPQSQMQ

SEQ ID NO: 54418 - protein, 185 aa, Homo sapiens
MDKDSQGLLDSSLMASGTASRSEDEESLAGQKRASSQALGTIPKRRSSSRFIKRKKFDDELVESSLAKSSTRAKGASGVEPGRCSGSEPSSSEKKKVSKAPSTPVPPSPAPAPGLTKRVKKSKQPLQVTKDLGRWKPADDLLLINAVLQTNDLTSVHLGVKFSCRFTLREVQERWYALLYDPVIS

SEQ ID NO: 54419 - protein, 210 aa, Homo sapiens
  MOD_RES (1)..(1): Any amino acid
XRTRRNIDASQLLDDGNGENYVDYADGMEEIFGSLNSLKLEIEQMKRPLGTQQNPARTCKDLQLCHPDFPDGEYWVDPNQGCSRDSFKVYCNFTAGGSTCVFPDKKSEGSKMARWPKEQPSTWYSQYKRGSLLSYVDAEGNPVGVVQMTFLRLLSASAHQNVTYHCYQSVAWQDAATGSYDKALRFLGSNDEEMSYDNNPYIRALVDGCA

SEQ ID NO: 54420 - protein, 15 aa, Homo sapiens
MEKTLQQMEEVVGSV

SEQ ID NO: 54421 - protein, 183 aa, Homo sapiens
  MOD_RES (1)..(1): Any amino acid
XQQMFEFDTKTSAKEEDAFHFVSYVPVNGRLYELDGLREGPIDLGACNQDDWISAVRPVIEKRIQKYSEGEIRFNLMAIVSDRKMIYEQKIAELQRQLAEEEPMDTDQGNSMLSAIQSEVAKNQMLIEEEVQKLKRYKIENIRRKHNYLPFIMELLKTLAEHQQLIPLVEKFEKHFEKTLLGK

SEQ ID NO: 54422 - protein, 1038 aa, Homo sapiens
  MOD_RES (1)..(1): Any amino acid
XYSAERTAETRAPGAKQLTNHSPPAPRHGPVPAEAPELKAQEPLRKQSRLDPSSAVLMRKAKREKVETMLRNDSLSSDQSESVRPSPPKPHRSKRGGKKRQMSVSSSEEEGVSTPEYTSCEDVELESESVSEKGDLDYYWLDPATWHSRETSPISSHPVTWQPSKEGDRLIGRVILNKRTTMPKDSGALLGLKVVGGKMTDLGRLGAFITKVKKGSLADVVGHLRAGDEVLEWNGKPLPGATNEEVYNIILESKSEPQVEIIVSRPIGDIPRIPESSHPPLESSSSSFESQKMERPSISVISPTSPGALKDAPQVLPGQLSVKLWYDKVGHQLIVNVLQATDLPARVDGRPRNPYVKMYFLPDRSDKSKRRTKTVKKILEPKWNQTFVYSHVHRRDFRERMLEITVWDQPRVQEEESEFLGEILIELETALLDDEPHWYKLQTHDESSLPLPQPSPFMPRRHIHGESSSKKLQRSQRISDSDISDYEVDDGIGVVPPVGYRSSARESKSTTLTVPEQQRTTHHRSRSVSPHRGNDQGKPRSRLPNVPLQRSLDEIHPTRRSRSPTRHHDASRSPVDHRTRDVDSQYLSEQDRMHRQRSPTQSPPADTSFSSRRGRQLPQVPVRSGSIEQASLVVEERTRQMKMKVHRFKQTTGSGSSQELDREQYSKYNIHKDQYRSCDNVSAKSSDSDVSDVSAISRTSSASRLSSTSFMSEQSERPRGRISSFTPKMQGRRMGTSGRSIMKSTSVSGEMYTLEHNDGSQSDTAVGTVGAGGKKRRSSLSAKVVAIVSRRSRSTSQLSQTESGHKKLKSTIQRSTETGMAAEMRKMVRQPSRESTDGSINSYSSEGNLIFPGVRLGADSQFSDFLDGLGPAQLVGRQTLATPAMGDIQIGMEDKKGQLEVEVIRARSLTQKPGSKSTPAPYVKVYLLENGACIAKKKTRIARKTLDPLYQQSLVFDESPQGKVLQVIVWGDYGRMDHKCFMGVAQILLEELDLSSMVIGWYKLFPPSSLVDPTLTPLTRRASQSSLESSTGPPCIRS

SEQ ID NO: 54423 - protein, 175 aa, Homo sapiens
MSQQDAVAALSERLLVAAYKGQTENVVQLINKGARVAVTKHGRTPLHLAANKGHLPVVQILLKAGCDLDVQDDGDQTALHRATVVGNTEIIAALIHEGCALDRQDKDGNTALHEASWHGFSQSAKLLIKAGANVLAKNKAGNTALHLACQNSHSQSTRVLLLAGSRADLKNNAGD

SEQ ID NO: 54424 - protein, 347 aa, Homo sapiens
KTFVLGLLHQGYHSLDRKDVAILDYIHNGLKLIMSCPSVLDLFSLLQVEVLRMVCERPEPQLCARLSDLLTDFVQCIPKGKLSITFCQQLVRTIGHFQCVSTQERELREYVSQVTKVSNLLQNIWKAEPATLLPSLQEVFASISSTDASFEPSVALASLVQHIPLQMITVLIRSLTTDPNVKDASMTQALCRMIDWLSWPLAQHVDTWVIALLKGLAAVQKFTILIDVTLLKIELVFNRLWFPLVRPGALAVLSHMLLSFQHSPEAFHLIVPHVVNLVHSFKNDGLPSSTAFLVQLTELIHCMMYHYSGFPDLYEPILEAIKSCSVAQAEVQWHDHGSLQPLHLELK

SEQ ID NO: 54425 - protein, 273 aa, Homo sapiens
MAEFTSYKETASSRHLRFKLQSLSRRLDELEEATKNLQKAEDELLDLQDKVIQAEGSNSSMLAEIEVLRQRVLRIEGKDEEIKRAEDLCRLMKEKLEEEENLTRELKSEIERLQKRMAELEKLEEAFSRSKNDCTQLCLSLNEERNLTKKISSELEMLRVKVKELESSEDRLDKTEQSLASELEKLKSLTLSFVSERKYLNEKEKENEKLIKELTQKLEQNKKMNRDYTRNASNLERNDLRIEDGISSTLPSKESRRKGGLDYLKQVENETRN

SEQ ID NO: 54426 - protein, 265 aa, Homo sapiens
MSPTISHKDSSRQRRPGNFSHSLDMKSGPLPPGGWDDSHLDSAGREGDREALLGDTGTGDFLKAPQSFRAELSSILLLLFLYVLQGIPLGLAGSIPLILQSKNVSYTDQAFFSFVFWPFSLKLLWAPLVDAVYVKNFGRRKSWLVPTQYILGLFMIYLSTQVDRLLGNTDDRTPDVIALTVAFFLFEFLAATQDIAVDGWALTMLSRENVGYASTCNSVGQTAGYFLGNVLFLALESADFCNKYLRFQPQPRGIVTLSGLVKQLF

SEQ ID NO: 54427 - protein, 185 aa, Homo sapiens
MDSCSLEIANWRNHQETLKYQFDAFYGERSTQQDIYAGSVQPILRHLLEGQNASVLAYGPTGAGKTHTMLGSPEQPGVIPRALMDLLQLTREEGAEGRPWALSVTMSYLEIYQEKVLDLLDPASGDLVIREDCRGNILIPGLSQKPISSFADFERHFLPASRNRTVGATRLNQRSSRSHAVLLVK

SEQ ID NO: 54428 - protein, 157 aa, Homo sapiens
MGPLSAPPCTQHITWKGLLLTAETPKPSISSSNLNPREVMEAVRLICDPETPDASYLWLLNGQNLPMTHRLQLSKTNRTLYLFGVTKYIAGPYECEIRNPVSASRSDPVTLNLLPKLPMPYITINNLNPREKKDVLAFTCEPKSRNYTYIWWLNGQS

SEQ ID NO: 54429 - protein, 70 aa, Homo sapiens
GYGTHLMNHLKEYHIKHNILYFLTYADEYAIGYFKKQGFSKDIKVPKSRYLGYIKDYEGATLMEYHQEAD

SEQ ID NO: 54430 - protein, 164 aa, Homo sapiens
MNSLLIGELSPEQPSFEPTKNKELTDEFRELRATVERMGLMKANHVFFLLYLLHILLLDGAAWLTLWVFGTSFLPFLLCAVLLSAVQAQAGWLQHDFGHLSVFSTSKWNHLLHHFVIGHLKGAPASWWNHMHFQHHAKPNCFRKDPDINMHPFFFALGKILSVE

SEQ ID NO: 54431 - protein, 111 aa, Homo sapiens
MVAGWLTNYSQDSVTFEDVAVDFTQEEWTLLDQTQRNLYRDVMLENYKNLVAVDWESHINTKWSAPQQNFLQGKTSSVVEMRCGLAVLPRLVSNSCSQVILLPQPPEYIYI

SEQ ID NO: 54432 - protein, 48 aa, Homo sapiens
MNNSLENTISFEEYIRVKARSVPQHRMKEFLDSLASKGPEALQEFQQT

SEQ ID NO: 54433 - protein, 575 aa, Homo sapiens
TVCELCFVKLKLLMIAIEYKSANRESRILINPGNHLKIQEGTLGFFIASDAKEVKRPPQLCLPLAAQKRAFFYCKACHDDITDPKRIKKCGCKRLEDEQPSTLSPKKKQRNGGMRNSPNTSPKLMRHDPLLIPGNDQIDNMDSNVKKYDSTGMFHWCAPKEIEKVILTRSEAAMTVLSGHVVVCIFGDVSSALIGLRNLVMPLRASNFHYHELKHIVFVGSIEYLKREWETLHNFPKVSILPGTPLSRADLRAVNINLCDMCVILSANQNNIDDTSLQDKECILASLNIKSMQFDDSIGVLQANSQGFTPPGMDRSSPDNSPVHGMLRQPSITTGVNIPIITELVNDTNVQFLDQDDDDDPDTELYLTQPFACGTAFAVSVLDSLMSATYFNDNILTLIRTLVTGGATPELEALIAEENALRGGYSTPQTLANRDRCRVAQLALLDGPFADLGDGGCYGDLFCKALKTYNMLCFGIYRLRDAHLSTPSQCTKRYVITNPPYEFELVPTDLIFCLMQFDHNAGQSRASLSHSSHSSQSSSKKSSSVHSIPSTANRQNRPKSRESRDKQKYVQEERL

SEQ ID NO: 54434 - protein, 169 aa, Homo sapiens
MRTSYYQPSLTAEYDEDSPGGDFDFFSNLVTKWEAAARLPGDSTRQVVVRSGVVLGRGGGAMGHMLLPFRLGLGGPIGSGHQFFPWIHIGDLAGILTHALEANHVHGVLNGVAPSSATNAEFAQTLGAALGRRAFIPLPSAVVQAVFGRQRAIMLLEGQKVIPQRTLAT

SEQ ID NO: 54435 - protein, 73 aa, Homo sapiens
MTDLYHYITSYVVHGQIIYGPAYSGRETVYSNASLLIQNVTQEDAGSYTLHIIKRGDGTGGVTGYFTVTLYCE

SEQ ID NO: 54436 - protein, 200 aa, Homo sapiens
MDSKYQCVKLNDGHFMPVLGFGTYAPAEVPKSKALEAVKLAIEAGFHHIDSAHVYNNEEQVGLAIRSKIADGSVKREDIFYTSKLWSNSHRPELVRPALERSLKNLQLDYVDLYLIHFPVSVKPGEEVIPKDENGKILFDTVDLCATWEAMEKCKDAGLAKSIGVSNFNHRLLEMILNKPGLKYKPVCNQVECHPYFNQR

SEQ ID NO: 54437 - protein, 31 aa, Homo sapiens
MADEEAGGTERMEISAELPQTPQRLASGLCN

SEQ ID NO: 54438 - protein, 908 aa, Homo sapiens
MAFAECIAPACVMSWLRFWGPWPLLTWQLLSLLVKEAQPLVWVKDPLQLTSNPLGPPEPWSSRSSHLPWESPHAPAPPAAPGDFDYLGPSASSQMSALPQEPTENLAPFLKELDSAGELPLGPEPFLAAHQDLNDKRTPEERLPEVVPLLNRDQNQALVQLPRLKWVQTTDLDRAAGHQADEILVPLDSKVSRPTKFVVSPKNLKKDLAERWSLPEIVGIPHQLSKPQRQKQTLPDDYLSMDTLYPGSLPPELRVNADEPPGPPEQVGLSQFHLEPKSQNPETLEDIQSSSLQEEAPAQLLQLPQEVEPSTQQEAPALPPESSMESLAQTPLNHEVTVQPPGEDQAHYNLPKFTVKPADVEVTMTSEPKNETESTQAQQEAPIQPPEEAEPSSTALRTTDPPPEHPEVTLPPSDKGQAQHSHLTEATVQPLDLELSITTEPTTEVKPSPTTEETSAQPPDPGLAITPEPTTEIGHSTALEKTRAPHPDQVQTLHRSLTEVTGPPTKLESSQDSLVQSETAPEEQKASTSTNICELCTCGDETLSCVGLSPKQRLRQVPVPEPDTYNGIFTTLNFQGNYISYLDGNVWKAYSWTEKLILSENYLTELPKDSFEGLLYLQYLILNRNPLTTVEDPYLFELPALKYLDMGTTHITLTTLKNILTMTVELEKLILPSHMACCLCQFKNSIEAVCKTVKLHCNTACLTNSIHCPEEASVGNPEGAFMKMLQARKQHMSTQLTIESEAPSDSSGINLSGFGGDQLEIQLTEQLRSLIPNEDVRKFMSHVIRTLKMECSETHVQGSCAKLMLRTGLLMKLLSEQQEAKALNVEWDTDQQKTNYINENMEQNEQKEQKSSELMKEVPGDDYKNKLIFAISVTVILIILIIIFCLIEVNSHKRASEKYKDNPSISGA

SEQ ID NO: 54439 - protein, 133 aa, Homo sapiens
  MOD_RES (1)..(1): Any amino acid
XWSVKLNWTGTSKSGVQYKGHVEIPNLSDENSVDEVEISVSLAKDEPDTNLVALMKEEGVKLLREAMGIYISTLKTGHFATITLTFIDKNGETELCMEGRGIPAPEEERTRQGWQRYYFEGIKQTFGYGARLF

SEQ ID NO: 54440 - protein, 70 aa, Homo sapiens
MLLKKHAGKGGGREPRSEDPTPAEQHCARTMPPCAVLAALLSVVAVVSCLYLGVKTNDLQARIAALESAK

SEQ ID NO: 54441 - protein, 53 aa, Homo sapiens
MIEYQIPVSFKDVVVGFTQEEWHRLSPAQRALYRDVMLETYSNLVSVGYEGTK

SEQ ID NO: 54442 - protein, 109 aa, Homo sapiens
MEIRQHEWLSASPHEGFEQMRLKSRPKEPSPSLTRVGANFYSSVKQQDYSASVWLRRKDKLEHSQQKCIVIFALVCCFAILVALIFSAVDIMGEDEDGLSEKNCQNKCR

SEQ ID NO: 54443 - protein, 47 aa, Homo sapiens
MNSLLIGELSPEQPSFEPTKNKELTDEFRELRATVERMGLMKANHVF

SEQ ID NO: 54444 - protein, 400 aa, Homo sapiens
MSQVTFSDVAIDFSHEEWACLDSAQRDLYKDVMVQNYENLVSVAGLSVTKPYVIMLLEDGKEPWMMEKKLSKDWESRWENKELSTKKDIYDEDSPQPVTMEKVVKQSYEFSNSNKNLEYTECDTFRSTFHSKSTLSEPQNNSAEGNSHKYDILKKNLSKKSVIKSERINGGKKLLNSNKSGAAFNQSKSLTLPQTCNREKIYTCSECGKAFGKQSILSRHWRIHTGEKPYECRECGKTFSHGSSLTRHQISHSGEKPYKCIECGKAFSHGSSLTNHQSTHTGEKPYECMNCGKSFSRVSLLIQHLRIHTQEKRYECRICGKAFIHSSSLIHHQKSHTGEKPYECRECGKAFCCSSHLTQHQRIHSMKKKYECNKCLKVFSSFSFLVQHQSIHTEEKPFEV

SEQ ID NO: 54445 - protein, 54 aa, Homo sapiens
ETPTDSETTQKARFEMVLDLMQQLQDLGHPPKELAGEMRRVSPCWPGFKRVSNS

SEQ ID NO: 54446 - protein, 115 aa, Homo sapiens
MQSWSRVYCSLAKRGHFNRISHGLQGLSAVPLRTYADQPIDADVTVIGSGPGGYVAAIKAAQLGFKTVCIEKNETLGGTCLNVGCIPSKALLNNSHYYHMAHGKDFASRGIETLG

SEQ ID NO: 54447 - protein, 376 aa, Homo sapiens
MGKEKTHINIVVIGHVDSGKSTTTGHLIYKCGGIDKRTIEKFEKEAAEMGKGSFKYAWVLDKLKAERERGITIDISLWKFETSKYYVTIIDAPGHRDFIKNMITGTSQADCAVLIVAAGVGEFEAGISKNGQTREHALLAYTLGVKQLIVGVNKMDSTEPPYSQKRYEEIVKEVSTYIKKIGYNPDTVAFVPISGWNGDNMLEPSANMPWFKGWKVTRKDGNASGTTLLEALDCILPPTRPTDKPLRLPLQDVYKIGGIGTVPVGRVETGVLKPGMVVTFAPVNVTTEVKSVEMHHEALSEALPGDNVGFNVKNVSVKDVRRGNVAGDSKNDPPMEAAGFTAQMSSCSVTQAGVQRSWLTATSTSQPQAILPPLSP

SEQ ID NO: 54448 - protein, 94 aa, Homo sapiens
MMKGEFYVIEYAACDATYNEIVTFERLRPVNQNKTVKKNTFFKCTVDVPEDLREACANENAHKDFKKAVGACRIFYHPETTQLMILSASEATVK

SEQ ID NO: 54449 - protein, 439 aa, Homo sapiens
MGGAVVDEGPTGVKAVSVFFKELIQEFGIGYSDTAWISSILLAMLYGTGPLCSVCVNRFGCRPVMLVGGLFASLGMVAASFCRSIIQVYLTTGVITGLGLALNFQPSLIMLNRYFSKRRPMANGLAAAGSPVFLCALSPLGQLLQDRYGWRGGFLILGGLLLNCCVCAALMRPLVVTAQPGSGPPRPSRRLLDLSVFRDRGFVLYAVAASVMVLGLFVPPVFVVSYAKDLGVPDTKAAFLLTILGFIDIFARPAAGFVAGLGKVRPYSVYLFSFSMFFNGLADLAGSTAGDYGGLVVFCIFFGISYGMVGALQFEVLMAIVGTHKFSSAIGLVLLMEAVAVLVGPPSGGKLLDATHVYMYVFILAGAEVLTSSLILLLGNFFCIRKKPKEPQPEVAAAEEEKLHKPPADSGVDLREVEHFLKAEPEKNGEVVHTPETSV

SEQ ID NO: 54450 - protein, 186 aa, Homo sapiens
  MOD_RES (1)..(1): Any amino acid
XWGGAVAAAGAARRVLLLLLLGVLSAGLRPGALATEHYSPLSLLKQELQHRQQQEAPAGGGGCSPQSGDWGDQYSAECGESSFLNFHDSDCEPKGSSPCDSLLSLNTEKILSQAKSIAEQKRFPFATDNDSTNEELAIAYVLIGSGLYDEAIRHFSTMLQEAIESFKEALKQKVDFIDAYKSLGQA

SEQ ID NO: 54451 - protein, 149 aa, Homo sapiens
MKKEGTTLGLTVSGGIDKDGKPRVSNLRQGGIAARSDQLDVGDYIKAVNGINLAKFRHDEIISLLKNVGERVVLEVEYELPPVSVQGSSVIFRTVEVTLHKEGNTFGFVIRGGAHDDRNKSRPVVITCVRPGGPADREGTIKPGDRLLS

SEQ ID NO: 54452 - protein, 203 aa, Homo sapiens
EKTVKRCLLDTFKHTDEEFLKQASSQKPAWKDGSTATCVLAVDNILYIANLGDSRAILCRYNEESQKHAALSLSKEHNPTQYEERMRIQKAGGNVRDGRVLGVLEVSRSIGDGQYKRCGVTSVPDIRRCQLTPNDRFILLACDGLFKVFTPEEAVNFILSCLEVRNLTRGWWLSQLCLSFQRSRSSETPFPPIVGQPLCPFSV

SEQ ID NO: 54453 - protein, 151 aa, Homo sapiens
LLERCKYWPACKNGDECAYHHPISPCKAFPNCKFAEKCLFVHPNCKYDAKCTKPDCPFTHVSRRIPVLSPKPDWRSVLVFILLAVAPPAPPSSSQLCRYFPACKKMECPFYHPKHCRFNTQCTRPDCTFYHPTINVPPRHALKWIRPQTSE

SEQ ID NO: 54454 - protein, 92 aa, Homo sapiens
MASSSTVPLGFHYETKYVVLSYLGLLSQEKLQEQHLSSPQDFGASGFATTNAFGIDKTWSRTFERTAAVWRDIPGGLFGRVHHSARWLGHCV

SEQ ID NO: 54455 - protein, 184 aa, Homo sapiens
MRGQAFVIFKEVSSATNALRSMQGFPFYDKPMRIQYAKTDSDIIAKMKGTFVERDRKREKRKPKSQETPATKKAVQGGGATPVVGAVQGPVPGMPPMTQAPRIMHHMPGQPPYMPPPGMIPPPGLAPGQIPPGAMPPQQLMPGQMPPAQPLSENPPNHILFLTNLPEETNELMLSMLFNQFPGF

SEQ ID NO: 54456 - protein, 866 aa, Homo sapiens
MDVNSSKYPSLLLHSQEEKTSTATSKTQTRLEGEVTPNSLSTSYKTVSLPLSSPNIKLNLTSPKRGQKREEGWKEVVRRSKKLSVPASVVSRIMGRGGCNITAIQDVTGAHIDVDKQKDKNGERMITIRGGTESTRYAVQLINALIQDPAKELEDLIPKNHIRTPASTKSIHANFSSGVGTTAASSKNAFPLGAPTLVTSQATTLSTFQPANKLNKNVPTNVRSSFPVSLPLAYPHPHFALLAAQTMQQIRHPRLPMAQFGGTFSPSPNTWGPFPVRPVNPGNTNSSPKHNNTSRLPNQNGTVLPSESAGLATASCPITVSSVVAASQQLCVTNTRTPSSVRKQLFACVPKTSPPATVISSVTSTCSSLPSVSSAPITSGQAPTTFLPASTSQAQLSSQKMESFSAVPPTKEKVSTQDQPMANLCTPSSTANSCSSSASNTPGAPETHPSSSPTPTSSNTQEEAQPSSVSDLSPMSMPFASNSEPAPLTLTSPRMVAADNQDTSNLPQLAVPAPRVSHRMQPRGSFYSMVPNATIHQDPQSIFVTNPVTLTPPQGPPAAVQLSSAVNIMNGSQMHINPANKSLPPTFGPATLFNHFSSLFDSSQVPANQGWGDGPLSSRVATDASFTVQSAFLGNSVLGHLENMHPDNSKAPGFRPPSQRVSTSPVATSAPPTLGQPKGVSASQDRKIPPPIGTERLARIRQGGSVAQAPAGTSFVAPVGHSGIWSFGVNAVSEGLSGWSQSVMGNHPMHQQLSDPSTFSQHQPMERDDSGMVAPSNIFHQPMASGFVDFSKGLPISMYGGTIIPSHPQLADVPGGPLFNGLHNPDPAWNPMIKVIQNSTECTDAQQIWPGTWAPHIGNMHLKYVN

SEQ ID NO: 54457 - protein, 422 aa, Homo sapiens
MMEEEELEFVEELEAVLQLTPEVQLAIEQVFPSQDPLDRADFNAVEYINTLFPTEQSLANIDEVVNKIRLKIRRLDDNIRTVVRGQTNVGQDGRQALEEAQKAIQQLFGKIKDIKDKAEKSEQMVKEITRDIKQLDHAKRHLTTSITTLNHLHMLAGGVDSLEAMTRRRQYGEVANLLQGVMNVLEHFHKYMGIPQIRQLSERVKAAQTELGQQILADFEEAFPSQGTKRPGGPSNVLRDACLVANILDPRIKQEIIKKFIKQHLSEYLVLFQENQDVAWLDKIDRRYAWIKRQLVDYEEKYGRMFPREWCMAERIAVEFCHVTRAELAKIMRTRAKEIEVKLLLFAIQRTTNFEGFLAKRFSGCTLTDGTLKKLESPPPSTNPFLEDEPTPEMEELATEKGDLDQVSLVCVTTGNLPNVRF

SEQ ID NO: 54458 - protein, 32 aa, Homo sapiens
  MOD_RES (1)..(1): Any amino acid
XWRGRGKRPAAEDHTQATCSRPQQGTEQNGLI

SEQ ID NO: 54459 - protein, 161 aa, Homo sapiens [sequence omitted]

SEQ ID NO: 54460 - protein, 134 aa, Homo sapiens
MASRGARQRLKGSGASSGDTAPAADKLRELLGSREAGGAEHRTELSGNKAGQVWAPEGSTAFKCLLSARLCAALLSNISDCDETFNYWEPVDTLPHLWGRVSDLGIFPSICHSLLCLPVASCLASCISCKNSTN

SEQ ID NO: 54461 - protein, 241 aa, Homo sapiens
RLRFLRTNTLLGHLMGKALRDPTVTRRYYYSIKDISIGGRCVCHGHADACDAKDPTDPFSSPNLSGHNRQLPCCPSPDLHSSQAGTKAQDGDGRVGAANTPHLLCPVCLLSGAAEGTAEHPPPGSPSQDGQQPWCWHRHIPGPHPESSVRLQCTCQHNTCGGTCDRCCPGFNQQPWKPATANSANECQSCNCYGHATDCYYDPEVDRRRASQSLDGTYQGGGVCIDCQHHTTGVNCERCLP

SEQ ID NO: 54462 - protein, 48 aa, Homo sapiens
MAKTYDYLFKLLLIGDSGVGKTCLLFRFSEDAFNTTFISTIVRPHIEE

SEQ ID NO: 54463 - protein, 369 aa, Homo sapiens
MNTNSKEVLSLGVQVPEAWEELLTMKVEAKSHLQWQESRLKRSNPLAREIFRRHFRQLCYQETPGPREALTRLQELCYQWLRPHVSTKEQILDLLVLEQFLSILPKELQGWVREHCPESGEEAVILLEDLERELDEPQHEMVAHRHRQEVLCKEMVPLAEQTPLTLQSQPKEPQLTCDSAQKCHSIGETDTFLFSKPVVIPQLKGGGETWPNNRGVLRDEVTKTEDRELVLRKDCPKIVEPHGKMFNEQTWEVSQQDPSHGEVGEHKDRIERQWGNLLGEGQHKCDECGKSFTQSSGLIRHQRIHTGERPYECNECGKAFSRSSGLFNHRGIHNIQKRYHCKECGKVFSQSAGLIQHQRIHKGEKPYQC

SEQ ID NO: 54464 - protein, 96 aa, Homo sapiens
MDFFASGLPLVTEETPSGEAGSEEDDEVVAMIKELLDTRIRPTVQEDGGDVIYKGFEDGIVQLKLQGSCTSCPSSIITLKNGIQNMLQFYIPEVEG

SEQ ID NO: 54465 - protein, 1508 aa, Homo sapiens
MFSALKYHAIDYLYENVVRKKFYRDALLLRIPSCLYQDESYHVAVTDNKFRRPWTRVSAVSVPGMTDTSVLDQWKASFFVEDFLEKKTITRMVTQINCEFEEVVPSSNPDSQIEVEEVSLYTHMDYNEVFTPVSCLEKCSALQNQNQDLFIDDKGILFVSSRKHLPTLPTLLSRLKLFLVKDPLLDFKGQIFTEANFSRECFSLQETLEAFVKEDFCMDKVNFCQEKLEDTICLNEPSSFLIEYEFLIPPSLKPEIDIPSLSELKELLNPVPEIINYVDEKEKLFERDLTNKHGIEDIGDIKFSSTEILTIQSQSEPEECSKPGELEMPLTPLFLTCQHSSVNSLRTELQTFPLSPVCKINLLTAEESANEYYMMWQLERCRSPLNPFLLTVPRIQEPHSQYSVTDLKKIFSVKEESLVINLEKAEWWKQAGLNLKMMETLEHLNTYLCHDNLSSNDTKIEIFLPTKVLQLESCLEHKSHSSPIALIDEKSTNAHLSLPQKSPSLAKEVPDLCFSDDYFSDKGAAKEEKPKNDQEPVNRIIQKKENNDHFELDCTGPSIKSPSSSIIKKASFEHGKKQENDLDLLSDFIMLRNKYKTCTSKTEVTNSDEKHDKEACSLTLQEESPIVHINKTLEEINQERGTDSVIEIQASDSQCQAFCLLEAAASPILKNLVSLCTLPTANWKFATVIFDQTRFLLKEQEKVVSDAVRQGTIDEREMTFKHAALLHLLVTIRDVLLTCSLDTALGYLSKAKDIYNSILGPYLGDIWRQLEIVQFIRGKKPETNYKIQELQCQILSWMQSQQQIKVLIIIRMDSDGEKHFLIKILNKIEGLTLTVLHSNERKDFLESEGVLRGTSSCVVVHNQYIGADFPWSNFSFVVEYNYVEDSCWTKHCKELNIPYMAFKVILPDTVLERSTLLDRFGGFLLEIQIPYVFFASEGLLNTPDILQLLESNYNISLVERGCSESLKLFGSSECYVVVTIDEHTAIILQDLEELNYEKASDNIIMRLMALSLQYRYCWIILYTKETLNSEYLLTEKTLHHLALIYAALVSFGLNSEELDVKLIIAPGVEATALIIRQIADHSLMTSKRDPHEWLDKSWLKVSPSEEEMYLLDFPCINPLVAQLMLNKGPSLHWILLATLCQLQELLPEVPEKVLKHFCSITSLFKIGSSSITKSPQISSPQENRNQISTLSSQSSASDLDSVIQEHNEYYQYLGLGETVQEDKTTILNDNSSIMELKEISSFLPPVTSYNQTSYWKDSSCKSNIGQNTPFLINIESRRPAYNSFLNHSDSESDVFSLGLTQMNCETIKSPTDTQKRVSVVPRFINSQKRRTHEAKGFINKDVSDPIFSLEGTQSPLHWNFKKNIWEQENHPFNLQYGAQQTACNKLYSQKGNLFTDQQKCLSDESEGLTCESSKDETFWRELPSVPSLDLFRASDSNANQKEFNSLYFYQRAGKSLGQKRHHESSFNSGDKESLTGFMCSQLPQFKKRRLAYEKVPGRVDGQTRLRFF

SEQ ID NO: 54466 - protein, 51 aa, Homo sapiens
MLREDSMMEYLKIAQDLEMYGVNYFEIKNKKGTELWLGVDALGLNIYEHDD

SEQ ID NO: 54467 - protein, 20 aa, Homo sapiens
MTFGQSKLYRSEDYGKNFKD

SEQ ID NO: 54468 - protein, 137 aa, Homo sapiens
MFIWTSGRTSSSYRHDEKRNIYQKIRDHDLLDKRKTVTALKAGEDRAILLGLAMMVCSIMMYFLLGITLLRSYMQSVWTEESQCTLLNASITETFNCSFSCGPDCWKLSQYPCLQVYVNLTSSGEKLLLYHTEETIK

SEQ ID NO: 54469 - protein, 2969 aa, Homo sapiens
MWDPRAARMDLTAYAELLKESGNQVLKNGNFSLAIRKYDEAIQILLQLYQWGVPPRDLAVLLCNKSNAFFSLGKWNEAFVAAKECLQWDPTYVKGYYRAGYSLLRLHQPYEAARMFFEGLRLVQRSQDQAPVADFLVGVFTTMSSDSIVLQSFLPCFDHIFTTGFPTEVWQSVIEKLAKKGLWHSFLLLSAKKDRLPRNIHVPELSLKSLFEKYVFIGLYEKMEQVPKLVQWLISIGASVETIGPYPLHALMRLCIQARENHLFRWLMDHKPEWKGRINQKDGDGCTVLHVVAAHSPGYLVKRQTEDVQMLLRFGADPTLLDRQSRSVVDVLKRNKNFKAIEKINSHLEKLATCSKDLSGFSNGDGPTSENDIFRKVLEQLVKYMNSGNRLLHKNFLKQEVVQRFLRLLSTLQEIPPDLVCDINQDCATTVFKFLLEKQRWPEVLLLLTRKVSGEPPLGDCLIKDCNFSDLDICTIIPHLSTWDQRKKQLLGCLIDSGALPDGLQESQERPVVTCLKHEDFELAFLLLTKGADPRAISLTEGDTPLHAALHIFLEIKADIGFSFLSHLLDLFWSNPTEFDYLNPNVQDSNGNTLMHILFQKGMLKRVKKLLDLLVKFDINFNLKNKEGKDARHRIKKNDSLLLAWNKALMENRRRSRQDSAAHLGKLSKSTAPGHTSQLKSQGSFKSVPCGATARTLPEGSAVPDSWETLPGTQVTRKEPGALRPCSLRDCLMQDITVLIQQVEVDPSFPEDCLQSSEPLEAGAGKEGKKDDKPTLGAGAPDCSEVGEGHAQVGLGALQLVPDDNRGKEGNDDQDDWSTQEIEACLQDFDNMTWEIECTSEMLKKLSSKVMTKVIKKKIILAIQQLGNGEWTQGLQKRLKHLKGSIQLFEAKLDKGARMLWELAIDFSPRCSENPEKIIATEQNTCAMEKSGRIYTEIIRIWDIVLDHCKLADSIKAICNAYNRGLSCVLRKKLKGINKGQVSANMKIQKRIPRCYVEDTEAEKGREHVNPEYFPPASAVETEYNIMKFHSFSTNMAFNILNDTTATVEYPFRVGELEYAVIDLNPRPLEPIILIGRSGTGKTTCCLYRLWKKFHVYWEKAEQAGSPLLAKQVWLKRRLEVEPGKESPGGEEEEEEEDEEEEDSIEVETVESIDEQEYEACAGGAGVEPAGDGQAAEVCAPEHPHQLEHLHQIFVTKNHVLCQEVQRNFIELSKSTKATSHYKPLDPNIHKLQDLRDENFPLFVTSKQLLLLLDASLPKPFFLRNEDGSLKRTIIGWSAQEESTIPSWQEDEEEAEVDGDYSEEDKAVEMRTGDSDPRVYVTFEVFKNEIWPKMTKGRTAYNPALIWKEIKSFLKGSFEALSCPHGRLTEEVYKKLGRKRCPNFKEDRSEIYSLFSLYQQIRSQKGYFDEEDVLYNISRRLSKLRVLPWSIHELYGDEIQDFTQAELALLMKCINDPNSMFLTGDTAQSIMKGVAFRFSDLRSLFHYASRNTIDKQCAVRKPKKIHQLYQNYRSHSGILNLASGVVDLLQFYFPESFDRLPRDSGLFDGPKPTVLESCSVSDLAILLRGNKRKTQPIEFGAHQVILVANETAKEKIPEELGLALVLTIYEAKGLEFDDVLLYNFFTDSEAYKEWKIISSFTPTSTDSREENRPLVEVPLDKPGSSQGRSLMVNPEMYKLLNGELKQLYTAITRARVNLWIFDENREKRAPAFKYFIRRDFVQVVKTDENKDFDDSMFVKTSTPAEWIAQGDYYAKHQCWKVAAKCYQKGGAFEKEKLALAHDTALSMKSKKVSPKEKQLEYLELAKTYLECKEPTLSLKCLSYAKEFQLSAQLCERLGKIRDAAYFYKRSQCYKDAFRCFEQIQEFDLALKMYCQEELFEEAAIAVEKYEEMLKTKTLPISKLSYSASQFYLEAAAKYLSANKMKEMMAVLSKLDIEDQLVFLKSRKRLAEAADLLNREGRREEAALLMKQHGCLLEAARLTADKDFQASCLLGAARLNVARDSDIEHTKDILREALDICYQTGQLSGIAEAHFLQGVILRDFQKLRDAFFKFDTLNHSAGVVEALYEAASQCEAEPEKILGLAPGGLEILLSLVRALKRVTNNAEKEMVKSCFEFFGISQVDAKYCQIAQNDPGPILRIIFDLDLNLREKKTKDHFLIMTDQVKLALNKHLLGRLCQITRSLLGKTYRGVCMRFIVGLKCEDENCEHFHRPLRRCEAKCLVQSKMNLVAINGLLLEAKKVFPKILAEELKEIDYILSTDMYGLCKSILDVLFPKHFHQRVLSENPMACKEILKPNYKSFRFYRFALKEYIHFLFENESARNRRESTDLWLSAMQAFLLSSNYPEEFEKLLHQEEDNYNRELKALESEKDERGRGRGSRIKGIEGKFGMLAPNRDDENMDKTHLCFIRLLENCIDQFYVYRNPEDYKRLFFRFMNVLIKRCKEPLIPSIGNTVALLEFQFIHCGVVLARLWKNVILCLPKSYIALLHYWEFLFSKKDKELGDVFSIIQEYKPKDVTRAIQDFRFHLSYLAKVLCGYENVNFNVLLDAFSEIDYVVSGEAERTLVLCLVMLVNAEEILQPYCKPLLYRHFREIESRLQLMSMDCPGQVPERLLKVVKRVLVAVNVKSVAEALQDLLFERDEEYLMDCDWRWDPVHTKGSIVRGLYYEEVRLNRLLCLDPVDYFAEPECEFGQDEMDELALEDRDHVLATILSQKQRKASIQRKLRRACLVVSLCISWRRRVGTQMERVREEAREPRAGNFKKADVDRTQCDLCGVKFTRGPENYFSPSKAFEGAASEVAVLSRAELEREECQERNSESYEQHIHLEHHQRQQVAYQKYSEFFHEKVDPAIDEGKLVVQDIEQSVWIHSHVGSKEHSHMLQKVQEHIKRVSDMVEDLYRRKAWAGAEEAMTRLVNILILSVRDARDWLMKTETRLKKEGIVQEDDYENEVEDFGELRPRRRSRKCGKQRKY

SEQ ID NO: 54470 - protein, 40 aa, Homo sapiens
MGCTLSAEDKAAVERSKMIDRNLREDGEKAAREVKLLLLG

SEQ ID NO: 54471 - protein, 1528 aa, Homo sapiens
MIKTIYKTPGMIKDEQEIVQKRTFTKWINSHLAKRKPPMVVDDLFEDMKDGVKLLALLEVLSGQKLPCEQGRRMKRIHAVANIGTALKFLEGRKSMHRGSPIKLVNINSTDIADGRPSIVLGLMWTIILYFQIEELTSNLPQLQSLSSSASSVDSIVSSETPSPPSKRKVTTKIQGNAKKALLKWVQYTAGKQTGIEVKDFGKSWRSGVAFHSVIHAIRPELVDLETVKGRSNRENLEDAFTIAETELGIPRLLDPEDVDVDKPDEKSIMTYVAQFLKHYPDIHNASTDGQEDDEILPGFPSFANSVQNFKREDRVIFKEMKVWIEQFERDLTRAQMVESNLQDKYQSFKHFRVQYEMKRKQIEHLIQPLHRDGKLSLDQALVKQSWDRVTSRLFDWHIQLDKSLPAPLGTIGAWLYRAEVALREEITVQQVHEETANTIQRKLEQHKDLLQNTDAHKRAFHEIYRTRSVNGIPVPPDQLEDMAERFHFVSSTSELHLMKMEFLELKYRLLSLLVLAESKLKSWIIKYGRRESVEQLLQNYVSFIENSKFFEQYEVTYQILKQTAEMYVKADGSVEEAENVMKFMNETTAQWRNLSVEVRSVRSMLEEVISNWDRYGNTVASLQAWLEDAEKMLNQSENAKKDFFRNLPHWIQQHTAMNDAGNFLIETCDEMVSRDLKQQLLLLNGRWRELFMEVKQYAQADEMDRMKKEYTDCVVTLSAFATEAHKKLSEPLEVSFMNVKLLIQDLEDIEQRVPVMDAQYKIITKTAHLITKESPQEEGKEMFATMSKLKEQLTKVKECYSPLLYESQQLLIPLEELEKQMTSFYDSLGKINEIITVLEREAQSSALFKQKHQELLACQENCKKTLTLIEKGSQSVQKFVTLSNVLKHFDQTRLQRQIADIHVAFQSMVKKTGDWKKHVETNSRLMKKFEESRAELEKVLRIAQEGLEEKGDPEELLRRHTEFFSQLDQRVLNAFLKACDELTDILPEQEQQGLQEAVRKLHKQWKDLQGEAPYHLLHLKIDVEKNRFLASVEECRTELDRETKLMPQEGSEKIIKEHRVFFSDKGPHHLCEKRLQLIEELCVKLPVRDPVRDTPGTCHVTLKELRAAIDSTYRKLMEDPDKWKDYTSRFSEFSSWISTNETQLKGIKGEAIDTANHGEVKRAVEEIRNGVTKRGETLSWLKSRLKVLTEVSSENEAQKQGDELAKLSSSFKALVTLLSEVEKMLSNFGDCVQYKEIVKNSLEELISGSKEVQEQAEKILDTENLFEAQQLLLHHQQKTKRISAKKRDVQQQIAQAQQGEGGLPDRGHEELRKLESTLDGLERSRERQERRIQVTLRKWERFETNKETVVRYLFQTGSSHERFLSFSSLESLSSELEQTKEFSKRTESIAVQAENLVKEASEIPLGPQNKQLLQQQAKSIKEQVKKLEDTLEEDIKTMEMVKTKWDHFGSNFETLSVWITEKEKELNALETSSSAMDMQISQIKVTIQEIESKLSSIVGLEEEAQSFAQFVTTGESARIKAKLTQIR

SEQ ID NO: 54472 - protein, 126 aa, Homo sapiens
MEERKPAHVLRSFKYAAFMNEELRNLSLSGHVGFDSLPDQLVNKSTSQGFCFNILCVGETGIGKSTLMDTLFNTKFESDPATHNEPGVRLKARSYELQESNVRLKLTIVDTVGFGDQINKDDSYKP

SEQ ID NO: 54473 - protein, 48 aa, Homo sapiens
MKKVHLRPDEDLTEFHSYCLGWSAMARSRLTATSASWLQAILLRQPPE

SEQ ID NO: 54474 - protein, 60 aa, Homo sapiens
MNLDGSAQDPEKREYSSVCVGREDDIKKSERMTAVVHDREVVIFYHKGEYHAMDIRCYRF

SEQ ID NO: 54475 - protein, 211 aa, Homo sapiens
MYVMQLAKYQSHSKSCPTVFPPTPVLCLPNQVLQRLEQRRQQASEREAPSIEQRLQEVRESIRRAQVSQVKGAARLALLQGAGLDVERWLKPAMTQAQDEVEQERRLSEARLSQRDLSPTAEDAELSDFEECEETGELFEEPAPQALATRALPCPAHVVFRYQAGREDELTITEGEWLEVIEEGDADEWVKARNQHGEVGFVPERYLNFPD

SEQ ID NO: 54476 - protein, 60 aa, Homo sapiens
MEVAGSPFPFLQSVACLLTLAHIPAVGNILQHRRRGAGPTLGHLDSKPSSKSNMIRGRNS

SEQ ID NO: 54477 - protein, 53 aa, Homo sapiens
  MOD_RES (1)..(1): Any amino acid
XLTQMEFAAHTWTGQSILTEDNFDFQEEIPSDILKPPHQNHWSTCGLGTLLIT

SEQ ID NO: 54478 - protein, 365 aa, Homo sapiens
LDPPAVVAESVSSLTIADAFIAAGESSAPTPPRPALPRRFICSFPDCSANYSKAWKLDAHLCKHTGERPFVCDYEGCGKAFIRDYHLSRHILTHTGEKPFVCAANGCDQKFNTKSNLKKHFERKHENQQKQYICSFEDCKKTFKKHQQLKIHQCQHTNEPLFKCTQEGCGKHFASPSKLKRHAKAHEGYVCQKGCSFVAKTWTELLKHVRETHKEEILCEVCRKTFKRKDYLKQHMKTHAPERDVCRCPREGCGRTYTTVFNLQSHILSFHEESRPFVCEHAGCGKTFAMKQSLTRHAVVHDPDKKKMKLKVKKSREKRSLASHLSGYIPPKRKQGQGLSLCQNGESPNCVEDKMLSTVAVLTLG

SEQ ID NO: 54479 - protein, 32 aa, Homo sapiens
MQKCLVTEAQTLLRLSGVQRVESVFFGGGTPS

SEQ ID NO: 54480 - protein, 134 aa, Homo sapiens
MDAVDATMEKLRAQCLSRGASGIQGLARFFRQLDRDGSRSLDADEFRQGLAKLGLVLDQAEAEGVCRKWDRNGSGTLDLEEFLRALRPPMSQAREAVIAAAFAKLDRSGDGVVTVDDLRGVYSGRAHPKVRSGE

SEQ ID NO: 54481 - protein, 59 aa, Homo sapiens
MERNDIINFKALEKELQAALTADEKYKRENAAKLRAVEQRVASYEEFRGIVLASHLKPL

SEQ ID NO: 54482 - protein, 605 aa, Homo sapiens
YFCFRALKDNVTHAHLQQIRRNLAHQQHGVTLLHRFWNLWRSQIEQKKERELLPLLHAAWDHYRIALLCKCIELWLQYTQKRRYKQLLQARADGHFQQRALPAAFHTWNRLWRWRHQENVLSARATRFHRETLEKQVFSLWRQKMFQHRENRLAERMAILHAERQLLYRSWFMWHQQAAARHQEQEWQTVACAHHRHGRLKKAFCLWRESAQGLRTERTGRVRAAEFHMAQLLRWAWSQWRETYQGRVRSILREVAARESQHNRQLLRGALRRWKENTMARVDEAKKTFQASTHYRRTICSKVLVQWREAVSVQMYYRQQEDCAIWEAQKVLDRGCLRTWFQRWWDCSRRSAQQRLQLERAVQHHHRQLLLEGLARWKTHHLQCVRKRLLHRQSTQLLAQRLSRTCFRQWRQQLAARRQEQRATVRALWFWAFSLQAKVWATWLAFVLERRRKKARLQWALQAYQGQLLQEGATRLLRFAASMKASRQQLQAQQQVQAAHSLHRAVRRCATLWKQKVLGRGGKPQPLAAIAPSRKVTFEGPLLNRIAAGAGDGTLETKRPQASRPLGALGRLAAEEPHALELNTAHSARKQPRRPHFLLEPAQSQ

SEQ ID NO: 54483 - protein, 209 aa, Homo sapiens
MAGEQKPSSNLLEQFILLAKGTSGSALTALISQVLEAPGVYVFGELLELANVQECIPYSVLLKDLEMRNLRELEDLIIEAVYTDIIQGKLDQRNQLLEVDFCIGRDIRKKDINNIVKTLHEWCDGCEAVLLGIEQQVLRANQYKENHNRTQQQVEAEVTNIKKTLKATASSSAQEMEQQLAERECPPHAEQRQPTKKMSKVKGLVSSRH

SEQ ID NO: 54484 - protein, 380 aa, Homo sapiens
VDKSCPRGIIRVEESFRSGAKPPLRARDFMATNPEHLEILKKMGVSLIHLKDGRVQLVQHAIQAASSIDAEDGLRFMQEMIELSSQQQKEQQLPPRAVQIVSHPFFGRVVLTAGPAQFGLDLSKHKETRGFVASSKPSNGCSELTNPEAVMGKIALIQRGQCMFAEKARNIQNAGAIGGIVIDDNEGSSSDTAPLFQMAGDGKDTDDIKIPMLFLFSKEGSIILDAIREYEEVEVLLSDKAKDRDPEMENEEQPSSENDSQNQSGEQISSSSQEVDLVDQESSEENSLNSHPESLSLADMDNAASISPSEQTSNPTENHETTNLNGECTDLDNQLQEQSETEEDSNPNVSWGKKVQPIDSILADWNEDIEAFEMMEKDEL

SEQ ID NO: 54485 - protein, 475 aa, Homo sapiens
MELENIVANTVLLKAREGGGGNRKGKSKKWRQMLQFPHISQCEELRLSLERDYHSLCERQPIGRLLFREFCATRPELSRCVAFLDGVAEYEVTPDDKRKACGRQLTQNFLSHTGPDLIPEVPRQLVTNCTQRLEQGPCKDLFQELTRLTHEYLSVAPFADYLDSIYFNRFLQWKWLERQPVTKNTFRQYRVLGKGGFGEVCACQVRATGKMYACKKLEKKRIKKRKGEAMALNEKQILEKVNSRFVVSLAYAYETKDALCLVLTLMNGGDLKFHIYHMGQAGFPEARAVFYAAEICCGLEDLHRERIVYRDLKPENILLDDHGHIRISDLGLAVHVPEGQTIKGRVGTVGYMAPEVVKNERYTFSPDWWALGCLLYEMIAGQSPFQQRKKKIKREEVERLVKEVPEEYSERFSPQARSLCSQLLCKDPAERLGCRGGSAREVKEHPLFKKLNFKRLGAGMLEPPFKPDVSAAHSC

SEQ ID NO: 54486 - protein, 507 aa, Homo sapiens
MAELQMLLEEEIPGGRRALFDSYTNLERVADYCENNYIQSADKQRALEETKAYTTQSLASVAYLINTLANNVLQMLDIQASQLRRMESSINHISQTVDIHKEKVARREIGILTTNKNTSRTHKIIAPANLERPVRYIRKPIDYTILDDIGHGVKVSTQNMKMGGLPRTTPPTQKPPSPPMSGKGTLGRHSPYRTLEPVRPPVVPNDYVPSPTRNMAPSQQSPVRTASVNQRNRTYSSSGSSGGSHPSSRSSSRENSGSGSVGVPIAVPTPSPPSVFPAPAGSAGTPPLPATSASAPAPLVPATVPSSTAPDAAAGGAQTLADGFTSPTPPVVSSTPPTGHPVQFYSMNRPASRHTPPTIGGSLPYRRPPSITSQTSLQNQMNGGPFYSQNPVSDTPPPPPPVEEPVFDESPPPPPPPEDYEEEEAAVVEYSDPYAEEDPPWAPRSYLEKVVAIYDYTKDKEDELSFQEGAIIYVIKKNDDGWYEGVMNGVTGLFPGNYVESIMHYSE

SEQ ID NO: 54487 - protein, 1385 aa, Homo sapiens
MQDYNKDDMSYRRISAVEPKTALPFNRFLPNKSRQPSYVPAPLRKKKPDKHEDNRRSWASPVYTEADGTFSSNQRRIWGTNVENWPTVQGTSKSSCYLEEEKAKTRSIPNIVKDDLYVRKLSPVMPNPGNAFDQFLPKCWTPEDVNWKRIKRETYKPWYKEFQGFSQFLLLQALQTYSDDILSSETHTKIDPTSGPRLITRRKNLSYAPGYRRDDLEMAALDPDLENDDFFVRKTGAFHANPYVLRAFEDFRKFSEQDDSVERDIILQCREGELVLPDLEKDDMIVRRIPAQKKEVPLSGAPDRYHPVPFPEPWTLPPEIQAKFLCVLERTCPSKEKSNSCRILVPSYRQKKDDMLTRKIQSWKLGTTVPPISFTPGPCSEADLKRWEAIREASRLRHKKRLMVERLFQKIYGENGSKSMSDVSAEDVQNLRQLRYEEMQKIKSQLKEQDQKWQDDLAKWKDRRKSYTSDLQKKKEEREEIEKQALEKSKRSSKTFKEMLQDRESQNQKSTVPSRRRMYSFDDVLEEGKRPPTMTVSEASYQSERVEEKGATYPSEIPKEDSTTFAKREDRVTTEIQLPSQSPVEEQSPASLSSLRSRSTQMESTRVSASLPRSYRKTDTVRLTSVVTPRPFGSQTRGISSLPRSYTMDDAWKYNGDVEDIKRTPNNVVSTPAPSPDASQLASSLSSQKEVAATEEDVTRLPSPTSPFSSLSQDQAATSKATLSSTSGLDLMSESGEGEISPQREVSRSQDQFSDMRISINQTPGKSLDFGFTIKWDIPGIFVASVEAGSPAEFSQLQVDDEIIAINNTKFSYNDSKEWEEAMAKAQETGHLVMDVRRYGKAGSPETKWIDATSGIYNSEKSSNLSVTTDFSESLQSSNIESKEINGIHDESNAFESKASESISLKNLKRRSQFFEQGSSDSVVPDLPVPTISAPSRWVWDQEEERKRQERWQKEQDRLLQEKYQREQEKLREEWQRAKQEAERENSKYLDEELMVLSSNSMSLTTREPSLATWEATWSEGSKSSDREGTRAGEEERRQPQEEVVHEDQGKKPQDQLVIERERKWEQQLQEEQEQKRLQAEAEEQKRPAEEQKRQAEIERETSVRIYQYRRPVDSYDIPKTEEASSGFLPGDRNKSRSTTELDDYSTNKNGNNKYLDQIGNMTSSQRRSKKEQVPSGAELERQQILQEMRKRTPLHNDNSWIRQRSASVNKEPVSLPGIMRRGESLDNLDSPRSNSWRQPPWLNQPTGFYASSSVQDFSRPPPQLVSTSNRAYMRNPSSSVPPPSAGSVKTSTTGVATTQSPTPRSHSPSASQSGSQLRNSVLPVSVTSEALPQELKSGSETTNCTATTAISDSNLDGQPPCDVSLHTKALLQIEEEVVAAHVDL

SEQ ID NO: 54488 - protein, 204 aa, Homo sapiens
MKVNVWEIKPPDFSYKLYTSLRIPERSSKPIKEEKRRKKISFPETMLHLPSIRNHPKEVTAPKFITTFPHLDLQKAKLMFVKSGQYPRGVYVNPKPHDFRQYQPGLPNFETTYEKDPFGLKFKSQHLSTVHGYQLPKDDKQKTSTERFITHKHCECTWDSKLILTKAPWPVRSASYTRHRRQRDAYSAFMDRVEEKFTKICKSR

SEQ ID NO: 54489 - protein, 35 aa, Homo sapiens
MRQQPGPSEHIERRVSNAGGPPAPPAGGPPPPPGP

SEQ ID NO: 54490 - protein, 24 aa, Homo sapiens
MNSTLFSQVENHSVHSNFSEKNAQ

SEQ ID NO: 54491 - protein, 199 aa, Homo sapiens
MLPPQKKPWESMAKGLVLGALFTSFLLLVYSYAVPPLHAGLASTTPEAAASCSPPALEPEAVIRANGSAGECQPRRNIVFLKTHKTASSTLLNILFRFGQKHRLKFAFPNGRNDFDYPTFFARSLVQDYRPGACFNIICNHMRFHYDEVRGLVPTNAIFITVLRDPARLFESSFHYFGPVVPLTWKLSAGDKLTEFLQD

SEQ ID NO: 54492 - protein, 694 aa, Homo sapiens
MGHPPLEFSDCYLDSPDFRERLKCYEQELERTNKFIKDVIKDGNALISAMRNYSSAVQKFSQTLQSFQFDFIGDTLTDDEINIAESFKEFAELLNEVENERMMMVHNASDLLIKPLENFRKEQIGFTKERKKKFEKDGERFYSLLDRHLHLSSKKKESQLQEADLQVDKERHNFFESSLDYVYQIQEVQESKKFNIVEPVLAFLHSLFISNSLTVELTQDFLPYKQQLQLSLQNTRNHFSSTREEMEELKKRMKEAPQTCKLPGQPTIEGYLYTQEKWALGISWVKYYCQYEKETKTLTMTPMEQKPGAKQGPLDLTLKYCVRRKTESIDKRFCFDIETNERPGTITLQALSEANRRLWMEAMDGKEPIYHSPITKQQEMELNEVGFKFVRKCINIIETKGIKTEGLYRTVGSNIQVQKLLNAFFDPKCPGDVDFHNSDWDIKTITSSLKFYLRNLSEPVMTYRLHKELVSAAKSDNLDYRLGAIHSLVYKLPEKNREMLELLIRHLVNVCEHSKENLMTPSNMGVIFGPTLMRAQEDTVAAMMNIKFQNIVVEILIEHFGKIYLGPPEESAAPPVPPPRVTARRHKPITISKRLLRERTVFYTSSLDESEGDADSFSKVRPPGEKPTIIRPPVRPPDPPCRAATPQKPEPKPDIVAGNAGEITSSVVASRTRFFETASRKTGSSQGRLPGDES

SEQ ID NO: 54493 - protein, 375 aa, Homo sapiens
MDDLRYGVYPVKGASGYPGAERNLLEYSYFEKGPLTFRDVVIEFSQEEWQCLDTAQQDLYRKVMLENFRNLVFLGIDVSKPDLITCLEQGKDPWNMKRHSMVATPPVTYSHFAQDLWPQPGIKDSFQKVILREYGNYGHKDLQLRKGCKSVNECNVQKEGYNELKEYLTTTQSKIFQCDKYVKVFHKFLNSNTHKTRHTGKKPFKCKKCGKSFCMLLHLGQHKIIHIRENSYQCEECGKAFKWFSTLTRHKRIHTGDKSYKHEECGKGFNHSTTLTRHKVIHAGEKHYKCEKCGKDFKQSSHLTKHKTIHAGEKPYKCEGCGKAFCQFSYLTKHKIIHTGEKPYKCEECGKAFNWYSHLTRHKIIHTGEKPYKCE

SEQ ID NO: 54494 - protein, 90 aa, Homo sapiens
  MOD_RES (1)..(1): Any amino acid
XAIPLSVDLWIHYINFLKETLDPGDPETNNTIRGTFEHAVLAAGTDFRSDRLWEMYINWENEQGNLREVTAIYDRILGIPTQLYSHHFQS

SEQ ID NO: 54495 - protein, 165 aa, Homo sapiens
MTADHLREKNIMRADFNKTNELLKEINAALQVSLEEMEEKYLMRESKPEDIQMITELKAMLTERDQIIKKLIEDNKFYQLELVNRETNFNKVFNSSPTVGVINPLAKVSVRCMCMSSRNMTTGVSITHCCVPCNFPQRRPAQSEASPVASPDPQRQEWFARYFTF

SEQ ID NO: 54496 - protein, 648 aa, Homo sapiens
MTPTLAALLCLGLSLGPRTHVQAGPFPKPTLWAEPGSVISWGSPVTIWCQGSLEAQEYRLDKEGSPEPWDRNNPLEPKNKARFSIPSITEHHAGRYRCHYYSSAGWSEPSDPLELVMTGAYSKPTLSALPSPVVASGGNMTLQCGSQKGYHHFVLMKEGEHQLPRTLDSQQLHSGGFQALFPVGPVNPSHRWRFTCYYYYMNTPRVWSHPSDPLEILPSGVSRKPSLLTLQGPVLAPGQSLTLQCGSDVGYDRFVLYKEGERDFLQRPGQQPQAGLSQANFTLGPVSPSHGGQYRCYGAHNLSSEWSAPSDPLNILMAGQIYDTVSLSAQPGPTVASGENVTLLCQSWWQFDTFLLTKEGAAHPPLRLRSMYGAHKYQAEFPMSPVTSAHAGTYRCYGSYSSNPHLLSHPSEPLELVVSGHSGGSSLPPTGPPSTPGGPEDQPLNPPGSGPQNRLGRYLEVLIGVSVAFVLLLFLLLFLLLRRQRHSKHRTSDQRKTDFQRPAGAAETEPKDRGLLRRSSPAADVQEENLYAAVKDTQSEDRVELDSQSPHDEDPQAVTYAPVKHSSPRREMASPPSSLSGEFLDTKDRQVEEDRQMDTEAAASEASQDVTYAQLHSLTLRRKATEPPPSQEGEPPAEPSIYATLAIH

SEQ ID NO: 54497 - protein, 210 aa, Homo sapiens
MLPAATEVQGQKDMVWKWMPLLLLLVCVATMCSAQDRTDLLNVCMDAKHHKTKPGPEDKLHDQCSPWKKNACCTASTSQELHKDTSRLYNFNWDHCGKMEPACKRHFIQDTCLYECSPNLGPWIQQVNQSWRKERFLDVPLCKEDCQRWWEDCHTSHTCKSNWHRGWDWTSGVNKCPAGALCRTFESYFPTPAALCEGLWSHSYKVSNYS

SEQ ID NO: 54498 - protein, 30 aa, Homo sapiens
MDPLGPAKPQWSWRCCLTTLLFQLLMAVCF

SEQ ID NO: 54499 - protein, 142 aa, Homo sapiens
MQRKAGKKEHVQLRDKRNQEPQFRGNTARKCEPQAAEGRVSEWLRCDNMHHQWLLLAACFWVIFMFMVASKFITLTFKDPDVYSAKQEFLFLTTMPEVRKLPEEKHIPEELKPTGKELPDSQLVQPLVYMERLELIRNVCRD

SEQ ID NO: 54500 - protein, 711 aa, Homo sapiens
MGSPLRFDGRVVLVTGAGAGLGRAYALAFAERGALVVVNDLGGDFKGVGKGSLAADKVVEEIRRRGGKAVANYDSVEEGEKVVKTALDAFGRIDVVVNNAGILRDRSFARISDEDWDIIHRVHLRGSFQVTRAAWEHMKKQKYGRIIMTSSASGIYGNFGQANYSAAKLGLLGLANSLAIEGRKSNIHCNTIAPNAGSRMTQTVMPEDLVEALKPEYVAPLVLWLCHESCEENGGLFEVGAGWIGKLRWERTLGAIVRQKNHPMTPEAVKANWKKICDFENASKPQSIQESTGSIIEVLSKIDSEGGVSANHTSRATSTATSGFAGAIGQKLPPFSYAYTELEAIMYALGVGASIKDPKDLKFIYEGSSDFSCLPTFGVIIGQKSMMGGGLAEIPGLSINFAKVLHGEQYLELYKPLPRAGKLKCEAVVADVLDKGSGVVIIMDVYSYSEKELICHNQFSLFLVGSGGFGGKRTSDKVKVAVAIPNRPPDAVLTDTTSLNQAALYRLSGDWNPLHIDPNFASLAGFDKPILHGLCTFGFSARRVLQQFADNDVSRFKAIKARFAKPVYPGQTLQTEMWKEGNRIHFQTKVQETGDIVISNAYVDLAPTSGTSAKTPSEGGKLQSTFVFEEIGRRLKDIGPEVVKKVNAVFEWHITKGGNIGAKWTIDLKSGSGKVYQGPAKGAADTTIILSDEDFMEVVLGKLDPQKVYGR

SEQ ID NO: 54501 - protein, 40 aa, Homo sapiens
MDEEYDVIVLGTGLTERRQVGVQRMVSPSPRNASCRASCL

SEQ ID NO: 54502 - protein, 271 aa, Homo sapiens
MAGAGSEARFAGLSLVQLNELLEDEGQLTEMVQKMEENVQLNKEMTLASNRSLAEGNLLYQPQLDTLKARLTQKYQELQVLFEAYQIKKTKLDRQSSSASLETLLALLQAEGAKIEEDTENMAEKFLDGELPLDSFIDVYQSKRKLAHMRRVKIEKLQEMVLKGQRLPQALAPLPPRLPELAPTAPLPYPAPEASGPPAVAPRRIPPPPPPVPAGRLATPFTAAMSSGQAVPYPGLQCPPLPPRVGLPTQQGFSSQFVSPYPPPLPQRPPP

SEQ ID NO: 54503 - protein, 3574 aa, Homo sapiens
MWPRLAFCCWGLALVSGWATFQQMSPSRNFSFRLFPETAPGAPGSIPAPPAPGDEAAGSRVERLGQAFRRRVRLLRELSERLELVFLVDDSSSVGEVNFRSELMFVRKLLSDFPVVPTATRVAIVTFSSKNYVVPRVDYISTRRARQHKCALLLQEIPAISYRGGGTYTKGAFQQAAQILLHARENSTKVVFLITDGYSNGGDPRPIAASLRDSGVEIFTFGIWQGNIRELNDMASTPKEEHCYLLHSFEEFEALARRALHEDLPSGSFIQDDMVHCSYLCDEGKDCCDRMGSCKCGTHTGHFECICEKGYYGKGLQYECTACPSGTYKPEGSPGGISSCIPCPDENHTSPPGSTSPEDCVCREGYRASGQTCELVHCPALKPPENGYFIQNTCNNHFNAACGVRCHPGFDLVGSSIILCLPNGLWSGSESYCRVRTCPHLRQPKHGHISCSTREMLYKTTCLVACDEGYRLEGSDKLTCQGNSQWDGPEPRCVERHCSTFQMPKDVIISPHNCGKQPAKFGTICYVSCRQGFILSGVKEMLRCTTSGKWNVGVQAAVCKDVEAPQINCPKDIEAKTLEQQDSANVTWQIPTAKDNSGEKVSVHVHPAFTPPYLFPIGDVAIVYTATDLSGNQASCIFHIKVIDAEPPVIDWCRSPPPVQVSEKVHAASWDEPQFSDNSGAELVITRSHTQGDLFPQGETIVQYTATDPSGNNRTCDIHIVIKGSPCEIPFTPVNGDFICTPDNTGVNCTLTCLEGYDFTEGSTDKYYCAYEDGVWKPTYTTEWPDCAKKRFANHGFKSFEMFYKAARCDDTDLMKKFSEAFETTLGKMVPSFCSDAEDIDCRLEENLTKKYCLEYNYDYENGFAIGPGGWGAANRLDYSYDDFLDTVQETATSIGNAKSSRIKRSAPLSDYKIKLIFNITASVPLPDERNDTLEWENQQRLLQTLETITNKLKRTLNKDPMYSFQLASEILIADSNSLETKKASPFCRPGSVLRGRMCVNCPLGTYYNLEHFTCESCRIGSYQDEEGQLECKLCPSGMYTEYIHSRNISDCKAQCKQGTYSYSGLETCESCPLGTYQPKFGSRSCLSCPENTSTVKRGAVNISACGVPCPEGKFSRSGLMPCHPCPRDYYQPNAGKAFCLACPFYGTTPFAGSRSITECSSFSSTFSAAEESVVPPASLGHIKKRHEISSQVFHECFFNPCHNSGTCQQLGRGYVCLCPLGYTGLKCETDIDECSPLPCLNNGVCKDLVGEFICECPSGYTGQRCEENINECSSSPCLNKGICVDGVAGYRCTCVKGFVGLHCETEVNECQSNPCLNNAVCEDQVGGFLCKCPPGFLGTRCGKNVDECLSQPCKNGATCKDGANSFRCLCAAGFTGSHCELNINECQSNPCRNQATCVDELNSYSCKCQPGFSGKRCETEQSTGFNLDFEVSGIYGYVMLDGMLPSLHALTCTFWMKSSDDMNYGTPISYAVDNGSDNTLLLTDYNGWVLYVNGREKITNCPSVNDGRWHHIAITWTSANGIWKVYIDGKLSDGGAGLSVGLPIPGMLGGGALVLGQEQDKKGEGFSPAESFVGSISQLNLWDYVLSPQQVKSLATSCPEELSKGNVLAWPDFLSGIVGKVKIDSKSIFCSDCPRLGGSVPHLRTASEDLKPGSKVNLFCDPGFQLVGNPVQYCLNQGQWTQPLPHCERISCGVPPPLENGFHSADDFYAGSTVTYQCNNGYYLLGDSRMFCTDNGSWNGVSPSCLDVDECAVGSDCSEHASCLNVDGSYICSCVPPYTGDGKNCAEPIKCKAPGNPENGHSSGEIYTVGAEVTFSCQEGYQLMGVTKITCLESGEWNHLIPYCKAVSCGKPAIPENGCIEELAFTFGSKVTYRCNKGYTLAGDKESSCLANSSWSHSPPVCEPVKCSSPENINNGKYILSGLTYLSTASYSCDTGYSLQGPSIIECTASGIWDRAPPACHLVFCGEPPAIKDAVITGNNFTFRNTVTYTCKEGYTLAGLDTIECLADGKWSRSDQQCLAVSCDEPPIVDHASPETAHRLFGDIAFYYCSDGYSLADNSQLLCNAQGKWVPPEGQDMPRCIAHFCEKPPSVSYSILESVSKAKFAAGSVVSFKCMEGFVLNTSAKIECMRGGQWNPSPMSIQCIPVRCGEPPSIMNGYASGSNYSFGAMVAYSCNKGFYIKGEKKSTCEATGQWSSPIPTCHPVSCGEPPKVENGFLEHTTGRIFESEVRYQCNPGYKSVGSPVFVCQANRHWHSESPLMCVPLDCGKPPPIQNGFMKGENFEVGSKVQFFCNEGYELVGDSSWTCQKSGKWNKKSNPKCMPAKCPEPPLLENQLVLKELTTEVGVVTFSCKEGHVLQGPSVLKCLPSQQWNDSFPVCKIVLCTPPPLISFGVPIPSSALHFGSTVKYSCVGGFFLRGNSTTLCQPDGTWSSPLPECVPVECPQPEEIPNGIIDVQGLAYLSTALYTCKPGFELVGNTTTLCGENGHWLGGKPTCKAIECLKPKEILNGKFSYTDLHYGQTVTYSCNRGFRLEGPSALTCLETGDWDVDAPSCNAIHCDSPQPIENGFVEGADYSYGAIIIYSCFPGFQVAGHAMQTCEESGWSSSIPTCMPIDCGLPPHIDFGDCTKLKDDQGYFEQEDDMMEVPYVTPHPPYHLGAVAKTWENTKESPATHSSNFLYGTMVSYTCNPGYELLGNPVLICQEDGTWNGSAPSCISIECDLPTAPENGFLRFTETSMGSAVQYSCKPGHILAGSDLRLCLENRKWSGASPRCEAISCKKPNPVMNGSIKGSNYTYLSTLYYECDPGYVLNGTERRTCQDDKNWDEDEPICIPVDCSSPPVSANGQVRGDEYTFQKEIEYTCNEGFLLEGARSRVCLANGSWSGATPDCVPVRCATPPQLANGVTEGLDYGFMKEVTFHCHEGYILHGAPKLTCQSDGNWDAEIPLCKPVNCGPPEDLAHGFPNGFSFIHGGHIQYQCFPGYKLHGNSSRRCLSNGSWSGSSPSCLPCRCSTPVIEYGTVNGTDFDCGKAARIQCFKGFKLLGLSEITCEADGQWSSGFPHCEHTSCGSLPMIPNAFISETSSWKENVITYSCRSGYVIQGSSDLICTEKGVWSQPYPVCEPLSCGSPPSVANAVATGEAHTYESEVKLRCLEGYTMDTDTDTFTCQKDGRWFPERISCSPKKCPLPENITHILVHGDDFSVNRQVSVSCAEGYTFEGVNISVCQLDGTWEPPFSDESCSPVSCGKPESPEHGFVVGSKYTFESTIIYQCEPGYELEGNRERVCQENRQWSGGVAICKETRCETPLEFLNGKADIENRTTGPNVVYSCNRGYSLEGPSEAHCTENGTWSHPVPLCKPNPCPVPFVIPENALLSEKEFYVDQNVSIKCREGFLLQGHGIITCNPDETWTQTSAKCEKISCGPPAHVENAIARGVHYQYGDMITYSCYSGYMLEGFLRSVCLENGTWTSPPICRAVCRFPCQNGGICQRPNACSCPEGWMGRLCEEPICILPCLNGGRCVAPYQCDCPPGWTGSRCHTAVCQSPCLNGGKCVRPNRCHCLSSWTGHNCSRKRRTGF

SEQ ID NO: 54504 - protein, 46 aa, Homo sapiens
MVVLRAGKKTFLPPLCRAFACRGCQLAPERGAERRDTAPSGVRKQH

SEQ ID NO: 54505 - protein, 395 aa, Homo sapiens
MSVTKSTEGPQGAVAIKLDLMSPPESAKKLENKDSTFLDESPSESAGLKKTKGITVFQALIHLVKGNMGTGILGLPLAVKNAGILMGPLSLLVMGFIACHCMHILVKCAQRFCKRLNKPFMDYGDTVMHGLEANPNAWLQNHAHWGRHIVSFFLIITQLGFCCVYIVFLADNLKQVVEAVNSTTNNCYSNETVILTPTMDSRLYMLSFLPFLVLLVLIRNLRILTIFSMLANISMLVSLVIIIQYITQEIPDPSRLPLVASWKTYPLFFGTAIFSFESIGVVLPLENKMKNARHFPAILSLGMSIVTSLYIGMAALGYLRFGDDIKASISLNLPNCWLYQSVKLLYIAGILCTYALQFYVPAEIIIPFAISRVSTRWALPLDLSIRLVMVCLTCE

SEQ ID NO: 54506 - protein, 711 aa, Homo sapiens
MKQLPAATVRLLSSSQIITSVVSVVKELIENSLDAGATSVDVKLVLITTRTAADNFSTQYVLDGSGHILSQKPSHLGQGTTVTALRLFKNLPVRKQFYSTAKKCKDEIKKIQDLLMSFGILKPDLRIVFVHNKAVIWQKSRVSDHKMALMSVLGTAVMNNMESFQYHSEESQIYLSGFLPKCDADHSFTSLSTPERSFIFINSRPVHQKDILKLIRHHYNLKCLKESTRLYPVFFLKIDVPTADVDVNLTPDKSQVLLQNKESVLIALENLMTTCYGPLPSTNSYENNKTDVSAADIVLSKTAETDVLFNKVESSGKNYSNVDTSVIPFQNDMHNDESGKNTDDCLNHQISIGDFGYGHCSSEISNIDKNTKNAFQDISMSNVSWENSQTEYSKTCFISSVKHTQSENGNKDHIDESGENEEEAGLENSSEISADEWSRGNILKNSVGENIEPVKILVPEKSLPCKVSNNNYPIPEQMNLNEDSCNKKSNVIDNKSGKVTAYDLLSNRVIKKPMSASALFVQDHRPQFLIENPKTSLEDATLQIEELWKTLSEEEKLKYEEKATKDLERYNSQMKRAIEQESQMSLKDGRKKIKPTSAWNLAQKHKLKTSLSNQPKLDELLQSQIEKRRSQNIKMVQIPFSMKNLKINFKKQNKVDLEEKDEPCLIHNLRFPDAWLMTSKTEVMLLNPYRVEEALLFKRLLENHKLPAEPL

SEQ ID NO: 54507 - protein, 1003 aa, Homo sapiens
MATPGPRDIPLLPGSPRRLSPQAGSRGGQGPKHGQQCLKMPGPRAPGLQGGSNRDPGQPCGGESTRSSSVINNYLDANEPVSLEARLSRMHFHDSQRKVDYVLAYHYRKRGVHLAQGFPGHSLAIVSNGETGKEPHAGGPGDIELGPLDALEEERKEQREEFEHNLMEAGLELEKDLENKSQGSIFVRIHAPWQVLAREAEFLKIKVPTKKEMYEIKAGGSIAKKFSAALQKLSSHLQPRVPEHSNNKMKNLSYPFSREKMYLYNIQEKDTFFDNATRSRIVHEILKRTACSRANNTMGINSLIANNIYEAAYPLHDGEYDSPEDDMNDRKLLYQEWARYGVFYKFQPIDLIRKYFGEKIGLYFAWLGLYTSFLIPSSVIGVIVFLYGCATIEEDIPSREMCDQQNAFTMCPLCDKSCDYWNLSSACGTAQASHLFDNPATVFFSIFMALWATMFLENWKRLQMRLGYFWDLTGIEEEEVSSQEHSRPEYETKVREKMLKESNQSAVQKLETNTTECGDEDDEDKLTWKDRFPGYLMNFASILFMIALTFSIVFGVIVYRITTAAALSLNKATRSNVRVTVTATAVIINLVVILILDEIYGAVAKWLTKIEVPKTEQTFEERLILKAFLLKFVNAYSPIFYVAFFKGRFVGRPGSYVYVFDGYRMEECAPGGCLMELCIQLSIIMLGKQLIQNNIFEIGVPKLKKLFRKLKDETEAGETDSAHSKHPEQWDLDYSLEPYTGLTPEYMEMIIQFGFVTLFVASFPLAPVFALLNNVIEVRLDAKKFVTELRRPDAVRTKDIGIWFDILSGIGKFSVISNAFVIAITSDFIPRLVYQYSYSHNGTLHGFVNHTLSFFNVSQLKEGTQPENSQFDQEVQFCRFKDYREPPWAPNPYEFSKQYWFILSARLAFVIIFQNLVMFLSVLVDWMIPDIPTDISDQIKKEKSLLVDFFLKEEHEKLKLMDEPALRSPGGGDRSRSRAASSAPSGQSQLGSMMSSGSQHTNV

SEQ ID NO: 54508 - protein, 352 aa, Homo sapiens
  MOD_RES (1)..(1): Any amino acid
XETEEELIENDYRVSTSKITKQSFKEIEKVALPTNTTSSRPRTECCSDAGDSPLKPVSCPKSKASDKRSLLPHQISQIYDELFQIHLKLQCETAAQQKFAEELQKRERFLLEREQLLFRHENALSKIKGVEEEVLTRFQIIKEHDAEVEHLTEVLKEKNKETKRLRSSFDALKELNDTLKKQLNEASEENRKIDIQAKRVQARLDNLQRKYEFMTIQRLKGSSHAVHEMKSLKQEKAPVSKTYKVPLNGQVYELLTVFMDWISDHHLSKVKHEESGMDGKKPQLKFASQRNDIQEKCVKLLPLMTEQLQWMPFVNIKLHEPFVKFIYWSLRQLDAGAQHSTMTSTLRRLGED

SEQ ID NO: 54509 - protein, 675 aa, Homo sapiens
  MOD_RES (1)..(1): Any amino acid
XKPKLPENYTDETWQKLKEAVEAIQNSTSIKYNLEELYQAVENLCSYKISANLYKQLRQICEDHIKAQIHQFREDSLDSVLFLKKIDRCWQNHCRQMIMIRSIFLFLDRTYVLQNSMLPSIWDMGLELFRAHIISDQKVQNKTIDGILLLIERERNGEAIDRSLLRSLLSMLSDLQIYQDSFEQRFLEETNRLYAAEGQKLMQEREVPEYLHHVNKRLEEEADRLITYLDQTTQKSLIATVEKQLLGEHLTAILQKGLNNLLDENRIQDLSLLYQLFSRVRGGVQVLLQQWIEYIKAFGSTIVINPEKDKTMVQELLDFKDKVDHIIDICFLKNEKFINAMKEAFETFINKRPNKPAELIGKDVFEAFYKKDLAKRLLVGKSASVDAEKSMLSKLKHECGAAFTSKLEGMFKDMELSKDIMIQFKQYMQNQNVPGNIELTVNILTMGYWPTYVPMEVHLPPEMVKLQEIFKTFYLGKHSGRKLQWQSTLGHCVLKAEFKEGKKELQVSLFQTLVLLMFNEGEEFSLEEIKQATGIEDGELRRTLQSLACGKARVLAKNPKGKDIEDGDKFICNDDFKHKLFRIKINQIQMKETVEEQASTTERVFQDRQYQIDAAIVRIMKMRKTLSHNLLVSEVYNQLKFPVKPADLKKRIESLIDRDYMERDKENPNQYNYIA

SEQ ID NO: 54510 - protein, 143 aa, Homo sapiens
MVKVTFNSALAQKEAKKDEPKSGEEALIIPPDAVAVDCKDPDDVVPVGQRRAWCWCMCFGLAFMLAGVILGGAYLYKYFALQSFSLVAQTGVQWRDLGSLHPLSPGFRLECGGAITAHCSLNLLGSGNPPASTSPGVARTTAR

SEQ ID NO: 54511 - protein, 57 aa, Homo sapiens
MDAALKRSRSEEPAEILPPARDEEEEEEEGMEQGLEEEEEVDPRIQHICGGSAREQT

SEQ ID NO: 54512 - protein, 151 aa, Homo sapiens
  MOD_RES (1)..(1): Any amino acid
XQPPPPITYSLCGTKNIKVAKKVVKTHEPASFNLNVTLKSSPDLLTYFCWASSTSGAHVDSARLQMHWELWSRQRGRPQGGDDLPGVLGQPTYHQQPDREGWAGPPAAETMPQAACQLLLPAEPDIGLVLVPGCKQRQCPAQRPHSGAPRW

SEQ ID NO: 54513 - protein, 120 aa, Homo sapiens
MEFHNGGHVSGIGGFLVSLTSRMKPHTLAVTPALIFAITVATIGSFQFGYNTGVINAPETIIKEFINKTLTDKANAPPSEVLLTNLWSLSVAIFSVGGMIGSFSVGLFVNRFGRRNSMLI

SEQ ID NO: 54514 - protein, 463 aa, Homo sapiens
MGCDRNCGLIAGAVIGAVLAVFGGILMPVGDLLIQKTIKKQVVLEEGTIAFKNWVKTGTEVYRQFWIFDVQNPQEVMMNSSNIQVKQRGPYTYRVRFLAKENVTQDAEDNTVSFLQPNGAIFEPSLSVGTEADNFTVLNLAVAAASHIYQNQFVQMILNSLINKSKSSMFQVRTLRELLWGYRDPFLSLVPYPVTTTVGLFYPYNNTADGVYKVFNGKDNISKVAIIDTYKGKRNLSYWESHCDMINGTDAASFPPFVEKSQVLQFFSSDICRSIYAVFESDVNLKGIPVYRFVLPSKAFASPVENPDNYCFCTEKIISKNCTSYGVLDISKCKEGRPVYISLPHFLYASPDVSEPIDGLNPNEEEHRTYLDIEPITGFTLQFAKRLQVNLLVKPSEKIQVLKNLKRNYIVPILWLNETGTIGDEKANMFRSQVTGKINLLGLIEMILLSVGVVMFVAFMISY

SEQ ID NO: 54515 - protein, 99 aa, Homo sapiens
MELVQVLKRGLQQITGHGGLRGYLRVFFRTNDAKVGTLVGEDKYGNKYYEDNKQFFGRHRWVVYTTEMNGKNTFWDVDGSMVPPEWSLMGFKLNLHEPE

SEQ ID NO: 54516 - protein, 114 aa, Homo sapiens
MKVLLRLICFIALLISSLEADKCKEREEKIILVSSANEIDVRPCPLNPNEHKGTITWYKDDSKTPVSTEQASRIHQHKEKLWFVPAKVEDSGHYYCVVRNSSYCLRIKISAKFV

SEQ ID NO: 54517 - protein, 180 aa, Homo sapiens
  MOD_RES (1)..(1): Any amino acid
XRAQGAGSGAAAASSPAAGEPLQRERRAGAECGLARQVRAEVTKWIGVNRRPRKRKRREKEEVFEKLLPDQLVLLLEHLLEQKTLSPRTLQSLQRTYHLQDQDAEVRHRWCELIVKHKFTKAYKSVERFLQEDQAMGVYLYGELMVSEDARQQQLARRCFERTKEQMDRSSAQVVAEMLF

SEQ ID NO: 54518 - protein, 273 aa, Homo sapiens [sequence omitted]

SEQ ID NO: 54519 - protein, 249 aa, Homo sapiens
MLQTLYDYFWWERLWLPVNLTWADLEDRDGRVYAKASDLYITLPLALLFLIVRYFFELYVATPLAALLNIKEKTRLRAPPNATLEHFYLTSGKQPKQVEVELLSRQSGLSGRQVERWFRRRRNQDRPSLLKKFREASWRFTFYLIAFIAGMAVIVDKPWFYDMKKVWEGYPIQSTIPSQYWYYMIELSFYWSLLFSIASDVKRKDFKEQIIHHVATIILISFSWFANYIRAGTLIMALHDSSDYLLEVR

SEQ ID NO: 54520 - protein, 152 aa, Homo sapiens
  MOD_RES (1)..(1): Any amino acid
XAWAVFKGKFKEGDKAEPATWKTRLRCALNKSPDFEEVTDRSQLDISEPYKVYRIVPEEEQKCKLGVATAGCVNEVTEMECGRSEIDELIKESCSSSITARAGFLTAGWCCALGKSFRIWPPCAPNSFSCRLSSCMSGNWQKRLGRAVEPAL

SEQ ID NO: 54521 - protein, 48 aa, Homo sapiens
MVSAEGAVAPGSTLLVAPALSHRPALQRVEKGPHRPFGIKTSPIWPAG

SEQ ID NO: 54522 - protein, 262 aa, Homo sapiens
MPYLGSEDVVKELKKALCNPHIQADRLRYRNVIQRVIRYMTQGLDMSGVFMEMVKASATVDIVQKKLVYLYMCTYAPLKPDLALLAINTLCKDCSDPNPMVRGLALRSMCSLRMPGVQEYIQQPILNGLRDKASYVRRVAVLGCAKMHNLHGDSEVDGALVNELYSLLRDQDPIVVVNCLRSLEEILKQEGGVVINKPIAHHLLNRMSKLDQWGQAEVLNFLLRYQPRSEEELFDILNLLDSFLKSSSPGVVMGATKLFLIL

SEQ ID NO: 54523 - protein, 102 aa, Homo sapiens
MLSAVWGAGGPGAGGAARGQPSRKELLLRHHLWSGPRCLSFPLGSLPASLLGLPGATSHRSCLSPNLASGLAARGTQTQSVLFGEVRLPLDGGVRGARKRRS

SEQ ID NO: 54524 - protein, 300 aa, Homo sapiens
MALIMEPVSKWSPSQVVDWMKGLDDCLQQYIKNFEREKISGDQLLRITHQELEDLGVSRIGHQELILEAVDLLCALNYGLETENLKTLSHKLNASAKNLQNFITGRRRSGHYDGRTSRKLPNDFLTSVVDLIGAAKSLLAWLDRSPFAAVTDYSVTRNNVIQLCLELTTIVQQDCTVYETENKILHVCKTLSGVCDHIISLSSDPLVSQSAHLEVIQLANIKPSEGLGMYIKSTYDGLHVITGTTENSPADRCKKIHAGDEVIQVNHQTVEYSKILKTTQNDLWENLVPALALKLTYGFK

SEQ ID NO: 54525 - protein, 110 aa, Homo sapiens
MSPHPTALLGLVLCLAQTIHTQEEDLPRPSISAEPGTVIPLGSHVTFVCRGPVGVQTFRLERESRSTYNDTEDVSQASPSESEARFRIDSDPRRGRRTTVTMSMHLLPKA

SEQ ID NO: 54526 - protein, 992 aa, Homo sapiens
  MOD_RES (1)..(1): Any amino acid
XEDFIESLFIVLESKRLDRATDKSGDKIPLLCVPFEKKDFVGLDTDSRHYKKRCQGRMRKHVGDLCLQAGMLQDSLVHYHMSVELLRSVNDFLWLGAALEGLCSASVIYHYPGGTGGKSGARRFQGSTLPAEAANRHRPGALTTNGINPDTSTEIGRAKNCLSPEDIIDKYKEAISYYSKYKNAGVIELEACIKAVRVLAIQKRSMEASEFLQNAVYINLRQLSEEEKIQRYSILSELYELIGFHRKSAFFKRVAAMQCVAPSIAEPGWRACYKLLLETLPGYSLSLDPKDFSRGTHRGWAAVQMRLLHELVYASRRMGNPALSVRHLSFLLQTMLDFLSDQEKKDVAQSLENYTSKCPGTMEPIALPGGLTLPPVPFTKLPIVRHVKLLNLPASLRPHKMKSLLGQNVSTKSPFIYSPIIAHNRGEERNKKIDFQWVQGDVCEVQLMVYNPMPFELRVENMGLLTSGVEFESLPAALSLPAESGLYPVTLVGVPQTTGTITVNGYHTTVFGVFSDCLLDNLPGIKTSGSTVEVIPALPRLQISTSLPRSAHSLQPSSGDEISTNVSVQLYNGESQQLIIKLENIGMEPLEKLEVTSKVLTTKEKLYGDFLSWKLEETLAQFPLQPGKVATFTINIKVKLDFSCQENLLQDLSDDGISVSGFPLSSPFRQVVRPRVEGKPVNPPESNKAGDYSHVKTLEAVLNFKYSGGPGHTEGYYRNLSLGLHVEVEPSVFFTRVSTLPATSTRQCHLLLDVFNSTEHELTVSTRSSEALILHAGECQRMAIQVDKFNFESFPESPGEKGQFANPKQLEEERREARGLEIHSKLGICWRIPSLKRSGEASVEGLLNQLVLEHLQLAPLQWDVLVDGQPCDREAVAACQVGDPVRLEVRLTNRSPRSVGPFALTVVPFQDHQNGVHNYDLHDTVSFVGSSTFYLDAVQPSGQSACLGALLFLYTGDFFLHIRFHEDSTSKELPPSWFCLPSVHVCALEAQA

SEQ ID NO: 54527 - protein, 660 aa, Homo sapiens
IAKPQGTYQVLPPNTGSLYIDKDCSAVYCHESSSNIYYPFQKREQLRAGRYIMRHTSEVICEVLDPEGNTFQVMADGSISTILPEKKLEDDLNEKTEGYDSLSSMHLEKNHQQIYGEHVPRFFVMYADGSGMELLRDSDIEEYLSLAYKESNTVVLQEPVQEQPGTLTITVLRPFHEASPWQVKKEDTIVPPNLRSRSWETFPSVEKKTPGPPFGTQIWKGLCIESKQLVSAPGAILKSPSVLQMRQFIQHEVIKNEVKLRLQVSLKDYINYILKKEDELQEMMVKDSRTEEERGNAADLLKLVMSFPKMEETTKSHVTEVAAHLTDLFKQSLATPPKCPPDTFGKDFFEKTWRHTASSKRWKEKIDKTRKEIETTQNYLMDIKNRIIPPFFKSELNQLYQSQYNHLDSLSKKLPSFTKKNEDANETAVQDTSDLNLDFKPHKVSEQKSSSVPSLPKPEISADKKDFTAQNQTENLTKSPEEAESYEPVKIPTQSLLQDVAGQTRKEKVKLPHYLLSSKPKSQPLAKVQDSVGGKVNTSSVASAAINNAKSSLFGFHLLPSSVKFGVLKEGHTYATVVKLKNVGVDFCRFKVKQPPPSTGLKVTYKPGPVAAGMQTELNIELFATAVGEDGAKGSAHISHNIEIMTEHEVLFLPVEANIL

SEQ ID NO: 54528 - protein, 169 aa, Homo sapiens
MVSSDRPVSLEDEVSHSMKEMIGGCCVCSDERGWAENPLVYCDGHGCSVAVHQACYGIVQVPTGPWFCRKCESQERAARVRCELCPHKDGALKRTDNGGWAHVVCALYIPEVQFANVSTMEPIVLQSVPHDRYNKTCYICDEQGRESKAATGACMTCNKHGCRQAFHVT

SEQ ID NO: 54529 - protein, 703 aa, Homo sapiens
MGRSNSRSHSSRSKSRSQSSSRSRSRSHSRKKRYSSRSRSRTYSRSRSRDRMYSRDYRRDYRNNRGMRRPYGYRGRGRGYYQGGGGRYHRGGYRPVWNRRHSRSPRRGRSRSRSPKRRSVSSQRSRSRSRRSYRSSRSPRSSSSRSSSPYSKSPVSKRRGSQEKQTKKAEGEPQEESPLKSKSQEEPKDTFEHDPSESIDEFNKSSATSGDIWPGLSAYDNSPRSPHSPSPIATPPSQSSSCSDAPMLSTVHSAKNTPSQHSHSIQHSPERSGSGSVGNGSSRYSPSQNSPIHHIPSRRSPAKTIAPQNAPRDESRGRSSFYPDGGDQETAKTGKFLKRFTDEESRVFLLDRGNTRDKEASKEKGSEKGRAEGEWEDQEALDYFSDKESGKQKFNDSEGDDTEETEDYRQFRKSVLADQGKSFATASHRNTEEEGLKYKSKVSLKGNRESDGFREEKNYKLKETGYVVERPSTTKDKHKEEDKNSERITVKKETQSPEQVKSEKLKDLFDYSPPLHKNLDAREKSTFREESPLRIKMIASDSHRPEVKLKMAPVPLDDSNRPASLTKDRLLASTLVHSVKKEQEFRSIFDHIKLPQASKSTSESFIQHIVSLVHHVKEQYFKSAAMTLNERFTSYQKATEEHSTRQKSPEIHRRIDISPSTLRKHTRLAGEERVFKEENQKMPLSIFLNYIVFEKAMEQEGGR

SEQ ID NO: 54530 - protein, 199 aa, Homo sapiens
MSLAGGRAPRKTAGNRLSGLLEAEEEDEFYQTTYGGFTEESGDDEYQGDQSDTEDEVDSDFDIDEGDEPSSDGEAEEPRRKRRVVTKAYKEPLKSLRPRKVNTPAGSSQKAREEKALLPLELQDDGSDSRKSMRQSTAEHTRQTFLRVQERQGQSRRRKGPHCERPLTQEELLREAKITEELNLRSLVPPRAAPKSPCS

SEQ ID NO: 54531 - protein, 137 aa, Homo sapiens
QDEELDPEFVQQVADFCSYIFSNSKTKTLSGGIKAEEILQTYLKSKESVTDAILQTDQILTEKEKEIEVECVKAESAQASAKMVEEMQIKYQQMMEEKEKSYQEHVKQLTEKMERERAQLLEEQEKTLTSKLQVSKC

SEQ ID NO: 54532 - protein, 42 aa, Homo sapiens
MYTSHEDIGYDFEDGPKDKKTLKPHPNIDGGWAWMMVLSSFF

SEQ ID NO: 54533 - protein, 704 aa, Homo sapiens
MERGLPLLCAVLALVLAPAGAFRNDKCGDTIKIESPGYLTSPGYPHSYHPSEKCEWLIQAPDPYQRIMINFNPHFDLEDRDCKYDYVEVFDGENENGHFRGKFCGKIAPPPVVSSGPFLFIKFVSDYETHGAGFSIRYEIFKRGPECSQNYTTPSGVIKSPGFPEKYPNSLECTYIVFVPKMSEIILEFESFDLEPDSNPPGGMFCRYDRLEIWDGFPDVGPHIGRYCGQKTPGRIRSSSGILSMVFYTDSAIAKEGFSANYSVLQSSVSEDFKCMEALGMESGEIHSDQITASSQYSTNWSAERSRLNYPENGWTPGEDSYREWIQVDLGLLRFVTAVGTQGAISKETKKKYYVKTYKIDVSSNGEDWITIKEGNKPVLFQGNTNPTDVVVAVFPKPLITRFVRIKPATWETGISMRFEVYGCKITDYPCSGMLGMVSGLISDSQITSSNQGDRNWMPENIRLVTSRSGWALPPAPHSYINEWLQIDLGEEKIVRGIIIQGGKHRENKVFMRKFKIGYSNNGSDWKMIMDDSKRKAKSFEGNNNYDTPELRTFPALSTRFIRIYPERATHGGLGLRMELLGCEVEAPTAGPTTPNGNLVDECDDDQANCHSGTGDDFQLTGAETIFIPLLYHFSSCLSWDQLTPVCVLVTPHGRELPRNRSCLARTRASSFPHVIWIDELFLIATTICNNNLSHFESQRLGLS

SEQ ID NO: 54534 - protein, 499 aa, Homo sapiens
  MOD_RES (1)..(1): Any amino acid
XEGAFNYTVMALSDSSELTCSTTFSSCTISSLQCGTEYLISVLASNDAGSSKSSSAMTLKTVACAPGRVTIQEDPPGHLSVAWSSVDLGDYYVVFVKSDDGLEVHCNTSLTQCNFLSECGFTYFISVFVYNKAGQSPLGDIFNYTTAPCCPSDINPVLVSSDRVEIVWSPVRGAELYETKAVDGYNMVECNDTTPACTLSALECDTKYNITVYSFNEVRGSNMSCTPQFITTAPCSPEIKNVSRDAFSMINVHWRSTNDDATYTVTAQGEKGLYQCSSTGESCTMRGLPCGSVFSVTAVAETQAGRSLPSYSVPLETVPCCPTGLTVTQITQSVINVSWTIGRVAQTHVAVLESHTGQSKCHTHQNHCLLGCITCGINYTVTLKAISATGLTADCSYQSYFSGACCPLGVKLYRLGPNGIRIYWQASRGSANYSTDLYGSKGIFTCTPSAGLSFCDVTEIPCGDVYTVMVSPVAKTGLKLTFCPKKIYSVIYRGKRNEE

SEQ ID NO: 54535 - protein, 2134 aa, Homo sapiens
MPGLDRPLSRQNPHDGVVTPAASPSLPQPGLQMPGQWGPVQGGPQPSGQHRSPCPEGPVPSGVPCATSVPHFPTPSILHQGPGHEQHSPLVAPPAALPSDGRDEVSHLQSGSHLANNSDPESTFRQNPRIVNHWASPELRQNPGVKNEHRPASALVNPLARGDSPENRTHHPLGAGAGSGCAPLEADSGASGALAMFFQGGETENEENLSSEKAGLSGQADFDDFCSSPGLGRPPAPTHVGAGSLCQALLPGPSNEAAGDVWGDTASTGVPDASGSQYENVENLEFVQNQEVLPSEPLNLDPSSPSDQFRYGPLPGPAVPRHGAVCHTGAPDATLHTVHPDSVSSSYSSRSHGRLSGSARPQELVGTFIQQEVGKPEDEASGSFFKQIDSSPVGGETDETTVSQNYRGSVSQPSTPSPPKPTGIFQTSANSSFEPVKSHLVGVKPFEADRANVVGEVRETCVRQKQCRPAAALPDASPGNLEQPPDNMETLCAPQVCPLPLNSTTEAVHMLPHAGAPPLDTVYPAPEKRPSARTQGPVKCESPATTLWAQSELPDFGGNVLLAPAAPALYVCAKPQPPVVQPPEEAMSGQQSRNPSSAAPVQSRGGIGASENLENPPKMGEEEALQSQASSGYASLLSSPPTESLQNPPVLIAQPDHSYNLAQPINFSVSLSNSHEKNQSWREALVGDRPAVSSWALGGDSGENTSLSGIPTSSVLSLSLPSSVAQSNFPQGSGASEMVSNQPANLLVQPPSQPVPENLVPESQKDRKAGSALPGFANSPAGSTSVVLVPPAHGTLVPDGNKANHSSHQEDTYGALDFTLSRTLENPVNVYNPSHSDSLASQQSVASHPRQSGPGAPNLDRFYQQVTKDAQGQPGLERAQQELVPPQQQASPPQLPKAMFSELSNPESLPAQGQAQNSAQSPASLVLVDAGQQLPPRPPQSSSVSLVSSGSGQAAVPSEQPWPQPVPALAPGPPPQDLAAYYYYRPLYDAYQPQYSLPYPPEPGAASLYYQDVYSLYEPRYRPYDGAASAYAQNYRYPEPERPSSRASHSSERPPPRQGYPEGYYSSKSGWSSQSDYYASYYSSQYDYGDPGHWDRYHYSARVRDPRTYDRRYWCDAEYDAYRREHSAFGDRPEKRDNNWRYDPRFTGSFDDDPDPHRDPYGEEVDRRSVHSEHSARSLHSAHSLASRRSSLSSHSHQSQIYRSHNVAAGSYEAPLPPGSFHGDFAYGTYRSNFSSGPGFPEYGYPADTVWPAMEQVSSRPTSPEKFSVPHVCARFGPGGQLIKVIPNLPSEGQPALVEVHSMEALLQHTSEQEEMRAFPGPLAKDDTHKVDVINFAQNKAMKCLQNENLIDKESASLLWNFIVLLCRQNGTVVGTDIAELLLRDHRTVWLPGKSPNEANLIDFTNEAVEQVEEEESGEAQLSFLTGGPAAAASSLERETERFRELLLYGRKKDALESAMKNGLWGHALLLASKMDSRTHARVMTRFANSLPINDPLQTVYQLMSGRMPAASTCCGDEKWGDWRPHLAMVLSNLNNNMDVESRTMATMGDTLASRGLLDAAHFCYLMAQAGFGVYTKKTTKLVLIGSNHSLPFLKFATNEAIQRTEAYEYAQSLGAETCPLPSFQVFKFIYSCRLAEMGLATQAFHYCEAIAKSILTQPHLYSPVLISQLVQMASQLRLFDPQLKEKPEEESLAAPTWLVHLQQVERQIKEGAGVWHQDGALPQQCPGTPSSEMEQLDRPGLSQPGALGIANPLLAVPAPSPEHSSPSVRLLPSAPQTLPDGPLASPARVPMFPVPLPPGPLEPGPGCVTPGPALGFLEPSGPGLPPGVPPLQERRHLLQEARSPDPGIVPQEAPVGNSLSELSEENFDGKFANLTPSRTVPDSEAPPGWDRADSGPTQPPLSLSPAPETKRPGQAAKKETKEPKKGESWFFRWLPGKKKTEAYLPDDKNKSIVWDEKKNQWVNLNEPEEEKKAPPPPPTSMPKTVQAAPPALPGPPGAPVNMYSRRAAGTRARYVDVLNPSGTQRSEPALAPADFVAPLAPLPIPSNLFVPTPDAEEPQLPDGTGREGPAAARGLANPEPAPEPKAPGDLPAAGGPPSGAMPFYNPAQLAQACATSGSSRLGRIGQRKHLVLN

SEQ ID NO: 54536 - protein, 522 aa, Homo sapiens
MKSPALQPLSMAGLQLMTPASSPMGPFFGLPWQQEAIHDNIYTPRKYQVELLEAALDHNTIVCLNTGSGKTFIAVLLTKELSYQIRGDFSRNGKRTVFLVNSANQVAQQVSAVRTHSDLKVGEYSNLEVNASWTKERWNQEFTKHQVLIMTCYVALNVLKNGYLSLSDINLLVFDECHLAILDHPYREIMKLCENCPSCPRILGLTASILNGKCDPEELEEKIQKLEKILKSNAETATDLVVLDRYTSQPCEIVVDCGPFTDRSGLYERLLMELEEALNFINDCNISVHSKERDSTLISKQILSDCRAVLVVLGPWCADKVAGMMVRELQKYIKHEQEELHRKFLLFTDTFLRKIHALCEEHFSPASLDLKFVTPKVIKLLEILRKYKPYERQQFESVEWYNNRNQDNYVSWSDSEDDDEDEEIEEKEKPETNFPSPFTNILCGIIFVERRYTAVVLNRLIKEAGKQDPELAYISSNFITGHGIGKNQPRNKQMEAEFRKQEENIDPMFNLKEEQGHPSLII

SEQ ID NO: 54537 - protein, 103 aa, Homo sapiens
MNGPEDLPKSYDYDLIIIGGGSGGLAAAKEAAQYGKKVMVLDFVTPTPLGTRWGLGGTCVNVGCIPKKLMHQAALLGQALQDSRNYGWKVEETVKHDWDRMIE

SEQ ID NO: 54538 - protein, 91 aa, Homo sapiens
MAAAEEEDGGPEGPNRERGGAGATFECNICLETAREAVVSVCGHLYCWPCLHQWLETRPERQECPVCKAGISREKVVPLYGRGSQKPQDPR

SEQ ID NO: 54539 - protein, 220 aa, Homo sapiens
MGCVFQSTEDKCIFKIDWTLSPGEHAKDEYVLYYYSNLSVPIGRFQNRVHLMGDILCNDGSLLLQDVQEADQGTYICEIRLKGESQVFKKAVVLHVLPEEPKELMVHVGGLIQMGCVFQSTEVKHVTKVEWIFSGRRAKEEIVFRYYHKLRMSVEYSQSWGHFQNRVNLVGDIFRNDGSIMLQGVRESDGGNYTCSIHLGNLVFKKTIVLHVSPEEPRKW

SEQ ID NO: 54540 - protein, 18 aa, Homo sapiens
VKTVVCKAETPACMESAF

SEQ ID NO: 54541 - protein, 95 aa, Homo sapiens
MMSEHDLADVVQIAVEDLSPDHPVVLENHVVTDEDEPALKRQRLEINCQDPSIKSFLYSINQTICLRLDSIEAKLQALEATCKSLEEKLDLVTNK

SEQ ID NO: 54542 - protein, 142 aa, Homo sapiens
MSLRCGDAARTLGPRVFGRYFCSPVRPLSSLPDKKKELLQNGPDLQDFVSGDLADRSTWDEYKGNLKRQKGERLRLPPWLKTEIPMGKNYNKLKNTLRNLNLHTVCEEARCPNIGECWGGGEYATATATIMESKNPCGVSYS

SEQ ID NO: 54543 - protein, 463 aa, Homo sapiens
MAGPTEAETGLAEPRALCAQRGHRTYARRWVFLLAISLLNCSNATLWLSFAPVADVIAEDLVLSMEQINWLSLVYLVVSTPFGVAAIWILDSVGLRAALGVYTIPAGVVCLLSTICLWESVPPTPPSAGAASSTSEKFLDGLKLQLMWNKAYVILAVCLGGMIGISASFSALLEQILCASGHSSGFSGLCGALFITFGILGALALGPYVDRTKHFTEATKIGLCLFSLACVPFALVSQLQGQTLALAATCSLLGLFGFSVGPVAMELAVECSFPVGEGAATGMIFVLGQAEGILIMLAMTALTVRRSEPSLSTCQQGEDPLDWTVSLLLMAGLCTFFSCILAVFFHTPYRRLQAESGEPPSTRNAVGGADSGPGVDRGGAGRAGVLGPSTATPECTARGASLEDPRGPGSPHPACHRATPRAQGPAATDAPSRPGRLAGRVQASRFIDPAGSHSSFSSPWVIT

SEQ ID NO: 54544 - protein, 13 aa, Homo sapiens
MEMDEDPDNLPAQ

SEQ ID NO: 54545 - protein, 1386 aa, Homo sapiens
VSRALPEKQGEIEAQIKDLGQLEKKLEDLEEQLNHLLLWLSPIRNQLEIYNQPNQEGPFDVKETEIAVQAKQPDVEEILSKGQHLYKEKPATQPVKRKLEDLSSEWKAVNRLLQELRAKQPDLAPGLTTIGASPTQTVTLVTQPVVTKETAISKLEMPSSLMLEVPALADFNRAWTELTDWLSLLDQVIKSQRVMVGDLEDINEMIIKQKATMQDLEQRRPQLEELITAAQNLKNKTSNQEARTIITDRIERIQNQWDEVQEHLQNRRQQLNEMLKDSTQWLEAKEEAEQVLGQARAKLESWKEGPYTVDAIQKKITETKQLAKDLRQWQTNVDVANDLALKLLRDYSADDTRKVHMITENINASWRSIHKRVSEREAALEETHRLLQQFPLDLEKFLAWLTEAETTANVLQDATRKERLLEDSKGVKELMKQWQDLQGEIEAHTDVYHNLDENSQKILRSLEGSDDAVLLQRRLDNMNFKWSELRKKSLNIRSHLEASSDQWKRLHLSLQELLVWLQLKDDELSRQAPIGGDFPAVQKQNDVHRAFKRELKTKEPVIMSTLETVRIFLTEQPLEGLEKLYQEPRELPPEERAQNVTRLLRKQAEEVNTEWEKLNLHSADWQRKIDETLERLRELQEATDELDLKLRQAEVIKGSWQPVGDLLIDSLQDHLEKVKALRGEIAPLKENVSHVNDLARQLTTLGIQLSPYNLSTLEDLNTRWKLLQVAVEDRVRQLHEAHRDFGPASQHFLSTSVQGPWERAISPNKVPYYINHETQTTCWDHPKMTELYQSLADLNNVRFSAYRTAMKLRRLQKALCLDLLSLSAACDALDQHNLKQNDQPMDILQIINCLTTIYDRLEQEHNNLVNVPLCVDMCLNWLLNVYDTGRTGRIRVLSFKTGIISLCKAHLEDKYRYLFKQVASSTGFCDQRRLGLLLHDSIQIPRQLGEVASFGGSNIEPSVRSCFQFANNKPEIEAALFLDWMRLEPQSMVWLPVLHRVAAAETAKHQAKCNICKECPIIGFRYRSLKHFNYDICQSCFFSGRVAKGHKMHYPMVEYCTPTTSGEDVRDFAKVLKNKFRTKRYFAKHPRMGYLPVQTVLEGDNMETPASSPQLSHDDTHSRIEHYASRLAEMENSNGSYLNDSISPNESIDDEHLLIQHYCQSLNQDSPLSQPRSPAQILISLESEERGELERILADLEEENRNLQAEYDRLKQQHEHKGLSPLPSPPEMMPTSPQSPRDAELIAEAKLLRQHKGRLEARMQILEDHNKQLESQLHRLRQLLEQPQAEAKVNGTTVSSPSTSLQRSDSSQPMLLRVVGSQTSDSMGEEDLLSPPQDTSTGLEEVMEQLNNSFPSSRGHNVGSLFHMADDLGRAMESLVSVMTDEEGAE

SEQ ID NO: 54546 - protein, 484 aa, Homo sapiens
  MOD_RES (1)..(1): Any amino acid
XNIQSSASQPPRPQQGQVKLTMAQLTQLTQGHGGNQGLTVVIQGQGQTTGQLQLIPQGVTVLPGPGQQLMQAAMPNGTVQRFLFTPLATTATTASTTTTTVSTTAAGTGEQRQSKLSPQMQVHQDKTLPPAQSSSVGPAEAQPQTAQPSAQPQPQTQPQSPAQPEVQTQPEVQTQTTVSSHVPSEAQPTHAQSSKPQVAAQSQPQSNVQGQSPVRVQSPSQTRIRPSTPSQLSPGQQSQVQTTTSQPIPIQPHTSLQIPSQGQPQSQPQVVMKHNAVIEHLKQKKSMTPAEREENQRMIVCNQVMKYILDKIDKEEKQAAKKRKREESVEQKRSKQNATKLSALLFKHKEQLRAEILKKRALLDKDLQIEVQEELKRDLKIKKEKDLMQLAQATAVAAPCPPVTPAPPAPPAPPPSPPPPPAVQHTGLLSTPTLPAASQKRKREEEKDSSSKSKKKKMISTTSKETKKDTKLYCICKTPYDESK

SEQ ID NO: 54547 - protein, 37 aa, Homo sapiens
MRGCAADDIMDPTSLAETQEDHNGGQKQLSPQKVTLY

SEQ ID NO: 54548 - protein, 223 aa, Homo sapiens
MALRHLALLAGLLVGVASKSMENTAQLPECCVDVVGVNASCPGASLCGPGCYRRWNADGSASCVRCGNGTLPAYNGSECRSFAGPGAPFPMNRSSGTPGRPHPGAPRVAASLFLGTFFISSGLILSVAGFFYLKRSSKLPRACYRRNKAPALQPGEAAAMIPPPQSSAPPEDRRSRPPPGPPEQPSLQWCWVRRTQESARTEAALRQAGAAPGQGHGSRCLPG

SEQ ID NO: 54549 - protein, 118 aa, Homo sapiens
MDYTLDLSVTTVTDYYYPDIFSSPCDAELIQTNDLLSAGPVGVWDCNVQSGVWLLLHWLLQQHVFHHPHECGQVPGCCPCRVCPKGEDDQDGHNAVPGSMANRHYGYHPIASVLPSGL

SEQ ID NO: 54550 - protein, 338 aa, Homo sapiens
MLLLSSSISLYKDRNEARLISSQNNAGLEDFERKKTLGTGSFGRVMLVKHKATEQYYAMKILDKQKVVKLKQIEHTLNEKRILQAVNFPFLVRLEYAFKDNSNLYMVMEYVPGGEMFSHLRRIGRFSEPHARFYAAQIVLTFEYLHSLDLIYRDLKPENLLIDHQGYIQVTDFGFAKRVKGRTWTLCGTPEYLAPEIILSKGYNKAVDWWALGVLIYEMAAGYPPFFADQPIQIYEKIVSGKVRFPSHFSSDLKDLLRNLLQVDLTKRFGNLKNGVSDIKTHKWFATTDWIAIYQRKVEAPFIPKFRGSGDTSNFDDYEEEDIRVSITEKCAKEFGEF

SEQ ID NO: 54551 - protein, 33 aa, Homo sapiens
EEMIRHREQEELRRQQEGFKPNYMENYVCHFLR

SEQ ID NO: 54552 - protein, 128 aa, Homo sapiens
  MOD_RES (1)..(1): Any amino acid
XSDRYIAPTVLVDVQETEPVMQEEIFGPILPIVNVQSVDEAIKFINRQEKPLALPQWDGPVPRQVHLRHLLPPPHLPARPLRPGEIKGDPLPTLYRLEPAAVTLGHGLPELHPPVSVPPASNGSHRET

SEQ ID NO: 54553 - protein, 80 aa, Homo sapiens
  MOD_RES (1)..(1): Any amino acid
XGTAPPLLHTRPAHLAEQVWGSGARPWKAPHPGPSTHTSRSPEGAAGPMGRGRHRGTPWGRQGAWPEELCVWKLAGHTGN

SEQ ID NO: 54554 - protein, 43 aa, Homo sapiens
  MOD_RES (1)..(1): Any amino acid
XIVEGHLTKAVEETKLSKVGKWTALNKSPSPQQSRHDPHYNLI

SEQ ID NO: 54555 - protein, 215 aa, Homo sapiens
  MOD_RES (1)..(1): Any amino acid
XADPLCAPARNPCANGGLCTVLAPGEVGCDCSHTGFGGKFCSEEEHPMEVGSLLFSEGGAGRGGAGDVHQPTKGKEEFVATFKGNEFFCYDLSHNPIQSSTDEITLAFRTLQRNGLMLHTGKSADYVNLSLKSGAVWLVINLGSGAFEALVEPVNGKFNDNAWHDVRVTRNLRQVTISVDGILTTTGYTQEDYTMLGSDDFFYIGGSPNTADLPG

SEQ ID NO: 54556 - protein, 463 aa, Homo sapiens
MCTLCTTMRGSYRRCPWISLSVCLSLCLCHCLLTPLSPSLFPPSQTLPSLPLGPPAHMSGISAWTGSSLPTEAAPGDLEGFKLGGSDTWGPQYDELPHYPGIVDGPAALASFPETVPAVPGPYGPHRPPQPLPPGLDSDGLKREKDEIYGHPLFPLLALVFEKCELATCSPRDGAGAGLGTPPGGDVCSSDSFNEDIAAFAKQVRSERPLFSSNPELDNLMIQAIQVLRFHLLELEKVHDLCDNFCHRYITCLKGKMPIDLVIEDRDGGCREDFEDYPASCPSLPDQNNMWIRDHEDSGSVHLGTPGPSSGGLASQSGDNSSDQGDGLDTSVASPSSGGEDEDLDQERRRNKKRGIFPKVATNIMRAWLFQHLSHPYPSEEQKKQLAQDTGLTILQVNNWFINARRRIVQPMIDQSNRTGQGAAFSPEGQPIGGYTETQPHVAVRPPGSVGMSLNLEGEWHYL

SEQ ID NO: 54557 - protein, 288 aa, Homo sapiens
MGSNSEVARLLASSDPLAQIAEDKPYAELWMGTHPRGDAKILDNRISQKTLSQWIAENQDSLGSKVKDTFNGNLPFLFKVLSVETPLSIQAHPNKELAEKLHLQAPQHYPDANHKPEMAIALTPFQGLCGFRPVEEIVTFLKKVPEFQFLIGDEAATHLKQTMSHDSQAVASSLQSCFSHLMKSEKKVVVEQLNLLVKRISQQAAAGNNMEDIFGELLLQLHQQYPGDIGCFAIYFLNLLTLKPGEAMFLEANVPHAYLKGDCVECMACSDNTVRAGLTPKFIDVPTL

SEQ ID NO: 54558 - protein, 308 aa, Homo sapiens
MALTLGTPPQVTLLSLFPCRDPPTVMVVFTVALCGNVLLIFLIYLDAGLHTPMYFFLSQLSLMDLMLVCNIVPKMAANFLSGRKSISFVGCGIQIGFFVSLVGSEGLLLGLMAYDRYVAVSHPLHYPILMNQRVCLQITGSSWAFGIIDGVIQMVAAMGLPYCGSRSVDHFFCEVQALLKLACADTSLFDTLLFACCVFMLLLPFSIIMASYACILGAVLRIRSAQAWKKALATCSSHLTAVTLFYGAAMFMYLRPRRYRAPSHDKVASIFYTVLTPMLNPLIYSLRNGEVMGALRKGLDRCRIGSQH

SEQ ID NO: 54559 - protein, 127 aa, Homo sapiens
MLKKQSAGLVLWGAILFVAWNALLLLFFWTRPAPGRPPSVSALDGDPASLTREVIRLAQDAEVELERQRGLLQQIGDALSSQRGRVPTAAPPAQPRVPVTPAPAVIPILVIACDRSTVRRCLDKLLH

SEQ ID NO: 54560 - protein, 110 aa, Homo sapiens
MATELEYESVLCVKPDVSVYRIPPRASNRGYRASDWKLDQPDWTGRLRITSKGKTAYIKLEDKVSGELFAQAPVEQYPGIAVETVTDSSRYFVIRIQDGTGSLQVGKAGI

SEQ ID NO: 54561 - protein, 21 aa, Homo sapiens
  MOD_RES (1)..(1): Any amino acid
XFSGGYNKLIFGAGTRLAVHP

SEQ ID NO: 54562 - protein, 367 aa, Homo sapiens
MDSKKRSSTEAEGSKERGLVHIWQAGSFPITPERLPGWGGKTVLQAALGVKHGVLLTEDGEVYSFGTLPWRSGPVEICPSSPILENALVGQYVITVATGSFHSGAVTDNGVAYMWGENSAGQCAVANQQYVPEPNPVSIADSEASPLLAVRILQLACGEEHTLALSISREIWAWGTGCQLGLITTAFPVTKPQKDLKPVPERCNQCSQLLITMTDKEDHVIISDSHCCPLGVTLTESQAENHASTALSPSTETLDRQEEVFENTLVANDQSVATELNAVSAQITSSDAMSSQQNVMGTTEISSARNIPSYPDTQAVNEYLRKLSDHSVREDSEHGEKPVPSQVPAQFYKIKVCLELNCMGFSLETLK

SEQ ID NO: 54563 - protein, 148 aa, Homo sapiens
MPKNKKRNTPHRGSSAGGGGSGAAAATAATAGGQHRNVQPFSDEDASIETMSHCSGYSDPSSFAEDGPEVLDEEGTQEDLEYKLKGLIDLTLDKSAKTRQAALEGIKNALASKMLYEFILERRMTLTDSIERCLKKGNALIFESQTYN

SEQ ID NO: 54564 - protein, 105 aa, Homo sapiens
MAPEENAGTELLLQGFERRFLAVRTLRSFPWQSSGGSVTLSKSTAIISHGTTGLVTWDAALYLAEWAIENPAAFINRRAVLPRSHRVAGRGPAEAGCLPGAQAGS

SEQ ID NO: 54565 - protein, 55 aa, Homo sapiens
MLDDNNHLIQCIMDSQNKGKTSECSQYQQMLHTNLVYLATIADSNQNMQSLLPAV

SEQ ID NO: 54566 - protein, 460 aa, Homo sapiens
  MOD_RES (1)..(1): Any amino acid
XEEERLVLLENQKHLPVEEQLKLLLERLDEVNASKQSVGRSRRAKMIKKEMTALRRKLAHQRETGRDGPERHGPSSRGSLTPHPAACDKDGQTDSAAEESSSQETSKGLGPNMSSTPAHEVGRRTSVLFSKKNPKTAGPPKRPGRPPKNRESQMTPSHGGSPVGPPQLPIMSSLRQRKRGRSPRPSSSSDSDSDKSTEDPPMGEPYHHPAPQENLPANGFSGGNQPVKKSFLVYRNDCSLPRSSSDSESSSSSSSSAASDRTSTTPSKQGRGKPSFSRGTFPEDSSEDTSGTENEAYSVGTGRGVGHSMVRKSLGRGAGWLSEDEDSPLDALDLVWAKCRGYPSYPALIIDPKMPREGMFHHGVPIPVPPLEVLKLGEQMTQEAREHLYLVLFFDNKRTWQWLPRTKLVPLGVNQDLDKEKMLEGRKSNIRKSVQIAYHRALQHRSKVQGEQSSETSDSD

SEQ ID NO: 54567 - protein, 513 aa, Homo sapiens
MADYLISGGTSYVPDDGLTAQQLFNCGDGLTYNDFLILPGYIDFTADQVDLTSALTKKITLKTPLVSSPMDTVTEAGMAIAMAKYEQGFITDPVVLSPKDRVRDVFEAKARHGFCGIPITDTGRMGSRLVGIISSRDIDFLKEEEHDCFLEEIMTKREDLVVAPAGITLKEANEILQRSKKGKLPIVNEDDELVAIIARTDLKKNRDYPLASKDAKKQLLCGAAIGTHEDDKYRLDLLAQAGVDVVVLDSSQGNSIFQINMIKYIKDKYPNLQVIGGNVVTAAQAKNLIDAGVDALRVGMGSGSICITQEVAPKIPPDIKSHSPKCPSTVTGCYMLACGRPQATAVYKVSEYARRFGVPVIADGGIQNVGHIAKALALGASTVMMGSLLAATTEAPGEYFFSDGIRLKKYRGMGSLDAMDKHLSSQNRYFSEADKIKVAQGVSGAVQDKGSIHKFVPYLIAGIQHSCQDIGAKSLTQVRAMMYSGELKFEKRTSSAQVEGGVHSLHSYEKRLF

SEQ ID NO: 54568 - protein, 186 aa, Homo sapiens
MEALPLLAATTPDHGRHRRLLLLPLLLFLLPAGAVQGWETEERPRTREEECHFYAGGQVYPGEASRVSVADHSLHLSKAKISKPAPYWEGTAVIDGEFKELKLTDYRGKYLVFFFYPLDFTFVCPTEIIAFGDRLEEFRSINTEVVACSVDSQFTHLAWSVSYTYIRRKKRMDLLLKHGQITLDMI

SEQ ID NO: 54569 - protein, 105 aa, Homo sapiens
MLGSGFKAERLRVNLRLVINRLKLLEKKKTELAQKARKEIADYLAAGKDERARIRVEHIIREDYLVEAMEILELYCDLLLARFGLIQSMKELDSGLAESVSTLIW

SEQ ID NO: 54570 - protein, 259 aa, Homo sapiens
  MOD_RES (1)..(1): Any amino acid
XNRGARYRLGPELEICGYGCWDHYYESDTLLHSFQVLAALVESPVTQDIICDVGMPVMHRNVRYNCRVIFLNRKILLIRPKMALANEGNYRELRWFTPWSRSRHTEEYFLPRMIQDLTKQETVPFGDAVLVTWDTCIGSEICEELWTPHSPHIDMGLDGVEIITNASGSHQVLRKANTRVDLVTMVTSKNGGIYLLANQKGCDGDRLYYDGCAMIAMNGSVFAQGSQFSLDDVQTRKNGLLLPQMETNPKCTNTTKSNF

SEQ ID NO: 54571 - protein, 155 aa, Homo sapiens
MIATPLKHSRIYLPPEASSQRRNLPMDAIFFDSIPSGTLTPVKDLVKYQNSSLKLNDHKKNQFLKMTTFNNKNIFQSTMLTEATTSNSSLDISAIKPNKDGLKNKANYESPGKIFLRMKEKVLRDKQEQPSRNSSLLEPQKSGNNETFTPNRVEK

SEQ ID NO: 54572 - protein, 270 aa, Homo sapiens
MLGFVGRVAAAPASGALRRLTPSASLPPAQLLLRAAPTAVHPVRDYAAQTSPSPKAGAATGRIVAVIGAVVDVQFDEGLPPILNALEVQGRETRLVLEVAQHLGLFGGAGVGKTVLIMELINNVAKAHGGYSVFAGVGERTREGNDLYHEMIESGVINLKDATSKVALVYGQMNEPPGARARVALTGLTVAEYFRDQEGQDVLLFIDNIFRFTQAGSEVSALLGRIPSAVGYQPTLATDMGTMQERITTTKKGSITSVQAIYVPADDLTD

SEQ ID NO: 54573 - protein, 40 aa, Homo sapiens
  MOD_RES (1)..(1): Any amino acid
XNDSQPLTVYFSLSLLQIMDVDEKNQVLTTNIWLQMNIQG

SEQ ID NO: 54574 - protein, 111 aa, Homo sapiens
MFIGGLSWDTTKKDLKDYFSKFGEVVDCTLKLDPITGRSRGFGFVLFKESESVDKVMDQKEHKLNGKVIDPKRAKAMKTKEPVKKIFVGGLSPDTPEEKIREYFGGFGEVE

SEQ ID NO: 54575 - protein, 92 aa, Homo sapiens
MVCFDCGAKNPSWASITYGVFLCIDCSGSHRSLGVHLSFIRSTELDSNWSWFQLRCMQVGGNASASSFFHQHGCSTNDTNAKYNSRAAQLYR

SEQ ID NO: 54576 - protein, 106 aa, Homo sapiens
MAEAEGESLESWLNKATNPSNRQEDWEYIIGFCDQINKELEGPQIAVRLLAHKIQSPQEWEALQALTVLEACMKNCGRRFHNEVGKFRFLNELIKVVSPKRARPWR

SEQ ID NO: 54577 - protein, 18 aa, Homo sapiens
KSLLESMGCSQSLWPLSR

SEQ ID NO: 54578 - protein, 121 aa, Homo sapiens
MAAPWASLRLVAPMWNGRIRGIHRLGAAVAPEGNQKKKRTILQFLTNYFYDVEALRDYLLQREMYKVHEKNRFRDKEWIRPDKYGHFSQEFWNFCEVPVEAVDAGDCDINYEGLDNLLKTV

SEQ ID NO: 54579 - protein, 509 aa, Homo sapiens
ELTGGGTTFSVRKTAYCDVHTPPGCTRRPLNIYGDVEMKNGVCRKESSVKTVRSTSKVRKKAKKAKKALAEPCAVLPTVCAPYIPPQRLNRIANQVAIQRKKQFVERAHSYWLLKRLSRNGAPLLRRLQSSLQSQRSSQQRENDEEMKAAKEKLKYWQRLRHDLERARLLIELLRKREKLKREQVKVEQVAMELRLTPLTVLLRSVLDQLQDKDPARIFAQPVSLKEVPDYLDHIKHPMDFATMRKRLEAQGYKNLHEFEEDFDLIIDNCMKYNARDTVFYRAAVRLRDQGGVVLRQARREVDSIGLEEASGMHLPERPAAAPRRPFSWEDVDRLLDPANRAHLGLEEQLRELLDMLDLTCAMKSSGSRSKRAKLLKKEIALLRNKLSQQHSQPLPTGPGLEGFEEDGAALGPEAGEEARDQNLFVCSPSEVGDSSAAKEKVAEHMRRLRGGGGVPRKAPGRRSHQRLWGCEERAGAGRRPGEEGHTPTTLCLRVQHLLQQQPALRLEL

SEQ ID NO: 54580 - protein, 219 aa, Homo sapiens
MAPASRLLALWALAAVALPGSGAEGDGGWRPGGPGAVAEEERCTVERRADLTYAEFVQQYAFVRPVILQGLTDNSRFRALCSRDRLLASFGDRVVRLSTANTYSYHKVDLPFQEYVEQLLHPQDPTSLGNDTLYFFGDNNFTEWASLFRHYSPPPFGLLGTAPAYSFGIAGAGSGVPFHWHGPGYSEVIYGRKVLYFPDRWWHATLNLDTSVFISTFLG

SEQ ID NO: 54581 - protein, 262 aa, Homo sapiens
MEGQTPGSRGLPEKPHPATAAATLSSMGAVFILMKSALGAGLLNFPWAFSKAGGVVPAFLVELVSLVFLISGLVILGYAAAVSGQATYQGVVRGLCGPAIGKLCEACFLLNLLMISVAFLRVIGDQLEKLCDSLLSGTPPAPQPWYADQRFTLPLLSVLVILPLSAPREIAFQKYTSILGTLAACYLALVITVQYYLWPQGLVRESHPSLSPASWTSVFSVFPTICFGFQCHEAAVSIYCSMRKRSLSHWALVSVLSLLACC

SEQ ID NO: 54582 - protein, 899 aa, Homo sapiens
  MOD_RES (1)..(1): Any amino acid
XEIQLSKSDVVLSFTLEIVIMEVQGLKSVAPNRIVYCTMEVEGEKLQTDQAEASRPQWGTQGDFTTTHPRPVVKVKLFTESTGVLALEDKELGRVILYPTSNSSKSAELHRMVVPKNSQDSDLKIKLAVRMDKPAHMKHSGYLYALGQKVWKRWKKRYFVLVQVSQYTFAMCSYREKKSEPQELMQLEGYTVDYTDPHPGLQGGCMFFNAVKEGDTVIFASDDEQDRILWVQAMYRATGQSYKPVPAIQTQKLNPKGGTLHADAQLYADRFQKHGMDEFISANPCKLDHAFLFRILQRQTLDHRLNDSYSCLGWFSPGQVFVLDEYCARYGVRGCHRHLCYLAELMEHSENGAVIDPTLLHYSFAFCASHVHGNRPDGIGTVSVEEKERFEEIKERLSSLLENQISHFRYCFPFGRPEGALKATLSLLERVLMKDIATPIPAEEVKKVVRKCLEKAALINYTRLTEYAKIEETMNQASPARKLEEILHLAELCIEVLQQNEEHHAEAFAWWPDLLAEHAEKFWALFTVDMDTALEAQPQDSWDSFPLFQLLNNFLRNDTLLCNGKFHKHLQEIFVPLVVRYVDLMESSIAQSIHRGFEQETWQPVNNGSATSEDLFWKLDALQMFVFDLHWPEQEFAHHLEQRLKLMASDMLEACVKRTRTAFELKLQKASKTTDLRIPASVCTMFNVLVDAKKQSTKLCALDGGQEQQYHSKIDDLIDNSVKEIISLLVSKFVSVLEGVLSKLSRYDEGTFFSSILSFTVKAAAKYVDVPKPGMDLADTYIMFVRQNQDILREKVNEEMYIEKLFDQWYSSSMKVICVWLTDRLDLQLHIYQLKTLIKIVKKTYRDFRLQGVLEGTLNSKTYDTVHRRLTVEEATASVSEGGGLQGITMKDSDEEEEG

SEQ ID NO: 54583 - protein, 41 aa, Homo sapiens
MDTESNRRANLALPQEPSSVPAFEVLEISPQEVSSGRLLKS

SEQ ID NO: 54584 - protein, 722 aa, Homo sapiens
METSDIQIFYQEDPECQNLSENSCPPSEVSDTNLYSPFKPRNYQLELALPAMKGKNTIICAPTGCGKTFVSLLICEHHLKKFPQGQKGKVVFFANQIPVYEQQKSVFSKYFERHGYRVTGISGATAENVPVEQIVENNDIIILTPQILVNNLKKGTIPSLSIFTLMIFDECHNTSKQHPYNMIMFNYLDQKLGGSSGPLPQVIGLTASVGVGDAKNTDEALDYICKLCASLDASVIATVKHNLEELEQVVYKPQKFFRKVESRISDKFKYIIAQLMRDTESLAKRICKDLENLSQIQNREFGTQKYEQWIVTVQKACMVFQMPDKDEESRICKALFLYTSHLRKYNDALIISEHARMKDALDYLKDFFSNVRAAGFDEIEQDLTQRFEEKLQELESVSRDPSNENPKLEDLCFILQEEYHLNPETITILFVKTRALVDALKNWIEGNPKLSFLKPGILTGRGKTNQNTGMTLPAQKCILDAFKASGDHNILIATSVADEGIDIAQCNLVILYEYVGNVIKMIQTRGRGRARGSKCFLLTSNAGVIEKEQINMYKEKMMNDSILRLQTWDEAVFREKILHIQTHEKFIRDSQEKPKPVPDKENKKLLCRKCKALACYTADVRVIEECHYTVLGDAFKECFVSRPHPKPKQFSSFEKRAKIFCARQNCSHDWGIHVKYKTFEIPVIKIESFVVEDIATGVQTLYSKWKDFHFEKIPFDPAEMSK

SEQ ID NO: 54585 - protein, 358 aa, Homo sapiens
MASTSRRQRRERRFRRYLSAGRLVRAQALLQRHPGLDVDAGQPPPLHRACARHDAPALCLLLRLGADPAHQDRHGDTALHAAARQGPDAYTDFFLPLLSRCPSAMGIKNKDGETPGQILGWGPPWDSAEEEEEDDASKEREWRQKLQGELEDEWQEVMGRFEGDASHETQEPESFSAWSDRLAREHAQKCQQQQREAEGSRRPPRAEGSSQSWRQQEEEQRLFRERARAKEEELRESRARRAQEALGDREPKPTRAGPREEHPRGAGRGSLWRFGDVPWPCPGGGDPEAMAAALVARGPPLEEQGALRRYLRVQQVRWHPDRFLQRFRSQIETWELGRVMGAVTALSQALNRHAEALK

SEQ ID NO: 54586 - protein, 70 aa, Homo sapiens
  MOD_RES (1)..(1): Any amino acid
XKFDDLDGTHALMSRMVQNEIPYFIWTTRRDVLDCRFLSKDQMINHYARAGSFTTKRRGFTVLARMVSIS

SEQ ID NO: 54587 - protein, 149 aa, Homo sapiens
PPEDPNQDPPEDDSTCQCQACGPHQAAGPDLGSSNDGCPQLFQERSVIVENSSGSTSASELLKPMKKRKRREYQSPSEEESEPEAMEKQEEGKDPEGQPTASTPESEEWSSSQPATGEKKECWSWESYLEEQKAITAPVSLFQDPTRQG

SEQ ID NO: 54588 - protein, 140 aa, Homo sapiens
LNECAKPHLCGDGGFCINFPGHYKCNCYPGYRLKASRPPVCEDIDECRDPSSCPDGKCENKPGSFKCIACQPGYRSQGGGACRDVNECAEGSPCSPGWCENLPGSFRCTCAQGYAPAPDGRSCLGERQHPRPGPPPPPTR

SEQ ID NO: 54589 - protein, 133 aa, Homo sapiens
  MOD_RES (1)..(1): Any amino acid
XPPGRDKEEEEEVAGGDCIGSTVYSKHWLFGVLSGLIQIVSPENTKSSSDDEEQLTELDEEMENEICRALTKETVAQGVKEGQLSKQKCSSAFQNLLPFYSPVVEDFIKILREVDKALADDLEKNFPSLKVQT

SEQ ID NO: 54590 - protein, 487 aa, Homo sapiens
MVSPLPPPHCPGAALHVQPYKAAASHGPHGASPGGAGSMPLKLVGKVLLKGSTRVTPSVQPHLQPIRNMSVSRTMEDSCELDLVYVTERIIAVSFPSTANEENFRSNLREVAQMLKSKHGGNYLLFNLSERRPDITKLHAKVLEFGWPDLHTPALEKICSICKAMDTWLNADPHNVVVLHNKGNRGRIGVVIAAYMHYSNISASADQALDRFAMKRFYEDKIVPIGQPSQRRYVHYFSGLLSGSIKMNNKPLFLHHVIMHGIPNFESKGGCRPFLRIYQAMQPVYTSGIYNIPGDSQTSVCITIEPGLLLKGDILLKCYHKKFRSPARDVIFRVQFHTCAIHDLGVVFGKEDLDDAFKDDRFPEYGKVEFVFSYGPEKIQGMEHLENGPSVSVDYNTSDPLIRWDSYDNFSGHRDDGMEEVVGHTQGPLDGSLYAKVKKKDSLHGSTGAVNATRPTLSATPNHVEHTLSVSSDSGNSTASTKTDKTD

SEQ ID NO: 54591 - protein, 217 aa, Homo sapiens
MTAEDSTAAMSSDSAAGSSAKVPEGVAGAPNEAALLALMERTGYSMVQENGQRKYGGPPPGWEGPHPQRGCEVFVGKIPRDVYEDELVPVFEAVGRIYELRLMMDFDGKNRGYAFVMYCHKHEAKRAVRELNNYEIRPGRLLGVCCSVDNCRLFIGGIPKMKKREEILEEIAKVTEGVLDVIVYASAADKMKNRGFAFVEYESHRAAAMARRKLMPG

SEQ ID NO: 54592 - protein, 275 aa, Homo sapiens
MYVRVSFDTKPDLLLHLMTKEWQLELPKLLISVHGGLQNFELQPKLKQVFGKGLIKAAMTTGAWIFTGGVNTGVIRHVGDALKDHASKSRGKICTIGIAPWGIVENQEDLIGRDVVRPYQTMSNPMSKLTVLNSMHSHFILADNGTTGKYGAEVKLRRQLEKHISLQKINTRCLPFFSLDSRLFYSFWGSCQLDSVGIGQGVPVVALIVEGGPNVISIVLEYLRDTPPVPVVVCDGSGRASDILAFGHKYSEEGGSKYITNLKRERKKEEESKGI

SEQ ID NO: 54593 - protein, 1022 aa, Homo sapiens
MGVRNCLYGNNMSGQRDIPPEIGEQPEQPPLEAPGAAAPGAGPSPAEEMETEPPHNEPIPVENDGEACGPPEVSRPNFQVLNPAFREAGAHGSYSPPPEEAMPFEAEQPSLGGFWPTLEQPGFPSGVHAGLEAFGPALMEPGAFSGARPGLGGYSPPPEEAMPFEFDQPAQRGCSQLLLQVPDLAPGGPGAAGVPGAPPEEPQALRPAKAGSRGGYSPPPEETMPFELDGEGFGDDSPPPGLSRVIAQVDGSSQFAAVAASSAVRLTPAANAPPLWVPGAIGSPSQEAVRPPSNFTGSSPWMEISGPPFEIGSAPAGVDDTPVNMDSPPIALDGPPIKVSGAPDKRERAERPPVEEEAAEMEGAADAAEGGKVPSPGYGSPAAGAASADTAARAAPAAPADPDSGATPEDPDSGTAPADPDSGAFAADPDSGAAPAAPADPDSGAAPDAPADPDSGAAPDAPADPDAGAAPEAPAAPAAAETRAAHVAPAAPDAGAPTAPAASATRAAQVRRAASAAPASGARRKIHLRPPSPEIQAADPPTPRPTRASAWRGKSESSRGRRVYYDEGVASSDDDSSGDESDDGTSGCLRWFQHRRNRRRRKPQRNLLRNFLVQAFGGCFGRSESPQPKASRSLKVKKVPLAEKRRQMRKEALEKRAQKRAEKKRSKLIDKQLQDEKMGYMCTHRLLLLGAGESGKSTIVKQMRILHVNGFNGDEKATKVQDIKNNLKEAIETIVAAMSNLVPPVELANPENQFRVDYILSVMNVPDFDFPPEFYEHAKALWEDEGVRACYERSNEYQLIDCAQYFLDKIDVIKQADYVPSDQDLLRCRVLTSGIFETKFQVDKVNFHMFDVGGQRDERRKWIQCFNDVTAIIFVVASSSYNMVIREDNQTNRLQEALNLFKSIWNNRWLRTISVILFLNKQDLLAEKVLAGKSKIEDYFPEFARYTTPEDATPEPGEDPRVTRAKYFIRDEFLRISTASGDGRHYCYPHFTCAVDTENIRRVFNDCRDIIQRMHLRQYELL

SEQ ID NO: 54594 - protein, 159 aa, Homo sapiens
MNEIQAIAARLPNVDLVLSQTKQDIARARRLQAEAEEARSRAHAVEGQVEDVVGNLRQGTVALQEAQDTMQGTSRSLRLIQDRVAEVQQVLRPAEKLVTSMTKQLGDFWTRMEELRHQARQQGAEAVQAQQLAEGASEQALSAQEGFERIKQKYAELKD

SEQ ID NO: 54595 - protein, 64 aa, Homo sapiens
MFDCWRFILCKRPGSNSYSSPQRPNEAKKEETDHQIDVSDVIRLVQDTPEATAMATEVSASRPQ

SEQ ID NO: 54596 - protein, 169 aa, Homo sapiens
PVRIPPGIPPGVPRGYVGTGRLSWKKRLSVQTCSTATSSSTATLTADQKLTRSKLPSCRLRSRASKARSSVSIWMLRSSRVRMVSMDSYRAAGGEGSGLPPPIREQRPKKPGDTEGGCINPGRYSCKHRLVQAKFKSSPCHSLAVTMSNLINLSEPVSSSISFQIAVNI

SEQ ID NO: 54597 - protein, 128 aa, Homo sapiens
MISLTDTQKIGMGLTGFGVFFLFFGMILFFDKALLAIGNVLFVAGLAFVIGLERTFRFFFQKHKMKATGFFLGGVFVVLIGWPLIGMIFEIYGFFLLFRGFFPVVVGFIRRVPVLGSLLNLPGIRSTT

SEQ ID NO: 54598 - protein, 149 aa, Homo sapiens
  MOD_RES (1)..(1): Any amino acid
XSDLKRGLKIQAAKFNIDGNNECPIDTRKQLAENLVVIGGTSMLPGFLHRLLAEIRYLVEKPKYKKALGTKTFRIHTPPAKANCVAWLGGAIFGALQDILGSRSVSKEYYNQTGRIPDWCSLNNPPLEMMFDVGKTQPPLMKRAFSTEK

SEQ ID NO: 54599 - protein, 46 aa, Homo sapiens
MWDFVLSPDEINTIYLGGPFSPNVLNWRALKYEVQGEVFTKPQLWP

SEQ ID NO: 54600 - protein, 163 aa, Homo sapiens
MSELDQLRQEAEQLKNQIRITNNIDPVGRIQMRTRRTLRGHLAKIYAMHWGTDSRLLVSASQDGKLIIWDSYTTNKVHAIPLRSSWVMTCAYAPSGNYVACGGLDNICSIYNLKTREGNVRVSRELAGHTGYLSCCRFLDDNQIVTSSGDTTCALWDIETGQQ

SEQ ID NO: 54601 - protein, 150 aa, Homo sapiens
MNKFVGLSNVDPKSESLVVCDVAEDLVEKLRKFRFRKETNNAAIIMKIDKDKRLVVLDEELEGISPDELKDELPERQPRTFIVYSYKYQHDDGRVSYPLCFIFSSPVGCKPEQQMMYAGSKNKLVQTAELTKVFEIRNTEDLTEEWLREK

SEQ ID NO: 54602 - protein, 198 aa, Homo sapiens
  MOD_RES (1)..(1): Any amino acid
XDGTLRLWDLTTGTTTRRFVGHTKDVLSVAFSSDNRQIVSGSRDKTIKLWNTLGVCKYTVQDESHSEWVSCVRFSPNSSNPIIVSCGWDKLVKDGQAMLWDLNEGKHLYTLDGGDIINALCFSPNRYWLCAATGPSIKIWDLEGKIIVDELKQEVISTSSKAEPPQCTSLAWSADGQTLFAGYTDNLVRVWQVTIGTR

SEQ ID NO: 54603 - protein, 65 aa, Homo sapiens
MESGSTAASEEARSLRECELYVQKHNIQALLKDSIVQLCTARPERPMAFLREYFERLEKEEAKQI

SEQ ID NO: 54604 - protein, 145 aa, Homo sapiens
MLTITDFINILHRYYKSALVQIYELEEHKIETWREVYLQDSFKPLVCISPNASLFDAVSSLIRNKIHRLPVIDPESGNTLYILTHKRILKFLKLFITEFPKPEFMSKSLEELQIGTYANIAMVRTTTPVYVALGIFVQHRVSALP

SEQ ID NO: 54605 - protein, 90 aa, Homo sapiens
MTSIFHFAIIFMLILQIRIQLSEESEFLVDRSKNGLIHVPKDLSQKTTILNISQNYISELWTSDILSLSKLRILIISHNRIQYLDISVFK

SEQ ID NO: 54606 - protein, 952 aa, Homo sapiens
MKSARAKTPRKPTVKKGSQTNLKDPVGVYCRVRPLGFPDQECCIEVINNTTVQLHTPEGYRLNRNGDYKETQYSFKQVFGTHTTQKELFDVVANPLVNDLIHGKNGLLFTYGVTGSGKTHTMTGSPGEGGLLPRCLDMIFNSIGSFQAKRYVFKSNDRNSMDIQCEVDALLERQKREAMPNPKTSSSKRQVDPEFADMITVQEFCKAEEVDEDSVYGVFVSYIEIYNNYIYDLLEEVPFDPIKPKPPQSKLLREDKNHNMYVAGCTEVEVKSTEEAFEVFWRGQKKRRIANTHLNRESSRSHSVFNIKLVQAPLDADGDNVLQEKEQITISQLSLVDLAGSERTNRTRAEGNRLREAGNINQSLMTLRTCMDVLRENQMYGTNKMVPYRDSKLTHLFKNYFDGEGKVRMIVCVNPKAEDYEENLQVMRFAEVTQEVEVARPVDKAICGLTPGRRYRNQPRGPVGNEPLVTDVVLQSFPPLPSCEILDINDEQTLPRLIEALEKRHNLRQMMIDEFNKQSNAFKALLQEFDNAVLSKENHMQGKLNEKEKMISGQKLEIERLEKKNKTLEYKIEILEKTTTIYEEDKRNLQQELETQNQKLQRQFSDKRRLEARLQGMVTETTMKWEKECERRVAAKQLEMQNKLWVKDEKLKQLKAIVTEPKTEKPERPSRERDREKVTQRSVSPSPVPLSSNYIAQISNGQQLMSQPQLHRRSNSCSSISVASCISEWEQKIPTYNTPLKVTSIARRRQQEPGQSKTCIVSDRRRGMYWTEGREVVPTFRNEIEIEEDHCGRNAPPIRLRHRRSRSAGDRWVDHKPASNMQTETVMQPHVPHAITVSVANEKALAKCEKYMLTHQELASDGEIETKLIKGDIYKTRGGGQSVQFTDIETLKQESPNGRKRRSSTVAPAQPDGAESEWTDVETRCSVAVEMRAGSQLGPGYQHHAQPKRKKP

SEQ ID NO: 54607 - protein, 197 aa, Homo sapiens
MCLPHFVIHSSVDGHLSCFHHWAVENNTAMNSGVEVSVLVSLLNFLRQVHEIQSCMGRLETADKQSVHIVENEIQASIDQIFSRLERLEILSSKEPPNKRQNARLRVDQLKYDVQHLQTALRNFQHRRHAREQQERQREELLSRTFTTNDSDTTIPMDESLQFNSSLQKVHNGMDDLILDGHNILDGLRTQRLTLKG

SEQ ID NO: 54608 - protein, 276 aa, Homo sapiens
  MOD_RES (1)..(1): Any amino acid
XNSWDAHLGLGACGEAEGLGVQGAEEEEEEEEEEEEEGAGVPACPPKGPGKAPAGGGCRRQRRGGPVAPRARRLRLSASRRAGGSRGLGARRLERRLKESLQNWFRAECLMDYDPRGNRLAWGGQPEALSELTQSPPGDDLAPQDLTGKSRDSASAAGAPSSQDLSPPDVKEEAGWVPERPGPAEEEEELEEGEGERAGVPGRSPRGRAHRRHPQERWRLEYLMELDGGRRGLVCGVCGGALASLKMSTIERHIRRRHPGSTRLGGPVQALIAREW

SEQ ID NO: 54609 - protein, 660 aa, Homo sapiens
MSSGIWQRGKEEEGVYGFLIEDIRKEVNRASKLKCCVCKKNGASIGCVAPRCKRSYHFPCGLQRECIFQFTGNFASFCWDHRPVQIITSNNYRESLPCTICLEFIEPIPSYNILRSPCCKNAWFHRDCLQVQAINAGVFFFRCTICNNSDIFQKEMLRMGIHIPEKDASWELEENAYQELLQHYERCDVRRCRCKEGRDYNAPDSKWEIKRCQCCGSSGTHLACSSLRSWEQNWECLECRGIIYNSGEFQKAKKHVLPNSNNVGITDCLLEESSPKLPRQSPGSQSKDLLRQGSKFRRNVSTLLIELGFQIKKKTKRLYINKANIWNSALDAFRNRNFNPSYAIEVAYVIENDNFGSEHPGSKQEFLSLLMQHLENSSLFEGSLSKNLSLNSQALKENLYYEAGKMLAISLVHGGPSPGFFSKTLFNCLVYGPENTQPILDDVSDFDVAQIIIRINTATTVADLKSIINECYNYLELIGCLRLITTLSDKYMLVKDILGYHVIQRVHTPFESFKQGLKTLGVLEKIQAYPEAFCSILCHKPESLSAKILSELFTVHTLPDVKALGFWNSYLQAVEDGKSTTTMEDILIFATGCSSIPPAGFKPTPSIECLHVDFPVGNKCNNCLAIPITNTYKEFQENMDFTIRNTLRLEKEESSHYIGH

SEQ ID NO: 54610 - protein, 129 aa, Homo sapiens
MTEVVPSSALSEVSLRLLCHDDIDTVKHLCGDWFPIEYPDSWYRDITSNKKFFSLAATYRGAIVGMIVAEIKNRTKIHKEDGDILASNFSVDTQVAYILSLGVVKEFRKHGIGSLLLESLKDHISTTAQ

SEQ ID NO: 54611 - protein, 138 aa, Homo sapiens
MQGSTRRMGVMTDVHRRFLQLLMTHGVLEEWDVKRLQTHCYKVHDRNATVDKLEDFINNINSVLESLYIEIKRGVTEDDGRPIYALVNLATTSISKMATDFAENELDLFRKALELIIDSETGFASSTNILNLVDQLKG

SEQ ID NO: 54612 - protein, 162 aa, Homo sapiens
MAPTCVFLASKVEEFGVVSNTRLIAAATSVLKTRFSYAFPKEFPYRMNHILECEFYLLELMDCCLIVYHPYRPLLQYVQDMGQEDMLLPLAWRIVNDTYRTDLCLLYPPFMIALACLHVACVVQQKDARQWFAELSVDMEKILEIIRVILKLYEQWKNFDER

SEQ ID NO: 54613 - protein, 342 aa, Homo sapiens
QSGEQESEYEQEQGEDELVYHKSDGSELYTQEYPEEGQYEGHEAELTEDQIEYVEEPEEEQLYTDEVLDIEINEPLDEFTGGMETLELQKDIKEESDEEEEDDEESGRLRFKTERKEGTIIRLSDVTRERRNIPETLELSAEAKAALLEFEERERQHKQGRYSSRRGGRRGGPLMCRGVGDQRRESTERGRMKDHRPALLPTQPPVVTHSPRLIPPQPQAPPPPPPPPQQQPIRSLFQPQPLQPLLPVQHPHHPSPPQGMHMPPQLETPRMMMTPPPVTPQQPKNIHINPHFKGTVVTPVQVPLLPVPSQPRPAVGPQRFPGPPEFPQHTPGPVPNSFSQPP

SEQ ID NO: 54614 - protein, 298 aa, Homo sapiens
MEANGLGPQGFPELKNDTFLRAAWGEETDYTPVWCMRQAGRYLPEFRETRAAQDFFSTCRSPEACCELTLQPLRRFPLDAAIIFSDILVVPQALGMEVTMVPGKGPSFPEPLREEQDLERLRDPEVVASELGYVFQAITLTRQRLAGRVPLIGFAGAPWTLMTYMVEGGGSSTMAQAKRWLYQRPQASHQLLRILTDALVPYLVGQVVAGAQALQLFESHAGHLGPQLFNKFALPYIRDVAKQVKARLREAGLAPVPMIIFAKDGHFALEELAQAGYEVVGLDWTVAPKKARRRSGSW

SEQ ID NO: 54615 - protein, 312 aa, Homo sapiens
MSMSPTVIILACLGFFLDQSVWAHVGGQDKPFCSAWPSAVVPQGGHVTLRCHYRRGFNIFTLYKKDGVPVPELYNRIFWNSFLISPVTPAHAGTYRCRGFHPHSPTEWSAPSNPLVIMVTGLYEKPSLTARPGPTVRTGENVTLSCSSQSSFDIYHLSREGEAHELRLPAVPSINGTFQADFPLGPATHGETYRCFGSFHGSPYEWSDASDPLPVSVTGNPSSSWPSPTEPSFKTGIARHLHAVIRYSVAIILFTILPFFLLHRWCSKKKSKPHEAEARELRALCGSRMGARRCCCNEPRACGTQNSEQGGL

SEQ ID NO: 54616 - protein, 77 aa, Homo sapiens
MRKVKKLRLDKENTGSWRSFSLNSEGAERMATTGTPTADRGDAAATDDPAARFQVQKHSWDGLRSIIHGSRKYSGLI

SEQ ID NO: 54617 - protein, 977 aa, Homo sapiens
  MOD_RES (1)..(1): Any amino acid
XQIDMAFNVFFLLYFGLRFIAANDKLWFWLEVNSVVDFFTVPPVFVSVYLNRSWLGLRFLRALRLIQFSEILQFLNILKTSNSIKLVNLLSIFISTWLTAAGFIHLVENSGDPWENFQNNQALTYWECVYLLMVTMSTVGYGDVYAKTTLGRLFMVFFILGGLAMFASYVPEIIELIGNRKKYGGSYSAVSGRKHIVVCGHITLESVSNFLKDFLHKDRDDVNVEIVFLHNISPNLELEALFKRHFTQVEFYQGSVLNPHDLARVKIESADACLILANKYCADPDAEDASNIMRVISIKNYHPKIRIITQMLQYHNKAHLLNIPSWNWKEGDDAICLAELKLGFIAQSCLAQGLSTMLANLFSMRSFIKIEEDTWQKYYLEGVSNEMYTEYLSSAFVGLSFPTVCELCFVKLKLLMIAIEYKSANRESRILINPGNHLKIQEGTLGFFIASDAKEVKRAFFYCKACHDDITDPKRIKKCGCKRLIYFEDEQPSTLSPKKKQRNGGMRNSPNTSPKLMRHDPLLIPGNDQIDNMDSNVKKYDSTGMFHWCAPKEIEKVILTRSEAAMTVLSGHVVVCIFGDVSSALIGLRNLVMPLRASNFHYHELKHIVFVGSIEYLKREWETLHNFPKVSILPGTPLSRADLRAVNINLCDMCVILSANQNNIDDTSLQDKECILASLNIKSMQFDDSIGVLQANSQGFTPPGMDRSSPDNSPVHGMLRQPSITTGVNIPIITELVNDTNVQFLDQDDDDDPDTELYLTQPFACGTAFAVSVLDSLMSATYFNDNILTLIRTLVTGGATPELEALIAEENALRGGYSTPQTLANRDRCRVAQLALLDGPFADLGDGGCYGDLFCKALKTYNMLCFGIYRLRDAHLSTPSQCTKRYVITNPPYEFELVPTDLIFCLMQFDHNAGQSRASLSHSSHSSQSSSKKSSSVHSIPSTANRQNRPKSRESRDKQNATRMNRMGQGMTINGSA

SEQ ID NO: 54618 - protein, 139 aa, Homo sapiens
MSMEDYDFLFKIVLIGNAGVGKTCLVRRFTQGLFPPGQGATIGVDFMIKTVEINGEKVKLQIWDTAGQERFRSITQSYYRSANALILTYDITCEESFRCLPEWLREIEQYASNKVITVLVGNKIDLAERREVSQQRAEE

SEQ ID NO: 54619 - protein, 107 aa, Homo sapiens
MSVIFFACVVRVRDGLPLSASTDFYHTQDFLEWRRRLKSLALRLAQYPGRGSAEGCDFSIHFSSFGDVACMAICSCQCPAAMAFCFLETLWWEFTASYDTTCIGLAS

SEQ ID NO: 54620 - protein, 253 aa, Homo sapiens
MAGPNQLCIRRWTTKHVAVWLKDEGFFEYVDILCNKHRLDGITLLTLTEYDLRSPPLEIKVLGDIKRLMLSVRKLQKIHIDVLEEMGYNSDSPMGSMTPFISALQSTDWLCNGELSHDCDGPITDLNSDQYQYMNGKNKHSVRRLDPEYWKTILSCIYVFIVFGFTSFIMVIVHERVPDMQTYPPLPDIFLDSVPRIPWAFAMTEVCGMILCYIWLLVLLLHKHRSILLRRLCSLMGTVFLLRCFTMFVTSLS

SEQ ID NO: 54621 - protein, 304 aa, Homo sapiens
MSLMVISMACVAFFLLQGAWPHEGFRRKPSLLAHPGPLVKSEETVILQCWSDVMFEHFLLHREGTFNHTLRLIGEHIDGVSKGNFSIGRMTQDLAGTYRCYGSVTHSPYQLSAPSDPLDIVITGLYEKPSLSAQPGPTVLAGESVTLFCSSRSSYDMYHLSREGEAHERRLPAGPKVNGTFQADFPLDPATHGGTYRCFGSFHDSPYEWSKSSDPLLVSVTGNSSNSWPSPTEPSSETGNPRHLHVLIGTSVVKLPFTILLFFLLHRWCSNKKNASVMDQGPAGNRTVNREDSDEQDHQEVSYA

SEQ ID NO: 54622 - protein, 485 aa, Homo sapiens
  MOD_RES (1)..(1): Any amino acid
XAAQPSQKITATKIPKSLPTKPSAPSTSIVPIKSPHPTQKTAPSSFTKSALPTQKQVPPTSRPVPARVSRPAEKPIQRNPGMPRPPPPSTRPLPPTTSSSKKPIPTLARTEAKITSHASKPASARTSTHKPPPFTALSSSPAPTPGSTRSTRPPATMVPPTSGTSTPRTAPAVPTPGSAPTGSKKPIGSEASKKAGPKSSPRKPVPLRPGKAARDVPLSDLTTRPSPRQPQPSQQTTPALVLAPAQFLSSSPRPTSSGYSIFHLAGSTPFPLLMGPPGPKGDCGLPGPPGLPGLPGIPGARGPRGPPGPYGNPGLPGPPGAKGDMGLPGLSGNPGPPGRKGHKGYPGPAGHPGEQGQPGPEGSPGAKGYPGRQGLPGPVGDPGPKGSRGYIGLPGLFGLPGSDGERGLPGVPGKRGKMGMPGFPGVFGERGPPGLDGNPGELGLPGPPGVPGLIGDLGVLGPIGYPGPKGMKGLMGSVGEPGLKG

SEQ ID NO: 54623 - protein, 38 aa, Homo sapiens
MAGAIIENMSTKKLCIVGGILLVFQIIAFLVGGLIAYP

SEQ ID NO: 54624 - protein, 173 aa, Homo sapiens
MSGCGLFLRTTAAARACRGLVVSTANRRLLRTSPPVRAFAKELFLGKIKKKEVFPFPEVSQDELNEINQFLGPVEKFFTEEAYICLIKIFLLAVDSRKIDQEGKIPDETLEKLKSLGLFGLQVPEEYGGLGFSNTMYSRLGEIISMDGSITVTLAAHQAIGLKGIILAGTEEQ

SEQ ID NO: 54625 - protein, 95 aa, Homo sapiens
MNGTLDHPDQPDLDAIKMFVGQVPRTWSEKDLRELFEQYGAVYEINVLRDRSQNPPQSKGCCFVTFYTRKAALEAQNALHNMKVLPGMHHPIQMK

SEQ ID NO: 54626 - protein, 172 aa, Homo sapiens
MAAAAASHLNLDALREVLECPICMESFTEEQLRPKLLHCGHTICRQCLEKLLASSINGVRCPFCSKITRITSLTQLTDNLTVLKIIDTAGLSEAVGLLMCRSCGRRLPRQFCRSCGLVLCEPCREADHQPPGHCTLPVKEAAEERRRDFGEKLTRLRELMGELQRRKAALEG

SEQ ID NO: 54627 - protein, 40 aa, Homo sapiens
MGMTRMLLECSLSDKLCVIQEKQYEVIIVPTLLVTIFLIL

SEQ ID NO: 54628 - protein, 130 aa, Homo sapiens
KLGQMENKTQHQMRVLDKLMVERLSAERTECLNRLQQHSDTEKHEGEKRQISLVDELKTWCMLKIQNLEQKLSGDSRACRAKSTPSTCESSTGNPHTESPFVQKEHDQQLLYSPALKGSTYARAVGNTGW

SEQ ID NO: 54629 - protein, 48 aa, Homo sapiens
MATNWGSLLQDKQQLEELARQAVDRALAEGVLLRTSQEPTSSEHHQTG

SEQ ID NO: 54630 - protein, 40 aa, Homo sapiens
MERAVRVESGVLVGVVCLLLACPATATGYQDAVWARSCSA

SEQ ID NO: 54631 - protein, 156 aa, Homo sapiens
MAVEGSTITSRIKNLLRSPSIKLRRSKAGNRREDLSSKVTLEKVLGITVSGGRGLACDPRSGLVAYPAGCVVVLFNPRKHKQHHILNSSRKTITALAFSPDGKYLVTGESGHMPAVRVWDVAEHSQVAELQEHKYGVACVAFSPSAKYIVSVGYQH

SEQ ID NO: 54632 - protein, 1191 aa, Homo sapiens
MPRGEAPGPGRRGAKDEALGEESGERWSPEFHLQRKLADSSHSEQQDRNRVSEELIMVVQEMKKYFPSERRNKPSTLDALNYALRCVHSVQANSEFFQILSQNGAPQADVSMYSLEELATIASEHTSKNTDTFVAVFSFLSGRLVHISEQAALILNRKKDVLASSHFVDLLAPQDMRVFYAHTARAQLPFWNNWTQRAAARYECAPVKPFFCRIRGGEDRKQEKCHSPFRIIPYLIHVHHPAQPELESEPCCLTVVEKIHSGYEAPRIPVNKRIFTTTHTPGCVFLEVDEKAVPLLGYLPQDLIGTSILSYLHPEDRSLMVAIHQKVLKYAGHPPFEHSPIRFCTQNGDYIILDSSWSSFVNPWSRKISFIIGRHKVRTSPLNEDVFATKIKKMNDNDKDITELQEQIYKLLLQPVHVSVSSGYGSLGSSGSQEQLVSIASSSEASGHRVEETKAEQMTLQQVYASVNKIKNLGQQLYIESMTKSSFKPVTGTRTEPNGGGESANGGGECKTFTSFHQTLKNNSVYTEPCEDLRNDEHSPSYQQINCIDSVIRYLKSYNIPALKRKCISCTNTTSSSSEEDKQNHKADDVQALQAGLQIPAIPKSEMPTNGRSIDTGGGAPQILSTAMLSLGSGISQCGYSSTIVHVPPPETARDATLFCEPWTLNMQPAPLTSEEFKHVGLTAAVLSAHTQKEEQNYVDKFREKILSSPYSSYLQQESRSKAKYSYFQGDSTSKQTRSAGCRKGKHKRKKLPEPPDSSSSNTGSGPRRGAHQNAQPCCPSAASSPHTSSPTFPPAAMVPSQAPYLVPAFPLPAATSPGREYAAPGTAPEGLHGLPLSEGLQPYPAFPFPYLDTFMTVFLPDPPVCPLLSPSFLPCPFLGATASSAISPSMSSAMSPTLDPPPSVTSQRREEEKWEAQSEGHPFITSRSSSPLQLNLLQEEMPRPSESPDQMRRNTCPQTEYCVTGNNGSESSPATTGALSTGSPPRENPSHPTASALSTGSPPMKNPSHPTASTLSMGLPPSRTPSHPTATVLSTGSPPSESPSRTGSAASGSSDSSIYLTSSVYSSKISQNGQQSQDVQKKETFPNVAEEPIWRMIRQTPERILMTYQVPERVKEVVLKEDLEKLESMRQQQPQFSHGQKEELAKVYNWIQSQTVTQEIDIQACVTCENEDSADGAATSCGQVLVEDSC

SEQ ID NO: 54633 - protein, 44 aa, Homo sapiens
MQECSELQLPFYQDPPSVMLDKLSAGMAEQQAILKKSQGDHRGT

SEQ ID NO: 54634 - protein, 118 aa, Homo sapiens
SDWSDWEEHPASAVCLFCEKQAETIEKLYVHMEDAHEFDLLKIKSELGLNFYQQVKLVNFIRRYYFPTYENDTLLCTLSDSESDLTAQEQNENVPIISEDTSKLYALKQSSILNQLLL

SEQ ID NO: 54635 - protein, 182 aa, Homo sapiens
MWLAIEDGNLEEMEEEVRLKKRKRRRNVDKDPAKEDVEKAKKRRGRPPAEKLSPNPPKLTKQMNAIIDTVINYKDRCNVEKVPSNSQLEIEGNSSGRQLSEVFIQLPSRKELPEYYELIRKPVDFKKIKERIRNHKYRSLGDLEKDVMLLCHNAQTFNLEGSQIYEDSIVLQSVFKSARQKI

SEQ ID NO: 54636 - protein, 21 aa, Homo sapiens
MESENRTVIREFILLGLTQSQ

SEQ ID NO: 54637 - protein, 150 aa, Homo sapiens
MAPLALHLLVLVPILLSLVASQDWKAERSQDPFEKCMQDPDYEQLLKVTILEADNRIGGRIFTYRDQNTGWIGELGAMRMPSSHRILHKLCQGLGLNLTKFTQYDKNTWTEVHEVKLRNYVVEKVPEKLGYALRPQEKGHSPEDIYQMAL

SEQ ID NO: 54638 - protein, 427 aa, Homo sapiens
  MOD_RES (1)..(1): Any amino acid
XDMPHSWVEQIEISPEAFETRCPNGKKVIQYKRAKLEKWAPYLNSNGLVSRLTTYEDLQCTNILEIKEWYQNREDMLELKHINKTTDLKTDYFKPGHPQALRVHSYKSMQPEMDRVIEFYETARVDGLMKREETPRTMTEYYQGRPDFLSYRHASFGPRVKKLTLSSAESNPRPIVKITERFFRNPAKPAEEDVAERVFLVAEERIQLRYHCREDHITASKREFLRRTEVDSKGNKIIMTPDMCISFEVLEILKLREEEEAAHTLTISIYDTKRNEKSKEYREAMERMMHEEHLRQVETQLDYLAPFLAQLPPGEKLTCWQAVRLKDECLSDFKQRLINKANLIQARFEKETQELQKKQQWYQENQVTLTPEDEDLYLSYCSQAMFRIRILEQRLNRHKELAPLKYLALEEKLYKDPRLGELQKIFA

SEQ ID NO: 54639 - protein, 90 aa, Homo sapiens
MLAVEVSEAEGGIREWEEEEKEEEAAERTPTGEKSPNSPRTLLSLRGKARTGGPMEVKLELHPLQNRWALWFFKNDRSRAWQDNLHLVTK

SEQ ID NO: 54640 - protein, 111 aa, Homo sapiens
MDSFGQPRPEDNQSVVRRMQKKYWKTKQVFIKATGKKEDEHLVASDAELDAKLEVFHSVQETCTELLKIIEKYQLRLNVAKDLPVDSLEGEDFEKEFSFLNNLLSSGSSST

SEQ ID NO: 54641 - protein, 38 aa, Homo sapiens
MAGIFYFALFSCLFGICDAVTGSRVYPANEVGGSEYHG

SEQ ID NO: 54642 - protein, 108 aa, Homo sapiens
  MOD_RES (1)..(1): Any amino acid
XRSAINEVVTREYTINIHKRIHGVGFKKRAPRALKEIRKFAMKEMGTPDVRIDTRLNKAVWAKGIRNVPYRIRVRLSRKRNEDEDSPNKLYTLVTYVPVTTFKIFFLR

SEQ ID NO: 54643 - protein, 64 aa, Homo sapiens
MERRRLWRGVERGGMPRKACNSFRGARGGTQRPWSQCCGLPRGLGRWLLHHSWVWVPFRADTSA

SEQ ID NO: 54644 - protein, 100 aa, Homo sapiens
MSRELAPLLLLLLSIHSALAMRICSFNVRSFGESKQEDKNAMDVIVKVIKRCDIILVMEIKDSNNRICPILMEKLNRNSRRGITYNYVISSRLGRNTYKE

SEQ ID NO: 54645 - protein, 217 aa, Homo sapiens
MREDLADNWHISSEPEDPVTERSAFTERDAGSGLVTRLRERPALLVSSTSWTEFEQLTLDGHNLPSLVCVITGKGPLREYYSRLIHQKHFQHIQVCTPWLEAEDYPLLLAGSADLGVCLHTSSSGLDLPMKVVDMFGCCLPVCAVNFKCLHELVKHEENGLVFEDSEELAAQLQMLFSNFPDPAGKLNQFRKNLRESQQLRWDESWVQTVLPLVMDT

SEQ ID NO: 54646 - protein, 94 aa, Homo sapiens
MAPPAAPGRDRVGREDEDGWETRGDRKVRAGAMGEQAGGRPCGAGIQCPAPRRPGSPWWRRSGARGSTRACRSCGCCWRAPRCRPSWRTPKCWS

SEQ ID NO: 54647 - protein, 111 aa, Homo sapiens
MKVKIKCWNGVATWLWVANDENCGICRMAFNGCCPDCWSAMARSRLAATSASRVQTVLLPQPSKQLGLQACARRRLPAGVGPVLPLLPHALHPQVAARTAGAAALPHVPPG

SEQ ID NO: 54648 - protein, 227 aa, Homo sapiens
PITEKSNPLTQDLDKADAENIVRLLGQCDAEIFQEEGQALSTYQRLYSESILTTMVQVAGKVQEVLKEPDGGLVVLSGGGTSGRMAFLMSVSFNQLMKGLGQKPLYTYLIAGGDRSVVASREGTEDSALHGIEELKKVAAGKKRVIVIGISVGLSAPFVAGQMDCCMNNTAVFLPVLVGFNPVSMARHPFPPPRILRSLTVFPSLRAPHYQITSLLFSMSVVTLISE

SEQ ID NO: 54649 - protein, 616 aa, Homo sapiens
  MOD_RES (1)..(1): Any amino acid
XRNNVIQLCLELTTIVQQVGWQLKNLVNALREDPSGVILTLKKRPQSMLTSAPALLKNMRWKPLALQPLIPRSPTSSVATPSSTISTPTKRDSSALQDLYIPPPPAEPYIPRDEKGNLPCEDLRGHMVGKPVHKGSESPNSFLDQEYRKRFNIVEEDTVLYCYEYEKGRSSSQGRRESTPTYENSLLRYMSNEKIAQEEYMFQRNSKKDTGKKSKKKGDKSNSPTHYSLLPSLQMDALRQDIMGTPVPETTLYHTFQQSSLQHKSKKKNKGPIAGKSKRRISCKDLGRGDCEGWLWKKKDAKSYFSQKWKKYWFVLKDASLYWYINEEDEKAEGFISLPEFKIDRASECRKKYAFKACHPKIKSFYFAAEHLDDMNRWLNRINMLTAGYAERERIKQEQDYWSESDKEEADTPSTPKQDSPPPPYDTYPRPPSMSCASPYVEAKHSRLSSTETSQSQSSHEEFRQEVTGSSAVSPIRKTASQRRSWQDLIETPLTSSGLHYLQTLPLEDSVFSDSAAISPEHRRQSTLPTQKCHLQDHYGPYPLAESERMQVLNGNGGKPRSFTLPRDSGFNHCCLNAPVSACDPQDDVQPPEVEEEEEEEEEEGEAAGENIGEKS

SEQ ID NO: 54650 - protein, 95 aa, Homo sapiens
MNKPSDGRPKYLVVNADEGEPGTCKDREILRHDPHKLLEGCLVGGRAMGARAAYIYIRGEFYNEASNLQVAIREAYEAGLIGKNACGSGYDFDVF

SEQ ID NO: 54651 - protein, 57 aa, Homo sapiens
MCNTPTYCDLGKAAKDVFNKGYGFGMVKIDLKTKSCSGVLCGNIHSDGIFYFWSCLH

SEQ ID NO: 54652 - protein, 263 aa, Homo sapiens
MKLNMAEEEDYMSDSFINVQEDIRPGLPMLRQIREARRKEEKQQEANLKNRQKSLKEEEQERRDIGLKNALGCENKGFALLQKMGYKSGQALGKSGGGIVEPIPLNIKTGKSGIGHEASLKRKAEEKLESYRKKIHMKNQAEEKAAEQFRMRLKNKQDEMKLEGDLRRSQRACQQLDVQKNIQVPREAWYWLRLEEETEEDEEEKEQDEDEYKSEDLSVLEKLQILTSYLREEHLYCIWCGTAYEDKEDLSSNCPGPTSADHD

SEQ ID NO: 54653 - protein, 165 aa, Homo sapiens
MTLTERLREKISRAFYNHGLLCASYPIPIILFTGFCILACCYPLLKLPLPGTGPVEFTTPVKDYSPPPVDSDRKQGEPTEQPEWRDFPLPCGGYWVRECVGAHQVCGLNPGRPGGEAADRPRPKQRELVHHEEHGHGAGHHPHRLLHPSARHPGVLSLCCRGAGV

SEQ ID NO: 54654 - protein, 293 aa, Homo sapiens
MGRVVAELVSSLLGLWLLLCSCGCPEGAELRAPPDKIAIIGAGIGGTSAAYYLRQKFGKDVKIDLFEREEVGGRLATMMVQGQEYEAGGSVIHPLNLHMKRFVKDLGLSAVQASGGLLGIYNGETLVFEESNWFIINVIKLVWRYGFQSLRMHMWVEDVLDKFMRIYRYQSHDYAFSSVEKLLHALGGDDFLGMLNRTLLETLQKAGFSEKFLNEMIAPVMRVNYGQSTDINAFVGAVSLSCSDSGLWAVEGGNKLVCSGLLQASKSNLISGSVMYIEEKTKTKYTVLGLCPL

SEQ ID NO: 54655 - protein, 74 aa, Homo sapiens
  MOD_RES (1)..(1): Any amino acid
XTTVHRSTYQNHSTETPSLTAAVPSSVSVPRAPSISPSTLSPATSNHSQHYANEDSKMGSTVTAAVIGIIVPIA

SEQ ID NO: 54656 - protein, 44 aa, Homo sapiens
MLETLRERLLSVQQDFTSGLKTLSDKSREAKVKSKPSWLNQEQF

SEQ ID NO: 54657 - protein, 28 aa, Homo sapiens
  MOD_RES (1)..(1): Any amino acid
XIQKREASNCFAIRHFENKFAVETLICS

SEQ ID NO: 54658 - protein, 211 aa, Homo sapiens
MSQQGYVATPPYSQPQPGIGLSPPHYGHYGDPSHTASPTGMMKPAGPLGATATRGMLPPGPPPPGPHQFGQNGAHATGHPPQRFRHGSSKPGTPWPSVSHIIADSSTTSTAFHFAAWISSSSTTTHHTQWSWCLTFASTNVQTRWALWASSSKCPVPAPTSSRPDLGCWISSAAGQLWSPDGRRTTVLPRRLPWRSCTDGWSATAPEEAGS

SEQ ID NO: 54659 - protein, 74 aa, Homo sapiens
MGKQNSKLRPEVMQDLLESTDFTEHEIQEWYKGFLRDCPSGHLSMEEFKKIYGNFFPYGDASKFAEHVFRTFDA

SEQ ID NO: 54660 - protein, 197 aa, Homo sapiens
MYLKDYERKVILEKAGKYVDEENSDGETSNHRLQETSSQSYVEEQKQLKESFRAFVEDSEDEDGAGEGGSSLLQKRAKTRQEKAQEEADYIEWLKGQKEIRNPDSLKELTHLKEYWNDPELDEGERFLRDYILNKRYEEEEEEEEDEEEMEEEEGVHGPPVQLAVDDSSDEGELFLKKQEDFEQKYNFRFEEPDSAS

SEQ ID NO: 54661 - protein, 214 aa, Homo sapiens
  MOD_RES (1)..(1): Any amino acid
XSAMIADYMFWLGGGREESISKLIKLYWQAMIEEAITRAESFSVMYTPFATKIRADKIEKVKDAFTKTHPAYAEYMYTDLQALHMLPQTVDWSSFPPQQYLLTLGFKNKDDGKFLEKISSRKLPIFTEHKTPFGLTREDTVRQMETMGKRILPILDFIRSTQLNGNNSFWKIVSKSFNEIEVGEFSCILRCDGEVAICQPPQPAAESKGAVPGD

SEQ ID NO: 54662 - protein, 721 aa, Homo sapiens
MIDSVKLRRDSAADFFSHYEYLCALQNSVPLPAVRACLREGVLDFNADRLRGVDWAPLLSTLKINKDLPLVSIKSFFQPWLGDTGSDMNKFCRSRVPAIRYKDVTFQLCKALKGCLSISSVLKNLELNGLILRERDLTILAKGLNKSASLVHLSLANCPIGDGGLEIICQGIKSSITLKTVNFTGCNLTWQGADHMAKILKYQTMRRHEETWAESLRYRRPDLDCMAGLRRITLNCNTLIGDLGACAFADSLSEDLWLRALDLQQCGLTNEGAKALLEALETNTTLVVLDIRKNPLIDHSMMKAVIKKVLQNGRSAKSEYQWITSPSVKEPSKTAKQKRRTIILGSGHKGKATIRIGLATKKPVSSGRKHSLGKEYYAPAPLPPGVSGFLPWRTAERAKRHRGFPLIKTRDICNQLQQPGFPVTVTVESPSSSEVEEVDDSSESVHEVPEKTSIEQEALQEKLEECLKQLKEERVIRLKVDKRVSELEHENAQLRNINFSLSEALHAQSLTNMILDDEGVLGSIENSFQKFHAFLDLLKDAGLGQLATMAGIDQSDFQLLGHPQMTSTVSNPPKEEKKALEDEKPEPKQNALGQMQNIQVSICMQSAYNEGTLMKFQKITGDARIPLPLDSFPVPVSTPEGLGTSSNNLGVPATEQRQESFEGFIARMCSPSPDATSGTGSQRKEEELSRNSRSSSEKKTKTGEYTKKHSDKQHPGKDLHS

SEQ ID NO: 54663 - protein, 103 aa, Homo sapiens
EQELKAAADGVLSEVRKKQADTKRMVDILRALEKLRKLRKEAAARKDEFPLAHLLEPFRQYYLQAEHSLPALIQIRHDWDQYLVPSDHPKGNFVPQGWVLPPL

SEQ ID NO: 54664 - protein, 38 aa, Homo sapiens
  MOD_RES (1)..(1): Any amino acid
XSARTVFIDVEEVKNKSCLTFTDDGCGMTPHKLHRMLS

SEQ ID NO: 54665 - protein, 299 aa, Homo sapiens
MDKTFERKLPVSSLTISRLIDNISSREEIDHAEYYLYKFRHSPNCWYLRNWTIHTWIRQCLKYDAQDKALYTLVNKVQYGIFPDNFTFNLLMDSFIKKENYKDALSVVFEVMMQEAFEVPSTQLLSLYVLFHCLAKKTDFSWEEERNFGASLLLPGLKQKNSVGFSSQLYGYALLGKVELQQGLRAVYHNMPLIWKPGYLDRALQVMEKVAASPEDIKLCREALDVLGAVLKALTSADGASEEQSQNDEDNQGSEKLVEQLDIEETEQSKLPQYLERFKALHSKLQALGKIESEGLLSL

SEQ ID NO: 54666 - protein, 17 aa, Homo sapiens
  MOD_RES (1)..(1): Any amino acid
XQCLERFRPPIENSTIA

SEQ ID NO: 54667 - protein, 646 aa, Homo sapiens
  MOD_RES (1)..(1): Any amino acid
XAPEPSPHSGTPQPALGQPAPLLPAAVGAVSLATSQLPSPPLGPTVPPQPPSALESDGEGPPPRVGFVDSTIKSLDEKLRTLLYQEHVPTSSASAGTPVEVGDRDFTLEPLRGDQPRSEVCGGDLALPPVPKEAVSGRVQLPQPLVEKSELAPTRGAVMEQGTSSSMTESSPRSMLGYDRDGRQVASDSHVVPSVPQDVPAFVRPARVEPTDRDGGEAGESSAEPPPSDMGTVGGQASHPQTLGARALGSPRKRPEQQDVSSPAKTVGRFSVVSTQDEWTLASPHSLRYSAPPDVYLDEAPSSPDVKLAVRRAQTASSIEVGVGEPVSSDSGDEGPRARPPVQKQASLPVSGSVAGDFVKKATAFLQRPSRAGSLGPETPSRVGMKVPTISVTSFHSQSSYISSDNDSELEDADIKKELQSLREKHLKEISELQSQQKQEIEALYRRLGKPLPPNVGFFHTAPPTGRRRKTSKSKLKAGKLLNPLVRQLKVVASSTGHLADSSRGPPAKDPAQASVGLTADSTGLSGKAVQTQQPCSVRASLSSDICSGLASDGGGARGQGSSTSSLAPGPEPGPQPALHVQAQVNNSNNKKGTFTDDLHKLVDEWTSKTVGAAQLKPTLNQLKQTQKLQDMEAQAGWAAPGEARA

SEQ ID NO: 54668 - protein, 791 aa, Homo sapiens
GTETAEFAELKTQIEKMRLDYQHEIENLQNQQDSERAAHAKEMEALRAKLMKVIKEKENSLEAIRSKLDKAEDQHLVEMEDTLNKLQEAEIKVKELEVLQAKCNEQTKVIDNFTSQLKATEEKLLDLDALRKASSEGKSEMKKLRQQLEAAEKQIKHLEIEKNAESSKASSITRELQGRELKLTNLQENLSEVSQVKETLEKELQILKEKFAEASEEAVSVQRSMQETVNKLHQKEEQFNMLSSDLEKLRENLADMEAKFREKDEREEQLIKAKEKLENDIAEIMKMSGDNSSQLTKMNDELRLKERDVEELQLKLTKANENASFLQKSIEDMTVKAEQSQQEAAKKHEEEKKELERKLSDLEKKMETSHNQCQELKARYERATSETKTKHEEILQNLQKTLLDTEDKLKGAREENSGLLQELEELRKQADKAKAAQTAEDAMQIMEQMTKEKTETLASLEDTKQTNAKLQNELDTLKENNLKNVEELNKSKELLTVENQKMEEFRKEIETLKQAAAQKSQQLSALQEENVKLAEELGRSRDEVTSHQKLEEERSVLNNQLLEMKKRESKFIKDADEEKASLQKSISITSALLTEKDAELEKLRNEVTVLRGENASAKSLHSVVQTLESDKVKLELKVKNLELQLKENKRQLSSSSGNTDTQADEDERAQESQQMIDFLNSVIVDLQRKNQDLKMKVEMMSEAALNGNGDDLNNYDSDDQEKQSKKKPRLFCDICDCFDLHDTEDCPTQAQMSEDPPHSTHHGSRGEERPYCEICEMFGHWATNCNDDETF

SEQ ID NO: 54669 - protein, 213 aa, Homo sapiens [sequence omitted]

SEQ ID NO: 54670 - protein, 113 aa, Homo sapiens
MSEEEQGSGTTTGCGLPSIEQMLAANPGKTPISLLQEYGTRIGKTPVYDLLKAEGQAHQPNFTFRVTVGDTSCTGQGPSKKAAKHKAAEVALKHLKGGSMLEPALEDSRLFTA

SEQ ID NO: 54671 - protein, 152 aa, Homo sapiens
  MOD_RES (1)..(1): Any amino acid
XAVTRPVTWQLEYPGQAPEAEKDKMVWEILVSERDIRALIPLAKVSEACDAVFVAGKESRGARGVRVDFWWRRLRASLRLTVWAPLLPLRIELTDTTLEQVRGWRVPGPAEGPAEPAAEASDEAERRARGCHLQYQRAGVRFLAPFAAHPLD

SEQ ID NO: 54672 - protein, 493 aa, Homo sapiens
  MOD_RES (1)..(1): Any amino acid
XKGVRLPEPKDKILETPQKMTEKSESKTPGEGKKEDKSRMAEPMKGYMRPTKSRGLTPLLPKSTIQEQERHKQLKSAGIARPEEGRPVVSGTGNDITTPPNKELPPSPEKKTKPLATTQPAKTSTSKAKTQPTSLPKQPAPTTIGGLNKKPMSLASGLVPAAPPKRPAVASARPSILPSKDVKPKPIADAKAPEKRASPSKPASAPASRSGSKSTQTVAKTTTAAAVASTGPSSRSPSTLLPKKPTAIKTEGKPAEVKKMTAKSVPADLSRPKSTSTSSMKKTTTLSGTAPAAGVVPSRVKATPMPSRPSTTPFIDKKPTSAKPSSTTPRLSRLATNTSAPDLKNVRSKVGSTENIKHQPGGGRVQIQNKKVDISKVSSKCGSKANIKHKPGGGDVKIESQKLNFKEKAQAKVGSLDNVGHLPAGGAVKTEGGGSEAPLCPGPPAGEEPAISEAAPEAGAPTSASGLNGHPTLSGGGDQREAQTLDSQIQETN

SEQ ID NO: 54673 - protein, 91 aa, Homo sapiens
  MOD_RES (1)..(1): Any amino acid
XREDFQRIPELAINPLGDRIINAFFPEGEDQVNFRGFMRTLAHFRPIEDNEKSKDVNGPEPLNSRSNKLHFAFRLYDLDKDEKISRDELLQ

SEQ ID NO: 54674 - protein, 79 aa, Homo sapiens
  MOD_RES (1)..(1): Any amino acid
XASAKTCDGVQCAFEELVEKIIQTPGLWESENQNKGVKLSHREEGQGGGACETGIRSVAQAGVQWCDHSSLQPQPSSPK

SEQ ID NO: 54675 - protein, 90 aa, Homo sapiens
MYQPSRGAARRLGPCLRAYQARPQERGRRDQDLSCIAAAWMGLEAFLRDLPAPILGLGYLSKSLELPTLPLPPRQEILVWRNICLSCMRD

SEQ ID NO: 54676 - protein, 195 aa, Homo sapiens
  MOD_RES (1)..(1): Any amino acid
XFKNDDVGKRAGSVCTFLEKTETKSHPHTECHSYVFAIDEVLEKVRKTQKRITKKNPKKAEKLERKKVYRAEYINFLENLKILEISEDCTYADVKALHTEITRNKDSTLERVLPRVRFTRHGKELKALAQRGIGYHHSSMYFKEKEFVEILFVKGLIRVVTATETLALGIHMPCKSVVFAQDSVYLDALNYRQIM

SEQ ID NO: 54677 - protein, 176 aa, Homo sapiens
MFLCQGFRKYLPEHLNDLKKENFSLKLRIYFLEERMQQKYEASREDIYKRNIELKVEVESLKRELQDKKQHLDKTWADVENLNSQNEAELRRQFEERQQETEHVYELLENKIQLLQEESRLAKNEAARMAALVEAEKECNLELSEKLKGVTKNWEDVPGDQVKPDQYTEALAQRDK

SEQ ID NO: 54678 - protein, 794 aa, Homo sapiens
MNLQPIFWIGLISSVCCVFAQTDENRCLKANAKSCGECIQAGPNCGWCTNSEGMPTSARCDDLEALKKKGCPPDDIENPRGSKDIKKNKNVTNRSKGTAEKLKPEDITQIQPQQLVLRLRSGEPQTFTLKFKRAEDYPIDLYYLMDLSYSMKDDLENVKSLGTDLMNEMRRITSDFRIGFGSFVEKTVMPYISTTPAKLRNPCTSEQNCTSPFSYKNVLSLTNKGEVFNELVGKQRISGNLDSPEGGFDAIMQVAVCGSLIGWRNVTRLLVFSTDAGFHFAGDGKLGGIVLPNDGQCHLENNMYTMSHYYDYPSIAHLVQKLSENNIQTIFAVTEEFQPVYKELKNLIPKSAVGTLSANSSNVIQLIIDAYNSLSSEVILENGKLSEGVTISYKSYCKNGVNGTGENGRKCSNISIGDEVQFEISITSNKCPKKDSDSFKIRPLGFTEEVEVILQYICECECQSEGIPESPKCHEGNGTFECGACRCNEGRVGRHCECSTDEVNSEDMDAYCRKENSSEICSNNGECVCGQCVCRKRDNTNEIYSGKFCECDNFNCDRSNGLICGGNGVCKCRVCECNPNYTGSACDCSLDTSTCEASNGQICNGRGICECGVCKCTDPKFQGQTCEMCQTCLGVCAEHKECVQCRAFNKGEKKDTCTQECSYFNITKVESRDKLPQPVQPDPVSHCKEKDVDDCWFYFTYSVNGNNEVMVHVVENPECPTGPDIIPIVAGVVAGIVLIGLALLLIWKLLMIIHDRREFAKFEKEKMNAKWDTGENPIYKSAVTTVVNPKYEGK

SEQ ID NO: 54679 - protein, 74 aa, Homo sapiens
MNKSRWQSRRRHGRRSHQQNPWFRLRDSEDRSDSRAAQPAHDSGHGDDESPSTSSGTAGTSSVPETLLPLAPWT

SEQ ID NO: 54680 - protein, 112 aa, Homo sapiens
MKDNDIKRLLYTHLLCIFSIILSVFIPSLFLENFSILETHLTWLCICSGFVTAVNLVLYLVVKPNTSSKRSSLSHKVGIGNIFICSYFVYFYYCALLMFVRTKPQSMAKSVQ

SEQ ID NO: 54681 - protein, 88 aa, Homo sapiens
MASPGKPGADEAQEEEGELEGGSAGPRAAILEQAEELFLLCDKEAKGFITKHDLQGLQSDLPLTPEQLEAVFESLDRAHTGFLTAREF

SEQ ID NO: 54682 - protein, 227 aa, Homo sapiens
MDFGPGRLFRFFSYCVVAHIQLAVFFFSVGILETRILLADGAEFKKDRGEGLARVLCGEEQADADAGAQVCSLLLAQSEVRPQCLLLVLANRTEISSKLQLMKKHQSDLKKLGILDFTEQDVASHQSYSQKTLIALVTSGALLAVLGITGYFLMNRRSWSPTGERLGEDPYYTENGGGQGYSSGPGTSPEAQGKASVNRGAQENGTGQATSRNGHSARQHVVADTEL

SEQ ID NO: 54683 - protein, 226 aa, Homo sapiens
MKETPLSNCERRFLLRAIEEKKRLDGRQTYDYRNIRISFGTDYGCCIVELGKTRVLGQVSCELVSPKLNRATEGILFFNLELSQMAAPAFEPGRQSDLLVKLNRLMERCLRNSKCIDTESLCVVAGEKYTPEERDPVPLSIHHMPICVSFAFFQQGTYLLVDPNEREERVMDGLLVIAMNKHREICTIQSSGGIMLLKDQVLRCSKIAGVKVAEITELILKALEND

SEQ ID NO: 54684 - protein, 610 aa, Homo sapiens
MAFPVDMLENCSHEELENSAEDYMSDLRCGDPENPECFSLLNITIPISLSNVGFVPLYGGDQTQKILALFAPEDSLTAVALYLADQWWAIDDIVKTSVPSREGLKQVSTLGERVVLYVLNRIIYRKQEMERNEIPFLCHSSTDYAKILWKKGEAIGFYSVKPTACKQYFEKYPGDHELLWEVEGVGHWYQRIPVTRALQREALKILALSQNEPKRPMSGEYGPASVPEYEARTEDNQSSEMQLTIDSLKDAFASTSEGHDKTSVSTHTRSGNLKRPKIGKRFQDSEFSSSQGEDEKTSQTSLTASINKLESTARPSESSEEFLEEEPEQRGIEFEDESSDRDARPALETQPQQEKQDGEKESELEPMNGEIMDDSLKTSLITEEEDSTSEVLDEELKLQPFNSSEDSTNLVPLVVESSKPPEVDAPDKTPRIPDSEMLMDEGTSDEKGHMEEKLSLLPRKKAHLGSSDNVATMSNEERSDGGFPNSVIAEFSEEPVSENLSPNTTSSLEDQGEEGVSEPQETSTALPQSSLIEVELEDVPFSQNAGQKNQSEEQSEASSEQLDQFTQSAEKAVDSSSEEIEVEVPVVDRRNLRRKAKGHKGPAKKKAKLT

SEQ ID NO: 54685 - protein, 223 aa, Homo sapiens
MAPFLRIAFNSYELGSLQAEDEANQPFCAVKMKEALSTERGKTLVQKKPTMYPEWKSTFDAHIYEGRVIQIVLMRAAEEPVSEVTVGVSVLAERCKKNNGKAEFWLDLQPQAKVLMSVQYFLEDVDCKQSMRSEDEAKFPTMNRRGAIKQAKIHYIKNHEFIATFFGQPTFCSVCKDFVWGLNKQGYKCRHCGMNVHHKCREKVANLCGINQKLLAEALNQVT

SEQ ID NO: 54686 - protein, 63 aa, Homo sapiens
  MOD_RES (1)..(1): Any amino acid
XLKSEGKTETTMQVGNSQTKVKGEDSKNIPLEKETRKSLVSDSGGQRTSDKIQEYPQLREETI

SEQ ID NO: 54687 - protein, 207 aa, Homo sapiens
MSGPVPSRARVYTDVNTHRPREYWDYESHVVEWGNQDDYQLVRKLGRGKYSEVFEAINITNNEKVVVKILKPVKKKKIKREIKILENLRGGPNIITLADIVKDPVSRTPALVFEHVNNTDFKQLYQTLTDYDIRFYMYEILKALDYCHSMGIMHRDVKPHNVMIDHEHRKLRLIDWGLAEFYHPGQEYNVRVASRYFKGPELLVDYQ

SEQ ID NO: 54688 - protein, 91 aa, Homo sapiens
  MOD_RES (1)..(1): Any amino acid
XNPELSPFPKSSSPRNKSENPMVQLFYGTFLTEGVREGKPFCNNETFGQYPLQVNGYRNLDECLEGAMVEGDVELLPSDHSVKYGQEPTCT

SEQ ID NO: 54689 - protein, 55 aa, Homo sapiens
MGKCRGLRTARKLRSHRRDQKWHDKQYKKAHLGTALKANPFGGASHAKGIVLEKV

SEQ ID NO: 54690 - protein, 66 aa, Homo sapiens
  MOD_RES (1)..(1): Any amino acid
XRYKAGEKEPDPKTWKANFRCAMNSLPDIEEVKDQSRNKGSSAVRVYRMLPPLTKNQRKVMWGFQP

SEQ ID NO: 54691 - protein, 58 aa, Homo sapiens
  MOD_RES (1)..(1): Any amino acid
XALGAPFLLEDPANQFLRLKRHVNLQDYWDPDHSSDVWVNTLAKQDLIIIRHEDCIKS

SEQ ID NO: 54692 - protein, 22 aa, Homo sapiens
YDVRHRTKENSPGHSGGACSVN

SEQ ID NO: 54693 - protein, 201 aa, Homo sapiens
MASAELDYTIEIPDQPCWSQKNSPSPGGKEAETRQPVVILLGWGGCKDKNLAKYSAIYHKRGCIVIRYTAPWHMVFFSESLGIPSLRVLAQKLLELLFDYEIEKEPLLFHVFSNGGVMLYRYVLELLQTRRFCRLRVVGTIFDSAPGDSNLVFCMASCLLLSPLLVDGISAGTEGQLTLRPDWAAQVLTRLGCHLQCITRS

SEQ ID NO: 54694 - protein, 49 aa, Homo sapiens
MAPSLWKGLVGIGLFALAHAAFSAAQHSSSDTSGLCSYLLRYSSYCRRV

SEQ ID NO: 54695 - protein, 1123 aa, Homo sapiens [sequence omitted]

SEQ ID NO: 54696 - protein, 60 aa, Homo sapiens
MSEMSGATTSLATVALDPPSDRTSHPQDVIEDLSQNSITGEHSQLLDDGHKKARNAYLNN

SEQ ID NO: 54697 - protein, 143 aa, Homo sapiens
MCNTNMSVPTDGAVTTSQIPASEQETLVRPKPLLLKLLKSVGAQKDTYTMKEDLDAGVSEHSGDWLDQDSVSDQFSVEFEVESLDSEDYSLSEEGQELSDEDDEVYQVTVYQAGESDTDSFEEDPEISLADYWKCTSCNEMNP

SEQ ID NO: 54698 - protein, 247 aa, Homo sapiens
MNMPVNKSPMINTCGGISSPYHEELWKLNFQHLSGERGHKSRPTFSITKEFILRFNQTQNSKEKEELLELARKIILRCKRKLGLKTLGSGRHVHLPAAWTEVIYLAQCKGEIQDESLNMLYASLDHASFDYDHLPALFFVAESVLYRLCCDASLKTYLYSVEIKLAKIGYLVFLRLFIFFLHGHLESFKQHLLRLQPYLYALSFSGASYHKYPNIFSNVQFILKASEIIGKRELRSESIFRPVEDKK

SEQ ID NO: 54699 - protein, 54 aa, Homo sapiens
MEVLPCSRVAHIERTRKPYNNDIDYYAKRNALRAAEVWMDDFKSHVYMAWNIPM

SEQ ID NO: 54700 - protein, 132 aa, Homo sapiens
MVMVANKKSQDQMTEDLSLFLGNNTIRFTVWLHGVLDKLRSVTTEPSSLKSSDTNIFDSNVPSNKSNFSRGDERRHEAAVPPLAIPSARPEKRDSRVSTSSQESKTTNVRQTYDDGAATRLMSTVKPLREPA

SEQ ID NO: 54701 - protein, 1009 aa, Homo sapiens
MDGKRRPGPGPGVPPKRARGGLWDDDDAPRPSQFEEDLALMEEMEAEHRLQEQEEEELQSVLEGVADGQVPPSAIDPRWLRPTPPALDPQTEPLIFQQLEIDHYVGPAQPVPGGPPPSRGSVPVLRAFGVTDEGFSVCCHIHGFAPYFYTPAPPGFGPEHMGDLQRELNLAISRDSRGGRELTGPAVLAVELCSRESMFGYHGHGPSPFLRITVALPRLVAPARRLLEQGIRVAGLGTPSFAPYEANVDFEIRFMVDTDIVGCNWLELPAGKYALRLKEKATQCQLEADVLWSDVVSHPPEGPWQRIAPLRVLSFDIECAGRKGIFPEPERDPVIQICSLGLRWGEPEPFLRLALTLRPCAPILGAKVQSYEKEEDLLQAWSTFIRIMDPDVITGYNIQNFDLPYLISRAQTLKVQTFPFLGRVAGLCSNIRDSSFQSKQTGRRDTKVVSMVGRVQMDMLQVLLREYKLRSYTLNAVSFHFLGEQKEDVQHSIITDLQNGNDQTRRRLAVYCLKDAYLPLRLLERLMVLVNAVEMARVTGVPLSYLLSRGQQVKVVSQLLRQAMHEGLLMPVVKSEGGEDYTGATVIEPLKGYYDVPIATLDFSSLYPSIMMAHNLCYTTLLRPGTAQKLGLTEDQFIRTPTGDEFVKTSVRKGLLPQILENLLSARKRAKAELAKETDPLRRQVLDGRQLALKVSANSVYGFTGAQVGKLPCLEISQSVTGFGRQMIEKTKQLVESKYTVENGYSTSAKVVYGDTDSVMCRFGVSSVAEAMALGREAADWVSGHFPSPIRLEFEKVYFPYLLISKKRYAGLLFSSRPDAHDRMDCKGLEAVRRDNCPLVANLVTASLRRLLIDRDPEGAVAHAQDVISDLLCNRIDISQLVITKELTRAASDYAGKQAHVELAERTRCSCWSTACPLTRSTTWSSSWPSPSCASSSPSWARAVPRLCYCGGTTRAARRCSRARWAASWPSPNAATAALAAAQCSATREPCVSSASPGSLSCIRRRYPI

SEQ ID NO: 54702 - protein, 83 aa, Homo sapiens
MGMTRMLLECSLSDKLCVIQEKQYEVIIVPTLLVTIFLILLGVILWLFIREQRTQQQRSGPQGIAPVPPPRDLSWEAGHGGNV

SEQ ID NO: 54703 - protein, 156 aa, Homo sapiens
MSDSAGGRAGLRRYPKLPVWVVEDHQEVLPFIYRAIGSKHLPASNVSFLHFDSHPDLLIPVNMPADTVFDKETLFGDHWILTSISAFSPLPYAVLVEIYDEDSGFHRELSIENWIMPAVYAGHFSHVIWFHPTWAQQIREGRHHFLVGKDTSTTTI

SEQ ID NO: 54704 - protein, 60 aa, Homo sapiens
MVLILGRRLNREDLGVRDSPATKRKVFEMDPKSLTGHEFFDFSSGSSHAENILQIFNEFR

SEQ ID NO: 54705 - protein, 85 aa, Homo sapiens
MASSTPSSSATSSNAGADPNTTNLRPTTYDTWCGVAHGCTRKLGLKICGFLQRTNSLEEKSRLVSAFKERQSSKNLLSCENSDRD

SEQ ID NO: 54706 - protein, 288 aa, Homo sapiens
MAGPQPLALQLEQLLNPRPSEADPEADPEEATAARVIDRFDEGEDGEGDFLVVGSIRKLASASLLDTDKRYCGKTTSRKAWNEDHWEQTLPGSSDEEISDEEGSGDEDSEGLGLEEYDEDDLGAAEEQECGDHRESKKSRSHSAKTPGFSVQSISDFEKFTKGMDDLGSSEEEEDEESGMEEGDDAEDSQGESEEDRAGDRNSEDDGVVMTFSSVKVSEEVEKGRAVKNQIALWDQLLEGRIKLQKALLTTNQLPQPDVFPLFKDKGGPEFSSALKNMRRFLVKMMSW

SEQ ID NO: 54707 - protein, 121 aa, Homo sapiens
MVNPTVFFDIAVDGEPLGRVSFELFADKVPKTAENFRALSTGEKGFGYKGSCFHRIIPGFMCQGGDFTRHNGTGGKSIYGEKFEDENFILKHTGPGILSMANAGPNTNGSQFFICTAKTEW

SEQ ID NO: 54708 - protein, 63 aa, Homo sapiens
MKMDMEDADMTLWTEAEFEEKCTYIVNDHPWDSGADGGTSVQAEASLPRNLLFKYATNSEEVI

SEQ ID NO: 54709 - protein, 10 aa, Homo sapiens
MSEVLPADSG

SEQ ID NO: 54710 - protein, 124 aa, Homo sapiens
MAEFPSKVSTRTSSPAQGAEASVSALRPDLGFVRSRLGALMLLQLLMIFNISATVLYITAFIACSAAVDLTSLRGTRPYNQRAAASFFACLVMIAYGVSAFFSYQAWRGVGSNAATSQMAGGYA

SEQ ID NO: 54711 - protein, 166 aa, Homo sapiens
MEAQAQGLLETEPLQGTDEDAVASADFSSMLSEEEKEELKAELVQLEDEITTLRQVLSAKERHLVEIKQKLGMNLMNELKQNFSKSWHDMQTTTAYKKTHETLSHAGQKATAAFSNVGTAISKKFGDMSYSIRHSISMPAMRNSPTFKSFEERVETTVTSLKVQMK

SEQ ID NO: 54712 - protein, 98 aa, Homo sapiens
MSGGSADYNREHGGPEGMDPDGVIESNWNEIVDNFDDMNLKESLLRGIYAYGFEKPSAIQQRAIIPCIKGYDVIAQAQSGTGKTATFAISILQQLEIE

SEQ ID NO: 54713 - protein, 431 aa, Homo sapiens
MALARGSRQLGALVWGACLCVLVHGQQAQPGQGSDPARWRQLIQWENNGQVYSLLNSGSEYVPAGPQRSESSSRVLLAGAPQAQQRRSHGSPRRRQAPSLPLPGRVGSDTVRGQARHPFGFGQVPDNWREVAVGDSTGMARARTSVSQQRHGGSASSVSASAFASTYRQQPSYPQQFPYPQAPFVSQYENYDPASRTYDQGFVYYRPAGGGVGAGAAAVASAGVIYPYQPRARYEEYGGGEELPEYPPQGFYPAPERPYVPPPPPPPDGLDRRYSHSLYSEGTPGFEQAYPDPGPEAAQAHGGDPRLGWYPPYANPPPEAYGPPRALEPPYLPVRSSDTPPPGGERNGAQQGRLSVGSVYRPNQNGRVTPAQTPACPGRKVEGQEQDGQAPGSGTSWGTRDHKDGGSLQTSPGRLTPGLAGERARASLRSP

SEQ ID NO: 54714 - protein, 242 aa, Homo sapiens
MVMVKGVNKLALPPGSVISYPLENRVYMVGKANSVFEDLSVTLRQLRNRLFQENSVLSSLPLNSLSRNNEVDLLFLSELQVLHDISSLLSRHKHLAKDHSPDLYSLELAGLDEIGKRYGEDSEQFRDASKILVDALQKFADDMYSLYGGNAVVELVTVKSFDTSLIRKTRTILEAKQAKNPASPYNLAYKYNFEYSVVFNMVLWIMIALALAVIITSYNIWNMDPGYDSIIYRMTNQKIRMD

SEQ ID NO: 54715 - protein, 171 aa, Homo sapiens
MAAAMPLALLVLLLLGPGGWCLAEPPRDSLREELVITPLPSGDVAATFQFRTRWDSELQREGVWINLGRSSVMSSQGSSAPLSTSSTPPTQSLPLPPSNPWVWPMTLTTTFCAMLCCRGRWSAPKTSPPGRSSCPVVPRPLCAAEGRSLVPHQLPLPGSAYPPCLQKCTLY

SEQ ID NO: 54716 - protein, 124 aa, Homo sapiens
MRKAGVAHSKSSKDMESHVFLKAKTRDEYLSLVARLIIHFRDIHNKKSQASVSDPMNALQSLTGGPAAGAAGIGMPPRGPGQSLGGMGSLGAMGQPMSLSGQPPPGTSGMAPHSMAVVSTATPQ

SEQ ID NO: 54717 - protein, 107 aa, Homo sapiens
MAAKSQPNIPKAKSLDGVTNDRTASQGQWGRAWEVDWFSLASVIFLLLFAPFIVYYFIMACDQYSCALTGPVVDIVTGHARLSDIWAKTPPITRKAAQLYTLWVTFQ

SEQ ID NO: 54718 - protein, 264 aa, Homo sapiens
  MOD_RES (1)..(1): Any amino acid
XEIDLSNQSGRVSKLGNETHFLFFGLYPGTTYSFTIRASTAKGFGPPATNQFTTKISAPSMPAYELETPLNQTDNTVTVMLKPAHSRGAPVSVYQIVVEEERPRRTKKTTEILKCYPVPIHFQNASLLNSQYYFAAEFPADSLQAAQPFTIGDNKTYNGYWNTPLLPYKSYRIYFQAASRANGETKIDCVQVATKAAIIVTQLTTPYIRIAPAAGDGQLTGAATPKPVPEPEKQTDHTVKIAGVIAGILLFVIIFLGVVLVMKK

SEQ ID NO: 54719 - protein, 236 aa, Homo sapiens
MAAGFGRCCRVLRSISRFHWRSQHTKANRQREPGLGFSFEFTEQQKEFQATARKFAREEIIPVAAEYDKTGEYPVPLIRRAWELGLMNTHIPENCGGLGLGTFDACLISEELAYGCTGVQTAIEGNSLGQMPIIIAGNDQQKKKYLGRMTEEPLMCAYCVTEPGAGSDVAGIKTKAEKKGDEYIINGQKMWITNGGKANWPHFLAQDTKRHSLLALVSNVSSLRPGCSWIQSHESQ

SEQ ID NO: 54720 - protein, 475 aa, Homo sapiens
MTPGTQSPFFLLLLLTVLTVVTGSGHASSTPGGEKETSATQRSSVPSSTEKNAVSMTSSVLSSHSPGSGSSTTQGQDVTLAPATEPASGSAATWGQDVTSVPVTRPALGSTTPPAHDVTSAPDNKPAPGSTAPPAHGVTSAPDTRPAPGSTAPPAHGVTSAPDNRPALGSTAPPVHNVTSASGSASGSASTLVHNGTSARATTTPASKSTPFSIPSHHSDTPTTLASHSTKTDASSTHHSTVPPLTSSNHSTSPQLSTGVSFFFLSFHISNLQFNSSLEDPSTDYYQELQRDISEMFLQIYKQGGFLGLSNIKFRPGSVVVQLTLAFREGTINVHDVETQFNQYKTEAASRYNLTISDVSVSDVPFPFSAQSGAGVPGWGIALLVLVCVLVALAIVYLIALAVCQCRRKNYGQLDIFPARDTYHPMSEYPTYHTHGRYVPPSSTDRSPYEKVSAGNGGSSLSYTNPAVAATSANL

SEQ ID NO: 54721 - protein, 184 aa, Homo sapiens
MMLGTEGGEGFVVKVRGLPWSCSADEVQRFFSDCKIQNGAQGIRFIYTREGRPSGEAFVELESEDEVKLALKKDRETMGHRYVEVFKSNNVEMDWVLKHTGPNSPDTANDGFVRLRGLPFGCSKEEIVQFFSGILKSLRAVELKLELIMIHHESLWPCSGQVLMTDLGLVEGITALAEELALRG

SEQ ID NO: 54722 - protein, 156 aa, Homo sapiens
MAVWIQAQQLQGEALHQMQALYGQHFPIEVRHYLSQWIESQAWDSVDLDNPQENIKATQLLEGLVQELQKKAEHQVGEDGFLLKIKLGHYATQLQNTYDRCPMELVRCIRHILYNEQRLVREANNGSSPAGSLADAMSQKHLQINQTFEELRLVTQ

SEQ ID NO: 54723 - protein, 63 aa, Homo sapiens
MSEEIITPVYCTGVSAQVQKQRARELGLGRHENAIKYLGQDYEQLRVRCLQSGTLFRDEAFPP

SEQ ID NO: 54724 - protein, 228 aa, Homo sapiens
MDGSRRVRATSVLPRYGPPCLFKGHLSTKSNAAVDCSVPVSVSTSIKCIHVPWWFAAPINLSSTLDADQQRREKLKKELAQCEKEFKLTKTAMRANYKNNSKSLFNTLQKPSGEPQIEDDMLKEEMNGFSSFARSLVPSSERLHLSLHKSSKVITNGPEKNSSSSPSSVDYAASGPRKLSSGALYGRRPRSTFPNSHRFQLVISKAPSGDLLDKHSELFSNKQLPFTP

SEQ ID NO: 54725 - protein, 272 aa, Homo sapiens [sequence omitted]

SEQ ID NO: 54726 - protein, 553 aa, Homo sapiens
MIKSRPLDYTFVPRTWIFPAEYTQFQNYVKELKKKRKQKTFIVKPANGAMGHGISLIRNGDKLPSQDHLIVQEYIEKPFLMEGYKFDLRIYILVTSCDPLKIFLYHDGLVRMGTEKYIPPNESNLTQLYMHLTNYSVNKHNEHFERDETENKGSKRSIKWFTEFLQANQHDVAKFWSDISELVVKTLIVAEPHVLHAYRMCRPGQPPGSESVCFEVLGFDILLDRKLKPWLLEINRAPSFGTDQKIDYDVKRGVLLNALKLLNIRTSDKRRNLAKQKAEAQRRLYGQNSIKRLLPGSSDWEQQRHQLERRKEELKERLAQVRKQISREEHENRHMGNYRRIYPPEDKALLEKYENLLAVAFQTFLSGRAASFQRELNNPLKRMKEEDILDLLEQCEIDDEKLMGKTTKTRGPKPLCSMPESTEIMKRPKYCSSDSSYDSSSSSSESDENEKEEYQNKKREKQVTYNLKPSNHYKLIQQPSSIRRSVSCPRSISAQSPSSGDTRPFSAQQMISVSRPTSASRSHSLNRASSYMRHLPHSNDACSTNSQVIILAQ

SEQ ID NO: 54727 - protein, 99 aa, Homo sapiens
MEEIPAQEAAGSPRVQFQSLETQSECLSPEPQFVQDTDMEQGLTGGILLRLPTTRIHSVNSCPALSHTQASAFSGETLAVLTAGISKRWPKYRLPIDIA

SEQ ID NO: 54728 - protein, 513 aa, Homo sapiens
MPLELTQSRVQKIWVPVDHRPSLPRSCGPKLTNSPTVIVMVGLPARGKTYISKKLTRYLNWIGVPTKVFNVGEYRREAVKQYSSYNFFRPDNEEAMKVRKQCALAALRDVKSYLAKEGGQIAVFDATNTTRERRHMILHFAKENDFKAFFIESVCDDPTVVASNIMEVKISSPDYKDCNSAEAMDDFMKRISCYEASYQPLDPDKCDRDLSLIKVIDVGRRFLVNRVQDHIQSRIVYYLMNIHVQPRTIYLCRHGENEHNLQGRIGGDSGLSSRGKKFASALSKFVEEQNLKDLRVWTSQLKSTIQTAEALRLPYEQWKALNEIDAGVCEELTYEEIRDTYPEEYALREQDKYYYRYPTGESYQDLVQRLEPVIMELERQENVLVICHQAVLRCLLAYFLDKSAEEMPYLKCPLHTVLKLTPVAYGCRVESIYLNVESVCTHRERSEDAKKGPNPLMRRNSVTPLASPEPTKKPRINSFEEHVASTSAALPSCLPPEVPTQLPGQPLLGQACL

SEQ ID NO: 54729 - protein, 52 aa, Homo sapiens
MSIYFPIHCPDYLRSAKMTEVMMNTQPMEEIGLSPRKDGLSYQVNLPRPVRF

SEQ ID NO: 54730 - protein, 59 aa, Homo sapiens
MDTLDRVVKPKTKRAKRFLEKREPKLNENIKNAMLIKGGNANATVTKVLKDVEKYYKTF

SEQ ID NO: 54731 - protein, 262 aa, Homo sapiens
MSKLPRELTRDLERSLPAVASLGSSLSHSQSLSSHLLPPPEKRRAISDVRRTFCLFVTFDLLFISLLWIIELNTNTGIRKNLEQEIIQYNFKTSFFDIFVLAFFRFSGLLLGYAVLRLRHCCSAKGHLATCSPSSLLSSPGWRPGSLTSKSYPRKLKRSDGILPPRLLLPVDPCCSPVLCPRDSSIHPQNPLQGLTMNQMKKLLGRKVSLLRSGSTSARGRRPRQWWTRSWPRKRTGSLRRIMNMGTPCTPLKFPFTARRLS

SEQ ID NO: 54732 - protein, 98 aa, Homo sapiens
MAVDVAEYHLSVIKSPPGWEVGVYAAGALALLGIAAVSLWKLWTSGSFPSPSPFPNYDYRYLQQKYGESCAEAREKRVPAWNAQRASTRGPPSRKGSL

SEQ ID NO: 54733 - protein, 241 aa, Homo sapiens
  MOD_RES (1)..(1): Any amino acid
XSKYALHCRETGDLFVLQLKGMHKMTPPIKDLLPRLTPILKNRHEKVQENCIDLVGRIADRGAEYVSAREWMRICFELLELLKAHKKAIRRATVNTFGYIAKAIGPHDVLATLLNNLKVQERQNRVCTTVAIAIVAETCSPFTVLPALMNEYRVPELNVQNGVLKSLSFLFEYIGEMGKDYIYAVTPLLEDALMDRDLVHRQTASAVVQHMSLGVYGFGCEDSLNHLLNYVWPNVFETSPH

SEQ ID NO: 54734 - protein, 222 aa, Homo sapiens
MRRCSYFPKDVTVFDKDDKSEPIRVLVTGAAGQIAYSLLYSIGNGSVFGKDQPIILVLLDITPMMGVLDGVLMELQDCALPLLKDVIATDKEDVAFKDLDVAILVGSMPRREGMERKDLLKANVKIFKSQGAALDKYAKKSVKVIVVGNPANTNCLTASKSAPSIPKENFSCLTRLDHNRAKAQIALKLGVTANDVKNVIIWGNHSSTQYPDVNHAKVKLQG

SEQ ID NO: 54735 - protein, 140 aa, Homo sapiens
MERVGCTLTTTYAHPRPTPTNFLPAISTMASSYRDRFPHSNLTHSLSLPWRPSTYYKVASNSPSVAPYCTRSQRVSENTMLPFVSNRTTFFTRYTPDDWYRSNLTNYQESNTSRHNSEKLRVDTSRLIQDKYQQTRKTQA

SEQ ID NO: 54736 - protein, 237 aa, Homo sapiens
  MOD_RES (1)..(1): Any amino acid
XVLGLSDFEMQRIHVAAAVSFLGGVIQVAMFVLQLGSATFVVTEPVISAMTTGAATHVVTSQVKYLLGMKMPYISGPLGFFYIYAYVFENIKSVRLEALLLSLLSIVVLVLVKELNEQFKRKIKVVLPVDLVLIIAASFACYCTNMENTYGLEVVGHIPQGIPSPRAPPMNILSAVITEAFGVALVGYVASLALAQGSAKKFKYSIDDNQVECAPSPSPLQLYHCTVHSQILKMMNL

SEQ ID NO: 54737 - protein, 19 aa, Homo sapiens
MHIEEIQEDEDNDMEGPDI

SEQ ID NO: 54738 - protein, 32 aa, Homo sapiens
  MOD_RES (1)..(1): Any amino acid
XSNFGGGGRNFGGRSSGPYGGGGQYFAKPRNQ

SEQ ID NO: 54739 - protein, 119 aa, Homo sapiens
MISFQESVTFQDVAVDFTAEEWQLLDCAERTLYWDVMLENYRNLISVGCPITKTKVILKVEQGQEPWMVEGANPHESSPESRSVARLECSGAISARVQVILLPQPPEELELQAPATMPG

SEQ ID NO: 54740 - protein, 41 aa, Homo sapiens
MQTIKCVVVGDGAVGKTCLLISYTTNKFPSEYVPTILTSHG

SEQ ID NO: 54741 - protein, 266 aa, Homo sapiens
AWKLHLLQWEEDSSKYSHSSSPQEKPVADSVVLSFDSAGQTLGSEYDRLGFLLNLDSKLPAELATKYANFSEGACKPGYASALMTAIFPRFSKPAPMFLDDSFRKWARIREFVPPFGIKGQDNLIKAILSVTKEYRLTPALDSLRCRRCIIVGNGGVLANKSLGSRIDDYDIVVRLNSAPVKGFEKDVGSKTTLRITYPEGAMQRPEQYERDSLFVLAGFKWQDFKWLKYIVYKERVSWTHNIQREKEFLRKLVKARVITDLSSGI

SEQ ID NO: 54742 - protein, 62 aa, Homo sapiens
  MOD_RES (1)..(1): Any amino acid
XDVAVKFTQEEWNLLSEAQRCLYRDVTLENLALMSSLGKETVAPLLPVPPLGEREAEEKTAA

SEQ ID NO: 54743 - protein, 137 aa, Homo sapiens
MDLSANQDEETDQETFQLEIDRDTKKCAFRTHTGKYWTLTATGGVQSTASSKNASCYFDIEWRDRRITLRASNGKFVTSKKNGQLAASVETAGDSELFLMKLINRPIIVFRGEHGFIGCRKVTGTLDANRSSYDVFQ

SEQ ID NO: 54744 - protein, 960 aa, Homo sapiens
MITVVYGPDLVNISHLNLVAFQEEVAKEWTNEVFSLATNLLAQNMSRDAFLEKAYTKLKLQVTPEGRIPLKNIYRLFSADRKRVETALEACSLPSSRNDSIPQEDFTPEVYRVFLNNLCPRPEIDNIFSEFGAKSKPYLTVDQMMDFINLKQRDPRLNEILYPPLKQEQVQVLIEKYEPNNSLARKGQISVDGFMRYLSGEENGVVSPEKLDLNEDMSQPLSHYFINSSHNTYLTAGQLAGNSSVEMYRQVLLSGCRCVELDCWKGRTAEEEPVITHGFTMTTEISFKEVIEAIAECAFKTSPFPILLSFENHVDSPKQQAKMAEYCRLIFGDALLMEPLEKYPLESGVPLPSPMDLMYKILVKNKKKSHKSSEGSGKKKLSEQASNTYSDSSSMFEPSSPGAGEADTESDDDDDDDDCKKSSMDEGTAGSEAMATEEMSNLVNYIQPVKFESFEISKKRNKSFEMSSFVETKGLEQLTKSPVEFVEYNKMQLSRIYPKGTRVDSSNYMPQLFWNAGCQMVALNFQTMDLAMQINMGMYEYNGKSGYRLKPEFMRRPDKHFDPFTEGIVDGIVANTLSVKIISGQFLSDKKVGTYVEVDMFGLPVDTRRKAFKTKTSQGNAVNPVWEEEPIVFKKVVLPTLACLRIAVYEEGGKFIGHRILPVQAIRPGYHYICLRNERNQPLTLPAVFVYIEVKDYVPDTYADVIEALSNPIRYVNLMEQRAKQLAALTLEDEEEVKKEADPGETPSEAPSEARTTPAENGVNHTTTLTPKPPSQALHSQPAPGSVKAPAKTEDLIQSVLTEVEAQTIEELKQQKSFVKLQKKHYKEMKDLVKRHHKKTTDLIKEHTTKYNEIQNDYLRRRAALEKSAKKDSKKKSEPSSPDHGSSTIEQDLAALDAEMTQKLIDLKDKQQQQLLNLRQEQYYSEKYQKREHIKLLIQKLTDVAEECQNNQLKKLKEIC

SEQ ID NO: 54745 - protein, 212 aa, Homo sapiens
  MOD_RES (1)..(1): Any amino acid
XFSGVLHQCHILASEMVHFIHQMQYYITFEVLECSWDELWNKVQQAQDLDHIIAAHEVFLDTIISRCLLDSDSRALLNQLRAVFDQIIELQNAQDAIYRAALEELQRRLQFEEKKKQREIEGQWGVTAAEEEEENKRIGEFKESIPKMCSQLRILTHFYQGIVQQFLVLLTTSSDESLRFLSFRLDFNEHYKAREPRLRVSLGTRGRRSSHT

SEQ ID NO: 54746 - protein, 165 aa, Homo sapiens
MVLEYCPGGELFDYIISQDRLSEEETRVVFRQIVSAVAYVHSQGYAHRDLKPENLLFDEYHKLKLIDFGLCAKPKGNKDYHLQTCCGSLAYAAPELIQGKSYLGSEMEFHCVAQAGVQWRDLGSLQPPTLGFKRFSCLSLPSSWDCRCLEHGHTVICSYVWISTI

SEQ ID NO: 54747 - protein, 185 aa, Homo sapiens
  MOD_RES (1)..(1): Any amino acid
XVDSAGSYISHDILHNGRKKRSAQNARSSLHYRFSAFGQELHLELKPSAILSSHFIVQVLGKDGASETQKPEVQQCFYQGFIRNDSSSSVAVSTCAGLLLAQEHNYSSPAGHHPHVLYKRTAEEKIQRYRGYPGSGRNYPGYSPSHIPHASQSRETEYHHRRLQKQHFCGRRKKCICSQASHRGH

SEQ ID NO: 54748 - protein, 86 aa, Homo sapiens
MAVGLLKAMYQELVTFRDVAVDFSQEEWDCLDSSQRHLYSNVMLENYRILVSLGLCFSKPSVILLLEQGKAPWMVKRELTKGLCSG

SEQ ID NO: 54749 - protein, 112 aa, Homo sapiens
MGPEALSSLLLLLLVASGDADMKGHFDPAKCRYALGMQDRTIPDSDISASSSWSDSTAARHSRLESSDGDGAWCPAGSVFPKEEEYLQVDLQRLHLVALVGTQGRHAGGLGK

SEQ ID NO: 54750 - protein, 171 aa, Homo sapiens
  MOD_RES (1)..(1): Any amino acid
XYLFALQVKQDLAQGRLTCNDTSAALLISHIVQSEIGDFDEALDREHLAKNKYIPQQDALEDKIVEFHHNHIGQTPAESDFQLLEIARRLEMYGIRLHPAKDREGTKINLAVANTGILVFQGFTKINAFNWAKVRKLSFKRKRFLIKLRPDANFLGWPGARSRGRLHRETT

SEQ ID NO: 54751 - protein, 987 aa, Homo sapiens
MDVTEDEEEEIKLEINMLKKYSHHRNIATYYGAFIKKSPPGHDDQLWLVMEFCGAGSITDLVKNTKGNTLKEDWIAYISREILRGLAHLHIHHVIHRDIKGQNVLLTENAEVKLDETEYEYSGSEEEEEEVPEQEGEPSSIVNVPGESTLRRDFLRLQQENKERSEALRRQQLLQEQQLREQEEYKRQLLAERQKRIEQQKEQRRRLEEQQRREREARRQQEREQRRREQEEKRRLEELERRRKEEEERRRAEEEKRRVEREQEYIRRQLEEEQRHLEVLQQQLLQEQAMLLECRWREMEEHRQAERLQRQLQQEQAYLLSLQHDHRRPHPQHSQQPPPPQQERSKPSFHAPEPKAHYEPADRAREVPVRTTSRSPVLSRRDSPLQGSGQQNSQAGQRNSTSSIEPRLLWERVEKLVPRPGSGSSSGSSNSGSQPGSHPGSQSGSGERFRVRSSSKSEGSPSQRLENAVKKPEDKKEVFRPLKPAGEVDLTALAKELRAVEDVRPPHKVTDYSSSSEESGTTDEEDDDVEQEGADESTSGPEDTRAASSLNLSNGETESVKTMIVHDDVESEPAMTPSKEGTLIVRQTQSASSTLQKHKSSSSFTPFIDPRLLQISPSSGTTVTSVVGFSCDGMRPEAIRQDPTRKGSVVNVNPTNTRPQSDTPEIRKYKKRFNSEILCAALWGVNLLVGTESGLMLLDRSGQGKVYPLINRRRFQQMDVLEGLNVLVTISGKKDKLRVYYLSWLRNKILHNDPEVEKKQGWTTVGDLEGCVHYKVVKYERIKFLVIALKSSVEVYAWAPKPYHKFMAFKSFGELVHKPLLVDLTVEEGQRLKVIYGSCAGFHAVDVDSGSVYDIYLPTHIQCSIKPHAIIILPNTDGMELLVCYEDEGVYVNTYGRITKDVVLQWGEMPTSVAYIRSNQTMGWGEKAIEIRSVETGHLDGVFMHKRAQRLKFLCERNDKVFFASVRSGGSSQVYFMTLGRTSLLSW

SEQ ID NO: 54752 - protein, 635 aa, Homo sapiens
  MOD_RES (1)..(1): Any amino acid
XVGPYIQVPSAGSFPVLGDPIKPQSLSIASNAAHGRSKSANDGNWPTLKQNSSSSVKPVQVAGADWKDPSVEGSVKQGTVSSQPVPFSALGPTEKPGIEIGKVPPPIPGVGKQLPPSYGTYPSPTPLGPGSTSSLERRKEGSLPRPSAGLPSRQRPTLLPATGSTPQPGSSQQIQQRISVPPSPTYPPAGPPAFPAGDSKPELPLTVAIRPFLADKGSRPQSPRKGPQTVNSSSIYSMYLQQATPPKNYQPAAHSALNKSVKAVYGKPVLPSGSTSPSPLPFLHGSLSTGTPQPQPPSESTEKEPEQDGPAAPADGSTVESLPRPLSPTKLTPIVHSPLRYQSDADLEALRRKLANAPRPLKKRSSITEPEGPGGPNIQKLLYQRFNTLAGGMEGTPFYQPSPSQDFMGTLADVDNGNTNANGNLEELPPAQPTAPLPAEPAPSSDANDNELPSPEPEELICPQTTHQTAEPAEDNNNNVATVPTTEQIPSPVAEAPSPGEEQVPPAPLPPASHPPATSTNKRTNLKKPNSERTGHGLRVRFNPLALLLDASLEGEFDLVQRIIYEVEDPSKPNDEGITPLHNAVCAGHHHIVKFLLDFGVNVNAADSDGWGAGKAGCDEQRCGVCSVGLRGPEQ

SEQ ID NO: 54753 - protein, 147 aa, Homo sapiens
MGNKQTIFTEEQLDNYQDCTFFNKKDILKWGNRGSEGFGHSSRVTQAVHSLAPGPSCLSCTHSDCCVCFLQENPFKERIVAAFSEDGEGNLTFNDFVDMFSVLCESAPRELKANYAFKIYDFNTDNFICKEDLELTLARLTKSELDE

SEQ ID NO: 54754 - protein, 140 aa, Homo sapiens
CKDDEAVVQAPRHAPVVRTPSIQPSLLPHAAPFAKSHLVHGSSPGVMGTSVATSASKIIPQGADSTMLATKTVKHGAPSPSHPISAPQAAAAAALRRQMASQAPAVNTLTESTLKNVPQVVNVQELKNNPATPSTAMGGL

SEQ ID NO: 54755 - protein, 49 aa, Homo sapiens
MAGNFWQSSHYLQWILDKQDLLKERQKDLKFLSEEEYWKLQIFFTNGIL

SEQ ID NO: 54756 - protein, 127 aa, Homo sapiens
MPEGAQGLSLSKPSPSLGCGRRGEVCDCGTVCETRTAAPAAPTMASPRGSGSSTSLSTVGSEGDPAPGPTPACSASRPEPLPGPPIRLHLSPVGIPGSARPSRLERVAREIVETERAYVRDLRSIVE

SEQ ID NO: 54757 - protein, 428 aa, Homo sapiens
MPHIPEDEEPPGEPQAAQSPAGQQGPPAAGVSCSPTPTIVLTGDATSPEGETDKNLANRVHSPHKRLSHRHLKVSTASLTSVDPAGHIIDLVNDQLPDISISEEDKKKNLALLEEAKLVSERFLTRRGRKSRSSPGDSPSAVSPNLSPSASPTSSRSNSLTVPTPPGLDVCSGPPSPLPGAPPQKGDEADVSSPHPGEPEHILMRNQNLVGLKLPDLSEAAEQEKGLPSELSPAIEEEESKSGLDVMPNISDVLLRKLRVHRSLPGSAPPLTEKEVENVFVQLSLAFRNDSYTLESRINQAERERNLTEENTEKELENFKASITSSASLWHHCEHRETYQKLLEDIAVLHRLAARLSSRAEVVGAVRQEKRMSKATEVMMQYVENLKRTYEKDHAELMEFKKLANQNSSRSCGPSEYASPEGQRCCGS

SEQ ID NO: 54758 - protein, 125 aa, Homo sapiens
ASIIRLTISYLKMRDFANQGDPPWNLRMEGPPPNTSVKVIGAQRRRSPSALAIEVFEAHLGSHILQSLDGFVFALNQEGKFLYISETVSIYLGLSQAQTLCSPLQSHRRPSRCSVAKLQSIYVTF

SEQ ID NO: 54759 - protein, 103 aa, Homo sapiens
  MOD_RES (1)..(1): Any amino acid
XDIKEDGIVPLRYVKFQNVNSVTIFVQSNQGEEETTRISYFTFIGTPVQATNMNDFKRHLSALTLPMFSPLLVQDFYSFYHLDQPCYLENTHWQVESYQPVKQ

SEQ ID NO: 54760 - protein, 93 aa, Homo sapiens
MSQGNKMLLTFHTDFSNEENGTIMFYKGFLAYYQAVDLDECASRSKSGEEDPQPQCQHLCHNYVGGYFCSCRPGYELQEDRHSCQAECSSELY

SEQ ID NO: 54761 - protein, 131 aa, Homo sapiens
  MOD_RES (1)..(1): Any amino acid
XAPGLFFVDAERVPCRHDDVFFPPSASFRVGLGPGASPVRVRSEALGVLEATMRESGAHVWGSSAAGLAGGVAAAVLLALLVLLVAPPLLRRAGRLRWRRHEAAAPAGAPLGFRNPVFDVTASEELPLPRR

SEQ ID NO: 54762 - protein, 289 aa, Homo sapiens
MASPGCLLCVLGLLLCGAASLELSRPHGDTAKKPIIGILMQKCRNKVMKNYGRYYIAASYVKYLESAGARVVPVRLDLTEKDYEILFKSINGILFPGGSVDLRRSDYAKVAKIFYNLSIQSFDDGDYFPVWGTCLGFEELSLLISGECLLTATDTVDVAMPLNFTGGQLHSRMFQNFPTELLLSLAVEPLTANFHKWSLSVKNFTMNEKLKKFFNVLTTNTDGKIEFISTMEGYKYPVYGVQWHPEKAPYEWKNLDGISHAPNAVKTAFYLAEFFVNEGSCSVAQAEMQ

SEQ ID NO: 54763 - protein, 232 aa, Homo sapiens
MGEMEQLRQEAEQLKKQIADARKACADVTLAELVSGLEVVGRVQMRTRRTLRGHLAKIYAMHWATDSKLLVSASQDGKLIVWDSYTTNKVHAIPLRSSWVMTCAYAPSGNFVACGGLDNMCSIYNLKSREGNVKVSRELSAHTGYLSCCRFLDDNNIVTSSGDTTALWDIETGQQKTVFVGHTGDCMSLAVSPDFNLFISGACDASAKLWDVREGTCRQTFTGHESDINAIC

SEQ ID NO: 54764 - protein, 54 aa, Homo sapiens
  MOD_RES (1)..(1): Any amino acid
XTQEAGHAACSLMLTQFVSSQEGINTENAPNSTTFLQWRHPQDQEHQRGDPRFR

SEQ ID NO: 54765 - protein, 625 aa, Homo sapiens
MASARKASRPMRDVFGDFSDVSLEDSTMEEIRNFQISRNLTKIAPGHSRFLKRNQTLDEKHLLLKENPVLGSGPRLASCRPPTTASRIRANAALMKLAQLETRIMNRKLQRNLSDTESDSMTADAGLPKRADRILSGGALELASQNTDKTSQNQARELPVTENNAQNAKVSRFLKKKQAPVENISPEAPAGKERTLQTPKQKEPARTFDSPDSDEEEMKVLLGSLMDSSREKNTNQGFSSANVSEEEERKLFSVPSQLRAFTVPSVELSSAKPSQTSHLPTSLAADRTLHSTRSRADYPQSHVSSDTASHTPSVSITGAFSNSVSLKMGHVKLVSSPGRSEAETVDEPVSEGADDSLDEFRINILSLDGLAPAVSENSDLEQEEESAQRQKTAGKIFRAEASTGQDAPRQAQARSWASQGKAASAEGDESEVSEHLSASSASAIQQDSTSSMQPPSEAPMVNTVSSAYSEDFENSPSLTASEPTAHSKESLDRTLDALSESSSSVKTDLPQTAESRKKSGRHVTRVLVKDTAVQTPDPAFTYEWTKALTAYSPAVLALHDVLKQQLSLTQQFIQASRHLHASLLRSLDADSFHYHTLEEAKEYIRCHRPAPLTMEDALEEVNKEL

SEQ ID NO: 54766 - protein, 134 aa, Homo sapiens
MSSPLASLSKTRKVPLPSEPMNPGRRGIRIYGDEDEVDMLSDGCGSEEKISVPSCYGGIGAPVSRQVPASHDSELMAFMTRKLWDLEQQVKAQTDEILSKDQKIAALEDLVQTLRPHPAEATLQRQEELETMCV

SEQ ID NO: 54767 - protein, 257 aa, Homo sapiens
MELEEGKAGSGLRQYYLSKIEELQLIVNDKSQNLRRLQAQRNELNAKVRLLREELQLLQEQGSYVGEVVRAMDKKKVLVKVHPEGKFVVDVDKNIDINDVTPNCRVALRNDSYTLHKILPNKVDPLVSLMMVEKVPDSTYEMIGGLDKQIKEIKEVIELPVKHPELFEALGIAQPKGVLLYGPPGTGKTLLARAVAHHTDCTFIRVSGSELVQKFIGEGARMVRELFVMAREHAPSIIFMDEIDSIGSSRLEGGSGG

SEQ ID NO: 54768 - protein, 466 aa, Homo sapiens
  MOD_RES (1)..(1): Any amino acid
XVEESAAGEQSSGTQIPRHLEEKDLKPIFEQFGRIFELTVIKDKYTGLHKGCAFLTYCARDSALKAQSALHEQKTLPGMNRPIQVKPADSESRGDRKLFVGMLGKQQTDEDVRKMFEPFGTIDECTVLRGPDGTSKGCAFVKFQTHAEAQAAINTLHSSRTLPGASSSLVVKFADTEKERGLRRMQQVATQLGMFSPIALQFGAYSAYTQALMQQQAALVAAHSAYLSPMATMAAVQMQHMAAINANGLIATPITPSSGTSTPPAIAATPVSAIPAALGVNGYSPVPTQPTGQPAPDALYPNGVHPYPAQSPAAPVDPLQQAYAGMQHYTAAYPAAYSLVAPAFPQPPALVAQQPPPPPQQQQQQQQQQQQQQQREGPDGCNIFIYHLPQEFTDSEILQMFVPFGHVISAKVFVDRATNQSKCFGFVSFDNPASAQAAIQAMNGFQIGMKRLKVQLKRPKDANRPY

SEQ ID NO: 54769 - protein, 85 aa, Homo sapiens
MASGPVVAMVWQGLDVVRTSRALIGATNPADAPPGTIRGDFCIEVGKNLIHGSDSVESARREIALWFRADELLCWEDSAGHWLYE

SEQ ID NO: 54770 - protein, 756 aa, Homo sapiens
  MOD_RES (1)..(1): Any amino acid
XLHQEEITRIKKECEREIRRLMEEIKFKDRAVFVLERELGVQAGHAQRLQLQKEALDEQLSQVREADRHPGSPRRELPHAAGAGDASDHSGSPEQQLDEKDARRFQLKIAELSAIIRKLEDRNALLSEERNELLKRVREAESQYKPLLDKNKRLSRKNEDLSHALRRMENKLKFVTQENIEMRQRAGIIRRPSSLNDLDQSQDEREVDFLKLQIVEQQNLIDELSKTLETAGYVKSVLERDKLLRFRKQRKKMAKLPKPVVVETFFGYDEEASLESDGSSVSYQTDRTDQTPCTPDDDLEEGMAKEETELRFRQLTMEYQALQRAYALLQEQVGGTLDAERETREQLQAEVQRAQARIEDLEKALAEQGQDMKWIEEKQALYRRNQELVEKIKQMETEEARLRHEVQDARDQNELLEFRILELEERERKSPAISFHHTPFVDGKSPLQVYCEAEGVTDIVVAELMKKLDILGDNANLTNEEQVVVIQARTVLTLAEKWLQQIEETEAALQRKMVDLESEKELFSKQKGYLDEELDYRKQALDQANKHILELEAMLYDALQQEAGAKVAELLSEEEREKLKVAVEQWKRQVMSELRERDAQILRERMELLQLAQQRIKELEERIEAQKRQIKELEEKLSFSGHSPSWHPDVPHIESDPFPPVGPESRDKMGRRVSILKTQGDLVSARPSRGGRVRRGSVWGVELPSTWDVPELELALPTSRGLLRDGPGLGCWTLGPFSRTAAPIPFPGMCSIPCQA

SEQ ID NO: 54771 - protein, 179 aa, Homo sapiens
  MOD_RES (1)..(1): Any amino acid
XPDSRRQDGAMSSSDAEDDFLEPATPTATQAGHALPLLPQEFPEVVPLNIGGAHFTTRLSTLRCYEDTMLAAMFSGRHYIPTDSEGRYFIDRDGTHFGDVLNFLRSGDLPPRERVRAVYKEAQYYAIGPLLEQLENMQPLKGEKTTWSGLWRSPGCVRSSGRPALPSSRVIFSQGWNAN

SEQ ID NO: 54772 - protein, 21 aa, Homo sapiens
RRPHPAPGPGDSNIFWGLQET

SEQ ID NO: 54773 - protein, 157 aa, Homo sapiens
QESSQSDVGSLHSSKHQDSKKEEEKKKPHIKKPLNAFMLYMKEMRAKVVAECTLKESAAINQILGRRWHALSREEQAKYYELARKERQLHMQLYPGWSARDNYGKKKKRKRDKQPGETNDLSAPKKCRARFGLDQQNNWCGPCRCKYSKEVSGTVRA

SEQ ID NO: 54774 - protein, 89 aa, Homo sapiens
MIDIQTRMAGRALELLYLPENKPCYLLDIGCGTGLSGSYLSDEGHYWVGLDISPAMLDEAVDREIEGDLLLGDMGQGIPFKPGTFDGCI

SEQ ID NO: 54775 - protein, 186 aa, Homo sapiens
MACEIMPLQSAHVPQVSNVSATGELLERTIRSAVEQHLFDVNNSGGQSSEDSESGTLSASSATSARQRRRQSKEQDEVRHGRDKGLINKENTPSGFNHLDDCILNTQEVEKVHKNTFGCAGERSKPKRQKSSTKLSELHDNQDGLVNMESLNSTRSHERTGPDDFEWMSDERKGNEKDGGHTQHFE

SEQ ID NO: 54776 - protein, 58 aa, Homo sapiens
MPPYTVVYFPVRAIRAAPQVPGRRPHPVPVQYHPASPGPHPWALWEGPAGGSPGGHGE

SEQ ID NO: 54777 - protein, 313 aa, Homo sapiens
  MOD_RES (1)..(1): Any amino acid
XNRGVVSRGWRPGWRRPGRGSPKDRLPPAPRKRALVSVGVAERAVHETPTLTHETFKALKPGLSAYADDVEKSAQGIRELLDVAKQDIPFDFWKATPLVLKATAGLRLLPGEKAQKLLQKVKKVFKASPFLVGDDCVSIMNGTDEGVSAWITINFLTGSLKTPGGSSVGMLDLGGGSTQIAFLPRVEGTLQASPPGYLTALRMFNRTYKLYSYSYLGLGLMSARLAILGGVEGQPAKDGKELVSPCLSPSFKGEWEHAEVTYRVSGQKAAASLHELCAARVSEVLQNRVHRTEEVKHVDFYAFSYYYDLAAGV

SEQ ID NO: 54778 - protein, 1061 aa, Homo sapiens
  MOD_RES (1)..(1): Any amino acid
XNKTSKENSEQEKDTRVCEHPLSDIVIAGEAAHPLPHTFHRLLQTISDLMMSLPSGSSLQQMALRCWSLKFKQSDHQFLHQSNVFHHINNILSKSDDGDSEESFSISIQSGFEAMSQELCIVMCLKDLTSIVDIKTSSRPAMIGSLTDGSTETFWESGDEDKNKTKNITINCVKGINARYVSVHVDNSRDLGNKVTSMTFLTGKAVEDLCRIKQVDLDSRHIGWVTSELPGGDNHIIKIELKGPENTLRVRQVKVLGWKDGESTKIAGQISASVAQQRNCEAETLRVFRLITSQVFGKLISGDAEPTPEQEEKALLSSPEGEEKATSDADLKEHMVGIIFSRSKLTNLQKQVCAHIVQAIRMEATRVREEWEHAISSKENANSQPNDEDASSDAYCFELLSMVLALSGSNVGRQYLAQQLTLLQDLFSLLHTASPRVQRQVTSLLRRVLPEVTPSRLASIIGVKSLPPADISDIIHSTEKGDWNKLGILDMFLGCIAKALTVQLKAKGTTITGTAGTTVGKGVTTVTLPMIFNSSYLRRGESHWWMKGSTPTQISEIIIKLIKDMAAGHLSEAWSRVTKNAIAETIIALTKMEEEFRSPVRCIATTRLWLALASLCVLDQDHVDRLSSGRWMGKDGQQKQMPMCDNHDDGETAAIILCNVCGNLCTDCDRFLHLHRRTKTHQRQVFKEEEEAIKVDLHEGCGRTKLFWLMALADSKTMKAMVEFREHTGKPTTSSSEACRFCGSRSGTELSAVGSVCSDADCQEYAKIACSKTHPCGHPCGGVKNEEHCLPCLHGCDKSATSLKQDADDMCMICFTEALSAAPAIQLDCSHIFHLQCCRRVLENRWLGPRITFGFISCPICKNKINHIVLKDLLDPIKELYEDVRRKALMRLEYEGLHKSEAITTPGVRFYNDPAGYAMNRYAYYVCYKCRKAYFGGEARCDAEAGRGDDYDPRELICGACSDVSRAQMCPKHGTDFLEYKCRYCCSVAVFFCFGTTHFCNACHDDFQRMTSIPKEELPHCPAGPKGKQLEGTECPLHVVHPPTGEEFALGCGVCRNAHTF

SEQ ID NO: 54779 - protein, 451 aa, Homo sapiens
MQPSSLLPLALCLLAAPASALVRIPLHKFTSIRRTMSEVGGSVEDLIAKGPVSKYSQAVPAVTEGPIPEVLKNYMDAQYYGEIGIGTPPQCFTVVFDTGSSNLWVPSIHCKLLDIACWIHHKYNSDKSSTYVKNGTSFDIHYGSGSLSGYLSQDTVSVPCQSASSASALGGVKVERQVFGEATKQPGITFIAAKFDGILGMAYPRISVNNVLPVFDNLMQQKLVDQNIFSFYLSRDPDAQPGGELMLGGTDSKYYKGSLSYLNVTRKAYWQVHLDQSPEGRRVQPSQGRGSQGGALGPQGTLQSRQGLHALTPRRVEVASGLTLCKEGCEAIVDTGTSLMVGPVDEVRELQKAIGAVPLIQGEYMIPCEKVSTLPAITLKLGGKGYKLSPEDYTLKVSQAGKTLCLSGFMGMDIPPPSGPLWILGDVFIGRYYTVFDRDNNRVGFAEAARL

SEQ ID NO: 54780 - protein, 100 aa, Homo sapiens
MLPPQKKPWESMAKGLVLGALFTSFLLLVYSYAVPPLHAGLASTTPEAAASCSPPALEPEAVIRANGSAGECQPRRNIVFLKTHKTASSTLLNILFRFGQ

SEQ ID NO: 54781 - protein, 235 aa, Homo sapiens
  MOD_RES (1)..(1): Any amino acid
XFYINYVTRSTQIENQHQGAQDTSDLMSPSKRSSQKYIIEGLTEKSSQIVDPWERSYGDILHRMKDLCRYMNNFDSEAHAKYKNQVVYSTMLVFFKNAFQYVNSIQPSLFQGPNAPSQVPLVLLEDVSNVYGDVEIDRNKHIHKKRKLAEGREKTMSSDDEDCSAKGRNRHIVVNKAELANSTEVLESFKLARESWELLYSLEFLDKEFTRICLAWKTDTWLWLRIFLTDMIIYQ

SEQ ID NO: 54782 - protein, 494 aa, Homo sapiens
MKWVTFISLLFLFSSAYSRGVFRRDAHKSEVAHRFKDLGEENFKALYLYEIARRHPYFYAPELLFFAKRYKAAFTECCQAADKAACLLPKLDELRDEGKASSAKQRLKCASLQKFGERAFKAWAVARLSQRFPKAEFAEVSKLVTDLTKVHTECCHGDLLECADDRADLAKYICENQDSISSKLKECCEKPLLEKSHCIAEVENDEMPADLPSLAADFVESKDVCKNYAEAKDVFLGMFLYEYARRHPDYSVVLLLRLAKTYETTLEKCCAAADPHECYAKVFDEFKPLVEEPQNLIKQNCELFEQLGEYKFQNALLVRYTKKVPQVSTPTLVEVSRNLGKVGSKCCKHPEAKRMPCAEDYLSVVLNQLCVLHEKTPVSDRVTKCCTESLVNRRPCFSALEVDETYVPKEFNAETFTFHADICTLSEKERQIKKQTALVELVKHKPKATKEQLKAVMDDFAAFVEKCCKADDKETCFAEEGKKLVAASQAALGL

SEQ ID NO: 54783 - protein, 325 aa, Homo sapiens
MDPSADTWDLSSPLISLWINRFYIYLGFAVSISLWICVQIVIEMQGFATVLAEAVTSLDLPVAIINLKEYDPDDHLIEEVGKNVDKWLWMLGVHRVMSRGEGDCDVVKSKHGSIEANFRAWKTKFISQLQALQKGERKKSCGGHCKKGKCESHQHGSEEREEGSQEQDELHHRDTKEEEPFESSSEEEFGGEDHQSLNSIVDVEDLGKIMDHVKKEKREKEQQEEKSGLFRNMGRNEDGERRAMITPALREALTKQVDAPRERSLLQTHILWNESHRCMETTPSLACANKCVFCWWHHNNPVGTEWLWKMDQPEMILKEAIENHQ

SEQ ID NO: 54784 - protein, 39 aa, Homo sapiens
MGLSFSSGPRSFFPVGIGEHLQSFTTCQLCDSIKYLLQK

SEQ ID NO: 54785 - protein, 194 aa, Homo sapiens
  MOD_RES (1)..(1): Any amino acid
XFQRRPSKRLNLPCRMGFSSDEYLSLVARLIIHFRDIHNKKSQASVSDPMNALQSLTGGPAAGAAGIGQPPPGTSGMAPHSMAVVSTATPQTQLQLQQVALQQQQQQQQFQQQQQAALQQQQQQQQQQQFQAQQSAMQQQFQAVVQQQQQLQQQQQQQQHLIKLHHQNQQQIQQQQQQLQRIAQLQLQQQQQQQ

SEQ ID NO: 54786 - protein, 465 aa, Homo sapiens
MSTEKVDQKEEAGEKEVCGDQIKGPDKEEEPPAAASHGQGWRPGGRAARNARPEPGARHPALPAMVNDPPVPALLWAQEVGQVLAGRARRLLLQFGVLFCTILLLLWVSVFLYGSFYYSYMPTVSHLSPVHFYYRTDCDSSTTSLCSFPVANVSLTKGGRDRVLMYGQPYRVTLELELPESPVNQDLGMFLVTISCYTRGGRIISTSSRSVMLHYRSDLLQMLDTLVFSSLLLFGFAEQKQLLEVELYADYRENSYVPTTGAIIEIHSKRIQLYGAYLRIHAHFTGLRYLLYNFPMTCAFIGVASNFTFLSVIVLFSYMQWVWGGIWPRHRFSLQVNIRKRDNSRKEVQRRISAHQPGPEGQEESTPQSDVTEDVSGSDPCIPLLAAEGQLSEEEKPDQQPLSGEEELEPEASDGSGSWEDAALLTEANLPAPAPASASAPVLETLGSSEPAGGALRQRPTCSSS

SEQ ID NO: 54787 - protein, 105 aa, Homo sapiens
MFQFHAGSWESWCCCCLIPADRPWDRGQHWQLEMADTRSVHETRFEAAVKVIQSLPKNGSFQPTNEMMLKFYSFYKQATEGPCKLSRPGFWDPIGRYKWQEQLPT

SEQ ID NO: 54788 - protein, 552 aa, Homo sapiens
MSISALGGRTKGKPLPPGEEERNNVLKQMKVRTTLKGDKSWITKQDESEGRTIELPSGRSRATSFSSAGEVPKPRPPSTRAPTGYIIRGVFTKPIDSSSQPQQQFPKANGTPKSAASLVRTANAGPPRPSSSGYKMTTEDYKKLAPYNIRRSSTSGDTEEEEEEEVVPFSSDEQKRRSEAASGVLRRTAPREHSYVLSAAKKSTGPTQETQAPFIAKRVEVVEEDGPSEKSQDPPALARSTPGSNSADGGRTKASRAIWIECLPSMPSPAGSQELRSSPGNKDKEAPCSRELQRDLAGEEAFRAPNTDAARSSAQLSDGNVGSGATGSRPEGLAAVDIGSERGRLCAAASFASFLEDQDGHSANSQSCKPRPAAISSSATSVSAVPADRKSNSTAAQEDAKADPKGALADYEGKDVATRVGEAWQERPGAPRGGQGDPAVPAQQPADPSTPERQSSPSGSEQLVRRESCGSSVLTDFEGKDVATKVGEAWQDRPGAPRGGQGDPAVPTQQPADPSTPEQQNSPSGSEQFVRRESCTSRYEPNCTGTLPARAR

SEQ ID NO: 54789 - protein, 392 aa, Homo sapiens
MAANMYRVGDYVYFENSSSNPYLIRRIEELNKTASGNVEAKVVCFYRRRDISNTLIMLADKHAKEIEEESETTVEADLTDKQKHQLKHRELFLSRQYESLPATHIRGKCSVALLNETESVLSYLDKEDTFFYSLVYDPSLKTLLADKGEIRVGPRYQADIPEMLLEGESDEREQSKLEVKVWDPNSPLTDRQIDQFLVVARAVGTFARALDCSSSVRQPSLHMSAAAASRDITLFHAMDTLYRHSYDLSSAISVLVPLGGPVLCRDEMEEWSASEASLFEEALEKYGKDFNDIRQDFLPWKSLTSIIEYYYMWKTTDRYVQQKRLKAAEAESKLKQVYIPTYKPNPNQISTSNGKPGAVNGAVGTTFQPQNPLLGRACESCYVSPVVFLGPT

SEQ ID NO: 54790 - protein, 152 aa, Homo sapiens
MQDASRDLFTYTVKCIQIRRKLRIEKRQQENLLLSVLPAHISMGMKLAIIERLKEHGDRRCMPDNNFHSLYVKRHQNVSILYADIVGFTQLASDCSPKELVVVLNELFGKFDQIAKANECMRIKILGDCYYCVSGLPVSLPTHARNCVKMGL

SEQ ID NO: 54791 - protein, 48 aa, Homo sapiens
MDLEGDRNGGAKKKNFFKLNNKSEKDKKEKKPTVSVFSMFRYSNWLDK

SEQ ID NO: 54792 - protein, 619 aa, Homo sapiens
MNASGSGYPLASLYVGDLHPDVTEAMLYEKFSPAGPILSIRVCRDVATRRSLGYAYINFQQPADAERALDTMNFEMLKGQPIRIMWSQRDPGLRKSGVGNIFIKNLEDSIDNKALYDTFSTFGNILSCKVACDEHGSRGFGFVHFETHEAAQQAINTMNGMLLNDRKVFVGHFKSRREREAELGARALEFTNIYVKNLPVDVDEQGLQDLFSQFGKMLSVKVMRDNSGHSRCFGFVNFEKHEEAQKAVVHMNGKEVSGRLLYAGRAQKRVERQNELKRRFEQMKQDRLRRYQGVNLYVKNLDDSIDDDKLRKEFSPYGVITSAKVMTEGGHSKGFGFVCFSSPEEATKAVTEMNGRIVGTKPLYVALAQRKEERKAILTNQYMQRLSTMRTLSNPLLGSFQQPSSYFLPAMPQPPAQAAYYGCGPVTPTQPAPRWTSQPPRPSSAYPPGASMVRPPVVPRRPPAHISSVRQASTQVPRTVPHTQRVANIGTQTTGPSGVGCCTPGRPLLPCKCSSAAHSTYRVQEPAVHIPGQEPLTASMLAAAPLHEQKQMIGERLYPLIHDVHTQLAGKITGMLLEIDNSELLLMLESPESLHAKIDEAVAVLQAHQAMEQPKAYMH

SEQ ID NO: 54793 - protein, 662 aa, Homo sapiens
MRMQLLDKFLGSPHHPLLPAPTRLRTWSCPGRTCGDREGAGGVPHPTPSLCPPAAGTMEIVYVYVKKRSEFGKQCNFSDRQAELNIDIMPNPELAEQFVERNPVDTGIQCSISMSEHEANSERFEMETRGVNHVEGGWPKDVNPLELEQTIRFRKKVEKDENYVNAIMQLGSIMEHCIKQNNAIDIYEEYFNDEEAMEVMEEDPSAKTINVFRDPQEIKRAATHLSWHPDGNRKLAVAYSCLDFQRAPVGMSSDSYIWDLENPNKPELALKPSSPLVTLEFNPKDSHVLLGGCYNGQIACWDTRKGSLVAELSTIESSHRDPVYGTIWLQSKTGTECFSASTDGQVMWWDIRKMSEPTEVVILDITKKEQLENALGAISLEFESTLPTKFMVGTEQGIVISCNRKAKTSAEKIVCTFPGHHGPIYALQRNPFYPKNFLTVGDWTARIWSEDSRESSIMWTKYHMAYLTDAAWSPVRPTVFFTTRMDGTLDIWDFMFEQCDPTLSLKVCDEALFCLRVQDNGCLIACGSQLGTTTLLEVSPGLSTLQRNEKNVASSMFERETRREKILEARHREMRLKEKGKAEGRDEEQTDEELAVDLEALVSKAEEEFFDIIFAELKKKEADAIKLTPVPQQPSPEEDQVVEEGEEAAGEEGDEEVEEDLA

SEQ ID NO: 54794 - protein, 258 aa, Homo sapiens
LAARVAAVRAAAWLLLGAATGLTRGPAAAFTAARSDAGIRAMCSEIILRQEVLKDGFHRDLLIKVKFGESIEDLHTCRLLIKQDIPAGLYVDPYELASLRERNITEAVMVSENFDIEAPNYLSKESEVLIYARRDSQCIDCFQAFLPVHCRYHRPHSEDGEASIVVNNPDLLMFCDQEFPILKCWAHSEVAAPCALENEDICQWNKMKYKSVYKNVILQVPVGLTVHTSLVCSVTLLITILCSTLILVAVFKYGHFSL

SEQ ID NO: 54795 - protein, 227 aa, Homo sapiens
MDILDQGALQRLFKKYSFMAVIHFAGLKAVGESVQKPLDYYRVNLTGTIQLLEIMKAHGVKNLVFSSSATVYGNPQYLPLDEAHPTGGCTNPYGKSKFFIEEMIRDLCQADKTWNAVLLRYFNPTGAHASGCIGEDPQGIPNNLMPYVSQVAIGRREALNVFGNDYDTEDGTGVRDYIHVVDLAKGHIAALRKLKEQCGCRIYNLGTGTGYSVLQMVQAMEKASGKK

SEQ ID NO: 54796 - protein, 384 aa, Homo sapiens
MMDLRNTPAKSLDKFIEDYLLPDTCFRMQINHAIDIICGFLKERCFRGSSYPVCVSKVVKGGSSGKGTTLRGRSDADLVVFLSPLTTFQDQLNRRGEFIQEIRRQLEACQRERAFSVKFEVQAPRWGNPRALSFVLSSLQLGEGVEFDVLPAFDALGQLTGGYKPNPQIYVKLIEECTDLQKEGEFSTCFTELQRDFLKQRPTKLKSLIRLVKHWYQNCKKKLGKLPPQYALELLTVYAWERGSMKTHFNTAQGFRTVLELVINYQQLCIYWTKYYDFKNPIIEKYLRRQLTKPRPVILDPADPTGNLGGGDPKGWRQLAQEAEAWLNYPCFKNWDGSPVSSWILLMRQRLREVRSLAQGHQLTSGGNGIQAQWTLKPVLMSLC

SEQ ID NO: 54797 - protein, 149 aa, Homo sapiens
MERSERRRRRCQVAFSYLPQNDDELELKVGDIIEVVGEVEEGWWEGVLNGKTGMFPSNFIKELSGESDELGISQDEQLSKSSLRETTGSESDGGDSSSTKSEGANGTVATAAIQPKKVKGVGFGDIFKDKPIKLRPRSIEVENDFLPVE

SEQ ID NO: 54798 - protein, 467 aa, Homo sapiens
MNVVFAVKQYISKMIEDSGPGMKVLLMDKETTGIVSMVYTQSEILQKEVYLFERIDSQNREIMKHLKAICFLRPTKENVDYIIQELRRPKYTIYFIYFSNVISKSDVKSLAEADEQEVVAEVQEFYGDYIAVNPHLFSLNILGCCQKCPMIRYQLSSEAAKRLAECVKQVITKEYELFEFRRTEVPPLLLILDRCDDAITPLLNQWTYQAMVHELLGINNNRIDLSRVPGISKDLREVVLSAENDEFYANNMYLNFAEIGSNIKNLMEDFQKKKPKEQQKLESIADMKAFVENYPQFKKMSGTVSKHVTVVGELSRLVSERNLLEVSEVEQELACQNDHSSALQNIKRLLQNPKVTEFDAARLVMLYALHYERHSSNSLPGLMMDLRNKGVSEKYRKLVSAVVEYGGKRVRGSDLFSPKDAVAITKQFLKGLKGVENVYTQHQPFLHETLDHLIKGRLKENLYPYLG

SEQ ID NO: 54799 - protein, 317 aa, Homo sapiens
MAETVWSTDTGEAVYRSRDPVRNLRLRVHLQRITSSNFLHYQPAAELGKDLIDLATFRPQPTASGHRPEEDEEEEIVIGWQEKLFSQFEVDLYQNETACQSPLDYQYRQEILKLENSGGKKNRRIFTYTDSDRYTNLEEHCQRMTTAASEVPSFLVERMANVRRRRQDRRGMEGGILKSRIVTWEPSEEFVRNNHVINTPLQTMHIMADLGPYKKLGYKKYEHVLCTLKVDSNGVITVKPDFTGLKGPYRIETEGEKQELWKYTIDNVSPHAQPEEEERERRVFKDLYGRHKEYLSSLVGTDFEMTGQAQHSSSSQE

SEQ ID NO: 54800 - protein, 985 aa, Homo sapiens
MGKLIRMGPQERWLLRTKRLHWSRLLFLLGMLIIGSTYQHLRRPRGLSSLWAAVSSHQPIKLASRDLSSEEMMMMSSSPSKPSSEMGGKMLVPQASVGSDEATLSMTVENIPSMPKRTAKMIPTTTKNNYSPTAAGTERRKEDTPTSSRTLTYYTSTSSRQIVKKYTPTPRGEMKSYSPTQVREKVKYTPSPRGRRVGTYVPSTFMTMETSHAITPRTTVKDSDITATYKILETNSLKRIMEETTPTTLKGMFDSTPTFLTHEVEANVLTSPRSVMEKNNLFPPRRVESNSSAHPWGLVGKSNPKTPQGTVLLHTPATSEGQVTISTMTGSSPAETKAFTAAWSLRNPSPRTSVSAIKTAPAIVWRLAKKPSTAPSTSTTPTVRAKLTMQVHHCVVVKPTPAMLTTPSPSLTTALLPEELSPSPSVLPPSLPDLHPKGEYPPDLFSVEERRQGWVVLHVFGMMYVFVALAIVCDEYFVPALGVITDKLQISEDVAGATFMAAGGSAPELFTSLIGVFISHSNVGIGTIVGSAVFNILFVIGTCSLFSREILNLTWWPLFRDVSFYILDLIMLILFFLDSLIAWWESLLLLLAYAFYVFTMKWNKHIEVWVKEQLSRRPVAKVMALEDLSKEDVAEAESTGEMPGEEGETAGEGETEEKSGGETQPEGEGETETQGKGEECEDENEAEGKGDNEGEDEGEIHAEDGEMKGNEGETESQELSAENHGEAKNDEKGVEDGGGSDGGDSEEEEEEEEEQEEEEEEEEQEEEEEEEEEEEEKGNEEPLSLDWPETRQKQAIYLFLLPIVFPLWLTVPDVRRQESRKFFVFTFLGSIMWIAMFSYLMVWWAHQVGETIGISEEIMGLTILAAGTSIPDLITSVIVARKGLGDMAVSSSVGSNIFDITVGLPVPWLLFSLINGLQPVPVSSNGLFCAIVLLFLMLLFVISSIASCKWRMNKILGFTMFLLYFVFLIISVMLEDRIISCPVSV

SEQ ID NO: 54801 - protein, 58 aa, Homo sapiens
MSLHFLYYCSEPTLDVKIAFCQGFDKQVDVSYIAKHYNMSKSKVDNQFYSVEVGDSTF

SEQ ID NO: 54802 - protein, 537 aa, Homo sapiens
  MOD_RES (1)..(1): Any amino acid
XLDQKTCGDIDECKDPDACSQICVNYKGYFKCECYPGYEMDLLTKNCKAAAGKSPSLIFTNRHEVRRIDLVKRNYSRLIPMLKNVVALDVEVATNRIYWCDLSYRKIYSAYMDKASDPKEQEVLIDEQLHSPEGLAVDWVHKHIYWTDSGNKTISVATVDGGRRRTLFSRNLSEPRAIAVDPLRGFMYWSDWGDQAKIEKSGLNGVDRQTLVSDNIEWPNGITLDLLSQRLYWVDSKLHQLSSIDFSGGNRKTLISSTDFLSHPFGIAVFEDKVFWTDLENEAIFSANRLNGLEISILAENLNNPHDIVIFHELKQPRAPDACELSVQPNGGCEYLCLPAPQISSHSPKYTCACPDTMWLGPDMKRCYRAPQSTSTTTLASTMTRTVPATTRAPGTTVHRSTYQNHSTETPSLTAAVPSSVSVPRAPSISPSTLSPATSNHSQHYANEDSKMGSTVTAAVIGIIVPIVVIALLCMSGYLIWRNWKRKNTKSMNFDNPVYRKTTEEEDEDELHIGRTAQIGHVYPARVALSLEDDGLP

SEQ ID NO: 54803 - protein, 367 aa, Homo sapiens
MWATLPLLCAGAWLLGVPVCGAAELCVNSLEKFHFKSWMSKHRKTYSTEEYHHRLQTFASNWRKINAHNNGNHTFKMALNQFSDMSFAEIKHKYLWSEPQNCSATKSNYLRGTGPYPPSVDWRKKGNFVSPVKNQGACGSCWTFSTTGALESAIAIATGKMLSLVRNQPQATPCGGHPILMWARPGPLVSLEHWLRAEQQLVDCAQDFNNHGCQGGLPSQAFEYILYNKGIMGEDTYPYQGKDGYCKFQPGKAIGFVKDVANITIYDEEAMVEAVALYNPVSFAFEVTQDFMMYRTGIYSSTSCHKTPDKVNHAVLAVGYGEKNGIPYWIVKNSWGPQWGMNGYFLIERGKNMCGLAACASYPIPLV

SEQ ID NO: 54804 - protein, 74 aa, Homo sapiens
MNFLRSPPDPAKDHCNGELITAAHELGVAHPPGYPLFTLVAKLAITLFPFGSIAYRVNLLCGLFGAVAASLLFF

SEQ ID NO: 54805 - protein, 118 aa, Homo sapiens
  MOD_RES (1)..(1): Any amino acid
XSKSRDRKSYKHRSKSRDREQDRKSKEKEKRGSDDKKSSVKSGSREKQSEDTNTESKESDTKNEVNGTSEDIKSEVQRKYAQMKMELSRVRRHTKASSEGKDSVVLQNILSVGVVSGP

SEQ ID NO: 54806 - protein, 226 aa, Homo sapiens
MAVQVVQAVQAVHLESDAFLVCLNHALSTEKEEVMGLCIGEVDAVRIVHIHSVIILRRSDKRKDRVEISPEQLSAASTEAERLAELTGRPMRVVGWYHSHPHITVWPSHVDVRTQAMYQMMDQGFVGLIFSCFIEDKNTKTGRVLYTCFQSIQAQKSSESLHGPRDFWSSSQHISIEGQKEEERYERIEIPIHIVPHVTIGKVCLESAVELPKILCQEEQDAYRRI

SEQ ID NO: 54807 - protein, 1240 aa, Homo sapiens
MGALLRKANLPGVPSPGSNARMPVSTSLHQDGSQERPVSLTSTTSSSGSSCDSRSAMEEPSSSEAPAKNGAGSLRSRHLPNSNNNSSSWLNVKGPLSPFNSRAAAGPAHHKLSYLGRVVREIVETERMYVQDLRSIVEDYLLKIIDTPGLLKPEQVSALFGNIENIYALNSQLLRDLDSCNSDPVAVASCFVERSQEFDIYTQYCNNYPNSVAALTECMRDKQQAKFFRDRQELLQHSLPLGSYLLKPVQRILKYHLLLQEIAKHFDEEEDGFEVVEDAIDTMTCVAWYINDMKRRHEHAVRLQEIQSLLINWKGPDLTTYGELVLEGTFRVHRVRNERTFFLFDKTLLITKKRGDHFVYKGNIPCSSLMLIESTRDSLCFTVTHYKHSKQQYSIQAKTVEEKRNWTHHIKRLILENHHATIPQKAKEAILEMDSYYPNRYRCSPERLKKAWSSQDEVSTNVRQGRRQSEPTKHLLRQLNEKARAAGMKGKGRRESESSRSSRRPSGRSPTSTEKRMSFESISSLPEVEPDPEAGSEQEVFSAVEGPSAEETPSDTESPEVLETQLDAHQGLLGMDPPGDMVDFVAAESTEDLKALSSEEEEEMGGAAQEPESLLPPSVLDQASVIAERFVSSFSRRSSVAQEDSKSSGFGSPRLVSRSSSVLSLEGSEKGLARHGSATDSLSCQLSPEVDISVGVATEDSPSVNGMEPPSPGCPVEPDRSSCKKKESALSTRDRLLLDKIKSYYENAEHHDAGFSVRRRESLSYIPKGLVRNSISRFNSLPRPDPEPVPPVGSKRQVGSRPTSWALFELPGPSQAVKGDPPPISDAEFRPSSEIVKIWEGMESSGGSPGKGPGQGQANGFDLHEPLFILEEHELGAITEESATASPESSSPTEGRSPAHLARELKELVKELSSSTQGELVAPLHPRIVQLSHVMDSHVSERVKNKVYQLARQYSLRIKSNKPVMARPPLQWEKVAPERDGKSPTVPCLQEEAGEPLGGKGKRKPVLSLFDYEQLMAQEHSPPKPSSAGEMSPQRFFFNPSAVSQRTTSPGGRPSARSPLSPTETFSWPDVRELCSKYASRDEARRAGGGRPRGPPVNRSHSVPENMVEPPLSGRVGRCRSLSTKRGRGGGEAAQSPGPLPQSKPDGGETLYVTADLTLEDNRRVIVMEKGPLPSPTAGLEESSGQGPSSPVALLGQVQDFQQSAECQPKEEGSRDPADPSQQGRVRNLREKFQALNSVG

SEQ ID NO: 54808 - protein, 408 aa, Homo sapiens
MMDLRNTPAKSLDKFIEDYLLPDTCFRMQINHAIDIICGFLKERCFRGSSYPVCVSKVVKGGSSGKGTTLRGRSDADLVVFLSPLTTFQDQLNRRGEFIQEIRRQLEACQRERAFSVKFEVQAPRWGNPRALSFVLSSLQLGEGVEFDVLPAFDALGQLTGGYKPNPQIYVKLIEECTDLQKEGEFSTCFTELQRDFLKQRPTKLKSLIRLVKHWYQNCKKKLGKLPPQYALELLTVYAWERGSMKTHFNTAQGFRTVLELVINYQQLCIYWTKYYDFKNPIIEKYLRRQLTKPRLKATVQTMRPTIPGGIRNMVTLEHMSTLISLIDPAHSRQHPPHRQKRTGPAPSSECQCILGERAPVLSGPVPSFSGGTLDPERTKLLSELVYNPGQNPGLLTPGLLCPLSYHR

SEQ ID NO: 54809 - protein, 216 aa, Homo sapiens
MSYPQFGYPYSSAPQFLMATNSLSTCCESGGRTLADSGPAASAQAPVYCPVYESRLLATARHELNSAAALGVYGGPYGGSQGYGNYVTYGSEASAFYSLNSFDSKDGSGSAHGGLAPAAAAYYPYEPALGQYPYDRIKRLGGHPHKGIGLDLSGLGRSPGSLYGTMDSGTRRKNATRETTSTLKAWLQEHRKNPYPTKGEKIMLAIITKMTLTQVS

SEQ ID NO: 54810 - protein, 179 aa, Homo sapiens
MVPPPPGEESQTVILPPGWQSYLSPQGRRYYVNTTTNETTWERPSSSPGIPASPGSHRSSLPPTVNGYHASGTPAHPPETAHMSVRKSTGDSQNLGSSSPSKKQSKENTITINCVTFPHPDTMPEQQLLKPTEWSYCDYFWADKKDPQGNGTVAGFELLLQKQLKGKQMQKEMSEFIRE

SEQ ID NO: 54811 - protein, 147 aa, Homo sapiens
MVEDGAEELEDLVHFSVSELPSRGYGVMEEIRRQGKLCDVTLKIGDHKFSAHRIVLAASIPYFHAMFTNDMMECKQDEIVMQGMDPSALEALINFAYNGNLAIDQQNVQSLLMGASFLQLQSIKDACCTFLRERLHPKNCLGVRQFA

SEQ ID NO: 54812 - protein, 171 aa, Homo sapiens
MVSVFRSEEMCLSQLFLQVEAAYCCVAELGELGLVQFKDLNMNVNSFQRKFVNEVRRCESLERILRFLEDEMQNEIVVQLLEKSPLTPLPREMITLETVLEKLEGELQEANQNQQALKQSFLELTELKYLLKKTQDFFETETNLADDFFTEDTSGLLELKAVPAYMTGKLG

SEQ ID NO: 54813 - protein, 46 aa, Homo sapiens
MKIFDAAKAPIQWEERNVTAIQGPGGKWMIPSEAKESMDKNKMGLK

SEQ ID NO: 54814 - protein, 297 aa, Homo sapiens
MLLEKDVNPGGKEETPGQRPAVTETHQLAELNEKKNERLRAAFGISDSYVDGSSFDPQRRAREAKQPAPEPPKPYSLVRESSSSRSPTPKQKKKKKKKDRGRRSESSSPRRERKKSSKKKKHRSESESKKRKHRSPTPKSKRKSKDKKRKRSRSTTPAPKSRRAHRSTSADSASSSDTSRSRSRSAAAKTHTTALAGRSPSPASGRRGEGDAPFSEPGTTSTQRPSSPETATKQPSSPYEDKDKDKKEKSATRPSPSPERSSTGPEPPAPTPLLAERHGGSPQPLATTPLSQEPVNP

SEQ ID NO: 54815 - protein, 555 aa, Homo sapiens
MAEHAPRRCCLGWDFSTQQVKVVAVDAELNVFYEESVHFDRDLPEFGTQGGVHVHKDGLTVTSPVLMWVQQHGSIYWKAGAQQALTSLSPDLRLHQQLQDCFSISDCPVWMDSSTTAQCRQLEAAVGGAQALSCLTGSRAYERFTGNQIAKIYQQNPEAYSHTERISLVSSFAASLFLGSYSPIDYSDGSGMNLLQIQDKVWSQACLGACAPHLEEKLSPPVPSCSVVGAISSYYVQRYGFPPGCKVVAFTGDNPASLAGMRLEEGDIAVSLGTSDTLFLWLQEPMPALEGHIFCNPVDSQHYMALLCFKNGSLMREKIRNESVSRSWSDFSKALQSTEMGNGGNLGFYFDVMEITPEIIGRHRFNTENHKVAAFPGDVEVRALIEGQFMAKRIHAEGLGYRVMSKTKILATGGASHNREILQVLADVFDAPVYVIDTANSACVGSAYRAFHGLAGGTDVPFSEVVKLAPNPRLAATPSPGASQMESCSVARLECSGTISAHCNLCLLGSSNSPALASRVTGITGTPNHAQLIFVFLVETGFHHVGQDGLNPPTL

SEQ ID NO: 54816 - protein, 83 aa, Homo sapiens
MSSLPLQVDFYTDMDEDSDIAFRFRVHFGNHVVMNRREFGIWMLEETTDYVPFEDGKQFELCIYVHYNEYEIKVNGIRIYGFV

SEQ ID NO: 54817 - protein, 119 aa, Homo sapiens
MIDAATLKSRKMLEEIMKYEASILTHDSSIRYLQEIYNSNNQKIVNLKEKVAQLEAQCQEPCKDTVQIHDITGKDCQDIANKGAKQSGLYFIKPLKANQQFLVYCEIDGSGNGWTVFQK

SEQ ID NO: 54818 - protein, 4242 aa, Homo sapiens
MMPAQYALTSSLVLLVLLSTARAGPFSSRSNVTLPAPRPPPQPGGHTVGAGVGSPSSQLYEHTVEGGEKQVVFTHRINLPPSTGCGCPPGTEPPVLASEVQALRVRLEILEELVKGLKEQCTGGCCPASAQAGTGQTDVRTLCSLHGVFDLSRCTCSCEPGWGGPTCSDPTDAEIPPSSPPSASGSCPDDCNDQGRCVRGRCVCFPGYTGPSCGWPSCPGDCQGRGRCVQGVCVCRAGFSGPDCSQRSCPRGCSQRGRCEGGRCVCDPGYTGDDCGMRSCPRGCSQRGRCENGRCVCNPGYTGEDCGVRSCPRGCSQRGRCKDGRCVCDPGYTGEDCGTRSCPWDCGEGGRCVDGRCVCWPGYTGEDCSTRTCPRDCRGRGRCEDGECICDTGYSGDDCGVRSCPGDCNQRGRCEDGRCVCWPGYTGTDCGSRACPRDCRGRGRCENGVCVCNAGYSGEDCGVRSCPGDCRGRGRCESGRCMCWPGYTGRDCGTRACPGDCRGRGRCVDGRCVCNPGFTGEDCGSRRCPGDCRGHGLCEDGVCVCDAGYSGEDCSTRSCPGGCRGRGQCLDGRCVCEDGYSGEDCGVRQCPNDCSQHGVCQDGVCICWEGYVSEDCSIRTCPSNCHGRGRCEEGRCLCDPGYTGPTCATRMCPADCRGRGRCVQGVCLCHVGYGGEDCGQEEPPASACPGGCGPRELCRAGQCVCVEGFRGPDCAIQTCPGDCRGRGECHDGSCVCKDGYAGEDCGEEVPTIEGMRMHLLEETTVRTEWTPAPGPVDAYEIQFIPTTEGASPPFTARVPSSASAYDQRGLAPGQEYQVTVRALRGTSWGLPASKTITTMIDGPQDLRVVAVTPTTLELGWLRPQAEVDRFVVSYVSAGNQRVRLEVPPEADGTLLTDLMPGVEYVVTVTAERGRAVSYPASVRANTGSSPLGLLGTTDEPPPSGPSTTQGAQAPLLQQRPQELGELRVLGRDETGRLRVVWTAQPDTFAYFQLRMRVPEGPGAHEEVLPGDVRQALVPPPPPGTPYELSLHGVPPGGKPSDPIIYQGIMDKDEEKPGKSSGPPRLGELTVTDRTSDSLLLRWTVPEGEFDSFVIQYKDRDGQPQVVPVEGPQRSAVITSLDPGRKYKFVLYGFVGKKRHGPLVAEAKILPQSDPSPGTPPRLGNLWVTDPTPDSLHLSWTVPEGQFDTFMVQYRDRDGRPQVVPVEGPERSFVVSSLDPDHKYRFTLFGIANKKRYGPLTADGTTAPERKEEPPHPEFLEQPLLGELTVTGVTPDSLRLSWTVAQGPFDSFMVQYKDAQGQPQAVPVAGDENEVTVPGLDPDRKYKMNLYGLRGRQRVGPESVVAKTAPQEDVDETPSPTELGTEAPESPEEPLLGELTVTGSSPDSLSLFWTVPQGSFDSFTVQYKDRDGRPRAVRVGGKESEVTVGGLEPGHKYKMHLYGLHEGQRVGPVSAVGVTAPQQEETPPATESPLEPRLGELTVTDVTPNSVGLSWTVPEGQFDSFIVQYKDKDGQPQVVPVAADQREVTVYNLEPERKYKMNMYGLHDGQRMGPLSVVIVTAPLPPAPATEASKPPLEPRLGELTVTDITPDSVGLSWTVPEGEFDSFVVQYKDRDGQPQVVPVAADQREVTIPDLEPSRKYKFLLFGIQDGKRRSPVSVEAKTVARGDASPGAPPRLGELWVTDPTPDSLRLSWTVPEGQFDSFVVQFKDKDGPQVVPVEGHERSVTVTPLDAGRKYRFLLYGLLGKKRHGPLTADGTTEARSAMDDTGTKRPPKPRLGEELQVTTVTQNSVGLSWTVPEGQFDSFVVQYKDRDGQPQVVPVEGSLREVSVPGLDPAHRYKLLLYGLHHGKRVGPISAVAITAGREETETETTAPTPPAPEPHLGELTVEEATSHTLHLSWMVTEGEFDSFEIQYTDRDGQLQMVRIGGDRNDITLSGLESDHRYLVTLYGFSDGKHVGPVHVEALTVPEEEKPSEPPTATPEPPIKPRLGELTVTDATPDSLSLSWTVPEGQFDHFLVQYRNGDGQPKAVRVPGHEEGVTISGLEPDHKYKMNLYGFHGGQRMGPVSVVGVTAAEEETPSPTEPSMEAPEPAEEPLLGELTVTGSSPDSLSLSWTVPQGRFDSFTVQYKDRDGRPQVVRVGGEESEVTVGGLEPGRKYKMHLYGLHEGRRVGPVSAVGVTAPEEESPDAPLAKLRLGQMTVRDITSDSLSLSWTVPEGQFDHFLVQFKNGDGQPKAVRVPGHEDGVTISGLEPDHKYKMNLYGFHGGQRVGPVSAVGLTAPGKDEEMAPASTEPPTPEPPIKPRLEELTVTDATPDSLSLSWTVPEGQFDHFLVQYKNGDGQPKATRVPGHEDRVTISGLEPDNKYKMNLYGFHGGQRVGPVSAIGVTAAEEETPSPTEPSMEAPEPPEEPLLGELTVTGSSPDSLSLSWTVPQGRFDSFTVQYKDRDGRPQVVRVGGEESEVTVGGLEPGRKYKMHLYGLHEGRRVGPVSTVGVTAPQEDVDETPSPTEPGTEAPEPPEEPLLGELTVTGSSPDSLSLSWTVPQGRFDSFTVQYKDRDGRPQAVRVGGQESKVTVRGLEPGRKYKMHLYGLHEGRRLGPVSAVGVTEDEAETTQAVPTMTPEPPIKPRLGELTMTDATPDSLSLSWTVPEGQFDHFLVQYRNGDGQPKAVRVPGHEDGVTISGLEPDHKYKMNLYGFHGGQRVGPISVIGVTAAEEETPSPTELSTEAPEPPEEPLLGELTVTGSSPDSLSLSWTIPQGHFDSFTVQYKDRDGRPQVMRVRGEESEVTVGGLEPGRKYKMHLYGLHEGRRVGPVSTVGVTEDEAETTQAVPTTTPEPPNKPRLGELTVTDATPDSLSLSWMVPEGQFDHFLVQYRNGDGQPKVVRVPGHEDGVTISGLEPDHKYKMNLYGFHGGQRVGPISVIGVTAAEEETPAPTEPSTEAPEPPEEPLLGELTVTGSSPDSLSLSWTIPQGRFDSFTVQYKDRDGRPQVVRVRGEESEVTVGGLEPGCKYKMHLYGLHEGQRVGPVSAVGVTAPKDEAETTQAVPTMTPEPPIKPRLGELTVTDATPDSLSLSWMVPEGQFDHFLVQYRNGDGQPKAVRVPGHEDGVTISGLEPDHKYKMNLYGFHGGQRVGPVSAIGVTEEETPSPTEPSTEAPEAPEEPLLGELTVTGSSPDSLSLSWTIPQGRFDSFTVQYKDRDGQPQVVRVRGEESEVTVGGLEPGRKYKMHLYGLHEGQRVGPVSTVGITAPLPTPLPVEPRLGELAVAAVTSDSVGLSWTVAQGPFDSFLVQYRDAQGQPQAVPVSGDLRAVAVSGLDPARKYKFLLFGLQNGKRHGPVPVEARTAPDTKPSPRLGELTVTDATPDSVGLSWTVPEGEFDSFVVQYKDKDGRLQVVPVAANQREVTVQGLEPSRKYRFLLYGLSGRKRLGPISADSTTAPLEKELPPHLGELTVAEETSSSLRLSWTVAQGPFDSFVVQYRDTDGQPRAVPVAADQRTVTVEDLEPGKKYKFLLYGLLGGKRLGPVSALGMTAPEEDTPAPELAPEAPEPPEEPRLGVLTVTDTTPDSMRLSWSVAQGPFDSFVVQYEDTNGQPQALLVDGDQSKILISGLEPSTPYRFLLYGLHEGKRLGPLSAEGTTGLAPAGQTSEESRPRLSQLSVTDVTTSSLRLNWEAPPGAFDSFLLRFGVPSPSTLEPHPRPLLQRELMVPGTRHSAVLRDLRSGTLYSLTLYGLRGPHKADSIQGTARTLSPVLESPRDLQFSEIRETSAKVNWMPPPSRADSFKVSYQLADGGEPQSVQVDGQARTQKLQGLIPGARYEVTVVSVRGFEESEPLTGFLTTVPDGPTQLRALNLTEGFAVLHWKPPQNPVDTYDIQVTAPGAPPLQAETPGSAVDYPLHDLVLHTNYTATVRGLRGPNLTSPASITFTTGLEAPRDLEAKEVTPRTALLTWTEPPVRPAGYLLSFHTPGGQTQEILLPGGITSHQLLGLFPSTSYNARLQATWGQSLLPPVSTSFTTGGLRIPFPRDCGEEMQNGAGASRTSTIFLNGNRERPLNVFCDMETDGGGWLVFQRRMDGQTDFWRDWEDYAHGFGNISGEFWLGNEALHSLTQAGDYSMRVDLRAGDEAVFAQYDSFHVDSAAEYYRLHLEGYHGTAGDSMSYHSGSVFSARDRDPNSLLISCAVSYRGAWWYRNCHYANLNGLYGSTVDHQGVSWYHWKGFEFSVPFTEMKLRPRNFRSPAGGG

SEQ ID NO: 54819 - protein, 123 aa, Homo sapiens
MDGFYDQQVPYMVTNSQRGRNCNEKPTNVRKRKFINRDLAHDSEELFQDLSQLQETWLAEAQVPDNDEQFVPDYQAESLAFHGLPLKIKKEPHSPCSEISSACSQEQPFKFSYGEKCLYNVSA

SEQ ID NO: 54820 - protein, 282 aa, Homo sapiens
MASPGCLWLLAVALLPWTCASRALQHLDPPAPLPLVIWHGMGDSCCNPLSMGAIKKMVEKKIPGIYVLSLEIGKTLMEDVENSFFLNVNSQVTTVCQALAKDPKLQQGYNAMGFSQGGQFLRAVAQRCPSPPMINLISVGGQHQGVFGLPRCPGESSHICDFIRKTLNAGAYSKVVQERLVQAEYWHDPIKEDVYRNHSIFLADINQERGINESYKKNLMALKKFVMVKFLNDSIVDPVDSEDRLGLKEMDNAGQLVFLATEGDHLQLSEEWFYAHIIPFLG

SEQ ID NO: 54821 - protein, 195 aa, Homo sapiens
  MOD_RES (1)..(1): Any amino acid
XMLPYYTVNGSWVVPPEPRPSFFSISPQDCQFALGGRGQKPELQMLTVSEELPFDNVDGGVWRQGFDISYDPHDWDAEDLQEDPRRRFLWAEVSFFAKWWDNINVQKRAAVRRLVGNGQLEIATGGWVMPDEANSHYFALIDQLIEGHQWLERNLGATPRSGWAVDPFGYSSTMPYLLRRANLTSMLIQRVHYAI

SEQ ID NO: 54822 - protein, 44 aa, Homo sapiens
MAELVQGQSAPVGMKAEGFVDALHRVRQKATGVIVLEEGLHSGA

SEQ ID NO: 54823 - protein, 130 aa, Homo sapiens
MVVAAGKRFCGEHAGAAEEEDARKRILCPLDPKHTVYEDQLAKHLKKCNSREKPKPDFYIQDINAGLRDETEIPEQLVPISSLSEEQLEKLIKKLRKASEALHDALNDPKNGDSATKHLKQQVCLGYSNY

SEQ ID NO: 54824 - protein, 156 aa, Homo sapiens
MAGLQELRFPEEKPLLRGQDATELESSDAFLLAADTDWKEHDIETPYGLLHVVIRGSPKGNRPAILTYHDVGLNHKLCFNTFFNFEDMQEITKHFVVCHVDAPGQQVGASQFPQGYQFPSMEQLAAMLPSVVQHFGFKYVIGIGVGAGAYVLAKFA

SEQ ID NO: 54825 - protein, 261 aa, Homo sapiens
MPCTCTWRNWRQWIRPLVAVIYLVSIVVAVPLCVWELQKLEVGIHTKAWFIAGIFLLLTIPISLWVILQHLVHYTQPELQKPIIRILWMVPIYSLDSWIALKYPGIAIYVDTCRECYEAYVIYNFMGFLTNYLTNRYPNLVLILEAKDQQKHFPPLCCCPPWAMGEVLLFRCKLGVLQYTVVRPFTTIVALICELLGIYDEGNFSFSNAWTYLVIINNMSQLFAMYCLLLFYKVLKEELSPIQPVGKFLCVKLVVFVSFWP

SEQ ID NO: 54826 - protein, 149 aa, Homo sapiens
MSTVHEILCKLSLEGDHSTPPSAYGSVKAYTNFDAERDALNIETAIKTKGVDEVTIVNILTNRSNAQRQDIAFAYQRRTKKELASALKSALSGHLETVILGLLKTPAQYDASELKASMKGLGTDEDSLIEIICSRTNQELQEINRVYKE

SEQ ID NO: 54827 - protein, 142 aa, Homo sapiens
METFPLLLLSLGLVLAEASESTMKIIKEEFTDEEMQYDMAKSGQEKQTIEILMNPILLVKNTSLSMSKDDMSSTLLTFRSLHYNDPKGNSSGNDKECCNDMTVWRKVSEANGSCKWSNNFIRSSTEVMRRVHRAPSCKFVQN

SEQ ID NO: 54828 - protein, 24 aa, Homo sapiens
  MOD_RES (1)..(1): Any amino acid
XGEFGLREYSEVKTVTVKIPQKNS

SEQ ID NO: 54829 - protein, 150 aa, Homo sapiens
DLRRDEQPSGSVETGFEDKIPKRRFSEMQNERREQAQRTVLIHCPEKISENKFLKYLSQFGPINNHFFYESFGLYAVVEFCQKESIGSLQNGTHTPSTAMETAIPFRSRFFNLKLKNQTSERSRVRSSNQLPRSNKQLFELLCYAESVSF

SEQ ID NO: 54830 - protein, 625 aa, Homo sapiens
MELWAPQRLPQTRGKATAPSKDPDRGFRRDGHHRPVPHSWHNGERFHQWQDNRGSPQPQQEPRADHQQQPHYASRPGDWHQPVSGVDYYEGGYRNQLYSRPGYENSYQSYQSPTMREEYAYGSYYYHGHPQWLQEERVPRQRSPYIWHEDYREQKYLDEHHYENQHSPFGTNSETHFQSNSRNPCKDSPASNSGQEWPGELFPGSLLAEAQKNKPSLASESNLLQQRESGLSSSSYELSQYIRDAPERDDPPASAAWSPVQAEDVSSAGPKAPMKFYIPHVPVSFGPGGQLVHVGPSSPTDGQAALVELHSMEVILNDSEEQEEMRSFSGPLIREDVHKVDIMTFCQQKAAQSCKSETLGSRDSALLWQLLVLLCRQNGSMVGSDIAELLMQDCKKLEKYKRQPPVANLINLTDEDWPVLSSGTPNLLTGEIPPSVETPAQIVEKFTRLLYYGRKKEALEWAMKNHLWGHALFLSSKMDPQTYSWVMSGFTSTLALNDPLQTLFQLMSGRIPQAATCCGEKQWGDWRPHLAVILSNQAGDPELYQRAIVAIGDTLAGKGLVEAAHFCYLMAHVPFGHYTVKTDHLVLLGSSHRYATWEKGNSKDIFQGTVLALVGFYGSIFHFLM

SEQ ID NO: 54831 - protein, 117 aa, Homo sapiens
MAHGIPSQGKVTITVDEYSSNPTQAFTHYNINQSRFQPPHVHMVDPIPYDTPKPAGHTRFVCISDTHSRTDGIQMPYGDILLHTGDFTELGLPSEVKKFNDWLDLVSHCKHGRNPNA

SEQ ID NO: 54832 - protein, 58 aa, Homo sapiens
MEKLAASTEPQGPRPVLGRESVQCRMECCDVPAETLYDVLHDIEYRKKWDSNVIETFD

SEQ ID NO: 54833 - protein, 58 aa, Homo sapiens
MEGKWLLCMLLVLGTAIVEAHDGHDDDVIDIEDDLDDVIEEVEDSKPDTTAPPSSPKV

SEQ ID NO: 54834 - protein, 522 aa, Homo sapiens
MYVIESARQRPPKRKYLSSGRKSVFQKLYDLYIEECEKEPEVKKLRRNVNLLEKLVMQETLSCLVVNLYPGNEGYSLMLRGKNGSDSETIRLPYEEGELLEYLDAEELPPILVDLLEKSQVNIFHCGCVIAEIRDYRQSSNMKSPGYQSRHILLRPTMQTLICDVHSITSDNHKWTQEDKLLLESQLILATAEPLCLDPSIAVTCTANRLLYNKQKMNTRPMKRCFKRYSRSSLNRQQDLSHCPPPPQLRLLDFLQKRKERKAGQHYDLKISKAGNCVDMWKRSPCNLAIPSEVDVEKYAKVEKSIKSDDSQPTVWPAHDVKDDYVFECEAGTQYQKTKLTILQSLGDPLYYGKIQPCKADEESDSQMSPSHSSTDDHSNWFIIGSKTDAERVVNQYQELVQNEAKCPVKMSHSSSGSASLSQVSPGKETDQTETVSVQSSVLGKGVKHRPPPIKLPSSSGNSSSGNYFTPQQTSSFLKSPTPPPSSKPSSIPRKSSVDLNQVSMLSPAALSPASSSQRHES

SEQ ID NO: 54835 - protein, 85 aa, Homo sapiens
MKTLFLGVTLGLAAALSFTLEEEDEGGSVHPEENPDAEDGGAWQIQRLWGQEAHIPAGAARDGRLRLLLQRPAPWGPALHGKACG

SEQ ID NO: 54836 - protein, 56 aa, Homo sapiens
MSAEDEPQHLEFTMQEAVQCLHALEEYCPSKDDYSKLCLLLTLPRLTNHAEFKDWN

SEQ ID NO: 54837 - protein, 282 aa, Homo sapiens
  MOD_RES (1)..(1): Any amino acid
XVKLRLQEFLLSKSKEPTPGGLNHSLPQHPKCWGAHHASLDQSSPPQSGPPGTPPSYKLPLPGPYDSRDDFPLRKTASSVCNSAPGSGPSSPNSSHSTIAENGFTGSVPNIPTEMLPQHRALPLDSSPNQFSLYTSPSLPNISLGLQATVTVTNSHLTASPKLSTQQEAERQALQSLRQGGTLTGKFMSTSSIPGCLLGVALEGDGSPHGHASLLQHVLLLEQARQQSTLIAVPLHGQSPLVTGERVATSMRTVGKLPRHRPLSRTQSSPLPQSPQALQQLV

SEQ ID NO: 54838 - protein, 78 aa, Homo sapiens
MTSCHIAEEHIQKVAIFGGTHGNELTGVFLVKHWLENGAEIQRTGLEVKPFITNPRAVKKCTRYIDCDLNRIFDLENL

SEQ ID NO: 54839 - protein, 250 aa, Homo sapiens
MPGARSGGSGGDGSNSGSYSGDASGAVTVWEVVSLLGKLLGTVVALKVVLYLLRVCLAMAWKSGGASHSELIHNLRSFQATISAPHMHAYALELLFDQLHEGAKALDVGSGSGILTACFARMVGCTGKVIGIDHIKELVDDSVNNVRKDDPTLLSSGRVQLVVGDGRMGYAEEAPYDAIHVGAAAPVVPQALIDQLKPGGRLILPVGPAGGNQMLEQYDKLQDGSIKMKPLMGVIYVPLTDKEKQWSRWK

SEQ ID NO: 54840 - protein, 34 aa, Homo sapiens
  MOD_RES (1)..(1): Any amino acid
XVEPAIQELFSCPTPGCDGSGHVSGKYARHRRNQ

SEQ ID NO: 54841 - protein, 204 aa, Homo sapiens
MERAGATSRGGQAPGFLLRLHTEGRAEAARVQEQDLRQWGLTGIHLRSYQLEGVNWLAQRFHCQNGCILGDEMGLGKTCQTIALFIYLAGRLNDEGPFLILCPLSVLSNWKEEMQRFAPGLSCVTYAGDKEERACLQQDLKQESRFHVLLTTYEICLKDASFLKSFPWSVLVVDEAHRLKNQSSLLHKTLSEQVNCTNSCSHFC

SEQ ID NO: 54842 - protein, 138 aa, Homo sapiens
MNIFDRKINFDALLKFSHITPSTQQHLKKVYASFALCMFVAAAGAYVHMVTHFIQAGLLSALGSLILMIWLMATPHSHETEQKRLGLLAGFAFLTGVGLGPALEFCIAVNPSILPTAFMGTAMIFTCFTLSALYARRR

SEQ ID NO: 54843 - protein, 132 aa, Homo sapiens
MYIKKLMEIITVENPKMPYEMKEMALEAIVQLWRIPSFVTELYINYDCDYYCSNLFEELTKLLSKLLITGTEQFNQKPKKGIQFLQEKGLLTIPMDNTEVAQWLRENPRLDKKMIGEFVSDRKNIDLLESFV

SEQ ID NO: 54844 - protein, 370 aa, Homo sapiens
MESIFHEKQEGSLCAQHCLNNLLQGEYFSPVELSSIAHQLDEEERMRMAEGGVTSEDYRTFLQQPSGNMDDSGFFSIQVISNALKVWGLELILFNSPEYQRLRIDPINERSFICNYKEHWFTVRKLGKQWFNLNSLLTGPELISDTYLALFLAQLQQEGYSIFVVKGDLPDCEADQLLQMIRVQQMHRPKLIGEELAQLKEQRVHKTDLERVLEANDGSGMLDEDEEDLQRALALSRQEIDMEDEEADLRRAIQLSMQGSSRNISQDMTQTSGTNLTSEELRKRREAYFEKVRLRLQKYIQQQKQQQQQQQQQQGDLSGQSSHPCERPATSSGALGSDLGDAMSEEDMLQAAVTMSLETVRNDLKTEGKK

SEQ ID NO: 54845 - protein, 233 aa, Homo sapiens
  MOD_RES (1)..(1): Any amino acid
XTEGSFACSACENGYWVNEDGTACEDLDECAFPGVCPSGVCTNTAGSFSCKDCDGGYRPSPLGDSCEDVDECEDPQSSCLGGECKNTVGSYQCLCPQGFQLANGTVCEDVNECMGEEHCAPHGECLNSHGSFFCLCAPGFVSAEGGTSCQDIDECEDYGDPVCGTWKCENSPGSYRCVLGCQPGFHMAPNGDCIDIDECANDTMCGSHGFCDNTDGSFRCLCDQGFEISPSGW

SEQ ID NO: 54846 - protein, 106 aa, Homo sapiens
MLTLHNWLSFYEKNYVCVGRVTGRFYGEDGLPTPALTQVEAAITRGLEANKLQLQEKQTFPPCNAEWSSARGSRLWCSQKRGFNSSLALASGSLKHACHRLILQFL

SEQ ID NO: 54847 - protein, 198 aa, Homo sapiens
MNSFSTSAFGPVAFSLGLLLVLPAAFPAPVPPGEDSKDVAAPHRQPLTSSERIDKQIRYILDGISALRKETCNKSNMCESSKEALAENNLNLPKMAEKDGCFQSGFNEETCLVKIITGLLEFEVYLEYLQNRFESSEEQARAVQMSTKVLIQFLQKKVGVSSFPQLGVGEDRLKDSVLDNSGMQCHFQKRRLHVNKRV

SEQ ID NO: 54848 - protein, 227 aa, Homo sapiens
  MOD_RES (1)..(1): Any amino acid
XRKKENSRSLDVGGPLRYAVYGFFFTGPLSHFFYFFMEHWIPPEVPLAGLRRLLLDRLVFAPAFLMLFFLIMNFLEGKDASAFAAKMRGGFWPALRMNWRVWTPLQFININYVPLKPGSPGPLPHWEDGVQHPLQHGRIPPDATGGGLAEPAGATCFPPPEVPGALRQPGSSVLVCLPGLLGEVTTAGRTSGALWTWVWGSHPPSESRTNPVRMSLTLNQVIQDAQK

SEQ ID NO: 54849 - protein, 140 aa, Homo sapiens
YYLVQGLIEDCQLALQQKRETLSPLCLIPMVTSPREEQQLLASTSKPVVKLLHNRSNNKYSYTSTSDDNLLKNIELFDKLALRFHGRLLFLKDVLGDEICCWSFYGQGRKIAEVCCTSIVYATEKKQTKCIVHAKVCGPS

SEQ ID NO: 54850 - protein, 247 aa, Homo sapiens
  MOD_RES (1)..(1): Any amino acid
XELLRSHQSRPAKCLTIMWALGQAGFANLTEGLKVWLGIMLPVLGIKSLSPFAITYLDRLLLMHPNLTKGFGMIGPKDFFPLLDFAYMPNNSLTPSLQEQLCQLYPRLKVLAFGAKPDSTLHTYFPSFLSRATPSCPPEMKKELPVDSCLPRSLELHPQKMDPKRQHIQLLSSLTECLTVDPLSASVWRQLYPKHLSQSSLLLEHLLSSWEQIPKKVQKSLQETIQSLKLTNQELLRKGSSNNQDVV

SEQ ID NO: 54851 - protein, 76 aa, Homo sapiens
METSSRELQAAEYLEKHQIKEVVSYLTSALLFFRPALKTLGLCTEDEDLQDDGHKITLDKFKEEVNKRMKEIWSAF

SEQ ID NO: 54852 - protein, 93 aa, Homo sapiens
MKLGSSRAGPGRGSAGLLPGVHELPMGIPAPWGTSPLSFHRKCSLWAPGRPFLTLVLLVSIKQVTGSLLEETTRKWAQYKQACLRDLLKEPSG

SEQ ID NO: 54853 - protein, 267 aa, Homo sapiens
  MOD_RES (1)..(1): Any amino acid
XADLTEGDLANSHLPSEVLYMLKNVRVLGHFEKPLFLELCRHMVFQRLGQGDYVFRPGQPDASIYVVQDGLLELCLPGPDGKECVVKEVVPGDSVNSLLSILDVITGHQHPQRTVSARAARDSTVLRLPVEAFSAVFTKYPESLVRVVQIIMVRLQRVTFLALHNYLGLTNELFSHEIQPLRLFPSPGLPTRTSPVRGSKRMVSTSATDEPRETPGRPPDPTGAPLPGPTGLQGGPRSDFDMAYERGRISVSLQEEASGGSLAAPAR

SEQ ID NO: 54854 - protein, 1019 aa, Homo sapiens
MRYRLAWLLHPALPSTFRSVLGARLPPPERLCGFQKKTYSKMNNPAIKRIGNHITKSPEDKREYRGLELANGIKVLLISDPTTDKSSAALDVHIGSLSDPPNIAGLSHFCEHMLFLGTKKYPKENEYSQFLSEHAGSSNAFTSGEHTNYYFDVSHEHLEGALDRFAQFFLCPLFDESCKDREVNAVDSEHEKNVMNDAWRLFQLEKATGNPKHPFSKFGTGNKYTLETRPNQEGIDVRQELLKFHSAYYSSNLMAVCVLGRESLDDLTNLVVKLFSEVENKNVPLPEFPEHPFQEEHLKQLYKIVPIKDIRNLYVTFPIPDLQKYYKSNPGHYLGHLIGHEGPGSLLSELKSKGWVNTLVGGQKEGARGFMFFIINVDLTEEGLLHVEDIILHMFQYIQKLRAEGPQEWVFQECKDLNAVAFRFKDKERPRGYTSKIAGILHYYPLEEVLTAEYLLEEFRPDLIEMVLDKLRPENVRVAIVSKSFEGKTDRTEEWYGTQYKQEAIPDEVIKKWQNADLNGKFKLPTKNEFIPTNFEILPLEKEATPYPALIKDTAMSKLWFKQDDKFFLPKACLNFEFFSRYIYADPLHCNMTYLFIRLLKDDLKEYTYAARLSGLSYGIASGMNAILLSVKGYNDKQPILLKKIIEKMATFEIDEKRFEIIKEAYMRSLNNFRAEQPHQHAMYYLRLLMTEVAWTKDELKEALDDVTLPRLKAFIPQLLSRLHIEALLHGNITKQAALGIMQMVEDTLIEHAHTKPLLPSQLVRYREVQLPDRGWFVYQQRNEVHNNCGIEIYYQTDMQSTSENMFLELFCQIISEPCFNTLRTKEQLGYIVFSGPRRANGIQGLRFIIQSEKPPHYLESRVEAFLITMEKSIEDMTEEAFQKHIQALAIRRLDKPKKLSAECAKYWGEIISQQYNFDRDNTEVAYLKTLTKEDIIKFYKEMLAVDAPRRHKVSVHVLAREMDSCPVVGEFPCQNDINLSQAPALPQPEVIQNMTEFKRGLPLFPLVKPHINFMAAKL

SEQ ID NO: 54855 - protein, 616 aa, Homo sapiens
  MOD_RES (1)..(1): Any amino acid
XCAQWLIHCKVLPTNHRVTWDSAQVFDLAQTLRDGVLLCQLLNNLRAHSINLKEINLRPQMSQFLCLKNIRTFLTACCETFGMRKSELFEAFDLFDVRDFGKVIETLSRLSRTPIALATGIRPFPTEESINDEDIYKGLPDLIDETLVEDEEDLYDCVYGEDEGGEVYEDLMKAEEAHQPKCPENDIRSCCLAEIKQTEEKYTETLESIEKYFMAPLKRFLTAAEFDSVFINIPELVKLHRNLMQEIHDSIVNKNDQNLYQVFINYKERLVIYGQYCSGVESAISSLDYISKTKEDVKLKLEECSKRANNGKFTLRDLLVVPMQRVLKYHLLLQELVKHTTDPTEKANLKLALDAMKDLAQYVNEVKRDNETLREIKQFQLSIENLNQPVLLFGRPQGDGEIRITTLDKHTKQERHIFLFDLAVIVCKRKGDNYEMKEIIDLQQYKIANNPTTDKENKKWSYGFYLIHTQGQNGLEFYCKTKDLKKKWLEQFEMALSNIRPDYADSNFHDFKMHTFTRVTSCKVCQMLLRGTFYQGYLCFKCGARAHKECLGRVDNCGRVNSGEQGTLKLPEKRTNGLRRTPKQVDPDVPCLLHFFISMAPATRSIVKSQKKNKKF

SEQ ID NO: 54856 - protein, 209 aa, Homo sapiens
MGGKQSTAARSRGPFPGVSTDDSAVPPPGGAPHFGHYRTGGGAMGLRSRSVSSVAGMGMDPSTAGGVPFGLYTPASRGTGDSERAPGGGGSASDSTYAHGNGYQETGGGHHRDGMLYLGSRASLADALPLHIAPRWFSSHSGFKCPICSKSVASDEMEMHFIMCLSKPRLSYNDDVLTKDAGECVICLEELLQGDTIARLPCLCIYHKR

SEQ ID NO: 54857 - protein, 627 aa, Homo sapiens
MMSLSVRPQRRLLSARVNRSQSFAGVLGSHERGPRSFPVFSPPGPPRKPPALSRVSRMFSVAHPAAKVPQPERLDLVYTALKRGLTAYLEVHQQEQEKLQGQIRESKRNSRLGFLYDLDKQVKSIERFLRRLEFHASKIDELYEAYCVQRRLRDGAYNMVRAYTTGSPGSREARDSLAEATRGHREYTESMCLLESELEAQLGEFHLRMKGLAGFARLCVGDQYEICMKYGRQRWKLRGRIEGSGKQVWDSEETIFLPLLTEFLSIKVTELKGLANHVVVGSVSCETKDLFAALPQVVAVDINDLGTIKLSLEVTWSPFDKDDQPSAASSVNKASTVTKRFSTYSQSPPDTPSLREQAFYNMLRRQEELENGTAWSLSSESSDDSSSPQLSGTARHSPAPRPLVQQPEPLPIQVAFRRPETPSSGPLDEEGAVAPVLANGHAPYSRTLSHISEASVDAALAEASVEAVGPESLAWGPSPPTHPAPTHGEHPSPVPPALDPGHSATSSTLGTTGSVPTSTDPAPSAHLDSVHKSTDSGPSELPGPTHTTTGSTYSAITTTHSAPSPLTHTTTGSTHKPIISTLTTTGPTLNIIGPVQTTTSPTHTMPSPTHTTASPTHTSTSPTHTPT

SEQ ID NO: 54858 - protein, 155 aa, Homo sapiens
  MOD_RES (1)..(1): Any amino acid
XGLLLLCAAAAGAGKAEELHYPLGERRSDYDREALLGVQEDVDEYVKLGHEEQQKRLQAIIKKIDLDSDGFLTESELSSWIQMSFKHYAMQEAKQQFVEYDKNSDDTVTWDEYNIQMYDRVIDFDENTALDDAEEESFRKHQCGGLGLHPQSQSA

SEQ ID NO: 54859 - protein, 462 aa, Homo sapiens
MCDLRRPAAGGMMDLAYVCEWEKWSKSTHCPSVPLACAWSCRNLIAFTMDLRSDDQDLTRMIHILDTEHPWDLHSIPSEHHEAITCLEWDQSGSRLLSADADGQIKCWSMADHLANSWESSVGSLVEGDPIVALSWLHNGVKLALHVEKVLLCASSQTSSIVECWSLRKEGLPVNNIFQQISPVVGDKQPTILKWRILSATNDLDRVSAVALPKLPISLTNTDLKVASDTQFYPGLGLALAFHDGSVHIVHRLSLQTMAVFYSSAAPRPVDEPAMKRPRTAGPAVHLKAMQLSWTSLALVGIDSHGKLSVLRLSPSMGHPLEVGLALRHLLFLLEYCMVTGYDWWDILLHVQPSMVQSLVEKLHEEYTRQTAALQQVLSTRILAMKASLCKLSPCTVTRVCDYHTKLFLIAISSTLKSLLRPHFLNTPDKSPGDRLTEICTKITDVDIDKVMINLKTEEFVL

SEQ ID NO: 54860 - protein, 143 aa, Homo sapiens
YSHYYQQPPGPVPGPAPAPAAPPAQGQQPQQPGAPPQQDYTKAWEEYYKKQAQVATGGGPGAPPGSQPDYSAAWAEYYRQQAAYYGQTPGPGGPQPPPTQQGQQQASGNCHPPPPPFSFQPPATVHPALVGSAGNPFPCGVCP

SEQ ID NO: 54861 - protein, 245 aa, Homo sapiens
MLSPAPEEPLLLAELKPGRPHQFDWKSSCETWSVAFSPDGSWFAWSQGHCIVKLIPWPLEEQFIPKGFEAKSRSSKNETKGRGSPKEKTLDCGQIVWGLAFSPWPSPPSRKLWARHHPQVPDVSCLVLATGLNDGQIKIWEVQTGLLLLNLSGHQDVVRDLSFTPSGSLILVSASRDKTLRIWDLNKHGKQIQVLSGHLQWVYCCSISPDCSMLCSAAGEKSVFLWSMRSYTLIRKLEGHQSSVV

SEQ ID NO: 54862 - protein, 185 aa, Homo sapiens
MAAVAGSGAAAAPSSLLLVVGSEFGSPGLLTYVLEELERGIRSWDVDPGVCNLDEQLKVFVSRHSATFSSIVKGQRSLHHRGDNLETLVLLNPSDKSLYDELRNLLLDPASHKLLVLAGHPCPESPQPPRLPLEARRGQPAAGPGCQPPHPSPRSTWTWPTCPAGAAPTWWMRSSSSACARSATS

SEQ ID NO: 54863 - protein, 312 aa, Homo sapiens
MYSPIIYQALCEHVQTQMSLMNDLTSKNIPNGIPAVPCHAPSHSESQATPHSSYGLCTSTPVWSLQRPPCPPKVHSEVQTDGNSQFASQEDSEIQRLITEMEACISVLPTVSGNTDIQVEIALAMQPLRSENAQLRRQLRILNQQLREQQKTQKPSGAVDCNLELFSLQSLNMSLQNQLEESLKSQELLQSKNEELLKVIENQKDENKKFSSIFKDKDQTILENKQQYDIEITRIKIELEEALVNVKSSQFKLETAEKENQILGITLRQRDAEVTRLRELTRSTPEKKSPLSKRLSPQPQIRAATTQLVSNS

SEQ ID NO: 54864 - protein, 152 aa, Homo sapiens [sequence omitted]

SEQ ID NO: 54865 - protein, 90 aa, Homo sapiens
MELAALCRWGLLLALLPPGAASTQVCTGTDMKLRLPASPETHLDMLRHLYQGCQVVQGNLELTYLPTNASLSFLQVRPVGNPARPCLQLG

SEQ ID NO: 54866 - protein, 173 aa, Homo sapiens
MVSESHHEALAAPPVTTVATVLPSNATEPASPGEGKEDAFSKLKEKFMNELHKIPLPPWALIAIAIVAVLLVLTCCFCICKKCLFKKKNKKKGKEKGGKNAINMKDVKDLGKTMKDQDDDAETGLTDGEEKEEPKEEEKLGKLQYSLDYDFQNNQLLVGIIQAAELPALDMGG

SEQ ID NO: 54867 - protein, 165 aa, Homo sapiens
MARLSGTVGVAAVTAGPGLTNTVTAVKNAQMAQSPILLLGGAASTLLQNRGALQAVDQLSLFRPLCKFCVSVRRVRDIVPTLRAAMAAAQSGTPGPVFVELPVDVLYPYFMVQKEMVPAKPPKGLVGRVVSWYLENYLANLFAGAWEPQPEGPLPLDIPQASPQQ

SEQ ID NO: 54868 - protein, 284 aa, Homo sapiens
MVSWIISRLVVLIFGTLYPAYYSYKAVKSKDIKEYVKWMMYWIIFALFTTAETFTDIFLCWFPFYYELKIAFVAWLLSPYTKGSSLLYRKFVHPTLSSKEKEIDDCLVQAKDRSYDALVHFGKRGLNVAATAAVMAASKGQGALSERLRSFSMQDLTTIRGDGAPAPSGPPPPGSGRASGKHGQPKMSRSASESASSSVCTCCSTCRTWKVVEGDVNEGGMKAWEPHQVQNPLAFSDDEEEDLLDFMYKYKAPRRMELPLEAPPRILRSRFRKKSTSSSATETT

SEQ ID NO: 54869 - protein, 62 aa, Homo sapiens
MPFSHLSTYSLVWVMAAVVLCTAQVQVVTQDEREQLYTPASLKCSLQNAQEALIVTWQKKKA

SEQ ID NO: 54870 - protein, 151 aa, Homo sapiens
MQFFGRLVNTFSGVTNLFSNPFRVKEVAVADYTSSDRVREEGQLILFQNTPNRTWDCVLVNPRNSQSGFRLFQLELEADALVNFHQYSSQLLPFYESSPQVLHTEVLQHLTDLIRNHPSWSVAHLAVELGIRECFHHSRIISSLEGTQWLA

SEQ ID NO: 54871 - protein, 78 aa, Homo sapiens
  MOD_RES (1)..(1): Any amino acid
XRSPRKPIDSLRDSRSLSYSPVERRRPSPQPSPRDQQSSSSERGSRRGQRGDSRSPSHKRRRETPSPRPMRHRSSRSP

SEQ ID NO: 54872 - protein, 123 aa, Homo sapiens
MAKFMTPVIQDNPSGWGPCAVPEQFRDMPYQPFSKGDRLGKVADWTGATYQDKRYTNKYSSQFGGGSQYAYFHEEDESSFQLVDTARTQKTAYQRNRMRFAQRNLRRDKDRRNMLQFNLQILP

SEQ ID NO: 54873 - protein, 98 aa, Homo sapiens
MAARPLSRMLRRLLRSSARSCSSGAPVTQPCPGESARAASEEVSRRRQFLREHAAPFSAFLTDSFGRQHSYLRISLTEKCNLRCESPSWALSGLVSIC

SEQ ID NO: 54874 - protein, 160 aa, Homo sapiens
  MOD_RES (1)..(1): Any amino acid
XTGTLSRKSIKAPATPASATLGRPPRIPEPVHLPVVPDGRLSAASSAFSLASAGSAEGVGGAPTPKGQAAPPAPPLPSSLDPPPPPAAVEVFQRPPTLEELSPPPPAFLLFPQDEELPLPLDLPPPPPLDGDELGLPPPPPGFGPDEPSWVPASYLEKGT

SEQ ID NO: 54875 - protein, 604 aa, Homo sapiens
MLLARMNPQVQPENNGADTGPEQPLRARKTAELLVVKERNGVQCLLAPRDGDAQPRETWGKKIDFLLSVVGFAVDLANVWRFPYLCYKNGGGAFLIPYTLFLIIAGMPLFYMELALGQYNREGAATVWKICPFFKGVGYAVILIALYVGFYYNVIIAWSLYYLFSSFTLNLPWTDCGHTWNSPNCTDPKLLNGSVLGNHTKYSKYKFTPAAEFYERGVLHLHESSGIHDIGLPQWQLLLCLMVVVIVLYFSLWKGVKTSGKVVWITATLPYFVLFVLLVHGVTLPGASNGINAYLHIDFYRLKEATVWIDAATQIFFSLGAGFGVLIAFASYNKFDNNCYRDALLTSSINCITSFVSGFAIFSILGYMAHEHKVNIEDVATEGAGLVFILYPEAISTLSGSTFWAVVFFVMLLALGLDSSMGGMEAVITGLADDFQVLKRHRKLFTFGVTFSTFLLALFCITKGGIYVLTLLDTFAAGTSILFAVLMEAIGVSWFYGVDRFSNDIQQMMGFRPGLYWRLCWKFVSPAFLLFVVVVSIINFKPLTYDDYIFPPWANWVGWGIALSSMVLVPIYVIYKFLSTQGSLWEMKTRQGRRRATNSCQISC

SEQ ID NO: 54876 - protein, 36 aa, Homo sapiens
MDKNIGEQLNKAYEAFRQACMDRDSAVKELQQKSLQ

SEQ ID NO: 54877 - protein, 171 aa, Homo sapiens
MSRSLLLWFLLFLLLLPPLPVLLADPGAPTPAGLWTWLRNSLRPSPSFTHFLLTHGRWFWEFVNATFIREMLMRLVLTVRSNLIPSPPTYNSAHDYISWESFSNFFKTSGKMGPGFTKALGHGVDLGHIYGDNLERQYQLRLFKDGKLKYQVLDGEMYPPSVEEAPVLMHY

SEQ ID NO: 54878 - protein, 702 aa, Homo sapiens
  MOD_RES (1)..(1): Any amino acid
XVRAGLFHGTELLCKTIVSSEVSGKNDHIWNEPLEFDINICDLPRMARLCFAVYAVLDKVKTKKSTKTINPSKYQTIRKAGKVHYPVAWVNTMVFDFKGQLRTGDIILHSWSSFPDELEEMLNPMGTVQTNPYTENATALHVKFPENKKQPYYYPPFDKSRGGKKFLPVLKEILDRDPLSQLCENEMDLIWTLRQDCREIFPQSLPKLLLSIKWNKLEDVAQLQALLQIWPKLPPREALELLDFNYPDQYVREYAVGCLRQMSDEELSQYLLQLVQVLKYEPFLDCALSRFLLERALGNRRIGQFLFWHLRSEVHIPAVSVQFGVILEAYCRGSVGHMKVLSKQVEALNKLKTLNSLIKLNAVKLNRAKGKEAMHTCLKQSAYREALSDLQSPLNPCVILSELYVEKCKYMDSKMKPLWLVYNNKVFGEDSVGVIFKNGDDLRQDMLTLQMLRLMDLLWKEAGLDLRMLPYGCLATGDRSGLIEVVSTSETIADIQLNSSNVAAAAAFNKDALLNWLKEYNSGDDLDRAIEEFTLSCAGYCVASYVLGIGDRHSDNIMVKKTGQLFHIDFGHILGNFKSKFGIKRERVPFILTYDFIHVIQQGKTGNTEKFGRFRQCCEDAYLILRRHGNLFITLFALMLTAGLPELTSVKDIQYLKDSLALGKSEEEALKQFKQKFDEALRESWTTKVNWMAHTVRKDYRS

SEQ ID NO: 54879 - protein, 117 aa, Homo sapiens
MVPWVRTMGQKLKQRLRLDVGREICRQYPLFCFLLLCLSAASLLLNRYIHILMIFWSFVAGVVTFYCSLGPDSLLPNIFFTIKYKPKQLGLQELFPQGHSCAVCGKVKCKRHSDLVV

SEQ ID NO: 54880 - protein, 112 aa, Homo sapiens
  MOD_RES (1)..(1): Any amino acid
XGDTVVVVEKDHFMDDFFHQVEEIRNSIDKITQYVEEVKKNHSIILSAPNPEGKIKEELEDLNKEIKKTANKIRAKLKGFRCVQKQREATTSRPPSSTVLHELPPAPAPRLF

SEQ ID NO: 54881 - protein, 531 aa, Homo sapiens
MRTTKVYKLVIHKKGFGGSDDELVVNPKVFPHIKLGDIVEIAHPNDEYSPLLLQVKSLKEDLQKETISVDQTVTQVFRLRPYQDVYVNVVDPKVSTCAYITQKVEFAGIRAQAGELWVKNEKVMCGYISEDTRVVFRSTSAMVYIFIQMSCEMWDFDIYGDLYFEKAVNGFLADLFTKWKEKNCSHEVTVVLFSRTFYDAKSVDEFPEINRASIRQDHKGRFYEDFYKVVVQNERREEWTSLLVTIKKLFIQYPVLVRLEQAEGFPQGDNSTSAQGNYLEAINLSFNVFDKHYINRNFDRTGQMSVVITPGVGVFEVDRLLMILTKQRMIDNGIGVDLVCMGEQPLHAVPLFKLHNRSAPRDSRLGDDYNIPHWINHSFYTSKSQLFCNSFTPRIKLAGKKPASEKAKNGRDTSLGSPKESENALPIQVDYDAYDAQVFRLPGPSRAQCLTTCRSVRERESHSRKSASSCDVSSSPSLPSRTLPTEEVRSQASDDSSLGKSANILMIPHPHLHQYEVSSSLGYTSTREHLG

SEQ ID NO: 54882 - protein, 94 aa, Homo sapiens
  MOD_RES (1)..(1): Any amino acid
XRFDMPDFEDDGGPYGESEAEECGILDGCTNGRCVRVPEGFTCRCFDGYRLDMTRMACVDINECDEAEAASPLCVNARCLNTDGSFRCICRPGF

SEQ ID NO: 54883 - protein, 232 aa, Homo sapiens
MENPQDIFSSNGGCLSDIVIEKYLVESKESVSHVQLACSMQDCAFPLDGTELCIWNTKDPSHQLLILRGHHQPITAMAFGNKVNPLLICSASLDYVIMWNLDECREKVLQGVSATLKGIQPAAIHVESLSVLVDDSRLVGPRTDTLTCMKWAQARFLTGWLGTQTLSLEWPSTHQRPRDMDEAGNHHSQQTNTGTENQTPHVLTYEDSSVPENELGSALTSGASFESVGRYK

SEQ ID NO: 54884 - protein, 615 aa, Homo sapiens
  MOD_RES (1)..(1): Any amino acid
XRQCLMVSRNLGSVGYDPNEKTFDKILVANRGEIACRVIRTCKKMGIKTVAIHSDVDASSVHVKMADEAVCVGPAPTSKSYLNMDAIMEAIKKTRAQAVHPGYGFLSENKEFARCLAAEDVVFIGPDTHAIQAMGDKIESKLLAKKAEVNTIPGFDGVVKDAEEAVRIAREIGYPVMIKASAGGGGKGMRIAWDDEETRDGFRLSSQEAASSFGDDRLLIEKFIDNPRHIEIQVLGDKHGNALWLNERECSIQRRNQKVVEEAPSIFLDAETRRAMGEQAVALARAVKYSSAGTVEFLVDSKKNFYFLEMNTRLQVRVDSGIQPGSDISIYYDPMISKLITYGSDRTEALKRMADALDNYVIRGVTHNIALLREVIINSRFVKGDISTKFLSDVYPDGFKGHMLTKSEKNQLLAIASSLFVAFQLRAQHFQENSRMPVIKPDIANWELSVKLHDKVHTVVASNNGSVFSVEVDGSKLNVTSTWNLASPLLSVSVDGTQRTVQCLSREAGGNMSIQFLGTVYKVNILTRLAAELNKFMLEKVTEDTSSVLRSPMPGVVVAVSVKPGDAVAEGQEICVIEAMKMQNSMTAGKTGTVKSVHCQAGDTVGEGDLLVELE

SEQ ID NO: 54885 - protein, 41 aa, Homo sapiens
MTKEKEFFDVWSVLMGESQPYSGPRTPDGREIVFYKVIDYV

SEQ ID NO: 54886 - protein, 269 aa, Homo sapiens
  MOD_RES (1)..(1): Any amino acid
XNWGPPGGEMTFSIPTHKCGLVIGRGGENVKAINQQTGAFVEISRQLPPNGDPNFKLFIIRGSPQQIDHAKQLIEEKIEGPLCPVGPGPGGPGPAGPMGPFNPGPFNQGPPGAPPHAGGPPPHQYPPQGWGNTYPQWQPPAPHDPSKAAAAAADPNAAWAAYYSHYYQQPPGPVPGPAPAPAAPPAQGQQPQQPGAPPQQDYTKAWEEYYKKQAQVATGGGPGAPPGSQPDYSAAWAEYYRQQAAYYGQTPGPGGPQPPPTQQGQQQAQ

SEQ ID NO: 54887 - protein, 35 aa, Homo sapiens
NTKMADGPDEYDTEAGCVPLLHPEFEMELRSCCPG

SEQ ID NO: 54888 - protein, 72 aa, Homo sapiens
MTAQGGLVANRGRRFKWAIELSGPGGGSRETRSTQSVTWTSKCLIPACKRQTGSWWRSAAGTSPWVPSNRFP

SEQ ID NO: 54889 - protein, 221 aa, Homo sapiens
  MOD_RES (1)..(1): Any amino acid
XAGTPRPRLSLGISQATGSAARWRTRRTGKGLGYNSDEIRPRTLLIEHLMEGGRRDHHTMTVLWGTQEIIVAEFHKKIKEAFEVFDHESNNTVDVREIGTIIRSLGCCPTEGELHDLIAEVEEEEPTGYIRFEKFLPVMTEILLERKYRPIPEDVLLRAFEVLDSAKRGFLTKDELIKYMTEEGEPFSQEEMEEMLSAAIDPESNSINYKDYITMMVIDEN

SEQ ID NO: 54890 - protein, 85 aa, Homo sapiens
MDAGKLARHPTDTGSERAVPALAEIRPWWAPPLRPQGEDNCETPVPGPGGMRVNNLKHLCLPGAHLLGSYFCYDNPAALQTQVKR

SEQ ID NO: 54891 - protein, 56 aa, Homo sapiens
MAAVPTQPQSKEGPWSPESESPMLRITAPLPPGPSMAVPTLGPGEIASTTPPSRAW

SEQ ID NO: 54892 - protein, 191 aa, Homo sapiens
SLTFPPGSSMRGLLVLSVLLGAVFGKEDFVGHQVLRISVADEAQVQKITQDYGQDAAFTAILDTLDIFLEIVTNPDGFAFTHSTNRMWRKTRSHTAGSLCIGVDPNRNWDAGFGLSGASSNPCSETYHGKFANSEVEVKSIVDFVKDHGNIKAFISIHSYSQLLMYPYGYKTEPVPDQDELDQLSKAAVTA

SEQ ID NO: 54893 - protein, 36 aa, Homo sapiens
MIQAILVFNNHGKPRLVRFYQRFKKFNSRLFERLSI

SEQ ID NO: 54894 - protein, 123 aa, Homo sapiens
CHGGFGYLLSRSLLLRLRPHLDGCRGDILSARPDEWLGRCLIDSLGVGCVSQHQGQQYRSFELAKNRDPEKEGSSAFLSAFAVHPVSEGTLMYRLHKRFSALELERAYSEIEQLQNCPKKAQG

SEQ ID NO: 54895 - protein, 188 aa, Homo sapiens
MSSPLQRAVGDTKRALSASSSSSASLPFDDRDSNHTSEGNGDSLLADEDTDFEDSLNRNVKKRAAKRPPKTTPVAKHPKKGSRVVHRHSRKQSEPPANDLFNAVKAAKSDMQDSGDYPLIAPGPSWKKFQGSFCEFVRTLVCQCQYSLLYDGFPMDDLISLLTGLSDSQVRAFRHTSTLAAMKLMTSL

SEQ ID NO: 54896 - protein, 244 aa, Homo sapiens
MAERQEEQRGSPPLRAEGKADAEVKLILYHWTHSFSSQKVRLVIAEKALKCEEHDVSLPLSEHNEPWFMRLNSTGEVPVLIHGENIICEATQIIDYLEQTFLDERTPRLMPDKESMYYPRVQHYRELLDSLPMDAYTHGCILHPELTVDSMIPAYATTRIRSQIGNTESELKKLAEENPDLQEAYIAKQKRLKSKLLDHDNVKYLKKILDELEKVLDQVETELQRRNEETPECLPLILYVPFSN

SEQ ID NO: 54897 - protein, 167 aa, Homo sapiens
  MOD_RES (1)..(1): Any amino acid
XNCWGCILVPALRKLNELSSPSPKSREQSRRSYDDQLRSGSPPKSPRTTVHDKSAHQTHSSWTPPNAQYWSQFHSVRPQGPQLRQQQHKQNKQVLGYCLLLMLAGMGLHYIAFRKVKQMHLNFMDEKDRIITAFYNEARARARANRGILQQERQRLGQRQPPPSEPT

SEQ ID NO: 54898 - protein, 158 aa, Homo sapiens
MVLLWEPAGAWLALGLALALGPSVAAAAPRQDCTGVECPPLENCIEEALEPGACCATCVQQGCACEGYQYYDCLQGGFVRGRVPAGQSYFVDFGSTECSCPPGGGKISCQFMLCPELPPNCIEAVVVADSCPQCGQVGCVHAGHKYAAGHTVHLPPCR

SEQ ID NO: 54899 - protein, 44 aa, Homo sapiens
MANIAVQRIKREFKEVLKSEEGSCNDSPHGIIVIASTIGSCRAR

SEQ ID NO: 54900 - protein, 1762 aa, Homo sapiens
MDVFSFVKIAKLSSHRTKSSGWPPPSGTWGLSQVPPYGWEMTANRDGRDYFINHMTQAIPFDDPRLESCQIIPPAPRKVEMRRDPVLGFGFVAGSEKPVVVRSVTPGGPSEGKLIPGDQIVMINDEPVSAAPRERVIDLVRSCKESILLTVIQPYPSPKSAFISAAKKARLKSNPVKVRFSEEVIINGQVSETVKDNSLLFMPNVLKVYLENGQTKSFRFDCSTSIKDVILTLQEKLSIKGIEHFSLMLEQRTEGAGTKLLLLHEQETLTQVTQRPSSHKMRCLFRISFVPKDPIDLLRRDPVAFEYLYVQSCNDVVQERFGPELKYDIALRLAALQMYIATVTTKQTQKISLKYIEKEWGLETFLPSAVLQSMKEKNIKKALSHLVKANQNLVPPGKKLSALQAKVHYLKFLSDLRLYGGRVFKATLVQAEKRSEVTLLVGPRYGISHVINTKTNLVALLADFSHVNRIEMFSEEESLVRVELHVLDVKPITLLMESSDAMNLACLTAGYYRLLVDSRRSIFNMANKKNTATQETGPENKGKHNLLGPDWNCIPQMTTFIGEGEQEAQITYIDSKQKTVEITDSTMCPKEHRHLYIDNAYSSDGLNQQLSQPGEAPCEADYRSLAQRSLLTLSGPETLKKAQESPRGAKVSFIFGDFALDDGISPPTLGYETLLDEGPEMLEKQRNLYIGSANDMKGLDLTPEAEGIQFVENSVYANIGDVKSFQAAEGIEEPLLHDICYAENTDDAEDEDEVSCEEDLVVGEMNQPAILNLSGSSDDIIDLTSLPPPEGDDNEDDFLLRSLNMAIAAPPPGFRDSSDEEDSQSQAASFPEDKEKGSSLQNDEIPVSLIDAVPTSAEGKCEKGLDNAVVSTLGALEALSVSEEQQTSDNSGVAILRAYSPESSSDSGNETNSSEMTESSELATAQKQSENLSRMFLATHEGYHPLAEEQTEFPASKTPAGGLPPKSSHALAARPATDLPPKVVPSKQLLHSDHMEMEPETMETKSVTDYFSKLHMGSVAYSCTSKRKSKLADGEGKAPPNGNTTGKKQQGTKTAEMEEEASGKFGTVSSRDSQHLSTFNLERTAFRKDSQRWYVATEGGMAEKSGLEAATGKTFPRASGLGAREAEGKEEGAPDGETSDGSGLGQGDRFLTDVTCASSAKDLDNPEDADSSTCDHPSKLPEADESVARLCDYHLAKRMSSLQSEGHFSLQSSQGSSVDAGCGTGSSGSACATPVESPLCPSLGKHLIPDASGKGVNYIPSEERAPGLPNHGATFKELHPQTEGMCPRMTVPALHTAINTEPLFGTLRDGCHRLPKIKETTALTEPGKERRGGMPSAWSQHPEADPILLPSNIHSESKVPIPNQDPNDFSQANQAYGEAVSWRPPDLRGGSLRTPPSQKALRHSSSILSGSVDLETFRERTKGAVSLKCPGITEAQEASSERRAELPLGRKLTKSFSQSSMHLSSEGRFHKRSPVAHKDSKLYRTLPLRKLEGSNWRCRGPFSYCFLNRGQDEDGEEEEERGEATVQVSCLYRPQMTQAMPEPSSPCLAVAIQKQRGELSRGSVLKVWAEDLRDPDDLDFSNLAFDARIARINALKESTYAMPDGFLAAQNDANELLCLVRATKEKREESRPEAYDLTLSQYKQLLSIESRQLGSACRKMAMAEKSPEEMLLAMTSSFQVLCCLTEACMRLVKVVNSETQRQEIVGKIDEVVINYICLLKAAEAATGKNPGDPNVGLSARHSTTMAALVSTLTRSLKRLLNK

SEQ ID NO: 54901 - protein, 921 aa, Homo sapiens
MQAVELLLSTLEKGVWHLGWTREFVEALRRTGSPLAARYMNPELTDLPSPSFENAHDEYLQLLNLLQPTLVDKLLVRDVLDKCMEEELLTIEDRNRIAAAENNGNESGVRELLKRIVQKENWFSAFLNVLRQTGNNELVQELTGSDCSESNAESDTSLAEGSVSCLDESLGHNSNMGSDSGTMGSDSDEENVAARASPEPELQLRPYQMEVAQPALEGKNIIICLPTGSGKTRVAVYIAKDHLDKKKKASEPGKVIVLVNKVLLVEQLFRKEFQPFLKKWYRVIGLSGDTQLKISFPEVVKSCDIIISTAQILENSLLNLENGEDAGVQLSDFSLIIIDECHHTNKEAVYNNIMRHYLMQKLKNNRLKKENKPVIPLPQILGLTASPGVGGATKQAKAEEHILKLCANLDAFTIKTVKENLDQLKNQIQEPCKKFAIADATREDPFKEKLLEIMTRIQTYCQMSPMSDFGTQPYEQWAIQMEKKAAKEGNRKERVCAEHLRKYNEALQINDTIRMIDAYTHLETFYNEEKDKKFAVIEDDSDEGGDDEYCDGDEDEDDLKKPLKLDETDRFLMTLFFENNKMLKRLAENPEYENEKLTKLRNTIMEQYTRTEESARGIIFTKTRQSAYALSQWITENEKFAEVGVKAHHLIGAGHSSEFKPMTQNEQKEVISKFRTGKINLLIATTVAEEGLDIKECNIVIRYGLVTNEIAMVQARGRARADESTYVLVAHSGSGVIEHETVNDFREKMMYKAIHCVQNMKPEEYAHKILELQMQSIMEKKMKTKRNIAKHYKNNPSLITFLCKNCSVLACSGEDIHVIEKMHHVNMTPEFKELYIVRENKALQKKCADYQINGEIICKCGQAWGTMMVHKGLDLPCLKIRNFVVVFKNNSTKKQYKKWVELPITFPNLDYSECCLFSDED

SEQ ID NO: 54902 - protein, 250 aa, Homo sapiens
MAADGVDERSPLLSASHSGNVTPTAPPYLQESSPRVTNIFSAELPPPYTAIASPDASGIPVINCRVCQSLINLDGKLHQHVVKCTVCNEATPIKNPPTGKKYVRCPCNCLLICKDTSRRIGCPRPNCRRIINLGPVMLISEEQPAQPALPIQPEGTRVVCGHCGNTFLWMELRFNTLAKCPHCKKISSVGSALPRRRCCAYITIGMICIFIGVGLTVGTPDFARRFRATYVSWAIAYLLGLICLIRACYW

SEQ ID NO: 54903 - protein, 34 aa, Homo sapiens
  MOD_RES (1)..(1): Any amino acid
XMKKPVEEGTLPYPIFAAIDNDLQPSWQEARAPG

SEQ ID NO: 54904 - protein, 125 aa, Homo sapiens
MPELVVTALLAPSRLSLKLLRAFMWSLVFSVALVAAAVYGCIALTHVLCRPRRGCCGRRRSASPACLSDPSLGEHGFLNLKSSGLRLHYVSAGRGNGPLMLFLHGFPENWFSWRYQLREFQSRFH

SEQ ID NO: 54905 - protein, 1038 aa, Homo sapiens
MANDSPAKSLVDIDLSSLRDPAGIFELVEVVGNGTYGQVYKGRHVKTGQLAAIKVMDVTEDEEEEIKLEINMLKKYSHHRNIATYYGAFIKKSPPGHDDQLWLVMEFCGAGSITDLVKNTKGNTLKEDWIAYISREILRGLAHLHIHHVIHRDIKGQNVLLTENAEVKLDETEYEYSGSEEEEEEVPEQEGEPSSIVNVPGESTLRRDFLRLQQENKERSEALRRQQLLQEQQLREQEEYKRQLLAERQKRIEQQKEQRRRLEEQQRREREARRQQEREQRRREQEEKRRLEELERRRKEEEERRRAEEEKRRVEREQEYIRRQLEEEQRHLEVLQQQLLQEQAMLLECRWREMEEHRQAERLQRQLQQEQAYLLSLQHDHRRPHPQHSQQPPPPQQERSKPSFHAPEPKAHYEPADRAREVPVRTTSRSPVLSRRDSPLQGSGQQNSQAGQRNSTSIEPRLLWERVEKLVPRPGSGSSSGSSNSGSQPGSHPGSQSGSGERFRVRSSSKSEGSPSQRLENAVKKPEDKKEVFRPLKPADLTALAKELRAVEDVRPPHKVTDYSSSSEESGTTDEEDDDVEQEGADESTSGPEDTRAASSLNLSNGETESVKTMIVHDDVESEPAMTPSKEGTLIVRQTQSASSTLQKHKSSSSFTPFIDPRLLQISPSSGTTVTSVVGFSCDGMRPEAIRQDPTRKGSVVNVNPTNTRPQSDTPEIRKYKKRFNSEILCAALWGVNLLVGTESGLMLLDRSGQGKVYPLINRRRFQQMDVLEGLNVLVTISGKKDKLRVYYLSWLRNKILHNDPEVEKKQGWTTVGDLEGCVHYKVVKYERIKFLVIALKSSVEVYAWAPKPYHKFMAFKSFGELVHKPLLVDLTVEEGQRLKVIYGSCAGFHAVDVDSGSVYDIYLPTHIQCSIKPHAIIILPNTDGMELLVCYEDEGVYVNTYGRITKDVVLQWGEMPTSVAYIRSNQTMGWGEKAIEIRSVETGHLDGVFMHKRAQRLKFLCERNDKVFFASVRSGGSSQVYFMTLGRTSLLSW

SEQ ID NO: 54906 - protein, 53 aa, Homo sapiens
MATLVELPDSVLLEIFSYLPVRDRIRISRVCHRWKRLVDDRWLWRHVDLTLYT

SEQ ID NO: 54907 - protein, 97 aa, Homo sapiens
MAVCGLGSRLGLGSRLGLRGCFGAARLLYPRFQSRGPQGVEDGDRPQPSSKTPRIPKIYTKTGDKETGICHVGQASLELLASSDLPTMASQSPGITV

SEQ ID NO: 54908 - protein, 725 aa, Homo sapiens
MATAATTTTTTTATVALTTSWDNATGRPTAEPDPILDNYVLLVVVMSLFVGGTLVVLSGVLLLCKRCWDVHQRLNRAMEEAEKTTTTYLDNGTHPAQDPDFRGEDPECQDAETERFLSTSSTGRRVSFNEAALFEQSRKTQDKGRQGGWQSTAAGASGMGGGRALMARCCRRYTLTEGDFHHLKNARLTHLHLPPLKIVTIHECDSGEASSATTPHPATSPKATLAIFQPPGKALTGRSVGPSSALPGDPYNSAAGATDFAEISPSASSDSGEGTSLDAGTRSTKAGGPGAAAGPGEAGPGSGAGTVLQFLTRLRRHASLDGASPYFKVKKWKLEPSQRAASLDTRGSPKRHHFQRQRAASESTEQEEGDAPQEDFIQYIARAGDAVAFPHPRPFLASPPPALGRLEAAEAAGGASPDSPPERGAGSAGPEQQQPPLEPDAERDAGPEQAQTSYRDLWSLRASLELHAAASDHSSSGNDRDSVRSGDSSGSGSGGAAPAFPPPSPPAPRPKDGEARRLLQMDSGYASIEGRGAGDDTEPPAAPARPRSPRAWPRRPRRDYSIDEKTDALFHEFLRHDPHFDDTPAAARHRARAHPHARKQWQRGRQHSDPGARAAPALAGTPAPPAGAARPARAPLRRGDSVDGPPDGRTLGGAGDDPAIPVIEEEPGGGGCPGSGLCVLPSGSVLDKLAAGLDERLFPPRLAEPVVATPALVAAAPTSPDHSPA

SEQ ID NO: 54909 - protein, 36 aa, Homo sapiens
MAVLAGSLLGPTSRLAGMSISRATSNARTSTAGSGA

SEQ ID NO: 54910 - protein, 150 aa, Homo sapiens
IPGSPEPEHGSVQESQVSEQPATEAGENPLEFLRDQPQFQNMRQVIQQNPALLPALLQQLGQENPQLLQQISRHQEQFIQMLNEPPGELADISDVEGEVGAIGEEAPQMNYIQLKALGFPESLVIQAYFACEKNENLAANFLLSQNFDDE

SEQ ID NO: 54911 - protein, 122 aa, Homo sapiens
MPKTEETVLQNDPSVAENGAPEPKTPGQSQKSKSFCLDDQSPDLIETVNEVSKLSISHEIVVNQDFYVEETILPPNSVEGRFAEAMYNAFWNHLKEQLLSTPPDFTCALELLKDVKENPGDE

SEQ ID NO: 54912 - protein, 263 aa, Homo sapiens
MSYPQGYLYQPSASLALYSCPAYSTSVISGPRTDELGRSSSGSAFSPYAGSTAFTAPSPGYNSHLQYGADPAAAAAAAFSSYVLLKKEKKSLDFPCFPPLRPTCVRSPAERGVASVAQASICMEGRAAVARSAHGGSPCPPCPGPIAGQALGGSRASPAPAPSRSPSAQCPFPGGTVLSRPLYYTAPFYPGYTNYGSFGHLHGHPGPGPGPTTGPGSHFNGLNQTVLNRADALAKDPKMLRSQSQLDLCKDSPYELKKGMSDI

SEQ ID NO: 54913 - protein, 87 aa, Homo sapiens
  MOD_RES (1)..(1): Any amino acid
XSHLETLQLLRTAQLPEQISLPPLSALSRYTLVSPAGCPMNPELLGKGWAETSGCALAPKVALWVPGKCLVIGSPWQGLRVVGKPRI

SEQ ID NO: 54914 - protein, 73 aa, Homo sapiens
ISMVSVIHIPDRTYKLSCRILYQYLLLAQGQFHDLKKKKTQTEVCWKRWDSLKVKLSHRKRTARTVLFARMGL

SEQ ID NO: 54915 - protein, 194 aa, Homo sapiens
MPFITYLSGLLTAQMLSDDQLISGVEIRCEEKGRCPSTCHLCRRPGKEQLSPTPVLLEINRVVPLYTLIQDNGTKEAFKSALMSSYWCSGKGDVIDDWCRCDLSAFDANGLPNCSPLLQPVLRLSPTVEPSSTVVSLEWVDVQPAIGTKVSDYILQHKKVDEYTDTDLYTVYCWITFIDLRILNQPCIPGMKPT

SEQ ID NO: 54916 - protein, 218 aa, Homo sapiens
MISQFFILSSKGDPLIYKDFRGDSGGRDVAELFYRKLTGLPGDESPVVMHHHGRHFIHIRHSGLYLVVTTSENVSPFSLLELLSRLATLLGDYCGSLGEGTISRNVALVYELLDEVLDYGYVQTTSTEMLRNFIQTEAVVSKPFSLFDLSSVGLFGAETQQSKVAPSSAASRPVLSSRSDQSQKNEVFLDVVERLSVLIASNVMGQESGSMKSRFTAL

SEQ ID NO: 54917 - protein, 37 aa, Homo sapiens
  MOD_RES (1)..(1): Any amino acid
XYADARLEVGSTQLRTAGSCSHSFKRSFLGQKDPALV

SEQ ID NO: 54918 - protein, 166 aa, Homo sapiens
MKIWSSEHVFGQNLALSPRLECSGTILAHHNLCLSGSSNSCASASRVAGTTGVCHHACHPWDTVIQAAMRKYPNPMNPSVLGVDVLQRRVDGRGRLHSLRLLSTEWGLPSLVRAILGTSRTLTYIREHSVVDPVEKKMELCSTNITLTNLVSVNERLVYTPHPENP

SEQ ID NO: 54919 - protein, 409 aa, Homo sapiens
EKLKLTYEEKCEIEESQLKFLRNDLAEYQRTCEDLKEQLKHKEFLLAANTCNRVGGLCLKCAQHEAVLSQTHTNVHMQTIERLVKERDDLMSALVSVRSSLADTQQREASAYEQVKQVLQISEEANFEKTKALIQCDQLRKELERQAERLEKELASQQEKRAIEKDMMKKEITKEREYMGSKMLILSQNIAQLEAQVEKVTKEKISAINQLEEIQSQLASREMDVTKVCGEMRYQLNKTNMEKDEAEKEHREFRAKTNRDLEIKDQEIEKLRIELDESKQHLEQEQQKAALAREECLRLTELLGESEHQLHLTRSEIAQLSQEKRYTYDKLGKLQRRNEELEEQCVQHGRVHETMKQRLRQLDKHSQATAQQLVQLLSKQNQLLLERQSLSEEVDRLRTQLPSMPQSDC

SEQ ID NO: 54920 - protein, 1414 aa, Homo sapiens
MVSKRRLSKSEDKESLTEDASKTRKQPLSKKTKKSHIANEVEENDSIFVKLLKISGIILKTGESQNQLAVDQIAFQKKLFQTLRRHPSYPKIIEEFVSGLESYIEDEDSFRNCLLSCERLQDEEASMGASYSKSLIKLLLGIDILQPAIIKTLFEKLPEYFFENKNSDEINIPRLIVSQLKWLDRVVDGKDLTTKIMQLISIAPENLQHDIITSLPEILGDSQHADVGKELSDLLIENTSLTVPILDVLSSLRLDPNFLLKVRQLVMDKLSSIRLEDLPVIIKFILHSVTAMDTLEVISELREKLDLQHCVLPSRLQASQVKLKSKGRASSSGNQESSGQSCIILLFDVIKSAIRYEKTISEAWIKAIENTASVSEHKVFDLVMLFIIYSTNTQTKKYIDRVLRNKIRSGCIQEQLLQSTFSVHYLVLKDMCSSILSLAQSLLHSLDQSIISFGSLLYKYAFKFFDTYCQQEVVGALVTHICSGNEAEVDTALDVLLELVVLNPSAMMMNAVFVKDDMHLVIRKQLSSTVFKYKLIGIIGAVTMAGIMAADRSESPSLTQERANLSDEQCTQVTSLLQLVHSCSEQSPQASALYYDEFANLIQHEKLDPKALEWVGHTICNDFQDAFVVDSCVVPEGDFPFPVKALYGLEEYDTQDGIAINLLPLLFSQDFAKDGGPVTSQESGQKLVSPLCLAPYFRLLRLCVERQHNGNLEEIDGLLDCPIFLTDLEPGEKLESMSAKERSFMCSLIFLTLNWFREIVNAFCQETSPEMKGKVLTRLKHIVELQIILEKYLAVTPDYVPPLGNFDVETLDITPHTVTAISAKIRKKGKIERKQKTDGSKTSSSDTLSEEKNSECDPTPSHRGQLNKEFTGKEEKTSLLLHNSHAFFRELDIEVFSILHCGLVTKFILDTEMHTEATEVVQLGPPELLFLLEDLSQKLESMLTPPIARRVPFLKNKGSRNIGFSHLQQRSAQEIVHCVFQLLTPMCNHLENIHNYFQCLAAENHGVVDGPGVKVQEYHIMSSCYQRLLQIFHGLFAWSGFSQPENQNLLYSALHVLSSRLKQGEHSQPLEELLSQSVHYLQNFHQSIPSFQCALYLIRLLMVILEKSTASAQNKEKIASLARQFLCRVWPSGDKEKSNISNDQLHALLCIYLEHTESILKAIEEIAGVGVPELINSPKDASSSTFPTLTRHTFVVFFRVMMAELEKTVKKIEPGTAADSQQIHEEKLLYWNMAVRDFSILINLIKVFDSHPVLHVCLKYGRLFVEAFLKQCMPLLDFSFRKHREDVLSLLETFQLDTRLLHHLCGHSKIHQDTRLTQHVPLLKKTLELLVCRVKAMLTLNNCREAFWLGNLKNRDLQGEEIKSQNSQESTADESEDDMSSQASKSKATEDGEEDEVSAGEKEQDSDESYDDSD

SEQ ID NO: 54921 - protein, 115 aa, Homo sapiens
MNDLPDTQVFICTSPLLKYHHCVGEKYRWVEQHLGPQFVERIILTRDKTVVLGDLLIDDKDTVRGQEETPSWEHILFTCCHNRHLVLPPTRRRLLSWSDNWREILDSKRGAAQRE

SEQ ID NO: 54922 - protein, 149 aa, Homo sapiens
MAAATADPGAGNPQPGDSSGGGAGGGLPSPGEQELSRRLQRLYPAVNQQETPLPRSWSPKDKYNYIGLSQGNLRVHYKGHGKNHKDAASVRATHPIPAACGIYYFEVKIVSKGRDGYMGIGLSAQGVNMNRLPDPTSRNLSSLLQVQQR

SEQ ID NO: 54923 - protein, 90 aa, Homo sapiens
MRTVAEKVDAVRIVHIHSVIILRRSDKRKDRVEISPEQLSAASTEAERLAELTGRPMRVVGWYHSHPHITVWPSHVGKYHGVAMFIVFRN

SEQ ID NO: 54924 - protein, 1424 aa, Homo sapiens
SLCSLVPGFQIKAFTALRFLSEPSDAVTMRGGNVLLDCSAESDRGVPVIKWKKDGIHLALGMDERKQQLSNGSLLIQNILHSRHHKPDEGLYQCEASLGDSGSIISRTAKVAVAGPLRFLSQTESVTAFMGDTVLLKCEVIGEPMPTIHWQKNQQDLTPIPGDSRVVVLPSGALQISRLQPGDIGIYRCSARNPASSRTGNEAEVRILSDPGLHRQLYFLQRPSNVVAIEGKDAVLECCVSGYPPPSFTWLRGEEVIQLRSKKYSLLGGSNLLISNVTDDDSGMYTCVVTYKNENISASAELTVLVPPWFLNHPSNLYAYESMDIEFECTVSGKPVPTVNWMKNGDVVIPSDYFQIVGGSNLRILGVVKSDEGFYQCVAENEAGNAQTSAQLIVPKPAIPSSSVLPSAPRDVVPVLVSSRFVRLSWRPPAEAKGNIQTFTVFFSREGDNRERALNTTQPGSLQLTVGNLKPEAMYTFRVVAYNEWGPGESSQPIKVATQPELQVPGPVENLQAVSTSPTSILITWEPPAYANGPVQGYRLFCTEVSTGKEQNIEVDGLSYKLEGLKKFTEYSLRFLAYNRYGPGVSTDDITVVTLSDVPSAPPQNVSLEVVNSRSIKVSWLPPPSGTQNGFITGYKIRHRKTTRRGEMETLEPNNLWYLFTGLEKGSQYSFQVSAMTVNGTGPPSNWYTAETPENDLDESQVPDQPSSLHVRPQTNCIIMSWTPPLNPNIVVRGYIIGYGVGSPYAETVRVDSKQRYYSIERLESSSHYVISLKAFNNAGEGVPLYESATTRSITDPTDPVDYYPLLDDFPTSVPDLSTPMLPPVGVQAVALTHDAVRVSWADNSVPKNQKTSEVRLYTVRWRTSFSASAKYKSEDTTSLSYTATGLKPNTMYEFSVMVTKNRRSSTWSMTAHATTYEAAPTSAPKDLTVITREGKPRAVIVSWQPPLEANGKITAYILFYTLDKNIPIDDWIMETISGDRLTHQIMDLNLDTMYYFRIQARNSKGVGPLSDPILFRTLKVEHPDKMANDQGRHGDGGYWPVDTNLIDRSTLNEPPIGQMHPPHGSVTPQKNSNLLVIIVVTVGVITVLVVVIVAVICTRRSSAQQRKKRATHSAGKRKGSQKDLRPPDLWIHHEEMEMKNIEKPSGTDPAGRDSPIQSCQDLTPVSHSQSETQLGSKSTSHSGQDTEEAGSSMSTLERSLAARRAPRAKLMIPMDAQSNNPAVVSAIPVPTLESAQYPGILPSPTCGYPHPQFTLRPVPFPTLSVDRGFGAGRSQSVSEGPTTQQPPMLPPSQPEHSSSEEAPSRTIPTACVRPTHPLRSFANPLLPPPMSAIEPKVPYTPLLSQPGPTLPKTHVKTASLGLAGKARSPLLPVSVPTAPEVSEESHKPTEDSANVYEQDDLSEQMASLEGLMKQLNAITGSAF

SEQ ID NO: 54925 - protein, 78 aa, Homo sapiens
MAEKFDCHYCRDPLQGKKYVQKDGHHCCLKCFDKFCANTCVECRKPIGADSKEVHYKNRFWHDTCFRCAKCLHPLANE

SEQ ID NO: 54926 - protein, 188 aa, Homo sapiens
MEDDQNWYKAELRGVEGFIPKNYIRVKPHPWYSGRISRQLAEEILMKRNHLGAFLIRESESSPGEFSVSVNYGDQVQHFKVLREASGKYFLWEEKFNSLNELVDFYRTTTIAKKRQIFLRDEEPLLKSPGACFAQAQFDFSAQDPSQLSFRRGDIIEVLERPDPHWWRGRSCGRVGFFPRSYVQPVHL

SEQ ID NO: 54927 - protein, 229 aa, Homo sapiens
MFADLDYDIEEDKLGIPTVPGKVTLQKDAQNLIGISIGGGAQYCPCLYIVQVFDNTPAALDGTVAAGDEITGVNGRSIKGKTKVEVAKMIQEVKGEVTIHYNKLQADPKQGMSLDIVLKKVKHRLVENMSSGTADALGLSRAILCNDGLVKRLEELERTAELYKGMTEHTKNLLRAFYELSQTHRAFGDVFSVIGVREPQPAASEAFVKFADAHRSIEKFGIRLLKTIK

SEQ ID NO: 54928 - protein, 12 aa, Homo sapiens
MAAVAVAVREGE

SEQ ID NO: 54929 - protein, 254 aa, Homo sapiens
MEPNSLQWVGSPCGLHGPYIFYKAFQFHLEGKPRILSLGDFFFVRCTPKDPICIAELQLLWEERTSRQLLSSSKLYFLPEDTPQGRNSDHGEDEVIAVSEKVIVKLEDLVKWVHSDFSKWRCGFHAGPVKTEALGRNGQKEALLKYRQSTLNSGLNFKDVLKEKADLGEDEEETNVIVLSYPQYCRYRSMLKRIQDKPSSILTDQFALALGGIAVVSRNPQILYCRDTFDHPTLIENESICDEFGGRLTSHCSY

SEQ ID NO: 54930 - protein, 140 aa, Homo sapiens
MIPDSQKLLRCELESLKSQLQAQTKAFEFLNHSVTMLEKESCLQQIKIQQLEEVLSPTGRQGEKEEHKWGMEQGRQELYGALTQGLQGLEKTLRDSEEMQRARTTRCLQLLAQEIRDSKKFLWEELELVREEVTFIYQKL

SEQ ID NO: 54931 - protein, 172 aa, Homo sapiens
  MOD_RES (1)..(1): Any amino acid
XAEAEERERDSRKWLRGDHLSFAQLCIQSVVECVTSALCIPLASQKRSSTGRPDWTCIVVGFTSGYVRFYTENGVLLLAQLLNEDPVLQLKCRTYEIPRHPGVTEQNEELSILYPAAIVTIDGFSLFQSLRACRNQVAKAAASGNENIQPPPLAYKKWGLQDIDTIIDHASV

SEQ ID NO: 54932 - protein, 165 aa, Homo sapiens
MFKIGRGALDLFSELLSFGGIVLAACQALENSTSPLSDPPVAAAVVSHFNDCPDSHTQFCFHGTCRFLVQEDKPACVCHSGYVGARCEHADLLAVVAASQKKQAITALVVVSIVALAVLIITCVLIHCCQVRKHCEWCRALICRHEKPSALLKGRTACCHSETVV

SEQ ID NO: 54933 - protein, 276 aa, Homo sapiens
  MOD_RES (1)..(1): Any amino acid
XAAPSWRGARLVQSVLRVWQVGPHVARERVIPFSSLLGFQRRCVSCVAGSAFSGPRLASASRSNGQGSALDHFLGFSQPDSSVTPCVPAVSMNRDEQDVLLVHHPDMPENSRVLRVVLLGAPNAGKSTLSNQLLGRKVFPVSRKVHTTRCQALGVITEKETQVILLDTPGIISPGKQKRHHLELSLLEDPWKSMESADLVVVLVDVSDKWTRNQLSPQLLRCLTKYSQIPSVLVMNKVDCLKQKSVLLELTAALTEAIPSDTGPARALGVPQCSPH

SEQ ID NO: 54934 - protein, 77 aa, Homo sapiens
MSLWLGAPVPDIPPDSAVELWKPGAQDASSQAQGGSSCILREEARMPHSAGGTAGVGLEAAEPTALLTRAEPPSEPT

SEQ ID NO: 54935 - protein, 84 aa, Homo sapiens
MAEPDYIEDDNPELIRPQKLINPVKTSRNHQDLHRELLMNQKRGLAPQNKPELQKVMEKRKRDQVIKQKEEEAQKKKSDLEIEL

SEQ ID NO: 54936 - protein, 338 aa, Homo sapiens
MAPFCFPARSLQEFATVLRNLEDERIRMIENASEVLITPLEKFRKEQIGAAKEAKKKYDKETEKYCGILEKHLNLSSKKKESQLQEADSQVDLVRQHFYEVSLEYVFKVQEVQERKMFEFVEPLLAFLQGLFTFYHHGYELAKDFGDFKTQLTISIQNTRNRFEGTRSEVESLMKKMKENPLEHKTISPYTMEGYLYVQEKRHFGTSWVKHYCTYQRDSKQITMVPFDQKSGGKGGEDESVILKSCTRRKTDSIEKRFCFDVEAVDRGNLDPEMDMYTRRYRVNMKAEVEVMHLQANEHQRLAAEHQKLEERHGADSSSQTSGGTLDLELLASRPVKQ

SEQ ID NO: 54937 - protein, 207 aa, Homo sapiens
  MOD_RES (1)..(1): Any amino acid
XLDLSANELRDIDALSQKCCISVHLEHLEKLELHQNALTSFPQQLCETLKSLTHLDLHSNKFTSFPSYLLKMSCIANLDVSRNDIGPSVVLDPTVKCPTLKQFNLSYNQLSFVPENLTDVVEKLEQLILEGNKISGICSPLRLKELKILNLSKNHISSLSENFLEACPKVESFSARMNFLVSGCSVVPQGNLIQTVESGKHFCACDI

SEQ ID NO: 54938 - protein, 986 aa, Homo sapiens
QLQGSLKRKQVVNLSPANSKRPNGFVDNSFLDIKRIRVGENLSAGQGGLQINNGQSQIMSGTLPMSQAPLRKTNTLPSHTHSPGNGLFNMGLKEVKKEPGETLSCSKHMDGQMTQENIFPNRYGDDPGEQLMDPELQELFNELTNISVPPMSDLELENMINATIKQDDPFNIDLGQQSQRSTPRPSLPMEKIVIKSEYSPGLTQGPSGSPQLRPPSAGPAFSMANSALSTSSPIPSVPQSQAQPQTGSGASRALPSWQEVSHAQQLKQIAANRQQHARMQQHQQQHQPTNWSALPSSAGPSPGPFGQEKIPSPSFGQQTFSPQSSPMPGVAGGSGQSKVMANYMYKAGPSAQGGHLDVLMQQKPQDLSRSFINNPHPAMEPRQGNTKPLFHFNSDQANQQMPSVLPSQNKPSLLHYTQQQQQQQQQQQQQQQQQQQQQQQQQQQQQQQQQQSSISAQQQQQQQSSISAQQQQQQQQQQQQQQQQQQQQQQQQQQQPSSQPAQSLPSQPLLRSPLPLQQKLLLQQMQNQPIAGMGYQVSQQQRQDQHSVVGQNTGPSPSPNPCSNPNTGSGYMNSQQSLLNQQLMGKKQTLQRQIMEQKQQLLLQQQMLADAEKIAPQDQINRHLSRPPPDYKDQRRNVGNMQPTAQYSGGSSTISLNSNQALANPVSTHTILTPNSSLLSTSHGTRMPSLSTAVQNMGMYGNLPCNQPNTYSVTSGMNQLTQQRNPKQLLANQNNPMMPRPPTLGPSNNNNVATFGAGSVGNSQQLRPNLTHSMASMPPQRTSNVMITSNTTAPNWASQEGTSKQQEALTSAGVRFPTGTPAAYTPNQSLQQAVGSQQFSQRAVAPPNQLTPAVQMRPMNQMSQTLNGQTMGPLRGLNLRPNQLSTQILPNLNQSGTGLNQSRTGINQPPSLTPSNFPSPNQSSRAFQGTDHSSDLAFDFLSQQNDNMGPALNSDADFIDSLLKTEPGNDDWMKDINLDEILGNNS

SEQ ID NO: 54939 - protein, 173 aa, Homo sapiens
MVCFIGRSNVGKSSLIKALFSLAPEVEVRVSKKPGHTKKMNFFKVGKHFTVVDMPGYGFRAPEDFVDMVETYLKERRNLKRTFLLVDSVVGIQKTDNIAIEMCEEFALPYVIVLTKIDKSSKGHLLKQVLQIQKFVNMKTQGCFPQLFPVSAVTFSGIHLLRCFIASVTGSLD

SEQ ID NO: 54940 - protein, 204 aa, Homo sapiens
  MOD_RES (1)..(1): Any amino acid
XWAALRTTLFSAAFSLSGSLPLLRPPAHLHFFPHWLLYCFPSCLQFSTLCLLNLYLAEVLQTGAVPIWPSWKEPILYLQMVICKVRCATELDRHKILLHLGFIMASLLFLVVNLTCAMLVHGDVPENQLKWTVFVRALINDSLFILCAISLVCYICKITKMSSANVYLESKGMSLCQTVVVGSVVILLYSSRACYNLVVVTISQ

SEQ ID NO: 54941 - protein, 153 aa, Homo sapiens
MAFPEPKPRPPELPQKRLKTLDCGQGAVRAVRFNVDGNYCLTCGSDKTLKLWNPLRGTLLRTYSGHGYEVLDAAGSFDNSSLCSGGGDKAVVLWDVASGQVVRKFRGHAGKVNTVQFNEEATVILSVSAVGIAAHGGLSQCRRWMRPEMACPV

SEQ ID NO: 54942 - protein, 135 aa, Homo sapiens
MHTIIRDKETSRDEFIFYSKRLMRLLIEHALSFLPFQDCVVQTPQGQDYAGKCYAGKQITGVSILRAGETMEPALRAVCKDVRIGTILIQTNQLTGEPELHYLRLPKDISDDHVILMDCTVSTGAAAMMAVRVLL

SEQ ID NO: 54943 - protein, 236 aa, Homo sapiens
MDFRTACEETKTGICLLQDGNQEPFKVRLHLAKDILMIQEQDVICVSGEPFYSGERTVTIRRQTVGGFGLSIKGGAEHNIPVVVSKISKEQRAELSGLLFIGDAILQINGINVRKCRHEEVVQVLRNAGEEVTLTVSFLKRAPAFLKLPLNEDCACAPSDQSSGTSSPLCDSGLHLNYHPNNTDTLSCSSWPTSPGLRWEKRWCDLRLIPLLHSRFSQYVPGTDLSRLKKSTETFL

SEQ ID NO: 54944 - protein, 126 aa, Homo sapiens
MCDRNGGRRLRQWLIEQIDSSMYPGLIWENEEKSMFRIPWKHAGKQDYNQEVDASIFKAWAVFKGKFKEGDKAEPATWKTRLRCALNKSPDFEEVTDRSQLDISEPYKVYRIVPEEEQKCNYPLWA

SEQ ID NO: 54945 - protein, 67 aa, Homo sapiens
  MOD_RES (1)..(1): Any amino acid
XTIEENIKIFEEEEVEFISVPVPEFADSDPANIVHDFNKKLLKVFRNVKPAIVSQFGILKTNLPWKL

SEQ ID NO: 54946 - protein, 186 aa, Homo sapiens
MSSEMEPLLLAWSYFRRRKFQLCADLCTQMLEKSPYDQAAWILKARALTEMVYIDEIDVDQEGIAEMMLDENAIAQVPRPGTSLKLPGTNQTGGPSQAVRPITQAGRPITGFLRPSTQSGRPGTMEQAIRTPRTAYTARPITSSSGRFVRLGTASMLTSPDGPFINLSRLNLTKYSQKPKLAKVCT

SEQ ID NO: 54947 - protein, 297 aa, Homo sapiens
MPYMRYSRKVWDQVKASNPDLKLWEIGKIIGGMWRDLTDEEKQEYLNEYEAEKIEYNESMKAYHNSPAYLAYINAKSRAEAALEEESRQRQSRMEKGEPYMSIQPAEDPDDYDDGFSMKHTATARFQRNHRLISEILSESVVPDVRSVVTTARMQVLKRQVQSLMVHQRKLEAELLQIEERHQEKKRKFLESTDSFNNELKRLCGLKVEVDMEKIAAEIAQAEEQARKRQEEREKEAAEQAERSQSSIVPEEEQAANKGEEKKDDENIPMETGNPLATNAEAVPRLCTAVFNLGFSF

SEQ ID NO: 54948 - protein, 141 aa, Homo sapiens
MVLRRMHRPRSCSYQLLLEHQRPSCIQGLRWTPLTNSEESLDFSESLEQASTERVLRAGRQLHRHLLATCPNLIRDRKYHLRLYRQCCSGRELVDGILALGLGVHSRSQVVGICQVLLDEGALCHVKHDWAFQDRDAQFYR

SEQ ID NO: 54949 - protein, 266 aa, Homo sapiens
MKTLLLLLLVLLELGEAQGSLHRVPLRRHPSLKKKLRARSQLSEFWKSHNLDMIQFTESCSMDQSAKEPLINYLDMEYFGTISIGSPPQNFTVIFDTGSSNLWVPSVYCTSPACMHFFPETHSRFQPSQSSTYSQPGQSFSIQYGTGSLSGIIGADQVSVEGLTVVGQQFGESVTEPGQTFVDAEFDGILGLGYPSLAVGGVTPVFDNMMAQNLVDLPMFSVYMSSNPEGGAGSELIFGGYDHSHFSGSLNWVPVTKQAYWQIALD

SEQ ID NO: 54950 - protein, 164 aa, Homo sapiens
MSASPDDLSTGGRLQNMTVDECFQSRNTVLQGQPFGGVPTVLCLNIALWVLVLVVYSFLRKAAWDYGRLALLIHNDSLTSLIYGEQSEKTSPSETSLEMERRDKGFCSWFFNSITMKDEDLINKCGDDARIYIVFQYHLIIFVLIICIPSLGIILPINYTGSVL

SEQ ID NO: 54951 - protein, 216 aa, Homo sapiens
MLSRLMSGSSRSLEREYSCTVRLLDDSEYTCTIQRDAKGQYLFDLLCHHLNLLEKDYFGIRFVDPDKQRHWLEFTKSVVKQLRSQPPFTMCFRVKFYPADPAALKEEITRYLVFLQIKRDLYHGRLLCKTSDAALLAAYILQAEIGDYDSGKHPEGYSSKFQFFPKHSEKLERKIAEIHKTELRTCQEMLHFWPSLLLGLLFFKETRGSTSLNGMR

SEQ ID NO: 54952 - protein, 59 aa, Homo sapiens
MSMEDYDFLFKIVLIGNAGVGKTCLVRRFTQGLFPPGQGATIGVDFMIKTVEINGEKVK

SEQ ID NO: 54953 - protein, 550 aa, Homo sapiens [sequence omitted]

SEQ ID NO: 54954 - protein, 950 aa, Homo sapiens
MVTTMSVRLRFLSPGDTGAVGVVGRSASFAGFSSAQSRRIAKSINRNSVRSRMPAKSSKMYGTLRKGSVCADPKPQQVKKIFEALKRGLKEYLCVQQAELDHLSGRHKDTRRNSRLAFYYDLDKQTRCVERHIRKMEFHISKVDELYEDYCIQCRLRDGASSMQRAFARCPPSRAARESLQELGRSLHECAEDMWLIEGALEVHLGEFHIRMKGLVGYARLCPGDHYEVLMRLGRQRWKLKGRIESDDSQTWDEEEKAFIPTLHENLDIKVTELRGLGSLAVGAVTCDIADFFTTRPQVIVVDITELGTIKLQLEVQWNPFDTESFLVSPSPTGKFSMGSRKGSLYNWTPPSTPSFRERYYLSVLQQPTQQALLLGGPRATSILSYLSDSDLRGPSLRSQSQELPEMDSFSSEDPRDTETSTSASTSDVGFLPLTFGPHASIEEEAREDPLPPGLLPEMAHLSGGPFAEQPGWRNLGGESPSLPQGSLFHSGTASSSQNGHEEGATGDREDGPGVALEGPLQEVLELLRPTDSTQPQLRELEYQVLGFRDRLKPCRARQEHTSAESLMECILESFAFLNADFALDELSLFGGSQGLRKDRPLPPPSSLKASSRELTAGAPELDVLLMVHLQVCKALLQKLASPNLSRLVQECLLEEVAQQKHVLETLSVLDFEKVGKATSIEEIIPQASRTKGCLKLWRGCTGPGRVLSCPATTLLNQLKKTFQHRVRGKYPGQLEIACRRLLEQVVSCGGLLPGAGLPEEQIITWFQFHSYLQRQSVSDLEKHFTQLTKEVTLIEELHCAGQAKVVRKLQGKRLGQLQPLPQTLRAWALLQLDGTPRVCRAASARLAGAVRNRSFREKALLFYTNALAENDARLQQAACLALKHLKGIESIDQTASLCQSDLEAVRAAARETTLSFGEKGRLAFEKMDKLCSEQREVFCQEADVEITIF

SEQ ID NO: 54955 - protein, 167 aa, Homo sapiens
MAANKSKGQSSLALHKVIMVGSGGVGKSALTLQFMYDEFVEDYEPTKADSYRKKVVLDGEEVQIDILDTAGQEDYAAIRDNYFRSGEGFLLVFSITEHESFTATAEFREQILRVKAEEDKIPLLVVGNKSDLEERRQVPVEEARSKAEEWGVQYVETSAKTRANVDK

SEQ ID NO: 54956 - protein, 88 aa, Homo sapiens
MTFVNCHGAGGSVAVRKTRVRPRRRLGFGKMSVPGPYQAATGPSSAPSAPPSYEETVAVNSYYPTPPAPMPGPTTGLVTGPDGKGMNP

SEQ ID NO: 54957 - protein, 295 aa, Homo sapiens
MDLWQLLLTLALAGSSDAFSGSEATAAILSRAPWSLQSVNPGLKTNSSKEPKFTKCRSPERETFSCHWTDEVHHGTKNLGPIQLFYTRRNTQEWTQEWKECPDYVSAGENSCYFNSSFTSIWIPYCIKLTSNGGTVDEKCFSVDEIVQPDPPIALNWTLLNVSLTGIHADIQVRWEAPRNADIQKGWMVLEYELQYKEVNETKWKMMDPILTTSVPVYSLKVDKEYEVRVRSKQRNSGNYGEFSEVLYVTLPQMSQFTCEEDFYFPWLLIIIFGIFGLTVMLFVFLFSKQQRKEN

SEQ ID NO: 54958 - protein, 71 aa, Homo sapiens
MATAAYEQLKLHITPEKFYVEACDDGADDVLTIDRVSTEVTLAVKKDVPPSAVTRPIFGILGTIHLVAVTR

SEQ ID NO: 54959 - protein, 101 aa, Homo sapiens
MPFFGNTFSPKKTPPRKSASLSNLHSLDRSTREVELGLEYGSPTMNLAGQSLKFENGQWIAETGVSGGVDRREVQRLRRRNQQLEEENNLLRLKVDILLDM

SEQ ID NO: 54960 - protein, 345 aa, Homo sapiens
MAAPASDSGGSQQSPSSSPGSREGAGVAAKGAPDCGDAGARDAAETVSGLPPLEDYECKICYNYFDADRRAPKLLACLHTFCQECLSQLQLRAAAAAAAAAAPERPPRPPPWLCPPGAIACPVCRHRTPLPDSRVHGLPNNTKLAEAFPLALRAAHDPLPQDRLPPLPARLPAPAAAPPPTPAPPPPPSPAPPQPPPPPPAEDAAPGPRARPGLRAPGAYDSCQNCKRAALTAGCVCVVFSFLSMVVLLFTGLIFVNHYGGGGTPGGGAPPGEAPATGSPSPSPVGPICLSVASILALFSVVVTWVICWLKYRPEGAAAGSTGGSGGGGGPRARAAAGGARRSDT

SEQ ID NO: 54961 - protein, 146 aa, Homo sapiens
MADDLDFETGDAGASATFPMQCSALRKNGFVVLKGRPCKIVEMSTSKTGKHGHAKVHLVGIDIFTGKKYEDICPSTHNMDVPNIKRNDFQLIGIQDGYLSLLQDSGEVREDLRLPEGDLGKEIEQKYDCGEEILITVLSAMTEEAA

SEQ ID NO: 54962 - protein, 108 aa, Homo sapiens
METGPSCSSQTGVSTFLTLGAPPCEARRGEWCHSRASAGHRREMESPRGWTLQVAPEEGQVLCNVKTATRGLSEGAVSGGWGAWENSTEVPREAGDGQRQQATLGAAD

SEQ ID NO: 54963 - protein, 603 aa, Homo sapiens
MKLRLPASPETHLDMLRHLYQGCQVVQGNLELTYLPTNASLSFLQDIQEVQGYVLIAHNQVRQVPLQRLRIVRGTQLFEDNYALAVLDNGDPLNNTTPVTGASPGGLRELQLRSLTEILKGGVLIQRNPQLCYQDTILWKDIFHKNNQLALTLIDTNRSRACHPCSPMCKGSRCWGESSEDCQSLTRTVCAGGCARCKGPLPTDCCHEQCAAGCTGPKHSDCLACLHFNHSGICELHCPALVTYNTDTFESMPNPEGRYTFGASCVTACPYNYLSTDVGSCTLVCPLHNQEVTAEDGTQRCEKCSKPCARVCYGLGMEHLREVRAVTSANIQEFAGCKKIFGSLAFLPESFDGDPASNTAPLQPEQLQVFETLEEITGYLYISAWPDSLPDLSVFQNLQVIRGRILHNGAYSLTLQGLGISWLGLRSLRELGSGLALIHHNTHLCFVHTVPWDQLFRNPHQALLHTANRPEDECVGEGLACHQLCARGHCWGPGPTQCVNCSQFLRGQECVEECRVLQGLPREYVNARHCLPCHPECQPQNGSVTCFGPEADQCVACAHYKDPPFCVARCPSGVKPDLSYMPIWKFPDEEGACQPCPINCTHS

SEQ ID NO: 54964 - protein, 110 aa, Homo sapiens
MYGLHQDVHHFNSFDKVRSLPLLLSQAGVRTGIIGKKHVGPETVYPFDFAYTEENGSVLQVGRNITRIKLLVRKFLQTQDDRPFFLYVAFHDPHRCGHSQPQYGTFCEKF

SEQ ID NO: 54965 - protein, 209 aa, Homo sapiens
MSENAAPGLISELKLAVPWGHIAAKAWGSLQGPPVLCLHGWLDNASSFDRLIPLLPQDFYYVAMDFGGHGLSSHYSPGVPYYLQTFVSEIRRVVAALKWNRFSILGHSFGGVVGGMFFCTFPEMVDKLILLDTPLFLLESDEMENLLTYKRRAIEHVLQVEASQEPSHVFSLKQLLQRLLKSNSHLSEECGELLLQRGTTKVATGREQH

SEQ ID NO: 54966 - protein, 265 aa, Homo sapiens
MEADSPAGPGAPEPLAEGAAAEFSSLLRRIKGKLFTWNILKTIALGQMLSLCICGTAITSQYLAERYKVNTPMLQSFINYCLLFLIYTVMLAFRSGSDNLLVILKRKWWKYILLGLADVEANYVIVRAYQYTTLTSVQLLDCFGIPVLMALSWFILHARYRVIHFIAVAVCLLGVGTMVGADILAGREDNSGSDVLIGDILVLLGASLYAISNVCEEYIVKKLSRQEFLGMVGLFGTIISGIQLPAVRGICPVYVLPVQLHAIGD

SEQ ID NO: 54967 - protein, 914 aa, Homo sapiens
MGVPQRSGSSILKISISDSNDNSPAFEQQSYIIQLLENSPVGTLLLDLNATDPDEGANGKIVYSFSSHVSPKIMETFKIDSERGHLTLFKQVDYEITKSYEIDVQAQDLGPNSIPAHCKIIIKVVDVNDNKPEININLMSPGKEEISYIFEGDPIDTFVALVRVQDKDSGLNGEIVCKLHGHGHFKLQKTYENNYLILTNATLDREKRSEYSLTVIAEDRGTPSLSTVKHFTVQINDINDNPPHFQRSRYEFVISENNSPGAYITTVTATDPDLGENGQVTYTILESFILGSSITTYVTIDPSNGAIYALRIFDHEEVSQITFVVEARDGGSPKQLVSNTTVVLTIIDENDNVPVVIGPALRNNTAEITIPKGAESGFHVTRIRAIDRDSGVNAELSCAIVAGNEENIFIIDPRSCDIHTNVSMDSVPYTEWELSVIIQDKGNPQLHTKVLLKCMIFEYAESVTSTAMTSVSQASLDVSMIIIISLGAICAVLLVIMVLFATRCNREKKDTRSYNCRVAESTYQHHPKRPSRQIHKGDITLVPTINGTLPIRSHHRSSPSSSPTLERGQMGSRQSHNSHQSLNSLVTISSNHVPENFSLELTHATPAVEVSQLLSMLHQGQYQPRPSFRGNKYSRSYRYALQDMDKFSLKDSGRGDSEAGDSDYDLGRDSPIDRLLGEGFSDLFLTDGRIPAAMRLCTEECRVLGHSDQCWMPPLPSPSSDYRSNMFIPGEEFPTQPQQQHPHQSLEDDAQPADSGEKKKSFSTFGKDSPNDEDTGDTSTSSLLSEMSSVFQRLLPPSLDTYSECSEVDRSNSLERRKGPLPAKTVGYPQGVAAWAASTHFQNPTTNCGPPLGTHSSVQPSSKWLPAMEEIPENYEEDDFDNVLNHLNDGKHELMDASELVAEINKLLQDVRQS

SEQ ID NO: 54968 - protein, 150 aa, Homo sapiens
MSNPSAPPPYEDRNPLYPGPPPPGGYGQPSVLPGGYPAYPGYPQPGYGHPAGYPQPMPPTHPMPMNYGPGHGYDGEERAVSDSFGPGEWDDRKVRHTFIRKVYSIISVQLLITVAIIAIFTFVEPVSAFVRRNVAVYYVSYAVFVVTYLI

SEQ ID NO: 54969 - protein, 300 aa, Homo sapiens
MAKWLRDYLSFGGRRPPPQPPTPDYTESDILRAYRAQKNLDFEDPYEDAESRLEPDPAGPGDSKNPGDAKYGSPKHRLIKVEAADMARAKALLGGPGEELEADTEYLDPFDAQPHPAPPDDGYMEPYDAQWVMSELPGRGVQLYDTPYEEQDPETADGPPSGQKPRQSRMPQEDERPADEYDQPWEWKKDHISRAFAVQFDSPEWERTPGSAKELRRPPPRSPQPAERVDPALPLEKQPSSQGFLHLKFARTRENQVVLGQHSGPFPSVPELVLHYSSRPLPVQGAEHLALLYPVVTQTP

SEQ ID NO: 54970 - protein, 227 aa, Homo sapiens
AGHIMEFSQDQHGSRFIQLKLERATPAERQLVFNEILQAAYQLMVDVFGNYVIQKFFEFGSLEQKLALAERIRGHVLSLALQMYGCRVIQKALEFIPSDQQVINEMVRELDGHVLKCVKDQNGNHVVQKCIECVQPQSLQFIIDAFKGQDQYGNYVIQHVLEHGRPEDKSKIVAEIRGNVLVLSQHKFASNVVEKCVTHASRTERAVLIDEVCTMNDGPHSALYTMM

SEQ ID NO: 54971 - protein, 150 aa, Homo sapiens
MVVMIVGFLTVLIQGSTHAGGFHNVLEQSTNGSRLHIFDFDVDPLRRHTFWTITVGGTFTWLGIYGVNQSTIQRCISCKTEKHAKLALYFNLLGLWIILVCAVFSGLIMYSHFKDCDPWTSGIISAPDQLMPYFVMEIFATMPGLPGLFV

SEQ ID NO: 54972 - protein, 109 aa, Homo sapiens
MKRMMKMRTPQYSTSNTGKTCFPAWWHPVESWSAATWGVKDWTWKPSCVGGVETKTNVMYKTPAPSCVSGICSDCHWQARFHVTTMELLLPPFGHPFKVPPTSTPHVRG

SEQ ID NO: 54973 - protein, 202 aa, Homo sapiens
MRRKEKRLLQAVALVLAALVLLPNVGLWALYRERQPDGTPGGSGAAVAPAAGQGSHSRQKKTFFLGDGQKLKDWHDKEAIRRDAQRVGNGEQGRPYPMTDAERVDQAYRENGFNIYVSDKISLNRSLPDIRHPNCNSKRYLETLPNTSIIIPFHNEGWSSLLRTVHSVLNRSPPELVAEIVLVDDFSDRDLPTASTPSPFVC

SEQ ID NO: 54974 - protein, 136 aa, Homo sapiens
  MOD_RES (1)..(1): Any amino acid
XPSRALPEPQEAQKLAAERARAPVVPYGVDLHYWGQELPTAGKIVKSDSQHRFWKPSEVEEEVVNADISEMLRSRHITFAGKFEPVQHWCRAPRPDGRLCERQDRLKTFHSCPRPSGSRGGTEPSPRPCGSQDALL

SEQ ID NO: 54975 - protein, 106 aa, Homo sapiens
  MOD_RES (1)..(1): Any amino acid
XAVLVYTPSRKVHGKRLVCYDDRYIVKVAYEQDGVIVSNDNYRDLQSENPEWKWFIEQRLLMFSFVNDRFMPPDDPLGRHGPSLSNFLSRKPKPPEPSWQHCPYGG

SEQ ID NO: 54976 - protein, 113 aa, Homo sapiens
MRNAVCIFYLVLRALDTLEDDMTISVEKKVPLLHNFHSFLYQPDWRFMESKEKDRQVLEDFPTISLEFRNLAEKYQTVIADICRRMGIGMAEFLDKHVTSEQEWDKPQSLKTP

SEQ ID NO: 54977 - protein, 102 aa, Homo sapiens
  MOD_RES (1)..(1): Any amino acid
XMNFPLGDILIFIEHKRKQCNGSLCLEKAVDKPPSPSPIEMKKASNPVEVGIQVTPEDDDCLSTSSRGICPKQEHIAGRLLGQDVRRVLWEEHNTFHPAWAT

SEQ ID NO: 54978 - protein, 154 aa, Homo sapiens
MAELNTHVNVKEKIYAVRSVVPNKSNNEIVLVLQQFDFNVDKAVQAFVDGSAIQVLKEWNMTGKKKNNKRKRSKSKQHQGNKDAKDKVERPEAGPLQPQPPQIQNGPMNGCEKDSSSTDSANEKPALIPREKKISILEEPSKALRGVTEGNRLL

SEQ ID NO: 54979 - protein, 269 aa, Homo sapiens
MGRARRRYFDEGAWLLAAPRALAEILSVKDISGRKLFYVHYIDFNKRLDEWVTHERLDLKKIQFPKKEAKTPTKNGLPGSRPGSPEREVPASAQASGKTLPIPVQITLRFNLPKEREAIPGGEPDQPLSSSSCLQPNHRSTKRKVEVVSPATPVPSETAPASVFPQNGAARRAVAAQPGRKRKSNCLGTDEDSQDSSDGIPSAPRMTGSLVSDRSHDDIVTRMKNIECIELGRHRLKPWYFSPYPQELTTLPVLYLCEFCLKYGRSLKC

SEQ ID NO: 54980 - protein, 147 aa, Homo sapiens
MDLSTFDFRTGKMLMSKMNKSRQRVRYDSSNQVKGKPDLNTALPVRQTASIFKQPVTKITNHPSNKVKSDPQKAVDQPRQLFWEKKLSGLNAFDIAEELVKTMDLPKGLQGVGPGCTDETLLSAIASALHTSTMPITGQLSAAVEKN

SEQ ID NO: 54981 - protein, 54 aa, Homo sapiens
MGFNLTFHLSYKFRLLLLLTLCLTVVGWATSNYFVGAIQEIPKAKEFMANFHKT

SEQ ID NO: 54982 - protein, 171 aa, Homo sapiens
MFPAGPPSHSLLRLPLLQLLLLVVQAVGRGLGRASPAGGPLEDVVIERYHIPRACPREVQMGDFVRYHYNGTFEDGKKFDSSYDRNTLVAIVVGVGRLITGMDRGLMGMCVNERRRLIVPPHLGYGSIGLAGLIPPDATLYFDVVLLDVWNKEDTVQVSTLLRPPHCPRMV

SEQ ID NO: 54983 - protein, 239 aa, Homo sapiens
MRLPGAMPALALKGELLLLSLLLLLEPQISQGLVVTPPGPELVLNVSSTFVLTCSGSAPVVWERMSQEPPQEMAKAQDGTFSSVLTLTNLTGLDTGEYFCTHNDSRGLETDERKRLYIFVPDPTVGFLPNDAEELFIFLTEITEITIPCRVTDPQLVVTLHEKKGDVALPVPYDHQRGFSGIFEDRSYICKTTIGDREVDSDAYYVYRLQGEPPFWPDAQQSVIHQRLCERSADCGPPG

SEQ ID NO: 54984 - protein, 148 aa, Homo sapiens
MAAVALRDSAQGTVTFEDVAVNFSQEEWSLLSEAQRCLYHDVMLENLTLISSLGCWYGAKDETPSKQTLSIQQESPLRTHWTGVCTKKVHLWGMCGPLLGDILHQGTQHNQKLNGFGAYEKKLDDDANHHQDQKQHIGEKSYRSNAKG

SEQ ID NO: 54985 - protein, 168 aa, Homo sapiens
MCPQYLSQSPNPSCPTAFSWNLPWEASARRREIEDKLKQEEETLSFIRDSLEKSDQLTKNMVSILSSFESRLMKLENSIIPVHKQTENLQRLQENVEKTLSCLDHVISYYHVASDTEKIIREGPTGRLEEYLGSMAKIQKAVEYFQDNSPDSPELNKVKLLFERGKEA

SEQ ID NO: 54986 - protein, 141 aa, Homo sapiens
MVRELIVPTEDPSGESLIISPEEFERIKWASHVLTREELEARDQAFKKEKEATMDAVMTRKKIMKQKEMVWNNNKKLSDLEEVAKERAQNLLQRANKLRMEQEEELKDMSKIILNAKCHAIRDAQILEKQQIQKELDTEEK

SEQ ID NO: 54987 - protein, 85 aa, Homo sapiens
  MOD_RES (1)..(1): Any amino acid
XSIRPGIFCIGVDLNRNWKSGFGDVASGITVDWAYDSGIKYAFSFELRDTGQYGFLLPATQIIPTAQETWMALRTIMEHTLNHPY

SEQ ID NO: 54988 - protein, 493 aa, Homo sapiens
  MOD_RES (1)..(1): Any amino acid
XYRGWVGVSGRLHPSLTVWAQNLPFLRGSRLLAWVLWLQAWQVAAPCPGACVCYNEPKVTTSCPQQGLQAVPVGIPAASQRIFLHGNRISHVPAASFRACRNLTILWLHSNVLARIDAAAFTGLALLEQLDLSDNAQLRSVDPATFHGLGRLHTLHLDRCGLQELGPGLFRGLAALQYLYLQDNALQALPDDTFRDLGNLTHLFLHGNRISSVPERAFRGLHSLDRLLLHQNRVAHVHPHAFRDLGRLMTLYLFANNLSALPTEALAPLRALQYLRLNDNPWVCDCRARPLWAWLQKFRGSSSEVPCSLPQRLAGRDLKRLAANDLQGCAVATGPYHPIWTGRATDEEPLGLPKCCQPDAADKASVLEPGRPASAGNALKGRVPPGDSPPGNGSGPRHINDSPFGTLPGSAEPPLTAVRPEGSEPPGFPTSGPRRRPGCSRKNRTRSHCRLGQAGSGGGGTGDSEGSGALPSLTCSLTPLGLALVLWTVLGPC

SEQ ID NO: 54989 - protein, 123 aa, Homo sapiens
MSKLVTLLALCKTEKFLIHSQQPCPQGAPDCQKVKVMYRMAHKPVYQVKQKVLTSLAWRCCPGYTGPNCEHHDSMAIPEPADPGDSHQEPQDGPVSFKPGHLAAVINEVEVQQEQQEHLLGDL

SEQ ID NO: 54990 - protein, 179 aa, Homo sapiens
  MOD_RES (1)..(1): Any amino acid
XSLKQRLREARMTGTPVLVALGDFLGGPLAPHPYQGEPPSMLRYEEMTERWFPLANNLPPDLVNVRGYGSAILDNYLFIVGGYRITSQEISAAHSYNPSTNEWLQVASMNQKRSNFKLVAVNSKLYAIGGQAVSNVECYNPEQDAWNFVAPLPNPLAEFSACECKGKIYVIGGYTTRGK

SEQ ID NO: 54991 - protein, 26 aa, Homo sapiens
  MOD_RES (1)..(1): Any amino acid
XKRLLEVLASQGHILAAGCGACLLLQ

SEQ ID NO: 54992 - protein, 232 aa, Homo sapiens
FQGGKWVPCGKADTNVQGNRVYMHPDSPNTGAHWMRQEISFGKLKLTNNKGASNNNGQMVVLQSLHKYQPRLHVVEVNEDGTEDTSQPGRVQTFTFPETQFIAVTAYQNTDITQLKIDHNPFAKGFRDNYDTIYTGCDMDRLTPSPNDSPRSQIVPGARYAMAGSFLQDQFQAEDPGAPSPQRWFVTPANNRLDFAASAYDTATDFAGNAATLLSYAAAGVKALPLQAAGCT

SEQ ID NO: 54993 - protein, 263 aa, Homo sapiens
MSDMEDDFMCDDEEDYDLEYSEDSNSEPNVDLENQYYNSKALKEDDPKAALSSFQKVLELEGEKGEWGFKALKQMIKINFKLTNFPEMMNRYKQLLTYIRSAVTRNYSEKSINSILDYISTSKQMDLLQEFYETTLEALKDAKNDRLWFKTNTKLGKLYLEREEYGKLQKILRQLHQSCQTDDGEDDLKKGTQLLEIYALEIQMYTAQKNNKKLKALYEQSLHIKSAIPHPLIMGVIRECGGKMHLREGEFEKAHTDFFEAFK

SEQ ID NO: 54994 - protein, 120 aa, Homo sapiens
AVQGTGLAFIAFTEAMTHFPASPFWSVMFFLMLVNLGLGSMFGTIEGIVTPIVDTFKVRKEILTAAITTLLLSSLLTSAEMWLRNGMQSSFTFGGFSANEHKRTESNKNMGILYEFQKLF

SEQ ID NO: 54995 - protein, 92 aa, Homo sapiens
MLVAGLLLWASLLTGAWPSFPTQDHLPATPRVRLSFKELKATGTAHFFNFLLNTTDYRILLKDEDHDRMYVGSKDYVLSLDLHDINREPLIV

SEQ ID NO: 54996 - protein, 78 aa, Homo sapiens
MSVGVSTSAPLSPTSGTSVGMSTFSIMDYVVFVLLLVLSLAIGLYHACRGWGRHTVGELLMADRKMGCLPVALSLLAT

SEQ ID NO: 54997 - protein, 239 aa, Homo sapiens
MPGCELPVGTCPDMCPAAERAQREREHRLHRLEVVPGCRQDPPRADPQRAVKEYSRPAAGKPRPPPSQLRPPSVLLATVRYLAGEVAESADIARAEVASFVADRLRAVLLDLALQGAGDAEAAVVLEAALATLLTVVARLGPDAARGPADPVLLQAQVQEGFGSLRRCYARGAGPHPRQPAFQGLFLLYNLGESGSWRLGRAWGQEPTMTVEARWKPCMRFYSCLLPCAPARPSARPWR

SEQ ID NO: 54998 - protein, 275 aa, Homo sapiens
  MOD_RES (1)..(1): Any amino acid
XNVAPGAESAVASFVTQLAAAEALQKAPDVTTLPRNVMFVFFQGVALRTSLELWMHTDPVSQKNESVRNQVEDLLATLEKSGAGVPAVILRRPNQSQPLPPSSLQRFLRARNISGVVLADHSGAFHNKYYQSIYDTAENINVSYPEWLSPEEDLNFVTDTAKALADVATVLGRALYELAGGTNFSDTVQADPQTVTRLLYGFLIKANNSWFQSILRQDLRSYLGDGPLQHYIAVSSPTNTTYVVQYALANLTGTVVNLTREQCQDPSKVPSENKD

SEQ ID NO: 54999 - protein, 117 aa, Homo sapiens
WDLSEYSYKDPEDQGNLYIDIAVGAPFEGLGKVYIYHSSSKGLLRQPQQVIHGEKLGLPGLATFGYSLSGQMDVDENFYPDLLVGSLSDHIVLLRARPVINIVHKTLVPRPAVLDPA

SEQ ID NO: 55000 - protein, 383 aa, Homo sapiens
MSSKMVISEPGLNWDISPKNGLKTFFSRENYKDHSMAPSLKELRVLSNRRIGENLNASASSVENEPAVSSATQAKEKVKTTIGMVLLPKPRVPYPRFSRFSQREQRSYVDLLVKYAKIPANSKAVGINKNDYLQYLDMKKHVNEEVTEFLKFLQNSAKKCAQDYNMLSDDARLFTEKILRACIEQVKKYSEFYTLHEVTSLMGFFPFRVEMGLKLEKTLLALGSVKYVKTVFPSMPIKLQLSKDDIATIETSEQTAEAMHYDISKDPNAEKLVSRYHPQIALTSQSLFTLLNNHGPTYKEQWEIPVCIQVIPVAGSKPVKVIYINSPLPQKKMTMRERNQIFHEVPLKFMMSKNTSVPVSAVFMDKPEEFISEMDVCNAFFFP

SEQ ID NO: 55001 - protein, 50 aa, Homo sapiens
MDEDVLTTLKILIIGESGVGKSSLLLRFTDDTFDPELAATIAVGEEMTAL

SEQ ID NO: 55002 - protein, 279 aa, Homo sapiens
EEGALSVLQQFKESDLSHVQNKSAFLCGVMKTYRQREKQGSKVQESTKGPDEAKIKVFVGKIPRDLYEDELVPLFEKAGPIWDLRLMMDPLSGQNRGYAFITFCGKEAAQEAVKLCDSYEIRPGKHLGVCISVANNRLFVGSIPKNKTKENILEEFSKVTEGLVDVILYHQPDDKKKNRGFCFLEYEDHKSAAQARRRLMSGKVKVWGNVVTVEWADPVEEPDPEVMAKVKVLFVRNLATTVTEEILEKSFSEFGKLERVKKLKDYAFVHFEDRGAAVK

SEQ ID NO: 55003 - protein, 262 aa, Homo sapiens
MAVFVVLLALVAGVLGNEFSILKSPGSVVFRNGNWPIPGERIPDVAALSMGFSVKEDLSWPGLAVGNLFHRPRATVMVMVKGVNKLALPPGSVISYPLENAVPFSLDSVANSIHSLFSEETPVVLQLAPSEERVYMVGKANSVFEDLSVTLRQLRNRLFQENSVLSSLPLNSLSRNNEVDLLFLSELQVLHDISSLLSRHKHLAKDHSPDLYSLELAGLDEIGKRYGEDSEQFRDASKILVDALQKSLWWECSGRVSHCQVI

SEQ ID NO: 55004 - protein, 1059 aa, Homo sapiens
MLFPLQVAAVTSSVRDDPLEHCVSPRTRARSPEICKMADNLDEFIEEQKARLAEDKAELESDPPYMEMKGKLSAKLSENSKILISMAKENIPPNSQQTRGSLGIDYGLSLPLGEDYERKKHKLKEELRQDYRRYLTQERLKLERNKEYNQFLRGKEESSEKFRQVEKSTEPKSQRNKKPIGQVKPDLTSQIQTSCENSEGPRKDVLTPSEAYEELLNQRRLEEDRYRQLDDEIELRNRRIIKKANEEVGISNLKHQRFASKAGIPDRRFHRFNEDRVFDRRYHRPDQDPEVSEEMDERFRYESDFDRRLSRVYTNDRMHRNKRGNMPPMEHDGDVIEQSNIRISSAENKSAPDNETSKSANQDTCSPFAGMLFGGEDRELIQRRKEKYRLELLEQMAEQQRNKRREKDLELRVAASGAQDPEKSPDRLKQFSVAPRHFEEMIPPERPRIAFQTPLPPLSAPSVPPIPSVHPVPSQNEDLRSGLSSALGEMVSPRIAPLPPPPLLPPLATNYRTPYDDAYYFYGSRNTFDPSLAYYGSGMMGVQPAAYVSAPVTHQLAQPVVNTVGQNELKITSDQVINSGLIFEDKPKPSKQSLQSYQEALQQQIREREERRKKEREEKEEYEAKLEAEMRTYNPWGKGGGGAPLRDAKGNLITDLNRMHRQNIDAYHNPDARTYEDKRAVVSLDPNLATSNAENLEDAANKSSGHMQTQSSPFARGNVFGEPPTELQIKQQELYKNFLRFQIEEKKQREEAERERLRIAEEKEERRLAEQRARIQQEYEEEQEKKREKEEEQRLKNEEHIRLAEERQKEAERKKKEEEEKYNLQLQHYCERDNLIGEETKHMRQPSPIVPALQNKIASKLQRPPSVDSIIRSFIHESSMSRAQSPPVPARKNQLRAEEEKKNVIMELSEMRKQLRSEERRLQERLLHMDSDDEIPIRKKERNPMDIFDMARHRLQAPVRRQSPKGLDAATFQNVHDFNELKDRDSETRVDLKFMYLDPPRDHHTLEIQQQALLREQQKRLNRIKMQEGAKVDLDAIPSAKVREQRMMMRVHWLTLMTS

SEQ ID NO: 55005 - protein, 369 aa, Homo sapiens
MAEDVSSAAPSPRGCADGRDADPTEEQMAETERNDEEQFECQELLECQVQVGAPEEEEEEEEDAGLVAEAEAVAAGWMLDFLCLSLCRAFRDGRSEDFRRTRNSAEAIIHGLSSLTACQLRTIYICQFLTRIAAGKTLDAQFENDERITPLESALMIWGSIEKEHDKLHEEIQNLIKIQAIAVCMENGNFKEAEEVFERIFGDPNSHMPFKSKLLMIISQKDTFHSFFQHFSYNHMMEKIKSYVNYVLSEKSSTFLMKAAAKVVESKRTRTITSQDKPSGNDVEMETEANLDTRKSVSDKQSAVTESSEGTVSLLRSHKNLFLSKLQHGTQQQDLNKKERRVGTPQSMALGRRQEFEIWREEIWRGKLV

SEQ ID NO: 55006 - protein, 100 aa, Homo sapiens
MNTEMYQTPMEVAVYQLHNFSISFFSSLLGGDVVSVKLDNSASGASVVAIDNKIEQAMVSGITASFSSPDLAAAYVTLGRIEGMGEKALSQNPEEADSLP

SEQ ID NO: 55007 - protein, 141 aa, Homo sapiens
  MOD_RES (1)..(1): Any amino acid
XTFVFCCWKAAQIKEHLLKSKWCRPTSLNVVRIITSELYRSLGDVLRDVDAKALVRSDFLLVYGDVISNINITRALEEHRLRRKLEKNVSVMTMIFKESSPSHPTRCHEDNVVVAVDSTTNRVLHFQKTQGLRRFAFPLSL

SEQ ID NO: 55008 - protein, 166 aa, Homo sapiens
MASTDYSTYSQAAAQQGYSAYTAQPTQGYAQTTQQAYGQQSYGTYGQPTDVSYTQAQTTATYGQTAYATSYGQPPTEGTSTGYTTPTAPQAYSQPVQGYGTGAYDTTTATVTTTQASYAAQSAYGTQPAYPAYGQQPAATAPTRPQDGNKPTETSQPQSSTGGYNQ

SEQ ID NO: 55009 - protein, 322 aa, Homo sapiens
MKGLYFQQSSTDEEITFVFQEKEDLPVTEDNFVKLQVKACALSQINTKLLAEMKMKKDLFPVGREIAGIVLDVGSKVSFFQPDDEVVGILPLDSEDPGLCEVVRVHEHYLVHKPEKVTWTEAAGSIRDGVRAYTALHYLSHLSPGKSVLIMDGASAFGTIAIQLAHHRGAKVISTACSLEDKQCLERFRPPIARVIDVSNGKVHVAESCLEETGGLGVDIVLDAGVRLYSKDDEPAVKLQLLPHKHDIITLLGVGGHWVTTEENLQLDPPDSHCLFLKGATLAFLNDEVWNLSNVQQGKYLSTYLKGCDGEVINWCFQTSVG

SEQ ID NO: 55010 - protein, 1154 aa, Homo sapiens
MPSSLMLEVPALADFNRAWTELTDWLSLLDQVIKSQRVMVGDLEDINEMIIKQKATMQDLEQRRPQLEELITAAQNLKNKTSNQEARTIITDRIERIQNQWDEVQEHLQNRRQQLNEMLKDSTQWLEAKEEAEQVLGQARAKLESWKEGPYTVDAIQKKITETKQLAKDLRQWQTNVDVANDLALKLLRDYSADDTRKVHMITENINASWRSIHKRVSEREAALEETHRLLQQFPLDLEKFLAWLTEAETTANVLQDATRKERLLEDSKGVKELMKQWQDLQGEIEAHTDVYHNLDENSQKILRSLEGSDDAVLLQRRLDNMNFKWSELRKKSLNIRSHLEASSDQWKRLHLSLQELLVWLQLKDDELSRQAPIGGDFPAVQKQNDVHRAFKRELKTKEPVIMSTLETVRIFLTEQPLEGLEKLYQEPRELPPEERAQNVTRLLRKQAEEVNTEWEKLNLHSADWQRKIDETLERLRELQEATDELDLKLRQAEVIKGSWQPVGDLLIDSLQDHLEKVKALRGEIAPLKENVSHVNDLARQLTTLGIQLSPYNLSTLEDLNTRWKLLQVAVEDRVRQLHEAHRDFGPASQHFLSTSVQGPWERAISPNKVPYYINHETQTTCWDHPKMTELYQSLADLNNVRFSAYRTAMKLRRLQKALCLDLLSLSAACDALDQHNLKQNDQPMDILQIINCLTTIYDRLEQEHNNLVNVPLCVDMCLNWLLNVYDTGRTGRIRVLSFKTGIISLCKAHLEDKYRYLFKQVASSTGFCDQRRLGLLLHDSIQIPRQLGEVASFGGSNIEPSVRSCFQFANNKPEIEAALFLDWMRLEPQSMVWLPVLHRVAAAETAKHQAKCNICKECPIIGFRYRSLKHFNYDICQSCFFSGRVAKGHKMHYPMVEYCTPTTSGEDVRDFAKVLKNKFRTKRYFAKHPRMGYLPVQTVLEGDNMETPASSPQLSHDDTHSRIEHYASRLAEMENSNGSYLNDSISPNESIDDEHLLIQHYCQSLNQDSPLSQPRSPAQILISLESEERGELERILADLEEENRNLQAEYDRLKQQHEHKGLSPLPSPPEMMPTSPQSPRDAELIAEAKLLRQHKGRLEARMQILEDHNKQKKYPWKANERGHNVGSLFHMADDLGRAMESLVSVMTDEEGAE

SEQ ID NO: 55011 - protein, 184 aa, Homo sapiens
MAGAAMYELVRVGHSELVGEIIRLEGDMATIQVYEETSGVSVGDPVLRTGKPLSVELGPGIMGAIFDGIQRPLSDISSQTQSIYIPRGVNVSALSRDIKWDFTPCKNLRVGSHITGGDIYGIVSENSLIKHKIMLPPRNRGTVTYIAPPGNYDTSDVVLELEFEGVKEKFTMVQVWPVRQVRPV

SEQ ID NO: 55012 - protein, 1307 aa, Homo sapiens
MSGGGGGGGSAPSRFADYFVICGLDTETGLEPDELSALCQYIQASKARDGASPFISSTTEGENFEQTPLRRTFKSKVLARYPENVEWNPFDQDAVGMLCMPKGLAFKTQADPREPQFHAFIITREDGSRTFGFALTFYEEVTSKQICSAMQTLYHMHNAEYDVLHAPPADDRDQSSMEDGEDTPVTKLQRFNSYDISRDTLYVSKCICLITPMSFMKACRSVLEQLHQAVTSPQPPPLPLESYIYNVLYEVPLPPPGRSLKFSGVYGPIICQRPSTNELPLFDFPVKEVFELLGVENVFQLFTCALLEFQILLYSQHYQRLMTVAETITALMFPFQWQHVYVPILPASLLHFLDAPVPYLMGLHSNGLDDRSKLELPQEANLCFVDIDNHFIELPEDLPQFPNKLEFVQEVSEILMAFGIPPEGNLHCSESASKLKRLRASELVSDKRNGNIAGSPLHSYELLKENETIARLQALVKRTGVSLEKLEVREDPSSNKDLKVQCDEEELRIYQLNIQIREVFANRFTQMFADYEVFVIQPSQDKESWFTNREQMQNFDKASFLSDQPEPYLPFLSRFLETQMFASFIDNKIMCHDDDDKDPVLRVFDSRVDKIRLLNVRTPTLRTSMYQKCTTVDEAEKAIELRLAKIDHTAIHPHLLDMKIGQGKYEPGFFPKLQSDVLSTGPASNKWTKRNAPAQWRRKDRQKQHTEHLRLDNDQREKYIQEARTMGSTIRQPKLSNLSPSVIAQTNWKFVEGLLKECRNKTKRMLVEKMGREAVELGHGEVNITGVEENTLIASLCDLLERIWSHGLQVKQGKSALWSHLLHYQDNRQRKLTSGSLSTSGILLDSERRKSDASSLMPPLRISLIQDMRHIQNIGEIKTDVGKARAWVRLSMEKKLLSRHLKQLLSDHELTKKLYKRYAFLRCDDEKEQFLYHLLSFNAVDYFCFTNVFTTILIPYHILIVPSKKLGGSMFTANPWICISGELGETQIMQIPRNVLEMTFECQNLGKLTTVQIGHDNSGLYAKWLVEYVMVRNEITGHTYKFPCGRWLGKGMDDGSLERILVGELLTSQPEVDERPCRTPPLQQSPSVIRRLVTISPNNKPKLNTGQIQESIGEAVNGIVKHFHKPEKERGSLTLLLCGECGLVSALEQAFQHGFKSPRLFKNVFIWDFLEKAQTYYETLEKNEVVPEENWHTRARNFCRFVTAINNTPRNIGKDGKFQMLVCLGARVIMKIKSLMSVPAHAECYVRDHLLHHWIALLADCPITAHMYEDVALIKDHTLVNSLIRVLQTLQEFNITLETSLVKGIDI

SEQ ID NO: 55013 - protein, 757 aa, Homo sapiens [sequence omitted]

SEQ ID NO: 55014 - protein, 137 aa, Homo sapiens
METLEELDWCLDQLETIQTYRSVSEMASNKFKRMLNRELTHLSEMSRSGNQVSEYISNTFLDKQNDVEIPSPTQKDREKKKKQQLMTQISGVKKLMHSSSLNNTSISRFGVNTENEDHLAKELEDLNKWGLNIFNVA

SEQ ID NO: 55015 - protein, 4772 aa, Homo sapiens
MMMCAATASPAAASSGLGGDGFYPAATFSSSPAPGALFMPVPDGSVAAAGLGLGLPAADSRGHYQLLLSGRALADRYRRIYTAALNDRDQGGGSAGHPASRNKKILNKKKLKRKQKSKSKVKTRSKSENLENTVIIPDIKLHSNPSAFNIYCNVRHCVLEWQKKEISLAAASKNSVQSGESDSDEEEESKEPPIKLPKIIEVGLCEVFELIKETRFSHPSLCLRSLQALLNVLQGQQPEGLQSEPPEVLESLFQLLLEITVRSTGMNDSTGQSLTALSCACLFSLVASWGETGRTLQAISAILTNNGSHACQTIQVPTILNSLQRSVQAVLVGKIQIQDWFSNGIKKAALMHKWPLKEISVDEDDQCLLQNDGFFLYLLCKDGLYKIGSGYSGTVRGHIYNSTSRIRNRKEKKSWLGYAQGYLLYRDVNNHSMTAIRISPETLEQDGTVMLPDCHTEGQNILFTDGEYINQIAASRDDGFVVRIFATSTEPVLQQELQLKLARKCLHACGISLFDLEKDLHIISTGFDEESAILGAGREFALMKTANGKIYYTGKYQSLGIKQGGPSAGKWVELPITKSPKIVHFSVGHDGSHALLVAEDGSIFFTGSASKGEDGESTKSRRQSKPYKPKKIIKMEGKIVVYTACNNGSSSVISKDGELYMFGKDAIYSDSSSLVTDLKGHFVTQVAMGKAHTCVLMKNGEVWTFGVNNKGQCGRDTGAMNQGGKGFGVENMATAMDEDLEEELDEKDEKSMMCPPGMHKWKLEQCMVCTVCGDCTGYGASCVSSGRPDRVPGGICGCGSGESGCAVCGCCKACARELDGQEARQRGILDAVKEMIPLDLLLAVPVPGVNIEEHLQLRQEEKRQRVIRRHRLEEGRGPLVFAGPIFMNHREQALARLRSHPAQLKHKRDKHKDGSGERGEKDASKITTYPPGSVRFDCELRAVQVSCGFHHSVVLMENGDVYTFGYGQHGQLGHGDVNSRGCPTLVQALPGPSTQVTAGSNHTAVLLMDGQVFTFGSFSKGQLGRPILDVPYWNAKPAPMPNIGSKYGRKATWIGASGDQTFLRIDEALINSHVLATSEIFASKHIIGLVPASISEPPPFKCLLINKVDGSCKTFNDSEQEDLQGFGVCLDPVYDVIWRFRPNTRELWCYNAVVADARLPSAADMQSRCSILSPELALPTGSRALTTRSHAALHILGCLDTLAAMQDLKMGVASTEEETQAVMKVYSKEDYSVVNRFESHGGGWGYSAHSVEAIRFSADTDILLGGLGLFGGRGEYTAKIKLFELGPDGGDHETDGDLLAETDVLAYDCAAREKYAMMFDEPVLLQAGWWYVAWARVSGPSSDCGSHGQASITTDDGVVFQFKSSKKSNNGTDVNAGQIPQLLYRLPTSDGSASKGKQQTSEPVHILKRSFARTVSVECFESLLSILHWSWTTLVLGVEELRGLKGFQFTATLLDLERLRFVGTCCLRLLRVYTCEIYPVSATGKAVVEETSKLAECIGKTRTLLRKILSEGVDHCMVKLDNDPQGYLSQPLSLLEAVLQECHNTFTACFHSFYPTPALQWACLCDLLNCLDQDIQEANFKTSSSRLLAAVMSALCHTSVKLTSIFPIAYDGEVLLRSIVKQVSTENDSTLVHRFPLLVAHMEKLSQSEENISGMTSFREVLEKMLVIVVLPVRNSLRRENELFSSHLVSNTCGLLASIVSELTASALGSEVDGLNSLHSVKASANRFTKTSQGRSWNTGNGSPDAICFSVDKPGIVVVGFSVYGGGGIHEYELEVLVDDSEHAGDSTHSHRWTSLELVKGTYTTDDSPSDIAEIRLDKVVPLKENVKYAVRLRNYGSRTANGDGGMTTVQCPDGVTFTFSTCSLSSNGTNQTRGQIPQILYYRSEFDGDLQSQLLSKANEEDKNCSRALSVVSTVVRASKDLLHRALAVDADDIPELLSSSSLFSMLLPLIIAYIGPVAAAIPKVAVEVFGLVQQLLPSVAILNQKYAPPAFNPNQSTDSTTGNQPEQGLSACTTSSHYAVIESEHPYKPACVMHYKVTFPECVRWMTIEFDPQCGTAQSEDVLRLLIPVRTVQNSGYGPKLTSVHENLNSWIELKKFSGSSGWPTMVLVLPGNEALFSLETASDYVKDDKASFYGFKCFAIGYEFSPGPDEGVIQLEKELANLGGVCAAALMKKDLALPIGNELEEDLEILEEAALQVCKTHSGILGKGLALSHSPTILEALEGNLPLQIQSNEQSFLDDFIACVPGSSGGRLARWLQPDSYADPQKTSLILNKDDIRCGWPTTITVQTKDQYGDVVHVPNMKVEVKAVPVSQKKMSLQQDQAKKPQRIPGSPAVTAASSNTDMTYGGLASPKLDVSYEPMIVKEARYIAITMMKVYENYSFEELRFASPTPKRPSENMLIRVNNDGTYCANWTPGAIGLYTLHVTIDGIEIDAGLEVKVKDPPKGMIPPGTQLVKPKSEPQPNKVRKFVAKDSAGLRIRSHPSLQSEQIGIVKVNGTITFIDEIHNDDGVWLRLNDETIKKYVPNMNGYTEAWCLSFNQHLGKSLLVPVDESKTNTDDFFKDINSCCPQEATMQEQDMPFLRGGPGMYKVVKTGPSGHNIRSCPNLRGIPIGMLVLGNKVKAVGEVTNSEGTWVQLDQNSMVEFCESDEGEAWSLARDRGGNQYLRHEDEQALLDQNSQTPPPSPFSVQAFNKGASCSAQGFDYGLGNSKVLTVLPTAGDQLSAILNSIQSRPNLPAPSIFDQAAKPPSSLVHSPFVFGQPLSFQQPQLQKSPSRNLASRERIYKNYGVAGPASALSSLSHKLKGDRGNISTSSKPASTSGKSELSSKHSRSLKPDGRMSRTTADQKKPRGTESLSASESLILKSDAAKLRSDSHSRSLSPNHNTLQTLKSDGRMPSSSRAESPGPGSRLSSPKPKTLPANRSSPSGASSPRSSSPHDKNLPQKSTAPVKTKLDPPRERSKSDSYTLDPDTLRKKKMPLTEPLRGRSTSPKPKSVPKDSTDSPGSENRAPSPHVVQENLHSEVVEVCTSSTLKTNSLTDSTCDDSSEFKSVDEGSNKVHFSIGKAPLKDEQEMRASPKISRKCANRHTRPKKEKSSFLFKGDGSKPLEPAKQAMSPSVAECARAVFASFLWHEGIVHDAMACSSFLKFHPELSKEHAPIRSSLNSQQPTEEKETKLKNRHSLEISSALNMFNIAPHGPDISKMGSINKNKVLSMLKEPPLHEKCEDGKTETTFEMSMHNTMKSKSPLPLTLQHLVAFWEDISLATIKAASQNMIFPSPGSCAVLKKKECEKENKKSKKEKKKKEKAEVRPRGNLFGEMAQLAVGGPEKDTICELCGESHPYPVTYHMRQAHPGCGRYAGGQGYNSIGHFCGGWAGNCGDGGIGGSTWYLVCDRCREKYLREKQAAAREKVKQSRRKPMQVKTPRALPTMEAHQVIKANALFLLSLSSAAEPSILCYHPAKPFQSQLPSVKEGISEDLPVKMPCLYLQTLARHHHENFVGYQDDNLFQDEMRYLRSTSVPAPYISVTPDASPNVFEEPESNMKSMPPSLETSPITDTDLAKRTVFQRSYSVVASEYDKQHSILPARVKAIPRRRVNSGDTEVGSSLLRHPSPELSRLISAHSSLSKGERNFQWPVLAFVIQHHDLEGLEIAMKQALRKSACRVFAMEAFNWLLCNVIQTTSLHDILWHFVASLTPAPVEPEEEEDEENKTSKENSEQEKDTRVCEHPLSDIVIAGEAAHPLPHTFHRLLQTISDLMMSLPSGSSLQQMALRCWSLKFKQSDHQFLHQSNVFHHINNILSKSDDGDSEESFSISIQSGFEAMSQELCIVMCLKDLTSIVDIKTSSRPAMIGSLTDGSTETFWESGDEDKNKTKNITINCVKGINARYVSVHVDNSRDLGNKVTSMTFLTGKAVEDLCRIKQVDLDSRHIGWVTSELPGGDNHIIKIELKGPENTLRVRQVKVLGWKDGESTKIAGQISASVAQQRNCEAETLRVFRLITSQVFGKLISGDAEPTPEQEEKALLSSPEGEEKVYNATSDADLKEHMVGIIFSRSKLTNLQKQVCAHIVQAIRMEATRVREEWEHAISSKENANSQPNDEDASSDAYCFELLSMVLALSGSNVGRQYLAQQLTLLQDLFSLLHTASPRVQRQVTSLLRRVLPEVTPSRLASIIGVKSLPPADISDIIHSTEKGDWNKLGILDMFLGCIAKALTVQLKAKGTTITGTAGTTVGKGVTTVTLPMIFNSSYLRRGESHWWMKGSTPTQISEIIIKLIKDMAAGHLSEAWSRVTKNAIAETIIALTKMEEEFRSPVRCIATTRLWLALASLCVLDQDHVDRLSSGRWMGKDGQQKQMPMCDNHDDGETAAIILCNVCGNLCTDCDRFLHLHRRTKTHQRQVFKEEEEAIKVDLHEGCGRTKLFWLMALADSKTMKAMVEFREHTGKPTTSSSEACRFCGSRSGTELSAVGSVCSDADCQEYAKIACSKTHPCGHPCGGVKNEEHCLPCLHGCDKSATSLKQDADDMCMICFTEALSAAPAIQLDCSHIFHLQCCRRVLENRWLGPRITFGFISCPICKNKINHIVLKDLLDPIKELYEDVRRKALMRLEYEGLHKSEAITTPGVRFYNDPAGYAMNRYAYYVCYKCRKAYFGGEARCDAEAGRGDDYDPRELICGACSDVSRAQMCPKHGTDFLEYKCRYCCSVAVFFCFGTTHFCNACHDDFQRMTSIPKEELPHCPAGPKGKQLEGTECPLHVVHPPTGEEFALGCGVCRNAHTF

SEQ ID NO: 55016 - protein, 131 aa, Homo sapiens
MDSISLEDVAVNFTLEEWALLDPGQRNIYRDVMRATFKNLACIGEKWKDQDIEDEHKNQGRNLRSPMVEALCENKEDCPCGKSTSQIPDLNTNLETPTGLKPCDCSVCGEVFMHQVSLNRHMRSHTEQKPN

SEQ ID NO: 55017 - protein, 488 aa, Homo sapiens
MEPLRAPALRRLLPPLLLLLLSLPPRARAKYVRGNLSSKEDWVFLTRFCFLSDYGRLDFRFRYPELPVPNISGLQAKCCQNILLYFDDPSQWPAVYKAGDKDCLAKESVIRPENNQVINLTTQYAWSGCQVVSEEGTRYLSCSSGRSFRSVRERWWYIALSKCGGDGLQLEYEMVLTNGKSFWTRHFSADEFGILETDVTFLLIFILIFFLSCYFGYLLKGRQLLHTTYKMFMAAAGVEVLSLLFFCIYWGQYATDGIGNESVKILAKLLFSSSFLIFLLMLILLGKGFTVTRGRISHAGSVKLSVYMTLYTLTHVVLLIYEAEFFDPGQVLYTYESPAGYGLIGLQVAAYVWFCYAVLVSLRHFPEKQPFYVPFFAAYTLWFFAVPVMALIANFGIPKWAREKIVNGIQLGIHLYAHGVFLILPFLFCIPTAFPTLLDLSTLPLPLPKFCHHRPLFRKKHLGWHRVKLLGSWVGNRRVQHHIFFFFF

SEQ ID NO: 55018 - protein, 20 aa, Homo sapiens
  MOD_RES (1)..(1): Any amino acid
XHGVKGQKVSCRNLNHNISL

SEQ ID NO: 55019 - protein, 99 aa, Homo sapiens
MKFITEIWHPNVDKNGDVCISILHEPGEDKYGYEKPEERWLPIHTVETIMISVISMLADPNGDSPANVDAAKEWREDRNGEFKRKVARCVRKSQETAFE

SEQ ID NO: 55020 - protein, 104 aa, Homo sapiens
MSLLSLPWLGLRPVATSPWLLLLLVVGSWLLARILAWTYAFYNNCRRLQCFPQPPKRNWFWGHLGLITPTEEGLKNSTQMSATYSQGFTVPEALAGRRDTAEWR

SEQ ID NO: 55021 - protein, 182 aa, Homo sapiens
  MOD_RES (1)..(1): Any amino acid
XLYTPYHKDVAGMGQSLSPLSSSGLGSIHNSQQGLPHYAHPGAAMPTDKMLTPNGFEAHHPAMLGRHGEQHLTPTSAGMVPINGLPPHHPHAHLNAQGHGQLLGTAREPNPSVTGAQAIFAQRVLCRSQGTLSDLLRNPKPWSKLKSGRETFRRMWKWLQEPEFQRMSALRLAGTAREARTA

SEQ ID NO: 55022 - protein, 328 aa, Homo sapiens
MAVAIAAARVWRLNRGLSQAALLLLRQPGARGLARSHPPRQQQQFSSLDDKPQFPGASAEFIDKLEFIQPNVISGIPIYRVMDRQGQIINPSEDPHGRISFYMTNYGEEGTHVGSAAALDNTDLVFGQYREAGVLMYRDYPLELFMAQCYGNISDLGKGRQMPVHYGCKERHFVTISSPLATQIPQAVGAAYAAKRANANRVVICYFGEGAASEGDAHAGFNFAATLECPIIFFCRNNGYAISTPTSEQYRGDGIAARGPGYGIMSIRVDGNDVFAVYNATKEARRRAVAENQPFLIEAMTYRIGHHSTSDDSSAYRSVDEVNYWDKQ

SEQ ID NO: 55023 - protein, 339 aa, Homo sapiens
  MOD_RES (1)..(1): Any amino acid
XGDIAALLIAAGADVNAHAKGAFFNPKYQHEGFYFGETPLALAACTNQPEIVQLLMEHEQTDITSRDSRGNNILHALVTVAEDFKTQNDFVKRMYDMILLRSGNWELETTRNNDGLTPLQLAAKMGKAEILKYILSREIKEKRLRSLSRKFTDWAYGPVSSSLYDLTNVDTTTDNSVLEITVYNTNIDNRHEMLTLEPLHTLLHMKWKKFAKHMFFLSFCFYFFYNITLTLVSYYRPREEEAIPHPLALTHKMGWLQLLGRMFVLIWAMCISVKEGIAIFLLRPSDLQSILSDAWFHFVLVPRLPRAGHGPGLGEHALLYAGFPVHGHVQRHDPEGHFA

SEQ ID NO: 55024 - protein, 151 aa, Homo sapiens
MTQDRPLLAVQEALKKCFPVVEEQQGLWQSALRDCQPLLSSLSNLAEQLQAAQNLRFEDVPALRAFPDLKERLRRKQLVAGDIVLDKLGERLAILLKVRDMVSSHVERVFQIYEQHADTVGIDAVLQPSAVSPSVADMLEWLQDIERHYRK

SEQ ID NO: 55025 - protein, 159 aa, Homo sapiens
MPQAFLLGSIHEPAGALMEPQPCPGSLAESFLEEELRLNAELSQLQFSEPVGIIYNPVEYAWEPHRNYVTRYCQGPKEVLFLGMNPGPFGMAQTGVPFGEVSMVRDWLGIVGPVLTPPQEHPKRPVLGLECPQSEANKGWEAVAKERLNELGLLPLLLK

SEQ ID NO: 55026 - protein, 1400 aa, Homo sapiens
  MOD_RES (1)..(1): Any amino acid
XPPPPPPPMWNPMIPAFDLFQGNHGFVAPVVTTAAHWRSVNYTFPPSVISHTSPTKVWRNKDGTSAYQVQETPVSQVVRKKTSYVGLVLVLLRGLPGSGKSFLARTLQEDNPSGVILSTDDYFYINGQYQFDVKYLGEAHEWNQNRAKEAFEKKISPIIIDNTNLQAWEMKPYVALSQKHKYKVLFREPDTWWKFKPKELARRNIHGVSKEKITRMLEHYQRFVSVPIIMSSSVPEKIERIELCAYSCEDRSTSPRDDEDIISEKEENILSLSLKHLEFTEEKNLDVTKETMLPENVAYLSNADLNKRRKEISDMNPSIQSALILETPHMYFSDSESKLQATDKSENEQIEMVAVKGYSKTDTDSSMERVSPSTCCSENNQEDCDLANSGPLQNEKSSPGEIVEERATVTKKAFGKQKSKSTLEKFPRHELSNFVGDWPVDKTIGQRTKRNRKTEKTSSVQSDKKYNYPQSHKLVNSVSVNTDCVQQRGSPHESVEDGRKSQCDDASEPLNSYKYDAYKNIDKNSFNIMGDWPSSDSLAQREHRSRMPKTGLSEPNLEIGTNDKMNEISLSTAHEACWGTSSQKLKTLGSSNLGSSEMLLSEMTCESQTCLSKKSHGQHTSLPLTFTNSAPTVSGVVEPQTLAECQEQMPKRDPGKEVGMCTQTEPQDFALLWKIEKNKISISDSIKVLTGRLDGFKPKVFNINTKSDVQEAIPYRVMYDKSTFVEESELTSADESENLNILCKLFGSFSLEALKDLYERCNKDIIWATSLLLDSETKLCEDTEFENFQKSCDGSQIGPFSLGLNLKEIISQRGTLENSNSPVPEFSHGIGISNADSQSTCDAERGNSEQAEMRAVTPENHESMTSIFPSAAVGLKNNNDILPNSQEELLYSSKQSFPGILKATTPKDMSETEKNLVVTETGDNIHSPSHFSDIFNFVSSTSNLELNEEIYFTDSLEIKRNENFPKDYVKFSDEEEFMNEDEKEMKEILMAGSSLSAGVSGEDKTEILNPTPAMAKSLTIDCLELALPPELAFQLNELFGPVGIDSGSLTVEDCVVHIDLNLAKVIHEKWKESVMERQRQEEVSCGKFMQDPSLVGHTGLDNPEQKSSQRTGKKLLKTLTASEMLPLLDHWNTQTKKVSLREIMSEEIALQEKHNLKRETLMFEKDCATKLKEKQLFKIFPAINQNFLVDIFKDHNYSLEHTVQFLNCVLEGDPVKTVVAQEFVHQNENVTSHTGQKSKEKKDFEYPDYDDYRAEAFLHQQKRMECYSKAKEAYRIGKKNVATFYAQQGTLHEQKMKEANHLAAIEIFEKVNASLLPQNVLDLHGLHVDEALEHLMRVLEKKTEEFKQNGGKPYLSVITGRGNHSQGGVARIKPAVIKYLISHSFRFSEIKPGCLKVMLK

SEQ ID NO: 55027 - protein, 118 aa, Homo sapiens
MASSAAGCVVIVGSGVIGRSWAMLFASGGFQVKLYDIEQQQIRNALENIRKEMKLLEQAGSLKGSLSVEEQLSLISGCPNIQEAVEGAMHIQYGHSSLLHWPLHPRSTKETGSWTPKS

SEQ ID NO: 55028 - protein, 119 aa, Homo sapiens
  MOD_RES (1)..(1): Any amino acid
XPSTVINQNETFANIIFKPTVVQQARIAQNGILGDFIIRYDVNREQSIGDIQVLNGYFVHYFAPKDLPPLPKNVVFVLDSSASMVGTKLRQDIGFSLAVQNWVPKGYLDISCVTLQVHV

SEQ ID NO: 55029 - protein, 361 aa, Homo sapiens
MGRDQRAVAGPALRRWLLLGTVTVGFLAQSVLAGVKKFDVPCGGRDCSGGCQCYPEKGGRGQPGPVGPQGYNGPPGLQGFPGLQGRKGDKGERGAPGVTGPKGDVGARGVSGFPGADGIPGHPGQGGPRGRPGYDGCNGTQGDSGPQGPPGSEGFTGPPGPQGPKGQKGEPYALPKEERDRYRGEPGEPGLVGFQGPPGRPGHVGQMGPVGAPGRPGPPGPPGPKGQQGNRGLGFYGVKGEKGDVGQPGPNGIPSDTLHPIIAPTGVTFHPDQYKGEKGSEGEPGIRGISLKGEEGIMGFPGLRGYPGLSGEKGSPGQKGSRGLDGYQGPDGPRGPKGEAGDPGPPGLPAYSPHPSLAKGV

SEQ ID NO: 55030 - protein, 152 aa, Homo sapiens
  MOD_RES (1)..(1): Any amino acid
XHSVSGILVCQAGCVLEELSRYVEERDFIMPLDLGAKGSCHIGGNVATNAGGLRFLRYGSLHGTVLGLEVVLADGTVLDCLTSLRKDNTGYDLKQLFIGSEGTLGIITTVSILCPPKPRAVNVAFLGFLCSALIPLQLQSPVCRPPVVLGAR

SEQ ID NO: 55031 - protein, 263 aa, Homo sapiens
MAQTPAFDKPKVELHVHLDGSIKPETILYYGRRRGIALPANTAEGLLNVIGMDKPLTLPDFLAKFDYYMPAIAGCREAIKRIAYEFVEMKAKEGVVYVEVRYSPHLLANSKVEPIPWNQAEGDLTPDEVVALVGQGLQEGERDFGVKARSILCCMRHQPNWSPKVVELCKKYQQQTVVAIDLAGDETIPGSSLLPGHVQAYQEAVKSGIHRTVHAGEVGSAEVVKEAVDILKTERLGHGYHTLEDQALYNRLRQENMHFEAQK

SEQ ID NO: 55032 - protein, 1642 aa, Homo sapiens
CPPHSHYEACSYGCPLSCGDLPVPEGCESACREGCVCDAGFVLSGDTCVPVGQCGCLHDDRYYPLGQTFYPGPGCDSLCRCREGGEVSCEPSSCGPHETCRPSGGSLGCVAVGSTTCQASGDPHYTTFDGHRFDFMGTCVYVLAQTCGTRPGLHRFAVLQENVAWGNGRVSVTRVITVQVANFTLRLEQRQWKVTVNGVDMKLPVVLANGQIRASQHGSDVVIETDFGLRVAYDLVYYVRVTVPGNYYQLMCGLCGNYNGDPKDDFQKPNGSQAGNANEFGNSWEEVVSDSPCLPPPTCPPGSEGCIPSEECPPELEKKYQKEEFCGLLSSPTGPLSSCHKLVDPQGPLKDCIFDLCLGGGNLSILCSNIHAYVSACQVAGGHVEPWRNETFCPMECPQNSHYELCADTCSLGCSALSAPLQCPDGCAEGCQCDSGFLYNGQACVPIQQCGCYHNGAYYEPEQTVLIDNCRQQCTCHAGKVVVCQEHSCKPGQVCQPSGGILSCVTKDPCHGVTCRPQETCKEQGGQGVCLPNYEATCWLWGDPHYHSFDGRKFDFQGTCNYVLATTGCPGVSTQGLTPFTVTTKNQNRGNPAVSYVRVVTVAALGTNISIHKDEIGKVRVNGVLTALPVSVADGRISVTQGASKALLVADFGLQVSYDWNWRVDVTLPSSYHGAVCGLCGNMDRNPNNDQVFPNGTLAPSIPIWGGSWRAPGWDPLCWDECRGSCPTCPEDRLEQYEGPGFCGPLAPGTGGPFTTCHAHVPPESFFKGCVLDVCMGGGDRDILCKALASYVAACQAAGVVIEDWRAQVGCEITCPENSHYEVCGPPCPASCPSPAPLTTPAVCEGPCVEGCQCDAGFVLSADRCVPLNNGCGCWANGTYHEAGSEFWADGTCSQWCRCGPGGGSLVCTPASCGLGEVCGLLPSGQHGCQPVSTAECQAWGDPHYVTLDGHRFDFQGTCEYLLSAPCHGPPLGAENFTVTVANEHRGSQAVSYTRSVTLQIYNHSLTLSARWPRKLQVDGVFVTLPFQLDSLLHAHLSGADVVVTTTSGLSLAFDGDSFVRLRVPAAYAGSLCGLCGNYNQDPADDLKAVGGKPAGWQVGGAQGCGECVSKPCPSPCTPEQQESFGGPDACGVISATDGPLAPCHGLVPPAQYFQGCLLDACQVQGHPGGLCPAVATYVAACQAAGAQLREWRRPDFCPFQCPAHSHYELCGDSCPGSCPSLSAPEGCESACREGCVCDAGFVLSGDTCVPVGQCGCLHDDRYYPLGQTFYPGPGCDSLCRCREGGEVSCEPSSCGPHETCRPSGGSLGCVAVGSTTCQASGDPHYTTFDGHRFDFMGTCVYVLAQTCGTRPGLHRFAVLQENVAWGNGRVSVTRVITVQVANFTLRLEQRQWKVTVNGVDMKLPVVLANGQIRASQHGSDVVIETDFGLRVAYDLVYYVRVTVPGNYYQLMCGLCGNYNGDPKDDFQKPNGSQAGNANEFGNSWEEVVPDSPCLPPPTCPPGSAGCIPSDKCPPELEKKYQKEEFCGLLSSPTGPLSSCHKLVDPQGPLKDCIFDLCLGGGNLSILCSNIHAYVSACQAAGGHVEPWRNETFCPMECPQNSHYELCADTCSLGCSALSAPLQCPDGCAEGCQCDSGFLYNG

SEQ ID NO: 55033 - protein, 422 aa, Homo sapiens
MGGPRAWALLCLGLLLPGGGAAWSIGAAPFSGRRNWCSYVVTRTISCHVQNGTYLQRVLQNCPWPMSCPGSSYRTVVRPTYKVMYKIVTAREWRCCPGHSGVSCEEVAASSASLEPMWSGSTMRRMALRPTAFSGCLNCSKVSELTERLKVLEAKMTMLTVIEQPVPPTPATPEDPAPLWGPPPAQGSPGDGGLQDQVGAWGLPGPTGPKGDAGSRGPMGMRGPPGPQGPPGSPGRAGAVGTPGERGPPGPPGPPGPPGPPAPVGPPHARISQHGDPLLSNTFTETNNHWPQGPTGPPGPPGPMGPPGPPGPTGVPGSPGHIGLRGEPGPQGSAGQRGEPGPKGDPGEKSHWGEGLHQLREALKILAERVLILETMIGLYEPELGSGAGPAGTGTPSLLRGKRGGHATNYRIVAPRSRDERG

SEQ ID NO: 55034 - protein, 134 aa, Homo sapiens
MKSHPRKKAKWEKEKHEDGVKWRQLEHKGPYFAPPYEPLPDGVRFFYEGRPVRLSVAAEEVATFYGRMLDHEYTTKEVFRKNFFNDWRKEMAVEEREVIKSLDKCDFTEIHRYFVDKAAARKVLSREEKQKLKE

SEQ ID NO: 55035 - protein, 81 aa, Homo sapiens
MDIIFGRNRKEQLEPVRAKVTGKIPAWLQGTLLRNGPGMHTVGESRYNHWFDGLALLHSFTIRDELSPTCLTPSPISPTTA

SEQ ID NO: 55036 - protein, 145 aa, Homo sapiens
MSQDTEVDMKEVELNELEPEKQPMNAASGAAMSLAGAEKNGLVKIKVAEDEAEAAAAAKFTGLSKEELLKVAGSPGWVRTRWALLLLFWLGWLGMLAGLKGRLDYLSSLKVKGLVLGPIHKNQKDDVAQTDLLQIDPNFGSKEDF

SEQ ID NO: 55037 - protein, 4597 aa, Homo sapiens
MSEPGGGGGEDGSAGLEVSAVQNVADVSVLQKHLRKLVPLLLEDGGEAPAALEAALEEKSALEQMRKFLSDPQVHTVLVERSTLKEDVGDEGEEEKEFISYNINIDIHYGVKSNSLAFIKRTPVIDADKPVSSQLRVLTLSEDSPYETLHSFISNAVAPFFKSYIRESGKADRDGDKMAPSVEKKIAELEMGLLHLQQNIEIPEISLPIHPMITNVAKQCYERGEKPKVTDFGDKVEDPTFLNQLQSGVNRWIREIQKVTKLDRDPASGTALQEISFWLNLERALYRIQEKRESPEVLLTLDILKHGKRFHATVSFDTDTGLKQALETVNDYNPLMKDFPLNDLLSATELDKIRQALVAIFTHLRKIRNTKYPIQRALRLVEAISRDLSSQLLKVLGTRKLMHVAYEEFEKVMVACFEVFQTWDDEYEKLQVLLRDIVKRKREENLKMVWRINPAHRKLQARLDQMRKFRRQHEQLRAVIVRVLRPQVTAVAQQNQGEVPEPQDMKVAEVLFDAADANAIEEVNLAYENVKEVDGLDVSKEGTEAWEAAMKRYDERIDRVETRITARLRDQLGTAKNANEMFRIFSRFNALFVRPHIRGAIREYQTQLIQRVKDDIESLHDKFKVQYPQSQACKMSHVRDLPPVSGSIIWAKQIDRQLTAYMKRVEDVLGKGWENHVEGQKLKQDGDSFRMKLNTQEIFDDWARKVQQRNLGVSGRIFTIESTRVRGRTGNVLKLKVNFLPEIITLSKEVRNLKWLGFRVPLAIVNKAHQANQLYPFAISLIESVRTYERTCEKVEERNTISLLVAGLKKEVQALIAEGIALVWESYKLDPYVQRLAETVFNFQEKVDDLLIIEEKIDLEVRSLETCMYDHKTFSEILNRVQKAVDDLNLHSYSNLPIWVNKLDMEIERILGVRLQAGLRAWTQVLLGQAEDKAEVDMDTDAPQVSHKPGGEPKIKNVVHELRITNQVIYLNPPIEECRYKLYQEMFAWKMVVLSLPRIQSQRYQVGVHYELTEEEKFYRNALTRMPDGPVALEESYSAVMGIVSEVEQYVKVWLQYQCLWDMQAENIYNRLGEDLNKWQALLVQIRKARGTFDNAETKKEFGPVVIDYGKVQSKVNLKYDSWHKEVLSKFGQMLGSNMTEFHSQISKSRQELEQHSVDTASTSDAVTFITYVQSLKRKIKQFEKQVELYRNGQRLLEKQRFQFPPSWLYIDNIEGEWGAFNDIMRRKDSAIQQQVANLQMKIVQEDRAVESRTTDLLTDWEKTKPVTGNLRPEEALQALTIYEGKFGRLKDDREKCAKAKEALELTDTGLLSGSEERVQVALEELQDLKGVWSELSKVWEQIDQMKEQPWVSVQPRKLRQNLDALLNQLKSFPARLRQYASYEFVQRLLKGYMKINMLVIELKSEALKDRHWKQLMKRLHVNWVVSELTLGQIWDVDLQKNEAIVKDVLLVAQGEMALEEFLKQIREVWNTYELDLVNYQNKCRLIRGWDDLFNKVKEHINSVSAMKLSPYYKVFEEDALSWEDKLNRIMALFDVWIDVQRRWVYLEGIFTGSADIKHLLPVETQRFQSISTEFLALMKKVSKSPLVMDVLNIQGVQRSLERLADLLGKIQKALGEYLERERSSFPRFYFVGDEDLLEIIGNSKNVAKLQKHFKKMFAGVSSIILNEDNSVVLGISSREGEEVMFKTPVSITEHPKINEWLTLVEKEMRVTLAKLLAESVTEVEIFGKATSIDPNTYITWIDKYQAQLVVLSAQIAWSENVETALSSMGGGGDAAPLHSVLSNVEVTLNVLADSVLMEQPPLRRRKLEHLITELVHQRDVTRSLIKSKIDNAKSFEWLSQMRFYFDPKQTDVLQQLSIQMANAKFNYGFEYLGVQDKLVQTPLTDRCYLTMTQALEARLGGSPFGPAGTGKTESVKALGHQLGRFVLVFNCDETFDFQAMGRIFVGLCQVGAWGCFDEFNRLEERMLSAVSQQVQCIQEALREHSNPNYDKTSAPITCELLNKQVKVSPDMAIFITMNPGYAGRSNLPDNLKKLFRSLAMTKPDRQLIAQVMLYSQGFRTAEVLANKIVPFFKLCDEQLSSQSHYDFGLRALKSVLVSAGNVKRERIQKIKREKEERGEAVDEGEIAENLPEQEILIQSVCETMVPKLVAEDIPLLFSLLSDVFPGVQYHRGEMTALREELKKVCQEMYLTYGDGEEVGGMWVEKVLQLYQITQINHGLMMVGPSGSGKSMAWRVLLKALERLEGVEGVAHIIDPKAISKDHLYGTLDPNTREWTDGLFTHVLRKIIDSVRGELQKRQWIVFDGDVDPEWVENLNSVLDDNKLLTLPNGERLSLPPNVRIMFEVQDLKYATLATVSRCGMVWFSEDVLSTDMIFNNFLARLRSIPLDEGEDEAQRRRKGKEDEGEEAASPMLQIQRDAATIMQPYFTSNGLVTKALEHAFQLEHIMDLTRLRCLGSLFSMLHQACRNVAQYNANHPDFPMQIEQLERYIQRYLVYAILWSLSGDSRLKMRAELGEYIRRITTVPLPTAPNIPIIDYEVSISGEWSPWQAKVPQIEVETHKVAAPDVVVPTLDTVRHEALLYTWLAEHKPLVLCGPPGSGKTMTLFSALRALPDMEVVGLNFSSATTPELLLKTFDHYCEYRRTPNGVVLAPVQLGKWLVLFCDEINLPDMDKYGTQRVISFIRQMVEHGGFYRTSDQTWVKLERIQFVGACNPPTDPGRKPLSHRFLRHVPVVYVDYPGPASLTQIYGTFNRAMLRLIPSLRTYAEPLTAAMVEFYTMSQERFTQDTQPHYIYSPREMTRWVRGIFEALRPLETLPVEGLIRIWAHEALRLFQDRLVEDEERRWTDENIDTVALKHFPNIDREKAMSRPILYSNWLSKDYIPVDQEELRDYVKARLKVFYEEELDVPLVLFNEVLDHVLRIDRIFRQPQGHLLLIGVSGAGKTTLSRFVAWMNGLSVYQIKVHRKYTGEDFDEDLRTVLRRSGCKNEKIAFIMDESNVLDSGFLERMNTLLANGEVPGLFEGDEYATLMTQCKEGAQKEGLMLDSHEELYKWFTSQVIRNLHVVFTMNPSSEGLKDRAATSPALFNRCVLNWFGDWSTEALYQVGKEFTSKMDLEKPNYIVPDYMPVVYDKLPQPPSHREAIVNSCVFVHQTLHQANARLAKRGGRTMAITPRHYLDFINHYANLFHEKRSELEEQQMHLNVGLRKIKETVDQVEELRRDLRIKSQELEVKNAAANDKLKKMVKDQQEAEKKKVMSQEIQEQLHKQQEVIADKQMSVKEDLDKVEPAVIEAQNAVKSIKKQHLVEVRSMANPPAAVKLALESICLLLGESTTDWKQIRSIIMRENFIPTIVNFSAEEISDAIREKMKKNYMSNPSYNYEIVNRASLACGPMVKWAIAQLNYADMLKRVEPLRNELQKLEDDAKDNQQKANEVEQMIRDLEASIARYKEEYAVLISEAQAIKADLAAVEAKVNRSTALLKSLSAERERWEKTSETFKNQMSTIAGDCLLSAAFIAYAGYFDQQMRQNLFTTWSHHLQQANIQFRTDIARTEYLSNADERLRWQASSLPADDLCTENAIMLKRFNRYPLIIDPSGQATEFIMNEYKDRKITRTSFLDDAFRKNLESALRFGNPLLVQVEFPPDLCSRVTFVNFTVTRSSLQSQCLNEVLKAERPDVDEKRSDLLKLQGEFQLRLRQLEKSLLQALNEVKGRILDDDTIITTLENLKREAAEVTRKVEETDIVMQEVETVSQQYLPLSTACSSIYFTMESLKQIHFLYQYSLQFFLDIYHNVLYENPNLKGVTDHTQRLSIITKDLFQVAFNRVARGMLHQDHITFAMLLARIKLKGTVGEPTYDAEFQHFLRGNEIVLSAGSTPRIQGLTVEQAEAVVRLSCLPAFKDLIAKVQADEQFGIWLDSSSPEQTVPYLWSEETPATPIGQAIHRLLLIQAFRPDRLLAMAHMFVSTNLGESFMSIMEQPLDLTHIVGTEVKPNTPVLMCSVPGYDASGHVEDLAAEQNTQITSIAIGSAEGFNQADKAINTAVKSGRWVMLKNVHLAPGWLMQLEKKLHSLQPHACFRLFLTMEINPKVPVNLLRAGRIFVFEPPPGVKANMLRTFSSIPVSRICKSPNERARLYFLLAWFHAIIQERLRYAPLGWSKKYEFGESDLRSACDTVDTWLDDTAKGRQNISPDKIPWSALKTLMAQSIYGGRVDNEFDQRLLNTFLERLFTTRSFDSEFKLACKVDGHKDIQMPDGIRREEFVQWVELLPDTQTPSWLGLPNNAERVLLTTQGVDMISKMLKMQMLEDEDDLAYAETEKKTRTDSTSDGRPAWMRTLHTTASNWLHLIPQTLSHLKRTVENIKDPLFRFFEREVKMGAKLLQDVRQDLADVVQVCEGKKKQTNYLRTLINELVKGILPRSWSHYTVPAGMTVIQWVSDFSERIKQLQNISLAAASGGAKELKNIHVCLGGLFVPEAYITATRQYVAQANSWSLEELCLEVNVTTSQGATLDACSFGVTGLKLQGATCNNNKLSLSNAISTALPLTQLRWVKQTNTEKKASVVTLPVYLNFTRADLIFTVDFEIATKEDPRSFYERGVAVLCTE

SEQ ID NO: 55038 - protein, 50 aa, Homo sapiens
  MOD_RES (1)..(1): Any amino acid
XDIFLVRGGMRAVEFKVVETDPSPYCIVAPDTVIHCEGEPIKREVRRVLE

SEQ ID NO: 55039 - protein, 591 aa, Homo sapiens
MATKARVMYDFAAEPGNNELTVNEGEIITITNPDVGGGWLEGRNIKGERGLVPTDYVEILPSDGKDQFSCGNSVADQAFLDSLSASTAQASSSAASNNHQVGSGNDPWSAWSASKSGNWESSEGWGAQPEGAGAQRNTNTPNNWDTAFGHPQAYQGPATGDDDDWDEDWDGPKSSSYFKDSESADAGGAQRGNSRASSSSMKIPLNKFPGFAKPGTEQYLLAKQLAKPKEKIPIIVGDYGPMWVYPTSTFDCVVADPRKGSKMYGLKSYIEYQLTPTNTNRSVNHRYKHFDWLYERLLVKFGSAIPIPSLPDKQVTGRFEEEFIKMRMERLQAWMTRMCRHPVISESEVFQQFLNFRDEKEWKTGKRKAERDELAGVMIFSTMEPEAPDLDLVEIEQKCEAVGKFTKAMDDGVKELLTVGQEHWKRCTGPLPKEYQKIGKALQSLATVFSSSGYQGETDLNDAITEAGKTYEEIASLVAEQPKKDLHFLMECNHEYKGFLGCFPDIIGTHKGAIEKVKESDKLVATSKITLQDKQNMVKRVSIMSYALQAEMNHFHSNRIYDYNSVIRLYLEQQVQFYETPLCASVHQERC

SEQ ID NO: 55040 - protein, 229 aa, Homo sapiens
MEAATTLHPGPRPALPLGGPGPLGEFLPPPECPVFEPSWEEFADPFAFIHKIRPIAEQTGICKVRPPPDWQPPFACDVDKLHFTPRIQRLNELEAQTRVKLNFLDQIAKYWELQGSTLKIPHVERKILDLFQLNKGNEKALIVFGRPCFRRPYFGGARWLTPVIPTLWEAKAGESPEDRSLRPAWPTWRNLVSTKNTKICWAWWRVPVIPATREAEAGEPLEPGRWRLQ

SEQ ID NO: 55041 - protein, 86 aa, Homo sapiens
MNSLLIGELSPEQPSFEPTKNKELTDEFRELRATVERMGLMKANHVFFLLYLLHILLLDGAAWLTLWVFGTSFLPFLLCAVLLSAV

SEQ ID NO: 55042 - protein, 123 aa, Homo sapiens
MDSRVSGTTSNGETKPVYPVMEKKEEDGTLERGHWNNKMEFVLSVAGEIIGLGNVWRFPYLCYKNGGGAFFIPYLVFLFTCGIPVFLLETALGQYTSQGGVTAWRKICPIFEVSPQALAMPPR

SEQ ID NO: 55043 - protein, 133 aa, Homo sapiens
MGTRRKVLVLGSGYISEPVLEYLSRDGNIEITVGSDMKNQIEQLGKKYNINPVSMDICKQEEKLGFLVAKQDLVISLLPYVLHPLVAKACITNKVNMVTASYITPALKELEKSFPFSSFHLLQCGRCWHHNHW

SEQ ID NO: 55044 - protein, 189 aa, Homo sapiens
MTPEFDEEVVFEVRPVGRTCRSEDGGKSARENSPLYQYLQDLGHTDFEICSSLSPKTEKCTTEGQQKPPTRVLPKQGILLKVAETIKSWIFFSQCNKKDDLLHKLDIGFRLDSLHTILQQEVLLQEDVELIELLDPSILSAGQSQQQENGHLPTLCSLATPNIWDLSMLFAFISLLVMLPTWWIVSSWL

SEQ ID NO: 55045 - protein, 6464 aa, Homo sapiens
MKGARWRRVPWVSLSCLCLCLLPHVVPGTTEDTLITGSKTPAPVTSTGSTTATLEGQSTAASSRTSNQDISASSQNHQTKSTETTSKAQTDTLTQMMTSTLFSSPSVHNVMETVTQETAPPDEMTTSFPSSVTNTLMMTSKTITMTTSTDSTLGNTEETSTAGTESSTPVTSAVSITAGQEGQSRTTSWRTSIQDTSASSQNHWTRSTQTTRESQTSTLTHRTTSTPSFSPSVHNVTGTVSQKTSPSGETATSSLCSVTNTSMMTSEKITVTTSTGSTLGNPGETSSVPVTGSLMPVTSAALVTVDPEGQSPVTFSRTSTQDTTAFSKNHQTQSVETTRVSQINTLNTLTPVTTSTVLSSPSGFNPSGTVSQETFPSGETTISSPSSVSNTFLVTSKVFRMPISRDSTLGNTEETSLSVSGTISAITSKVSTIWWSDTLSTALSPSSLPPKISTAFHTQQSEGAETTGRPHERSSFSPGVSQEIFTLHETTTWPSSFSSKGHTTWSQTELPSTSTGAATRLVTGNPSTGAAGTIPRVPSKVSAIGEPGEPTTYSSHSTTLPKTTGAGAQTQWTQETGTTGEALLSSPSYSVTQMIKTATSPSSSPMLDRHTSQQITTAPSTNHSTIHSTSTSPQESPAVSQRGHTQAPQTTQESQTTRSVSPMTDTKTVTTPGSSFTASGHSPSEIVPQDAPTISAATTFAPAPTGDGHTTQAPTTALQAAPSSHDATLGPSGGTSLSKTGALTLANSVVSTPGGPEGQWTSASASTSPDTAAAMTHTHQAESTEASGQTQTSEPASSGSRTTSAGTATPSSSGASGTTPSGSEGISTSGETTRFSSNPSRDSHTTQSTTELLSASASHGAIPVSTGMASSIVPGTFHPTLSEASTAGRPTGQSSPTSPSASPQETAAISRMAQTQRTRTSRGSDTISLASQATDTFSTVPPTPPSITSSGLTSPQTQTHTLSPSGSGKTFTTALISNATPLPVTYASSASTGHTTPLHVTDASSVSTGHATPLPVTDTSSESTGHATPLPVTSPSSVSTGHTTPLPVTDTSSESTGHVTPLPVTSLSSASTGDSTPLPVTDTSSASTGHVTPLPVTSLSSASTGDTTPLPVTDTSSASTGHATSLPVTDTSSVSTGHTTPLPVTDTSSASTGHATSLPVTDTSSVSTAHATPLPVTGLSSASTDDTTRLPVTDVSSASTGQAIPLPVTSPSSASTGDTTPLPVTDASSASTGDTTSLPVTIPSSASSGHTTSLPVTDASSVSTGHATSLLVTDASSVSTGDTTPLPVTDTNSASTGDTTPLHVTDASSVSTGHATSLPVTSLSSASTGDTTPLPVTSPSSASSGHTTPLPVTDASSVPTGHATSLPVTDASSVSTGHATPLPVTDASSVSTGHATPLPVTDTSSVSTGQATPLPVTSLSSASTGDTTPLPVTDTSSASTGQDTPLPVTSLSSVSTGDTTPLPVTSPSSASTGHATPLLVTDASSVSTGHATSLLVTDASSVSTGHATALHVTDASSLSTGDTTPLPVTSPSSASTGDTTPLPVTDTSSASTGHATSLPVTDTSSASTGHATPLPVTDTSSASTGQATPLPVTGPSSASTGHAIPLLVTDTSSASTGQATPLPVTSLSSASTGDTTPLPVTDASSVSTGHATSLPVTSLSSVSTGDTTPLPVTSPSSASSGHTTPLPVTDASSVSTGDTTPLPVTSPSSASSGHTTPLPVTSPSSASSGHTTPLPVTDASSASTGDTTPLPVTDTSSASTGHATHLPVTGLSSASTGDTTRLPVTNVSSASTGHATPLPVTSTSSASTGDTTPLPGTDTSSVSTGHTTPLLVTDASSVSTGDTTRLPVTSPSSASTGHTTPLPVTDTPSASTGDTTPLPVTNASSLSTRHTTSLHVTSPSSASTGHATSLPVTDTSSVSTGHATPLHVTSPSSASTGDTTPLPVTDTYSASTGQATPLPVTDTSSASTGDTTPLPVTDTSSASTGHATPLPVTNTSSVSTGHATPLHVTSPSSASTGHTTPLPVTDASSVSTGHATSLPVTDASSVFTGHATSLPVTIPSSASSGHTTPLPVTDASSVSTGHATSLPVTDASSVSTGHATPLPVTDASSVSTGHATPLPVTDTSSVSTGHATPLPLTSLSSVSTGDTTPLPVTDTSSASTGQATPLPVTSLSSVSTGDTTPLPVTDTSSASTGHATSLPVTDTSSASTGHATPLPDTDTSSASTGHATPLPVTDTSSASTGHATLLPVTDTSSASIGHATPLPVTDTSSISTGHATPLHVTSPSSASTGHATPLPVTDTSSASTGHANPLHVTSPSSASTGHATPLPVTDTSSASTGHATPLPVTSLSSVSTGDTTPLPVTSPSSASTGHTTPLPVTDTSSASTGQATALPVTSTSSASTGDTTPLPVTDTSSASTGQATPLPVTSLSSVSTGDTTPLPVTSPSSASTGHATPLLVTDASSASTGQATPLPVTDTSSAYTGDTTSLPVTDTSSSSTGDTTPLLVTETSSASTGHATPLHVTSPSSASTGDTTPVPVTDTSSVSTGHATPLPVTGLSSASTGDTTRLPVTDISSASTGQATPLPVTNTSSASTGHATPLPVTGLSSASTGDTTRLPVTDISSASTGQATPLPVTNTSSVSTGDTMPLPVTSPSSASTGHATPLPVTSTSSASTGHATPVPVTSTSSASTGHTTPLPVTDTSSASTGDTTPLPVTSPSSASTGHTTPLHVTIPSSASTGDTSTLPVTGASSASTGHATPLPVTDTSSVSTGHATPLPVTSFSSVSTGDTTPLPVTDTSSVSTGHATPLPVTSFSSVSTGDTTPLPVTDASSASTGHATPLPVTDTSSVSTGHATPLPLTSLSSVSTGDTTTLPVTDTSSVSTGHATPLPVTSFSSVSTGDTTPLPVTDASSASTGHATPLPVTDTSSVSTGHATPLPVTSLSSVSTGDTTPLPVTDASSASTGQATPLPVTSLSSVSTGDTTPLPVTIPSSASSGHTTSLPVTDTSSASTGQATPLPVTSLSSVSTGDTTPLLVTDASSVSTGHATPLPVTDTSSASTGDTTRLPVTDTSSASTGQATPLPVTSLSSVSTGDTTPLLVTNTSSVSRGHATSLPVTIPSSSSSGHTTPLPVTSTSSVSTGHVTPLPVTSTSSASTGHATSLPVTDTSSVSTGHATSLPVTDTSSVSTGHATPLPVTDASSVSTGHATPLPVTDASSASTGDTTPLPVTNTSSASTGQATPLPVTSLSSVSTGDTMPLPVTSPSSASTGHATPLPVTGLSSASTGDTTPLPVTDTSSASTGHVTPLPVTSLSSASTGDSTPLPVTDTSSASTGHVTPLPVTSLSSASTGDTTPLPVTDTSSASTGHATPLHVTDASSASTGQATLLPVTSLSSVSTGDTTPLPVTSPSSASTGHATPLLVTDTSSASTGHATPLPVTDASSVSTGHATSLPVTIRSSGSTGHTTPLPVTDTSSASTGQATSLLVTDTSSVSTGDTTPLPVTSTSSASTGHVTPLHVTSPSSASTGHATPLPVTSLSSASTGDTMPLPVTSPSSASTGDTTPLPVTDASSVSTGHTTPLPVTSPSSASTGHTTPLPVTDTTSASKGDTTPLPVTSPSSASTGHTTPLPVTDTSSASTGDTTPLPVTSPSSASTGHATPLPVTNASSLSTGHATPLHVTSPSSASTGHATPLPVTSTSSASTGHATSLPVTSTSSASTGHATPLPVTDNSSVSTGHATPLPVTGLSSATTDDTTRLPVTDVSSASTGQATPLPVTSLSSVSTGDTTPLPVTSPSSASTGHASPLLVTDASSASTGQATPLPVTDTSSVSTAHATPLPVTGLSSASTDDTTRLPVTDVSSASTGQAIPLPVTSPSSASTGDTTPLPVTDASSASTGDTTSLPVTIPSSASSGHTTSLPVTDASSVSTGHATSLLVTDASSVSTGDTTPLPVTDTNSASTGDTTPLHVTDASSVSTGHATSLPVTSLSSASTGDTTPLPVTSPSSASSGDTTPLPVTDTSSASTGHATHLPVTGLSSASTGDTTRLPVTNVSSASTGHATPLPVTSTSSASTGDTTPLPGTDTSSVSTGHTTPLLVTDASSVSTGDTTRLPVTSPSSASTGHTTPLHVTDASSVSTGHTTPLPVTDTSSASTGQATSLLVTDTSSVSTGDTTPLPVTSTSSASTGHVTPLHVTSPSSASTGHATPLPVTSLSSASTGDTTPLPVTDTSSVSTGHTTPLPVTSPSSASTGHTTPLPVTDTSSASKGDTTPLPVTSPSSASTGHTTPLPVTDTSSASTGDTTPLPVTNASSLSTGHATPLHVTSPSSASTGHATPLPVTSTSSASTGHATPLPVTSTSSASTGHATPLPVTDNSSVSTGHATPLPVTGLSSATTDDTTRLPVTDVSSASTGQATPLPVTSLSSVSTGDTTPLPVTSPSSASTGHASPLLVTDASSASTGQATPLPVTDTSSVSTAHATPLPVTGLSSASTDDTTRLPVTDVSSASTGQAIPLPVTSPSSASTGDTTPLPVTDASSASTGDTTSLPVTIPSSASSGHTTSLPVTDASSVSTGHATSLLVTDASSVSTGDTTPLPVTDTNSASTGDTTPLHVTDASSVSTGHATSLPVTSLSSASTGDTTPLPVTSPSSASSGHTTSLPVTDASSVSTGHATSLPVTIPSSASSGHTTPLPVTDASSVPTGHATSLPVTDASSVSTGHATPLPVTDASSVSTGHATPLPVTDTSSVSTGQATPLPVTSLSSASSTGDTTPLPVTDTSSASTGQDTPLPVTSLFSVSTGDTTPLPVTSPSSASTGHATHLLVTDASSVSTGHATSLLVTDASSVSTGHATALHVTDASSLSTGDTTPLPVTSPSSASTGDTTPLPVTDTSSVSTGHATSLPVTDTSSASTGHATSLPVTDTSSASTGQATPLPVTSPSSASTGHAIPLLVTDTSSASTGQATPLPVTSLSSASTGDTTPLPVTDASSVSTGHATSLPVTSLSSVSTGDTTPLPVTSPSSASTGHATPLHVTSPSSASTGHATPLPVTSLSSASTGDTTPLPVTSPSSASTGHATPLHVTDASSVSTGDTTPLPVTSPSSASSGHTTPLPVTDASSASTGDTTPLPVTDTSSASTGHATHLPVTGLSSASTGDTTRLPVTDVSSASTGHATPLPVTSTSSASTGDTTPLPGTDTSSVSTGHTTPLLVTDASSVSTGDTTRLPVTSPSSASTGHTTPLPVTDTPSASTGDTTPLPVTNASSLSTRHATSLHVTSPSSASTGHATPLPVTDTSAASTGHATPLPVTSTSSASTGDTTPLPVTDTSSASTGHATPLPVTNTSSVSTGHATPLHVTSPSSASTGHTTPLPVTDASSVSTGHATSLPVTDASSVSTGHATPLPVTDASSVSTGHATPLPLTSLSSVSTGDTTPLPVTDTSSASTGQATPLPVTSLSSVSTGDTTPLPVTDTSSASTGHATSLPVTDTSSASTGHATPLPVTDTSSISTGHATPLHVTSPSSASTGHATPLPVTDTSSASTGHATPLPVTSLSSVSTGDTTPLPVTSPSSASTGHATPLLVTDASSASTGQATPLPVTSLSSVSTGDTTPLPVTSPSSASTGHATSLPVTDTSSASTGDTTSLPVTDTSSAYTGDTTSLPVTDTSSSSTGDTTPLLVTETSSASTGDTTPVPVTDTSSVSTGHATPLPVTGLSSASTGDTTRLPVTDISSASTGQATPLPVTNTSSVSTGDTMPLPVTSPSSASTGHATPLPVTSTSSASTGHATPVPVTSTSLASTGHTTPLPVTSPSSASTGHTTPLPVTDTSSASTGDTTPLPVTNASSLSTGHTTPLHVTIPSSASTGDTSTLPVTGASSASTGHATPLPVTDTSSVSTGHATPLPVTSFSSVSTGDTTPLPVTDASSASTGHATPLPVTDTSSASTGDTTPLPVTDASSASTGQATPLPVTSLSSVSTGDTTPLPVTIPSSASSGHTTSLPVSDTSSASTGQATPLPVTSLSSVSTGDTTPLLVTDASSVSTGHATPLPVTDTSSASTGDTTRLPVTDTSSASTGQATPLPVTSLSSVSTGDTTPLLVTNTSSVSTGHATSLPVTIPSSSSSGHTTPLPVTSTSSVSTGHVTPLHVTSPSSSSTGQATPLPVTSTSSVSTGHVTPLHVTSPSSASTGHATPLPVTSTSSASTGHATPLPVTDASSVSTGHATPLPVTDTSSASTGDTTPLPVTDTSSASTGQATPLPVTSLSSVSTGHATPLAVSSATSASTVSSDSPLKMETSGMTTPSLKTDGGRRTATSPPPTTSQTIISTIPSTAMHTRSTAAPIPILPERGVSLFPYGADAGDLEFVRRTVDFTSPLFKPATGFPLGSSLRDSLYFTDNGQIIFPESDYQIFSYPNPLPTGFTGRDPVALVAPFWDDADFSTGRGTTFYQSNTYQAILSTDGSRSYALFLYQSGGMQWDVAQRSVEMAISKTAH

SEQ ID NO: 55046 - protein, 146 aa, Homo sapiens
MLSSTDFTFASWELVVRVDHPNEEQQKDVTLRVSGDLHVGGVMLKLVEQINISQDWSDFALWWEQKHCWLLKTHWTLDKYGVQADAKLLFTPQHKMLRLRLPNLKMVRLRVSFSAVVFKAVSDICKILNIRRSEELSLLKPSGDYF

SEQ ID NO: 55047 - protein, 412 aa, Homo sapiens
MSLHFLYYCSEPTLDVKIAFCQGFDKQVDVSYIAKHYNMSKSKVDNQFYSVEVGDSTFTVLKRYQNLKPIGSGAQGIVCAAYDAVLDRNVAIKKLSRPFQNQTHAKRAYRELVLMKCVNHKNIISLLNVFTPQKTLEEFQDVYLVMELMDANLCQVIQMELDHERMSYLLYQMLCGIKHLHSAGIIHRDLKPSNIVVKSDCTLKILDFGLARTAGTSFMMTPYVVTRYYRAPEVILGMGYKENVDIWSVGCIMGEMVRHKILFPGRDYIDQWNKVIEQLGTPCPEFMKKLQPTVRNYVENRPKYAGLTFPKLFPDSLFPADSEHNKLKASQARDLLSKMLVIDPAKRISVDDALQHPYINVWYDPAEVEAPPPQIYDKQLDEREHTIEEWKELIYKEVMNSEEKTKNGVVKG

SEQ ID NO: 55048 - protein, 47 aa, Homo sapiens
  MOD_RES (1)..(1): Any amino acid
XGLCLGPNEAPASPANREKPQRPDRPGHHGVTSMTLPWRMGPCRQLG

SEQ ID NO: 55049 - protein, 715 aa, Homo sapiens
MLQTFDYSRDPQEREFTTAVSSPGGQSVVLGSYDRLRVFNWIPRRSIWEEAKPKEITNLYTITALAWKRDGSRLCVGTLCGGVEQFDCCLRRSIYKNKFELTYVGPSQVIVKNLSSGTRVVLKSHYGYEVEEVKILGKERYLVAHTSETLLLGDLNTNRLSEIAWQGSGGNEKYFFENENVCMIFNAGELTLVEYGNNDTLGSVRTEFMNPHLISVRINERCQRGTEDNKKLAYLIDIKTIAIVDLIGGYNIGTVSHESRVDWLELNETGHKLLFRDRKLRLHLYDIESCSKTMILNFCSYMQWVPGSDVLVAQNRNSLCVWYNIEAPERVTMFTIRGDVIGLERGGGKTEVMVMEGVTTVAYTLDEGLIEFGTAIDDGNYIRATAFLETLEMTPETEAMWKTLSKLALEARQLHIAERCFSALGQVAKARFLHETNEIADQVSREYGGEGTDFYQVRARLAMLEKNYKLAEMIFLEQNAVEEAMGMYQELHRWDECIAVAEAKGHPALEKLRRSYYQWLMDTQQEERAGELQESQGDGLAAISLYLKAGLPAKAARLVLTREELLANTELVEHITAALIKGELYERAGDLFEKIHNPQKALECYRKGNAFMKAVELARLAFPVEVVKLEEAWGDHLVQQKQLDAAINHYIEARCSIKAIEAALGARQWKKAIYILDLQDRNTASKYYPLVAQHYASLQEYEVRKSPFPQHEAMQ

SEQ ID NO: 55050 - protein, 55 aa, Homo sapiens
MRVLLAALGLLFLGALRAFPQGCSRHSSAHRGLLTAGSSVSLTTTWMRPTAVQPA

SEQ ID NO: 55051 - protein, 179 aa, Homo sapiens
VENWSVEEQAMEMDLSVLQQVEDLERRVASASLQVKGWMCPEPASEREDLVYFEHKSFTKLCKEHDGEFTGEDESSAHALERKSDNPLDIAVTRLADLERNIERRYLKSPLSTTIQIKLDNVGTVTVPAPAPSVSGDGDGIEEDIAPGLRVWRRALSEARSAAQVALCIQQLQKSIAWE

SEQ ID NO: 55052 - protein, 307 aa, Homo sapiens
MASATAAAARRGLGRALPLFWRGYQTERGVYGYRPRKPESREPQGALERPPVDHGLARLVTVYCEHGHKAAKINPLFTGQALLENVPEIQALVQTLQGPFHTAGLLNMGKEEASLEEVLVYLNQIYCGQISIETSQLQSQDEKDWFAKRFEELQKETFTTEERKHLSKLMLESQLMFRKMRGLSEFPENFSATGDVLSHLTSSVDLYFGAHHPLHVTMLPNPSHLEAVNPVAVGKTRGRQQSRQDGDYSPDNSAQPGDRVICLQVHGDASFCGQGIVPETFTLSNLPHFRIGGSVHLIVNNQLGYTT

SEQ ID NO: 55053 - protein, 147 aa, Homo sapiens
MNVNIPQLADSLFERTTNSSWVVVFKSLITTHHLMVYGNERFIQYLASRNTLFNLSNFLDKSGLQGYDMSTFIRRYSRYLNEKAVSYRQVAFDFTKVKRGADGVMRTMNTEKLLKTVPIIQNQMDALLDFNVNSNELTNGVINAAFM

SEQ ID NO: 55054 - protein, 68 aa, Homo sapiens
MRALWVLGLCCVLLTFGSVRADDEVDVDGTVEEDLGKSREGSRTDDEVVQRGRSYSVGWIKCITNKRT

SEQ ID NO: 55055 - protein, 1295 aa, Homo sapiens
MRNLKLFRTLEFRDIQGPGNPQCFSLRTEQGTVLIGSEHGLIEVDPVSREVKNEVSLVAEGFLPEDGSGRIVGVQDLLDQESVCVATASGDVILCSLSTQQLECVGSVASGISVMSWSPDQELVLLATGQQTLIMMTKDFEPILEQQIHQDDFGESKFITVGWGRKETQFHGSEGRQAAFQMQMHESALPWDDHRPQVTWRGDGQFFAVSVVCPETGARKVRVWNREFALQSTSEPVAGLGPALAWKPSGSLIASTQDKPNQQDIVFFEKNGLLHGHFTLPFLKDEVKVNDLLWNADSSVLAVWLEDLQREESSIPKTCVQLWTVGNYHWYLKQSLSFSTCGKSKIVSLMWDPVTPYRLHVLCQGWHYLAYDWHWTTDRSVGDNSSDLSNVAVIDGNRVLVTVFRQTVVPPPMCTYQLLFPHPVNQVTFLAHPQKSNDLAVLDASNQISVYKCGDCPSADPTVKLGAVGGSGFKVCLRTPHLEKRYKIQFENNEDQDVNPLKLGLLTWIEEDVFLAVSHSEFSPRSVIHHLTAASSEMDEEHGQLNVSSSAAVDGVIISLCCNSKTKSVVLQLADGQIFKYLWESPSLAIKPWKNSGGFPVRFPYPCTQTELAMIGEEECVLGLTDRCRFFINDIEVASNITSFAVYDEFLLLTTHSHTCQCFCLRDASFKTLQAGLSSNHVSHGEVLRKVERGSRIVTVVPQDTKLVLQMPRGNLEVVHHRALVLAQIRKWLDKLMFKEAFECMRKLRINLNLIYDHNPKVFLGNVETFIKQIDSVNHINLFFTELKEEDVTKTMYPAPVTSSVYLSRDPDGNKIDLVCDAMRAVMESINPHKYCLSILTSHVKKTTPELEIVLQKVHELQGNAPSDPDAVSAEEALKYLLHLVDVNELYDHSLGTYDFDLVLMVAEKSQKDPKEYLPFLNTLKKMETNYQRFTIDKYLKRYEKAIGHLSKCGPEYFPECLNLIKDKNLYNEALKLYSPSSQQYQDISIAYGEHLMQEHMYEPAGLMFARCGAHEKALSAFLTCGNWKQALCVAAQLNFTKDQLVGLGRTLAGKLVEQRKHIDAAMVLEECAQDYEEAVLLLLEGAAWEEALRLVYKYNRLDIIETNVKPSILEAQKNYMAFLDSQTATFSRHKKRLLVVRELKEQAQQAGLDDEVPHGQESDLFSETSSVVSGSEMSGKYSHSNSRISARSSKNRRKAERKKHSLKEGSPLEDLALLEALSEVVQNTENLKDEVYHILKVLFLFEFDEQGRELQKAFEDTLQLMERSLPEIWTLTYQQNSATPVKWTVIFLSG

SEQ ID NO: 55056 - protein, 65 aa, Homo sapiens
MPVQLSEHPEWNESMHSLRISVGGLPVLASMTKAADPRFRPRWKVILTFFVGAAILWLLCSHRPA

SEQ ID NO: 55057 - protein, 76 aa, Homo sapiens
MDESLQFNSSLQKVHNGMDDLILDGHNILDGLRTQRLTLKVGSLLGDREKASCFSLIQQFSNCVYILITCPQIVIF

SEQ ID NO: 55058 - protein, 428 aa, Homo sapiens
MLLGFRRGRRSHFKHIIHGLLPAASVAPKAAVPRTPPPRSPNPSPERPRSALAAAILATTLTGRTVAIPQPRQRSRSESDVSSVEQDSFIEPYATTSQLRPRPNWQSEMGRRSSLPSFETLDYGDEEDIETQLSSSGKELGDVSAREDRGGHSDDLYAVPHRNQVPLLHEVNSEDDENISHQDGFPGSPPAPQRTQQKDGKHPVLNLKDEKPPLCEKPPPSPDITGRARQRYTEITREKFEALKEENMDLNNMNQSLTLELNTMKQAMKELQLKLKGMEKEKRKLKEAEKASSQEVAAPELLYLRKQAQELVDENDGLKMTVHRLNVELSRYQTKFRHLSKEESLNIEGLPSKGPIPPWLLDIKYLSPLLLAYEDMMKEKDELNATLKASASDSSKTGFRGKQVVAGAVGDSAKESQGQPPGAPPRSF

SEQ ID NO: 55059 - protein, 134 aa, Homo sapiens
MGEIEGTYRVLQTAGMRLGAQTPVGVSTLEPGQTLLPRMQEKHLHLRVKLLDNTMEIFDIEPKCDGQVLLTQVWKRLNLVECDYFGMEFQNTQSYWIWLEPMKPIIRQIRRPKNVVLRLAVKFFPPDPGQLQEE

SEQ ID NO: 55060 - protein, 69 aa, Homo sapiens
MREQYMRTGEGFLLVFSVTDRGSFEEIYKFQRQILRVKDRDEFPMILIGNKADLDHQRQVTQEEGQQLA

SEQ ID NO: 55061 - protein, 59 aa, Homo sapiens
MGTPASGRKRTPVKDRFSAEDEALSNIAREAEARLAAKRAARAEARDIRMRELERQQKE

SEQ ID NO: 55062 - protein, 447 aa, Homo sapiens
MCRTPYISSSESRLKGRLDYLSSLKVKGLVLGPIHKNQKDDVAQTDLLQIDPNFGSKEDFDSLLQSAKKKIETIFNMLTGLVLNSPGLPSHILRPFLAHICFNGMNFARVQIQAFVPSIRVILDLTPNYRGENSWFSTQVDTVATKVKDALEFWLQAGVDGFQVRDIENLKDASSFLAEWQNITKGFSEDRLLIAGTNSSDLQQILSLLESNKDLLLTSSYLSDSGSTGEHTKSLVTQYLNATGNRWCSWSLSQARLLTSFLPAQLLRLYQLMLFTLPGTPVFSYGDEIGLDAAALPGQPMEAPVMLWDESSFPDIPGAVSANMTVKGQSEDPGSLLSLFRRLSDQRSKERSLLHGDFHAFSAGPGLFSYIRHWDQNERFLVVLNFGDVGLSAGLQASDLPASASLPAKADLLLSTQPGREEGSPLELERLKLEPHEGLLLRFPYAA

SEQ ID NO: 55063 - protein, 82 aa, Homo sapiens
MKLLAATVLLLTICSLEGALVRRQAKEPCVESLVSQYFQTVTDYGKDLMEKVKSPELQAEAKSYFENFLSYFVELGTQPATQ

SEQ ID NO: 55064 - protein, 53 aa, Homo sapiens
  MOD_RES (1)..(1): Any amino acid
XSEKQCRDQFKDMNKSCDALLFMLNQKVRTGSHSPPLLERECFQDPLGALSRG

SEQ ID NO: 55065 - protein, 102 aa, Homo sapiens
MTKMDIRGAVDAAVPTNIIAAKAAEVRANKVNWQSYLQGQMISAEDCEFIQRFEMKRSPEEKQEMLQTEGSQCAKTFINLMTHICKEQTVQYILTMVDDMLQ

SEQ ID NO: 55066 - protein, 426 aa, Homo sapiens
MEESKQLQIHLDDIVIPSAAVISRAETINATVPKTIIYWDSQTTIEKVSCEMRYKATTNQTWNVKEFDTNFTYVQQSEFYLEPNIKYVFQVRCQETGKRYWQPWSSLFFHKTPETVPQVTSKAFQHDTWNSGLTVASISTGHLTSDNRGDIGLLLGMIVFAVMLSILSLIGIFNRSFRTGIKRRILLLIPKWLYEDIPNMKNSNVVKMLQENSELMNNNSSEQVLYVDPMITEIKEIFIPEHKPTDYKKENTGPLETRDYPQNSLFDNTTVVYIPDLNTGYKPQISNFLPEGSHLSNNNEITSLTLKPPVDSLDSGNNPRLQKHPNFAFSVSSVNSLSNTIFLGELSLILNQGECSSPDIQNSVEEETTMLLENDSPSETIPEQTLLPDEFVSCLGIVNEELPSINTYFPQNILESHFNRISLLEK

SEQ ID NO: 55067 - protein, 90 aa, Homo sapiens
MKDFGSRQEFDSVENAGAIGPSRFGLKRAEVLGHKTPEPAPRRTEITIVKPQESAHRRMEPPASKPEVGAAHLRGAHPQDHRDQVHHARY

SEQ ID NO: 55068 - protein, 96 aa, Homo sapiens
  MOD_RES (1)..(1): Any amino acid
XHGADAMHTDPDYSAAYVVIETDAEDGIKGCGITFTLGKGTEVDWSRKGRGAPGDSGRPKRGVGLVGQAGGKACLEVTCGHGSQDAGILHRFQVHH

SEQ ID NO: 55069 - protein, 21 aa, Homo sapiens
MRLAGPESSVTAAPRARKYKC

SEQ ID NO: 55070 - protein, 121 aa, Homo sapiens
MYGKIIFVLLLSEIVSISALSTTEVAMHTSTSSSVTKSYISSQTNDKHKRDTCPAHTANEVSEISVTTVSPPEKKNGETGQLVHRFTVPAPVVIILIILCVMAGIIGTILLISYSIRRLIK

SEQ ID NO: 55071 - protein, 179 aa, Homo sapiens
MEGGGGSVAVAGLGARGSGAAAATVRELLQDGCYSDFLNEDFDVKTYTSQSIHQAVIAEQLAKLAQGISQLDRELHLQVVARHEDLLAQATGIESLEGVLQMMQTRIGALQGAVDRIKAKIVEPYNKIVARTAQLARLQVACDLLRRIIRILNLSKRLQGQLQGGSREITKAAQSLNEL

SEQ ID NO: 55072 - protein, 98 aa, Homo sapiens
MAETPPPPTAGAESCSEEPARGGEWRPEEPRRAPAGGTDREGEAGPPPASPAGQSEPDSPVAAPFFLLYPGDGGAGFGVRPPPQQQRSWRTPPSPGSP

SEQ ID NO: 55073 - protein, 158 aa, Homo sapiens
MGLLSDPVRRRALARLVLRLNAPLCVLSYVAGIAWFLALVFPPLTQRTYMSENAMGSTMVEEQFAGGDRARAFARDFAAHRKKSGALPVAWLERTMRWCRAPTCTASCGPRVLPAPSRLCSPCPVALTLPTARLWGCCWHWLPTSGGRFIGPKISSSW

SEQ ID NO: 55074 - protein, 311 aa, Homo sapiens
MAFLVAHPMQFVYLLTTLCVFNMVFAKLGFSETVFSQRLSFTVLSAVGYFQWQKRPHLLPVGPLGRSMRWCLLLIWAQGLRQAPLASGMMTGTIETTGNISAEKGGSIILQCHLSSTTAQVTQVNWEQQDQLLAICNADLGWHISPSFKDRVAPGPGLGLTLQSLTVNDTGEYFCIYHTYPDGTYTGRIFLEVLESSVAEHGARFQIPLLGAMAATLVVICTAVIVVVALTRKKKALRIHSVEGDLRRKSAGQEEWSPSAPSPPGSCVQAEAAPAGLCGEQRGEDCAELHDYFNVLSYRSLGNCSFFTETG

SEQ ID NO: 55075 - protein, 29 aa, Homo sapiens
MNILGLVVFAIVFGVALRKLGPEGELLIR

SEQ ID NO: 55076 - protein, 186 aa, Homo sapiens
MAAPSQQRLVVVSVSPQSRASLAARFQLNPTDTARKLTSFFKKIGVHFVFDTAFSRHFSLLESQREFVRRFRGQADCRQALPLLASACPGWICYAEKTHGSFILPHISTARSPQQVMGSLVKDFFAQQQHLTPDKIYHVTVMPCYDKKLEASRPDFFNQEHQTRDVDCVLTTGEVFRLLEEEGVSL

SEQ ID NO: 55077 - protein, 60 aa, Homo sapiens
MELELYGVDDKFYSKLDQEDALLGSYPVDDGCRIHVSQISSLATGLVSAMMSHWGKMMAV

SEQ ID NO: 55078 - protein, 153 aa, Homo sapiens
MEPASCCAERPKPGPTGVKTKPSCGGWRAVSLLLLLLLLVLAAVGVVAGGLLGSAQGPPKPRLQTLRMTLPSPHMPRPNQTILVDVARNAATITVTPPQSNHSWAVLFDGQSVSGQGGVTLAGVGLGGPASPPCLPRAASVTALRSTRSASSA

SEQ ID NO: 55079 - protein, 87 aa, Homo sapiens
  MOD_RES (1)..(1): Any amino acid
XVIPLLRESVGILMQRTPPLLENSLPQCYQRVQQLQGVYSLQEQHFWTLCSDVYVGTLKLIVAPDADARWILSQTHNIFTQETGRGK

SEQ ID NO: 55080 - protein, 106 aa, Homo sapiens
VAKTTPFNTREPVMLACYVWGFYPAEVTITWRKNGKLVMPHSSAHKTAQPNGDWTYQTLSHLALTPSYGDTYTCVVEHIGAPEPILRDWSYTPLPGSNYSEGWHIS

SEQ ID NO: 55081 - protein, 144 aa, Homo sapiens
MDPVATHSCHLLQQLHEQRIQGLLCDCMLVVKGVCFKAHKNVLAAFSQYFRNVQQMHSRTKRWMNRIRMLHHQLIVITPQVKSQNKLLILQMAAAQNCLSNSQITITNSETFTVSSTINTQLVPVRRELLSSLLLSAPLQTLPR

SEQ ID NO: 55082 - protein, 67 aa, Homo sapiens
MQKGKGRTSRIRRRKLCGSSESRGVNESHKSEFIELRKWLKARKFQDSNLAPACFPGTGRGLMSQTS

SEQ ID NO: 55083 - protein, 175 aa, Homo sapiens
  MOD_RES (1)..(1): Any amino acid
XAENQILKTSVWYQEVWNDEFLSWNSSMFDEIREISLPLSAIWAPDIIINEFVDIERYPDLPYVYVNSSGTIENYKPIQVVSACSLETYAFPFDVQNCSLTFKSILHTVEDVDLAFLRSPEDIQHDKKAFLNDSEWELLSVSSTYSILQSSAGGFAQIQFNGTSSPSAWPSWFSA

SEQ ID NO: 55084 - protein, 76 aa, Homo sapiens
MADLSLADALTEPSPDIEGEIKRDFIATLEAEAFDDVVGETVGKTDYIPLLDVDEKTGNSESKKKPCSETSQIEDT

SEQ ID NO: 55085 - protein, 166 aa, Homo sapiens
MNPCCKFKDVRRNVQKDTEELKSCGIQDIFVFCTRGELSKYRVPNLLDLYQQCGIITHHHPIADGGTPDIASCCEIMEELTTCLKNYRKTLIHCYGGLGRSCLVAACLLLYLSDTISPEQAIDSLRDLRGSGAIQTIKQYNYLHEFRDKLAAHLSSRDSQSRSVSR

SEQ ID NO: 55086 - protein, 93 aa, Homo sapiens
  MOD_RES (1)..(1): Any amino acid
XLDLHAFDSLSGISLQKKLQHVPGTQPHLDQSIVTITFEVPGNAKEEHLNMFIQNLLWEKNVRNKDNHCMEVIRLKVQFTVADFRTKSFSWLL

SEQ ID NO: 55087 - protein, 124 aa, Homo sapiens
MPNSEPASLLELFNSIATQGELVRSLKAGNASKDEIDSAVKMLVSLKMSYKAAAGEDYKADCPPGNPAPTSNHGPDATEAEEDFVDPWTVQTSSAKGIDYDKLIVRFGSSKIDKELINRIERAT

SEQ ID NO: 55088 - protein, 287 aa, Homo sapiens
MKDRLEQLKAKQLTQDDDTDAVEIAIDNTAFMDEFFSEIEETRLNIDKISEHVEEAKKLYSIILSAPIPEPKTKDDLEQLTTEIKKRANNVRNKLKSMEKHIEEDEVRSSADLRIRKSQHSVLSRKFVEVMTKYNEAQVDFRERSKGRIQRQLEITGKKTTDEELEEMLESGNPAIFTSGIIDSQISKQALSEIEGRHKDIVRLESSIKELHDMFMDIAMLVENQGSMIDRIENNMDQSVGFVERAVADTKKAVKYQSEARRKKIMIMICCIILAIILASTIGSIFA

SEQ ID NO: 55089 - protein, 175 aa, Homo sapiens
MPTAQWSVEDEEEAVHEQCQHERDRQLQAQDEEGGGHVPERPKQEMLLSLKPSEAPELDEDEGFGDWSQRPEQRQQHEGAQGALDSGEPPQCRSPEGEQEDRPGLHAYEKEDSDEVHLEELSLSKEGPGPEDTVQDNLGAAGAEEEQEEHQKCQQPRTPSPLVLEGTIEQSSPPL

SEQ ID NO: 55090 - protein, 118 aa, Homo sapiens
MAASSSEISEMKGVEESPKVPGEGPGHSEAETGPPQVLAGVPDQPEAPQPGPNTTAAPVDSGPKAGLAPETTETPAGASETAQATDLSLSPGGESKANCSPEDPCQETVSKPEVSKEA

SEQ ID NO: 55091 - protein, 236 aa, Homo sapiens
MPLHSSLGDRARLHLKKKKSYQDKTIIMWKLTRDETNYGIPQRALRGHSHFVSDVVISSDGQFALSGSWDGTLRLWDLTTGTTTRRFVGHTKDVLSVAFSSDNRQIVSGSRDKTIKLWNTLGVCKYTVQDESHSEWVSCVRFSPNSSNPIIVSCGWDKLVKVWNLANCKLKTNHIGHTGYLNTVTVSPDGSLCASGGKDGQAMLWDLNEGKHLYTLDGGDIINALCFSPNRYWLCA

SEQ ID NO: 55092 - protein, 574 aa, Homo sapiens
MEPTENPCQGPLGQKAGEKPLAAGPGEEELLRGSAPHAQDTQSEELPPSCTISGEKKPPAVSGEATGADAGRLCPPPRSRAPHKDRTLARSRPQTQGEDCSLPVGEVKIGKRSYSPAPGKQKKPNAMGLAPTSSPGAPNSARATHNPVPCGSGRGPCHLANLLSTLAQSNQNRDHKQGPPEVTCQIRKKTRTLYRSDQLEELEKIFQEDHYPDSDKRREIAQTVGVTPQRIMVWFQNRRAKWRKMEKLNGKESKDNPAAPGPASSQCSSAAEILPAVPMEPKPDPFPQESPLDTFPEPPMLLTSDQTLAPTQPSEGAQRVVTPPLFSPPPVRRADLPFPLGPVHTPQLMPLLMDVAGSDSSHKDGPCGSWGTSITLPPPCSYLEELEPQDYQQSNQPGPLQFSQAPQPPLFQSPQPKLPYLPTFPFSMPSSLTLPPPEDSLFMFPCGPSGGTSQGYCPGASSGQILMQPPAGNIGTASWSDPCLPELPFPGPFCPQALGHPPGGDGYFPDLFPTPCPQALGRQPSSALSWMPEGARPGTGPLLSKAKEEPPAASLDQPSALEEARGDDKNSHVP

SEQ ID NO: 55093 - protein, 118 aa, Homo sapiens
MLLLADMDVVNQLVAGGQFRVVKEPLGFVKVLQWVFAIFAFATCGSYSGELQLSVDCANKTESDLSIEVEFEYPFRCAPTLGYQQTWERKGQGGTGQYLPPQVAPAQLPPRGYIHWDH

SEQ ID NO: 55094 - protein, 1047 aa, Homo sapiens
MRSEALLLYFTLLHFAGAGFPEDSEPISISHGNYTKQYPVFVGHKPGRNTTQRHRLDIQMIMIMNGTLYIAARDHIYTVDIDTSHTEEIYCSKKLTWKSRQADVDTCRMKGKHKDECHNFIKVLLKKNDDALFVCGTNAFNPSCRNYKMDTLEPFGDEFSGMARCPYDAKHANVALFADGKLYSATVTDFLAIDAVIYRSLGESPTLRTVKHDSKWLKEPYFVQAVDYGDYIYFFFREIAVEYNTMGKVVFPRVAQVCKNDMGGSQRVLEKQWTSFLKARLNCSVPGDSHFYFNILQAVTDVIRINGRDVVLATFSTPYNSIPGSAVCAYDMLDIASVFTGRFKEQKSPDSTWTPVPDERVPKPRPGCCAGSSSLERYATSNEFPDDTLNFIKTHPLMDEAVPSIFNRPWFLRTMVRYRLTKIAVDTAAGPYQNHTVVFLGSEKGIILKFLARIGNSGFLNDSLFLEEMSVYNSEKCSYDGVEDKRIMGMQLDRASSSLYVAFSTCVIKVPLGRCERHGKCKKTCIASRDPYCGWIKEGGACSHLSPNSRLTFEQDIERGNTDGLGDCHNSFVALNDISTPLPDNEMSYNTVYGHSSSLLPSTTTSDSTAQEGYESRGGMLDWKHLLDSPDSTDPLGAVSSHNHQDKKGVIRESYLKGHDQLVPVTLLAIAVILAFVMGAVFSGITVYCVCDHRRKDVAVVQRKEKELTHSRRGSMSSVTKLSGLFGDTQSKDPKPEAILTPLMHNGKLATPGNTAKMLIKADQHHLDLTALPTPESTPTLQQKRKPSRGSREWERNQNLINACTKDMPPMGSPVIPTDLPLRASPSHIPSVVVLPITQQGYQHEYVDQPKMSEVAQMALEDQAATLEYKTIKEHLSSKSPNHGVNLVENLDSLPPKVPQREASLGPPGASLSQTGLSKRLEMHHSSSYGVDYKRSYPTNSLTRSHQATTLKRNNTNSSNSSHLSRNQSFGRGDNPPPAPQRVDSIQVHSSQPSGQAVTVSRQPSLNAYNSLTRSGLKRTPSLKPDVPPKPSFAPLSTSMKPNDACT

SEQ ID NO: 55095 - protein, 57 aa, Homo sapiens
MGSGCRIECIFFSEFHPTLGPKITYQVPEDFISRELFDTVQVYIITKPELQNKLITV

SEQ ID NO: 55096 - protein, 168 aa, Homo sapiens
MEQPPAPKSKLKKLSEDSLTKQPEEVFDVLEKLGEGSYGSVFKAIHKESGQVVAIKQVPVESDLQEIIKEISIMQQCDSPYVVKYYGSYFKNTDLWIVMEYCGAGSVSDIIRLRNKTGFLTDTTEGSASCDLRMDLTLFHLGAEFLHYLLLYEADPLSCVFSLLVFSV

SEQ ID NO: 55097 - protein, 302 aa, Homo sapiens
  MOD_RES (1)..(1): Any amino acid
XPAGIYTSNKDPISHSGGMLRAVCSTPLSSSLLGPPGTSALPRLSRSPFTSTLPSSSASISTTQVFSLAGSTFSLPSTHIFGTPMGAVNPLLSQAESSHTEPDLEDCSFRCRGTSPQESLSSMSPISSLPALFDQTASAPCGGGQLDPAAPGTTNMEQLLEKQGDGEAGVNIVEMLKALHALQKENQRLQEQILSLTAKKERLQILNVQLSVPFPALPAALPAANGPVPGPYGLPPQAGSSDSLSTSKSPPGKSSLGLDNSLSTSSEVGATRSGAGRRGRLKALLVPSLPRSYWRLGNEVTD

SEQ ID NO: 55098 - protein, 173 aa, Homo sapiens
MAWRGWAQRGWGCGQAWGASVGGRSCEELTAVLTPPQLLGRRFNFFIQQKCGFRKAPRKVEPRRSDPGTSGEAYKRSALIPPVEETVFYPSPYPIRSLIKPLFFTVGFTGCAFGSAAIWQYESLKSRVQSYFDGIKADWLDSIRPQKEGDFRKEINKWWNNLSDGQRTVTGLC

SEQ ID NO: 55099 - protein, 911 aa, Homo sapiens
MLLFFTLGLLIHFVFFASIFDIYFTSPLVHGMTPQFTPLPPPARRLVLFVADGLRADALYELDENGNSRAPFIRNIIMHEGSWGISHTRVPTESRPGHVALIAGFYEDVSAVAKGWKENPVEFDSLFNESKYTWSWGSPDILPMFAKGASGDHVYTYSYDAKREDFGAQDATKLDTWVFDNVKDFFHHARNNQSLFSKINEEKIVFFLHLLGIDTNGHAHRPSSRDYKHNIKKVDDGVKEIVSMFNHFYGNDGKTTFIFTSDHGMTDWGSHGAGHPSETLTPLVTWGAGIKYPQRVSAQQFDDAFLKEWRLENWKRLDVNQGILPVDYLNNTDLFKAESMFTNAVQILEQFKVKMTQKKEVTLPFLFTPFKLLSDSKQFNILRKARSYIKHRKFDEVVSLCKELIHLALKGLSYYHTYDRFFLGVNVVIGFVGWISYASLLIIKSHSNLIKGVSKEVKKPSHLLPCSFVAIGILVAFFLLIQACPWTYYVYGLLPLPIWYAVLREFQVIQDLVVSVLTYPLSHFVGYLLAFTLGIEVLVLSFFYRYMLTAGLTAFAAWPFLTRLWTRAKMTSLSWTFFSLLLAVFPLMPVVGRKPDISLVMGAGLLVLLLSLCVVTSLMKRKDSFIKEELLVHLLQVLSTVLSMYVVYSTQSSLLRKQGLPLMNQIISWATLASSLVVPLLSSPVLFQRLFSILLSLMSTYLLLSTGYEALFPLVLSCLMFVWINIEQETLQQSGVCCKQKLTSIQFSYNTDITQFRQLYLDDIRRAFFLVFFLVTAFFGTGNIASINSFDLASVYCFLTVFSPFMMGALMMWKILIPFVLVMCAFEAVQLTTQLSSKSLFLIVLVISDIMALHFFFLVKDYGSWLDIGTSISHYVIVMSMTIFLVFLNGLAQLLTTKKLRLCGKPKSHFM

SEQ ID NO: 55100 - protein, 502 aa, Homo sapiens
MRCSPGGVWLALAASLLHVSLQGEFQRKLYKELVKNYNPLERPVANDSQPLTVYFSLSLLQIMDVDQKRQVLTTNIWLQMSWTDHYLQWNVSEYPGVKTVRFPDGQIWKPDILLYNSADERFDATFHTNVLVNSSGHCQYLPPGIFKSSCYIDVRWFPFDVQHCKLKFGSWSYGGWSLDLQMQEADISGYIPNGEWDLVGIPGKRSERFYECCKEPYPDVTFTVTMRRRTLYYGLNLLIPCVLISALALLVFLLPADSGEKISLGITVLLSLTVFMLLVAEIMPATSDSVPLIAQYFASTMIIVGLSVVVTVIVLQYHHHDPDGGKMPKWTRVILLNWCAWFLRMKRPGEDKVRPACQHKQRRCSLASVEMSAVAPPPASNGNLLYIGFRGLDGVHCVPTPDSGVVCGRMACSPTHDEHLLHGGQPPEGDPDLAKILEEVRYIANRFRCQDESEAVCSEWKFAACVVDRLCLMAFSVFTIICTIGILMSAPNFVEAVSKDFA

SEQ ID NO: 55101 - protein, 227 aa, Homo sapiens
MKVKVIPVLEDNYMYLVIEELTREAVAVDVAVPKRLLEIVGREGVSLTAVLTTHHHWDHARGNPELARLRPGLAVLGADERIFSLTRRLAHGEELRFGAIHVRCLLTPGHTAGHMSYFLWEDDCPDPPALFSGDALSVAGCGSCLEGSAQQMYQSLAELGTLPPETKVFCGHEHTLSNLEFAQKVEPCNDHVRAKLSWAKKRDEDDVPTVPSTLGEERLYNPFLRVA

SEQ ID NO: 55102 - protein, 438 aa, Homo sapiens
MLNVHNLNYSSSRTLLFQRFSVIFMDVLFVYAVRECCKCIDGKKVGKELTEKPKFILSVLLLWNFGLLIVDHIHFQYNGFLFGLMLLSIARLFQKRHMEGAFLFAVLLHFKHIYLYVAPAYGVYLLRSYCFTANKPDGSIRWKSFSFVRVISLGLVVFLVSALSLGPFLALNQLPQVFSRLFPFKRGLCHAYWAPNFWALYNALDKVLSVIGLKLKFLDPNNIPKASMTSGLVQQFQHTVLPSVTPLATLICTLIAILPSIFCLWFKPQGPRGFLRCLTLCALSSFMFGWHVHEKAILLAILPMSLLSVGKAGDASIFLILTTTGHYSLFPLLFTAPELPIKILLMLLFTIYSISSLKTLFRKEKPLFNWMETFYLLGLGPLEVCCEFVFPFTSWKVKYPFIPLLLTSVYCAVGITYAWFKLYVSVLIDSAIGKTKKQ

SEQ ID NO: 55103 - protein, 72 aa, Homo sapiens
MTVRGDVLAPDPASPTTAAASPSVSVIPEGSPTAMEQPVFLMTTAAQAISGFFVWTALLITCHQPRARLGQV

SEQ ID NO: 55104 - protein, 112 aa, Homo sapiens
MSSSNVEVFIPVSQGNTNGFPATASNDLKAFTEGAVLSFHNICYRVKLKSGFLPCRKPVEKEILSNINGIMKPGLNAILGPTGGGKSSLLDVLAARKDPSGLSGDVLINGAP

SEQ ID NO: 55105 - protein, 57 aa, Homo sapiens
MRKKDKQSIRDVRDIFGVSESPPRDTCGNHTNQLDGTKEERELPRVIKTSGSMYYPV

SEQ ID NO: 55106 - protein, 4969 aa, Homo sapiens
PGTTEDTLITGSKTAAPVTSTGSTTATLEGQSTAASSRTSNQDISASSQNHQTKSTETTSKAQTDTLTQMMTSTLFSSPSVHNVMETAPPDEMTTSFPSSVTNTLMMTSKTITMTTSTDSTLGNTEETSTAGTESSTPVTSAVSITAGQEGQSRTTSWRTSIQDTSASSQNHWTRSTQTTRESQTSTLTHRTTSTPSFSPSVHNVTGTVSQKTSPSGETATSSLCSVTNTSMMTSEKITVTTSTGSTLGNPGETSSVPVTGSLMPVTSAALVTFDPEGQSPATFSRTSTQDTTAFSKNHQTQSVETTRVSQINTLNTLTPVTTSTVLSSPSGFNPSGTVSQETFPSGETTTSSPSSVSNTFLVTSKVFRMPTSRDSTLGNTEETSLSVSGTISAITSKVSTIWWSDTLSTALSPSSLPPKISTAFHTQQSEGAETTGRPHERSSFSPGVSQEIFTLHETTTWPSSFSSKGHTTWSQTELPSTSTGAATRLVTGNPSTGTAGTIPRVPSKVSAIGEPGEPTTYSSHSTTLPKTTGAGAQTQWTQETGTTGEALLSSPSYSVTQMIKTATSPSSSPMLDRHTSQQITTAPSTNHSTIHSTSTSPQESPAVSQRGHTQAPQTTQESQTTRSVSPMTDTKTVTTPGSSFTASGHSPSEIVPQDAPTISAATTFAPAPTGDGHTTQAPTTALQAAPSSHDATLGPSGGTSLSKTGALTLANSVVSTPGGPEGQWTSASASTSPDTAAAMTHTHQAESTEASGQTQTSEPASSGSRTTSAGTATPSSSGASGTTPSGSEGISTSGETTRFSSNPSRDSHTTQSTTELLSASASHGAIPVSTGMASSIVPGTFHPTLSEASTAGRPTGQSSPTSPSASPQETAAISRMAQTQRTRTSRGSDTISLASQATDTFSTVPPTPPSITSTGLTSPQTETHTLSPSGSGKTFTTALISNATPLPVTYASSASTGHTTPLHVTDASSVSTGHATPLPVTSPSSVSTGHTTPLPVTDTSSESTGHVTPLPVTSFSSASTGDSTPLPVTDTSSASTGHVTPLPVTSLSSASTGDTTPLPVTDTSSASTGHATSLPVTDTSSVSTGHTTPLPVTDTSSASTGHATSLPVTDTSSVSTGHTTPLHVTDASSASTGQATPLPVTSLSSVSTGDTTPLPVTSPSSASTGHATPLLVTDTSSASTGHATPLPVTDASSVSTDHATSLPVTIPSAASTGHTTPLPVTDTSSASTGQATSLLVTDTSSVSTGDTTPLPVTSTSSASTGHVTPLHVTSPSSASTGHATPLPVTSLSSASTGDTMPLPVTSPSSASTGDTTPLPVTDASSVSTGHTTPLHVTDASSASTGQATPLPVTSLSSVSTGDTTPLPVTSPSSASTGHATPLLVTDTSSASTGHATPLPVTDASSVSTDHATSLPVTIPSAASTGHTTPLPVTDTSSASTGQATSLLVTDTSSVSTGDTTPLPVTSTSSASTGHVTPLHVTSPSSASTGHATPLPVTSLSSASTGDTMPLPVTSPSSASTGDTTPLPVTDASSVSTGHTTPLPVTSPSSASTGHTTPLPVTDTSSASKGDTTPLPVTSPSSASTGHTTPLPVTDTSSASTGDTTPLPVTNASSLSTGHATPLHVTSPSSASTGHATPLPVTSTSSASTGHATPLPVTGLSSATTDDTTRLPVTDVSSASTGQATPLPVTSLSSVSTGDTTPLPVTSPSSASTGHASPLLVTDASSASTGQATPLPVTDTSSVSTAHATPLPVTGLSSASTDDTTRLPVTDVSSASTGQAIPLPVTSPSSASTGDTTPLPVTDASSASTGDTTSLPVTIPSSASSGHTTSLPVTDASSVSTGHATSLLVTDASSVSTGDTTPLPVTDTNSASTGDTTPLHVTDASSVSTGHATSLPVTSLSSASTGDTTPLPVTSPSSASSGHTTPLPVTDASSVPTGHATSLPVTDASSVSTGHATPLPVTDASSVSTGHATPLPVTDTSSVSTGQATPLPVTSLSSASTGDTTPLPVTDTSSASTGQDTPLPVTSLSSVSTGDTTPLPVTNPSSASTGHATPLLVTDASSISTGHATSLLVTDASSVSTGHATALHDTDASSLSTGDTTPLPVTSPSSTSTGDTTPLPVTETSSVSTGHATSLPVTDTSSASTGHATSLPVTDTSSASTGHATPLPVTDTSSASTGQATPLPVTSPSSASTGHAIPLLVTDTSSASTGQATPLPVTSLSSASTGDTTPLPVTDASSVSTGHATSLPVTSLSSVSTGDTTPLPVTSPSSASTGHATPLHVTDASSASTGHATPLPVTSLSSASTGDTTPLPVTSPSSASTGHATPLHVTDASSVSTGDTTPLPVTSSSSASSGHTTPLPVTDASSASTGDTTPLPVTDTSSASTGHATHLPVTGLSSASTGDTTRLPVTNVSSASTGHATPLPVTSTSSASTGDTTPLPGTDTSSVSTGHTTPLLVTDASSVSTGDTTRLPVTSPSSASTGHTTPLPVTDTPSASTGDTTPLPVTNASSLSTRHATSLHVTSPSSASTGHATSLPVTDTSAASTGHATPLPVTSTSSASTGDTTPLPVTDTYSASTGQATPLPVTSLSSVSTGDTTPLPVTSPSSASTGHATPLLVTDASSASTGQATPLPVTSLSSVSTGDTTPLPVTSPSSASTGHATSLPVTDTSSASTGDTTSLPVTDTSSAYTGDTTSLPVTDTSSSSTGDTTPLLVTETSSVSTGDTTPLPVTDTSSASTGHATPLPVTNTSSVSTGHATPLHVTSPSSASTGHTTPLPVTDASSVSTGHATSLPVTDASSVFTGHATSLPVTIPSSASSGHTTPLPVTDASSVSTGHATSLPVTDASSVSTGHATPLPVTDASSVSTGHATPLPLTSLSSVSTGDTTPLPVTDTSSASTGQATPLPVTSLSSVSTGDTTPLPVTDTSSASTGHATSLPVTDTSSASTGHATPLPDTDTSSASTGHATLLPVTDTSSASIGHATSLPVTDTSSISTGHATPLHVTSPSSASTGHATPLPVTDTSSASTGHANPLHVTSPSSASTGHATPLPVTDTSSASTGHATPLPVTSLSSVSTGDTTPLPVTSPSSASTGHTTPLPVTDTSSASTGQATALPVTSTSSASTGDTTPLPVTDTSSASTGQATPLPVTSLSSVSTGDTTPLPVTSPSSASTGHATPLLVTDASSASTGQATPLPVTSLSSVSTGDTTPLPVTSPSSASTGHATSLPVTDTSSASTGDTTSLPVTDTSSAYTGDTTSLPVTDTSSSSTGDTTPLLVTETSSVSTGHATPLLVTDASSASTGHATPLHVTSPSSASTGDTTPVPVTDTSSVSTGHATPLPVTGLSSASTGDTTRLPVTDISSASTGQATPLPVTNTSSVSTGDTMPLPVTSPSSASTGHATPLPVTSTSSASTGHATPVPVTSTSSASTGHTTPLPVTDTSSASTGDTTPLPVTSPSSASTGHTTPLHVTIPSSASTGDTSTLPVTGASSASTGHATPLPVTDTSSVSTGHATPLPVTSLSSVSTGDTTPLPVTDASSASTGQATPLPVTSLSSVSTGDTTPLLVTDASSVSTGHATPLPVTDTSSASTGDTTRLPVTDTSSASTGQATPLPVTSLSSVSTGDTTPLLVTDASSVSTGHATPLPVTDTSSASTGDTTRLPVTDTSSASTGQATPLPVTIPSSSSSGHTTPLPVTSTSSVSTGHVTPLHVTSPSSASTGHVTPLPVTSTSSASTGHATPLLVTDASSVSTGHATPLPVTDASSASTGDTTPLPVTDTSSASTGQATPLPVTSLSSVSTGDTTPLPVTDASSASTGHATPLPVTIPSSVSTGDTMPLPVTSPSSASTGHATPLPVTGLSSASTGDTTPLPVTDTSSASTRHATPLPVTDTSSASTDDTTRLPVTDVSSASTGHATPLPVTSTSSASTGDTTPLPVTDTSSVSTGHATSLPVTSRSSASTGHATPLPVTDTSSVSTGHATPLPVTSTSSVSTGHATPLPVTSPSSASTGHATPVPVTSTSSASTGDTTPLPVTNASSLSTGHATPLHVTSPSSASRGDTSTLPVTDASSASTGHATPLPLTSLSSVSTGDTTPLPVTDTSSASTGQATPLPVTSLSSVSTGDTTPLPVTIPSSASSGHTTSLPVTDASSVSTGHGTPLPVTSTSSASTGDTTPLPVTDTSSASTGHATPLPVTDTSSASTGHATPLPVTSLSSVSTGHATPLAVSSATSASTVSSDSPLKMETPGMTTPSLKTDGGRRTATSPPPTTSQTIISTIPSTAMHTRSTAAPIPILPERGVSLFPYGAGAGDLEFVRRTVDFTSPLFKPATGFPLGSSLRDSLYFTDNGQIIFPESDYQIFSYPNPLPTGFTGRDPVALVAPFWDDADFSTGRGTTFYQEYETFYGEHSLLVQQAESWIRKMTNNGGYKARWALKVTWVNAHAYPAQWTLGSNTYQAILSTDGSRSYALFLYQSGGMQWDVAQRSGNPVLMGFSSGDGYFENSPLMSQPVWERYRPDRFLNSNSGLQGLQFYRLHREERPNYRLECLQWLKSQPRWPSWGWNQVSCPCSWQQGRRDLRFQPVSIGRWGLGSRQLCSFTSWRGGVCCSYGPWGEFREGWHVQRPWQLAQELEPQSWCCRWNDKPYLCALYQQRRPHVGCATYRPPQPAWMFGDPHITTLDGVSYTFNGLGDFLLVGAQDGNSSFLLQGRTAQTGSAQATNFIAFAAQYRSSSLGPVTVQWLLEPHDAIRVLLDNQTVTFQPDHEDGGGQETFNATGVLLSRNGSEVSASFDGWATVSVIALSNILHASASLPPEYQNRTEGLLGVWNNNPEDDFRMPNGSTIPPGSPEEMLFHFGMTWQINGTGLLGKRNDQLPSNFTPVFYSQLQKNSSWAEHLISNCDGDSSCIYDTLALRNASIGLHTREVSKNYEQANATLNQYPPSINGGRVIEAYKGQTTLIQYTSNAEDANFTLRDSCTDLELF

SEQ ID NO: 55107 - protein, 2027 aa, Homo sapiens [sequence omitted]

SEQ ID NO: 55108 - protein, 25 aa, Homo sapiens
MDASERGRLLDKLADLVERDRAVLA

SEQ ID NO: 55109 - protein, 338 aa, Homo sapiens
MVVMAPRTLFLLLSGALTLTETWAGSHSMRYFSAAVSRPGRGEPRFIAMGYVDDTQFVRFDSDSACPRMEPRAPWVEQEGPEYWEEETRNTKAHAQTDRMNLQTLRGYYNQSEASSHTLQWMIGCDLGSDGRLLRGYEQYAYDGKDYLALNEDLRSWTAADTAAQISKRKCEAANVAEQRRAYLEGTCVEWLHRYLENGKEMLQRADPPKTHVTHHPVFDYEATLRCWALGFYPAEIILTWQRDGEDQTQDVELVETRPAGDGTFQKWAAVVVPSGEEQRYMCHVQHEGLPEPLMLRWKQSSLPTIPIMGIVAGLVVLAAVVTGAAVAAVLWRKKSSD

SEQ ID NO: 55110 - protein, 48 aa, Homo sapiens
MAAAVAGMLRGGLLPQAGKEWPRSSRRVLRPLSSPHLPSSTTDSSHNL

SEQ ID NO: 55111 - protein, 81 aa, Homo sapiens
MGRKLDPTKEKRGPGRKARKQKGAETELVRFLPAVSDENSKRLSSRARKRAAKRRLGSVEAPKTNKSPEAKPLPGKLPKGP

SEQ ID NO: 55112 - protein, 160 aa, Homo sapiens
MAARGSGPRALRLLLLVQLVAGRCGLAGAAGGAQRGLSEPSSIAKHEDSLLKDLFQDYERWVRPVEHLNDKIKIKFGLAISQLVDVDEKNQLMTTNVWLKQEWIDVKLRWNPDDYGGIKVIRVPSDSVWTPDIVLFDNADGRFEGTSTKTVIRLLKIGNS

SEQ ID NO: 55113 - protein, 112 aa, Homo sapiens
NPTPSISWLKNGREFRGEHRIGGIKLRHQQWSLVMESVVPSDRGNYTCVVENKFGSIRQTYTLDVLERSPHRPILQAGLPANQTAVLGSDVEFHCKTAGANTTDKELEVLSL

SEQ ID NO: 55114 - protein, 70 aa, Homo sapiens
MRLAGPLRIVVLVVSVGVTWIVVSILLGGPGSGFPRIQQLFTSWSAVVQSRFTATSTSWVQAILVPQPPE

SEQ ID NO: 55115 - protein, 941 aa, Homo sapiens
MAAYLQWRRFVFFDKELVKEPLSNDGAAPGATPASGSAASKFLCLPPGITVCDSGRGSLVFGDMEGQIWFLPRSLQLTGFQAYKLRVTHLYQLKQHNILASVGEDEEGINPLVKIWNLEKRDGGNPLCTRIFPAIPGTEPTVVSCLTVHENLNFMAIGFTDGSVTLNKGDITRDRHSKTQILHKGNYPVTGLAFRQAGKTTHLFVVTTENVQSYIVSGKDYPRVELDTHGCGLRCSALSDPSQDLQFIVAGDECVYLYQPDERGPCFAFEGHKLIAHWFRGYLIIVSRDRKVSPKSEFTSRDSQSSDKQILNIYDLCNKFIAYSTVFEDVVDVLAEWGSLYVLTRDGRVHALQEKDTQTKLEMLFKKNLFEMAINLAKSQHLDSDGLAQIFMQYGDHLYSKGNHDGAVQQYIRTIGKLEPSYVIRKFLDAQRIHNLTAYLQTLHRQSLANADHTTLLLNCYTKLKDSSKLEEFIKKKSESEVHFDVETAIKVLRQAGYYSHALYLAENHAHHEWYLKIQLEDIKNYQEALRYIGKLPFEQAESNMKRYGKILMHHIPEQTTQLLKGLCTDYRPSLEGRSDREAPGCRANSEEFIPIFANNPRELKAFLEHMSEVQPDSPQGIYDTLLELRLQNWAHEKDPQVKEKLHAEAISLLKSGRFCDVFDKALVLCQMHDFQDGVLYLYEQGKLFQQIMHYHMQHEQYRQVISVCERHGEQDPSLWEQALSYFARKEEDCKEYVAAVLKHIENKNLMPPLLVVQTLAHNSTATLSVIRDYLVQKLQKQSQQIAQDELRVRRYREETTRIRQEIQELKASPKIFQKTKCSICNSALELPSVHFLCGHSFHQHCFESYSESDADCPTCLPENRKVMDMIRAQEQKRDLHDQFQHQLKCSNDSFSVIADYFGRGVFNKLTLLTDPPTARLTSSLEAGLQRDLLMHSRRGT

SEQ ID NO: 55116 - protein, 89 aa, Homo sapiens
MEREMVLCLAQTIHTQEGALPRPSISAEPGTVISPGSHVTFMCRGPVGVQTFRLEREDRAKYKDSYNVFRLGPSESEARFHIDSVSEGN

SEQ ID NO: 55117 - protein, 1261 aa, Homo sapiens
MEGYPWWPCLVYNHPFDGTFIREKGKSVRVHVQFFDDSPTRGWVSKRLLKPYTGSKSKEAQKGGHFYSAKPEILRAMQRADEALNKDKIKRLELAVCDEPSEPEEEEEMEVGTTYVTDKSEEDNEIESEEEVQPKTQGSRRSSRQIKKRRVISDSESDIGGSDVEFKPDTKEEGSSDEISSGVGDSESEGLNSPVKVARKRKRMVTGNGSLKRKSSRKETPSATKQATSISSETKNTLRAFSAPQNSESQAHVSGGGDDSSRPTVWYHETLEWLKEEKRRDEHRRRPDHPDFDASTLYVPEDFLNSCTPGMRKWWQIKSQNFDLVICYKVGKFYELYHMDALIGVSELGLVFMKGNWAHSGFPEIAFGRYSDSLVQKGYKVARVEQTETPEMMEARCRKMAHISKYDRVVRREICRIITKGTQTYSVLEGDPSENYSKYLLSLKEKEEDSSGHTRAYGVCFVDTSLGKFFIGQFSDDRHCSRFRTLVAHYPPVQVLFEKGNLSKETKTILKSSLSCSLQEGLIPGSQFWDASKTLRTLLEEEYFREKLSDGIGVMLPQVLKGMTSESDSIGLTPGEKSELALSALGGCVFYLKKCLIDQELLSMANFEEYIPLDSDTVSTTRSGAIFTKAYQRMVLDAVTLNNLEIFLNGTNGSTEGTLLERVDTCHTPFGKRLLKQWLCAPLCNHYAINDRLDAIEDLMVVPDKISEVVELLKKLPDLERLLSKIHNVGSPLKSQNHPDSRAIMYEETTYSKKKIIDFLSALEGFKVMCKIIGIMEEVADGFKSKILKQVISLQTKNPEGRFPDLTVELNRWDTAFDHEKARKTGLITPKAGFDSDYDQALADIRENEQSLLEYLEKQRNRIGCRTIVYWGIGRNRYQLEIPENFTTRNLPEEYELKSTKKGCKRYWTKTIEKKLANLINAEERRDVSLKDCMRRLFYNFDKNYKDWQSAVECIAVLDVLLCLANYSRGGDGPMCRPVILLPEDTPPFLELKGSRHPCITKTFFGDDFIPNDILIGCEEEEQENGKAYCVLVTGPNMGGKSTLMRQAGLLAVMAQMGCYVPAEVCRLTPIDRVFTRLGASDRIMSGESTFFVELSETASILMHATAHSLVLVDELGRGTATFDGTAIANAVVKELAETIKCRTLFSTHYHSLVEDYSQNVAVRLGHMACMVENECEDPSQETITFLYKFIKGACPKSYGFNAARLANLPEEVIQKGHRKAREFEKMNQSLRLFREVCLASERSTVDAEAVHKLLTLIKEL

SEQ ID NO: 55118 - protein, 591 aa, Homo sapiens
MPKGRQKVPHLDAPLGLPTCLWLELAGLFLLVPWVMGLAGTGGPDGQGTGGPSWAVHLESLEGDGEEETLEQQADALAQAAGLVNAGRIGELQGHYLFVQPAGHRPALEVEAIRQQVEAVLAGHEAVRWHSEQRLLRRAKRSVHFNDPKYPQQWHLNNRRSPGRDINVTGVWERNVTGRGVTVVVVDDGVEHTIQDIAPNYSPEGSYDLNSNDPDPMPHPDVENGNHHGTRCAGEIAAVPNNSFCAVGVAYGSRIAGIRVLDGPLTDSMEAVAFNKHYQINDIYSCSWGPDDDGKTVDGPHQLGKAALQHGVIAGRQGFGSIFVVASGNGGQHNDNCNYDGYANSIYTVTIGAVDEEGRMPFYAEECASMLAVTFSGGDKMLRSIVTTDWDLQKGTGCTEGHTGTSAAAPLAAGMIALMLQVRPCLTWRDVQHIIVFTATRYEDRRAEWVTNEAGFSHSHQHGFGLLNAWRLVNAAKIWTSVPYLASYVSPVLKENKAIPQSPRSLEVLWNVSRMDLEMSGLKTLEHVAVTVSITHPRRGSLELKLFCPSGMMSLIGAPRSMDSWLCVECSRHQGQTKAVRECHEWKIPAR

SEQ ID NO: 55119 - protein, 333 aa, Homo sapiens
KILFLSSIIPFDCLLTVRALGGLLKFLGRRRIGVELEDYNVSVPILGFKKFMLTHLVNIDQDTYSVLQIFKSESHPSVYKVASGLKEGLSLFGILNRCHCKWGEKLLRLWFTRPTHDLGELSSRLDVIQFFLLPQNLDMAQMLHRLLGHIKNVPLILKRMKLSHTKVSDWQVLYKTVYSALGLRDACRSLPQSIQLFRDIAQEFSDDLHHIASLIGKVYLSPQVDFEGSLAENRFTVLPNIDPEIDEKKRRLMGLPSFLTEVARKELENLDSRIPSCSVIYIPLIGFLLSIPRLPSMVEASDFEINGLDFMFLSEEKLHYRSARTKELDALLG

SEQ ID NO: 55120 - protein, 80 aa, Homo sapiens
MLQKPKSVKLRALRSPRKFGVAGRSCQEVLRKGCLRFQLPERGSRLCLYEDGTELTEDYFPSVPDNAELVLLTLGQAWQG

SEQ ID NO: 55121 - protein, 169 aa, Homo sapiens [sequence omitted]

SEQ ID NO: 55122 - protein, 51 aa, Homo sapiens
MIIIIVVGCLCFLTCTMKGLDDFYYCPHFTGFKRGADPGMPEPTVLSLLWG

SEQ ID NO: 55123 - protein, 579 aa, Homo sapiens
MWRVLFLLSGLGGLRMDSNFDSLPVQITVPEKIRSIIKEGIESQASYKIVIEGKPYTVNLMQKNFLPHNFRVYSYSGTGIMKPLDQDFQNFCHYQGYIEGYPKSVVMVSTCTGLRGVLQFENVSYGIEPLESSVGFEHVIYQVKHKKADVSLYNEKDIESRDLSFKLQSVEHPRTISLESLAVILAQLLSLSMGITYDDINKCQCSGAVCIMNPEAIHFSGVKIFSNCSFEDFAHFISKQKSQCLHNQPRLDPFFKQQAVCGNAKLEAGEECDCGTEQDCALIGETCCDIATCRFKAGSNCAEGPCCENCLFMSKERMCRPSFEECDLPEYCNGSSASCPENHYVQTGHPCGLNQWICIDGVCMSGDKQCTDTFGKEVEFGPSECYSHLNSKTDVSGNCGISDSGYTQCEADGHLCIAVEFASDHADSQKMWIKDGTSCGSNKVCRNQRCVSSSYLGYDCTTDKCNDRGVCNNKKHCHCSASYLPPDCSVQSDLWPGGSIDSGNFPPVAIPARLPERRYIENIYHSKPMRWPFFLFIPFFIIFCVLIAIMVKVNFQRKKWRTEDYSSDEQPESESEPKG

SEQ ID NO: 55124 - protein, 145 aa, Homo sapiens
MNIFDRKINFDALLKFSHITPSTQQHLKKVYASFALCMFVAAAGAYVHMVTHFIQAGLLSALGSLILMIWLMATPHSHETEQKRLGLLAGFAFLTGVGLGPALEFCIAVNPSILPTAFMGTAMIFTCFTLSALYARRRSYLFLGG

SEQ ID NO: 55125 - protein, 1166 aa, Homo sapiens
MIWPKVECCHFKTAVEAPLGMKLDKKMEVFIPLSTSAASSGPWAHSLFAFIPSWPKKNLFKRESPITHRLYGDISREVQGTSENGVIFQKCALVSGSSEAQTARIWLLVNNTKTTSSANLSELLLLDSIAGLTIWDSVGNRTSEGFQAFSKKFLQVGDAFAVSYAATLQAGDLGNGESLKLPAQLTFQSSSRNRTQLKVLFSITAEENVTVLPHHGLHAAGFFIAFLLSLVLTWAALFLMVRYQCLKGNMLTRHRVWQYESKLEPLPFTSADGVNEDLSLNDQMIDILSSEDPGSMLQALEELEIATLNRADADLEACRTQISKDIIALLLKNLTSSGHLSPQVERKMSAVFKKQFLLLENEIQEEYDRKMVALTAECDLETRKKMENQYQREMMAMEEAEELLKRAGERSAVECSNLLRTLHGLEQEHLRKSLALQQEEDFAKAHRQLAVFQRNELHSIFFTQIKSAIFKGELKPEAAKMLLQNYSKIQENVEELMDFFQASKRYHLSKRFGHREYLVQNLQSSETRVQGLLSTAAAQLTHLIQKHERAGYLDEDQMEMLLERAQTEVFSIKQKLDNDLKQEKKKLHQKLITKRRRELLQKHREQRREQASVGEAFRTVEDAGQYLHQKRSLMEEHGATLEELQERLDQAALDDLRTLTLSLFEKATDELRRLQNSAMTQELLKRGVPWLFLQQILEEHGKEMAARAEQLEGEERDRDQEGVQSVRQRLKDDAPEAVTEEQAELRRWEHLIFMKLCSSVFSLSEEELLRMRQEVHGCFAQMDRSLALPKIRARVLLQQFQTAWREAEFVKLDQAVAAPELQQQSKVRKSRSKSKSKGELLKKCIEDKIHLCEEQASEDLVEKVRGELLRERVQRMEAQEGGFAQSLVALQFQKASRVTETLSAYTALLSIQDLLLEELSASEMLTKSACTQILESHSRELQELERKLEDQLVQQEAAQQQQALASWQQWVADGPGILNEPGEVDSERQVSTVLHQALSKSQTLLEQHQQCLREEQQNSVVLEDLLENMEADTFATLCSQELRLASYLARMAMVPGATLRRLLSVVLPTASQPQLLALLDSATERHVDHAAESDGGAEQADVGRRRKHQSWWQALDGKLRGDLISRGLEKMLWARKRKQRSGNQESFWQYLVGTPEIGLIEWMSEK

SEQ ID NO: 55126 - protein, 105 aa, Homo sapiens
MEEPAAPSEAHEAAGAQAGAEAAREGVSGPDLPVCEPSGESAAPDSALPHAARGWAPFPVAPVPAHLRRGGLRPAPASGGGAWPSPLPSRSSGIWTKQIICRDIC

SEQ ID NO: 55127 - protein, 391 aa, Homo sapiens
MAGKRSGWSRAALLQLLLGVNLVVMPPTRARSLRFVTLEGMLQHWELGQALRQRYHGFLNTSYHRQEVYVRSTDFDRTLMSAEANLAGLFPPNGMQRFNPNISWQPIPVHTVPITEDRLLKFPLGPCPRYEQLQNETRQTPEYQNESSRNAQFLDMVANETGLTDLTLETVWNVYDTLFCEQTHGLRLPPWASPQTMQRLSRLKDFSFRFLFGIYQQAEKARLQGGVLLAQIRKNLTLMATTSQLPKLLVYSAHDTTLVALQMALDVYNGEQAPYASCHIFELYQEDSGNFSVEMYFRNESDKAPWPLSLPGCPHRCPLQDFLRLTEPVVPKDWQQECQLASGPADTEVIVALAVCGSILFLLIVLLLTVLFRMQAQPPGYRHVADGEDHA

SEQ ID NO: 55128 - protein, 341 aa, Homo sapiens
MSLMVVSMACVGFFLLQGAWPHEGVHRKPSLRAHPGPLVKSEETVILQCWSDVRFEHFLLHREGKFKDTLRLIGEHHDGVSKANFSIGPMMQDLAGTYRCYGSVTHSPYQLSAPSDPLDIVITGLYEKPSLSAQPGPTVLAGESVTLSCSSRSSYDMYHLSREGEAHERRFSAGPKVNGTFQADFPLGPATHGGTYRCFGSFRDSPYEWSNSSDPLLVSVTGNPSNSWPSPTEPSSETGNPRHLHVLIGTSVVIILFILLLFFLLHRWCCNKKNAVVMDQEPAGNRTVNREDSDEQDPQEVTYAQLNHCVFTQRKITHPSQRPKTPPTDIIVYTELPNAEP

SEQ ID NO: 55129 - protein, 115 aa, Homo sapiens
MLKVSAVLCVCAAAWCSQSLAAAAAVAAAGGRSDGGNFLDDKQWLTTISQYDKEVGQWNKFRDEVEDDYFRTWSPGKPFDQALDPAKDPCLKMKCSRHKVCIAQDSQTAVCISHR

SEQ ID NO: 55130 - protein, 166 aa, Homo sapiens
MKDKGHDGVKELDSLNSDRLRTVQLNVCSSEEVEKVVEIVRSSLKDPEKGMWGLVNNAGISTFGEVEFTSLETYKQVAEVNLWGTVRMTKSFLPLIRRAKGRVVNISSMLGRMANPARSPYCITKFGVEAFSDCLRYEMYPLGVKVSVVEPGNFIAATSLYSPESI

SEQ ID NO: 55131 - protein, 575 aa, Homo sapiens
MQSTSNHLWLLSDILGQGATANVFRGRHKKTGDLFAIKVFNNISFLRPVDVQMREFEVLKKLNHKNIVKLFAIEEETTTRHKVLIMEFCPCGSLYTVLEEPSNAYGLPESEFLIVLRDVVGGMNHLRENGIVHRDIKPGNIMRVIGEDGQSVYKLTDFGAARELEDDEQFVSLYGTEEYLHPDMYERAVLRKDHQKKYGATVDLWSIGVTFYHAATGSLPFRPFEGPRRNKEVMYKIITGKPSGAISGVQKAENGPIDWSGDMPVSCSLSRGLQVLLTPVLANILEADQEKCWGFDQFFAETSDILHRMVIHVFSLQQMTAHKIYIHSYNTATIFHELVYKQTKIISSNQELIYEGRRLVLEPGRLAQHFPKTTEENPIFVVSREPLNTIGLIYEKISLPKVHPRYDLDGDASMAKAITGVVCYACRIASTLLLYQELMRKGIRWLIELIKDDYNETVHKKTEVVITLDFCIRNIEKTVKVYEKLMKINLEAAELGEISDIHTKLLRLSSSQGTIETSLQDIDSRLSPGGSLADAWAHQEGTHPKDRNVEKLQVLLNCMTEIYYQFKKDKAERRS

SEQ ID NO: 55132 - protein, 38 aa, Homo sapiens
MSQDGASQFQEVIRQELELSVKKELEKILTTASSHEFE

SEQ ID NO: 55133 - protein, 37 aa, Homo sapiens
MVMEKPSPLLVGREFVRQYYTLLNQAPDMLHRKSTGK

SEQ ID NO: 55134 - protein, 372 aa, Homo sapiens
MRVMAPRTLILLLSGALALTETWACSHSMRYFYTAVSRPGRGEPRFIAVGYVDDTQFVQFDSDAASPRGEPRAPWVEQEGPEYWDRETQKYKRQAQTDRVNLRKLRGYYNQSEAGSHTLQRMYGCDLGPDGRLLRGYNQFAYDGKDYIALNEDLRSWTAADKAAQITQRKWEAAREAEQRRAYLEGTCVEWLRRYLENGKKTLQRAEHPKTHVTHHPVSDHEATLRCWALGFYPAEITLTWQRDGEDQTQDTELVETRPAGDGTFQKWAAVVVPSGEEQRYTCHVQHEGLPEPLTLRWGPSSQPTIPIVGIVAGLAVLAVLAVLGAVMAVVMCRRKSSGHFLPTGGKGGSCSQAASSNSAQGSDESLIACKA

SEQ ID NO: 55135 - protein, 146 aa, Homo sapiens
MGTRDDEYDYLFKVVLIGDSGVGKSNLTYENVERWLKELRDHADSNIVIMLVGNKSDLRHLRAVPTDEARAFAEKNGLSFIETSALDSTNVEAAFQTILTEIYRIVSQKQMSDRRENDMSPSNNVVPIHVPPTTENKPKVQCCQNI

SEQ ID NO: 55136 - protein, 193 aa, Homo sapiens
MRTTKVYKLVIHKKGFGGSDDELVVNPKVFPHIKLGDIVEIAHPNDEYSPLLLQVKSLKEDLQKETISVDQTVTQVFRLRPYQDVYVNVVDPKDVTLDLVELTFKDQYIGRGDMWRLKKSLVSTCAYITQKVEFAGIRAQAGELWVKNEKVMCGYISEDTRVVFRSTSAMVYIFIQMSCEMWDFDIYGTVSMC

SEQ ID NO: 55137 - protein, 191 aa, Homo sapiens
  MOD_RES (1)..(1): Any amino acid
XEEVGIYRISGVATDIQALKAVFDANNKDILLMLSDMDINAIAGTLKLYFRELPEPLLTDRLYPAFMEGIALSDPAAKENCMMHLLRSLPDPNLITFLFLLEHLKRVAEKEPINKMSLHNLATVFGPTLLRPSEVESKAHLTSAADIWSHDVMAQNSSGTHCTSPPTCSPRQGGCGRVVEPAPPAWGPTQT

SEQ ID NO: 55138 - protein, 235 aa, Homo sapiens
MDLSTFDFRTGKMLMSKMNKSRQRVRYDSSNQVKGKPDLNTALPVRQTASIFKQPVTKITNHPSNKVKSDPQKAVDQPRQLFWEKKLSGLNAFDIAEELVKTMDLPKGLQGVGPGCTDETLLSAIASALHTSTMPITGQLSAAVEKNPGVWLNTTQPLCKAFMVTDEDIRKQEELVQQVRKRLEEALMADMLAHVEELARDGEAPLDKACAEDDDEEDEEEEEEEPDPDPEMEHV

SEQ ID NO: 55139 - protein, 266 aa, Homo sapiens
MVCLKLPGGSCMAALTVTLMVLSSPLALAGDTQPRFLWQGKYKCHFFNGTERVQFLERLFYNQEEFVRFDSDVGEYRAVTELGRPVAESWNSQKDILEDRRGQVDTVCRHNYGVGESFTVQRRVHPEVTVYPAKTQPLQHHNLLVCSVSGFYPGSIEVRWFRNGQEEKAGVVSTGLIQNGDWTFQTLVMLETVPRSGEVYTCQVEHPSVMSPLTVEWRARSESAQSKMLSGVGGFVLGLLFLGAGLFIYFRNQKGHSGLQPTGFLS

SEQ ID NO: 55140 - protein, 603 aa, Homo sapiens
MIVQMTVILKLEMPQDSLILEKSQNWSSQKMDHILICCVCLGDNSEDADEIIQCDNCGITVHEGCYGVDGESDSIMSSASENSTEPWFCDACKCGVSPSCELCPNQDGIFKETDAGRWVHIVCALYVPGVAFGDIDKLRPVTLTEMNYSKYGAKECSFCEDPRFARTGVCISCDAGMCRAYFHVTCAQKEGLLSEAAAEEDIADPFFAYCKQHADRLDRKWKRKNYLALQSYCKMSLQEREKQLSPEAQARINARLQQYRAKAELARSTRPQAWVPREKLPRPLTSSASAIRKLMRKAELMGISTDIFPVDNSDTSSSVDGRRKHKQPALTADFVNYYFERNMRMIQIQENMAEQKNIKDKLENEQEKLHVEYNKLCESLEELQNLNGKLRSEGQGIWALLGRITGQKLNIPAILRAPKERKPSKKEGGTQKTSTLPAVLYSCGICKKNHDQHLLLLCDTCKLHYHLGCLDPPLTRMPRKTKNSYWQCSECDQAGSSDMEADMAMETLPDGTKRSRRQIKEPVKFVPQDVPPEPKKIPIRNTRTRGRKRSFVPEEEKHEERVPRERRQRQSVLQKKPKAEDLRTECATCKGTGDNENLVRYPS

SEQ ID NO: 55141 - protein, 182 aa, Homo sapiens
MCTPVRVSIVCVMGAVGAVWTAPLPLPWAPTPSIHLREEGAAFPFCRVCVLRPRRSKWRSWDVNLGPRRRGLLGCGPCPSGKPRVHLQRTRSGAGAEAGGLPTRGSMRGCPFLGSSAAKCSLLLRPPSRGEASPWLPEFMTHPVHHQQLACVSGWLGTSLLEATCLGPHGGSWWGHHPGSRE

SEQ ID NO: 55142 - protein, 241 aa, Homo sapiens
MAAEQGQILVIATAAVGGFTLLVILTLFFLITGRCQWYIKAKMKSEEKRRNHLQNGHLRFPGIKTYIDPDTYEDPSLAVHEFAKEIDPSRIRIERVIGAGEFGEVCSGRLKTPGKREIPVAIKTLKGGHMDRQRRDFLREASIMGQFDHPNIIRLEGVVTKRSFPAIGVEAFCPSFLRAGFLNSIQAPHPVPGGGSLPPRIPAGRPVMIVVEYMENGSLDSFLRLYPKAEYNGKQCSRYSI

SEQ ID NO: 55143 - protein, 49 aa, Homo sapiens
MSTVEEDSDTVTVETVNSVTLTQDTEGNLILHCPQNEADEIDSEDSIEP

SEQ ID NO: 55144 - protein, 314 aa, Homo sapiens
GRMSANTSMVTEFLLLGFSHLADLQGLLFSVFLTIYLLTVAGNFLIVVLVSTDAALQSPMYFFLRTLSALEIGYTSVTVPLLLHHLLTGRRHISRSGCALQMFFFLFFGATECCLLAAMAYDRYAAICEPLRYPLLLSHRVCLQLAGSAWACGVLVGLGHTPFIFSLPFCGPNTIPQFFCEIQPVLQLVCGDTSLNELQIILATALLILCPFGLILGSYGRILVTIFRIPSVAGRRKAFSTCSSHLIMVSLFYGTALFIYIRPKASYDPATDPLVSLFYAVVTPILNPIIYSLRNTEVKAALKRTIQKTVPMEI

SEQ ID NO: 55145 - protein, 60 aa, Homo sapiens
MRGMKLLGALLALAALLQGAVSLKIAAFNIQTFGETKMSNATLVSYIVQGCTRHLSLRGQ

SEQ ID NO: 55146 - protein, 544 aa, Homo sapiens
MGDILAHESELLGLVKEYLDFAEFEDTLKTFSKECKIKGKPLCKTVGGSFRDSKSLTIQKDLVAAFDNGDQKVFFDLWEEHISSSIRDGDSFAQKLEFYLHIHFAIYLLKYSVGRPDKEELDEKISYFKTYLETKGAALSQTTEFLPFYALPFVPNPMVHPSFKELFQDSWTPELKLKLIKFLALISKASNTPKLLTIYKENGQSNKEILQQLHQQLVEAERRSVTYLKRYNKIQADYHNLIGVTAELVDSLEATVSGKMITPEYLQSVCVRLFSNQMRQSLAHSVDFTRPGTASTMLRASLAPVKLKDVPLLPSLDYEKLKKDLILGSDRLKAFLLQALRWRLTTSHPGEQRETVLQAYISNDLLDCYSHNQRSVLQLLHSTSDVVRQYMARLINAFASLAEGRLYLAQNTKVLQMLEGRLKEEDKDIITRENVLGALQKFSLRRPLQTAMIQDGLIFWLVDVLKDPDCLSDYTLEYSVALLMNLCLRSTGKNMCAKVAGLVLKVLSDLLGHENHEIQPYVNGALYSILSVPSIREEARAMVP

SEQ ID NO: 55147 - protein, 153 aa, Homo sapiens
MQIFVKTLTGKTITLEVEPSDTIENVKAKIQDKEGIPPDQQRLIFAGKQLEDGRTLSDYNIQKESTLHLVLRLRGGMQIFVKTLTGKTITLEVEPSDTIENVKAKIQDKEGIPPDQQRLIFAGKQLEDGRTLSDYNIQKESTLHLVLRLRGGC

SEQ ID NO: 55148 - protein, 138 aa, Homo sapiens
MENSSAASASSEAGSSRSQEIEELERFIDSYVLEYQVQGLLADKTEGDGESERTQSHISQWTADCSEPLDSSCSFSRGRAPPQQNGSKDNSLDMLGTDIWAANTFDSFSGATWDLQPEKLDFTQFHRKVRHTPKQPLP

SEQ ID NO: 55149 - protein, 401 aa, Homo sapiens
MQNSHSGVNQLGGVFVNGRPLPDSTRQKIVELAHSGARPCDISRILQVSNGCVSKILGRYYETGSIRPRAIGGSKPRVATPEVVSKIAQYKRECPSIFAWEIRDRLLSEGVCTNDNIPSVSSINRVLRNLASEKQQMGADGMYDKLRMLNGQTGSWGTRPGWYPGTSVPGQPTQDGCQQQEGGGENTNSISSNGEDSDEAQMRLQLKRKLQRNRTSFTQEQIEALEKEFERTHYPDVFARERLAAKIDLPEARIQVWFSNRRAKWRREEKLRNQRRQASNTPSHIPISSSFSTSVYQPIPQPTTPVSSFTSGSMLGRTDTALTNTYSALPPMPSFTMANNLPMQVSAAGGGLHNPGPREVRSGSGPADLIGCVCTLESFSHYSDWLDQSSRRQSIPSLLSD

SEQ ID NO: 55150 - protein, 401 aa, Homo sapiens
MIIEMATGNPYLPSSSDLDLLHKIVLKVGNLSPHLQNIFSKSPIFAGVVLPQVQHPKNARKKYPKLNGLLADIVHACLQIDPADRISSSDLLHHEYFTRDGFIEKFMPELKAKLLQEAKVNSLIKPKESSKENELRKDERKTVYTNTLLSSSVLGKEIEKEKKPKEIKVRVIKVKGGRGDISEPKKKEYEGGLGQQDANENVHPMSPDTKLVTIEPPNPINPSTNCNGLKENPHCGGSVTMPPINLTNSNLMAANLSSNLFHPSVRLTERAKKRRTSSQSIGQVMPNSRQEDPGPIQSQMEKGIFNERTGHSDQMANENKRKLNFSRSDRKEFHFPELPVTIQSKDTKGMEVKQIKMLKRESKKTESSKIPTLLNVDQNQEKQENTGNAQTERKKNLPDVE

SEQ ID NO: 55151 - protein, 402 aa, Homo sapiens
MKETRGYGGDAPFCTRLNHSYTGMWAPERSAEARGNLTRPPGSGEDCGSVSVAFPITMLLTGFVGNALAMLLVSRSYRRRESKRKKSFLLCIGWLALTDLVGQLLTTPVVIVVYLSKQRWEHIDPSGRLCTFFGLTMTVFGLSSLFIASAMAVERALAIRAPHWYASHMKTRATRAVLLGVWLAVLAFALLPVLGVGQYTVQWPGTWCFISTGRGGNGTSSSHNWGNLFFASAFAFLGLLALTVTFSCNLATIKALVSRCRAKATASQSSAQWGRITTETAIQLMGIMCVLSVCWSPLLIMMLKMIFNQTSVEHCKTHTEKQKECNFFLIAVRLASLNQILDPWVYLLLRKILLRKFCQMRKRRLREQEMGPDGRCFCHAWRQVPRTWCSSHDREPCSVQLS

SEQ ID NO: 55152 - protein, 75 aa, Homo sapiens
MARGNQRELARQKNMKKTQEISKGKRKEDSLTASQRKQRYGVLLCDPDWSAVPQSRFTASSASQAQVTLPPQPSE

SEQ ID NO: 55153 - protein, 165 aa, Homo sapiens
MLAIKRYKQPSAVAHACNPNTLGGREAALKSFNKRKPLSLGITRKERPPLDVDEMLERFKTEAQAFTETKGNVICLGKEVFKGKKPDKDNRCRYILKTKFREMWKSWPGDSKEVQVMAERYKMLIPFSNPRVLPGPFSYTVVLYGPAGLGKTTLAQKLMLDWAED

SEQ ID NO: 55154 - protein, 60 aa, Homo sapiens
MNKPITPSTYVRCLNVGLIRKLSDFIDPQEGWKKLAVAIKKPSGDDRYNQFHIRCCSQNC

SEQ ID NO: 55155 - protein, 607 aa, Homo sapiens
MLENYSHLISLGSSISKPDVITLLEQEKEPWMVVRKETSRRYPDLELKYGPEKVSPENDTSEVNLPKQVIKQISTTLGIEAFYFRNDSEYRQFEGLQGYQEGNINQKMISYEKLPTHTPHASLICNTHKPYECKECGKYFSRSANLIQHQSIHTGEKPFECKECGKAFRLHIQFTRHQKFHTGEKPFECNECGKAFSLLTLLNRHKNIHTGEKLFECKECGKSFNRSSNLVQHQSIHSGVKPYECKECGKGFNRGAHLIQHQKIHSNEKPFVCKECGMAFRYHYQLIEHCQIHTGEKPFECKECGKAFTLLTKLVRHQKIHTGEKPFECRECGKAFSLLNQLNRHKNIHTGEKPFECKECGKSFNRSSNLVQHQSIHAGIKPYECKECGKGFNRGAHLIQHQKIHSNEKPFVCRECEMAFRYHCQLIEHSRIHTGDKPFECQDCGKAFNRGSSLVQHQSIHTGEKPYECKECGKAFRLYLQLSQHQKTHTGEKPFECKECGKFFRRGSNLNQHRSIHTGKKPFECKECGKAFRLHMHLIRHQKLHTGEKPFECKECGKAFRLHMQLIRHQKLHTGEKPFECKECGKVFSLPTQLNRHKNIHTGEKAS

SEQ ID NO: 55156 - protein, 44 aa, Homo sapiens
MPLPVQVFNLQSPGRGARCLAHVAGGRGAHADRRGPPGRPAECT

SEQ ID NO: 55157 - protein, 36 aa, Homo sapiens
MLVIPPGLSEEEEALQKKFNKLKKKTVSFLRVGTMH

SEQ ID NO: 55158 - protein, 241 aa, Homo sapiens
MAGSPTCLTLIYILWQLTEHLSKPKVTMGLQSNKNGTCVTNLTCCMEHGEEDVIYTWKALGQAANESHNGSILPISWRWGESDMTFICVARNPVSRNFSSPILARKLCEGDCLSPLHRRLCPGAADDPDSSMVLLCLLLVPLLLSLFVLGLFLWFLKRERQEEYIEEKKRVDICRETPNICPHSGENTEYDTIPHTNRTILKEDPANTVYSTVEIPKKMENPHSLLTMPDTPRLFAYENVI

SEQ ID NO: 55159 - protein, 81 aa, Homo sapiens
MGPCRRHLDSVLQQLQTEVYRGAQTLYVPNCDHRGFYRKRQCRSSQGQRRGPCWCVDRMGKSLPGSPDGNGSSSCPTGSSG

SEQ ID NO: 55160 - protein, 489 aa, Homo sapiens
MISAAQLLDELMGRDRNLAPDEKRSNVRWDHESVCKYYLCGFCPAELFTNTRSDLGPCEKIHDENLRKQYEKSSRFMKVGYERDFLRYLQSLLAEVERRIRRGHARLALSQNQQSSGAAGPTGKNEEKIQVLTDKIDVLLQQIEELGSEGKVEEAQGMMKLVEQLKEERELLRSTTSTIESFAAQEKQMEVCEVCGAFLIVGDAQSRVDDHLMGKQHMGYAKIKATVEELKEKLRKRTEEPDRDERLKKEKQEREEREKEREREREERERKRRREEEEREKERARDRERRKRSRSRSRHSSRTSDRRCSRSRDHKRSRSRERRRSRSRDRRRSRSHDRSERKHRSRSRDRRRSKSRDRKSYKHRSKSRDREQDRKSKEKEKRGSDDKKSSVKSGSREKQSEDTNTESKESDTKNEVNGTSEDIKSEVQRKYAQMKMELSRVRRHTKASSEGKDSVVLQNILRYIVLSQLFCSRLVPPLVCLFGNYRPHL

SEQ ID NO: 55161 - protein, 81 aa, Homo sapiens
ARGAAAGAAAGSGWTQEAGVAGGGAVIRTMRPTGHHVAHRGWRGRRTRALAVAGEPAPVGFPRMRSEPAQPPLGTHGGALL

SEQ ID NO: 55162 - protein, 280 aa, Homo sapiens
MAQPPPDVEGDDCLPAYRHLFCPDLLRDKVAFITGGGSGIGFRIAEIFMRHGCHTAARKLAGATGRRCLPLSMDVRAPPAVMAAVDQALKEFGRIDILINCAAGNFLCPAGALSFNAFKTVMDIDTSGTFNVSRVLYEKFFRDHGGVIVNITATLGNRGQALQVHAGSAKAAVDAMTRHLAVEWGPQNIRVNSLAPGPISGTEGLRRLGGPQASLSTKVTASPLQRLGNKTEIAHSVLYLASPLASYVTGAVLVADGGAWLTFPNGVKGLPDFASFSAKL

SEQ ID NO: 55163 - protein, 310 aa, Homo sapiens
MGRNNLTRPSEFILLGLSSRPEDQKPLFAVFLPIYLITVIGNLLIILAIRSDTRLQTPMYFFLSILSFVDICYVTVIIPKMLVNFLSETKTISYSECLTQMYFFLAFGNTDSYLLAAMAIDRYVAICNPFHYITIMSHRCCVLLLVLSFCIPHFHSLLHILLTNQLIFCASNVIHHFFCDDQPVLKLSCSSHFVKEITVMTEGLAVIMTPFSCIIISYLRILITVLKIPSAAGKRKAFSTCGSHLTVVTLFYGSISYLYFQPLSNYTVKDQIATIIYTVLTPMLNPFIYSLRNKDMKQGLAKLMHRMKCQ

SEQ ID NO: 55164 - protein, 232 aa, Homo sapiens
MASDSDVKMLLNFVNLASSDIKAALDKSAPCRRSVDHRKYLQKQLKRFSQKYSRLPRGLPGRAAEPYLKRGSEDRPRRLLLDLGPDSSPGGGGGCKEKVLRNPYREECLAKEQLPQRQHPEAAQPGQVPMRKRQLPASFWEEPRPTHSYHVGLEGGLGPREGPPYEGKKNCKGLEPLGPETTLVSMSPRALAEKEPLKMPGVSLVGRVNAWSCCPFQYHGQPIYPGPLGALP

SEQ ID NO: 55165 - protein, 192 aa, Homo sapiens
MFYFRGCGRWVAVSFTKQQFPLARLSSDSAAPRTPHFDVIVIGGGHAGTEAATAAARCGSRTLLLTHRVDTIGQMSCNPSFGGIGKGHLMREVDALDGLCSRICDQSGVHYKVLNRRKGPAVWGLRAQIDRKLYKQNMQKEILNTPLLTVQEGAVEDLILTEPEPEHTGKCRVSGVVLARRSAAMLLDSHQP

SEQ ID NO: 55166 - protein, 518 aa, Homo sapiens
MSLVPATNYIYTPLNQLKGGTIVNVYGVVKFFKPPYLSKGTDYCSVVTIVDQTNVKLTCLLFSGNYEALPIIYKNGDIVRFHRLKIQVYKKETQGITSSGFASLTFEGTLGAPIIPRTSSKYFNFTTEDHKMVEALRVWASTHMSPSWTLLKLCDVQPMQYFDLTCQLLGKAEVDGASFLLKVWDGTRTPFPSWRVLIQDLVLEGDLSHIHRLQNLTIDILVYDNHVHVARSLKVGSFLRIYSLHTKLQSMNSENQTMLSLEFHLHGGTSYGRGIRVLPESNSDVDQLKKDLESANLTANQHSDVICQSEPDDSFPSSGSVSLYEVERCQQLSATILTDHQYLERTPLCAILKQKAPQQYRIRAKLRSYKPRRLFQSVKLHCPKCHLLQEVPHEGDLDIIFQDGATKTPDVKLQNTSLYDSKIWTTKNQKGRKVAVHFVKNNGILPLSNECLLLIEGGTLSEICKLSNKFNSVIPVRSGHEDLELLDLSAPFLIQGTIHHYGTGYCTPPICVCYDLYT

SEQ ID NO: 55167 - protein, 180 aa, Homo sapiens
MLPAVGSVDEEEDPAEEDCPELVPIETTQSEEEEKSGLGAKIPVTIITGYLGAGKTTLLNYILTEQHSKRVAVILNESGEGSALEKSLAVSQGGELYEEWLELRNGCLCCSVKDNGLRAIENLMQKKGKFDDILLETTGLADPGAVASMFWVDAELGSDIYLDGIITIVDSKYGLKVKYH

SEQ ID NO: 55168 - protein, 448 aa, Homo sapiens
MIPTFTALLCLGLSLGPRTHMQAGPLPKPTLWAEPGSVISWGNSVTIWCQGTLEAREYRLDKEESPAPWDRQNPLEPKNKARFSIPSMTEDYAGRYRCYYRSPVGWSQPSDPLELVMTGAYSKPTLSALPSPLVTSGKSVTLLCQSRSPMDTFLLIKERAAHPLLHLRSEHGAQQHQAEFPMSPVTSVHGGTYRCFSSHGFSHYLLSHPSDPLELIVSGSLEGPRPSPTRSVSTAAGPEDQPLMPTGSVPHSGLRRHWEVLIGVLVVSILLLSLLLFLLLQHWRQGKHRTLAQRQADFQRPPGAAEPEPKDGGLQRRSSPAADVQGENFCAAVKDTQPEDGVEMDTRQSPHDEDPQAVTYAKVKHSRPRREMASPPSPLSGEFLDTKDRQAEEDRQMDTEAAASEAPQDVTYAQLHSFTLRQKATEPPPSQEGASPAEPSVYATLAIH

SEQ ID NO: 55169 - protein, 214 aa, Homo sapiens
MMWSNFFLQEENRRRGAAGRRRAHGQGRSGLTPEREGKVKLALLLAAVGATLAVLSVGTEFWVELNTYKANGSAVCEAAHLGLWKACTKRLWQADVPVDRDTCGPAELPGEANCTYFKFFTTGENARIFQRTTKKGLLLLVSLEVFRHSVRALLQRVSPEPPPAPRLTYEYSWSLGCGVGAGLILLLGAGCFLLLTLPSWPWGSLCPKRGHRAT

SEQ ID NO: 55170 - protein, 238 aa, Homo sapiens
MPFPVTTQGSQQTQPPQKHYGITSPISLAAPKETDCVLTQKLIETLKPFGVFEEEEELQRRILILGKLNNLVKEWIREISESKNLPQSVIENVGGKIFTFGSYRLGVHTKGADIDALCVAPRHVDRSDFFTSFYDKLKLQEEVKDLRAVEEAFVPVIKLCFDGIEIDILFARLALQTIPEDLDLRDDSLLKNLDIRCIRSLNGMRKPTSFCVLQFLSDISCFYTSFVLKLFIAILLTQ

SEQ ID NO: 55171 - protein, 129 aa, Homo sapiens
MTSHHCVGPGNHISWSGHEKEHRLDYCPEVTFPLTKGFPLGYTLLFNFASYPFLLPSKIKTLLRNKDSFLNILCPACLLLIRRCNIEYSSTGLNFLNTFTVSLIVTVIPLLQNVPVPLGNNVGKMQVYE

SEQ ID NO: 55172 - protein, 39 aa, Homo sapiens
MDTTAAAALPAFVALLLLSPWPLLGSAQGQFSAEKACSY

SEQ ID NO: 55173 - protein, 246 aa, Homo sapiens
MAFSGCQAPYLSPAVPFSGTIQGGLQDGFQITVNGAVLSCSGTRFAVDFQTGFSGNDIAFHFNPRFEDGGYVVCNTRQKGTWGPEERKMHMPFQKGMPFDLCFLVQSSDFKVMVNGSLFVQYFHRVPFHRVDTISVNGSVQLSYISFQPPSVRPANPAPITQTVIHTVQSASGQMFSTPAIPPMMYPHPAYPMPFITTIPGGLYPSKSIILSGTVLPSAQRCGSCVKLTASRWPWMVSTCLNTTIA

SEQ ID NO: 55174 - protein, 116 aa, Homo sapiens
MALLCYNRGCGQRFDPETNSDDACTYHPGVPVFHDALKGWSCCKRRTTDFSDFLSIVGCTKGRHNSEKPPEPVKPEVKTTEKKELCELKPKFQEHIIQAPKPVEAIKRPRSSSCYT

SEQ ID NO: 55175 - protein, 143 aa, Homo sapiens
MFCTKLKDLKITGECPFSLLAPGQVPNESSEEAAGSSESCKATVPICQDIPEKNIQESLPQRKTSRSRVYLHTLAESICKLIFPEFERLNVALQRTLAKHKIKESRKSLEREDFEKTIAEQAVAAGGDHWRCLLCSWGITQRE

SEQ ID NO: 55176 - protein, 216 aa, Homo sapiens
MSRRALRRLRGEQRGQEPLGPGALHFDLRDDDDAEEEGPKRELGVRRPGGAGKEGVRVNNRFELINIDDLEDDPVVNGERSGCALTDAVAPGNKGRGQRGNTESKTDGDDTETVPSEQSHASGKLRKKKKKQKNKKSSTGEASENGLEDIDRILERIEDSTGLNRPGPAPLSSRKHVLYVEHRHLNPDTELKRYFGARAILGEQRDRVLLGCPVWF

SEQ ID NO: 55177 - protein, 85 aa, Homo sapiens
  MOD_RES (1)..(1): Any amino acid
XSLPSDPLELVVSEPLSISPSPTPAGSLGHLKTREEAAWASVGSDCDEAGVHPRCAPLERSTPAVGAAHTAPPVLTWRPLCSGHP

SEQ ID NO: 55178 - protein, 935 aa, Homo sapiens
MESQEFIVLYTHQKMKKSKVWQDGILKITHLGNKAILYDDKGACLESLFLKCLEVKPGDDLESDRYLITVEEVKVAGAIGIVKQNVNKEAPELNSRTFISSGRSLGCQPSGLKRKFTGFQGPRQVPKKMVIMESGESAASHEAKKTGPTIFSPFCSMPPLFPTVGKKDVNNILADPENIVTYKNRERNAMDFSSVFSPSFQINPEVLCEENYFCSPVNSGNKLSDSLLTNEPVKRDSLASHYSGVSQNIRSKAQILALLKSESSSSCEELNSEMTEHFPQKQPQGSLKIATKPKYLIQQEECAEMKSTENLYYQHQSENTMRNKSRWAMYLSSQSSPIHSSTVDGNDTERKPKAQEDDVNSNLKDLSLQKIIQFVETYAEERKKYNVDQSVGNNDPSWNQEVKLEIPSFNESSSLQVTCSSAENDGILSESDIQEDNKIPFNQNDKGCIKGSVLIKENAQEVNTCGTLEKEYEQSESSLPELKHLQIESSNNSRISDDITDMISESKMDNESLNSIHESLSNVTQPFLEVTFNLNNFETSDTEEESQESNKISQDSESWVKDILVNDGNSCFQKRSENTNCEEIEGEHLPFLTSVSDKPTVTFPVKETLPSQFCDKTYVGFDMGICKTENTGKEIEEYSDTLSNFESFKWTDAVYGDNKEDANKPIQEVRINYDFALPPNKSKGINMNLHIPHIQNQIAENSNLFSEDAQPQPFILGSDLDKNDEHVLPSTSSSDNSVQLLNTNQNHYECIALDKSNTHISNSLFYPLGKKHLISKDTEAHISEPEDLGKIRSPPPDHVEVETAREGKQYWNPRNSSELSGLVNTISILKSLCEHSTALDSLEILKKKNTVFQQGTQQTYEPDSPPEVRKPFITVVSPKSPHLHKDSQQILKEDEVELSEPLQSVQFSSSGSKEETAFQAVIPKQIERKTCDPKG

SEQ ID NO: 55179 - protein, 426 aa, Homo sapiens
MFWEVISDEHGIDPTGTYHGDSDLQLDRISVYYNEATGGKYVPRAILVDLEPGTMDSVRSGPFGQIFRPDNFVFGQSGAGNNWAKGHYTEGAELVDSVLDVVRKEAESCDCLQGFQLTHSLGGGTGSGMGTLLISKIREEYPDRIMNTFSVVPSPKVSDTVVEPYNATLSVHQLVENTDETYCIDNEALYDICFRTLKLTTPTYGDLNHLVSATMSGVTTCLRFPGQLNADLRKLAVNMVPFPRLHFFMPGFAPLTSRGSQQYRALTVPELTQQVFDAKNMMAACDPRHGRYLTVAAVFRGRMSMKEVDEQMLNVQNKNSSYFVEWIPNNVKTAVCDIPPRGLKMAVTFIGNSTAIQELFKRISEQFTAMFRRKAFLHWYTGEGMDEMEFTEAESNMNDLVSEYQQYQDATAEEEEDFGEEAEEEA

SEQ ID NO: 55180 - protein, 235 aa, Homo sapiens
MACSRPPSQCEPTSLPPGPPAGRRHLPLSRRRREMSSNKEQRSAVFVILFALITILILYSSNSANEVFHYGSLRGRSRRPVNLKKWSITDGYVPILGNKTLPSRCHQCVIVSSSSHLLGTKLGPEIERAECTIRMNDAPTTGYSADVGNKTTYRVVAHSSVFRVLRRPQEFVNRTPETVFIFWGPPSKMQKPQGSLVRVIQRAGLVFPNMEAYAVSPGRMRQFDDLFRGRSLIRG

SEQ ID NO: 55181 - protein, 60 aa, Homo sapiens
MNLGDGLKLETELLDGKTKLILSPYEHKSKISVKCLKVFACLWIEPSLDDVPLYPSTLSP

SEQ ID NO: 55182 - protein, 473 aa, Homo sapiens
MQPWQCLRRFALAWWERTAEGRARSPREEAGPRDPGGRGEPDPERSSPPMLSADDAEYPREYRTLGGGGGGGSGGRRFSNVGLVHTSERRHTVIAAQSLEALSGLQKADADRKRDAFMDHLKSKYPQHALALRGQQDRMREQVGGWTVDPVCLLSSLCSHLHGDSAPSGAGQPAQTRSSRHTQGAQPGLADQAAKLSYASAESLETMSEAELPLGFSRMNRFRQSLPLSRSASQTKLRSPGVLFLQFGEETRRVHITHEVSSLDTLHALIAHMFPQKLTMGMLKSPNTAILIKDEARNVFYELEDVRDIQDRSIIKIYRKEPLYAAFPGSHLTNGDLRREMVYASRESSPTRRLNNLSPAPHLASGSPPPGLPSGLPSGLQSGSPSRSRLSYAGGRPPSYAGSPVHHAAERLGGAPAAQGVSPSPSAILERRDVKPDEDLASKAGGMVLVKGEGLYADPYGLLHEGRLSLAAA

SEQ ID NO: 55183 - protein, 338 aa, Homo sapiens
MYGVFVRILTERSQRKAFLQARSCIEDRLRLEDENEKQERLLMSLLPRNVAMEMKEDFLKPPERIFHKIYIQRHDNVSILFADIVGFTGLASQCTAQELVKLLNELFGKFDELATENHCRRIKILGDCYYCVSGLTQPKTDHAHCCVEMGLDMIDTITSVAEATEVDLNMRVGLHTGRVLCGVLGLRKWQYDVWSNDVTLANVMEAAGLPGKVHITKTTLACLNGDYEVEPGYGHERNSFLKTHNIETFFIVPSHRRKIFPGLILSDIKPAKRMKFKTVCYLLVQLMHCRKMFKAEIPFSNVMTCEDDDKVQIHPSLSGLDVLLGFWSPTLQRGRLCT

SEQ ID NO: 55184 - protein, 319 aa, Homo sapiens
MKLKLKNVFLAYFLVSIAGLLYALVQLGQPCDCLPPLRAAAEQLRQKDLRISQLQAELRRPPPAPAQPPEPEALPTIYVVTPTYARLVQKAELVRLSQTLSLVPRLHWLLVEDAEGPTPLVSGLLAASGLLFTHLVVLTPKAQRLREGEPGWVHPRGVEQRNKALDWLRGRGGAVGGEKDPPPPGTQGVVYFADDDNTYSRELFEEMRWTRGVSVWPVGLVGGLRFEGPQVQDGRVVGFHTAWEPSRPFPVDMAGFAVALPLLLDKPNAQFDSTAPRGHLESSLLSHLVDPKDLEPRAANCTRSLAVSPRLECSSAILA

SEQ ID NO: 55185 - protein, 142 aa, Homo sapiens
MELCRSLALLGGSLGLMFCLIALSTDFWFEAVGPTHSAHSGLWPTGHGDIISGHGPLVSTTAAFAAGKDSGLDWGIASQRIPAEELSHLSCPCPQPSPWWWPWRCTPASGGTSLHTPRSRPSSPGPSTWAGSQLSSCSVQVP

SEQ ID NO: 55186 - protein, 28 aa, Homo sapiens
MNFQENVTLAMALFTILTSIYFFNKAQQ

SEQ ID NO: 55187 - protein, 43 aa, Homo sapiens
MPSPRLQHSKPPRRLSRAQKHSSGSSNTSTANRSTHNELEKNR

SEQ ID NO: 55188 - protein, 300 aa, Homo sapiens
MRPARASLAAAGRDWGAALGTHLPREERIGIIGGTGLDDPEILEGRTEKYVDTPFGKPSDALILGKIKNVDCVLLARHGRQHTIMPSKVNYQANIWALKEEGCTHVIVTTACGSLREEIQPGDIVIIDQFIDRTTMRPQSFYDGSHSCARGVCHIPMAEPFCPKTREVLIETAKKLGLRCHSKGTMVTIEGPRFSSRAESFMFRTWGADVINMTTVPEVVLAKEAGICYASIAMATDYDCWKEHEEAVSVDRVLKTLKENANKAKSLLLTTIPQIGSTEWSETLHNLKNMAQFSVLLPRH

SEQ ID NO: 55189 - protein, 33 aa, Homo sapiens
MGKKRVTDHKLNVDKVIKNINTISSELKKIKVN

SEQ ID NO: 55190 - protein, 36 aa, Homo sapiens
MTSRRLEESMGAVQMGLVNMFKGFQSKVLPPLSPKV

SEQ ID NO: 55191 - protein, 522 aa, Homo sapiens
MSSRPLESPPPYRPDEFKPNHYAPSNDIYGGEMHVRPMLSQPAYSFYPEDEILHFYKWTSPPGVIRILSMLIIVMCIAIFACVASTLAWDRGYGTSLLGGSVGYPYGGSGFGSYGSGYGYGYGYGYGYGGYTDPRAAKGFMLAMAAFCFIAALVIFVTSVIRSEMSRTRRYYLSVIIVSAILGIMVFIATIVYIMGVNPTAQSSGSLYGSQIYALCNQFYTPAATGLYVDQYLYHYCVVDPQEAIAIVLGFMIIVAFALIIFFAVKTRRKMDRYDKSNILWDKEHIYDEQPPNVEEWVKNVSAGTQDVPSPPSDYVERVDSPMAYSSNGKVNDKRFYPESSYKSTPVPEVVQELPLTSPVDDFRQPRYSSGGNFETPSKRAPAKGRAGRSKRTEQDHYETDYTTGGESCDELEEDWIREYPPITSDQQRQLYKRNFDTGLQEYKSLQSELDEINKELSRLDKELDDYREESEEYMAAADEYNRLKQVKGSADYKSKKNHCKQLNSKLSHIKKMVGDYDRQKT

SEQ ID NO: 55192 - protein, 158 aa, Homo sapiens
MSTFRQEDVEDHYEMGEELGSGQFAIVRKCRQKGTGKEYAAKFIKKRRLSSSRRGVSREEIEREVNILREIRHPNIITLHDIFENKTDVVLILELVSGGELFDFLAEKESLTEDEATQFLKQILDGVHYLHSKRIAHFDLKPENIMLLDKNVPNPRIK

SEQ ID NO: 55193 - protein, 425 aa, Homo sapiens
MAAVGSGGYARNDAGEKLPSVMAGVPARRGQSSPPPAPPICLRRRTRLSTASEETVQNRVSLEKVLGITAQNSSGLTCDPGTGHVAYLAGCVVVILDPKENKQQHIFNTARKSLSALAFSPDGKYIVTGENGHRPAVRIWDVEEKNQVAEMLGHKYGVACVAFSPNMKHIVSMGYQHDMVLNVWDWKKDIVVASNKVSCRVIALSFSEDSSYFVTVGNRHVRFWFLEVSTETKVTSTVPLVGRSGILGELHNNIFCGVACGRGRMAGSTFCVSYSGLLCQFNEKRVLEKWINLKVSLSSCLCVSQELIFCGCTDGIVRIFQAHSLHYLANLPKPHYLGVDVAQGLEPSFLFHRKAEAVYPDTVALTFDPIHQWLSCVYKDHSIYIWDVKDINRVGKVWSELFHSSYVWNVETEFHSCCPGWSAMV

SEQ ID NO: 55194 - protein, 47 aa, Homo sapiens
MIGDILLFGTLLMNAGAVLNFKLKKKDTQGFGEESREPSTGLERESD

SEQ ID NO: 55195 - protein, 130 aa, Homo sapiens
MAASGKTSKSEPNHVIFKKISRDKSVTIYLGNRDYIDHVSQVQPVDGVVLVDPDLVKGKKGEMKPLVSGWFLGGVDCSLGGSGKGHLHGRRDRKAEAALLHMEPVPGPLTHTPVPNSRDIGPVDTRAHSL

SEQ ID NO: 55196 - protein, 39 aa, Homo sapiens
MTSRRLEESMGAVQMGLVNMFKGFQSKVLPPLSPKVVTE

SEQ ID NO: 55197 - protein, 421 aa, Homo sapiens
APRSSRGAQAAACHTSHHSAGSRPGGHLGGQAVGTPNCVPVEGPGCTKEEDVLASSACVSTDGGSLHCHNPSGPSDVPARQPHPEQEGWPPGTGDFPSQVPKQVLDVSQELLQSGVVTLPGTRDRHGRAVVQVRTRSLLWTREHSSCAELTRLLLYFHSIPRKEVRDLGLVVLVDARRSPAAPAVSQALSGLQNNTSPIIHSILLLVDKESAFRPDKDAIIQCEVVSSLKAVHKFVDSCQLTADLDGSFPYSHGDWICFRQRLEHFAANCEEAIIFLQNSFCSLNTHRTPRTAQEVAELIDQHETMMKLVLEDPLLVSLRLEGGTVLARLRREELGTEDSRDTLEAATSLYDRVDEEVHRLVLTSNNRLQQLEHLRELASLLEGNDQVRAAGGRRPGQHPLQARLAKATLSPSHCVFRALI

SEQ ID NO: 55198 - protein, 178 aa, Homo sapiens
MLPRPKAPASPRRPQTPTPSEQDADPGPASPRDTEAQRLRFRQFQYHVASGPHLALGQLWTLCRQWLRPEARSKEQMLELLVLEQFLGALPSKMRTWVQSQGPRSCREAASLVEDLTQMCQQEGERRRLPAPGRARGPDVSEDRTALLPAHIAPTPARPLPTSKPLLPRGCVFNYFYI

SEQ ID NO: 55199 - protein, 334 aa, Homo sapiens
MEFPGLGSLGTSEPLPQFVDPALVSSTPESGVFFPSGPEGLDAAASSTAPSTATAAAAALAYYRDAEAYRHSPVFQVYPLLNCMEGIPGGSPYAGWAYGKTGLYPASTVCPTREDSPPQAVEDLDGKGSTSFLETLKTERLSPDLLTLGPALPSSLPVPNSAYGGPDFSSTFFSPTGSPLNSAAYSSPKLRGTLPLPPCEARECVNCGATATPLWRRDRTGHYLCNACGLYHKMNGQNRPLIRPKKRLIVSKRAGTQCTNCQTTTTTLWRRNASGDPVCNACGLYYKLHQHYCGGSAQLMRAQSMASRGGVVSFSSCSQNSGQPKSLGPRHPLA

SEQ ID NO: 55200 - protein, 152 aa, Homo sapiens
ESKKALPPEKKQNTGSKKSNKNKSGKNQFNRGGGHRGRGGFNMRGGNFRGGAPGNRGGYNRRGNMPQRGGGGGGSGGIGYPYPRAPVFPGRGSYSNRGNYNRGGMPNRGNYNQNFRGRGNNRGYKNQSQGYNQWQQGSVHVNVLCGRVKGPN

SEQ ID NO: 55201 - protein, 278 aa, Homo sapiens
MFLVNSFLKGGGGGGGGGGGLGGGLGNVLGGLISGAGGGGGGGGGGGGGGGGGGGGTAMRILGGVISAISEAAAQYNPEPPPPRTHYSNIEANESEEVRQFRRLFAQLAGDDMEVSATELMNILNKVVTRHPDLKTDGFGIDTCRSMVAVMDLSLFLTPSHQSDTTGKLGFEEFKYLWNNIKRWQAIYKQFDTDRSGTICSSELPGAFEAAGFHLNEHLYNMIIRRYSDESGNMDFDNFISCLVRLDAMFRAFKSLDKDGTGQIQVNIQEWLQLTMYS

SEQ ID NO: 55202 - protein, 151 aa, Homo sapiens
MELKQSLSTHLEAEKPLRRYGAVEETAWKTERLGRNQLDIISMAETTMMPEEIELEMAKIQRLREVLVRRESELRFMMDDIQLCKDIMDLKQELQNLVAIPEKEKTKLQKQREDELIQKIHKLVQKRDFLVDDAEVERLRLPGREESRAPT

SEQ ID NO: 55203 - protein, 242 aa, Homo sapiens
MPVPWFLLSLALGRSPVVLSLERLVGPQDATHCSPGLSCRLWDSDILCLPGDIVPAPGPVLAPTHLQTELVLRCQKETDCDLCLRVAVHLAVHASLQAQVVLSFQAYPTARCVLLEVQVPAALVQFGQSVGSVVYDCFEAALGSEVRIWSYTQPRYEKELNHTQQLPALPWLNVSADGDNVHLVLNVSEEQHFGLSLYWNQVQGPPKPRWHKNLVRPPPSQVHSHCRPMPVQRTQCHIREDP

SEQ ID NO: 55204 - protein, 126 aa, Homo sapiens
MRTKMRIMGFRGTVIKPLNEEAAAELGAELLGEATIFIVGGGCLVLEYWRHQAQQRHKEEEQRAAWNALRDEVGHLALALEALQAQVQAAPPQGALEELRTELQEVRAQLCNPGRSASHAVPASKK

SEQ ID NO: 55205 - protein, 276 aa, Homo sapiens
MALLDVCGAPRGQRPESALPVAGSGRRSDPGHYSFSMRSPELALPRGMKPTEFFQSLGGDGERNVQIEMAHGTTTLAFKFQHGVIAAVDSRASAGSYISALRVNKVIEINPYLLGTMSGCAADCQYWERLLAKECRLYYLRNGERISVSAASKLLSNMMCQYRGMGLSMGSMICGWDKKGPGLYYVDEHGTRLSGNMFSTGSGNTYAYGVMDSGYRPNLSPEEAYDLGRRAIAYATHRDSYSGGVVNMYHMKEDGWVKVESTDVSDLLHQYREANQ

SEQ ID NO: 55206 - protein, 422 aa, Homo sapiens
MSFVECPYHSPAERLVAEADEGGPSAITGMGLCFRCLLFSFSGRSGVEGGRVDLNVFGSLGLQPWIGSSRCWGGPCSSALRCGWFSSWPPPSKSAIPIGGGSRGAGRVSRWPPPHWLEAWRVSPRPLSPLSPATFGRGFIAVAVIPGLWARGRGCSSDRLPRPAGPARRQFQAASLLTRGWGRAWPWKQILKELDECYERFSRETDGAQKRRMLHCVQRALIRSQELGDEKIQIVSQMVELVENRTRQVDSHVELFEAQQELGDTAGNSGKAGADRPKGEAAAQADKPNSKRSRRQRNNENRENASSNHDHDDGASGTPKEKKAKTSKKKKRSKAKAEREASPADLPIDPNEPTYCLCNQVSYGEMIGCDNDECPIEWFHFSCVGLNHKPKGKWYCPKCRGENEKTMDKALEKSKKERAYNR

SEQ ID NO: 55207 - protein, 54 aa, Homo sapiens
MLFHGISGGHIQGIMEEMERRSKTEARLAKGAQLNGRDAASPRRGSAAPRASWA

SEQ ID NO: 55208 - protein, 83 aa, Homo sapiens
MLSEVLLVSAPGKVILHGEHAVVHGKVALAVSLNLRTFLRLQPHSNGKVDLSLPNIGIKRAWDVARLQSLDTSFLGGPRRIWS

SEQ ID NO: 55209 - protein, 150 aa, Homo sapiens
MSAAPAYSEDKGGSAGPGEPEYGHDPASGGIFSSDYKRHDDLKEMLDTNKDSLKLEAMKRIVAMIARGKNASDLFPAVVKNVACKNIEVKKLVYVYLVRYAEEQQDLALLSISTFQRGLKVLTVLPRLECSGAIMAHWSLDFPELRIPTS

SEQ ID NO: 55210 - protein, 622 aa, Homo sapiens
MFVQGGDRDRMTANHESYLLMASTQNDMEDWVKSIRRVIWGPFGGGIFGQKLEDTVRYEKRYGNRLAPMLVEQCVDFIRQRGLKEEGLFRLPGQANLVKELQDAFDCGEKPSFDSNTDVHTVASLLKLYLRELPEPVIPYAKYEDFLSCAKLLSKEEEAGVKELAKQVKSLPVVNYNLLKYICRFLDEVQSYSGVNKMSVQNLATVFGPNILRPKVEDPLTIMEGTVVVQQLMSVMISKHDCLFPKDAELQSKPQDGVSNNNEIQKKATMGQLQNKENNNTKDSPSRQCSWDKSESPQRSSMNNGSPTALSGSKTNSPKNSVHKLDVSRSPPLMVKKNPAFNKGSGIVTNGSFSSSNAEGLEKTQTTPNGSLQARRSSSLKVSGTKMGTHSVQNGTVRMGILNSDTLGNPTNVRNMSWLPNGYVTLRDNKQKEQAGELGQHNRLSTYDNVHQQFSMMNLDDKQSIDSATWSTSSCEISLPENSNSCRSSTTTCPEQDFFGGNFEDPVLDGPPQDDLSHPRDYESKSDHRSVGGRSSRATSSSDNSETFVGNSSSNHSALHSLVSSLKQEMTKQKIEYESRIKSLEQRNLTLETEMMSLHDELDQERKKFTMIEIKMRNAERA

SEQ ID NO: 55211 - protein, 47 aa, Homo sapiens
MNQSIPVAPTPPRRVRLKPWLVAQVNSCQYPGLQWVNGEKKLFCIPW

SEQ ID NO: 55212 - protein, 82 aa, Homo sapiens
MMKTLLLFVGLLLTWESGQVLGDQTVSDNELQEMSNQGSKYVNKEIQNAVNGVKQIKTLIEKTNEERKTLLSNLEEAKKKKE

SEQ ID NO: 55213 - protein, 193 aa, Homo sapiens
  MOD_RES (1)..(1): Any amino acid
XIFFGLLVSPEEIGLSGIEAEENFEEDSHRPLINGGENEDEYEPNYSIQDDSSVAQVKAISFYQACCLPGVIPYSLAYACLKLVNYSFFFWLPFYLSNNFGWKEAEADKLSIWYDVGGIIGGTLQGFISDVLQKRAPVLALSLLLAVGSLIGYSLFSVSDPGQARMDVGFLLFHSHDKLYNCVYLAINSEGNI

SEQ ID NO: 55214 - protein, 29 aa, Homo sapiens
MSRYLLPLSALGTVAGAAVLLKDYVTGGA

SEQ ID NO: 55215 - protein, 81 aa, Homo sapiens
LDIKHNRPRRDCVAEGKVCDPLCSSGGCWGPGPGQCLSCRNYSRGGVCVTHCNFLNGYSKGSQSRMGGGGALQWNCSGGIQ

SEQ ID NO: 55216 - protein, 180 aa, Homo sapiens
MHLEPQSMVWLPVLHRVAAAETAKHQAKCNICKECPIVGFRYRSLKHFNYDVCQSCFFSGRTAKGHKLHYPMVEYCIPTTSGEDVRDFTKVLKNKFRSKKYFAKHPRLGYLPVQTVLEGDNLETPITLISMWPEHYDPSQSPQLFHDDTHSRIEQYATRLAQMERTNGSFLTDSSSTTGS

SEQ ID NO: 55217 - protein, 931 aa, Homo sapiens
MKSVCRRGPCRAPLWFSWSSRVVLWSTGRKKEVHLLTCYQLSNPGRLLDYPAHMEGQIWFLPRSLQLTGFQAYKLRVTHLYQLKQHNILASVGEDEEGINPLVKIWNLEKRDGGNPLCTRIFPAIPGTEPTVVSCLTVHENLNFMAIGFTDGSVTLNKGDITRDRHSKTQILHKGNYPVTGLAFRQAGKTTHLFVVTTENVQSYIVSGKDYPRVELDTHGCGLRCSALSDPSQDLQFIVAGDECVYLYQPDERGPCFAFEGHKLIAHWFRGYLIIVSRDRKVSPKSEFTSRDSQSSDKQILNIYDLCNKFIAYSTVFEDVVDVLAEWGSLYVLTRDGRVHALQEKDTQTKLEMLFKKNLFEMAINLAKSQHLDSDGLAQIFMQYGDHLYSKGNHDGAVQQYIRTIGKLEPSYVIRKFLDAQRIHNLTAYLQTLHRQSLANADHTTLLLNCYTKLKDSSKLEEFIKKKSESEVHFDVETAIKVLRQAGYYSHALYLAENHAHHEWYLKIQLEDIKNYQEALRYIGKLPFEQAESNMKRYGKILMHHIPEQTTQLLKGLCTDYRPSLEGRSDREAPGCRANSEEFIPIFANNPRELKAFLEHMSEVQPDSPQGIYDTLLELRLQNWAHEKDPQVKEKLHAEAISLLKSGRFCDVFDKALVLCQMHDFQDGVLYLYEQGKLFQQIMHYHMQHEQYRQVISVCERHGEQDPSLWEQALSYFARKEEDCKEYVAAVLKHIENKNLMPPLLVVQTLAHNSTATLSVIRDYLVQKLQKQSQQIAQDELRVRRYREETTRIRQEIQELKASPKIFQKTKCSICNSALELPSVHFLCGHSFHQHCFESYSESDADCPTCLPENRKVMDMIRAQEQKRDLHDQFQHQLKCSNDSFSVIADYFGRGVFNKLTLLTDPPTARLTSSLEAGLQRDLLMHSRRGT

SEQ ID NO: 55218 - protein, 677 aa, Homo sapiens
MTDSKYFTTNKKGEIFELKAELNNEKKEKRKEAVKKVIAAMTVGKDVSSLFPDVVNCMQTDNLELKKLVYLYLMNYAKSQPDMAIMAVNSFVKDCEDPNPLIRALAVRTMGCIRVDKITEYLCEPLRKCLKDEDPYVRKTAAVCVAKLHDINAQMVEDQGFLDSLRDLIADSNPMVVANAVAALSEISESHPNSNLLDLNPQNINKLLTALNECTEWGQIFILDCLSNYNPKDDREAQSICERVTPRLSHANSAVVLSAVKVLMKFLELLPKDSDYYNMLLKKLAPPLVTLLSGEPEVQYVALRNINLIVQKRPEILKQEIKVFFVKYNDPIYVKLEKLDIMIRLASQANIAQVLAELKEYATEVDVDFVRKAVRAIGRCAIKVEQSAERCVSTLLDLIQTKVNYVVQEAIVVIRDIFRKYPNKYESIIATLCENLDSLDEPDARAAMIWIVGEYAERIDNADELLESFLEGFHDESTQVQLTLLTAIVKLFLKKPSETQELVQQVLSLATQDSDNPDLRDRGYIYWRLLSTDPVTAKEVVLSEKPLISEETDLIEPTLLDELICHIGSLASVYHKPPNAFVEGSHGIHRKHLPIHHGSTDAGDSPVGTTTATNLEQPQVIPSQGDLLGDLLNLDLGPPVNVPQVSSMQMGAVDLLGGGLDSLLGSDLGGGIGGSPA

SEQ ID NO: 55219 - protein, 80 aa, Homo sapiens
MTTSLDTVETFGTTSYYDDVGLLCEKADTRALMAQFVPPLYSLVFTVGLLGNVVVVMILIKYRRLRIMTNIYLLNLAISD

SEQ ID NO: 55220 - protein, 311 aa, Homo sapiens
MPEEDNKIDHFILEHRKTNFDGLPRVKDERCWEIIDNIKGTEYTLSGLKFDSKYMNFRVRACNKAVAGEYSDPVTLETKALNFNLDNSSSHLNLKVEDTCVEWDPTGGKGQESKIKGKENKGRSGTPSPKRTSVGSRPPAVRGSRDRFTGESYTVLGDTAIESGQHYWEVKAQKDCKSYSVGVAYKTLGKFDQLGKTNTSWCIHVNNWLQNTFAAKHNNKVKALDVTVPEKIGVFCDFDGGQLSFYDANSKQLLYSFKTKFTQPVLPGFMVWCGGLSLSTGMQVPSAVRTLQKSENGMTGSASSLNNVVTQ

SEQ ID NO: 55221 - protein, 81 aa, Homo sapiens
MGVVNFVFRASEDLQVLENYSDAPMTPKQILQVIEAEGLKEMRSGTSPLACLNAMLHSNSRGGEGLFYKLPGRISLFTLKV

SEQ ID NO: 55222 - protein, 955 aa, Homo sapiens
MVTHKPGTDQHQMLTQGAGNRKFKCTECGKAFKYKHHLKEHLRIHSGEKPYECPNCKKRFSHSGSYSSHISSKKCIGLISVNGRMRNNIKTGSSPNSVSSSPTNSAITQLRNKLENGKPLSMSEQTGLLKIKTEPLDFNDYKVLMATHGFSGTSPFMNGGLGATSPLGVHPSAQSPMQHLGVGMEAPLLGFPTMNSNLSEVQKVLQIVDNTVSRQKMDCKAEEISKLKGYHMKDPCSQPEEQGVTSPNIPPVGLPVVSHNGATKSIIDYTLEKVNEAKACLQSLTTDSRRQISNIKKEKLRTLIDLVTDDKMIENHNISTPFSCQFCKESFPGPIPLHQHERYLCKMNEEIKAVLQPHENIVPNKAGVFVDNKALLLSSVLSEKGMTSPINPYKDHMSVLKAYYAMNMEPNSDELLKISIAVGLPQEFVKEWFEQRKVYQYSNSRSPSLERSSKPLAPNSNPPTKDSLLPRSPVKPMDSITSPSIAELHNSVTNCDPPLRLTKPSHFTNIKPVEKLDHSRSNTPSPLNLSSTSSKNSHSSSYTPNSFSSEELQAEPLDLSLPKQMKEPKSIIATKNKTKASSISLDHNSVSSSSENSDEPLNLTFIKKEFSNSNNLDNKSTNPVFSMNPFSAKPLYTALPPQSAFPPATFMPPVQTSIPGLRPYPGLDQMSFLPHMAYTYPTGAATFADMQQRRKYQRKQGFQGELLDGAQDYMSGLDDMTDSDSCLSRKKIKKTESGMYACDLCDKTFQKSSSLLRHKYEHTGKRPHQCQICKKAFKHKHHLIEHSRLHSGEKPYQCDKCGKRFSHSGSYSQHMNHRYSYCKREAEEREAAEREAREKGHLEPTELLMNRAYLQSITPQGYSDSEERESMPRDGESEKEHEKEGEDGYGKLGRQDGDEEFEEEEEESENKSMDTDPETIRDEEETGDHSMDDSSEDGKMETKSDHEEDNMEDGM

SEQ ID NO: 55223 - protein, 114 aa, Homo sapiens
MSNQVLCCVVLCFLGANTVDGGITQSPKYLFRKEGQNVTLSCEQNLNHDAMYWYRQDPGQGLRLIYYSQIVNDFQKGDIAEGYSVSREKKESFPLTVTSAQKNPTAFYLCASSI

SEQ ID NO: 55224 - protein, 1165 aa, Homo sapiens
MASQLQVFSPPSVSSSAFCSAKKLKIEPSGWDVSGQSSNDKYYTHSKTLPATQGQANSSHQVANFNIPAYDQGLLLPAPAVEHIVVTAADSSGSAATSTFQSSQTLTHRSNVSLLEPYQKCGLKRKSEEVDSNGSVQIIEEHPPLMLQNRTVVGAAATTTTVTTKSSSSSGEGDYQLVQHEILCSMTNSYEVLEFLGRGTFGQVAKCWKRSTKEIVAIKILKNHPSYARQGQIEVSILSRLSSENADEYNFVRSYECFQHKNHTCLVFEMLEQNLYDFLKQNKFSPLPLKYIRPILQQVATALMKLKSLGLIHADLKPENIMLVDPVRQPYRVKVIDFGSASHVSKAVCSTYLQSRYYRAPEIILGLPFCEAIDMWSLGCVIAELFLGWPLYPGASEYDQIRYISQTQGLPAEYLLSAGTKTTRFFNRDPNLGYPLWRLKTPEEHELETGIKSKEARKYIFNCLDDMAQVNMSTDLEGTDMLAEKADRREYIDLLKKMLTIDADKRITPLKTLNHQFVTMTHLLDFPHSNHVKSCFQNMEICKRRVHMYDTVSQIKSPFTTHVAPNTSTNLTMSFSNQLNTVHNQASVLASSSTAAAATLSLANSDVSLLNYQSALYPSSAAPVPGVAQQGVSLQPGTTQICTQTDPFQQTFIVCPPAFQTGLQATTKHSGFPVRMDNAVPIVPQAPAAQPLQIQSGVLTQQAWPGGTQQILLPSTWQQLPGVALHNSVQPTAMIPEAMGSGQQLADWRNAHSHGNQYSTIMQQPSLLTNHVTLATAQPLNVGVAHVVRQQQSSSLPSKKNKQSAPVSSKSSLDVLPSQVYSLVGSSPLRTTSSYNSLVPVQDQHQPIIIPDTPSPPVSVITIRSDTDEEEDNKYKPSSSGLKPRSNVISYVTVNDSPDSDSSLSSPYSTDTLSALRGNSGSVLEGPGRVVADGTGTRTIIVPPLKTQLGDCTVATQASGLLSNKTKPVASVSGQSSGCCITPTGYRAQRGGTSAAQPLNLSQNQQSSAAPTSQERSSNPAPRRQQAFVAPLSQAPYTFQHGSPLHSTGHPHLAPAPAHLPSQAHLYTYAAPTSAAALGSTSSIAHLFSPQGSSRHAAAYTTHPSTLVHQVPVSVGPSLLTSASVAPAQYQHQFATQSYIGSSRGSTIYTGYPLSPTKISQYSYL

SEQ ID NO: 55225 - protein, 185 aa, Homo sapiens
MAMFEQMRANVGKLLKGIDRYQFNPAFFQTTVTAQILLKALTNLPHTDFTLCKCMIDQAHQEERPIRQILYLGDLLETCHFQAFWQALDENMDLLEGITGFEDSVRKFICHVVGITYQHIDRWLLAEMLGDLSDSQLKVWMSKYGWSADESGQIFICSQEESIKPKNIVEKIDFDSVSSIMASSQ

SEQ ID NO: 55226 - protein, 211 aa, Homo sapiens
MSETDHIASTSSDKNVGKTPELKEDSCNLFSGNESSKLENESKLLSLNTDKTLCQPNEHNNRIEAQENYIPDHGGGEDSCAKTDTGSENSEQIANFPSGNFAKHISKTNETEQKVTQILVELRSSTFPESANEKTYSESPYDTDCTKKFISKIKSVSASEDLLEEIESELLSTEFAEHRVPNGMNKGEHALVLFEKCVQDKYLQQEHIIKK

SEQ ID NO: 55227 - protein, 1302 aa, Homo sapiens
MEQLSDEEIDHGAEEDSDKEDQDLDKMFGAWLGELDKLTQSLDSDKPMEPVKRSPLRQETNMANFSYRFSIYNLNEALNQGETVDLDALMADLCSIEQELSSIGSGNSKRQITETKATQKLPVSRHTLKHGTLKGLSSSSNRIAKPSHASYSLDDVTAQLEQASLSMDEAAQQSVLEDTKPLVTNQHRRTASAGTVSDAEVHSISNSSHSSITSAASSMDSLDIDKVTRPQELDLTHQGQPITEHAISLRCSSKQAKRHIDFTEEQAELTPHSYLDRETSLLLRNIAGKPSHLLTKEEQAAKLKAEKIRVALEKIKEAQVKKLVIRVHMSDDSSKTMMVDERQTVRQVLDNLMDKSHCGYSLDWSLVETVSELQMERIFEDHENLVENLLNWTRDSQNKLIFMERIEKYALFKNPQNYLLGKKETAEMADRNKEVLLEECFCGSSVTVPEIEGVLWLKDDGKKSWKKRYFLLRASGIYYVPKGKAKVSRDLVCFLQLDHVNVYYGQDYRNKYKAPTDYCLVLKHPQIQKKSQYIKYLCCDDVRTLHQWVNGIRIAKYGKQLYMNYQEALKRTESAYDWTSLSSSSIKSGSSSSSIPESQSNHSNQSDSGVSDTQPAGHVRSQSIVSSVFSEAWKRGTQLEESSKARMESMNRPYTSLVPPLSPQPKIVTPYTASQPSPPLPPPPPPPPPPPPPPPPPPPPLPSQSAPSAGSAAPMFVKYSTITRLQNASQHSGALFKPPTPPVMQSQSVKPQILVPPNGVVPPPPPPPPPPTPGSAMAQLKPAPCAPSLPQFSAPPPPLKIHQVQHITQVAPPTPPPPPPIPAPLPPQAPPKPLVTIPAPTSTKTVAPVVTQAAPPTPTPPVPPAKKQPAFPASYIPPSPPTPPVPVPPPTLPKQQSFCAKPPPSPLSPVPSVVKQIASQFPPPPTPPAMESQPLKPVPANVAPQSPPAVKAKPKWQPSSIPVPSPDFPPPPPESSLVFPPPPPSPVPAPPPPPPPTASPTPDKSGSPGKKTSKTSSPGGKKPPPTPQRNSSIKSSSGAEHPEPKRPSVDSLVSKFTPPAESGSPSKETLPPPAAPPKPGKLNLSGVNLPGVLQQGCVSAKAPVLSGRGKDSVVEFPSPPSDSDFPPPPPETELPLPPIEIPAVFSGNTSPKVAVVNPQPQQWSKMSVKKAPPPTRPKRNDSTRLTQAEISEQPTMATVVPQVPTSPKSSLSVQPGFLADLNRTLQRKSITRHGSLSSRMSRAEPTATMDDMALPPPPPELLSDQQKAGYGGSHISGYATLRRGPPPAPPKRDQNTKLSRDW

SEQ ID NO: 55228 - protein, 691 aa, Homo sapiens
MVYAVRSFPLSSEHAKFLIYAQDKETQEKWQVAVKLSLKPTLTEESVKESAEVEEIVFPRQFSKHSGHLQRQKRDWVIPPINLPENSRGPFPQELVRIRSDRDKNLSLRYSVTGPGADQPPTGIFIINPISGQLSVTKPLDREQIARFHLRAHAVDINGNQVENPIDIVINVIDMNDNRPEFLHQVWNGTVPEGSKPGTYVMTVTAIDADDPNALNGMLRYRIVSQAPSTPSPNMFTINNETGDIITVAAGLDREKVQQYTLIIQATDMEGNPTYGLSNTATAVITVTDVNDNPPEFTAMTFYGEVPENRVDIIVANLTVTDKDQPHTPAWNAVYRISGGDPTGRFAIQTDPNSNDGLVTVVKPIDFETNRMFVLTVAAENQVPLAKGIQHPPQSTATVSVTVIDVNENPYFAPNPKIIRQEEGLHAGTMLTTFTAQDPDRYMQQNIRYTKLSDPANWLKIDPVNGQITTIAVLDRESPNVKNNIYNATFLASDNGIPPMSGTGTLQIYLLDINDNAPQVLPQEAETCETPDPNSINITALDYDIDPNAGPFAFDLPLSPVTIKRNWTITRLNGDFAQLNLKIKFLEAGIYEVPIIITDSGNPPKSNISILRVKVCQCDSNGDCTDVDRIVGAGLGTGAIIAILLCIIILLILVLMFVVWMKRRDKERQAKQLLIDPEDDVRDNILKYDEE

SEQ ID NO: 55229 - protein, 75 aa, Homo sapiens
MAFSGSQAPYLSPAVPFSGTIQGGLQDGLQITVNGTVLSSSGTRWRVRGVQHEAERKLGARGEEDTHAFPEGDAL

SEQ ID NO: 55230 - protein, 333 aa, Homo sapiens
MLVIPPGLSEEEEALQKKFNKLKKKKKALLALKKQSSSSTTSQGGVKRSLSEQPVMDTATATEQAKQLVKSGAISAIKAETKNSGFKRSRTLEGKLKDPEKGPVPTFQPFQRSISADDDLQESSRRPQRKSLYESDRLRELGPDGEEAEGPGAGDGPPRSFDWGYEERSGAHSSASPPRSRSRDRSHERNRDRDRDRERDRDRDRDRDRERDRDRDRDRDRDRERDRDRERDRDRDREGPFRRSDSFPERRAPRKGNTLYVYGEDMTPTLLRGAFSPFGNIIDLSMDPPRNCAFVTYEKMESADQAVAELNGTQVESVQLKVNIARKQPMLDA

SEQ ID NO: 55231 - protein, 243 aa, Homo sapiens
MNGEEEFFDAVTGFDSDNSSGEFSEANQKVTGMIDLDTSKNNRIGKTGERPSQENGIQKHRTSLPAPMFSRSDFSVWTILKKCVGLELSKITMPIAFNEPLSFLQRITEYMEHVYLIHRASCQPQPLERMQSVAAFAVSAVASQWERTGKPFNPLLGETYELIREDLGFRFISEQVSHHPPISAFHSEGLNHDFLFHGSIYPKLKFWGKSVEAEPRGTITLELLNVNQRHLRAKHKSPTNAGR

SEQ ID NO: 55232 - protein, 63 aa, Homo sapiens
MTDSKYFTTNKKGEIFELKAELNNEKKEKRKEAVKKVIAAMTVGKDVRCCSSEVNFCYFSFVC

SEQ ID NO: 55233 - protein, 69 aa, Homo sapiens
MAVEGSTITSRIKNLLRSPSIKLRRSKAGNRREDLSSKVCGCVVQSPETQTAPHPQQFQENHHCPCLLP

SEQ ID NO: 55234 - protein, 229 aa, Homo sapiens
MASLQRSRVLRCCSCRLFQAHQVKKSVKWTCKACGEKQSFLQAYGEGSGADCRRHVQKLNLLQGQVSELPLRSLEETVSASEEENVGHQQAGNVKQQEKSQPSESRWLKYLEKDSQELELEGTGVCFSKQPSSKMEEPGPRFSQDLPRKRKWSRSTVQPPCSRGVQDSGGSEVAWGPQKGQAGLTWKVKQGSSPCLQENSADCSAGELRGPGKELWSPIQQDGYKEILF

SEQ ID NO: 55235 - protein, 89 aa, Homo sapiens
MSRPLLITFTPATDPSDLWKDGQQQPQPEKPESTLDGAAALAFYEALIGDESSAPDSQRSQTEPARERKRKKRRIMKAPAAEAVAEGAS

SEQ ID NO: 55236 - protein, 39 aa, Homo sapiens
MLPVYQEVKPNPLQDANLCSRVFFWSPPPLSWKDTCHWI

SEQ ID NO: 55237 - protein, 207 aa, Homo sapiens
MSRFKFIDIGINLTDPMFRGIYRGVQKHQDDLQDVIGRAVEIGVKKFMITGGNLQDSKDALHLAQTNGMFFSTVGCHPTRCGEFEKNNPDLYLKELLNLAENNKGKVVAIGECGLDFDRLQFCPKDTQLKYFEKQFELSEQTKLPMFLHCRNSHAEFLDIMKRNRDRCVGGVVHSFDGTKEAAAALIDLDLYIGFNGCIMYTYTRHI

SEQ ID NO: 55238 - protein, 39 aa, Homo sapiens
MDLIPNLAVETWLLLAVSLVLLYLMRVPKSAKSPLTKQT

SEQ ID NO: 55239 - protein, 104 aa, Homo sapiens
MENSSAASASSEAGSSRSQEIEELERFIDSYVLEYQVQGLLADKTEGDGESERTQSHISQWTADCSEPLDSSCSFSRGRAPPQQNGSKDNSLDMLGTDIWAANT

SEQ ID NO: 55240 - protein, 73 aa, Homo sapiens
MTSRSTARPNGQPQASKICQFKLVLLGESAVGKSSLVLRFVKGQFHEYQESTIGGNLCPSKDMGEGTTATGQS

SEQ ID NO: 55241 - protein, 76 aa, Homo sapiens
MTNSKGRSITDKTSGGPSSGGGFVDWTLRLNTIQSDKFLNLLLSMVPVIYQKNQEDRHKKANGIWQDGLSTAVQTF

SEQ ID NO: 55242 - protein, 103 aa, Homo sapiens
MQAWGSLLSGLRREEWRSPSSHCSVPSLAAGLLFGSLAGLGAYQLYQDPRNVWGFLAATSVTFVGVMGMRSYYYGKFMPVGLIAGASLLMAAKVGVRMLMTSD

SEQ ID NO: 55243 - protein, 1143 aa, Homo sapiens
MHSSSYSYRSSDSVFSNTTSTRTSLDSNENLLLVHCGPTLINSCISFGSESFDGHRLEMLQQIANRVQRDSVICEDKLILAGNALQSDSKRLESGVQFQNEAEIAGYILECENLLRQHVIDVQILIDGKYYQADQLVQRVAKLRDEIMALRNECSSVYSKGRILTTEQTKLMISGITQSLNSGFAQTLHPSLTSGLTQSLTPSLTSSSMTSGLSSGMTSRLTPSVTPAYTPGFPSGLVPNFSSGVEPNSLQTLKLMQIRKPLLKSSLLDQNLTEEEINMKFVQDLLNWVDEMQVQLDRTEWGSDLPSVESHLENHKNVHRAIEEFESSLKEAKISEIQMTAPLKLTYAEKLHRLESQYAKLLNTSRNQERHLDTLHNFVSRATNELIWLNEKEEEEVAYDWSERNTNIARKKDYHAELMRELDQKEENIKSVQEIAEQLLLENHPARLTIEAYRAAMQTQWSWILQLCQCVEQHIKENTAYFEFFNDAKEATDYLRNLKDAIQRKYSCDRSSSIHKLEDLVQESMEEKEELLQYKSTIANLMGKAKTIIQLKPRNSDCPLKTSIPIKAICDYRQIEITIYKDDECVLANNSHRAKWKVISPTGNEAMVPSVCFTVPPPNKEAVDLANRIEQQYQNVLTLWHESHINMKSVVSWHYLINEIDRIRASNVASIKTMLPGEHQQVLSNLQSRFEDFLEDSQESQVFSGSDITQLEKEVNVCKQYYQELLKSAEREEQEESVYNLYISEVRNIRLRLENCEDRLIRQIRTPLERDDLHESVFRITEQEKLKKELERLKDDLGTITNKCEEFFSQAAASSSVPTLRSELNVVLQNMNQVYSMSSTYIDKLKTVNLVLKNTQAAEALVKLYETKLCEEEAVIADKNNIENLISTLKQWRSEVDEKRQVFHALEDELQKAKAISDEMFKTYKERDLDFDWHKEKADQLVERWQNVHVQIDNRLRDLEGIGKSLKYYRDTYHPLDDWIQQVETTQRKIQENQPENSKTLATQLNQQKMLVSEIEMKQSKMDECQKYAEQYSATVKDYELQTMTYRAMVDSQQKSPVKRRRMQSSADLIIQEFMDLRTRYTALVTLMTQYIKFAGDSLKRLEEEEVIINSEHPVNIKELEMSSNYSVVWESKTCFMINLCGR

SEQ ID NO: 55244 - protein, 177 aa, Homo sapiens
MTPSPAKHRAKMDDIVVVAQGSQASRNVSNDPDVIKLQEIPTFQPLLKGLLSGQTSPTNAKLEKLDSQQVLQLCLRYQDHLHQCAEAVAFDQNALVKRIKEMDLSVETLFSFMQERQKRYAKYAEQIQKVNEMSAILRRIQMGIDQTVPLLDRLNSMLPEGERLEPFSMKPDRELRL

SEQ ID NO: 55245 - protein, 731 aa, Homo sapiens
MDEDALSRDDVIGKVCLTRDTIASHPKGFSGWAHLTEVDPDEEVQGEIHLRLEVWPGARACRLRCSVLEARDLAPKDRNGTSDPFVRVRYKGRTRETSIVKKSCYPRWNETFEFELQEGAMEALCVEAWDWDLVSRNDFLGKVVIDVQRLRVVQQEEGWFRLQPDQSKSRRHDEGNLGSLQLEVRLRDETVLPSSYYQPLVHLLCHEVKLGMQGPGQLIPLIEETTSTECRQDVATNLLKLFLGQGLAKDFLDLLFQLELSRTSETNTLFRSNSLASKSMESFLKVAGMQYLHGVLGPIINKVFEEKKYVELDPSKVEVKDVGCSGLHRPQTEAEVLEQSAQTLRAHLGALLSALSRSVRACPAVVRATFRQLFRRVRERFPGAQHENVPFIAVTSFLCLRFFSPAIMSPKLFHLRERHADARTSRTLLLLAKAVQNVGNMDTPASRAKEAWMEPLQPTVRQGVAQLKDFITKLVDIEEKDELDLQRTLSLQAPPVKEGPLFIHRTKGKGPLMSSSFKKLYFSLTTEALSFAKTPSSKKSALIKLANIRAAEKVEEKSFGGSHVMQVIYTDDAGRPQTAYLQCKCVNELNQWLSALRKVSINNTGLLGSYHPGVFRGDKWSCCHQKEKTGQGCDKTRSRVTLQEWNDPLDHDLEAQLIYRHLLGVEAMLWERHRELSGGAEAGTVPTSPGKVPEDSLARLLRVLQDLREAHSSSPAGSPPSEPNCLLELQT

SEQ ID NO: 55246 - protein, 130 aa, Homo sapiens
MSVKEGAQRKWAALKEKLGPQDSDPTEANLESADPELCIRLLQMPSVVNYSGLRKRLEGSDGGWMVQFLEQSGLDLLLEALARLSGRGVARISDALLQLTCVSCVRAVMNSRQGIEYILSNQGYVRQLSQ

SEQ ID NO: 55247 - protein, 111 aa, Homo sapiens
MLLLLLLLGPGSGLGAVVSQHPSWVICKSGTSVKIECRSLDFQATTMFWYRQFPKQSLMLMATSNEGSKATYEQGVEKDKFLINHASLTLSTLTVTSAHPEDSSFYICSAR

SEQ ID NO: 55248 - protein, 134 aa, Homo sapiens
MEMQQNIENYRATAGVEALQLVDREAKPHMESYNAGVKHYEADDFEMAIRHFEQALREYFVEDTECRTLCEGPQRFEEYEYLGYKAGLYEAIADHYMQVLVCQHECVRELATRPGRLSPIENFLPLHYDYLQFA

SEQ ID NO: 55249 - protein, 55 aa, Homo sapiens
MPTMRRTVSEIRSRAEGYEKTDDVSEKTSLADQEEVRTIFINQPQLTKFCNNHVR

SEQ ID NO: 55250 - protein, 296 aa, Homo sapiens
MSDRPTARRWGKCGPLCTRENIMVAFKGVWTQAFWKAVTAEFLAMLIFVLLSLGSTINWGGTEKPLPVDMVLISLCFGLSIATMVQCFGHISGGHINPAVTVAMVCTRKISIAKSVFYIAAQCLGAIIGAGILYLVTPPSVVGGLGVTMVHGNLTAGHGLLVELIITFQLVFTIFASCDSKRTDVTGSIALAIGFSVAIGHLFAIYWVGPIIGAVLAGGLYEYVFCPDVEFKRRFKEAFSKAAQQTKGSYMEVEDNRSQVETDDLILKPGVVHVIDVDRGEEKKGKDQSGEVLSSV

SEQ ID NO: 55251 - protein, 132 aa, Homo sapiens
MSAEVETSEGVDESEKKNSGALEKENQMRMADLSELLKEGTKEAHDRAENTQFVKDFLKGNIKKELFKLATTALYFTYSALEEEMERNKDHPAFAPLYFPMELHRKEALTKDMEYFFGENWEEQVQCPKAAQ

SEQ ID NO: 55252 - protein, 97 aa, Homo sapiens
MDNLSSEEIQQRAHQITDESLESTRRILGLAIESQDAGIKTITMLDEQKEQLNRIEEGLDQINKDMRETEKTLTELNKCCGLCVCPCNRFNIRSRAQ

SEQ ID NO: 55253 - protein, 10 aa, Homo sapiens
MACSPDAVVS

SEQ ID NO: 55254 - protein, 1050 aa, Homo sapiens
MRSAAKPWNPAIRAGGHGPDRVRPLPAASSGMKSSKSSTSLAFESRLSRLKRASSEDTLNKPGSTAASGVVRLKKTATAGAISELTESRLRSGTGAFTTTKRTGIPAPREFSVTVSRERSVPRGPSNPRKSVSSPTSSNTPTPTKHLRTPSTKPKQENEGGEKAALESQVRELLAEAKAKDSEINRLRSELKKYKEKRTLNAEGTDALGPNVDGTSVSPGDTEPMIRALEEKNKNFQKELSDLEEENRVLKEKLIYLEHSPNSEGAASHTGDSSCPTSITQESSFGSPTGNQMSSDIDEYKKNIHGNALRTSGSSSSDVTKASLSPDASDFEHITAETPSRPLSSTSNPFKSSKCSTAGSSPNSVSELSLASLTEKIQKMEENHHSTAEELQATLQELSDQQQMVQELTAENEKLVDEKTILETSFHQHRERAEQLSQENEKLMNLLQERVKNEEPTTQEGKIIELEQKCTGILEQGRFEREKLLNIQQQLTCSLRKVEEENQGALEMIKRLKEENEKLNEFLELERHNNNMMAKTLEECRVTLEGLKMENGSLKSHLQGEKQKATEASAVEQTAESCEVQEMLKVARAEKDLLELSCNELRQELLKANGEIKHVSSLLAKVEKDYSYLKEICDHQAEQLSRTSLKLQEKASESDAEIKDMKETIFELEDQVEQHRAVKLHNNQLISELESSVIKLEEQKSDLERQLKTLTKQMKEETEEWRRFQADLQTAVVVANDIKCEAQQELRTVKRKLLEEEEKNARLQKELGDVQGHGRVVTSRAAPPPVDEEPESSEVDAAGRWPGVCVSRTSPTPPESATTVKSLIKSFDLGRPGGAGQNISVHKTPRSPLSGIPVRTAPAAAVSPMQRHSTYSSVRPASRGVTQRLDLPDLPLSDILKGRTETLKPDPHLRKSPSLESLSRPPSLGFGDTRLLSASTRAWKPQSKLSVERKDPLAALAREYGGSKRNALLKWCQKKTQGYANIDITNFSSSWSDGLAFCALLHTYLPAHIPYQELNSQEKKRNLLLAFEAAESVGIKPSLVRILFCILVIL

SEQ ID NO: 55255 - protein, 132 aa, Homo sapiens
MAENDVDNELLDYEDDEVETAAGGDGAEAPAKKDVKGSYVSIHSSGFRDFLLKPELLRAIVDCGFEHPSEVQHECIPQAILGMDVLCQAKSGMGKTAVFVLATLQQLEPVTGQVCFCDSHFPRGDNEELHLP

SEQ ID NO: 55256 - protein, 110 aa, Homo sapiens
MMMPVVDPVVREKQLQQELLLIQQQQQIQKQLLIAEFQKQHENLTRQHQAQLQEHIKELLAIKQQQELLEKEQKLEQQRQEQEVERHRREQQLPPLRGKDRGRERAVAST

SEQ ID NO: 55257 - protein, 446 aa, Homo sapiens
MGLEALVPLAMIVAIFLLLVDLMHRHQRWAARYPPGPLPLPGLGNLLHVDFQNTPYCFDQLRRRFGDVFSLQLAWTPVVVLNGLAAVREAMVTRGEDTADRPPAPIYQVLGFGPRSQGRPFRPNGLLDKAVSNVIASLTCGRRFEYDDPRFLRLLDLAQEGLKEESGFLREVLNAVPVLPHIPALAGKVLRFQKAFLTQLDELLTEHRMTWDPAQPPRDLTEAFLAKKEKAKGSPESSFNDENLRIVVGNLFLAGMVTTSTTLAWGLLLMILHLDVQLRVQQEIDDVIGQVRRPEMGDQAHMPCTTAVIHEVQRFGDIIPLSVTHMTSRDIEVQGFRIPKGTTLITNLSSVLKDEAVWKKPFRFHPEHFLDAQGHFVKPEAFLPFSAGRRACLGEPLARMELFLFFTSLLQHFSFSVAAGQPRPSHSRVVSFLVTPSPYELCAVPR

SEQ ID NO: 55258 - protein, 38 aa, Homo sapiens
MYQGPPDTAEIIKTLPQKYRRKLVSQEEMEFIQRGGPE

SEQ ID NO: 55259 - protein, 122 aa, Homo sapiens
MTGRARARARGRARGQETAQLVGSTASQQPGYIQPRPQPPPAEGELFGRGRQRGTAGGTAKSQGLQISAGFQELSLAERGGRRRDFHDLGVNTRQNLDHVKESKTGSSGIIVRLSTNHFRLT

SEQ ID NO: 55260 - protein, 99 aa, Homo sapiens
MWPLALVIASLTLALSGGVSQESSKVLNTNGTSGFLPGGYTCFPHSQPWQAALLVQGRLLCGGVLVHPKWVLTAAHCLKEGLKVYLGKHALGRVEAGEQ

SEQ ID NO: 55261 - protein, 159 aa, Homo sapiens
MIPPQEASARRREIEDKLKQEEETLSFIRDSLEKSDQLTKNMVSILSSFESRLMKLENSIIPVHKQTENLQRLQENVEKTLSCLDHVISYYHVASDTEKIIREGPTGRLEEYLGSMAKIQKAVEYFQDNSPDSPELNKVVRGPQNNVRSLGISVSALVS

SEQ ID NO: 55262 - protein, 172 aa, Homo sapiens
MSFLCLVVLYYIVWSVLFLRSMDVIAEQRRTHITMALSWMTIVVPLLTFEILLVHKLDGHNAFSCIPIFVPLWLSLITLMATTFGQKGGNHWWFGIRKDFCQFLLEIFPFLREYGNISYDLHHEDNEETEETPVPEPPKIAPMFRKKARVVITQSPGKYVLPPPKLNIEMPD

SEQ ID NO: 55263 - protein, 175 aa, Homo sapiens
  MOD_RES (1)..(1): Any amino acid
XAWPCVSTPQPPVFLRCHETRFWAVLAAVLPRSHCSLPFPVAGFGYLTKQLMGLAGGRIVLALEGGHDLTAICDASEACVSALLGNELDPLPEKVLQQRPNANAVRSMEKVMEIHSKYWRCLQRTTSTAGRSLIEAQTCENEEAETVTAMASLSVGVKPAEKRPDEEPMEEEPPL

SEQ ID NO: 55264 - protein, 345 aa, Homo sapiens
MEDSGKTFSSEEEEANYWKDLAMTYKQRAENTQEELREFQEGSREYEAELETQLQQIETRNRDLLSENNRLRMELETIKEKFEVQHSEGYRQISALEDDLAQTKAIKDQLQKYIRELEQANDDLERAKRATIMSLEDFEQRLNQAIERNAFLESELDEKENLLESVQRLKDEARDLRQELAVQQKQEKPRTPMPSSVEAERTDTAVQATGSVPSTPIAHRGPSSSLNTPGSFRRGLDDSTGGTPLTPAARISALNIVGDLLRKVGVGHELPLVVQINNQVVQLLLKPVLGLFQFIISGRLLLVLLGEVLDLLLEPLLPLFQSFHGAGKVLQLLLRVGELQGQRPG

SEQ ID NO: 55265 - protein, 148 aa, Homo sapiens
  MOD_RES (1)..(1): Any amino acid
XGPASVPSVGKAVATAAQAQTGPEEDSGSSEEESDSEEEAETLAQVKPSGKTHQIRAALAPAKESPRKGAAPTPPGKTGPSAAQAGKQDDSGSSSEESDSDGEAPAAVTSAQSSWPSCYTRTSPGCKHPEEGPSLGEHSQELLLRERG

SEQ ID NO: 55266 - protein, 196 aa, Homo sapiens
  MOD_RES (1)..(1): Any amino acid
XVEESDNEWSVPHCFTIYAAQKTIVVAASTRLEKEKWMLDLNSAIQAAKSGGDTAPALPGRTVCTRPPRSPNEVSLEQESEDDARGVRSSLEGHGQHRANTTMHVCWYRNTSVSRADHSAAVENQLSGYLLRKFKNSHGWQKLWVVFTNFCLFFYKTHQVDGGDPGGQQLSREGPKHRAGWPPTLLRAGGDGQGEG

SEQ ID NO: 55267 - protein, 86 aa, Homo sapiens
  MOD_RES (1)..(1): Any amino acid
XYADARLEVGSTQLRTAGSCSHSFKRSFLAWWYVPVGTTTWEVEAEASLAARTYRQKQGGQRVSSTAPVNSPRQTLGHRVQDTDLE

SEQ ID NO: 55268 - protein, 230 aa, Homo sapiens
MLKAREYHSSSVLDGLLYVVAADSTERYDHTTDSWEALQPMTYPMDNCSTTACRGRLYAIGSLAGKETMVMQCYDPDTDLWSLVDCGQLPPWSFAPKTATLNGLMYFVRDDSAEVDVYNPTRNEWDKIPSMNQVHVGGSLAVLGGKLYVSGGYDNTFELSDVVEAYDPETRAWSVVGRLPEPTFWHGSVSIFRQFMPQTFSGGRGFELDSGSDDMDPGRPRPPRDPDELH

SEQ ID NO: 55269 - protein, 784 aa, Homo sapiens
MRSAAKPWNPAIRAGGHGPDRVRPLPAASSGMKSSKSSTSLAFESRLSRLKRASSEDTLNKPGSTAASGVVRLKKTATAGAISELTESRLRSGTGAFTTTKRTGIPAPREFSVTVSRERSVPRGPSNPRKSVSSPTSSNTPTPTKHLRTPSTKPKQENEGGEKAALESQVRELLAEAKAKDSEINRLRSELKKYKEKRTLNAEGTDALGPNVDGTSVSPGDTEPMIRALEEKNKNFQKELSDLEEENRVLKEKLIYLEHSPNSEGAASHTGDSSCPTSITQESSFGSPTGNQMSSDIDEYKKNIHGNALRTSGSSSSDVTKASLSPDASDFEHITAETPSRPLSSTSNPFKSSKCSTAGSSPNSVSELSLASLTEKIQKMEENHHSTAEELQATLQELSDQQQMVQELTAENEKLVDEKTILETSFHQHRERAEQLSQENEKLMNLLQERVKNEEPTTQEGKIIELEQKCTGILEQGRFEREKLLNIQQQLTCSLRKVEEENQGALEMIKRLKEENEKLNEFLELERHNNNMMAKTLEECRVTLEGLKMENGSLKSHLQGEKQKATEASAVEQTAESCEVQEMLKVARAEKDLLELSCNELRQELLKANGEIKHVSSLLAKVEKDYSYLKEICDHQAEQLSRTSLKLQEKASESDAEIKDMKETIFELEDQVEQHRAVKLHNNQLISELESSVIKLEEQKSDLERQLKTLTKQMKEETEEWRRFQADLQTAVVVANDIKCEAQQELRTVKRKLLEEEEKNARLQKELGDVQGHGRVVTSRAAPP

SEQ ID NO: 55270 - protein, 166 aa, Homo sapiens
MLLILLSVALLAFSSAQDLNEDVSQEDVPLVISDGGDSEQFLDEERQGPPLGGQQSQPSAGDGNQDDGPQQGPPQQGGQQQQGPPPPQGKPQGPPQQGGHPPPPQGRPQGPPQQGGHPRPPRGRPQGPPQQGGHQQGPPPPPPGKPQGPPPQGGRPQGPPQGQSPQ

SEQ ID NO: 55271 - protein, 330 aa, Homo sapiens
MLDKAPVLKVIVNSLKNMINTFVPSGKIMQVVDEKLPGLLGNFPGPFEEEMKGIAAVTDIPLGEIISFNIFYELFTICTSIVAEDKKGHLIHGRNMDFGVFLGWNINNDTWVITEQLKPLTVNLDFQRNNKTVFKASSFAGYVGMLTGFKPGLFSLTLNERFSINGGYLGILEWILGKKDVMWIGFLTRTVLENSTSYEEAKNLLTKTKILAPAYFILGGNQSGEGCVITRDRKESLDVYELDAKQGRWYVVQTNYDRWKHPFFLDDRRTPAKMCLNRTSQENISFETMYDVLSTKPVLNKLTVYTTLIDVTKGQFETYLRDCPDPCIGW

SEQ ID NO: 55272 - protein, 226 aa, Homo sapiens
MLTLDLIQEEDPSPEEPTSCAESFRVDLDKSVAQLAGSRRRADSDRIQPSADRASSLSRPWEKTDKGATYTPQAPKKLTPTEKGRCASLEEILSQRDAASARTLQLRAEEPPTPALPNPGQLSRIQDLVARKLEETQELLAEVQGLGDGKRKAKDPPRSPPDSESEQLLLETERLLGEASSNWSQAKRVLQEVRELRDLYRQMDLQTPDSHLRQTTPHSQYRKSLM

SEQ ID NO: 55273 - protein, 154 aa, Homo sapiens
MGKDIRPRSARAACKGVGLWSGCFGKMAGSGVRQATSTASTFVKPIFSRDMNEAKRRVRELYRAWYREVPNTVHQFQLDITVKMGRDKVREMFMKNAHVTDPRVVDLLVIKGKIELEETIKVWKQRTHVMRFFHETEAPRPKDFLSKFYVGHDP

SEQ ID NO: 55274 - protein, 377 aa, Homo sapiens
MSMSPTVIILACLGFFLDQSVWAHVGGQDKPFCSAWPSAVVPQGGHVTLRCHYRRGFNIFTLYKKDGVPVPELYNRIFWNSFLISPVTPAHAGTYRCRGFHPHSPTEWSAPSNPLVIMVTGLYEKPSLTARLGPTVRAGENVTLSCSSQSSFDIYHLSREGEAHELRLPAVPSINGTFQADFPLGPATHGETYRCFGSFHGSPYEWSDPSDPLPVSVTGNPSSSWPSPTEPSFKTGIARHLHAVIRYSVAIILFTILPFFLLHRWCSKKKNAAVMNQEPAGHRTVNREDSDEQDPQEVTYAQLDHCIFTQRKITGPSQRSKRPSTDTSVCIELPNAEPRALSPAHEHHSQALMGSSRETTALSQTQLASSNVPAAGI

SEQ ID NO: 55275 - protein, 241 aa, Homo sapiens
MSQDTEVDMKEVELNELEPEKQPMNAASGAAMSLAGAEKNGLVKIKVAEDEAEAAAAAKFTGLSKEELLKVAGSPGWVRTRWALLLLFWLGWLGMLAGAVVIIVRAPRCRELPAQKWWHTGALYRIGDLQAFQGHGAGNLAGLKGRLDYLSSLKVKGLVLGPIHKNQKDDVAQTDLLQIDPNFGSKEDFDSLLQSAKKKSIRVILDLTPNYRGENSWFSTQVDTVATKVKASGNWERGDLD

SEQ ID NO: 55276 - protein, 178 aa, Homo sapiens
  MOD_RES (1)..(1): Any amino acid
XLGATLKGVAAGSSSSVKWTEGQSNHSTGYESDNHTTPILCGAQYRIHTHGVFRGIQDVRRVPGVAPTLVRSASETSEKRPFMCAYPGCNKRYFKLSHLQMHSRKHTGVKPFQCKTCQRKFSRSDHLKTHTRTHTGKTSEKPFSCRWPSCQKKFARSDELVRHHNMHQRNMTKLQLAL

SEQ ID NO: 55277 - protein, 20 aa, Homo sapiens
  MOD_RES (1)..(1): Any amino acid
XLFSLLDEDKDGMVQLSLAE

SEQ ID NO: 55278 - protein, 114 aa, Homo sapiens
MGPGLLHWMALCLLGTGHGDAMVIQNPRYQVTQFGKPVTLSCSQTLNHNVMYWYQQKSSQAPKLLFHYYDKDFNNEADTPDNFQSRRPNTSFCFLDIRSPGLGDAAMYLCATSR

SEQ ID NO: 55279 - protein, 188 aa, Homo sapiens
  MOD_RES (1)..(1): Any amino acid
XENEGEEEEEEEDEEDLDPDLDPDLEEEENDLGDPAVLGAVHNTQRALLSSPGVKAPGMLGMSLASLHFLWQTLDYLSPIPFWPTFPSTSSPAQHFGPRLPSPDPTLFCSLLTSWPPRFSHLTQLHPRHQRILQQQQHSQTPREPHFLLTTLLRKCQWWVSLKGCSSWLKVPQPRSLGLSSQTPMLTS

SEQ ID NO: 55280 - protein, 980 aa, Homo sapiens
MAYTENGEVYFIDHNTKTTSWLDPRCLNKQQKPLEECEDDEGVHTEELDSELELPAGWEKIEDPVYGIYYVDHINRKTQYENPVLEAKRKKQLEQQQQQQQQQQQQQQQQQQQQTEEWTEDHSALVPPVIPNHPPSNPEPAREVPLQGKPFFTRNPSELKGKFIHTKLRKSSRGFGFTVVGGDEPDEFLQIKSLVLDGPAALDGKMETGDVIVSVNDTCVLGHTHAQVVKIFQSIPIGASVDLELCRGYPLPFDPDDPNTSLVTSVAILDKEPIIVNGQETYDSPASHSSKTGKVNGMKDARPSSPADVASNSSHGYPNDTVSLASSIATQPELITVHIVKGPMGFGFTIADSPGGGGQRVKQIVDSPRCRGLKEGDLIVEVNKKNVQALTHNQVVDMLVECPKGSEVTLLVQRGGLPVPKKSPKSQPLERKDSQNSSQHSVSSHRSLHTASPSHSTQVLPEFPPAEAQAPDQTDSSGQKKPDPFKIWAQSRSMYENRPMSPSPASGLSKGEREREINSTNFGECPIPDYQEQDIFLWRKETGFGFRILGGNEPGEPIYIGHIVPLGAADTDGRLRSGDELICVDGTPVIGKSHQLVVQLMQQAAKQGHVNLTVRRKVVFAVPKTENEVPSPASSHHSSNQPASLTEEKRTPQGSQNSLNTVSSGSGSTSGIGSGGGGGSGVVSTVVQPYDVEIRRGENEGFGFVIVSSVSRPEAGTTFGNACVAMPHKIGRIIEGSPADRCGKLKVGDRILAVNGCSITNKSHSDIVNLIKEAGNTVTLRIIPGDESSNATLLTNAEKIATITTTHTPSQQGTQETRNTTKPKQESQFEFKAPQATQEQDFYTVELERGAKGFGFSLRGGREYNMDLYVLRLAEDGPAERCGKMRIGDEILEINGETTKNMKHSRAIELIKNGGRRVRLFLKRGDGSVPEYAMIPPNIAACMRNEKLGEACFYLMGHNQTTTPAATATAPPPVHKVFRK

SEQ ID NO: 55281 - protein, 223 aa, Homo sapiens
MRPLQIVPSRLISQLYCGLKPPASTRNQICLKMARPSSSMADFRKFFAKAKHIVIISGAGVSAESGVPTFRGAGGYWRKWQAQDLATPLAFAHNPSRVWEFYHYRREVMGSKEPNAGHRAIAECETRLGKQGRRVVVITQNIDELHRKAGTKNLLEIHGSLFKTRCTSCGVVAENYKSPICPALSGKGAPEPGTQDASIPVEKLPRDEVSPCWPGWSRALDLR

SEQ ID NO: 55282 - protein, 238 aa, Homo sapiens
MLGQPAPLERFASRRPQVLAVRTVCDLVLGKMDKDCEMKRTTLDSPLGKLELSGCEQGLHEIKLLGKGTSAADAVEVPAPAAVLGGPEPLMQCTAWLNAYFHQPEAIEEFPVPALHHPVFQQESFTRQVLWKLLKVVKFGEVISYQQLAALAGNPKAARAVGGAMRGNPVPILIPCHRVVCSSGAVGNYSGGLAVKEWLLAHEGHRLGKPGLGGSSGLAGAWLKGAGATSGSPPAGRN

SEQ ID NO: 55283 - protein, 361 aa, Homo sapiens
  MOD_RES (1)..(1): Any amino acid
XGYLRPLIPAAAPQEPDTFEDIINDVEKIIMPGVTHWHSPYFFAYFPTASSYPAMLADMLCGAIGCIGFSWAHSSVERAGLIGGVKLKAIPSDGNFAMRASALQEALERDKAAGLIPFFMVATLGTTTCCSFDNLLEVGPICNKEDIWLHVDAAYAGSAFICPEFRHLLNGVEFADSFNFNPHKWLLVNFDCSAMWVKKRTDLTGAFRLDPTYLKHSHQDSGLITDYRHWQIPLGRRFRSLKMWFVFRMYGVKGLQAYIRKHVQLSHEFESLVRQDPRFEICVEVILGLVCFRLKGSNKVNEALLQRINSAKKIHLVPCHLRDKFVLRFAICSRTVESAHVQRAWEHIKELAADVLRAERE

SEQ ID NO: 55284 - protein, 296 aa, Homo sapiens
GRKIMEGLEASIEQFQFNPRLNISDDLKIGFFSTDHATQTDSSEILSVKELSSSTQKLAQMMKSLQVDFGFLKQLLQLKFEDRLKEESLSLFTILHDRILEIEKHYQQNEDKMRKSFNQQLADAIAVIKGMYQQFFEVEEENVSLQDASTVKTNILLRKLKEKEEVIKELKEELDQYKDFGFHKMESFAKETSSPKSNLEKENLEYKVENERLLQIISELEEEIQINLKENSGLEDELISMKEMAEKDHKTIQKLMDSRDRLREELHYEKSLVQDVINKQKEDKEMRKKYGSLSVK

SEQ ID NO: 55285 - protein, 973 aa, Homo sapiens
  MOD_RES (1)..(1): Any amino acid
XYQRVREVTGHLPPLNETANFISNSKIKTSDTTQKNSFQSHINSVANDIVESVLGKMYLVVVTSLYENNKSRTEVEISDHNDSLLMKPLRFRETKQAGKISNSPRYAISQAYSYVDSQNISVMENTLLPYLPLQVKKDLIQMVLNKITNFVSLPLKVSPKDNPKPCFKAHLKTRSKITTLPKFTKKTHLGLSAAKAKSKTKLGPGEKTLKDSRSKTAIGLSHIMSAGDAKNLLDTKLPTSELKIYAKDIIINILETIVKEFGKVKQTKALPSDQIIAAGKIVNTVLQELYVTNNCNLAYPMKSSHLRLSQGNIGTGSLPKQQACFYLENVSSQLEHIFPREGIFKKLFDKWQTESNDKENEKCKLLMIAENVLTEISIKAKELEYSLSLLNLPPLENCESRFYNHFKGASTRAEDTKAQINMFGREIVEMLLEKLQLCFLSQIPTPDSEETLSNSKEHITAKSKYGFPNKHSLSSLPIYNTKTKDQISVGSSNQIVQEIVETVLNMLESFVDLQFKHISKYEFSEIVKMPIENLSSIQQKLLNKKMLPKLQPLKMFSDKSESNTINFKENIQNILLRVHSFHSQLLTYAVNIISDMLAVIKNKLDNEISQMEPSSISILKENIVASEIIGTLMDQCTYFNESLIQNLSRESLFQGAENAYTVNQVELATNMKMFTSKLKEGSLGINPSQVSKTGFVFCSDEDMKEKYRVSSDLPTSVRSSVEDTVKNSEPTKRPDSETMPSCSTRNKVQDHRPRESNFGSFDQTMKGNSYLPEGSFLQKLLRKASDSTEAALKQVLSFIEMGKGENLRVFHYENLKPVVEPNQIQTTISPLKICLAAENIVNTVLSSCGFPSQPHTNENREIMKPFFISKQSSLSEVSGGQKDNEKSLLRMQDKKINYIPEEENENLEASREDSSFLQKLKKKEYPKIETVKEVEAFTFADHEMGSNEVHLIARHVTTSVVTYLKNFETTGRC

SEQ ID NO: 55286 - protein, 214 aa, Homo sapiens
MMSSAAFPRWLSMGVPRTPSRTVLFERERTGLTYRVPSLLPVPPGPTLLAFVEQRLSPDDSHAHRLVLRRGTLAGGSVRTGPHSLWVPATVCSCPQAACWYPPTPTAWTAESVLARSAGPALTPSPSTAMTTAAPGAVEASCPTCAQASASWQRWTVGRPAASSTAMPGAHWAAVCRRSALTRAPPSCPQSAWLPCPRLPGAARAASWASQPPP

SEQ ID NO: 55287 - protein, 289 aa, Homo sapiens
MAENDVDNELLDYEDDEVETAAGGDGAEAPAKKDVKGSYVSIHSSGFRDFLLKPELLRAIVDCGFEHPSEVQHECIPQAILGMDVLCQAKSGMGKTAVFVLATLQQLEPVTGQVSVLVMCHTRELAFQISKEYERFSKYMPNVKVAVFFGGLSIKKDEEVLKKNCPHIVVGTPGRILALARNKSLNLKHIKHFILDECDKMLEQLDMRRDVQEIFRMTPHEKQVMMFSATLSKEIRPVCRKFMQDPMEIFVDDETKLTLHGLQQYYVKLKDNEKNRKLFDLLDVLEFNQ

SEQ ID NO: 55288 - protein, 1225 aa, Homo sapiens
MDRGPAAVACTLLLALVACLAPASGQECDSAHFRCGSGHCIPADWRCDGTKDCSDDADEIGCAVVTCQQGYFKCQSEGQCIPNSWVCDQDQDCDDGSDERQDCSQSTCSSHQITCSNGQCIPSEYRCDHVRDCPDGADENDCQYPTCEQLTCDNGACYNTSQKCDWKVDCRDSSDEINCTEICLHNEFSCGNGECIPRAYVCDHDNDCQDGSDEHACNYPTCGGYQFTCPSGRCIYQNWVCDGEDDCKDNGDEDGCESGPHDVHKCSPREWSCPESGRCISIYKVCDGILDCPGREDENNTSTGKYCSMTLCSALNCQYQCHETPYGGACFCPPGYIINHNDSRTCVEFDDCQIWGICDQKCESRPGRHLCHCEEGYILERGQYCKANDSFGEASIIFSNGRDLLIGDIHGRSFRILVESQNRGVAVGVAFHYHLQRVFWTDTVQNKVFSVDINGLNIQEVLNVSVETPENLAVDWVNNKIYLVETKVNRIDMVNLDGSYRVTLITENLGHPRGIAVDPTVGKTVVHGGSLIPHPFGVSLFEGQVFFTDWTKMAVLKANKFTETNPQVYYQASLRPYGVTVYHSLRQPYATNPCKDNNGGCEQVCVLSHRTDNDGLGFRCKCTFGFQLDTDERHCIGREILAANRVENVESLAFDWISKNLYWTDSHYKSISVMRLADKTRRTVVQYLNNPRSVVVHPFAGYLFFTDWFRPAKIMRAWSDGSHLLPVINTTLGWPNGLAIDWAASRLYWVDAYFDKIEHSTFDGLDRRRLGHIEQMTHPFGLAIFGEHLFFTDWRLGAIIRVRKADGGEMTVIRSGIAYILHLKSYDVNIQTGSNACNQPTHPNGDCSHFCFPVPNFQRVCGCPYGMRLASNHLTCEGDPTNEPPTEQCGLFSFPCKNGRCVPNYYLCDGVDDCHDNSDEQLCGTLNNTCSSSAFTCGHGECIPAHWRCDKRNDCVDGSDEHNCPTHAPASCLDTQYTCDNHQCISKNWVCDTDNDCGDGSDEKNCNSTETCQPSQFNCPNHRCIDLSFVCDGDKDCVDGSDEVGCVLNCTASQFKCASGDKCIGVTNRCDGVFDCSDNSDEAGCPTRPPGMCHSDEFQCQEDGICIPNFWECDGHPDCLYGSDEHNACVPKTCPSSYFHCDNGNCIHRAWLCDRDNDCGDMSDEKDCPTQPFRCPSWQWQCLGHNICVNLSVVCDGIFDCPNGTDESPLCSKFPDHSLLAINSF

SEQ ID NO: 55289 - protein, 330 aa, Homo sapiens
MTDPSLGLTVPMAPPLAPLPPRDPNGAGSEWRKPGAVSFADVAVYFSREEWGCLRPAQRALYRDVMRETYGHLGALGVGGSKPALISWVEEKAELWDPAAQDPEVAKCPTEADPDSRNKEEERQREGTGALEKPDPVAAGSPGLKAPQAPFAGLEQLSKARRRSRPRFFAHPPVPRADQRHGCYVCGKSFAWRSTLVEHIYSHRGEKPFHCADCGKGFGHASSLSKHRAIHRGERPHRCPECGRAFMRRTALTSHLRVHTGEKPYRCPQCGRCFGLKTGMAKHQWVHRPGGEGRRGRRPGGLSVTLTPVRGDLDPPVGFQLYPEIFQECG

SEQ ID NO: 55290 - protein, 497 aa, Homo sapiens
MQPWHGKAMQRASEAGATAPKASARNARGAPMDPTESPAAPEAALPKAGKFGPARKSGSRQKKSAPDTQERPPVRATGARAKKAPQRAQDTQPSDATSAPGAEGLEPPAAREPALSRAGSCRQRGARCSTKPRPPPGPWDVPSPGLPVSAPILVRRDAAPGASKLRAVLEKLKLSRDDISTAAGMVKGVVDHLLLRLKCDSAFRGVGLLNTGSYYEHVKISAPNEFDVMFKLEVPRIQLEEYSNTRAYYFVKFKRNPKENPLSQFLEGEILSASKMLSKFRKIIKEEINDIKDTDVIMKRKRGGSPAVTLLISEKISVDITLALESKSSWPASTQEGLRIQNWLSAKVRKQLRLKPFYLVPKHAKEGNGFQEETWRLSFSHIEKEILNNHGKSKTCCENKEEKCCRKDCLKLMKYLLEQLKERFKDKKHLDKFSSYHVKTAFFHMESRSVAQAGVQWHDLGSLQALLPGFMPFSCLSLPSSWDYRCPPPHPANFLYF

SEQ ID NO: 55291 - protein, 29 aa, Homo sapiens
MFRRLTFAQLLFATVLGIAGGVYIFQPVF

SEQ ID NO: 55292 - protein, 49 aa, Homo sapiens
MEAERPQEEEDGEQGPPQDEEGWPPPNSTTRPWRSAPPSPPPPGTRHTD

SEQ ID NO: 55293 - protein, 484 aa, Homo sapiens
MKSSRNMNRSEKNYMELRLLLQTKEDYEALIKSLKVLLAELDEKILQMEKKIANQKQIFAKMQEANNPRKLQKQIHILETRLNLVTVHFDKMLTTNAKLRKEIEDLRFEKAAYDNVYQQLQHCLLMEKKTMNLAIEQSSQAYEQRVEAMARMAAMKDRQKKDTSQYNLEIRELERLYAHESKLKSFLLVKLNDRNEFEEQAKREEALKAKKHVKKNRGESFESYEVAHLRLLKLAESGNLNQLIEDFLAKEEKNFARFTYVTELNNDMEMMHKRTQRIQDEIILLRSQQKLSHDDNHSVLRQLEDKLRKTTEEADMYESKYGEVSKTLDLLKNSVEKLFKKINCDATKILVQLGETGKVTDINLPQYFAIIEKKTNDLLLLETYRRILEVEGAEAEIPPPFINPFWGGSALLKPPEPIKVIPPVLGADPFSDRLDDVEQPLDHSSLRQLVLDNYILKENRSKEVRGDSLPEKVDDFRSRKKVTM

SEQ ID NO: 55294 - protein, 393 aa, Homo sapiens
MEPFVVLVLCLSFMLLFSLWRQSCRRRKLPPGPTPLPIIGNMLQIDVKDICKSFTNFSKVYGPVFTVYFGMNPIVVFHGYEAVKEALIDNGEEFSGRGNSPISQRITKGLGIISSNGKRWKEIRRFSLTTLRNFGMGKRSIEDRVQEEAHCLVEELRKTKASPCDPTFILGCAPCNVICSVVFQKRFDYKDQNFLTLMKRFNENFRILNSPWIQVCNNFPLLIDCFPGTHNKVLKNVALTRSYIREKVKEHQASLDVNNPRDFIDCFLIKMEQEKDNQKSEFNIENLVGTVADLFVAGTETTSTTLRYGLLLLLKHPEVTAKVQEEIDHVIGRHRSPCMQDRSHMPYTDAVVHEIQRYSDLVPTGVPHAVTTDTKFRNYLIPKSFDNKIMLAA

SEQ ID NO: 55295 - protein, 128 aa, Homo sapiens
MDKRALLASPGFAAPPAKRRLELGESGHQYLSDGLKTPKGKGRAALRSPDSPKKKTRYDTSLGLLTKKFIQLLSQSPDGVLDLNKAAEVLKVQKRRIYDITNVLEGISDLFDAYDLEKLPLVEDFMCS

SEQ ID NO: 55296 - protein, 29 aa, Homo sapiens
MGQPSLTWMLMVVVASWFITTAATDTSEA

SEQ ID NO: 55297 - protein, 482 aa, Homo sapiens
MAQGRERDEGPHSAGGASLSVRWVQGFPKQNVHFVNDNTICYPCGNYVIFINIETKKKTVLQCSNGIVGVMATNIPCEVVAFSDRKLKPLIYVYSFPGLTRRTKLKGNILLDYTLLSFSYCGTYLASYSSLPEFELALWNWESSIILCKKSQPGMDVNQMSFNPMNWRQLCLSSPSTVSVWTIERSNQEHCFRARSVKLPLEDGSFFNETDVVFPQSLPKDLIYGPVLPLSAIAGLVGKEAETFRPKDDLYPLLHPTMHCWTPTSDLYIGCEEGHLLMINGDTLQVTVLNKIEEESPLEDRRNFISPVTLVYQKEGVLASGIDGFVYSFIIKDRSYMIEDFLEIERPVEHMTFSPNYTVLLIQTDKGSVYIYTFGKEPTLNKVLDACDGKFQAIDFITPGTQYFMTLTYSGEICVWWLEDCACVSKIYLNTLATVLACCPSSLSAAVGTEDGSVYFISVYDKESPQVVHKAFLSESSVQHVV

SEQ ID NO: 55298 - protein, 303 aa, Homo sapiens
MAWWLIAFAHGDLAPSEGTAEPCVTSIHSFSSAFLFSIEVQVTIGFGGRMVTEECPLAILILIVQNIVGLMINAIMLGCIFMKTAQAHRRAETLIFSKHAVIALRHGRLCFMLRVGDLRKSMIISATIHMQVVRKTTSPEGEVVPLHQVDIPMENGVGGNSIFLVAPLIIYHVIDANSPLYDLAPSDLHHHQDLEIIVILEGVVETTGITTQARTSYLADEILWGQRFVPIVAEEDGRYSVDYSKFGNTVKVPTPLCTARQLDEDHSLLEALTLASARGPLRKRSVPMAKAKPKFSISPDSLS

SEQ ID NO: 55299 - protein, 777 aa, Homo sapiens
VEAGKGLEMRKLVLSGFLASEEIYINQLEALLLPMKPLKATATTSQPVLTIQQIETIFYKIQDIYEIHKEFYDNLCPKVQQWDSQVTMGHLFQKLASQLGVYKAFVDNYKVALETAEKCSQSNNQFQKISEELKVKGPKDSKDSHTSVTMEALLYKPIDRVTRSTLVLHDLLKHTPVDHPDYPLLQDALRISQNFLSSINEDIDPRRTAVTTPKGETRQLVKDGFLVEVSESSRKLRHVFLFTDVLLCAKLKKTSAGKHQQYDCKWYIPLADLVFPSPEESEASPQVHPFPDHELEDMKMKISALKSEIQKEKANKGQSRAIERLKKKMFENEFLLLLNSPTIPFRIHNRNGKSYLFLLSSDYERSEWREAIQKLQKKDLQAFVLSSVELQVLTGSCFKLRTVHNIPVTSNKDDDESPGLYGFLHVIVHSAKGFKQSANLYCTLEVDSFGYFVSKAKTRVFRDTAEPKWDEEFEIELEGSQSLRILCYEKCYDKTKVNKDNNEIVDKIMGKGQIQLDPQTVETKNWHTDVIEMNGIKVEFSMKFTSRDMSLKRTPSKKQTGVFGVKISVVTKRERSKVPYIVRQCVEEVEKRGIEEVGIYRISGVATDIQALKAVFDANNKDILLMLSDMDINAIAGTLKLYFRELPEPLLTDRLYPAFMEGIALSDPAAKENCMMHLLRSLPDPNLITFLFLLEHLKRVAEKEPINKMSLHNLATVFGPTLLRPSEVESKAHLTSAADIWSHDVMAQVQVLLYYLQHPPISFAELKRNTLYFSTDV

SEQ ID NO: 55300 - protein, 214 aa, Homo sapiens
MEAREPGRPTPTYHLVPNTSQSQVEEDVSSPPQRSSETMQLKKEISLLNGVSLVVGNMIGSGIFVSPKGVLVHTASYGMSLIVWAIGGLFSVVGALCYAELGTTITKSGASYAYILEAFGGFIAFIRLWVSLLVVEPTGQAIIAITFANYIIQPSFPSCDPPYLACRLLAAACICNLPSAFKFTSLTDEFLLAMKRSCVSCGLEPWESGWERVC

SEQ ID NO: 55301 - protein, 471 aa, Homo sapiens
  MOD_RES (1)..(1): Any amino acid
XITLCKMVKHSNTLKPDSSRLENINNYRVCDGYYNTDLPGSWVLGAFALLCLLGLTWSFGLLFINEETIVMAYLFTIFNAFQGVFIFIFHCALQKKVRKEYGKCFRHSYCCGGLPTESPHSSVKASTTRTSARYSSGTQSRIRRMWNDTVRKQSESSFISGDINSTSTLNQGMTGNYLLTNPLLRPHGTNNPYNTLLAETVVCNAPSAPVFNSPATYRETRHSLNNARDTSAMDTLPLNGNFNNSYSLHKGDYNDSVQVVDCGLSLNDTAFEKMIISELVHNNLRGSSKTHNLELTLPVKPVIGGSSSEDDAIVADASSLMHSDNPGLELHHKELEAPLIPQRTHSLLYQPQKKVKSEGTDSYVSQLTAEAEDHLQSPNRDSLYTSMPNLRDSPYPESSPDMEEDLSPSRRSENEDIYYKSMPNLGAGHQLQMCYQISRGNSDGYIIPINKEGCIPEGDVREGQMQLVTSL

SEQ ID NO: 55302 - protein, 288 aa, Homo sapiens
MASNVTNKTDPRSMNSRVFIGNLNTLVVKKSDVEAIFSKYGKIVGCSVHKGFAFVQYVNERNARAAVAGEDGRMIAGQVLDINLAAEPKVNRGKAGVKRSAAEMYGSSFDLDYDFQRDYYDRMYSYPARVPPPPPIARAVVPSKRQRVSGNTSRRGKSGFNSKSGQRGSSKSGKLKGDDLQAIKKELTQIKQKVDSLLENLEKIEKEQSKQAVEMKNDKSEEEQSSSSVKKDETNVKMESEGGADDSAEEGDLLDDDDNEDRGDDQVKTTGKERKRWWRGAQGHMECL

SEQ ID NO: 55303 - protein, 456 aa, Homo sapiens
MQESATETISNSSMNQNGMSTLSSQLDAGSRDGRSSGDTSSEVSTVELLHLQQQQALQAARQLLLQQQTSGLKSPKSSDKQRPLQELLPETKLCICGHSSGDGHPHNTFAVPVSVAMMTPQVITPQQMQQILQQQVLSPQQLQALLQQQQAVMLQQQQLQEFYKKQQEQLHLQLLQQQQQQQQQQQQQQQQQQQQQQQQQQQQQQQQQQQQQQQQHPGKQAKEQQQQQQQQQQLAAQQLVFQQQLLQMQQLQQQQHLLSLQRQGLISIPPGQAALPVQSLPQAGLSPAEIQQLWKEVTGVHSMEDNGIKHGGLDLTTNNSSSTTSSNTSKASPPITHHSIVNGQSSVLSARRDSSSHEETGASHTLYGHGVCKWPGCESICEDFGQFLKHLNNEHALDDRSTAQCRVQMQVVQQLEIQLSKERERLQAMMTHLHMRPSEPKPSPKPVSAYCFINSK

SEQ ID NO: 55304 - protein, 105 aa, Homo sapiens
MKLFWLLFTIGFCWAQYSSNTQQGRTSIVHLFEWRWVDIALECERYLAPKGFGGVQVSPPNENVAIHNPFRPWWERYQPVSYKLCTRSGNEDEFRNMVTRCNNVG

SEQ ID NO: 55305 - protein, 78 aa, Homo sapiens
MFCVTPPELETKMNITKGGLVLFSANSNSSCMELSKKIAENKSTNSRVCEGKRCFHHPNCFEGREHHHHGAPDHGVCM

SEQ ID NO: 55306 - protein, 67 aa, Homo sapiens
MDEQSVESIAEVFRCFICMEKLRDARLCPHCSKLCCFSCIRRWLTEQRAQCPHCRVSLCRPGRSAMA

SEQ ID NO: 55307 - protein, 66 aa, Homo sapiens
MQIPQAPWPVVWAVLQLGWRPGWFLDSPDRPWNPPTFSPALLVVTEGDNATFTCSFSNTSESFVLN

SEQ ID NO: 55308 - protein, 43 aa, Homo sapiens
MLGARAWLGRVLLLPRAGAGLAASRRSACSPTSRLNSLRSLIP

SEQ ID NO: 55309 - protein, 187 aa, Homo sapiens
  MOD_RES (1)..(1): Any amino acid
XGSLQPGMWESTWQKNIESIGCSIQLVEVPQSSNTSLASFCNKVKKIRERYHAADVNFNSGKIWSTTTAFPYQLFSKTKFNIHIFIDNSTQPLHFMPCANYLVKDLIAEILHFCTNDQLLPKDHILSVCGSEEFLQNDHCLGSHKMFQKDKSVIQLHLQKSREAPGKLSRKVRTQQEGSCLHTGKGL

SEQ ID NO: 55310 - protein, 321 aa, Homo sapiens
MEFLTFLKSDYTHANLVDKALQLLKERILKGDTLAYFLRGQLYFEEGWYEEALEQFEEIKEKDHQATYQLGVMYYDGLGTTLDAEKGVDYMKKILDSPCPKARHLKFAAAYNLGRAYYEGKGVKRSNEEAERLWLIAADNGNPKASVKAQSMLGLYYSTKEPKELEKAFYWHSEACGNGNLESQGALGLMYLYGQGIRQDTEAALQCLREAAERGNVYAQGNLVEYYYKMKFFTKCVAFSKRIADYDEVHDIPMIAQVTDCLPEFIGRGMAMASFYHARCLQLGLGITRDETTAKHYYSKACRLNPALADELHSLLIRQRI

SEQ ID NO: 55311 - protein, 196 aa, Homo sapiens
MAVVSEDDFQHSSNSTYRTTSSSLRADQEALLEKLLDRPPPGLQRPEDRFCGTYIIFFSLGIGSLLPWNFFITAKEYWMFKLRNSSSPATGEDPEGSDILGCSPHPCPGLTDGHPGHLHGDNCTGEGGHFLLDPWLFCGHHCLHGDPQRCLHCLQQQHLRHDRLLSYEELPGTDIRRSHGRDGQRRGLIGGLGCIQ

SEQ ID NO: 55312 - protein, 91 aa, Homo sapiens
MSDSTWMSADPHLASSLSPSQDERMRSPQNLHSQEDGPHRLSHLSQGLNIICSLDTSLRARNPRVSAERNDFSFRGRSRCVTSNSLAKDGY

SEQ ID NO: 55313 - protein, 227 aa, Homo sapiens
MAAPSEVAAIAPGEGDGGGGGFGSWLDGRLEALGVDRAVYGAYILGILQEEEEEEKLDALQGILSAFLEEDSLLNICKEIVERWSETQNVVTKVKKEDEVQAIATLIEKQAQIVVKPRMVSEEEKQRKAALLAQYADVTDEEESLTEADEKDDSGATTMNIGSDKLLFRNTNVEDVLNARKLERDSLRDESQRKKEQDKLQRERDKLAKQERKEKEKKRTQRGERKR

SEQ ID NO: 55314 - protein, 80 aa, Homo sapiens
MFPPSGSTGLIPPSHFQARPLSTLPRMAPTWLSDIPLVQPPGHQDVSERRLDTQRPQVTMWERDVSSDRQEPGRRGSCPL

SEQ ID NO: 55315 - protein, 651 aa, Homo sapiens
MTPILTVLICLGLSLGPRTHVQAGHLPKPTLWAEPGSVITQGSPVTLRCQGGQETQEYRLYREKKTAPWITRIPQELVKKGQFPIPSITWEHTGRYRCYYGSDTAGRSESSDPLELVVTGAYIKPTLSAQPSPVVNSGGNVTLQCDSQVAFDGFILCKEGEDEHPQCLNSQPHARGSSRAIFSVGPVSPSRRWWYRCYAYDSNSPYEWSLPSDLLELLVLGVSKKPSLSVQPGPIVAPEETLTLQCGSDAGYNRFVLYKDGERDFLQLAGAQPQAGLSQANFTLGPVSRSYGGQYRCYGAHNLSSEWSAPSDPLDILIAGQFYDRVSLSVQPGPTVASGENVTLLCQSQGWMQTFLLTKEGAADDPWRLRSTYQSQKYQAEFPMGPVTSAHAGTYRCYGSQSSKPYLLTHPSDPLELVVSGPSGGPSSPTTGPTSTSGPEDQPLTPTGSDPQSGLGRHLGVVIGILVAVILLLLLLLLLFLILRHRRQGKHWTSTQRKADFQHPAGAVGPEPTDRGLQWRSSPAADAQEENLYAAVKHTQPEDGVEMDTRQSPHDEDPQAVTYAEVKHSRPRREMASPPSPLSGEFLDTKDRQAEEDRQMDTEAAASEAPQDVTYAQLHSLTLRREATEPPPSQEGPSPAVPSIYATLAIH

SEQ ID NO: 55316 - protein, 573 aa, Homo sapiens
MSKGILQVHPPICDCPGCRISSPVNRGRLADKRTVALPAARNLKKERTPSFSASDGDSDGSGPTCGRRPGLKQEDGPHIRIMKRRVHTHWDVNISFREASCSQDGNLPTLISSVHRSRHLVMPEHQSRCEFQRGSLEIGLRPAGDLLGKRLGRSPRISSDCFSEKRARSESPQAEALLLPRELGPSMAPEDHYRRLVSALSEASTFEDPQRLYHLGLPSHGYGFLPPAQAEMFAWQQELLRKQNLARLELPADLLRQKELESARPQLLAPETALRPNDGAEELQRRGALLVLNHGAAPLLALPPQGPPGSGPPTPSRDSARRAPRKGGPGPASARPSESKEMTGARLWAQDGSEDEPPKDSDGEDPETAAVGCRGPTPGQAPAGGAGAEGKGLFPGSTLPLGFPYAVSPYFHTGAVGGLSMDGEEAPAPEDVTKWTVDDVCSFVGGLSGCGEYTRVFREQGIDGETLPLLTEEHLLTNMGLKLGPALKIRAQVARRLGRVFYVASFPVALPLQPPTLRAPERELGTGEQPLSPTTATSPYGGGHALAGQTSPKQENGTLALLPGAPDPSQPLC

SEQ ID NO: 55317 - protein, 115 aa, Homo sapiens
NTVSETAKDLVSKMLHVDPHQRLTAKQVLQHPWVTQKDKLPQSQLSHQDLQLVKGAMAATYSALNSSKPTPQLKPIESSILAQRRVRKLPSTTLMDSSRLRLCWWKAIHCINFFL

SEQ ID NO: 55318 - protein, 200 aa, Homo sapiens
MSSRGGKKKSTKTSRSAKAGVIFPVGRMLRYIKKGHPKYRIGVGAPVYMAAVLEYLTGNTLEKKGGKEFVEAVLELRKKNGPLEVAGAAVSAGHGLPAKFVIHCNSPVWGADKCEELLEKTVKNCLALADDKKLKSIAFPSIGSGRNGFPKQTAAQLILKAISSYFVSTMSSSIKTVYFVLFDSESIGIYVQEMAKLDAN

SEQ ID NO: 55319 - protein, 242 aa, Homo sapiens
MEEDGSTVLGLLESSAEKAPVSVSCGGESPLDGICLSESDKTAVLTLIREEIITKEIEANEWKKKYEETRQEVLEMRKIVAEYEKTIAQMIDEQRTSMTSQKSFQQLTMEKEQALADLNSVERSLSDLFRRYENLKGVLEGFKKNEEALKKCAQDYLARVKQEEQRYQALKIHAEEKLDKANEEIAQVRTKAKAESAALHAGLRKEQMKVESLERALQQKNQEIEELTKICDELIAKLGKTD

SEQ ID NO: 55320 - protein, 139 aa, Homo sapiens
MEAARPPPTAGKFVVVGGGIAGVTCAEQLATHFPSEDILLVTASPVIKAVTNFKQISKILEEFDVEEQSSTMLGKRFPNIKVIESGVKQLKSEEHCIVTEDGNQHVYKKLCLCAGAKPKLICEGNPYVLGIRDTDSAQV

SEQ ID NO: 55321 - protein, 346 aa, Homo sapiens
MGSRQSHNSHQSLNSLVTISSNHVPENFSLELTHATPAVEQVSQLLSMLHQGQYQPRPSFRGNKYSRSYRYALQDMDKFSLKDSGRGDSEAGDSDYDLGRDSPIDRLLGEGFSDLFLTDGRIPAAMRLCTEECRVLGHSDQCWMPPLPSPSSDYRSNMFIPGEEFPTQPQQQHPHQSLEDDAQPADSGEKKKSFSTFGKDSPNDEDTGDTSTSSLLSEMSSVFQRLLPPSLDTYSECSEVDRSNSLERRKGPLPAKTVGYPQGVAAWAASTHFQNPTTNCGPPLGTHSSVQPSSKWLPAMEEIPENYEEDDFDNVLNHLNDGKHELMDASELVAEINKLLQDVRQS

SEQ ID NO: 55322 - protein, 362 aa, Homo sapiens
MLQKPKSVKLRALRSPRKFGVAGRSCQEVLRKGCLRFQLPERGSRLCLYEDGTELTEDYFPSVPDNAELVLLTLGQAWQGCEWQGLWRMCLLLDRHLLFVPLVADVSDIRRFLSAFHEPQVGLIQAAQQLLCDEQAPQRQRLLADLLHNVSQNIAAETRAEDPPWFEGLESRFQSKSGYLRYSCESRIRSYLREVSSYPSTVGAEAQEEFLRVLGSMCQRLRSMQYNGSYFDRGAKGGSRLCTPEGWFSCQGPFDMDSCLSRHSINPYSNRESRILFSTWNLDHIIEKKRTIIPTLVEAIKEQDGREVDWEYFYGLLFTSENLKLVHIVCHKKTTHKLNCDPSRIYKPQTRLKRKQPVRKRQ

SEQ ID NO: 55323 - protein, 77 aa, Homo sapiens
MDVLAEANGTFALNLLKTLGKDNSKNVFFSPMSMSCALAMVYMGAKGNTAAQMAQILSFNKSGGGGDIHQGFQSLLT

SEQ ID NO: 55324 - protein, 73 aa, Homo sapiens
MLTLASKLKRDDGLKGSRTAATASDSTRRVSVRDKLLVKEVAELEANLPCTCKVHFPDPNKLHCFQLTVTPVY

SEQ ID NO: 55325 - protein, 1253 aa, Homo sapiens
MLSWRLQTGPEKAELQELNARLYDYVCRVRELERENLLLEEELRGRRGREGLWAEGQARCAEEARSLRQQLDELSWATALAEGERDALRRELRELQRLDAEERAARGRLDAELGAQQRELQEALGARAALEALLGRLQAERRGLDAAHERDVRELRARAASLTMHFRARATGPAAPPPRLREVHDSYALLVAESWRETVQLYEDEVRELEEALRRGQESRLQAEEETRLCAQEAEALRREALGLEQLRARLEDALLRMREEYGIQAEERQRVIDCLEDEKATLTLAMADWLRDYQDLLQVKTGLSLEVATYRALLEGESNPEIVIWAEHVENMPSEFRNKSYHYTDSLLQRENERNLFSRQKAPLASFNHSSALYSNLSGHRGSQTGTSIGGDARRGFLGSGYSSSATTQQENSYGKAVSSQTNVRTFSPTYGLLRNTEAQVKTFPDRPKAGDTREVPVYIGEDSTIARESYRDRRDKVAAGASESTRSNERTVILGKKTEVKATREQERNRPETIRTKPEEKMFDSKEKASEERNLRWEELTKLDKEARQRESQQMKEKAKEKDSPKEKSVREREVPISLEVSQDRRAEVSPKGLQTPVKDAGGGTGREAEARELRFRLGTSDATGSLQGDSMTETVAENIVTSILKQFTQSPETEASADSFPDTKVTYVDRKELPGERKTKTEIVVESKLTEDVDVSDEAGLDYLLSKDIKEVGLKGKSAEQMIGDIINLGLKGREGRAKVVNVEIVEEPVSYVSGEKPEEFSVPFKVEEVEDVSPGPWGLVKEEEGYGESDVTFSVNQHRRTKQPQENTTHVEEVTEAGDSEGEQSYFVSTPDEHPGGHDRDDGSVYGQIHIEEESTIRYSWQDEIVQGTRRRTQKDGAVGEKVVKPLDVPAPSLEGDLGSTHWKEQARSGEFHAEPTVIEKEIKIPHEFHTSMKGISSKEPRQQLVEVIGQLEETLPERMREELSALTREGQGGPGSVSVDVKKVQGAGGSSVTLVAEVNVSQTVDADRLDLEELSKDEASEMEKAVESVVRESLSRQRSPAPGSPDEEGGAEAPAAGIRFRRWATRELYIPSGESEVAGGASHSSGQRTPQGPVSATVEVSSPTGFAQSQVLEDVSQAARHIKLGPSEVWRTERMSYEGPTAEVVEMDVSNVEAIRSRTQEAGALGVSDRGSWRDADSRNDQAVGVSFKASAGEGDQAHREQGKEQAMFDKKVQLQRMVDQRSVISDEKKVALLYLDNEEEENDGHWF

SEQ ID NO: 55326 - protein, 372 aa, Homo sapiens
MYVNSIGPVNAINMEYTIDIFFAQTWYDRRLKFNSTIKVLRLNSNMVGKIWIPDTFFRNSKKADAHWITTPNRMLRIWNDGRVLYTLRLTIDAECQLQLHNFPMDEHSCPLEFSSYGYPREEIVYQWKRSSVEVGDTRSWRLYQFSFVGLRNTTEVVKTTSGDYVVMSVYFDLSRRMGYFTIQTYIPCTLIVVLSWVSFWINKDAVPARTSLGITTVLTMTTLSTIARKSLPKVSYVTAMDLFVSVCFIFVFSALVEYGTLHYFVSNRKPSKDKDKKKKNPAPTIDIRPRSATIQMNNATHLQERDEEYGYECLDGKDCASFFCCFEDCRTGAWRHGRIHIRIAKMDSYARIFFPTAFCLFNLVYWVSYLYL

SEQ ID NO: 55327 - protein, 254 aa, Homo sapiens
MILNKALMLGALALTTVMSPCGGEDIVADHVASYGVNLYQSYGPSGQFTHEFDGDEEFYVDLERKETVWKLPLFHRLRFDPQFALTNIAVLKHNLNILIKRSNSTAATNEVPEVTVFSKSPVTLGQPNTLICLVDNIFPPVVNITWLSNGHSVTEGVSETSFLSKSDHSFFKISYLTFLPSADEIYDCKVEHWGLDEPLLKHWEPEIPAPMSELTETVVCALGLSVGLVGIVVGTVLIIRGLRSVGASRHQGPL

SEQ ID NO: 55328 - protein, 934 aa, Homo sapiens
MSSTLSPTDFDSLEIQGQYSDINNRWDLPDSDWDNDSSSARLFERSRIKALADEREAVQKKTFTKWVNSHLARVTCRVGDLYSDLRDGRNLLRLLEVLSGEILPKPTKGRMRIHCLENVDKALQFLKEQKVHLENMGSHDIVDGNHRLTLGLVWTIILRFQIQDISVETEDNKEKKSAKDALLLWCQMKTAGYPNVNVHNFTTSWRDGLAFNAIVHKHRPDLLDFESLKKCNAHYNLQNAFNLAEKELGLTKLLDPEDVNVDQPDEKSIITYVATYYHYFSKMKALAVEGKRIGKVLDHAMEAERLVEKYESLASELLQWIEQTIVTLNDRQLANSLSGVQNQLQSFNSYRTVEKPPKFTEKGNLEVLLFTIQSKLRANNQKVYTPREGRLISDINKAWERLEKAEHERELALRTELIRQEKLEQLAARFDRKAAMRETWLSENQRLVSQDNFGLELAAVEAAVRKHEAIETDIVAYSGRVQAVDAVAAELAAERYHDIKRIAARQHNVARLWDFLRQMVAARRERLLLNLELQKVFQDLLYLMDWMEEMKGRLQSQDLGRHLAGVEDLLQLHELVEADIAVQAERVRAVSASALRFCNPGKEYRPCDPQLVSERVAKLTALEEREKERKRKREEEERRKQPPAPEPTASVPPGDLVGGQTASDTTWDGTQPRPPPSTQAPSVNGVCTDGEPSQPLLGQQRLEHSSFPEGPGPGSGDEANGPRGERQTRTRGPAPSAMPQSRSTESAHAATLPPRGPEPSAQEQMEGMLCRKQEMEAFGKKAANRSWQNVYCVLRRGSLGFYKDAKAASAGVPYHGEVPVSLARAQGSVAFDYRKRKHVFKLGLQDGKEYLFQAKDEAEMSSWLRVVNAAIATASSASGEPEEPVVPSTTRGMTRAMTMPPVSPVGAEGPVVLRSKDGREREREKRFSFFKKNK

SEQ ID NO: 55329 - protein, 506 aa, Homo sapiens
MGNQMSVPQRVEDQENEPEAETYQDNASALNGVPVVVSTHTVQHLEEVDLGISVKTDNVATSSPETTEISAVADANGKNLGKEAKPEAPAAKSRFFLMLSRPVPGRTGDQAADSSLGSVKLDVSSNKAPANKDPSESWTLPVAAGPGQDTDKTPGHAPAQDKVLSAARDPTLLPPETGGAGGEAPSKPKDSSFFDKFFKLDKGQEKVPGDSQQEAKRAEHQDKVDEVPGLSGQSDDVPAGKDIVDGKEKEGQELGTADCSVPGDPEGLETAKDDSQAAAIAENNNSIMSFFKTLVSPNKAETKKDPEDTGAEKSPTTSADLKSDKANFTSQETQGAGKNSKGCNPSGHTQSVTTPEPAKEGTKEKSGPTSLPLGKLFWKKSVKEDSVPTGAEENTSDSTEKTITPPEPEPTGAPQKGKEGSSKDKKSAAEMNKQKSNKQEAKEPAQCTEQATVDTNSLQNGDKLQKRPEKRQQSLGGFFKGLGPKRMLDAQVQTDPVSIGPVGKSK

SEQ ID NO: 55330 - protein, 457 aa, Homo sapiens
MPEEMDKPLISLHLVDSDSSLAKVPDEAPKVGILGSGDFARSLATRLVGSGFKVVVGSRNPKRTARLFPSAAQVTFQEEAVSSPEVIFVAVFREHYSSLCSLSDQLAGKILVDVSNPTEQEHLQHRESNAEYLASLFPTCTVVKAFNVISAWTLQAGPRDGNRQVPICGDQPEAKRAVSEMALAMGFMPVDMGSLASAWEVEAMPLRLLPAWKVPTLLALGLFVCFYAYNFVRDVLQPYVQESQNKFFKLPVSVVNTTLPCVAYVLLSLVYLPGVLAAALQLRRGTKYQRFPDWLDHWLQHRKQIGLLSFFCAALHALYSFCLPLRRAHRYDLVNLAVKQVLANKSHLWVEEEVWRMEIYLSLGVLALGTLSLLAVTSLPSIANSLNWREFSFVQCVATSSAGNTGSGTRRPESQSQDPHLPAPHHQTSFLGPRSFCCSLVPVSTPYGHQEDLSWTR

SEQ ID NO: 55331 - protein, 972 aa, Homo sapiens
MWRLRRAAVACEVCQSLVKHSSGIKGSLPLQKLHLVSRSIYHSHHPTLKLQRPQLRTSFQQFSSLTNLPLRKLKFSPIKYGYQPRRNFWPARLATRLLKLRYLILGSAVGGGYTAKKTFDQWKDMIPDLSEYKWIVPDIVWEIDEYIDFEKIRKALPSSEDLVKLAPDFDKIVESLSLLKDFFTSGSPEETAFRATDRGSESDKHFRKVSDKEKIDQLQEELLHTQLKYQRILERLEKENKELRKLVLQKDDKGIHHRKLKKSLIDMYSEVLDVLSDYDASYNTQDHLPRVVVVGDQSAGKTSVLEMIAQARIFPRGSGEMMTRSPVKVTLSEGPHHVALFKDSSREFDLTKEEDLAALRHEIELRMRKNVKEGCTVSPETISLNVKGPGLQRMVLVDLPGVINTVTSGMAPDTKETIFSISKAYMQNPNAIILCIQDGSVDAERSIVTDLVSQMDPHGRRTIFVLTKVDLAEKNVASPSRIQQIIEGKLFPMKALGYFAVVTGKGNSSESIEAIREYEEEFFQNSKLLKTSMLKAHQVTTRNLSLAVSDCFWKMVRESVEQQADSFKATRFNLETEWKNNYPRLRELDRNELFEKAKNEILDEVISLSQVTPKHWEEILQQSLWERVSTHVIENIYLPAAQTMNSGTFNTTVDIKLKQWTDKQLPNKAVEVAWETLQEEFSRFMTEPKGKEHDDIFDKLKEAVKEESIKRHKWNDFAEDSLRVIQHNALEDRSISDKQQWDAAIYFMEEALQARLKDTENAIENMVGPDWKKRWLYWKNRTQEQCVHNETKNELEKMLKCNEEHPAYLASDEITTVRKNLESRGVEVDPSLIKDTWHQVYRRHFLKTALNHCNLCRRGFYYYQRHFVDSELECNDVVLFWRIQRMLAITANTLRQQLTNTEVRRLEKNVKEVLEDFAEDGEKKIKLLTGKRVQLAEDLKMFFFPSSDSTLHTRPPHGAAPSIDTSFTLSGL

SEQ ID NO: 55332 - protein, 218 aa, Homo sapiens
MARRGPGWRPLLLLVLLAGAAQGGLYFRRGQTCYRPLRGDGLAPLGRSTYPRPHEYLSPADLPKSWDWRNVDGVNYASITRNQHIPQYCGSCWAHASTSAMADRINIKRKGAWPSTLLSVQNVIDCGNAGSCEGGNDLSVWDYAHQHGIPDETCNNYQAKDQECDKFNQCGTCNEFKECHAIRNYTLWRVGDYGSLSGREKMMAEIYANGPIRAREAG

SEQ ID NO: 55333 - protein, 211 aa, Homo sapiens
KNADHLLHLKTKGPENIICSCISPCGSWIAYSTVSRFFLYRLNYEHDNISLKRVSKMPAFLRSALQILFSEDSTKLFVASNQGALHIVQLSGGSFKHLHAFQPQSGTVEAMCLLAVSPDGNWLAASGTSAGVHVYNVKQLKLHCTVPAYNFPVTAMAIAPNTNNLVIAHSDQQPLLFMDLLDERTLVAVERPLDDIIAQLPPPIKKKKFGT

SEQ ID NO: 55334 - protein, 343 aa, Homo sapiens
  MOD_RES (1)..(1): Any amino acid
XVRLPRQDALVLEGVRIGSEADPAPLLGGRLLLMDIVDAEQEAPVEGWIAVAYVGKEQAAQFHQENKGSGPQAYPKALVQQMRRALFLGASALLLLILNHNVVRELDISQLLLRPVIVLHYSSNVTKLLDALLQRTQATAEITSGESLSANIEWKLTLWTTCGLSKDGYGGWQDLVCLGGSRAQEQKPLQQLWNAILLVAMLLCTGLVVQAQRQASRQSQRELGGQVDLFKRRVVRRLASLKTRRCRLSRAAQGLPDPGAETCAVCLDYFCNKQWLRVLPCKHEFHRDCVDPWLMLQQTCPLCKFNVLGEHQGWGPSAYSACSSPDASLPVLLPLPCREPLLR

SEQ ID NO: 55335 - protein, 254 aa, Homo sapiens [sequence omitted]

SEQ ID NO: 55336 - protein, 401 aa, Homo sapiens
MYFINQRLFLRLWRVPVMRASHCYQSQGWRPVAVGQDLTVMAALGLGFLTSNFRRHSWSSVAFNLFMLALGVQWAILLDGFLSQFPPGKVVITLFSIRLATMSAMSVLISAGAVLGKVNLAQLVVMVLVEVTALGTLRMVISNIFNTDYHMNLRHFYVFAAYFGLTVAWCLPKPLPKGTEDNDQRATIPSLSAMLGALFLWMFWPSVNSALLRSPIQRKNAMFNTYYALAVSVVTAISGSSLAHPQRKISMTYVHSAVLAGGVAVGTSCHLIPSPWLAMVLGLVAGLISIGGAKCLPVCCNRVLGIHHISVMHSIFSLLGLLGEITYIVLLVLHTVWNGNGMIGFQVLLSIGELSLAIVIALTSGLLTGLLLNLKIWKAPHVAKYFDDQVFWKFPHLAVGF

SEQ ID NO: 55337 - protein, 58 aa, Homo sapiens
MKQPIMADGPRCKRRKQANPRRKNALESEMSTRSGRCPAAACHRCGPFVTCKVCCFCP

SEQ ID NO: 55338 - protein, 928 aa, Homo sapiens
MDLYSTPAAALDRFVARRLQPRKEFVEKARRALGALAAALRERGGRLGAAAPRVLKTVKGGSSGRGTALKGGCDSELVIFLDCFKSYVDQRARRAEILSEMRASLESWWQNPVPGLRLTFPEQSVPGALQFRLTSVDLEDWMDVSLVPAFNVLGQAGSGVKPKPQVYSTLLNSGCQGGEHAACFTELRRNFVNIRPAKLKNLILLVKHWYHQVCLQGLWKETLPPVYALELLTIFAWEQGCKKDAFSLAEGLRTVLGLIQQHQHLCVFWTVNYGFEDPAVGQFLQRQLKRPRPVILDPADPTWDLGNGAAWHWDLLAQEAASCYDHPCFLRGMGDPVQSWKGPGLPRAGCSGLGHPIQLDPNQKTPENSKSLNAVYPRAGSKPPSCPAPGPTGAASIVPSVPGMALDLSQIPTKELDRFIQDHLKPSPQFQEQVKKAIDIILRCLHENCVHKASRVSKGGSFGRGTDLRDGCDVELIIFLNCFTDYKDQGPRRAEILDEMRAQLESWWQDQVPSLSLQFPEQNVPEALQFQLVSTALKSWTDVSLLPAFDAVGQLSSGTKPNPQVYSRLLTSGCQEGEHKACFAELRRNFMNIRPVKLKNLILLVKHWYRQVAAQNKGKGPAPASLPPAYALELLTIFAWEQGCRQDCFNMAQGFRTVLGLVQQHQQLCVYWTVNYSTEDPAMRMHLLGQLRKPRPLVLDPADPTWNVGHGSWELLAQEAAALGMQACFLSRDGTSVQPWDVMPALLYQTPAGDLDKFISEFLQPNRQFLAQVNKAVDTICSFLKENCFRNSPIKVIKVVKGGSSAKGTALRGRSDADLVVFLSCFSQFTEQGNKRAEIISEIRAQLEACQQERQFEVKFEVSKWENPRVLSFSLTSQTMLDQSVDFDVLPAFDALGTLWANSGLKLGSSLSNSTNMLDDLEQGTSPS

SEQ ID NO: 55339 - protein, 136 aa, Homo sapiens
MALSVPGYSPGFRKPPEVVRLRRKRARSRGAAASPPRELTEPAARRAALVAGLPLRPFPAAGGRGGGSGGGPAAARRNPFARLDNRPRVAAEPPDGPAREQPEAPVPFLDSNQENDLLWEEKFPERTTVTELPQII

SEQ ID NO: 55340 - protein, 113 aa, Homo sapiens
  MOD_RES (1)..(1): Any amino acid
XWLLDVSHLVAPHARVLDSRVASLEGGRVVVGREPGVTSIEVRSPLSDSILGEQALAVTDDKVSVLELRVQPVMGISLTLSRGTAHPGEVTATCWAQSALPAPKQVTVGGSGG

SEQ ID NO: 55341 - protein, 265 aa, Homo sapiens
MAEAQSGTGQLQEQKKGLLIAVSVSVDKIISHFGAARNLVQKAQLGDSRLSPDVGHLVLTTLCPALHALVADGLKPFRKDLITGQRRSSPWSVVEASVKPGSSTRSLGTLYSQVSRLAPLSSSRSRFHAFILGLLNTKQLELWFSSLQEDAGLLSLLYLPTGFFSLARGGCPSLSTELLLLLQPLSVLTFHLDLLFEHHHHLPLGPPQAPAPPGPPPALQQTMQAMLHFGGRLAQSLRGTSKEAASDPSDSPNLPTPGSWWEQLT

SEQ ID NO: 55342 - protein, 60 aa, Homo sapiens
MAPRPPTAAPQESVTFKDVSVDFTQEEWYHVDPAQRSLYRDVMLENYSHLVSLEFLRIKD

SEQ ID NO: 55343 - protein, 184 aa, Homo sapiens
MALLCYNRGCGQRFDPETNSDDACTYHPGVPVFHDALKGWSCCKRRTTDFSDFLSIVGCTKGRHNSEKPPEPVKPEVKTTEKKELCELKPKFQEHIIQAPKPVEAIKRPSPDEPMTNLELKISASLKQALDKLKLSSGNEENKKEEDNDEIKIGTSCKNGGCSKSLHLQQQWGPDLPDKPWIYI

SEQ ID NO: 55344 - protein, 756 aa, Homo sapiens
MVKLDIHTLAHHLKQERLYVNSEKQLIQRLNADVLKTAEKLYRTAWIAKQQRINLDRLIITSAEASPAECCQHAKILEDTQFVDGYKQLGFQETAYGEFLSRLRENPRLIASSLVAGEKLNQENTQSVIYTVFTSLYGNCIMQEDESYLLQVLRYLIEFELKESDNPRRLLRRGTCAFSILFKLFSEGLFSAKLFLTATLHEPIMQLLVEDEDHLETDPNKLIERFSPSQQEKLFGEKGSDRFRQKVQEMVESNEAKLVALVNKFIGYLKQNTYCFPHSLRWIVSQMYKTLSCVDRLEVGEVRAMCTDLLLACFICPAVVNPEQYGIISDAPINEVARFNLMQVGRLLQQLAMTGSEEGDPRTKSSLGKFDKSCVAAFLDVVIGGRAVETPPLSSVNLLEGLSRTVVYITYSQLITLVNFMKSVMSGDQLREDRMALDNLLANLPPAKPGKSSSLEMTPYNTPQLSPATTPANKKNRLPIATRSRSRTNMLMDLHMDHEGSSQETIQEVQPEEVLVISLGTGPQLTPGMMSENEVLNMQLSDGGQGDVPVDENKLHGKPDKTLRFSLCSDNLEGISEGPSNRSNSVSSLDLEGESVSELGAGPSGSNGVEALQLLEHEQATTQDNLDDKLRKFEIRDMMGLTDDRDISETVSETWSTDVLGSDFDPNIDEDRLQEIAGAAAENMLGSLLCLPGSGSVLLDPCTGSTISETTSEAWSVEVLPSDSEAPDLKQEERLQELESCSGLGSTSDDTDVREA

SEQ ID NO: 55345 - protein, 96 aa, Homo sapiens
MESERSKRMGNACIPLKRIAYFLCLLSALLLTEGKKPAKPKCPAVCTCTKDNALCENARSIPRTVPPDVISLSFVRSGFTEISEGSFLFTPSLQLL

SEQ ID NO: 55346 - protein, 1205 aa, Homo sapiens
MSPALQDLSQPEGLKKTLRDEINAILQKRIMVLDGGMGTMIQREKLNEEHFRGQEFKDHARPLKGNNDILSITQPDVIYQIHKEYLLAGADIIETNTFSSTSIAQADYGLEHLAYRMNMCSAGVARKAAEEVTLQTGIKRFVAGALGPTNKTLSVSPSVERPDYRNITFDELVEAYQEQAKGLLDGGVDILLIETIFDTANAKAALFALQNLFEEKYAPRPIFISGTIVDKSGRTLSGQTGEGFVISVSHGEPLCIGLNCALGAAEMRPFIEIIGKCTTAYVLCYPNAGLPNTFGDYDETPSMMAKHLKDFAMDGLVNIVGGCCGSTPDHIREIAEAVKNCKPRVPPATAFEGHMLLSGLEPFRIGPYTNFVNIGERCNVAGSRKFAKLIMAGNYEEALCVAKVQVEMGAQVLDVNMDDGMLDGPSAMTRFCNLIASEPDIAKVPLCIDSSNFAVIEAGLKCCQGKCIVNSISLKEGEDDFLEKARKIKKYGAAMVVMAFDEEGQETLPGARISGGLSNLSFSFRGMEAIREAMHGVFLYHAIKSGMDMGIVNAGNLPVYDDIHKELLQLCEDLIWNKDPEATEKLLRYAQTQGTGGKKVIQTDEWRNGPVEERLEYALVKGIEKHIIEDTEEARLNQKKYPRPLNIIEGPLMNGMKIVGDLFGAGKMFLPQVIKSARVMKKAVGHLIPFMEKEREETRVLNGTVEEEDPYQGTIVLATVKGDVHDIGKNIVGVVLGCNNFRVIDLGVMTPCDKILKAALDHKADIIGLSGLITPSLDEMIFVAKEMERLAIRIPLLIGGATTSKTHTAVKIAPRYSAPVIHVLDASKSVVVCSQLLDENLKDEYFEEIMEEYEDIRQDHYESLKERRYLPLSQARKSGFQMDWLSEPHPVKPTFIGTQVFEDYDLQKLVDYIDWKPFFDVWQLRGKYPNRGFPKIFNDKTVGGEARKVYDDAHNMLNTLISQKKLRARGVVGFWPAQSIQDDIHLYAEAAVPQAAEPIATFYGLRQQAEKDSASTEPYYCLSDFIAPLHSGIRDYLGLFAVACFGVEELSKAYEDDGDDYSSIMVKALGDRLAEAFAEELHERVRRELWAYCGSEQLDVADLRRLRYKGIRPAPGYPSQPDHTEKLTMWRLADIEQSTGIRLTESLAMAPASAVSGLYFSNLKSKYFAVGKISKDQVEDYALRKNISVAEVEKWLGPILGYDTD

SEQ ID NO: 55347 - protein, 102 aa, Homo sapiens
MSGGTPYIGSKISLISKAEIRYEGILYTIDTENSTVALAKVRSFGTEDRPTDRPIPPRDEVFEYIIFRGSDIKDLTVCEPPKPQCSLPQDPAIVQSRWSTVA

SEQ ID NO: 55348 - protein, 922 aa, Homo sapiens
SEVEALTEQLSEEEEEEEEEEEEEEEEEEEEEEEEDEESGNQSDRSGSSGRRKAKKKWRKDSPWVKPSRKRRKREPPRAKEPRGVNGVGSSGPSEYMEVPLGSLELPSEGTLSPNHAGVSNDTSSLETERGFEELPLCSCRMEAPKIDRISERAGHKCMATESVDGELSGCNAAILKRETMRPSSRVALMVLCETHRARMVKHHCCPGCGYFCTAGTFLECHPDFRVAHRFHKACVSQLNGMVFCPHCGEDASEAQEVTIPRGDGVTPPAGTAAPAPPPLSQDVPGRADTSQPSARMRGHGEPRRPPCDPLADTIDSSGPSLTLPNGGCLSAVGLPLGPGREALEKALVIQESERRKKLRFHPRQLYLSVKQGELQKVILMLLDNLDPNFQSDQQSKRTPLHAAAQKGSVEICHVLLQAGANINAVDKQQRTPLMEAVVNNHLEVARYMVQRGGCVYSKEEDGSTCLHHAAKIGNLEMVSLLLSTGQVDVNAQDSGGWTPIIWAAEHKHIEVIRMLLTRGADVTLTDNEENICLHWASFTGSAAIAEVLLNARCDLHAVNYHGDTPLHIAARESYHDCVLLFLSRGANPELRNKEGDTAWDLTPERSDVWFALQLNRKLRLGVGNRAIRTEKIICRDVARGYENVPIPCVNGVDGEPCPEDYKYISENCETSTMNIDRNITHLQHCTCVDDCSSSNCLCGQLSIRCWYDKDGRLLQEFNKIEPPLIFECNQACSCWRNCKNRVVQSGIKVRLQLYRTAKMGWGVRALQTIPQGTFICEYVGELISDAEADVREDDSYLFDLDNKDGEVYCIDARYYGNISRFINHLCDPNIIPVRVFMLHQDLRFPRIAFFSSRDIRTGEELGFDYGDRFWDIKSKYFTCQCGSEKCKHSAEAIALEQSRLARLDPHPELLPELGSLPPVNT

SEQ ID NO: 55349 - protein, 428 aa, Homo sapiens
MNNSSINNQLLPVDAIRILGIHKRAGEPLGVTFRVENNDLVIARILHGGMIDRQGLLHVGDIIKEVNGHEVGNNPKELQELLKNISGSVTLKILPSYRDTITPQQVFVKCHFDYNPYNDNLIPCKEAGLKFSKGEILQIVNREDPNWWQASHVKEGGSAGLIPSQFLEEKRKAFVRRDWDNSGPFCGTISSKKKKKMMYLTTRNAEFDRHEIQIYEEVAKMPPFQRKTLVLIGAQGVGRRSLKNRFIVLNPTRFGTTVPFTSRKPREDEKDGQAYKFVSRSEMEADIKAGKYLEHGEYEGNLYGTKIDSILEVVQTGRTCILDVNPQALKVLRTSEFMPYVVFIAAPELETLRAMHKAVVDAGITTKLLTDSDLKKTVDESARIQRAYNHYFDLIIINDNLDKAFEKLQTAIEKLRMEPQWVPISWVY

SEQ ID NO: 55350 - protein, 94 aa, Homo sapiens
MSELEKAMVALIDVFHQYSGREGDKHKLKKSELKELINNELSHFLERWSLPMLPRLVSNFLCSSYPPALASQSAGITGNQRAGGCGQSHGNTGQ

SEQ ID NO: 55351 - protein, 268 aa, Homo sapiens
MFCVTPPELETKMNITKGGLVLFSANSNSSCMELSKKIAERLGVEMGKVQVYQEPNRETRVQIQESVRGKDVFIIQTVSKDVNTTIMELLIMVYACKTSCAKSIIGVIPYFPYSKQCKMRKRGSIVSKLLASMMCKAGLTHLITMDLHQKEIQGFFNIPVDNLRASPFLLQYIQEEIPDYRNAVIVAKSPASAKRAQSFAERLRLGIAVIHGEAQDAESDLVDGRHSPPMVRSVAAIHPSLEIPMLIPKEKPPITVVGDVGGRIAIIV

SEQ ID NO: 55352 - protein, 429 aa, Homo sapiens
MAAMLKCVMSGSQVKVFGKAVQALSRISDEFWLDPSKKGLALRCVNSSRSAYGCVLFSPVFFQHYQWSALVKMSENELDTTLHLKCKLGMKSILPIFRCLNSLERNIEKCRIFTRSDKCKVVIQFFYRHGIKRTHNICFQESQPLQVIFDKNVCTNTLMIQPRLLADAIVLFTSSQEEVTLAVTPLNFCLKSSNEESMDLSNAVHSEMFVGSDEFDFFQIGMDTEITFCFKELKGILTFSEATHAPISIYFDFPGKPLALSIDDMLVEANFILATLADEQSRASSPQSLCLSQKRKRSDLIEKKAGKNVTGQALECISKKAAPRRLYPKETLTNISALENCGSPAMKRVDGDVSEVSESSVSNTEEVPGSLCLRKFSCMFFGAVSSDQQEHFNHPFDSLARASDSEEDMNNVCCRKEFNGSDAKYFCII

SEQ ID NO: 55353 - protein, 721 aa, Homo sapiens
MAQWNQLQQLDTRYLEQLHQLYSDSFPMELRQFLAPWIESQDWAYAASKESHATLVFHNLLGEIDQQYSRFLQESNVLYQHNLRRIKQFLQSRYLEKPMEIARIVARCLWEESRLLQTAATAAQQGGQANHPTAAVVTEKQQMLEQHLQDVRKRVQDLEQKMKVVENLQDDFDFNYKTLKSQGDMQDLNGNNQSVTRQKMQQLEQMLTALDQMRRSIVSELAGLLSAMEYVQKTLTDEELADWKRRQQIACIGGPPNICLDRLENWITSLAESQLQTRQQIKKLEELQQKVSYKGDPIVQHRPMLEERIVELFRNLMKSAFVVERQPCMPMHPDRPLVIKTGVQFTTKVRLLVKFPELNYQLKIKVCIDKDSGDVAALRGSRKFNILGTNTKVMNMEESNNGSLSAEFKHLTLREQRCGNGGRANCDASLIVTEELHLITFETEVYHQGLKIDLETHSLPVVVISNICQMPNAWASILWYNMLTNNPKNVNFFTKPPIGTWDQVAEVLSWQFSSTTKRGLSIEQLTTLAEKLLGPGVNYSGCQITWAKFCKENMAGKGFSFWVWLDNIIDLVKKYILALWNEGYIMGFISKERERAILSTKPPGTFLLRFSESSKEGGVTFTWVEKDISGKTQIQSVEPYTKQQLNNMSFAEIIMGYKIMDATNILVSPLVYLYPDIPKEEAFGKYCRPESQEHPEADPGAAPYLKTKFICVTPFIDAVWK

SEQ ID NO: 55354 - protein, 89 aa, Homo sapiens
MSEKKQPVDLGLLEEDDEFEEFPAEDWAGLDEDEDAHVWEDNWDDDNVEDDFSNQLRATVLLMILVCETPYGCYVLHQKGRMCSAFLCC

SEQ ID NO: 55355 - protein, 83 aa, Homo sapiens
MEDERSFSDICGGRLALQRRYYSPSCREFCLSCPRLSLRSLTAVTCTVWLAAYGLFTLCEHDPLCCHLHHPLRSAWLSPFCED

SEQ ID NO: 55356 - protein, 361 aa, Homo sapiens
MESKVSEGGLNVTLTIRLLMHGKEVGSIIGKKGETVKKMREESGARINISEGNCPERIVTITGPTDAIFKAFAMIAYKFEEDIINSMSNSPATSKPPVTLRLVVPASQCGSLIGKGGSKIKEIRESTGAQVQVAGDMLPNSTERAVTISGTPDAIIQCVKQICVVMLESPPKGATIPYRPKPASTPVIFAGGQVRADPLAASTANLSLLLQHPPLPAYTIQGQYAIPHPDLTKLHQLAMQQTPFPPLGQTNPAFPGEKLPLHSSEEAQNLMGQSSGLDASPPASTHELTIPNDLIGCIIGRQGTKINEIRQMSGAQIKIANATEGSSERQITITGTPANISLAQYLINARLTSEVTGMGTL

SEQ ID NO: 55357 - protein, 120 aa, Homo sapiens
MNESKPGDSQNLACVFCRKHDDCPNKYGEKKTKEKWNLTVHYYCLLMSSGIWQRGKEEEGVYGFLIEDIRKEVNRASKLKCCVCKKNGASIGCVAPRCKRSYHFPCGLQRECIFQFTGNF

SEQ ID NO: 55358 - protein, 286 aa, Homo sapiens
MGGERSGVRGNKMAAAEPSPRRVGFVGAGRMAGAIAQGLIRAGKVEAQHILASAPTDRNLCHFQALGCRTTHSNQEVLQSCLLVIFATKPHVLPAVLAEVAPVVTTEHILVSVAAGVSLSTLEELLPPNTRVLRVLPNLPCVVQEGAIVMARGRHVGSSETKLLQHLLEACGRCEEVPEAYVDIHTGLSGSGVAFVCAFSEALAEGAVKMGMPSSLAHRIAAQTLLGTAKMLLHEGQHPAQLRSDVCTPGGTTIYGLHALEQGGLRAATMSAVEAATCRAKELSRK

SEQ ID NO: 55359 - protein, 277 aa, Homo sapiens
MRHENVIGLLDVFTPDETLDDFTDFYLVMPFMGTDLGKLMKHEKLGEDRIQFLVYQMLKGLRDLKPGNLAVNEDCELKILDFGLARQADSEMTGYVVTRWYRAPEVILNWMRYTQTVDIWSVGCIMAEMITGKTLFKGSDHLDQLKEIMKVTGTPPAEFVQRLQSDEAKNYMKGLPELEKKDFASILTNASPLAVNLLEKMLVLDAEQRVTAGEALAHPYFESLHDTEDEPQVQKYDDSFDDVDRTLDEWKRVTYKEVLSFKPPRQLGARVSKETPL

SEQ ID NO: 55360 - protein, 427 aa, Homo sapiens
MCRVLLTHEVMCSRCCEKKSCGNRNETPSDPVIIDRFFLKFFLKCNQNCLKTAGNPRDMRRFQVVLSTTVNVDGHVLAVSDNMFVHNNSKHGRRARRLDPSEATPCIKAISPSEGWTTGGAMVIIIGDNFFDGLQVVFGTMLVWSELITPHAIRVQTPPRHIPGVVEVTLSYKSKQFCKGAPGRFIYTALNEPTIDYGFQRLQKVIPRHPGDPERLAKEMLLKRAADLVEALYGTPHNNQDIILKRAADIAEALYSVPRNPSQLPALSSSPAHSGMMGINSYGSQLGVSISESTQGNNQGYIRNTSSISPRGYSSSSTPQQSNYSTSSNSMNGYSNVPMANLGVPGSPGFLNGSPTGSPYGIMSSSPTVGSSSTSSILPFSSSVFPAVKQKSAFAPVIRPQGSPSPACSSGNGNGFRAMTGLVVPPM

SEQ ID NO: 55361 - protein, 80 aa, Homo sapiens
MAASTASHRPIKGILKNKTSTTSSMVASAEQPRGNVDEELSKKSQKWDEMNILATYHPADKDYGLMKIDEPSTPYHRYIL

SEQ ID NO: 55362 - protein, 123 aa, Homo sapiens
MEIPNPPTSKCITYWKRKVKSEYMRLRQLKRLQANMGAKALYVANFAKVQEKTQILNEEWKKLRVQPVQSMKPVSGHPFLKKCTIESIFPGFASQHMLMRSLNTVALVPIMYSWSPLQQNFMR

SEQ ID NO: 55363 - protein, 40 aa, Homo sapiens
MPNIKIFSGSSHQDLSQKIADRLGLELGKVVTKKFSNQET

SEQ ID NO: 55364 - protein, 199 aa, Homo sapiens
GVHRKPSLLAHPGRLVKSEETVILQCWSDVRFEHFLLHREGKFKDTLHLIGEHHDGVSKANFSIGPMMQDLAGTYRCYGSVTHSPYQLSAPSDPLDIVITGLYEKPSLSAQPGPTVLAGESVTLSCSSRSSYDMYHLSREGEAHECRFSAGPKVNGTFQADFPLGPATHGGTYRCFGSFRDSPYEWSNSSDPLLVSVIG

SEQ ID NO: 55365 - protein, 192 aa, Homo sapiens
MTVLEITLAVILTLLGLAILAILLTRWARRKQSEMHISRYSSEQSARLLDYEDGRGSRHAYSTQSDTSCDNRERSKRDYTPSTNSLALSRSSIALPQGSMSSIKCLQTTEELPSRTAGAMMQFTAPIPGATGPIKLSQKTIVQTPGPIVQYPGPNVRSHPHTITGPPSAPRGPPMAPIIISQRTASQLAAPI

SEQ ID NO: 55366 - protein, 906 aa, Homo sapiens
MHPPETTTKMASVRFMVTPTKIDDIPGLSDTSPDLSSRSSSRVRFSSRESVPETSRSEPMSEMSGATTSLATVALDPPSDRTSHPQDVIEDLSQNSITGEHSQLLDDGHKKARNAYLNNSNYEEGDEYFDKNLALFEEEMDTRPKVSSLLNRMANYTNLTQGAKEHEEAENITEGKKKPTKTPQMGTFMGVYLPCLQNIFGVILFLRLTWVVGTAGVLQAFAIVLICCCCTMLTAISMSAIATNGVVPAGGSYFMISRALGPEFGGAVGLCFYLGTTFAAAMYILGAIEIFLVYIVPRAAIFHSDDALKESAAMLNNMRVYGTAFLVLMVLVVFIGVRYVNKFASLFLACVIVSILAIYAGAIKSSFAPPHFPVCMLGNRTLSSRHIDVCSKTKEINNMTVPSKLWGFFCNSSQFFNATCDEYFVHNNVTSIQGIPGLASGIITENLWSNYLPKGEIIEKPSAKSSDVLGSLNHEYVLVDITTSFTLLVGIFFPSVTGIMAGSNRSGDLKDAQKSIPIGTILAILTTSFVYLSNVVLFGACIEGVVLRDKFGDAVKGNLVVGTLSWPSPWVIVIGSFFSTCGAGLQSLTGAPRLLQAIAKDNIIPFLRVFGHSKANGEPTWALLLTAAIAELGILIASLDLVAPILSMFFLMCYLFVNLACALQTLLRTPNWRPRFRYYHWALSFMGMSICLALMFISSWYYAIVAMVIAGMIYKYIEYQGAEKEWGDGIRGLSLSAARFALLRLEEGPPHTKNWRPQLLVLLKLDEDLHVKHPRLLTFASQLKAGKGLTIVGSVIVGNFLENYGEALAAEQTIKHLMEAEKVKGFCQLVVAAKLREGISHLIQSCGLGGMKHNTVVMGWPNGWRQSEDARAWKTFIAMWSNFLRATLMCGGLCMMGGCLCYYHSY

SEQ ID NO: 55367 - protein, 258 aa, Homo sapiens
MQALNITPEQFSRLLRDHNLTREQFIALYRLRPLVYTPELPGRAKLALVLTGVLIFALALFGNALVFYVVTRSKAMRTVTNIFICSLALSDLLITFFCIPVTMLQNISDNWLGGAFICKMVPFVQSTAVVTEILTMTCIAVERHQGLVHPFKMKWQYTNRRAFTMLGVVWLVAVIVGSPMWHVQQLEIKYDFLYEKEHICCLEEWTSPVHQKIYTTFILVILFLLPLMEEETSCHYDGDSGGSLCCVLGTIPCCPYDD

SEQ ID NO: 55368 - protein, 254 aa, Homo sapiens
MEPLRVLELYSGVGGMHHALRESCIPAQVVAAIDVNTVANEVYKYNFPHTQLLAKTIEVLMEFPKIESVHPQKYAMDVENKIQEKNVEPNISFDGSIQCSGKDAILFKLETAEEIHRKNQQDSDLSVKMLKDFLEDDTDVNQYLLPPKSLLRYALLLDIVQPTCRRSVCFTKGYGSYIEGTGSVLQTAEDVQVENIYKSLTNLSQEEQITKLLILKLRYFTPKEIANLLGFPPEFGMWDTCRIQLSCIKTLKNL

SEQ ID NO: 55369 - protein, 904 aa, Homo sapiens
ITGWWYSVRTSASHSSASGHTGRSNGQSEVAAHACASMCDEMVTLWRLAVLDPALSPQRRRELCTQLRQWQLKVIENVKRGQHKKTLERLFPGFRPAVEACYFNWEEAYPLPGVTYSGTDRKLALCWARALPSRPGASRSGGLEESRDRPRPLPTEPAVRPKEPGTKRKGLGEGVPSSQRGPRRLSAEGGDKALHKMGPGGGKAKALGGAGSGSKGSAGGGSKRRLSSEDSSLEPDLAEMSLDDSSLALGAEASTFGGFPESPPPCPLHGGSRGPSTFLPEPPDTYEEDGGVYFSEGPEPPTASVGPPGLLPGDVCTQDDLPSTDESGNGLPKTKEAAPAVGEEDDDYQAYYLNAQDGAGGEEEKAEGGAGEEHDLFAGLKPLEQESRMEVLFACAEALHAHGYSSEASRLTVELAQDLLANPPDLKVEPPPAKGKKNKVSTSRQTWVATNTLSKAAFLLTVLSERPEHHNLAFRVGMFALELQRPPASTKALEVKLAYQESEVAALLKKIPLGPSEMSTMRCRAEELREGTLCDYRPVLPLMLASFIFDVLCAPGSRPPSRNWNSETPGDEELGFEAAVAALGMKTTVSEAEHPLLCEGTRREKGDLALALMITYKDDQAKLKKILDKLLDRESQTHKPQTLSSFYSSSRPTTASQRSPSKHGGPSAPGALQPLTSGSAGPAQPGSVAGAGPGPTEGFTEKNVPESSPHSPCEGLPSEAALTPRPEGKVPSRLALGSRGGYNGRGWGSPGRPKKKHTGMASIDSSAPETTSDSSPTLSRRPLRGGWAPTSWGRGQDSDSISSSSSDSLGSSSSSGSRRASASGGARAKTVEVGRGPPGSSPQPAPLRLRDWALCPWPAQLCFSQLALTYLFFPRFLDYRPGHGDRQRSPDYTGRMLGWAPDTP

SEQ ID NO: 55370 - protein, 1667 aa, Homo sapiens
MASKQTKKKEVHRINSAHGSDKSKDFYPFGSNVQSGSTEQKKGKFPLWPEWSEADINSEKWDAGKGAKEKDKTGKSPVFHFFEDPEGKIELPPSLKIYSWKRPQDILFSQTPVVVKNEITFDLFSANEHLLCSELMRWIISEIYAVWKIFNGGILSNYFKGTSGEPPLLPWKPWEHIYSLCKAVKGHMPLFNSYGKYVVKLYWMGCWRKITIDDFLPFDEDNNLLLPATTYEFELWPMLLSKAIIKLANIDIHVADRRELGEFTVIHALTGWLPEVISLHPGYMDKVWELLKEILPEFKLSDEASSESKIAVLDSKLKEPGKEGKEGKEIKDGKEVKDVKEFKPESSLTTLKAPEKSDKVPKEKADARDIGKKRSKDGEKEKFKFSLHGSRPSSEVQYSVQSLSDCSSAIQTSHMVVYATFTPLYLFENKIFSLEKMADSAEKLREYGLSHICSHPVLVTRSRSCPLVAPPKPPPLPPWKLIRQKKETVITDEAQELIVKKPERFLEISSPFLNYRMTPFTIPTEMHFVRSLIKKGIPPGSDLPSVSETDETATHSQTDLSQITKATSQGNTASQVILGKGTDEQTDFGLGDAHQSDGLNLEREIVSQTTATQEKSQEELPTTNNSVSKEIWLDFEDFCVCFQNIYIFHKPSSYCLNFQKSEFKFSEERVSYYLFVDSLKPIELLVCFSALVRWGEYGALTKDSPPIEPGLLTAETFSWKSLKPGSLVLKIHTYATKATVVRLPVGRHMLLFNAYSPVGHSIHICSMVSFVIGDEHVVLPNFEPESCRFTEQSLLIMKAIGNVIANFKDKGKLSAALKDLQTAHYPVPFHDKELTAQHFRVFHLSLWRLMKKVQITKPPPNFKFAFRAMVLDLELLNSSLEEVSLVEWLDVKYCMPTSDKEYSAEEVAAAIKIQAMWRGTYVRLLMKARIPDTKENISVADTLQKVWAVLEMNLEQYAVSLLRLMFKSKCKSLESYPCYQDEETKIAFADYTVTYQEQPPNSWFIVFRETFLVHQDMILVPKVYTTLPICILHIVNNDTMEQVPKVFQKVVPYLYTKNKKGYTFVAEAFTGDTYVAASRWKLRLIGSSAPLPCLSRDSPCNSFAIKEIRDYYIPNDKKILFRYSVKVLTPQPATIQVRTSKPDAFIKLQVLENEETMVSSTGKGQAIIPAFHFLKSEKGLSSQSSKHILSFHSASKKEQEVYVKKKAAQGIQKSPKGRAVSAIQDIGLPLVEEETTSTPTREDSSSTPLQNYKYIIQCSVLYNSWPLTESQLTFVQALKDLKKSNTKAYGERHEELINLGSPDSHTISEGQKSSVTSKTTRKGKEKSSEKEKTAKEKQAPRFEPQISTVHPQQEDPNKPYWILRLVTEHNESELFEVKKDTERADEIRAMKQAWETTEPGRAIKASQARLHYLSGFIKKTSDAESPPISESQTKPKEEVETAARGVKEPNSKNSAGSESKEMTQTGSGSAVWKKWQLTKGLRDVAKSTSSESGGVSSPGKEEREQSTRKENIQTGPRTRSPTILETSPRLIRKALEFMDLSQYVRKTDTDPLLQTDELNQQQAMQKAEEIHQFRQHRTRVLSIRNIDQEERLKLKDEVLDMYKEMQDSLDEARQKIFDIREEYRNKLLEAEHLKLEALSAQEAAMKLETEKMTPAPDTQKKKKGKKK

SEQ ID NO: 55371 - protein, 122 aa, Homo sapiens
MHDSNNVEKDITPSELPANPGCLHSKEHSIKATLIWRLFFLIMFLTIIVCGMVAALSAIRANCHQEPSVCLQAACPESWIGFQRKCFYFSDDTKNWTSSQRFCDSQDADLAQVESFQELVRK

SEQ ID NO: 55372 - protein, 396 aa, Homo sapiens
MMQQKAQITSQQLRKAQLQVDRFAMELEQSRNLSNTIVHIDMDAFYAAVEMRDNPELKDKPIAVGSMSMLSTSNYHARRFGVRAAMPGFIAKRLCPQLIIVPPNFDKYRAVSKEVKEILADYDPNFMAMSLDEAYLNITKHLEERQNWPEDKRRYFIKMGSSVENDNPGKEVNKLSEHERSISPLLFEESPSDVQPPGDPFQVNFEEQNNPQILQNSVVFGTSAQEVVKEIRFRIEQKTTLTASAGIAPNTMLAKVCSDKNKPNGQYQILPNRQAVMDFIKDLPIRKVSGIGKVTEKMLKALGIITCTELYQQRALLSLLFSETSWHYFLHISLGLGSTHLTRDGERKSMSVERTFSEINKAEEQYSLCQELCSELAQDLQKERLKKKYLPLLRNC

SEQ ID NO: 55373 - protein, 87 aa, Homo sapiens
MRDVYIVQDLMETDLYKLLKSQQLSNDHICYFLYQILRGLKYIHSANVLHRDLKPSNLLINTTCDLKICDFGLARIADPEHDHTGFL

SEQ ID NO: 55374 - protein, 1298 aa, Homo sapiens
MDDPFSPCRRLNSTQGEIRVGPSHQAKLPDLQPFPSPDGDTVTQHEELVWMPGVNDCDLLMYLRAARSMAAFAGMCDGGSTEDGCVAASRDDTTLNALNTLHESGYDAGKALQRLVKKPVPKLIEKCWTEDEVKRFVKGLRQYGKNFFRIRKELLPNKETGELITFYYYWKKTPEAASSRAHRRHRRQAVFRRIKTRTASTPVNTPSRPPSSEFLDLSSASEDDFDSEDSEQELKGYACRHCFTTTSKDWHHGGRENILLCTDCRIHFKKYGELPPIEKPVDPPPFMFKPVKEEDDGLSGKHSMRTRRSRGSMSTLRSGRKKQPASPDGRTSPINEDIRSSGRNSPSAASTSSNDSKAETVKKSAKKVKEEASSPLKSNKRQREKVASDTEEADRTSSKKTKTQEISRPNSPSEGEGESSDSRSVNDEGSSDPKDIDQDNRSTSPSIPSPQDNESDSDSSAQQQMLQAQPPALQAPTGVTPAPSSAPPGTPQLPTPGPTPSATAVPPQGSPTASQAPNQPQAPTAPVPHTHIQQAPALHPQRPPSPHPPPHPSPHPPLQPLTGSAGQPSAPSHAQPPLHGQGPPGPHSLQAGPLLQHPGPPQPFGLPPQASQGQAPLGTSPAAAYPHTSLQLPASQSALQSQQPPREQPLPPAPLAMPHIKPPPTTPIPQLPAPQAHKHPPHLSGPSPFSMNANLPPPPALKPLSSLSTHHPPSAHPPPLQLMPQSQPLPSSPAQPPGLTQSQNLPPPPASHPPTGLHQVAPQPPFAQHPFVPGGPPPITPPTCPSTSTPPAGPGTSAQPPCSGAAASGGSIAGGSSCPLPTVQIKEEALDDAEEPESPPPPPRSPSPEPTVVDTPSHASQSARFYKHLDRGYNSCARTDLYFMPLAGSKLAKKREEAIEKAKREAEQKAREEREREKEKEKEREREREREREAERAAKASSSAHEGRLSDPQLSGPGHMRPSFEPPPTTIAAVPPYIGPDTPALRTLSEYARPHVMSPTNRNHPFYMPLNPTDPLLAYHMPGLYNVDPTIRERELREREIREREIRERELRERMKPGFEVKPPELDPLHPAANPMEHFARHSALTIPPTAGPHPFASFHPGLNPLERERLALAGPQLRPEMSYPDRLAAERIHAERMASLTSDPLARLQMFNVTPHHHQHSHIHSHLHLHQQDPLHQGSAGPVHPLVDPLTAGPHLARFPYPPGTLPNPLLGQPPHEHEMLRHPVFGTPYPRDLPGAIPPPMSAAHQLQAMHAQSAELQRLAMEQQWLHGHPHMHGGHLPSQEDYYSRLKKEGDKQL

SEQ ID NO: 55375 - protein, 47 aa, Homo sapiens
MPACCSCSDVFQYETNKVTRIQSMNYGTIKWFFHVIIFSYVWGTLSS

SEQ ID NO: 55376 - protein, 215 aa, Homo sapiens
MARHRNVRGYNYDEDFEDDDLYGQSVEDDYCISPSTAAQFIYSRRDKPSVEPVEEYDYEDLKESSNSVSNHQLSGFDQARLYSCLDHMREVLGDAVPDEILIEAVLKNKFDVQKALSGVLEQDRVQSLKDKNEATVSTGKIAKGVLFSSSEVSADNVQSSYPQSANHLDYSSKPFDFASSVGKYGLSHNSSVPTHCLLHRKKKLDTRKSEKKLES

SEQ ID NO: 55377 - protein, 307 aa, Homo sapiens
MGENQTMVTEFLLLGFLLGPRIQMLLFGLFSLFYIFTLLGNGAILGLISLDSRLHTPMYFFLSHLAVVDIAYTRNTVPQMLANLLHPAKPISFAGCMTQTFLCLSFGHSECLLLVLMSYDRYVAICHPLRYSVIMTWRVCITLAVTSWTCGSLLALAHVVLILRLPFSGPHEINHFFCEILSVLRLACADTWLNQVVIFAACVFFLVGPPSLVLVSYSHILAAILRIQSGEGRRKAFSTCSSHLCVVGLFFGSAIIMYMAPKSRHPEEQQKVFFLFYSFFNPTLNPLIYSLRNGEVKGALRRALGKE

SEQ ID NO: 55378 - protein, 150 aa, Homo sapiens
MTGRARARARGRARGQETAQLVGSTASQQPGYIQPRPQPPPAEGELFGRGRQRGTAGGTAKSQGLQISAGFQELSLAERGGRRRDFHDLGVNTRQNLDHVKESKTGSSGIIVRLSTNHFRLTSRPQWALYQYHIDYNPLMEARRLRSALL

SEQ ID NO: 55379 - protein, 700 aa, Homo sapiens
MEATGVLPFVRGVDLSGNDFKGGYFPENVKAMTSLRWLKLNRTGLCYLPEELAALQKLEHLSVSHNNLTTLHGELSSLPSLRAIVARANSLKNSGVPDDIFKLDDLSVLDLSHNQLTECPRELENAKNMLVLNLSHNSIDTIPNQLFINLTDLLYLDLSENRLESLPPQMRRLVHLQTLVLNGNPLLHAQLRQLPAMTALQTLHLRSTQRTQSNLPTSLEGLSNLADVDLSCNDLTRVPECLYTLPSLRRLNLSSNQITELSLCIDQWVHVETLNLSRNQLTSLPSAICKLSKLKKLYLNSNKLDFDGLPSGIGKLTNLEEFMAANNNLELVPESLCRCPKLRKLVLNKNHLVTLPEAIHFLTEIEVLDVRENPNLVMPPKPADRAAEWYNIDFSLQNQLRLAGASPATVAAAAAGSGPKDPMARKMRLRRRKDSAQDDQAKQVLKGMSDVAQEKNKKQEESADARAPSGKVRRWDQGLEKPRLDYSEFFTEDVGQLPGLTIWQIENFVPVLVEEAFHGKFYEADCYIVLKTFLDDSGSLNWEIYYWIGGEATLDKKACSAIHAVNLRNYLGAECRTVREEMGDESEEFLQVFDNDISYIEGGTASGFYTVEDTHYVTRMYRVYGKKNIKLEPVPLKGTSLDPRNMSGRAGCAWSARAMSSTPLPAASTPGAPSARPWPKTGWHSPRLGEEEEGASSTVC

SEQ ID NO: 55380 - protein, 419 aa, Homo sapiens
MVSESHHEALAAPPVTTVATVLPSNATEPASPGEGKEDAFSKLKEKFMNELHKIPLPPWALIAIAIVAVLLVLTCCFCICKKCLFKKKNKKKGKEKGGKNAINMKDVKDLGKTMKDQDDDAETGLTDGEEKEEPKEEEKLGKLQYSLDYDFQNNQLLVGIIQAAELPALDMGGTSDPYVKVFLLPDKKKKFETKVHRKTLNPVFNEQFTFKVPYSELGGKTLVMAVYDFDRFSKHDIIGEFKVPMNTVDFGHVTEEWRDLQSAEKEEQEKLGDICFSLRYVPTAGKLTVVILEAKNLKKMDVGGLSDPYVKIHLMQNGKRLKKKKTTIKKNTLNPYYNESFSFEVPFEQIQKVQVVVTVLDYDKIGKNDAIGKVFVGYNSTGAELRHWSDMLANPRRPIAQWHTLQVEEEVDAMLAVKK

SEQ ID NO: 55381 - protein, 97 aa, Homo sapiens
MAGSPSRAAGRRLQLPLLCLFLQGATAVLFAVFVRYNHKTDAALWHRSNHSNADNEFYFRYPNGVSLLLPRLECNGTISAHHNLCLPGSSDSPASVS

SEQ ID NO: 55382 - protein, 102 aa, Homo sapiens
LFYSTGVVKRNDFSPEKDQRSLDINTAKCMLGLLLGKIWPLFPVFHQFLEQSKYKVINKDQWCNVLEFSRTINLDLSNYDEDGAWPVLLDEFVEWYKDKQMS

SEQ ID NO: 55383 - protein, 216 aa, Homo sapiens
MRKPRAAVGSGHRKQAASQEGRQKHAKNNSQAKPSACDGGESTLGWPGLLFSWPAAAGGSSEGLLAGLWEFPSVTWEPSEQLQRKALLQELQRWAGPLPATHLRHLGEVVHTFSHIKLTYQVYGLALEGQTPVTTVPPGARWLTQEEFHTAAVSTAMKKVFRVYQGQQPGTCMGSKRSQVSSPCSRKKPRMGQQVLDNFFRSHISTDAHSLNSAAQ

SEQ ID NO: 55384 - protein, 60 aa, Homo sapiens
MSVAFAAPRQRGKGEITPAAIQKMLDDNNHLIQCIMDSQNKGKTSECSQSGQWEPLKLAS

SEQ ID NO: 55385 - protein, 66 aa, Homo sapiens
MTLTKGSFTYSSGEEYRGEWKEGRRHGFGQLMFADGGTYLGHFENGLFNGFGVLTFSDGSRPADFP

SEQ ID NO: 55386 - protein, 94 aa, Homo sapiens
MFSLMASCCGWFKRWREPVRKVTLLMVGLDNAGKTATAKGIQGGLFLVEMGSPYVAQAGLECLASSYSSALASKSAGITGMSHHAQPGQNTLKM

SEQ ID NO: 55387 - protein, 192 aa, Homo sapiens
MSTAAVPELKQISRVEAMRLGPGWSHSCHAMLYAANPGQLFGRIPMRFSVLMQMRFDGLLGFPGGFVDRRFWSLEDGLNRVLGLGLGCLRLTEADYLSSHLTEGPHRVVAHLYARQLTLEQLHAVEISAVHSRDHGLEVGPPPGPRPPPRGLALAPWKAPMGAGPRAGPAVHPEGPSRRLPQLPEQRLREHG

SEQ ID NO: 55388 - protein, 572 aa, Homo sapiens
MLLARMNPQVQPENNGADTGPEQPLRARKTAELLVVKERNGVQCLLAPRDGDAQPRETWGKKIDFLLSVVGFAVDLANVWRFPYLCYKNGGGAFLIPYTLFLIIAGMPLFYMELALGQYNREGAATVWKICPFFKGVGYAVILIALYVGFYYNVIIAWSLYYLFSSFTLNLPWTDCGHTWNSPNCTDPKLLNGSVLGNHTKYSKYKFTPAAEFYERGVLHLHESSGIHDIGLPQWQLLLCLMVVVIVLYFSLWKGVKTSGKVWIDAATQIFFSLGAGFGVLIAFASYNKFDNNCYRDALLTSSINCITSFVSGFAIFSILGYMAHEHKVNIEDVATEGAGLVFILYPEAISTLSGSTFWAVVFFVMLLALGLDSSMGGMEAVITGLADDFQVLKRHRKLFTFGVTFSTFLLALFCITKGGIYVLTLLDTFAAGTSILFAVLMEAIGVSWFYGVDRFSNDIQQMMGFRPGLYWRLCWKFVSPAFLLFVVVVSIINFKPLTYDDYIFPPWANWVGWGIALSSMVLVPIYVIYKFLSTQGSLWERLAYGITPENEHHLVAQRDIRQFQLQHWLAI

SEQ ID NO: 55389 - protein, 118 aa, Homo sapiens
MGLEKLHPFDAGKWGKVINFLKEEKLLSDSMLVEAREASEEDLLVVHTRRYLNELKRPSGGRWSWSGAQRMMSTWIRWRGTSRNPSRSTCPTWWYTMQAPTSSRGTALGGCPSAQRAS

SEQ ID NO: 55390 - protein, 130 aa, Homo sapiens
MAPALWRACNGLMAAFFALAALVQVVYTIPAVLTLLVGLNPEVTGNVIWKSISAIHILFCTVWAVGLASYLLHRTQQNILHEEEGRNPVGGRIQLAIAIVITLFPFISWVYIYINKEMRSSWPTHCKTVI

SEQ ID NO: 55391 - protein, 55 aa, Homo sapiens
PESISSLPETTQNFLFFLGTQAFAVPLLLISRSQTFGYNGRACQEWLPFLSPSAS

SEQ ID NO: 55392 - protein, 43 aa, Homo sapiens
MGSKRRRATSPSSSVSGDFDDGHHSVSTPGPSRKRRRLSNLPT

SEQ ID NO: 55393 - protein, 656 aa, Homo sapiens
MVSILSSFESRLMKLENSIIPVHKQTENLQRLQENVEKTLSCLDHVISYYHVASDTEKIIREGPTGRLEEYLGSMAKIQKAVEYFQDNSPDSPELNKVKLLFERGKEALESEFRSLMTRHSKVVSPVLILDLISGDDDLEAQEDVTLEHLPESVLQDVIRISRWLVEYGRNQDFMNVYYQIRSSQLDRSIKGLKEHFHKSSSSSGVPYSPAIPNKRKDTPTKKPVKRPGTIRKAQNLLKQYSQHGLDGKKGGSNLIPLEGRDDMLDVETDAYIHCVSAFVKLAQSEYQLLADIIPEHHQKKTFDSLIQDALDGLMLEGENIVSAARKAIVRHDFSTVLTVFPILRHLKQTKPEFDQVLQGTAASTKNKLPGLITSMETIGAKALEDFADNIKNDPDKEYNMPKDGTVHELTSNAILFLQQLLDFQETAGAMLASQVLGDTYNIPLDPRETSSSATSYSSEFSKRLLSTYICKVLGNLQLNLLSKSKVYEDPALSAIFLHNNYNYILKSLEKSELIQLVAVTQKTAERSYREHIEQQIQTYQRSWLKVTDYIAEKNLPVFQPGVKLRDKERQIIKERFKGFNDGLEELCKIQKAWAIPDTEQRDRIRQAQKTIVKETYGAFLQKFGSVPFTKNPEKYIKYGVEQVGDMIDRLFDTSA

SEQ ID NO: 55394 - protein, 556 aa, Homo sapiens
MATTATCTRFTDDYQLFEELGKGAFSVVRRCVKKTSTQEYAAKIINTKKLSARDHQKLEREARICRLLKHPNIVRLHDSISEEGFHYLVFDLVTGGELFEDIVAREYYSEADASHCIHQILESVNHIHQHDIVHRDLKPENLLLASKCKGAAVKLADFGLAIEVQGEQQAWFGFAGTPGYLSPEVLRKDPYGKPVDIWACGVILYILLVGYPPFWDEDQHKLYQQIKAGAYDFPSPEWDTVTPEAKNLINQMLTINPAKRITADQALKHPWVCQRSTVASMMHRQETVECLRKFNARRKLKGAILTTMLVSRNFSAAKSLLNKKSDGGVKPQSNNKNSLVSPAQEPAPLQTAMEPQTTVVHNATDGIKGSTESCNTTTEDEDLKAAPLRTGNGSSVPEGRSSRDRTAPSAGMQPQPSLCSSAMRKQEIIKITEQLIEAINNGDFEAYTKICDPGLTSFEPEALGNLVEGMDFHKFYFENLLSKNSKPIHTTILNPHVHVIGEDAACIAYIRLTQYIDGQGRPRTSQSEETRVWHRRDGKWLNVHYHCSGAPAAPLQ

SEQ ID NO: 55395 - protein, 112 aa, Homo sapiens
MRKIDLCLSSEGSEVILATSSDEKHPPENIIDGNPETFWTTTGMFPQEFIICFHKHVRIERLVIQSYFVQTLKIEKSTSKEPVDFEQWIEKDLVHTEGQLQNEEIVVSEYTL

SEQ ID NO: 55396 - protein, 62 aa, Homo sapiens
MAPTLATAHRRRWWMACTAVLENLLFSAVLLGWGSLLIMLKSEGFYSYLCTEPAPASRFPAC

SEQ ID NO: 55397 - protein, 82 aa, Homo sapiens
MASAGVAAGRQAEDVLPPTSDQPLPDTKPLPPPQPPPVPAPQPQQSPAPRPQSPARAREEENYSFLPLVHNIIKCRDGAGLK

SEQ ID NO: 55398 - protein, 139 aa, Homo sapiens
IGNEGLAADLTDDPDTEEALKEFDFLVTAEDGEGAGEARSSGDGTEWGANRTKLYDMIADLGDDELPHIPSGIINQSRSASTRMTDHEGARAEEAEPITFPSGGGKSFIMGSDDVLLSVLGLGDLADLTVTNDADYSYD

SEQ ID NO: 55399 - protein, 156 aa, Homo sapiens
MQFMLLFSRQGKLRLQKWYVPLSDKEKKKITRELVQTVLARKPKMCSFLEWRDLKIVYKRYASLYFCCAIEDQDNELITLEIIHRYVELLDKYFGSVCELDIIFNFEKAYFILDEFLLGGEVQETSKKNVLKAIEQADLLQESQNEEWGGLSEDIL

SEQ ID NO: 55400 - protein, 55 aa, Homo sapiens
MGANASNYPHSCSPRVGGNSQAQQTFIGTSSYSQQGYGCESKLYSLDHGHEKPQD

SEQ ID NO: 55401 - protein, 123 aa, Homo sapiens
MGFGDLKSPAGLQVLNDYLADKSYIEGYVPSQADVAVFEAVSSPPPADLCHALRWYNHIKSYEKEKASLPGVKKALGKYGPADVEDTTGSGATDSKDDDDIDLFGSDDEEESEEAKRLREERL

SEQ ID NO: 55402 - protein, 48 aa, Homo sapiens
  MOD_RES (1)..(1): Any amino acid
XFYGRNSSYVHGGVDASGKPQEAVYGQNEHHSGSDAQHGRWIQFRKIS

SEQ ID NO: 55403 - protein, 53 aa, Homo sapiens
MIYLYNQGSMNTYSSDIQTQCYYQGNIEGYPDSMVTLSTCSGLRGILQFENVS

SEQ ID NO: 55404 - protein, 174 aa, Homo sapiens
MSFIPVAEDSDFPIHNLPYGVFSTRGDPRPRIGVAIGDQILDLSIIKHLFTGPVLSKHQDVFNQPTLNSFMGLGQAAWKEARVFLQNLLSVSQARLRDDTELRKCAFISQASATMHLPATIGECSLFTKIRTEQLRGPRGLARRLHRLLFLSAACYQRRNHVQGQGECVDAKLV

SEQ ID NO: 55405 - protein, 721 aa, Homo sapiens
MSDKMSSFLHIGDICSLYAEGSTNGFISTLGLVDDRCVVQPETGDLNNPPKKFRDCLFKLCPMNRYSAQKQFWKAAKPGANSTTDAVLLNKLHHAADLEKKQNETENRKLLGTVIQYGNVIQLLHLKSNKYLTVNKRLPALLEKNAMRVTLDEAGNEGSWFYIQPFYKLRSIGDSVVIGDKVVLNPVNAGQPLHASSHQLVDNPGCNEVNSVNCNTSWKIVLFMKWSDNKDDILKGGDVVRLFHAEQEKFLTCDEHRKKQHVFLRTTGRQSATSATSSKALWEVEVVQHDPCRGGAGYWNSLFRFKHLATGHYLAAEVDPDFEEECLEFQPSVCNKIIFLMSFVGNCGTFTRGYRAMVLDVEFLYHLLYLVICAMGLFVHEFFYSLLLFDLVYREETLLNVIKSVTRNGRSIILTAVLALILVYLFSIVGYLFFKDDFILEVDRLPNETAVPETGESLASEFLFSDVCRVESGENCSSPAPREELVPAEETEQDKEHTCETLLMCIVTVLSHGLRSGGGVGDVLRKPSKEEPLFAARVIYDLLFFFMVIIIVLNLIFGVIIDTFADLRSEKQKKEEILKTTCFICGLERDKFDNKTVTFEEHIKEEHNMWHYLCFIVLVKVKDSTEYTGPESYVAEMIKERNLDWFPRMRAMSLVSSDSEGEQNELRNLQEKLESTMKLVTNLSGQLSELKDQMTEQRKQKQRIGLLGHPPHMNVNPQQPA

SEQ ID NO: 55406 - protein, 30 aa, Homo sapiens
MSQSQNAIFTSPTGEENLMNSNHRDSESIT

SEQ ID NO: 55407 - protein, 540 aa, Homo sapiens
AAPRPSPAISVSVSAPAFYAPQKKFGPVVAPKPKVNPFRPGDSEPPPAPGAQRAQMGRVGEIPPPPPEDFPLPPPPLAGDGDDAEGALGGAFPPPPPPIEESFPPAPLEEEIFPSPPPPPEEEGGPEAPIPPPPQVSSGYVPPPVATPFSSKSSTKPAAGGTAPLPPWKSPSSSQPLPQVPAPAQSQTQFHVQPQPQPKPQVQLHVQSQTQPVSLANTQPRGPPASSPAPAPKFSPVTPKFTPVASKFSPGAPGGSGSQPNQKLGHPEALSAGTGSPQPPSFTYAQQREKPRVQEKQHPVPPPAQNQNQVRSPGAPGPLTLKEVEELEQLTQQLMQDMEHPQRQNVAVNELCGRCHQPLARAQPAVRALGQLFHIACFTCHQCAQQLQGQQFYSLEGAPYCEGCYTDTLEKCNTCGEPITDRMLRATGKAYHPHCFTCVVCARPLEGTSFIVDQANRPHCVPDYHKQYAPRCSVCSEPIMPEPGRDETVRVVALDKNFHMKCYKCEDCGKPLSIEADDNGCFPLDGHVLCRKCHTARAQT

SEQ ID NO: 55408 - protein, 62 aa, Homo sapiens
MIKSSWFYVKFKYAEKLKPGQNSCRDSDSESASGESKGFHRSSSRERLSDSSAPSSLGTGYF

SEQ ID NO: 55409 - protein, 127 aa, Homo sapiens
MQRADSEQPSKRPRCDDSPRTPSNTPSAEADWSPGLELHPDYKTWGPEQVCSFLRRGGFEEPVLLKNIRENEITGALLPCLDESRFENLGVSSLGERKKLLSYIQRLVQIHVDTMKEEVKYTQIQYT

SEQ ID NO: 55410 - protein, 117 aa, Homo sapiens
MAAAAKPNNLSLVVHGPGDLRLENYPIPEPGPNEVLLRMHSVGICGSDVHYWEYGRIGNFIVKKPMVLGHEASGTVEKVGSSVKHLKPGWKTKNQTKERADSAPTLGHGAIFVFLSR

SEQ ID NO: 55411 - protein, 962 aa, Homo sapiens
MDTRPKVSSLLNRMANYTNLTQGAKEHEEAENITEGKKKPTKTMLTAISMSAIATNGVVPAGGSYFMISRALGPEFGGAVGLCFYLGTTFAAAMYILGAIEIFLVYIVPRAAIFHSDDALKESAAMLNNMRVYGTAFLVLMVLVVFIGVRYVNKFASLFLACVIVSILAIYAGAIKSSFAPPHFPVCMLGNRTLSSRHIDVCSKTKEINNMTVPSKLWGFFCNSSQFFNATCDEYFVHNNVTSIQGIPGLASGIITENLWSNYLPKGEIIEKPSAKSSDVLGSLNHEYVLVDITTSFTLLVGIFFPSVTGIMAGSNRSGDLKDAQKSIPIGTILAILTTSFVYLSNVVLFGACIEGVVLRDKFGDAVKGNLVVGTLSWPSPWVIVIGSFFSTCGAGLQSLTGAPRLLQAIAKDNIIPFLRVFGHSKANGEPTWALLLTAAIAELGILIASLDLVAPILSMFFLMCYLFVNLACALQTLLRTPNWRPRFRYYHWALSFMGMSICLALMFISSWYYAIVAMVIAGMIYKYIEYQGAEKEWGDGIRGLSLSAARFALLRLEEGPPHTKNWRPQLLVLLKLDEDLHVKHPRLLTFASQLKAGKGLTIVGSVIVGNFLENYGEALAAEQTIKHLMEAEKVKGFCQLVVAAKLREGISHLIQSCGLGGMKHNTVVMGWPNGWRQSEDARAWKTFIGTVRVTTAAHLALLVAKNISFFPSNVEQFSEGNIDVWWIVHDGGMLMLLPFLLKQHKVWRKCSIRIFTVAQLEDNSIQMKKDLATFLYHLRIEAEVEVVEMHDSDISAYTYERTLMMEQRSQMLRHMRLSKTERDREAQLVKDRNSMLRLTSIGSDEDEETETYQEKVHMTWTKDKYMASRGQKAKSMEGFQDLLNMRPDQSNVRRMHTAVKLNEVIVNKSHEAKLVLLNMPGPPRNPEGDENYMEFLEVLTEGLERVLLVRGGGSEVITIYS

SEQ ID NO: 55412 - protein, 1114 aa, Homo sapiens
MTTMLQKSDSNASFLRAARAGNLDKVVEYLKGGIDINTCNQNGLNALHLAAKEGHVGLVQELLGRGSSVDSATKKGNTALHIASLAGQAEVVKVLVKEGANINAQSQNGFTPLYMAAQENHIDVVKYLLENGANQSTATEDGFTPLAVALQQGHNQAVAILLENDTKGKVRLPALHIAARKDDTKSAALLLQNDHNADVQSKMMVNRTTESGFTPLHIAAHYGNVNVATLLLNRGAAVDFTARNGITPLHVASKRGNTNMVKLLLDRGGQIDAKTRDGLTPLHCAARSGHDQVVELLLERGAPLLARTKNGLSPLHMAAQGDHVECVKHLLQHKAPVDDVTLDYLTALHVAAHCGHYRVTKLLLDKRANPNARALNGFTPLHIACKKNRIKVMELLVKYGASIQAITESGLTPIHVAAFMGHLNIVLLLLQNGASPDVTNIRGETALHMAARAGQVEVVRCLLRNGALVDARAREEQTPLHIASRLGKTEIVQLLLQHMAHPDAATTNGYTPLHISAREGQVDVASVLLEAGAAHSLATKKGFTPLHVAAKYGSLDVAKLLLQRRAAADSAGKNGLTPLHVAAHYDNQKVALLLLEKGASPHATAKNGYTPLHIAAKKNQMQIASTLLNYGAETNIVTKQGVTPLHLASQEGHTDMVTLLLDKGANIHMSTKSGLTSLHLAAQEDKVNVADILTKHGADQDAHTKLGYTPLIVACHYGNVKMVNFLLKQGANVNAKTKNGYTPLHQAAQQGHTHIINVLLQHGAKPNATTANGNTALAIAKRLGYISVVDTLKVVTEEVTTTTTTITEKHKLNVPETMTEVLDVSDEEGDDTMTGDGGEYLRPEDLKELGDDSLPSSQFLDGMNYLRYSLEGGRSDSLRSFSSDRSHTLSHASYLRDSAVMDDSVVIPSHQVSTLAKEAERNSYRLSWGTENLDNVALSSSPIHSGFLVSFMVDARGGAMRGCRHNGLRIIIPPRKCTAPTRVTCRLVKRHRLATMPPMVEGEGLASRLIEVGPSGAQFLGKLHLPTAPPPLNEGESLVSRILQLGPPGTKFLGPVIVEIPHFAALRGKERELVVLRSENGDSWKEHFCDYTEDELNEILNGMDEVLDSPEDLE

SEQ ID NO: 55413 - protein, 51 aa, Homo sapiens
MNKVRDENDTVMDKARVLIDLVTGKGPKSCCKFIKHLCEEDPQLASKMGLH

SEQ ID NO: 55414 - protein, 203 aa, Homo sapiens
MMDLRNTPAKSLDKFIEDYLLPDTCFRMQINHAIDIICGFLKERCFRGSSYPVCVSKVVKGGSSGKGTTLRGRSDADLVVFLSPLTTFQDQLNRRGEFIQEIRRQLEACQRERAFSVKFEVQAPRWGNPRALSFVLSSLQLGEGVEFDVLPAFDALAHRGVHRPAERGRVLHLLHRTTERLPEAAPHQAQEPHPPSQALVPKL

SEQ ID NO: 55415 - protein, 40 aa, Homo sapiens
MFRAPCHRLRARGTRKARAGAWRGCTFPCLGKSVFAGGIC

SEQ ID NO: 55416 - protein, 283 aa, Homo sapiens
MNNHVSSKPSTMKLKHTINPILLYFIHFLISLYTILTYIPFYFFSESRQEKSNRIKAKPVNSKPDSAYRSVNSLDGLASVLYPGCDTLDKVFTYAKNKFKNKRLLGTREVLNEEDEVQPNGKIFKKVILGQYNWLSYEDVFVRAFNFGNGLQMLGQKPKTNIAIFCETRAEWMIAAQACFMYNFQLVTLYATLGGPAIVHALNETEVTNIITSKELLQTKLKDIVSLVPRLRHIITVDGKPPTWSEFPKGIIVHTMAAVEALGAKASMERKMSTLDICLWPMF

SEQ ID NO: 55417 - protein, 288 aa, Homo sapiens
  MOD_RES (1)..(1): Any amino acid
XKERGLFRGIEDNPMVVPLCNRSKDVVEPLLRPQWEWCISRQLWWGHRIPAYFVTVSDPAVPPGEDPDGRYWVSGRNEAEAREKAAKEFGVSPDKISLQQDEDVLDTWFSSGLFPLSILGWPNQSEDLSVFYPGTLLETGHDILFFWVARMVMLGLKLTGRLPFREVYLHAIVRDAHGRKMSKSLGNVIDPLDVIYGISLQGLHNQLLNSNLDPSEVEKAKEGQKADFPAGIPECGTDALRFGLCAYMSQGRDINLDVNRILGYRHFCNKLWNATKFALRGLGKGFVP

SEQ ID NO: 55418 - protein, 228 aa, Homo sapiens
MNIKGSPWKAGSLLLLLVSNLLLCQSVAPLPICPGGAARCQVTLRDLFDRAVVLSHYIHNLSSEMFSEFDKRYTHGRGFITKAINSCHTSSLATPEDKEQAQQMNQKDFLSLIVSILRSWNEPLYHLVTEVRGMQEAPEAILSKAVEIEEQTKRLLEGMELIVSQVHPETKENEIYPVWSGLPSLQMADEESRLSAYYNLLHCLRRDSHKIDNYLKLLKCRIIHNNNC

SEQ ID NO: 55419 - protein, 284 aa, Homo sapiens
MEDSGKTFSSEEEEANYWKDLAMTYKQRAENTQEELREFQEGSREYEAELETQLQQIETRNRDLLSENNRLRMELETIKEKFEVQHSEGYRQISALEDDLAQTKAIKDQLQKYIRELEQANDDLERAKRATIMSLEDFEQRLNQAIERNAFLESELDEKENLLESVQRLKDEARDLRQELAVQQKQEKPRTPMPSSVEAERTDTAVQATGSVPSTPIAHRGPSSSLNTPGSFRRGLDDSTGGTPLTPAARISALNIVGDLLRKVGVGHELPLVVQINNQVVQLL

SEQ ID NO: 55420 - protein, 109 aa, Homo sapiens
MEKHSQEARQADRESEKPVDSLHPGAGTAKHPPPAASLEEKPDVKQKSSRKKVVVPQIIITRASNETLVSCSSSGSDQQRTIREPEDWGPYRRHRNPSTADAYNSHLKE

SEQ ID NO: 55421 - protein, 357 aa, Homo sapiens
MVQPFTTIPFPPPPQNGIPTEYGVPHTQDYAGQTGEHNLTLYGSTQAHGEQSSNSPSTQNGSLTQTEGGAQTDGQQSQTQSSENSESKSTPKRLHVSNIPFRFRDPDLRQMFGQFGKILDVEIIFNERGSKGFGFVTFENSADADRAREKLHGTVVEGRKIEVNNATARVMTNKKMVTPYANGWKLSPVVGAVYGPELYAASSFQADVSLGNDAAVPLSGRGGINTYIPLIIPGFPYPTAATTAAAFRGAHLRGRGRTVYGAVRAVPPTAIPAYPGVVYQDGFYGADLYGGYAAYRYAQPATATAATAAAAAAAAYSDGYGRVYTADPYHALAPAASYGVGAVASLYRGGYSRFAPY

SEQ ID NO: 55422 - protein, 163 aa, Homo sapiens
  MOD_RES (1)..(1): Any amino acid
XPPPEESSDSEPEAEPGSPQKLIRKVSTSGQIRQKTIIKEGMLTKQNNSFQRSKRRYFKLRGRTLYYAKTAKSIIFDEVDLTDASVAESSTKNVNNSFTAEVRWCDLGSLQPPSPRFKGSSCLSLPSSWDYSRAPLCPDNLRNFSRDGVSPYWPGWSQTPGLE

SEQ ID NO: 55423 - protein, 101 aa, Homo sapiens
MSMTDLLNAEDIKKAVGAFSATDSFDHKKFFQMVGLKKKSADDVKKVFHMLDKDKSGFIEEDELGFILKGFSPDARDLSAKETKMLMAAGDKDGDGKIGVD

SEQ ID NO: 55424 - protein, 41 aa, Homo sapiens
MKSRQKGKKKGSAKERVFGCDLQEHLQHSGQEGGCRSAIGT

SEQ ID NO: 55425 - protein, 116 aa, Homo sapiens
MTTESGSDSESKPDQEAEPQEAAGAQGRAGAPVPEPPKEEQQQALEQFAAAAAHSTPVRREVTDKEQEFAARAAKQLEYQQLEDDKLSQKSSSSKLSRSPLKIVKKPKSMQCKVIL

SEQ ID NO: 55426 - protein, 499 aa, Homo sapiens
MEIIRSNFKSNLHKVYQAIEEADFFAIDGEFSGISDGPSVSALTNGFDTPEERYQKLKKHSMDFLLFQFGLCTFKYDYTDSKYITKSFNFYVFPKPFNRSSPDVKFVCQSSSIDFLASQGFDFNKVFRNGIPYLNQEEERQLREQYDEKRSQANGAGALSYVSPNTSKCPVTIPEDQKKFIDQVVEKIEDLLQSEENKNLDLEPCTGFQRKLIYQTLSWKYPKGIHVETLETEKKERYIVISKVDEEERKRREQQKHAKEQEELNDAVGFSRVIHAIANSGKLVIGHNMLLDVMHTVHQFYCPLPADLSEFKEMTTCVFPRLLDTKLMASTQPFKDIINNTSLAELEKRLKETPFNPPKVESAEGFPSYDTASEQLHEAGYDAYITGLCFISMANYLGSFLSPPKIHVSARSKLIEPFFNKLFLMRVMDIPYLNLEGPDLQPKRDHVLHVTFPKEWKTSDLYQLFSAFGNIQISWIDDTSAFVSLSQPEQVKIGIQAML

SEQ ID NO: 55427 - protein, 70 aa, Homo sapiens
MGAHLVRRYLGDASVEPDPLQMPTFPPDYGFPERKERDGGHTAGDDGRAAEAPAAGLLRPPPHPAAQVQA

SEQ ID NO: 55428 - protein, 135 aa, Homo sapiens
MMAQSKANGSHYALTAIGLGMLVLGVIMAMWNLVPGFSAAEKPTAQGSNKTEVGGGILKSKTFSVAYVLVGAGVMLLLLSICLSIRDKRKQRQGEDLAHVQHPTGAGPHAQEEDRRKKRRMRRLPQGTMFPATRK

SEQ ID NO: 55429 - protein, 109 aa, Homo sapiens
MVSSAQMGFNLQALLEQLSQDELSKFKYLITTFSLAHELQKIPHKEVDKADGKQLVEILTTHCDSYWVEMASLQVFEKMHRMDLSERAKDEVREAALKSFNKRKPLSLG

SEQ ID NO: 55430 - protein, 123 aa, Homo sapiens
MNRRRKFLLASVLALQNSSFIYPSCQKCFSRIILVSKRSNCPKCGSTGESGNANYRYKLSLKVAESNKLFVITVFGSCLDTFFGLTATGLHRYIQDPNKIPETLDNDTTQNLLTKAVETCFVG

SEQ ID NO: 55431 - protein, 105 aa, Homo sapiens
MGKRDNRVAYMNPIAMARSRGPIQSSGPTIQDYLNRPRPTWEEVKEQLEKKKKGSKALAEFEEKMNENWKKELEKHREKLLSGSESSSKKRQRKKKEKKKSGRFF

SEQ ID NO: 55432 - protein, 126 aa, Homo sapiens
MGTYSLVPKKKTKVLKQRTVIEMFKSITHSTVGSKGEKDLGASSLHVNGESLEMDSDEDDSEELEEDDGHGAEQAAAFPTEDSRTSKESMSEADRAQKKHEEENTASSPHCPGGSGTLKQSLQELP

SEQ ID NO: 55433 - protein, 93 aa, Homo sapiens
MAFLDNPTIILAHIRQSHVTSDDTGMCEMVLIDHDVDLEKIHPPSMPGDSGSEIQGSNGETQGYVYAQSVDITSSWDFGIRRRSNTAQRLERL

SEQ ID NO: 55434 - protein, 82 aa, Homo sapiens
TLPDLSRPPDSYSGLGRAGATAAASEIKREEKEDEENTSAADHSEEEKKELKAPRARTRRGRGRPSPPRAEGRAGEGAPGGQ

SEQ ID NO: 55435 - protein, 180 aa, Homo sapiens
  MOD_RES (1)..(1): Any amino acid
XVAAAASSCRPLGSGAGPGPTGAAPVSAPAPGPGPAGKGGGGGGSPGPTAGPEPLSLPGILHFIQHEWARFEAEKARWEAERAELQAQVAFLQGERKGQENLKTDLVRRIKMLEYALKQERAKYHKLKFGTDLNQGEKKADVSEQVSNGPVESVTLENSPLVWKEGRQLLRHPVPAGFSF

SEQ ID NO: 55436 - protein, 29 aa, Homo sapiens
MGQICQRESATAAEKPKLHLLAESEIDKY

SEQ ID NO: 55437 - protein, 151 aa, Homo sapiens
QPLMKLGTQTVPCNKILLWSRIKDLAHQFTQVQRDMFTLEDTLLGYLADDLTWCEINYQSCPDWRKDCSNNPVSVFWKTVSRRFAEAACDVVHVMLNGSRSKIFDKNSTFGSVEVHNLQPEKVQTLEAWVIHGGREDSRDLCQDPTIKELE

SEQ ID NO: 55438 - protein, 123 aa, Homo sapiens
LQALRGLSKQLAQAERQWKKQLGPPGQARPDGGWALDASCQIPSTPGRGGHLSMSLNKDSAKVGALLHGQWTLLQALQEMRQELNKSLQECLSTGSLPLGPAPHTPRALGILRRQPLPASMPA

SEQ ID NO: 55439 - protein, 551 aa, Homo sapiens
MQSTSNHLWLLSDILGQGATANVFRGRHKKTGDLFAIKVFNNISFLRPVDVQMREFEVLKKLNHKNIVKLFAIEEETTTRHKVLIMEFCPCGSLYTVLEEPSNAYGLPESEFLIVLRDVVGGMNHLRENGIVHRDIKPGNIMRVIGEDGQSVYKLTDFGAARELEDDEQFVSLYGTEEYLHPDMYERAVLRKDHQKKYGATVDLWSIGVTFYHAATGSLPFRPFEGPRRNKEVMYKIITGKPSGAISGVQKAENGPIDWSGDMPVSCSLSRGLQVLLTPVLANILEADQEKCWGFDQFFAETSDILHRMVIHVFSLQQMTAHKIYIHSYNTATIFHELVYKQTKIISSNQELIYEGRRLVLEPGRLAQHFPKTTEENPIFVVSREPLNTIGLIYEKISLPKVHPRYDLDGDASMAKAITGVVCYACRIASTLLLYQELMRKGIRWLIELIKDDYNETVHKKTEVVITLDFCIRNIEKTVKVYEKLMKINLEAAELGEISDIHTKLLRLSSSQGTIETSLQDIDSRLSPGGSLADAWAHQEGTHPKDRKISL

SEQ ID NO: 55440 - protein, 202 aa, Homo sapiens
MNEKSCSFHSKEELRDGQGERLSAGYSPSYDKDKSVLAFRGIPISELKNHGILQALTTEAYEWEPRVVSTEVVRAQEEWEAVDTIQPETGSQASSEQPGQLISFSEALQHFQTVDLSPFKKRIQPTIRRTGLAALRHYLFGPPKLHQRLREERDLVLTIAQCGLDSQDPVHGRVLQTIYKKLTGSKFDCALHGNHWEDLGFQ

SEQ ID NO: 55441 - protein, 56 aa, Homo sapiens
  MOD_RES (1)..(1): Any amino acid
XADLTQSRRPLTSCTIFLGYTSNLISSGIRGRIGDHSWRRGGRPHQVPGAHILGRV

SEQ ID NO: 55442 - protein, 143 aa, Homo sapiens
  MOD_RES (1)..(1): Any amino acid
XRHSYPPALGSPGALAGAGVGAAGPLERRGAQPGRHSVTGYGDCAVGARYQDELTALLRLTVGTGGREAGARGEPSGIEPSGLEEPPGPFVPEAARARMREPEAREDYFGIMLTWSPLHGALCQARSFSPSLEVCSGEKSFYN

SEQ ID NO: 55443 - protein, 889 aa, Homo sapiens
  MOD_RES (1)..(1): Any amino acid
XDSLKLLAQGHGVVLSENMNDRNYADSMSQQDSRNMNYVMLGKPMNNGLMEKMVEESDEEVCLSSLECLRNQCFDLARKLSETNPQERNPQQNMNIRQHVRPEEDFPGRTPDRNYSDMLNLMRLEEQLSPRSRVFASCAKEDGCHERDDDTTSVNSDRSEEVFDMTKGNLTLLEKAIALETERAKAMREKMAMEAGRRDNMRSYEDQSPRQLPGEDRKPKSSDSHVKKPYYGKDPSRTEKKESKCPTPGCDGTGHVTGLYPHHRSLSGCPHKDRVPPEILAMHESVLKCPTPGCTGRGHVNSNRNSHRSLSGCPIAAAEKLAKAQEKHQSCDVSKSSQASDRVLRPMCFVKQLEIPQYGYRNNVPTTTPRSNLAKELEKYSKTSFEYNSYDNHTYGKRAIAPKVQTRDISPKGYDDAKRYCKDPSPSSSSTSSYAPSSSSNLSCGGGSSASSTCSKSSFDYTHDMEAAHMAATAILNLSTRCREMPQNLSTKPQDLCATRNPDMEVDENGTLDLSMNKQRPRDSCCPILTPLEPMSPQQQAVMNNRCFQLGEGDCWDLPVDYTKMKPRRIDEDESKDITPEDLDPFQEALEERRYPGEVTIPSPKPKYPQCKESKKDLITLSGCPLADKSIRSMLATSSQELKCPTPGCDGSGHITGNYASHRSLSGCPRAKKSGIRIAQSKEDKEDQEPIRCPVPGCDGQGHITGKYASHRSASGCPLAAKRQKDGYLNGSQFSWKSVKTEGMSCPTPGCDGSGHVSGSFLTHRSLSGCPRATSAMKKAKLSGEQMLTIKQRASNGIENDEEIKQLDEEIKELNESNSQMEADMIKLRTQVTITTMESNLKTIEEENKVIEQQNESLLHELANLSQSLIHSLANIQLPHMEDGVWWGQ

SEQ ID NO: 55444 - protein, 158 aa, Homo sapiens
MRDAGDPSPPNKMLRRSDSPENKYSDSTGHSKAKNVHTHRVRERDGGTSYSPQENSHNHSALHSSNSHSSNPSNNPSKTSDAPYDSADDWSEHISSSGKKYYYNCRTEVSQWEKPKEWLEREQRQKEANKMAVNSFPKDRDYRREVMQATATSGFASG

SEQ ID NO: 55445 - protein, 271 aa, Homo sapiens
MGKNLKEAVKMLEDSQRRTEEENGKKLISGDIPGPLQGSGQDMVSILQLVQNLMHGDEDEEPQSPRIQNIGEQGHMALLGHSLGAYISTLDKEKLRKLTTRILSDTTLWLCRIFRYENGCAYFHEEEREGLAKICRLAIHSRYEDFVVDGFNVLYNKKPVIYLSAAARPGLGQYLCNQDVAFLEKLIKDDIERGRLPLLLVANAGTAAVGHTDKIGRLKELCEQYGIWLHVEGVNLATLALGYVSSSVLAAAKCDSMTMTPGPWLGLPAVP

SEQ ID NO: 55446 - protein, 711 aa, Homo sapiens
MLRACQLSGVTAAAQSCLCGKFVLRPLRPCRRYSTSGSSGLTTGKIAGAGLLFVGGGIGGTILYAKWDSHFRESVEKTIPYSDKLFEMVLGPAAYNVPLPKKSIQSGPLKISSVSEVMKESKQPASQLQKQKGDTPASATEASSSSIRERPPEEVAARLAQQEKQEQVKIESLAKSLEDALRQTASVTLQAIAAQNAAVQAVNAHSNILKAAMDNSEIAGEKKSAQWRTVEGALKERRKAVDEAADALLKAKEELEKMKSVIENAKKKEVAGAKPHITAAEGKLHNMIVDLDNVVKKVQAAQSEAKVVSQYHELVVQARDDFKRELDSITPEVLPGWKGMSVSDLADKLSTDDLNSLIAHAHRRIDQLNRELAEQKATEKQHITLALEKQKLEEKRAFDSAVAKALEHHRSEIQAEQDRKIEEVRDAMENEMRTQLRRQAAAHTDHLRDVLRVQEQELKSEFEQNLSEKLSEQELQFRRLSQEQVDNFTLDINTAYARLRGIEQAVQSHAVAEEEARKAHQLWLSVEALKYSMKTSSAETPTIPLGSAVEAIKANCSDNEFTQALTAAIPPESLTRGVYSEETLRARFYAVQKLARRVAMIDETRNSLYQYFLSYLQSLLLFPPQQLKPPPELCPEDINTFKLLSYASYCIEHGDLELAAKFVNQLKGESRRVAQDWLKEARMTLETKQIVEILTAYASAVGIGTTQVQPE

SEQ ID NO: 55447 - protein, 128 aa, Homo sapiens
GGGCSASERLPPPFPGLEPESEGAAGGSEPEAGDSDTEGEDIFTGAAVVSKHQSPKITTSLLPINNGSKENGIHEEQDQEPQDLFADATVELSLDSTQNNQKKCWDYRREPPHPALSCFLKDLKASTQ

SEQ ID NO: 55448 - protein, 79 aa, Homo sapiens
  MOD_RES (1)..(1): Any amino acid
XGERALWCSRRDGGLQLRPATDLLLAWNPICLGLVEGVIGKIQLHSEDSNWGHVYSAYLLCLCVLAHCRAIQKYSVPRC

SEQ ID NO: 55449 - protein, 159 aa, Homo sapiens
MMLVGFLGCCGAVQESQCMLGLFFGFLLVIFAIEIAAAIWGYSHKDEVIKEVQEFYKDTYNKLKTKDEPQRETLKAIHYALNCCGLAGGVEQFISDICPKKDVLETFTVKSCPDAIKEVFDNKFHIIGAVGIGIAVVMGMERQRGRCSDQSLSPPEWSI

SEQ ID NO: 55450 - protein, 278 aa, Homo sapiens
SETNAATTVPVTQLPGSSQPAVLQPSVEPTQPTPQAVVSAAQAGLLRQQEELDRKAAELERKERELQNTVANLHVRQNNWPPLPSWCPVKPCFYQDFSTEIPADYQRICKMLYYLWMLHSVTLFLNLLACLAWFSGNSSKGVDFGLSILWFLIFTPCAFLCWYRPIYKAFRSDNSFSFFVFFFVFFCQIGIYIIQLVGIPGLGDSGWIAALSTLDNHSLAISVIMMVVAGFFTLCAVLSVFLLQRVSGVGRADSKWEEAGNRFLPLPRDVFHHCSWAS

SEQ ID NO: 55451 - protein, 126 aa, Homo sapiens
MVNLESMHTDIKMSGDVADSTDARSTLSQVEPGNDRNGLDFNRQIKTEDLSDSLQQTLSHRPCHLSQGPAMMSGNQMSGLNASPCQDMASLHPLQQLVLVPGHLQSVSQFLLSQTQPGQQEDWRAT

SEQ ID NO: 55452 - protein, 287 aa, Homo sapiens
MARRGPGWRPLLLLVLLAGAAQGGLYFRRGQTCYRPLRGDGLAPLGRSTYPRPHEYLSPADLPKSWDWRNVDGVNYASITRNQHIPQYCGSCWAHASTSAMADRINIKRKGAWPSTLLSVQNVIDCGNAGSCEGGNDLSVWDYAHQHGIPDETCNNYQAKDQECDKFNQCGTCNEFKECHAIRNYTLWRVGDYGSLSGREKMMAEIYANGPISCGIMATERLANYTGGIYAEYQDTTYINHVVSVAGWGISDGTEYWIVRNSWGEPWVRCFHFLKVIPRKKRPGTPL

SEQ ID NO: 55453 - protein, 167 aa, Homo sapiens
MDYRKSPIVHVPMSLIIQMPELRENPFKERIVAAFSEDGEGNLTFNDFVDMFSVLCESAPRELKANYAFKIYDFNTDNFICKEDLELTLARLTKSELDEEEVVLVCDKVIEEADLDGDGKLGFADFEDMIAKAPDFLRCCHYRGRAWAGQSRAGRDVGAEAPITRYL

SEQ ID NO: 55454 - protein, 643 aa, Homo sapiens
MRTLRRLKFMSSPSLSDLGKREPAAAADERGTQQRRACANATWNSIHNGVIAVFQRKGLPDQELFSLNEGVRQLLKTELGSFFTEYLQNQLLTKGMVILRDKIRFYEGQKLLDSLAETWDFFFSDVLPMLQAIFYPVQGKEPSVRQLALLHFRNAITLSVKLEDALARAHARVPPAIVQMLLVLQGVHESRGVTEDYLRLETLVQKVVSPYLGTYGLHSSEGPFTHSCILELQRDKAAAAAVLGAVRKRPSVVPMAGQDPALSTSHPFYDVARHGILQVAGDDRFGRRVVTFSCCRMPPSHELDHQRLLEYKKNLKALYVVHPTSFIKVLWNILKPLISHKFGKKVIYFNYLSELHEHLKYDQLVIPPEVLRYDEKLQSLHEGRTPPPTKTPPPRPPLPTQQFGVSLQYLKDKNQGELIPPVLRFTVTYLREKGLRTEGLFRRSASVQTVREIQRLYNQGKPVNFDDYGDIHIPAVILKTFLRELPQPLLTFQAYEQILGITCVESSLRVTGCRQILRSLPEHNYVVLRYLMGFLHAVSRESIFNKMNSSNLACVFGLNLIWPSQGVSSLSALVPLNMFTELLIEYYEKIFSTPEAPGEHGLAPWEQGSRAAPLQEAVPRTQATGLTKPTLPPSPLMAARRRL

SEQ ID NO: 55455 - protein, 62 aa, Homo sapiens
MKQDPQNADLKKQLHELQAKITALSEKQKRVVEQLRKNLIVKQEQPDKFQIQPLPQSENKLQ

SEQ ID NO: 55456 - protein, 151 aa, Homo sapiens
MTMYLWLKLLAFGFAFLDTEVFVTGQSPTPSPTGHLQAEEQGSQSKSPNLKSREADSSAFSWWPKAREPLTNHWSVSSVQTPHLPTHADSQTPSAGTDTQTFSGSAANAKLNPTPGSNAISDAYLNASETTTLSPSGSAVISTTTIATTPS

SEQ ID NO: 55457 - protein, 437 aa, Homo sapiens
KWRRYNFGGHGDCGPIISAPAQDDPILLSFIRCLQANLLCVWRRDVKPDCKELWIFWWGDEPNLVGVIHHELQVVEEGLWENGLSYECRTLLFKAIHNLLERCLMDKNFVRIGKWFVRPYEKDEKPVNKSEHLSCAFTFFLHGESNVCTSVEIAQHQPIYLINEEHIHMAQSSPAPFQVLVSPYGLNGTLTGQAYKMSDPATRKLIEEWQYFYPMVLKKKEESKEEDELGYDDDFPVAVEVIVGGVRMVYPSAFVLISQNDIPVPQSVASAGGHIAVGQQGLGSVKDPSNCGMPLTPPTSPEQAILGESGGMQSAASHLVSQDGGMITMHSPKRSGKIPPKLHNHMVHRVWKECILNRTQSKSQMSTPTLEEEPASNPATWDFVDPTQRVSCSCSRHKLLKRCAVGPNRPPTVSQPGFSAGPSSSSSLPPPASSKHK

SEQ ID NO: 55458 - protein, 35 aa, Homo sapiens
MSFRDLRNMSPRLTSRLTWILNRTEFSSLRQLPSS

SEQ ID NO: 55459 - protein, 55 aa, Homo sapiens
MPTAESEAKVKTKVRFEELLKTHSDLMREKKKLKKKLVRSEENISIHLVAPNVNM

SEQ ID NO: 55460 - protein, 316 aa, Homo sapiens
  MOD_RES (1)..(1): Any amino acid
XSFSSLYQSSCQGQLHRSVSWAGIASQREAVGCRAPLCLIDSAVVMEEGSPGEVPVLVEPPGLEDVEAALGMDRRTDAYSRSSSVSSQEEKSLHAEELVGRGIPIERVVSSEGGRPSVDLSFQPSQPLSKSSSSPELQTLQDILGDPGDKADVGRLSPEVKARSQSGTLDGESAAWSASGEDSRGQPEGPLPSSSPRSPSGLRPRGYTISDSAPSRRGKRVERDALKSRATASNAEKVPVSCSCSSTIPPSLATSQTSQSCCPMSHSPLSGRCSSSTRSHHTTPTRSPSCMLEKARATASSPSCPMSMAPTGTRSS

SEQ ID NO: 55461 - protein, 274 aa, Homo sapiens
MFTLAEVASLNDIQPTYRILKPWWDVFMDYLAVVMLMVAIFAGTMQLTKDQVVCLPVLPSPVNSKAHTPPGNAEVTTNIPKMEAATNQDQDGRTTNDISFGTSAVTPDIPLRATYPRTDFALPNQEAKKEKKDPTGRKTNLDFQQYVFINQMCYHLALPWYSKYFPYLALIHTIILMVSSNFWFKYPKTCSKVEHFVSILGKCFESPWTTKALSETACEDSEENKQRITGAQTLPKHVSTSSDEGSPSASTPMINKTGFKFSAEKPVIEVPSMT

SEQ ID NO: 55462 - protein, 226 aa, Homo sapiens
MASGPGSQEREGLLIVKLEEDCAWSQELPPPDPGPSPEASHLRFRRFRFQEAAGPREALSRLQELCHGWLRPEMRTKEQILELLVLEQFLTILPQEIQSRVQELHPESGEEAVTLVEDMQRELGRLRQQEKRNLRTWKVFRLYALRTSTLRCCFLTRPEGRCPGVLSWEDLMTGRKGIGRLPQRVEWSRPWQEPQVAENWGDRRNCSQRNSIYVPCVAKISLTTQT

SEQ ID NO: 55463 - protein, 137 aa, Homo sapiens
  MOD_RES (1)..(1): Any amino acid
XLYGLEATLIPVLSFEFLSLPSFSEKLSHPEDYGGLIFTSPRAVEAAELCLEQNNKTEVWERSLKEKWNAKSVYVVGNATASLVSKIGLDTEGETCGNAEKLAEYICSRESSALPLLFPCGNLKREILPKALKDKAM

SEQ ID NO: 55464 - protein, 129 aa, Homo sapiens
GVELDIEFTSDGIPVLMHDNTVDRTTDGTGRLCDLTFEQIRKLNPAANHRLRNDFPDEKIPTLREAVAECLNHNLTIFFDVKGHAHKATEALKKMYMEFPQLYNNSVVCSFLPEVIYKVTFGIFLVHIR

SEQ ID NO: 55465 - protein, 656 aa, Homo sapiens
  MOD_RES (1)..(1): Any amino acid
XKPKLPENYTDETWQKLKEAVEAIQNSTSIKYNLEELYQAVENLCSYKISANLYKQLRQICEDHIKAQIHQFREDSLDSVLFLKKIDRCWQNHCRQMIMIRSIFLFLDRTYVLQNSMLPSIWDMGLELFRAHIISDQKVQNKTIDGILLLIERERNGEAIDRSLLRSLLSMLSDLQIYQDSFEQRFLEETNRLYAAEGQKLMQEREVPEYLHHVNKRLEEEADRLITYLDQTTQKSLIATVEKQLLGEHLTAILQKGLNNLLDENRIQDLSLLYQLFSRVRGGVQVLLQQWIEYIKAFGSTIVINPEKDKTMVQELLDFKDKVDHIIDICFLKNEKFINAMKEAFETFINKRPNKPAELIAKYVDSKLRAGNKEATDEELEKMLDKIMIIFRFIYGKDVFEAFYKKDLAKRLLVGKSASVDAEKSMLSKLKHECGAAFTSKLEGMFKDMELSKDIMIQFKQYMQNQNVPGNIELTVNILTMGYWPTYVPMEVHLPPEMVKLQEIFKTFYLGKHSGRKLQWQSTLGHCVLKAEFKEGKKELQVSLFQTLVLLMFNEGEEFSLEEIKQATGIEDGELRRTLQSLACGKARVLAKNPKGKDIEDGDKFICNDDFKHKLFRIKINQIQMKETVFLSLSLSPNTLELYMLIIKIYKDFYTC

SEQ ID NO: 55466 - protein, 93 aa, Homo sapiens
MMNHSMSSGSGSLRTNQKRSLYVRAMFDYDKSKDSGLPSQGLSFKYGDILHVINASDDEWWQARRVMLEGDSEEMGVIPSKRRVERKERARLK

SEQ ID NO: 55467 - protein, 29 aa, Homo sapiens
VECDTCAICRVQVMGMCRPGEKHWEDVCL

SEQ ID NO: 55468 - protein, 1165 aa, Homo sapiens
HAKDFKEYHRSVTGKIQKLTKAVATYHANTEREQKKENERIEKERMRRLMAEDEEGYRKLIDQKKDKRLAYLLQQTDEYVANLTELVRQHKAAQVAKEKKKKKKKKKAENAEGQTPAIGPDGEPLDETSQMSDLPVKVIHVESGKILTGTDAPKAGQLEAWLEMNPGYEVAPRSDSEESGSEEEEEEEEEEQPQAAQPPTLPVEEKKKIPDPDSDDVSEVDARHIIENAKQDVDDEYGVSQALARGLQSYYAVAHAVTERVDKQSALMVNGVLKQYQIKGLEWLVSLYNNNLNGILADEMGLGKTIQTIALITYLMEHKRINGPFLIIVPLSTLSNWAYEFDKWAPSVVKVSYKGSPAARRAFVPQLRSGKFNVLLTTYEYIIKDKHILAKIRWKYMIVDEGHRMKNHHCKLTQVLNTHYVAPRRLLLTGTPLQNKLPELWALLNFLLPTIFKSCSTFEQWFNAPFAMTGEKVDLNEEETILIIRRLHKVLRPFLLRRLKKEVEAQLPEKVEYVIKCDMSALQRVLYRHMQAKGVLLTDGSEKDKKGKGGTKTLMNTIMQLRKICNHPYMFQHIEESFSEHLGFTGGIVQGLDLYRASGKFELLDRILPKLRATNHKVLLFCQMTSLMTIMEDYFAYRGFKYLRLDGTTKAEDRGMLLKTFNEPGSEYFIFLLSTRAGGLGLNLQSADTVIIFDSDWNPHQDLQAQDRAHRIGQQNEVRVLRLCTVNSVEEKILAAAKYKLNVDQKVIQAGMFDQKSSSHERRAFLQAILEHEEQDESRHCSTGSGSASFAHTAPPPAGVNPDLEEPPLKEEDEVPDDETVNQMIARHEEEFDLFMRMDLDRRREEARNPKRKPRLMEEDELPSWIIKDDAEVERLTCEEEEEKMFGRGSRHRKEVDYSDSLTEKQWLKAIEEGTLEEIEEEVRQKKSSRKRKRDSDAGSSTPTTSTRSRDKDDESKKQKKRGRPPAEKLSPNPPNLTKKMKKIVDAVIKYKDSSGRQLSEVFIQLPSRKELPEYYELIRKPVDFKKIKERIRNHKYRSLNDLEKDVMLLCQNAQTFNLEGSLIYEDSIVLQSVFTSVRQKIEKEDDSEGEESEEEEEGEEEGSESESRSVKVKIKLGRKEKAQDRLKGGRRRPSRGSRAKPVVSDDDSEEEQEEDRSGSGSEED

SEQ ID NO: 55469 - protein, 401 aa, Homo sapiens [sequence omitted]

SEQ ID NO: 55470 - protein, 134 aa, Homo sapiens
MKRTVCAKSIFELWGHGQSPEELYSSLKNYPVEKMVPFLHSDSTYKIKIHTFNKTLTQEEKIKRIDALEFLPFEGKVNLKKPQHVFSVLEDYGLDPNCIPENPHNIYFGRWIADGQRELIESYSVKKRHFIGNT

SEQ ID NO: 55471 - protein, 36 aa, Homo sapiens
MERPLENGDESPDSQGHATDWRFAVCSFRDAWEEEE

SEQ ID NO: 55472 - protein, 147 aa, Homo sapiens
MDSLQKQDLRRPKIHGAVQASPYQPPTLASLQRLLWVRQAATLNHIDEVWPSLFLGDAYAARDKSKLIQLGITHVVNAAAGRVLVHCAMGVSRSATLVLAFLMICENMTLVEAIQTVQAHRNICPNSGFLRQLQVLDNRLGRETGRF

SEQ ID NO: 55473 - protein, 216 aa, Homo sapiens
ADAPSLLQHDEVETYFHEFGHVMHQLCSQAEFAMFSGTHVERDFVEAPSQMLENWVWEQEPLLRMSRHYRTGSAVPRELLEKLIESRQANTGLFNLRQIVLAKVDQALHTQTDADPAEEYARLCQEILGVPATPGTNMPATFGHLAGGYDAQYYGYLWSEVYSMDMFHTRFKQEGVLNSKEAPHWPLRPRAVSAGSSVSSHTSPSGICVIGLRAMG

SEQ ID NO: 55474 - protein, 558 aa, Homo sapiens
MAVQPKETLQLESAAEVGFVRFFQGMPEKPTTTVRLFDRGDFYTAHGEDALLAAREVFKTQGVIKYMGPAGAKNLQSVVLSKMNFESFVKDLLLVRQYRVEVYKNRAGNKASKENDWYLAYKASPGNLSQFEDILFGNNDMSASIGVVGVKMSAVDGQRQVGVGYVDSIQRKLGLCEFPDNDQFSNLEALLIQIGPKECVLPGGETAGDMGKLRQIIQRGGILITERKKADFSTKDIYQDLNRLLKGKKGEQMNSAVLPEMENQVAVSSLSAVIKFLELLSDDSNFGQFELTTFDFSQYMKLDIAAVRALNLFQGSVEDTTGSQSLAALLNKCKTPQGQRLVNQWIKQPLMDKNRIEERLNLVEAFVEDAELRQTLQEDLLRRFPDLNRLAKKFQRQAANLQDCYRLYQGINQLPNVIQALEKHEGKHQKLLLAVFVTPLTDLRSDFSKFQEMIETTLDMDQVENHEFLVKPSFDPNLSELREIMNDLEKKMQSTLISAARDLGLDPGKQIKLDSSAQFGYYFRVTCKEEKVLRNNKNFSTVDIQKNGVKFTNRVYQK

SEQ ID NO: 55475 - protein, 137 aa, Homo sapiens
MPLQDLVTAEKPIPLFVEKCVEFIEDTGLCTEGLYRVSGNKTDQDNIQKQFDQDHNINLVSMEVTVNAVAGALKAFFADLPDPLIPYSLHPELLEAAKIPDKTERLHALKEIVKKFHPVNYDVFRYVITHLNRVSQQ

SEQ ID NO: 55476 - protein, 71 aa, Homo sapiens
MIVETVSNQLAWSAEQGFWVLTPKTKQTAPLAIATARGYTDCARHLIRQGAELDARVGGRAALHEACARAQ

SEQ ID NO: 55477 - protein, 368 aa, Homo sapiens
ARGGSGRCVARAMTGNAGEWCLMESDPGVFTELIKGFGCRGAQVEEIWSLEPENFEKLKPVHGLIFLFKWQPGEEPAGSVVQDSRLDTIFFAKQVINNACATQAIVSVLLNCTHQDVHLGETLSEFKEFSQSFDAAMKGLALSNSDVIRQVHNSFARQQMFEFDTKTSAKEEDAFHFVSYVPVNGRLYELDGLREGPIDLGACNQDDWISAVRPVIEKRIQKDGFSPCCPGWSQTPELKPSACLDLPKWYSEGEIRFNLMAIVSDRKMIYEQKIAELQRQLAEEEPMDTDQGNSMLSAIQSEVAKNQMLIEEEVQKLKRYKIENIRRKHNYLPFIMELLKTLAEHQQLIPLVEKAKEKQNAKKAQETK

SEQ ID NO: 55478 - protein, 586 aa, Homo sapiens
MCQVGEDYGEPAPEEPPPAPRPSREQKCVKCKEAQPVVVIRAGDAFCRDCFKAFYVHKFRAMLGKNRLIFPGEKVLLAWSGGPSSSSMVWQVLEGLSQDSAKRLRFVAGVIFVDERTPGVLTVALRSAAREKPLPKGKWPTPHSSARKHRPAERGLEGFSQVEVALQPALPGSSLSPDSFCLGFSEGAACGQSLEERSKTLAEVKPILQATGFPWHVVALEEVFSLPPSVLWCSAQELVGSEGAYKAAVDSFLQQQHVLGAGGGPGPTQGEEQPPQPPLDPQNLARPPAPAQTEALSQLFCSVRTLTAKEELLQTLRTHLILHMARAHGYSKVMTGDSCTRLAIKLMTNLALGRGAFLAWDTGFSDERHGDVVVVRPMRDHTLKEVAFYNRLFSVPSVFTPAVDTKAPEKASIHRLMEAFILRLQTQFPSTVSTVYRTSEKLVKGPRDGPAAGDSGPRCLLCMCALDVDAADSATAFGAQTSSRLSQMQSPIPLTETRTPPGPCCSPGVGWAQRCGQGACRREDPQACIEEQLCYSCRVNMKDLPSLDPLPPYILAEAQLRTQRAWGLQEIRDCLIEDSDDEAGQS

SEQ ID NO: 55479 - protein, 61 aa, Homo sapiens
  MOD_RES (1)..(1): Any amino acid
XVDSEDFFQLLEDDTCLMVLQSGQSWSPTRGAPSLDLHTAARPGPYVAGNFLHPSSCSGGG

SEQ ID NO: 55480 - protein, 77 aa, Homo sapiens
  MOD_RES (1)..(1): Any amino acid
XRSGSGNFGGGRGGGFGGNDNFGRGGNFSGRGGSYNDFGNYNNQSSNFGPMKGGNFGGRSSGPYGGGGQYFAKPRNQ

SEQ ID NO: 55481 - protein, 188 aa, Homo sapiens
MKCEHCTRKECSKKTKTDDQENVSADAPSPAQENGEKGEFHKLADAKIFLSDCLACDSCMTAEEGVQLSQQNAKDFFRVLNLNKKCDTSKHKVLVVSVCPQSLPYFAAKFNLSVTDASRRLCGFLKSLGVHYVFDTTIAADFSILESQKEFVRRYRQHSEEERTLPMLTSACPGMLPFPSSLQACRFP

SEQ ID NO: 55482 - protein, 1559 aa, Homo sapiens
MQESQTKSMFVSRALEKILADKEVKRPQHSQLRRACQVALDEIKAEIEKQRLGTAAPPKANFIEADKYFLPFELACQSKSPRVVSTSLDCLQKLIAYGHITGNAPDSGAPGKRLIDRIVETICSCFQGPQTDEGVQLQIIKALLTAVTSPHIEIHEGTILQTVRTCYNIYLASKNLINQTTAKATLTQMLNVIFTRMENQVLQEARELEKPIQSKPQSPVIQAAAVSPKFVRLKHSQAQSKPTTPEKTDLTNGEHARSDSGKVSTENGDAPRERGSSLSGTDDGAQEVVKDILEDVVTSAIKEAAEKHGLTEPERVLGELECQECAIPPGVDENSQTNGIADDRQSLSSADNLESDAQGHQVAARFSHVLQKDAFLVFRSLCKLSMKPLGEGPPDPKSHELRSKVVSLQLLLSVLQNAGPVFRTHEMFINAIKQYLCVALSKNGVSSVPDVFELSLAIFLTLLSNFKMHLKMQIEVFFKEIFLNILETSTSSFEHRWMVIQTLTRICADAQCVVDIYVNYDCDLNAANIFERLVNDLSKIAQGRSGHELGMTPLQELSLRKKGLECLVSILKCMVEWSKDLYVNPNHQTSLGQERLTDQEIGDGKGLDMARRCSVTSMESTVSSGTQTTVQDDPEQFEVIKQQKEIIEHGIELFNKKPKRGIQFLQEQGMLGTSVEDIAQFLHQEERLDSTQVGDFLGDSARFNKEVMYAYVDQLDFCEKEFVSALRTFLEGFRLPGEAQKIDRLMEKFAARYIECNQGQTLFASADTAYVLAYSIIMLTTDLHSPQVKNKMTKEQYIKMNRGINDSKDLPEEYLSSIYEEIEGKKIAMKETKELTIATKSTKQNVASEKQRRLLYNLEMEQMAKTAKALMEAVSHAKAPFTSATHLDHVRPMFKLVWTPLLAAYSIGLQNCDDTEVASLCLEGIRCAIRIACIFGMQLERDAYVQALARFSLLTASSSITEMKQKNIDTIKTLITVAHTDGNYLGNSWHEILKCISQLELAQLIGTGVKTRYLSGSGREREGSLKGHTLAGEEFMGLGLGNLVSGGVDKRQMASFQESVGETSSQSVVVAVDRIFTGSTRLDGNAIVDFVRWLCAVSMDELASPHHPRMFSLQKIVEISYYNMNRIRLQWSRIWHVIGDHFNKVGCNPNEDVAIFAVDSLRQLSMKFLEKGELANFRFQKDFLRPFEHIMKKNRSPTIRDMAIRCIAQMVNSQAANIRSGWKNIFAVFHQAASDHDGNIVELAFQTTCHIVTTIFQHHFPAAIDSFQDAVKCLSEFACNAAFPDTSMEAIRLIRFCGKYVSERPRVLQEYTSDDMNVAPGDRVWVRGWFPILFELSCIINRCKLDVRTRGLTVMFEIMKSYGHTFEKHWWQDLFRIVFRIFDNMKLPEQLSEKSEWMTTTCNHALYAICDVFTQFYEALNEVLLSDVFAQLQWCVKQDNEQLARSGTNCLENLVISNGEKFSPEVWDETCNCMLDIFKTTIPHVLLTWRPVGMEEDSSEKHLDVDLDRQSLSSIDKNPSERGQSQLSNPTDDSWKGRPYATRHAGCRYPHRDGGSGHV

SEQ ID NO: 55483 - protein, 98 aa, Homo sapiens
MAEQVLPQALYLSNMRKAVKIRERTPEDIFKPTNGIIHHFKTMHRYTLEMFRTCQFCPQFREIIHKALIDRNIQATLESQKKLNWCREVRKLVALKTN

SEQ ID NO: 55484 - protein, 206 aa, Homo sapiens
MEAELTPLESAINVLEMIKTEFTLTEAVVESSRKLVKEAAVIICIKNKEFEKASKILKKHMSKDPTTQKLRNDLLNIIREKNLAHPVIQNFSYETFQQKMLRFLESHLDDAEPYLLTIGFMAKKALKSESAASSTGKEDKQPAPGPVEKPPREPARQLRNPPTTIGMMTLKAAFKTLSGAQDSEAAFAKLDQKDLVLPTQALPASP

SEQ ID NO: 55485 - protein, 124 aa, Homo sapiens
MATSEQSICQARASVMVYDDTSKKWVPIKPGQQGFSRINIYHNTASNTFRVVGVKLQDQQVVINYSIVKGLKYNQATPTFHQWRDARQVYGLNFASKEEATTFSNAMLFALNIMNSQEGGACIL

SEQ ID NO: 55486 - protein, 105 aa, Homo sapiens
MEDHQHVPIDIQTSKLLDWLVDRRHCSLKWQSLVLTIREKINAAIQDMPESEEIAQLLSGSYIHYFHCLRILDLLKGTEASTKNIFGRYSSQRMKARLAGDYSSV

SEQ ID NO: 55487 - protein, 532 aa, Homo sapiens
MAAPPAPAAKGSPQPEPHAPEPGPGSAKRGREDSRAGRLSFCTKVCYGIGGVPNQIASSATAFYLQLFLLDIAQIPAAQVSLVLFGGKVSGAAADPVAGFFINRSQRTGSGRLMPWVLGCTPFIALAYFFLWFLPPFTSLRGLWYTTFYCLFQALATFFQVPYTALTMLLTPCPRERDSATAYRMTVEMAGTLMGATVHGLIVSGAHRPHRCEATATPGPVTVSPNAVEQSYLALFCTHASQLHDHVQDLVLAVLAHLYCIAAAVVVVTYPVCISLLCLGVKERPDPSAPASGPGLSFLAGLSLTTRHPPYLKLVISFLFISAAVQVEQSYLVLFCTHASQLHDHVQGLVLTVLVSAVLSTPLWEWVLQRFGKKTSAFGIFAMVPFAILLAAVPTAPVAYVVAFVSGVSIAVSLLLPWSMLPDVVDDFQLQHRHGPGLETIFYSSYVFFTKLSGACALGISTLSLEFSGYKAGVCKQAEEVVVTLKVLIGAVPTCMILAGLCILMVGSTPKTPSRDASSRLSLRRRTSYSLA

SEQ ID NO: 55488 - protein, 182 aa, Homo sapiens
MDAMKRGLCCVLLLCGAVFVSPSQEIHARFRRGARSYQVICRDEKTQMIYQQHQSWLRPVLRSNRVEYCWCNSGRAQCHSVPVKSCSEPRCFNGGTCQQALYFSDFVCQCPEGFAGKCCEIDTRATCYEDQGISYRGTWSTAESGAECTNWNSSALAQKPYSGRRPDAIRLGLGNHNYCRKQ

SEQ ID NO: 55489 - protein, 1114 aa, Homo sapiens
MPARTAPARVPTLAVPAISLPDDVRRRLKDLERDSLTEKECVKEKLNLLHEFLQTEIKNQLCDLETKLRKEELSEEGYLAKVKSLLNKDLSLENGAHAYNREVNGRLENGNQARSEARRVGMADANSPPKPLSKPRTPRRSKSDGEAKPEPSPSPRITRKSTRQTTITSHFAKGPAKRKPQEESERAKSDESIKEEDKDQDEKRRRVTSRERVARPLPAEEPERAKSGTRTEKEEERDEKEEKRLRSQTKEPTPKQKLKEEPDREARAGVQADEDEDGDEKDEKKHRSQPKDLAAKRRPEEKEPEKVNPQISDEKDEDEKEEKRRKTTPKEPTEKKMARAKTVMNSKTHPPKCIQCGQYLDDPDLKYGQHPPDAVDEPQMLTNEKLSIFDANESGFESYEALPQHKLTCFSVYCKHGHLCPIDTGLIEKNIELFFSGSAKPIYDDDPSLEGGVNGKNLGPINEWWITGFDGGEKALIGFSTSFAEYILMDPSPEYAPIFGLMQEKIYISKIVVEFLQSNSDSTYEDLINKIETTVPPSGLNLNRFTEDSLLRHAQFVVEQVESYDEAGDSDEQPIFLTPCMRDLIKLAGVTLGQRRAQARRQTIRHSTREKDRGPTKATTTKLVYQIFDTFFAEQIEKDDREDKENAFKRRRCGVCEVCQQPECGKCKACKDMVKFGGSGRSKQACQERRCPNMAMKEADDDEEVDDNIPEMPSPKKMHQGKKKKQNKNRISWVGEAVKTDGKKSYYKKVCIDAETLEVGDCVSVIPDDSSKPLYLARVTALWEDSSNGQMFHAHWFCAGTDTVLGATSDPLELFLVDECEDMQLSYIHSKVKVIYKAPSENWAMEGGMDPESLLEGDDGKTYFYQLWYDQDYARFESPPKTQPTEDNKFKFCVSCARLAEMRQKEIPRVLEQLEDLDSRVLYYSATKNGILYRVGDGVYLPPEAFTFNIKLSSPVKRPRKEPVDEDLYPEHYRKYSDYIKGSNLDAPEPYRIGRIKEIFCPKKSNGRPNETDIKIRVNKFYRPENTHKSTPASYHADINLLYWSDEEAVVDFKAVQGRCTVEYGEDLPEPIMQRAKALKILPTMPVALETKGRAREKGRASPSPKPVSRASQR

SEQ ID NO: 55490 - protein, 217 aa, Homo sapiens
GSTCDVKVKNGTTYEGIFKTLSSKFELAVDAVHRKASEPAGGPRREDIVDTMVFKPSDVMLVHFRNVDFNYATKDKFTDSAIAMNSKVNGEHKEKKRTTQKSFVSESCVRPSWLERLNQAPSTAYGSPWRTTMGALKRRSTVQSSGRAQGGRAPAWHPGRGSISLCLNESGKVPGEEFDAAALGAVGLALALCHLVALTIWTTAALAQVLRPVVSME

SEQ ID NO: 55491 - protein, 103 aa, Homo sapiens
MVDFAMDVYKNLYSDDIPHALREKRTTVVAQLKQLQAETEPIVKMFEDPETTRQMQSTRDGRMLFDYLADKHGAGIFRYTLQICKIPVRMWELLRSSRISLFF

SEQ ID NO: 55492 - protein, 744 aa, Homo sapiens
MPERLAEMLLDLWTPLIILWITLPPCIYMAPMNQSQVLMSGSPLELNSLGEEQRILNRSKRGWVWNQMFVLEEFSGPEPILVGRLHTDLDPGSKKIKYILSGDGAGTIFQINDVTGDIHAIKRLDREEKAEYTLTAQAVDWETSKPLEPPSEFIIKVQDINDNAPEFLNGPYHATVPEMSILGTSVTNVTATDADDPVYGNSAKLVYSILEGQPYFSIEPETAIIKTALPNMDREAKEEYLVVIQAKDMGGHSGGLSGTTTLTVTLTDVNDNPPKFAQSLYHFSVPEDVVLGTAIGRVKANDQDIGENAQSSYDIIDGDGTALFEITSDAQAQDGIIRLRKPLDFETKKSYTLKVEAANVHIDPRFSGRGPFKDTATVKIVVEDADEPPVFSSPTYLLEVHENAALNSVIGQVTARDPDITSSPIRFSIDRHTDLERQFNINADDGKITLATPLDRELSVWHNITIIATEIRNHSQISRVPVAIKVLDVNDNAPEFASEYEAFLCENGKPGQVIQTVSAMDKDDPKNGHYFLYSLLPEMVNNPNFTIKKNEDNSLSILAKHNGFNRQKQEVYLLPIIISDSGNPPLSSTSTLTIRVCGCSNDGVVQSCNVEAYVLPIGLSMGALIAILACIILLLVIVVLFVTLRRHKNEPLIIKDDEDVRENIIRYDDEGGGEEDTEAFDIATLQNPDGINGFLPRWGLPIQWWEERNPIQTCLFSRSRIPRSLLFIFFHKDTKINCITQWTT

SEQ ID NO: 55493 - protein, 121 aa, Homo sapiens
MMPFGKISQQLCGVKKLPWSCDSRYFWGWLNAVFNKVDYDRIRDVGPDRAASEWLLRCGAMVRYHGQERWQKDYNHLPTGPLDKYKIQAIDATDSCIMSIGFDHMGNYPIVLLIENADDLQ

SEQ ID NO: 55494 - protein, 126 aa, Homo sapiens
MAPIGLKAVVGEKIMHDVIKKVKKKGEWKVLVVDQLSMRMLSSCCKMTDIMTEGITRAGLLDHMLWKISISAESRSPAWRLCISSLHPRSPSTLSSVTLRTRRLLNTGLHTSSSLTLVQMPCLMNW

SEQ ID NO: 55495 - protein, 1542 aa, Homo sapiens
MLPCKKRRTTVTESLQHKGNQEENNVDLESAVKPESDQVKDLSSVSLSWDPSHGRVAGFEVQSLQDAGNQLGMEDTSLSSGMLTQNTNVPILEGVDVAISQGITLPSLESFHPLNIHIGKGKLHATGSKRGKKMTLRPGPVTQEDRCDHLTLKEPFSGEPSEEVKEEGGKPQMNSEGEIPSLPSGSQSAKPVSQPRKSTQPDVCASPQEKPLRTLFHQPEEEIEDGGLFIPMEEQDNEESEKRRKKKKGTKRKRDGRGQEGTLAYDLKLDDMLDRTLEDGAKQHNLTAVNVRNILHEVITNEHVVAMMKAAISETEDMPMFEPKMTRSKLKEVVEKGVVIPTWNISPIKKANEIKPPQFVDIHLEEDDSSDEEYQPDDEEEDETAEESLLESDVESTASSPRGAKKSRLRQSSEMTETDEESGILSEAEKVTTPAIRHISAEVVPMGPPPPPKPKQTRDSTFMEKLHAVDEELASSPVCMDSFQPMDDSLIAFRTRSKMPLKDVPLGQLEAELQAPDITPDMYDPNTADDEDWKMWLGGLMNDDVGNEDEADDDDDPEYNFLEDLDEPDTEDFRTDRAVRITKKEVNELMEELFETFQDEMGFSNMEDDGPEEEECVAEPRPNFNTPQALRFEEPLANLLNEQHRTVKELFEQLKMKKSSAKQLQEVEKVKPQSEKVHQTLILDPAQRKRLQQQMQQHVQLLTQIHLLATCNPNLNPEATTTRIFLKELGTFAQSSIALHHQYNPKFQTLFQPCNLMGAMQLIEDFSTHVSIDCSPHKTVKKTANEFPCLPKQVAWILATSKVFMYPELLPVCSLKAKNPQDKIVFTKAEDNLLALGLKHFEGTEFPNPLISKYLLTCKTAHQLTVRIKNLNMNRAPDNIIKFYKKTKQLPVLGKCCEEIQPHQWKPPIEREEHRLPFWLKASLPSIQEELRHMADGAREVGNMTGTTEINSDRSLEKDNLELGSESRYPLLLPKGVVLKLKPVATRFPRKAWRQKRSSVLKPLLIQPSPSLQPSFNPGKTPARSTHSEAPPSKMVLRIPHPIQPATVLQTVPGVPPLGVSGGESFESPAALPAVPPEARTSFPLSESQTLLSSAPVPKVMLPSLAPSKFRKPYVRRRPSKRRGVKASPCMKPAPVIHHPASVIFTVPATTVKIVSLGGGCNMIQPVNAAVAQSPQTIPITTLLVNPTSFPCPLNQSLVASSVSPLIVSGNSVNLPIPSTPEDKAHVNVDIACAVADGENAFQGLEPKLEPQELSPLSATVFPKVEHSPGPPLADAECQEGLSENSACRWTVVKTEEGRQALEPLPQGIQESLNNPTPGDLEEIVKMEPEEAREEISGSPERDICDDIKVEHAVELDTGAPSEELSSAGEVTKQTVLQKEEERSQPTKTPSSSQEPPDEGTSGTDVNKGSSKNALSSMDPEVRLSSPPGKPEDSSSVDGQSVGTPVGPETGGEKNGPEEEEEEDFDDLTQDEEDEMSSASEESVLSVPELQVRAGEYSQVFRGLSNMYHLLICHLLACCTMDSPKIICIFVNALWDMIVELR

SEQ ID NO: 55496 - protein, 389 aa, Homo sapiens
MAGLQRLASHLPVGVMLPHNTTEAPGPHSAKQDSYEQGDSSQQSLKGHLRNNFQKQLLSNKELILDKVYTHPKWNTQTKARSYSYPHCTGISQQDPESDSQGQGNGLFYSSGPQSWYPKANNQDFIPFTKKRVGVDRAFPLKPMVHRKSCSTGEAGTDGDHNVYPRPPEPREFSSRNFGVRNQGNFSVVGTVLAATQAEKAVANFDRTEWVQIRRLEAAGESLEEEIRRKQILLRGKLKKTEEELRRIQTQKEQAKENENGELQKIILPRSRVKGNKSNTMYKPIFSPEFEFEEEFSRDRREDETWGRSQQNSGPFQFSDYRIQRLKRERLVASNNKIRDPVSEPSVEKFSPPSETPVGALQGSARNSSLSMAPDSSGSSGSIEEPQLG

SEQ ID NO: 55497 - protein, 156 aa, Homo sapiens
MKETIMNQEKLAKLQAQVRIGGKGTARRKKKVVHRTATADDKKLQFSLKKLGVNNISGIEEVNMFTNQGTVIHFNNPKVQASLAANTFTITGHAETKQLTEMLPSILNQLGADSLTSLRRLAEALPKQSVDGKAPLATGEDDDDEVPGRNVYLWLT

SEQ ID NO: 55498 - protein, 247 aa, Homo sapiens
MVKQAENICRQATIQPRDNKRESQNWRALKQQLVNKFTLRLVSCVQLASKLSFRNKIISNITVLNFLQALGYLHTKEELLESELDVLKSLNFRINLPTPLAYVETLLEVLGYNGCLVPAMRLHATCLTLLDLVYLLHEPIYESLLRASIENSTPSQLQGEKFTSVKEDFMLLAVGIIAASAFIQNHECWSQVVGHLQSITGIALASIAEFSYAILTHGVGANTPGRQQSIPPHLAARALKTVASSNT

SEQ ID NO: 55499 - protein, 353 aa, Homo sapiens
MKCYDPVGKTPGSLGSSASAGQAAASAPLPLESGELSRGDLSRPEDADTSGPCCEHTQEKQSTRAPAAAPFVPFSGGGQRLGGPPGPTRPLTSSSAKLPKSLSSPGGPSKPKKSKSGQDPQQEQEQERERDPQQEQERERPVDREPVDREPVVCHPDLEERLQAWPAELPDEFFELTVDDVRRRLAQLKSERKRLEEAPLVTKAFREAQIKEKLERYPKVALRVLFPDRYVLQGFFRPSETVGDLRDFVRSHLGNPELSFYLFITPPKTVLDDHTQTLFQANLFPAALVHLGAEEPAGVYLEPGLLEHAISPSAADVLVARYMSRAAGSPSPLPAPDPAPKSEPAAEEGALVP

SEQ ID NO: 55500 - protein, 450 aa, Homo sapiens
MAALTIATGTGNWFSALALGVTLLKCLLIPTYHSTDFEVHRNWLAITHSLPISQWYYEATSEWTLDYPPFFAWFEYILSHVAKYFDQEMLNVHNLNYSSSRTLLFQRFSVIFMDVLFVYAVRECCKCIDGKKVGKELTEKPKFILSVLLLWNFGLLIVDHIHFQYNGFLFGLMLLSIARLFQKRHMEGAFLFAVLLHFKHIYLYVAPAYGVYLLRSYCFTANKPDGSIRWKSFSFVRVISLGLVVFLVSALSLGPFLALNQLPQVFSRLFPFKRGLCHAYWAPNFWALYNALDKVLSVIGLKLKFLDPNNIPKASMTSGLVQQFQHTVLPSVTPLATLICTLIAILPSIFCLWFKPQGPRGFLRCLTLCALSSFMFGWHVHEKAILLAILPMSLLSVGKAGDASIFLILTTTGHYSLFPLLFTAPELPIKILLMLLFTIYSISSLKTLFR

SEQ ID NO: 55501 - protein, 773 aa, Homo sapiens
MSARTPLPTVNERDTENHTSVDGYTEPHIQPTKSSSRQNIPRCRNSITSATDEQPHIGNYRLQKTIGKGNFAKVKLARHVLTGREVAVKIIDKTQLNPTSLQKLFREVRIMKILNHPNIGEVFDYLVAHGRMKEKEARAKFRQIVSAVQYCHQKYIVHRDLKAENLLLDGDMNIKIADFGFSNEFTVGNKLDTFCGSPPYAAPELFQGKKYDGPEVDVWSLGVILYTLVSGSLPFDGQNLKELRERVLRGKYRIPFYMSTDCENLLKKLLVLNPIKRGSLEQIMKDRWMNVGHEEEELKPYTEPDPDFNDTKRIDIMVTMGFARDEINDALINQKYDEVMATYILLGRKPPEFEGGESLSSGNLCQRSRPSSDLNNSTLQSPAHLKVQRSISANQKQRRFSDHAGPSIPPAVSYTKRPQANSVESEQKEEWDKDVARKLGSTTVGSKSEMTASPLVGPERKKSSTIPSNNVYSGGSMARRNTYVCERTTDRYVALQNGKDSSLTEMSVSSISSAGSSVASAVPSARPRHQKSMSTSGHPIKVTLPTIKDGSEAYRPGTTQRVPAASPSAHSISTATPDRTRFPRGSSSRSTFHGEQLRERRSVAYNGPPASPSHETGAFAHARRGTSTGIISKITSKFVRRDPSEGEASGRTDTSRSTSGEPKERDKEEGKDSKPRSLRFTWSMKTTSSMDPNDMMREIRKVLDANNCDYEQKERFLLFCVHGDARQDSLVQWEMEVCKLPRLSLNGVRFKRISGTSIAFKNIASKIANELKL

SEQ ID NO: 55502 - protein, 793 aa, Homo sapiens
MLRGGRRGQLGWHSWAAGPGSLLAWLILASAGAAPCPDACCPHGSSGLRCTRDGALDSLHHLPGAENLTELYIENQQHLQHLELRDLRGLGELRNLTIVKSGLRFVAPDAFHFTPRLSRLNLSFNALESLSWKTVQGLSLQELVLSGNPLHCSCALRWLQRWEEEGLGGVPEQKLQCHGQGPLAHMPNASCGVPTLKVQVPNASVDVGDDVLLRCQVEGRGLEQAGWILTELEQSATVMKSGGLPSLGLTLANVTSDLNRKNVTCWAENDVGRAEVSVQVNVSFPASVQLHTAVEMHHWCIPFSVDGQPAPSLRWLFNGSVLNETSFIFTEFLEPAANETVRHGCLRLNQPTHVNNGNYTLLAANPFGQASASIMAAFMDNPFEFNPEDPIPDTNSTSGDPVEKKDETPFGVSVAVGLAVFACLFLSTLLLVLNKCGRRNKFGINRPAVLAPEDGLAMSLHFMTLGGSSLSPTEGKGSGLQGHIIENPQYFSDASPSGVHHIKRRDIVLKWELGEGAFGKVFLAECHNLLPEQDKMLVAVKALKEASESARQDFQREAELLTMLQHQHIVRFFGVCTEGRPLLMVFEYMRHGDLNRFLRSHGPDAKLLAGGEDVAPGPLGLGQLLAVASQVAAGMVYLAGLHFVHRDLATRNCLVGQGLVVKIGDFGMSRDIYSTDYYRVGGRTMLPIRWMPPESILYRKFTTESDVWSFGVVLWEIFTYGKQPWYQLSNTEAIDCITQGRELERPRACPPEVYAIMRGCWQREPQQRHSIKDVHARLQALAQAPPVYLDVLG

SEQ ID NO: 55503 - protein, 4523 aa, Homo sapiens
MAAQVAAREARDFREAPTLRLTSGAGLEAVGAVELEEEEENEEEAAARRARSFAQDARVRFLGGRLAMMLGFTEEKWSQYLESEDNRQVLGEFLESTSPACLVFSFAASGRLAASQEIPRDANHKLVFISKKITESIGVNDFSQVVLFGELPALSLGHVSAFLDEILVPVLSNKNNHKSWSCFTSQDMEYHIEVMKKKMYIFRGKMSRRTLLPIPTVAGKMDLDQNCSENKPPSNERIILHAIESVVIEWSHQIQEIIERDSVQRLLNGLHLSPQAELDFWMMRRENLSCIYDQLQAPVVLKMVKILTTKQSSYFPTLKDIFLAVENALLEAQDVELYLRPLRRHIQCLQETEFPQTRILIAPLFHTICLIWSHSKFYNTPARVIVLLQEFCNLFINQATAYLSPEDLLRGEIEESLEKVQVAVNILKTFKNSFFNYRKKLASYFMGRKLRPWDFQSHLVFCRFDKFLDRLIKIEDIFATTLEFEKLERLEFGGTKGAILNGQVHEMSEELMELCKLFKQSTYDPSDCTNMEFESDYVAFKSKTLEFDRRLGTIICEAFFNCNGLEAAFKLLTIFGNFLEKPVVMEIFSLHYSTLVHMFNTELDVCKQLYNEHMKQIECGHVVLNKNMPFTSGNMKWAQQVLQRLQMFWSNFASLRYLFLGNPDHALVYQKYVEMTTLLDQFESRIYNEWKSNVDEICEFNLNQPLVKFSAINGLLCVNFDPKLVAVLREVKYLLMLKKQDIPDSALAIFKKRNTILKYIGNLDLLVQGYNKLKQTLLEVEYPLIEDELRAIDEQLTAATTWLTWQDDCWGYIERVRAATSELEHRVERTQKNVKVIQQTMRGWARCVLPPRREHRREAAFTLEDKGDLFTKKYKLIQGDGCKIHNLVEENRKLFKANPSLDTWKIYVEFIDDIVVEGFFQAIMHDLDFFLKNTEKQLKPAPFFQAQMILLPPEIVFKPSLDREAGDGFYDLVEEMLCNSFRMSAQMNRIATHLEIKNYQNDMDNMLGLAEVRQEIMNRVVNVINKVLDFRNTLETHTYLWVDDRAEFMKHFLLYGHAVSSDEMDAHANEEIPEQPPTLEQFKEQIDIYEALYVQMSKFEDFRVFDSWFKVDMKPFKVSLLTIIKKWSWMFQEHLLRFVIDSLNELQEFIKETDSGLQRELNEGDHDGLVDIMVHLLAVRSRQRATDELFEPLKETITLLESYGQKMPEQVYIQLEELPERWETTKKIAATVRHEVSPLHNAEVTLIRKKCILFDAKQAEFRERFRHYAPLGFNAENPYTALDKANEELEALEEEMLQMQESTRLFEVALPEYKQMKQCRKEIKLLKGLWDVIIYVRRSIDNWTKTQWRQIHVEQMDVELRRFAKASSITEIWSLNKEVRVWDAYTGLEGTVKDMTASLRAITELQSPALRDRHWHQLMKAIGVKFLINEATTLADLLALRLHRVEDDVRRIVDKAVKELGTEKVITEISQTWATMKFSYEVHYRTGIPLLKSDEQLFETLEHNQVQLQTLLQSKYVEYFIEQVLSWQNKLNIADLVIFTWMEVQRTWSHLESIFVCSEDIRIQLVKDARRFDGVDAEFKELMFKTAKVENVLEATCRPNLYEKLKDLQSRLSLCEKALAEYLETKRIAFPRFYFVSSADLLDILSKGAQPKQVTCHLAKLFDSIADLQFEDNQDVSAHRAVGMYSKEKEYVPFQAECECVGHVETWLLQLEQTMQETVRHSITEAIVAYEEKPRELWIFDFPAQVALTSSQIWWTTDVGIAFSRLEEGYETALKDFHKKQISQLNTLITLLLGELPPGDRQKIMTICTIDVHARDVVAKLISQKQVVVSPQAFTWLSQLRHRWEDTQKHCFVNICDAQFQYFYEYLGNSPRLVITPLTDRCYITLTQSLHLTMSGAPAGPAGTGKTETTKDLGRALGMMVYVFNCSEQMDYKSIGNIYKGLVQTGAWGCFDEFNRISVEVLSVVAVQVKMIHDAIRNRKKRFVFLGEAITLKPSVGIFITMNPGYAGRTELPENLKALFRPCAMVAPDIELICEILLVAEGFVDARALARKFITLYTLCKELLSKQDHYDWGLRAIKSVLVVAGSLKRGDKNRPEDQVLMRALRDFNMPKIVTDDIPVFLGLVGDLFPALDVPRRRKLHFEQMVRQSTLELRLQPEESFILKVVQLEELLAVRHSVFVVGNAGTGKSKILRTLNRTYVNMKQKPVWNDLNPKAVTTDELFGFIHHATREWKDGKIVYSYFIGLFSSILREQANLKHDGPKWIVLDGDIDPMWIESLNTVMDDNKVLTLASNERIALTPFMRLLFEIHHLRSATPATVSRAGILYVNPQDLGWNPYVASWIDRRRHQSEKANLTILFDKYVPACLDKLRTSFKTITSIPESSLVQTLCVLLECLLTPENVPSDSPKEVYEVYFVFACIWAFGGTLLQDQISDYQADFSRWWQKEMKAVKFPSQGTIFDYYVDHKTKKLLPWADKIAQFTMDPDVPLQTVLVHTTETARLRYFMELLLEKGKPLMLVGNAGVGKTVFVGDTLASLSEDYIVSRVPFNYYTTSTALQKILEKPLEKKAGHNYGPGGNKKLIYFIDDMNMPEVDLYGTVQPHTLIRQHIDYGHWYDRQKVMLKEIHNCQYVACMNPMVGSFTINPRLQRHFTVFAFNFPSLDALNTIYGQIFSFHFQQQAFAPSILRSGPTLIQATIAFHQTMMCNFLPTAIKFHYIFNLRDLSNVFQGILFASPECLKGPLDLIHLWLHESARVYGDKLIDKKDCDLFQRRMLETAYKYFEGIDSHMLLQQPLIYCHFADRGKDPHYMPVKDWEVLKTILTETLDNYNELNAAMHLVLFEDAMQHVCRISRILRTPQGCALLVGVGGSGKQSLSRLAAYLRGLEVFQITLTEGYGIQELRVDLANLYIRTGAKNMPTVFLLTDAQVLDESFLVLINDLLASGEIPDLFSDEDVDKIISGIHNEVHALGMVDSRENCWKFFMARVRLQLKIILCFSPVGRTLRVRARKFPAIVNCTAIDWFHAWPQEALVSVSRRFIEETKGIEPVHKDSISLFMAHVHTTVNEMSTRYYQNERRHNYTTPKSFLEQISLFKNLLKKKQNEVSEKKERLVNGIQKLKTTASQVGDLKARLASQEAELQLRNHDAEALITKIGLQTEKVSREKTIADAEERKVTAIQTEVFQKQRECEADLLKAEPALVAATAALNTLNRVNLSELKAFPNPPIAVTNVTAAVMVLLAPRGRVPKDRSWKAAKVFMGKVDDFLQALINYDKEHIPENCLKVVNEHYLKDPEFNPNLIRTKSFAAAGLCAWVINIIKFYEVYCDVEPKRQALAQANLELAAATEKLEAIRKKLVDLDRNLSRLTASFEKATAEKVRCQEEVNQTNKTIKLANRLVKELEAKKIRWGQSIKSFEAQEKTLCGDVLLTAAFVSYVGPFTRQYRQELVHCKWVPFLQQKVSIPLTEGLDLISMLTDDATIAAWNNEGLPSDRMSTENAAILTHCERWPLVIDPQQQGIKWIKNKYGMDLKVTHLGQKGFLNAIETALAFGDVILIENLEETIDPVLDPLLGRNTIKKGKYIRIGDKECEFNKNFRLILHTKLANPHYKPELQAQTTLLNFTVTEDGLEAQLLAEVVSIERPDLEKLKLVLTKHQNDFKIELKYLEDDLLLRLSAAEGSFLDDTKLVERLEATKTTVAEIEHKVIEAKENERKINEARECYRPVAARASLLYFVINDLQKINPLYQFSLKAFNVLFHRAIEQADKVEDMQGRISILMESITHAVFLYTSQALFEKDKLTFLSQMAFQILLRKKEIDPLELDFLLRFTVEHTHLSPVDFLTSQSWSAIKAIAVMEEFRGIDRDVEGSAKQWRKWVESECPEKEKLPQEWKKKSLIQKLILLRAMRPDRMTYALRNFVEEKLGAKYVERTRLDLVKAFEESSPATPIFFILSPGVDALKDLEILGKRLGFTIDSGKFHNVSLGQGQETVAEVALEKASKGGHWVILQNVHLVAKWLGTLEKLLERFSQGSHRDYRVFMSAESAPTPDEHIIPQGLLENSIKITNEPPTGMLANLHAALYNFDQDTLEICSKEQEFKSILFSLCYFHACVAGRLRFGPQGWSRSYPFNPGDLTICASVLYNYLEANSKVPWEDLRYLFGEIMYGGHITDDWDRKLCRVYLEEFMNPSLTEDELMLAPGFAAPPYLDYAGYHQYIEEMLPPESPALYGLHPNAEIEFLTVTSNTLFRTLLEMQPRNALSGDELGQSTEEKVKNVLDDILEKLPEEFNMAEIMQKNSNRSPYVLVCFQECERMNILIREIRISLEQLDLSLKGELALSPAVEAQQFALSYDTVPDTWSKLAYPSTYGLAQWFNDLLLRCRELDTWTQDLTLPAVVWLSGFFNPQSFLTAIMQTMARKNEWPLDKTRLTADVTKKTKEDYGHPPREGAYLHGLFMEGARWDTQAGTIVEARLKELACPMPVIFAKATPVDRQETKQTYECPVYRTKLRGPSYIWTFRLKSEEKTAKWVLAGVALLLEA

SEQ ID NO: 55504 - protein, 295 aa, Homo sapiens
  MOD_RES (1)..(1): Any amino acid
XQGSPDPQQTPSRMGREGEGTHSSLGCSSLGMVVIADLSTDPTELEERALEVAGPDGQASAISPASPRRKAADGGHRRALPGCTSLTGETTGESGEAGQDGKPPGDVLVGPTASLALAPGSGESMMGAGDSGHASPDTGPCVNQKQEPGPAQEEAELGGQNLERDLEGFRVSPQASVVLEHREIADDPLQEPGAQQGIPDTTSELAGQRDHLPHSADQGTWADSLAVELDFLLDSQIQDALDASDFEAPPEQLFPSGNKPGPCWPGPSSHANGDPVAVAKAQPRPPVSRPPACCV

SEQ ID NO: 55505 - protein, 42 aa, Homo sapiens
MDRSSKRRQVKPLAASLLEALDYDSSDDSDFKVGDASGLADS

SEQ ID NO: 55506 - protein, 118 aa, Homo sapiens
MAVANSSPVNPVVFFDVSIGGQEVGRMKIELFADVVPKTAENFRQFCTGEFRKDGVPIGYKGSTFHRVIKDFMIQGGDFVNMESRSVAQAGVQWCDLGLLQPPPPGWVQAILVPQPPE

SEQ ID NO: 55507 - protein, 145 aa, Homo sapiens
  MOD_RES (1)..(1): Any amino acid
XQLRLDVEKELEMQISMRQEMELAMKMLEKDVCEKQDALVSLRQQLDDLRALKHELAFKLQSSDLGVKQKSELNSRLEEKTNQMAATIKQLEQSSCGSHPDCARLSEAANLLSWTTGSSNRTLETRSTVCSWKSRSSPGSGTSLS

SEQ ID NO: 55508 - protein, 69 aa, Homo sapiens
  MOD_RES (1)..(1): Any amino acid
XAKQLVRGEPNVSYICSRYYRAPELIFGATDYTSSIELSSNPPLATILIPPHARIQAAASTPTNATAAS

SEQ ID NO: 55509 - protein, 102 aa, Homo sapiens
TFSWASVTSKNLPPSGAVPVTGIPPHVVKVPASQPIMFRGEVRLNVEEKKTRAAREGDRRDNRLRGPGGPRGGLGGGMRGPPRGGMVQKPGFGVGRGLAPRQ

SEQ ID NO: 55510 - protein, 195 aa, Homo sapiens
HFRHLPPYPLPKAPSERRSPERLKHYDDHRHRDHSHGRGERHRSLDRRERGRSPDRRRQDSRYRSDYDRGRTPSRHRSYERSRSYGLSVVPEPAGCTPELPGEIIKNTDSWAPPLEIVNHRSPSREKKRARWEEEKDRWSDNQSSGKDKNYTSIKEKEPEETMPDKNEEEEEELLKPVWIRCTHSENYYSSDPMD

SEQ ID NO: 55511 - protein, 267 aa, Homo sapiens
MWDQRLVRLALLQHLRAFYGIKVKGVRGQCDRRRHETAATEIGGKIFGVPFNALPHSAVPEYGHIPSFLVDACTSLEDHIHTEGLFRKSGSVIRLKALKNKVDHGEGCLSSAPPCDIAGLLKQFFRELPEPILPADLHEALLKAQQLGTEEKNKATLLLSCLLADHTVHVLRYFFNFLRNVSLRSSENKMDSSNLAVIFAPNLLQTSEGHEKMSSNTEKKGVYQILSWKRYQPCWVLMVSVLLHHWKALKKVNMKLLVNIREREDKV

SEQ ID NO: 55512 - protein, 319 aa, Homo sapiens
MLAKVVEGDLAFKGGRDISVSLLTLVVTACGLALFGVSLFVSWKLCWVPWRERGLPSGSKDNNQEPLNYMDTETNEQENSEDFLDPPTPCPDSSMKISHTSPDIPLSTQTGIQENCAHGVRVQRQVTEPTSSARHNSIRRQLNLSNPDFNIQQLQKQEQLTGIGRIKPELYKQRSLDNDDGRRSNSKACGKLNFILKYDCDLEQLIVKIHKAVNLPAKDFSGTSDPYVKIYLLPDRKTKHQTKVHRKTLNPVFDEVFLFPVPYNDLEARKLHFSVYDFDRFSRHDLIGQVVVDHFLDLADFPRECILWKDIEYVTNILS

SEQ ID NO: 55513 - protein, 56 aa, Homo sapiens
MATEEKKPETEAARAQPTPSSSATQSKPTPVKPNYALKFTLAGHTKAVSSVKFSPN

SEQ ID NO: 55514 - protein, 13 aa, Homo sapiens
  MOD_RES (1)..(1): Any amino acid
XLTSSHSKIEDRS

SEQ ID NO: 55515 - protein, 486 aa, Homo sapiens
MSYGEIEGKFLGPREEVTSEPRCKKLKSTTESYVFHNHSNADFHRIQEKTGNDWVPVTIIDVRGHSYLQENKIKTTDLHRPLHDEMPGNRPDVIESIDSQVLQEARPPLVSADDEIYSTSKAFIGPIYKPPEKKKRNEGRNEAHVLNGINDRGGQKEKQKFNSEKSEIDNELFQFYKEIEELEKEKDGFENSCKESEPSQEQFVPFYEGHNNGLLKPDEEKKDLSNKAMPSHCDYQQNLGNEPDKYPCNGQVIPTFCDTSFTSFRPEWQSVYPFIVPYGPPLPSLNYHLNIQRFSGPPNPPSNIFQAQDDSQIQNGYYVNNCHVNWNCMTFDQNNEYTDCSENRSSVHPSGNGCSMQDRYVSNGFCEVRERCWKDHCMDKHNGTDRFVNQQFQEEKLNKLQKLLILLRGLPGSGKTTLSRRNKHGVSRKKIAQMLDRYEYQMSISIVMNSVEPSHKSTQRPPPPQGRQRWGGSLGSHNRVCVTNNH

SEQ ID NO: 55516 - protein, 229 aa, Homo sapiens
MELVRRLMPLTLLILSCLAELTMAEAEGNASCTVSLGGANMAETHKAMILQLNPSENCTWTIERPENKSIRIIFSYVQLDPDGSCESENIKVFDGTSSNGPLLGQVCSKNDYVPVFESSSSTLTFQIVTDSARIQRTVFVFYYFFSPNISIPNCGGYLDTLEGSFTSPNYPKPHPELAYCVWHIQVEKDYKIKLNFKEILLCQFLPGIFCFLHLNLCRKHQHYIFNLLF

SEQ ID NO: 55517 - protein, 173 aa, Homo sapiens
EQDSFIEPYATTSQLRPRPNWQSEMGRRSSLPSFETLDYGDEEDIETQLSSSGKELGDVSAREDRGGHSDDLYAVPHRNQVPLLHEVNSEDDENISHQDGFPGSPPAPQRTQQKDGKHPVLNLKDEKPPLCEKPPPSPGPTLLQDLWGVAFLVGNVCGASVPLPEFLSCVQEE

SEQ ID NO: 55518 - protein, 821 aa, Homo sapiens
MNYIFGNNTLLYSRGSRGGNTSSSHGSAGPKQKHWAKKGSSDELQAEPEPSRWQQIVAFFTRRHSFIDCISVATSSTQPTEAVLPSPPTVPVIPVLPVPAENTVILPTIPQANPPPVLVNTDSLETPTYVNGTDADYEYEEITLERGNSGLGFSIAGGTDNPHIGDDSSIFITKIITGGAAAQDGRLRVNDCILRVNEVDVRDVTHSKAVEALKEAGSIVRLYVKRRKPVSEKIMEIKLIKGPKGLGFSIAGGVGNQHIPGDNSIYVTKIIEGGAAHKDGKLQIGDKLLAVNNVCLEEVTHEEAVTALKNTSDFVYLKVAKPTSMYMNDGYAPPDITNSSSQPVDNHVSPSSFLGQTPASPARYSPVSKAVLGDDEITREPRKVVLHRGSTGLGFNIVGGEDGEGIFISFILAGGPADLSGELRKGDRIISVNSVDLRAASHEQAAAALKNAGQAVTIVAQYRPEEYSRFEAKIHDLREQMMNSSISSGSGSLRTSQKRSLYVRALFDYDKTKDSGLPSQGLNFKFGDILHVINASDDEWWQARQVTPDGESDEVGVIPSKRRVEKKERARLKTVKFNSKTRDKGEIPDDMGSKGLKHVTSNASDSESSYRGQEEYVLSYEPVNQQEVNYTRPVIILGPMKDRINDDLISEFPDKFGSCVPHTTRPKRDYEVDGRDYHFVTSREQMEKDIQEHKFIEAGQYNNHLYGTSVQSVREVAEKGKHCILDVSGNAIKRLQIAQLYPISIFIKPKSMENIMEMNKRLTEEQARKTFERAMKLEQEFTEHFTAIVQGDTLEDIYNQVKQIIEEQSGSYIWVPAKEKL

SEQ ID NO: 55519 - protein, 192 aa, Homo sapiens
MLRFLGEKAAAKRQVLNADSVEQSFVGLKQLISCRNWRAAVDLCGRLLTAHGQGYGKSGLLTSHTTDSLQLWFVRLALLVKLGLFQNAEMEFEPFGNLDQPDLYYEYYPHVYPGRRGSMVPFSMRILHAELQQYLGNPQESLDRLHKVKTVCSKILANLEQGLAEDGGMSSVTQEGRQASIRLWRSRLGRVM

SEQ ID NO: 55520 - protein, 123 aa, Homo sapiens
MPNNSTALSLANVTYITMEIFIGLCAIVGNVLVICVVKLNPSLQTTTFYFIVSLALADIAVGVLVMPLAIVVSLGITIHFYSCLFMTCLLLIFTHASIMSLLAIAVDRYLRVKLTVSSISPTL

SEQ ID NO: 55521 - protein, 157 aa, Homo sapiens
MKQTKLEIQKALAEDATVYEYDSIYDEMQKKKEENNPKLLLGKDRKPKYIHNLLKAVEIRKKEQEKRMEKKIQREREMEKGEFDDKEAFVTSAYKKKLQERAEEEEREKRAAALEACLDVTKQKDLSGFYRHLLNQAVGEEEVPKCSFREARSGIKE

SEQ ID NO: 55522 - protein, 390 aa, Homo sapiens
MRWRTILLQYCFLLITCLLTALEAVPIDIDKTKVQNIHPVESAKIEPPDTGLYYDEYLKQVIDVLETDKHFREKLQKADIEEIKSGRLSKELDLVSHHVRTKLDELKRQEVGRLRMLIKAKLDSLQDIGMDHQALLKQFDHLNHLNPDKFESTDLDMLIKAATSDLEHYDKTRHEEFKKYEMMKEHERREYLKTLNEEKRKEEESKFEEMKKKHENHPKVNHPGSKDQLKEVWEETDGLDPNDFDPKTFFKLHDVNSDGFLDEQELEALFTKELEKVYDPKNEEDDMVEMEEERLRMREHVMNETLDQQQFFTEEELKEYENIIALQENELKKKADELQKQKEELQRQHDQLEAQKLEYHQVIQQMEQKKLQQGIPPSGPAGELKFEPHI

SEQ ID NO: 55523 - protein, 196 aa, Homo sapiens
MIVETEKCSISMKMASPEDVSEVLAHIGTCLRKIFPGLSPVRIMKKVSMEPSERLASLQALWDSQTVAEQGPCGGFSQMYACVCDWLGFSYREEVQWDVDTIYLTQDTRELNLQDFSHLDHRKSRIAVWSLKSSSQLNRPGKKYTSWIYLLFAQPGTTEDGEAGSAVSVVVADGPKASSSQAIFFFSCLEQFSFFL

SEQ ID NO: 55524 - protein, 236 aa, Homo sapiens
MANPKLLGMGLSEAEAIGADSARFEELLLQASKELQQAQTTRPESTQIQPQPGFCIKTNSSEGKVFINICHSPSIPPPADVTEEELLQMLEEDQAGFRIPMSLGEPHAELDASQCPQRTQESGPLGPFFPRTQESWAQDPPPSAPGDLAPRSDSFPYEGQGCTAYDVAVNSDFYRRMQNSDFLRELVITIAREGLEDKYNLQLNPEWRMMKNRPFMGSISQQNIRSEQRPRIQELG

SEQ ID NO: 55525 - protein, 291 aa, Homo sapiens [sequence omitted]

SEQ ID NO: 55526 - protein, 98 aa, Homo sapiens
MLDHEQVTPEDPGAQFLIRTGSVGRNRAEASLERAQNLNPMVDVKVDTEDIEKKPESFFTQFDAVCLTCCSRDVIVKVDQICHKNSIKFFTGDVFGYH

SEQ ID NO: 55527 - protein, 846 aa, Homo sapiens
MEQLVKERKGVQAREKQPAEPPAPLRRRAASDGQYENQSPEATSPRSPGVRSPVQCVSPELALTIALNPGGRPKEPHLHSYKEAFEEMEGTSPSSPPPSGVRSPPGLAKTPLSALGLKPHNPADILLHPTGEPRSYVESVARTAVAGPRAQDSEPKSFSAPATQAYGHEIPLRNGTLGGSFVSPSPLSTSSPILSADSTSVGSFPSGESSDQGPRTPTQPLLESGFRSGSLGQPSPSAQRNYQSSSPLPTVGSSYSSPDYSLQHFSSSPESQARAQFSVAGVHTVPGSPQARHRTVGTNTPPSPGFGWRAINPSMAAPSSPSLSHHQMMGPPGTGFHGSTVSSPQSSAATTPGSPSLCRHPAGVYQVSGLHNKVATTPGSPSLGRHPGAHQGNLASGLHSNAIASPGSPSLGRHLGGSGSVVPGSPCLDRHVAYGGYSTPEDRRPTLSRQSSASGYQAPSTPSFPVSPAYYPGLSSPATSPSPDSAAFRQGSPTPALPEKRRMSVGDRAGSLPNYATINGKVSSPVASGMSSPSGGSTVSFSHTLPDFSKYSMPDNSPETRAKVKFVQDTSKYWYKPEISREQAIALLKDQEPGAFIIRDSHSFRGAYGLAMKVSSPPPTIMQQNKKGDMTHELVRHFLIETGPRGVKLKGCPNEPNFGSLSALVYQHSIIPLALPCKLVIPNRDPTDESKDSSGPANSTADLLKQGAACNVLFVNSVDMESLTGPQAISKATSETLAADPTPAATIVHFKVSAQGITLTDNQRKLFFRRHYPLNTVTFCDLDPQERKWMKTEGGAPAKLFGFVARKQGSTTDNACHLFAELDPNQPASAIVNFVSKVMLNAGQKR

SEQ ID NO: 55528 - protein, 888 aa, Homo sapiens
MGLPEPGPLRLLALLLLLLLLLLLQLQHLAAAAADPLLGGQGPAKDCEKDQFQCRNERCIPSVWRCDEDDDCLDHSDEDDCPKKTCADSDFTCDNGHCIHERWKCDGEEECPDGSDESEATCTKQVCPAEKLSCGPTSHKCVPASWRCDGEKDCEGGADEAGCATLCAPHEFQCGNRSCLAAVFVCDGDDDCGDGSDERGCADPACGPREFRCGGDGGGACIPERWVCDRQFDCEDRSDEAAELCGRPGPGATSAPAACATASQFACRSGECVHLGWRCDGDRDCKDKSDEADCPLGTCRGDEFQCGDGTCVLAIKHCNQEQDCPDGSDEAGCLQGLNECLHNNGGCSHICTDLKIGFECTCPAGFQLLDQKTCGDIDECKDPDACSQICVNYKGYFKCECYPGYEMDLLTKNCKAAAGKSPSLIFTNRHEVRRIDLVKRNYSRLIPMLKNVVALDVEVATNRIYWCDLSYRKIYSAYMDKASDPKEQEVLIDEQLHSPEGLAVDWVHKHIYWTDSGNKTISVATVDGGRRRTLFSRNLSEPRAIAVDPLRGFMYWSDWGDQAKIEKSGLNGVDRQTLVSDNIEWPNGITLDLLSQRLYWVDSKLHQLSSIDFSGGNRKTLISSTDFLSHPFGIAVFEDKVFWTDLENEAIFSANRLNGLEISILAENLNNPHDIVIFHELKQPRAPDACELSVQPNGGCEYLCLPAPQISSHSPKYTCACPDTMWLGPDMKRCYRAPQSTSTTTLASTMTRTVPATTRAPGTTVHRSTYQNHSTETPSLTAAVPSSVSVPRAPSISPSTLSPATSNHSQHYANEDSKMGSTVTAAVIGIIVPIETRRSCTLAQAGVQWCDHSSLHPRTPGLKGFSCLSIPSSWDYRHAPPHLANFLN

SEQ ID NO: 55529 - protein, 280 aa, Homo sapiens
MASNHKSSAARPVSRGGVGLTGRPPSGIRPLSGNIRVATAMPPGTARPGSRGCPIGTGGVLSSQIKVAHRPVTQQGLTGMKTGTKGPQRQILDKSYYLGLLRSKISELTTEVNKLQKGIEMYNQENSVYLSYEKRAETLAVEIKELQGQLADYNMLVDKLNTNTEMEEVMNDYNMLKAQNDRETQSLDVIFTERQAQKLKLRTTIGQVQWLMPVIPALLEAEVGGSPEVRSSRPAWAMWRNSVSTKNIKISWVRWQVPVIPATQEAEARESLEPRRRRVQ

SEQ ID NO: 55530 - protein, 740 aa, Homo sapiens [sequence omitted]

SEQ ID NO: 55531 - protein, 186 aa, Homo sapiens
MNHTVQTFFSPVNSGQPPNYEMLKEEHEVAVLGAPHNPAPPTSTVIHIRSETSVPDHVVWSLFNTLFMNPCCLGFIAFAYSVKGQEDGWRRDRGPGLCLHRQVPEHLGPDSGHPHDHSAHRHPSADLPGLWIDQEASLRPGALPMTCIPRTPTSIPRPAPGAESCISPLSSHAFLQWHSIKCTCFW

SEQ ID NO: 55532 - protein, 373 aa, Homo sapiens
  MOD_RES (1)..(1): Any amino acid
XEDSVIVVLIAETDSQYTSAVTENIKALFPTEIHSGLLEVISPSPHFYPDFSRLRESFGDPKERVRWRTKQNLDYCFLMMYAQSKGIYYVQLEDDIVAKPNYLSTMKNFALQQPSEDWMILEFSQLGFIGKMFKSLDLSLIVEFILMFYRDKPIDWLLDHILWVKVCNPEKDAHCDRQKANLRIRFKPSLFQHVGTHSSLAGKIQKLKDKDFGKQALRKEHVNPPAEVSTSLKTYQHFTLEKAYLREDFFWAFTPAAGDFIRFRFFQPLRLERFFFRSGNIEHPEDKLFNTSVEVLPFDNPQSDKEALQEGRTATLRYPRSPDGYLQIGSFYKGVAEGEVDPAFGPLEALRLSIQTDSPVWVILSEIFLKKAD

SEQ ID NO: 55533 - protein, 238 aa, Homo sapiens
  MOD_RES (1)..(1): Any amino acid
XVLPQLSAGPASSSTSTVRLLEWTEAAAPPPGGGLRFRISEYKPLNMAGVEQPPSPELRQEGVTEYEDGGAPAGDGEAGPQQAEDHPQNPPEDPNQDPPEDDSTCQCQACGPHQAAGPDLGSSNDGCPQLFQERSVIVENSSGSTSASELLKPMKKRKRREYQSPSEEESEPEAMEKQEEGKDPEGQPTASTPESEEWSSSQPATGEKKECWSWESYLEEQKAITAPVSLFQDPTRQG

SEQ ID NO: 55534 - protein, 162 aa, Homo sapiens
  MOD_RES (1)..(1): Any amino acid
XQYLDPAQRGVRVLEVASGSGQHAAHFARAFPLAEWQPSDVDQRCLDSIAATTQAQGLTNVKAPLHLDVTWGWEHWGGILPQSLDLLLCINMAHVSPLRCTEGLFRAAGHLLKPRALLITYGEPRMGASGHSPPGGPGKGQWPAPGEDGRWGSGGPGNLSRG

SEQ ID NO: 55535 - protein, 108 aa, Homo sapiens
MAKAFKPVMSIPVSEHPDTEAALRAVSENETADNSFSQEEEPVVAGEDLPPPSPQESDVQPVQPEEVSARDFLQRLDLQIKLSTQAAKKLKEESRDEESPYATSLYHS

SEQ ID NO: 55536 - protein, 182 aa, Homo sapiens
MDLYSTPAAALDRFVARRLQPRKEFVEKARRALGALAAALRERGGRLGAAAPRVLKTVKGGSSGRGTALKGGCDSELVIFLDCFKSYVDQRARRAEILSEMRASLESWWQNPVPGLRLTFPEQSVPGALQFRLTSVDLEDWMDVSLVPAFNVLGVPTGVVEGDAAPGLCPGIADHLRLGAGL

SEQ ID NO: 55537 - protein, 293 aa, Homo sapiens
MQWLNTMKELALGVRTSKTCTFSAAMTTMQGMEQAMPGAGPGVPQLGNMAVIHSHLWKGLQEKFLKGEPKVLGVVQILTALMSLSMGITMMCMASNTYGSNPISVYIGYTIWGSVMFIISGSLSIAAGIRTTKGLVRGSLGMNITSSVLAASGILINTFSLAFYSFHHPYCNYYGNSNNCHGTMSILMGLDGMVLLLSVLEFCIAVSLSAFGCKVLCCTPGGGKIKHYASIQVFISRERKKERRKERKEKERKRKKEKRREGKKEGRKERNFQCRALHDRFQNSTLHSFFFTL

SEQ ID NO: 55538 - protein, 101 aa, Homo sapiens
MSHHWGYGKHNGPEHWHKDFPIAKGERQSPVDIDTHTAKYDPSLKPLSVSYDQATSLRILNNGHAFNVEFDDSQDKAEKGISMLRKKDVKNIHSPDNACEE

SEQ ID NO: 55539 - protein, 129 aa, Homo sapiens
MRPGEKAHKEKPNQPAPRPPRQGPTNEAQMAAAAALARLEQKQSRAWGPTSQDTIRNQVRKELQAEATVSGSPEAPGTNVVSEPREEGSAHLAVPGVYFTCPLTGATLRKDQRDACIKEAILLHFSTDP

SEQ ID NO: 55540 - protein, 9 aa, Homo sapiens
MTCPDKPGQ

SEQ ID NO: 55541 - protein, 448 aa, Homo sapiens
MPRVKAAQAGRQSSAKRHLAEQFAVGEIITDMAKKEWKVGLPIGQGGFGCIYLADMNSSESVGSDAPCVVKVEPSDNGPLFTELKFYQRAAKPEQIQKWIRTRKLKYLGVPKYWGSGLHDKNGKSYRFMIMDRFGSDLQKIYEANAKRFSRKTVLQLSLRILDILEYIHEHEYVHGDIKASNLLLNYKNPDQVYLVDYGLAYRYCPEGVHKEYKEDPKRCHDGTIEFTSIDAHNGVAPSRRGDLEILGYCMIQWLTGHLPWEDNLKDPKYVRDSKIRYRENIASLMDKCFPEKNKPGEIAKYMETVKLLDYTEKPLYENLRDILLQGLKAIGSKDDGKLDLSVVENGGLKAKTITKKRKKEIEESKEPGVEDTEWSNTQTEEAIQTLRSPKEQYIEACLSQRLAAAAMTVQEPERESRSNSDAVNQISFSLFSFDFFLLFYLNCFIFL

SEQ ID NO: 55542 - protein, 65 aa, Homo sapiens
MEIIRSNFKSNLHKVYQAIEEADFFAIDGEFSGISDGPSVSALTNGFDTPEERYQKLKKRSVSLC

SEQ ID NO: 55543 - protein, 63 aa, Homo sapiens
MQAMEGEVLLPALYEEEEEEEEEEEEVEEEEEQVQKGGSVGSLSVNKHRGLSLTETELEELRA

SEQ ID NO: 55544 - protein, 93 aa, Homo sapiens
MIEYQIPVSFKDVVVGFTQEEWHRLSPAQRALYRDVMLETYSNLVSVGYEGTKPDVILRLEQEEAPWIGEAACPGCHCWGISKLWPTDWPPAL

SEQ ID NO: 55545 - protein, 50 aa, Homo sapiens
MDEDGLPLMGSGIDLTKVPAIQQKRTVAFLNQFVVHTVQFLNRFSTVCEE

SEQ ID NO: 55546 - protein, 334 aa, Homo sapiens
MFNRKFMEELFKPQELYSKKALRTVYERLAHASIMKLNQASMDKLYDLMTMAFKYQVLLCPRPKDVLLVTFNHLDTIKGFIRDSPTILQQVDETLRQLTEIYGGLSAGEFQLIRQTLLIFFQDLHIRVSMFLKDKVQNNNGRFVLPVSGPVPWGTEVPGLIRMFNNKGEEVKRIEFKHGGNYVPAPKEGSFELYGDRVLKLGTNMYSVNQPVETHVSGSSKNLASWTQESIAPNPLAKEELNFLARLMGGMEIKKPSGPEPGFRLNLFTTDEEEEQAALTRPEELSYEVINIQATQDQQRSEELARIMGEFEITEQPRLSTSKGDDLLAMMDEL

SEQ ID NO: 55547 - protein, 97 aa, Homo sapiens
MSVKGCFTDFHIDFGGTSVWYHVFRGGKIFWLIPPTLHNLALYEEWVLSGKQSDIFLGDRVERCQRIELKQGYTFFIPSGWIHAVYTPVDSLVFGGN

SEQ ID NO: 55548 - protein, 50 aa, Homo sapiens
MKLWVSALLMAWFGVLSCVQAEFFTSIGHMTDLIYAEKELVQSLKEYILV

SEQ ID NO: 55549 - protein, 110 aa, Homo sapiens
MIDIQKDTAVEGEEIEVNCTAMASKPATTIRWFKGNTELKGKSEVEEWSDMYTVTSQLMLKVHKEDDGVPVICQVEHPAVTGNLQTQRYLEVQYKPQVHIQMTYPLQGLT

SEQ ID NO: 55550 - protein, 334 aa, Homo sapiens
MARRGPGWRPLLLLVLLAGAAQGGLYFRRGQTCYRPLRGDGLAPLGRSTYPRPHEYLSPADLPKSWDWRNVDGVNYASITRNQHIPQYCGSCWAHASTSAMADRINIKRKGAWPSTLLSVQNVIDCGNAGSCEGGNDLSVWDYAHQHGIPDETCNNYQAKDQEMRSRSVVQAGLRLLVSSHLPASASRSAGITECDKFNQCGTCNEFKECHAIRNYTLWRVGDYGSLSGREKMMAEIYANGPISCGIMATERLANYTGGIYAEYQDTTYINHVVSVAGWGISDGTEYWIVRNSWGEPWGERGWLRIVTSTYKDGKGARYNLAIEEHCTFGDPIV

SEQ ID NO: 55551 - protein, 115 aa, Homo sapiens
MFCHLRPMRRLCLEKIFPHWFPFSRALSGAEAVNALRPFYFAVHPDFFGQHPVEREINENSLKRLSVYLENLQKPGFKSLKPTQLTFYVRETDQSSSDGQEPFSTSGLQMEGGRA

SEQ ID NO: 55552 - protein, 1478 aa, Homo sapiens
MEAGSGPPGGPGSESPNRAVEYLLELNNIIESQQQLLETQRRRIEELEGQLDQLTQENRDLREESQLHRGELHRDPHGARDSPGRESQYQNLRETQFHHRELRESQFHQAARDVGYPNREGAYQNREAVYRDKERDASYPLQDTTGYTARERDVAQCHLHHENPALGRERGGREAGPAHPGREKEAGYSAAVGVGPRPPRERGQLSRGASRSSSPGAGGGHSTSTSTSPATTLQRNVEGDAPGSDLSTAVDSPGSQPPYRLSQLPPSSSHMGGPPAGVGLPWAQRARLQPASVALRKQEEEEIKRSKALSDSYELSTDLQDKKVEMLERKYGGSFLSRRAARTIQTAFRQYRMNKNFERLRSSASESRMSRRIILSNMRMQFSFEEYEKAQNPAYFEGKPASLDEGAMAGARSHRLERGLPYGGSCGGGIDGGGSSVTTSGEFSNDITELEDSFSKQVKSLAESIDEALNCHPSGPMSEEPGSAQLEKRESKEQQEDSSATSFSDLPLYLDDTVPQQSPERLPSTEPPPQGRPEFWAPAPLPPVPPPVPSGTREDGSREEGTRRGPGCLECRDFRLRAAHLPLLTIEPPSDSSVDLSDRSDRGSVHRQLVYEADGCSPHGTLKHKGPPGRAPIPHRHYPAPEGPAPAPPGPLPPAPNSGTGPSGVAGGRRLGKCEAAGENSDGGDNESLESSSNSNETINCSSGSSSRDSLREPPATGLCKQTYQRETRHSWDSPAFNNDVVQRRHYRIGLNLFNKKPEKGIQYLIERGFLSDTPVGVAHFILERKGLSRQMIGEFLGNRQKQFNRDVLDCVVDEMDFSSMDLDDALRKFQSHIRVQGEAQKVERLIEAFSQRYCVCNPALVRQFRNPDTIFILAFAIILLNTDMYSPSVKAERKMKLDDFIKNLRGVDNGEDIPRDLLVGIYQRIQGRELRTNDDHVSQVQAVERMIVGKKPVLSLPHRRLVCCCQLYEVPDPNRPQRLGLHQREVFLFNDLLVVTKIFQKKKILVTYSFRQSFPLVEMHMQLFQNSYYQFGIKLLSAVPGGERKVLIIFNAPSLQDRLRFTSDLRESIAEVQEMEKYRVESELEKQKGMMRPNASQPGGAKDSVNGTMARSSLEDTYGAGDGLKRGALSSSLRDLSDAGKRGRRNSVGSLDSTIEGSVISSPRPHQRMPPPPPPPPPEEYKSQRPVSNSSSFLGSLFGSKRGKGPFQMPPPPTGQASASSSSASSTHHHHHHHHHGHSHGGLGVLPDGQSKLQALHAQYCQGPGPAPPPYLPPQQPSLPPPPQQPPPLPQLGSIPPPPASAPPVGPHRHFHAHGPVPGPQHYTLGRPGRAPRRGAGGHPQFAPHGRHPLHQPTSPLPLYSPAPQHPPAHKQGPKHFIFSHHPQMMPAAGAAGGPGSRPPGGSYSHPHHPQSPLSPHSPIPPHPSYPPLPPPSPHTPHSPLPPTSPHGPLHASGPPGTANPPSANPKAKPSRISTVV

SEQ ID NO: 55553 - protein, 126 aa, Homo sapiens
MIEVQHKQCLEEAQLENETIGCSKMWDNLTCWPATPRGQVVVLACPLIFKLFSSIQGRNVSRSCTDEGWTHLEPGPYPIACGLDDKAASLDEQQTMFYGSVKTGYTIGYGLSLATLLVATAILSLF

SEQ ID NO: 55554 - protein, 43 aa, Homo sapiens
MARGPLAARGLRLLLPLLPLLPLLPLPQVALGFADGSCDPSDQ

SEQ ID NO: 55555 - protein, 133 aa, Homo sapiens
MRQRLLPSVTSLLLVALLFPGSSQARHVNHSATEALGELRERAPGQGTNGFQLLRHAVKRDLLQPRTPPYQGDVPPGIRNTICHMQQGICRLFFCHSGEKKRDICSDPWNRCCVSNTDEEGKEKPEMDGRSGI

SEQ ID NO: 55556 - protein, 66 aa, Homo sapiens
MEVPNVKDFQWKRLAPLPSRRVYCSLLETGGQVYAIGGCDDNGVPMDCFEVYSPEADQWTALPRLP

SEQ ID NO: 55557 - protein, 95 aa, Homo sapiens
MTEEACRTRSQKRALERDPTEDDVESKKIKMERGLLASDLNTDGDMRVTPEPGAGPTQGLLRATEATAMAMGRGEGLVGDGPVDMRTSHSPPQHH

SEQ ID NO: 55558 - protein, 59 aa, Homo sapiens
MVSDLVIILNYDRAVEAFAKGGNLTLGGNLTVAVGPLGRNLEGNVALRSSAAVFTYCKS

SEQ ID NO: 55559 - protein, 200 aa, Homo sapiens
MAAGFGRCCRVLRSISRFHWRSQHTKANRQREPGLGFSFEFTEQQKEFQATARKFAREEIIPVAAEYDKTGEYPVPLIRRAWELGLMNTHIPENCGGLGLGTFDACLISEELAYGCTGVQTAIEGNSLGQMPIIIAGNDQQKKKYLGRMTEEPLMCAYCVTEPGAGSDVAGIKTKAEKKGDEYIINGQKMWITNGGKANW

SEQ ID NO: 55560 - protein, 92 aa, Homo sapiens
MAAATAAAALAAADPPPAMPQAAGAGGPTTRRDFYWLRSFLAGEEEEFTSNRTWQSDKYLQVSVSVKMFQKKRRLLQTEPGSWINTLKCLSP

SEQ ID NO: 55561 - protein, 498 aa, Homo sapiens
MTPIVTVLICLGTIPKPTLWAEPDSVITQGSPVTLSCQGSLEAQEYRLYREKKSASWITRIRPELVKNGQFHIPSITWEHTGRYGCQYYSRARWSELSDPLVLVMTGAYPKPTLSAQPSPVVTSGGRVTLQCESQVAFGGFILCKEGEEEHPQCLNSQPHARGSSRAIFSVGPVSPNRRWSHRCYGYDLNSPYVWSSPSDLLELLVPGVSKKPSLSVQPGPVVAPGESLTLQCVSDVGYDRFVLYKEGERDLRQLPGRQPQAGLSQANFTLGPVSRSYGGQYRCYGAHNLSSECSAPSDPLDILITGQIRGTPFISVQPGPTVASGENVTLLCQSWRQFHTFLLTKAGAADAPLRLRSIHEYPKYQAEFPMSPVTSAHAGTYRCYGSLNSDPYLLSHPSEPLELVVSGPSMGSSPPPTGPISTPAGPEDQPLTPTGSDPQSGLGRHLGVVIGILVAVVLLLLLLLLLFLILRHRRQGKHWTSSPAQLPTPRKKTSMLP

SEQ ID NO: 55562 - protein, 119 aa, Homo sapiens
MMKGEFYVIEYAACDATYNEIVTFERLRPVNQNKTVKKNTFFKCTVDVPEDLREACANENAHKDFKKAVGACRIFYHPETTQLMILSASEATVKRVNILSDMHLRSIRTKLMLMSRNEE

SEQ ID NO: 55563 - protein, 248 aa, Homo sapiens
  MOD_RES (1)..(1): Any amino acid
XEFTHLEFPRRVLPKELGQRMLYRDQNMTGWAYKKIELEDLRFPLVCGEGKKARVMATIGVTRGLGDHSLKVCSSTLPIKPFLSCFPEVRVYDLTQYEHCPDDVLVLGTDGLWDVTTDCEVAATVDRVLSAYEPNDHSSPTMAAIRKKLVIVGDGACGKTCLLIVFSKDQFPEVYVPTVFENYIADIEVDGKQVELALWDTAGQEDYDRLRPLSYPDTDVILMCFSIDSPDSLENIPEKWTPEVKHFC

SEQ ID NO: 55564 - protein, 368 aa, Homo sapiens
MDGSHSAALKLQQLPPTSSSSAVSEASFSYKENLIGALLAIFGHLVVSIALNLQKYCHIRLAGSKDPRAYFKTKTWWLGLFLMLLGELGVFASYAFAPLSLIVPLSAVSVIASAIIGIIFIKEKWKPKDFLRRYVLSFVGCGLAVVGTYLLVTFAPNSHEKMTGENVTRHLVSWPFLLYMLVEIILFCLLLYFYKEKNANNIVVILLLVALLGSMTVVTVKAVAGMLVLSIQGNLQLDYPIFYVMFVCMVATAVYQAAFLSQASQMYDSSLIASVGYILSTTIAITAGAIFYLDFIGEDVLHICMFALGCLIAFLGVFLITRNRKKPIPFEPYISMDAMPDSYLHNRQLLFKRYSNSRNLPHHNLESL

SEQ ID NO: 55565 - protein, 121 aa, Homo sapiens
MPNIKIFSGSSHQDLSQKIADRLGLELGKVVTKKFSNQETCVEIGESVRGEDVYIVQSGCGEINDNLMELLIMINACKIASASRVTAVIPCFPYARQDKKDKSRAPISAKLVANMLSVAGD

SEQ ID NO: 55566 - protein, 444 aa, Homo sapiens
MSLMVVSMACVGLFLVQRAGPHMGGQDKPFLSAWPSAVVPRGGHVTLRCHYHHRFNNFMLYKEDGIHIPIFHGRIFQESFNMSPVTTAHAGNYTCRGSHPHSPTGWSAPSNPVVIMVTGNHRKPSLLAHPGPLVKSGERVILQCWSDIMFEHFFLHKEGISKDPSRLVGQIHDGVSKANFSIGPMMLALAGTYRCYGSVTHTSYQLSAPSDPLDIVVTGPYEKPSLSAQPGPKVQAGESVTLSCSSRSSYDMYHLSREGGAHERRLPAVRKVNRTFQADFPLGPATHGGTYRCFGSFRHSPYELSDPSDPLLVSVTGNPSSSWPSPTEPSSKSGNPRHLHVLIGTSVVIILFILLLFFLLHLWYSNKKNAAVMDQEPAGNRTANSEDSDEQDPQEVTYAQLDHCVFTQRKITRPSQRPKTPPTDTILYTELPNAKPRSKVVSCP

SEQ ID NO: 55567 - protein, 60 aa, Homo sapiens
  MOD_RES (1)..(1): Any amino acid
XESAPKEVSRFWRQRSPRSRCLHLARTFLLHHPMAEGGRARDHALEREEVPRYEYAGSCI

SEQ ID NO: 55568 - protein, 67 aa, Homo sapiens
MEPLVTWVVPLLFLFLLSRQGAACRTSECCFQDPPYPDADSGSASGPRDLRCYRISSDRYECSWQYE

SEQ ID NO: 55569 - protein, 3923 aa, Homo sapiens
MEDEERQKKLEAGKAKLAQFRQRKAQSDGQSPSKKQKKKRKTSSSKHDVSAHHDLNIDQSQCNEMYINSSQRVESTVIPESTIMRTLHSGEITSHEQGFSVELESEISTTADDCSSEVNGCSFVMRTGKPTNLLREEEFGVDDSYSEQGAQDSPTHLEMMESELAGKQHEIEELNRELEEMRVTYGTEGLQQLQEFEAAIKQRDGIITQLTANLQQARREKDETMREFLELTEQSQKLQIQFQQLQASETLRNSTHSSTAADLLQAKQQILTHQQQLEEQDHLLEDYQKKKEDFTMQISFLQEKIKVYEMEQDKKVENSNKEEIQEKETIIEELNTKIIEEEKKTLELKDKLTTADKLLGELQEQIVQKNQEIKNMKLELTNSKQKERQSSEEIKQLMGTVEELQKRNHKDSQFETDIVQRMEQETQRKLEQLRAELDEMYGQQIVQMKQELIRQHMAQMEEMKTRHKGEMENALRSYSNITVNEDQIKLMNVAINELNIKLQDTNSQKEKLKEELGLILEEKCALQRQLEDLVEELSFSREQIQRARQTIAEQESKLNEAHKSLSTVEDLKAEIVSASESRKELELKHEAEVTNYKIKLEMLEKEKNAVLDRMAESQEAELERLRTQLLFSHEEELSKLKEDLEIEHRINIEKLKDNLGIHYKQQIDGLQNEMSQKIETMQFEKDNLITKQNQLILEISKLKDLQQSLVNSKSEEMTLQINELQKEIEILRQEEKEKGTLEQEVQELQLKTELLEKQMKEKENDLQEKFAQLEAENSILKDEKKTLEDMLKIHTPVSQEERLIFLDSIKSKSKDSVWEKEIEILIEENEDLKQQCIQLNEEIEKQRNTFSFAEKNFEVNYQELQEEYACLLKVKDDLEDSKNKQELEYKSKLKALNEELHLQRINPTTVKMKSSVFDEDKTFVAETLEMGEVVEKDTTELMEKLEVTKREKLELSQRLSDLSEQLKQKHGEISFLNEEVKSLKQEKEQVSLRCRELEIIINHNRAENVQSCDTQVSSLLDGVVTMTSRGAEGSVSKVNKSFGEESKIMVEDKVSFENMTVGEESKQEQLILDHLPSVTKESSLRATQPSENDKLQKELNVLKSEQNDLRLQMEAQRICLSLVYSTHVDQVREYMENEKDKALCSLKEELIFAQEEKIKELQKIHQLELQTMKTQETGDEGKPLHLLIGKLQKAVSEECSYFLQTLCSVLGEYYTPALKCEVNAEDKENSGDYISENEDPELQDYRYEVQDFQENMHTLLNKVTEEYNKLLVLQTRLSKIWGQQTDGMKLEFGEENLPKEETEFLSIHSQMTNLEDIDVNHKSKLSSLQDLEKTKLEEQVQELESLISSLQQQLKETEQNYEAEIHCLQKRLQAVSESTVPPSLPVDSVVITESDAQRTMYPGSCVKKNIDGTIEFSGEFGVKEETNIVKLLEKQYQEQLEEEVAKVIVSMSIAFAQQTELSRISGGKENTASSKQAHAVCQQEQHYFNEMKLSQDQIGFQTFETVDVKFKEEFKPLSKELGEHGKEILLSNSDPHDIPESKDCVLTISEEMFSKDKTFIVRQSIHDEISVSSMDASRQLMLNEEQLEDMRQELVRQYQEHQQATELLRQAHMRQMERQREDQEQLQEEIKRLNRQLAQRSSIDNENLVSERERVLLEELEALKQLSLAGREKLCCELRNSSTQTQNGNENQGEVEEQTFKEKELDRKPEDVPPEILSNERYALQKANNRLLKILLEVVKTTAAVEETIGRHVLGILDRSSKSQSSASLIWRSEAEASVKSCVHEEHTRVTDESIPSYSGSDMPRNDINMWSKVTEEGTELSQRLVRSGFAGTEIDPENEELMLNISSRLQAAVEKLLEAISETSSQLEHAKVTQTELMRESFRQKQEATESLKCQEELRERLHEESRAREQLAVELSKAEGVIDGYADEKTLFERQIQEKTDIIDRLEQELLCASNRLQELEAEQQQIQEERELLSRQKEAMKAEAGPVEQQLLQETEKLMKEKLEVQCQAEKVRDDLQKQVKALEIDVEEQVSRFIELEQEKNTELMDLRQQNQALEKQLEKMRKFLDEQAIDREHERDVFQQEIQKLEQQLKVVPRFQPISEHQTREVEQLANHLKEKTDKCSELLLSKEQLQRDIQERNEEIEKLEFRVRELEQALLVSADTFQKVEDRKHFGAVEAKPELSLEVQLQAERDAIDRKEKEITNLEEQLEQFREELENKNEEVQQLHMQLEIQKKESTTRLQELEQENKLFKDDMEKLGLAIKESDAMSTQDQHVLFGKFAQIIQEKEVEIDQLNEQVTKLQQQLKITTDNKVIEEKNELIRDLETQIECLMSDQECVKRNREEEIEQLNEVIEKLQQELANIGQKTSMNAHSLSEEADSLKHQLDVVIAEKLALEQQVETANEEMTFMKNVLKETNFKMNQLTQELFSLKRERESVEKIQSIPENSVNVAIDHLSKDKPELEVVLTEDALKSLENQTYFKSFEENGKGSIINLETRLLQLESTVSAKDLELTQCYKQIKDMQEQGQFETEMLQKKIVNLQKIVEEKVAAALVSQIQLEAVQEYAKFCQDNQTISSEPERTNIQNLNQLREDELGSDISALTLRISELESQVVEMHTSLILEKEQVEIAEKNVLEKEKKLLELQKLLEGNEKKQREKEKKRSPQDVEVLKTTTELFHSNEESGFFNELEALRAESVATKAELASYKEKAEKLQEELLVKETNMTSLQKDLSQVRDHLAEAKEKLSILEKEDETEVQESKKACMFEPLPIKLSKSIASQTDGTLKISSSNQTPQILVKNAGIQINLQSECSSEEVTEIISQFTEKIEKMQELHAAEILDMESRHISETETLKREHYVAVQLLKEECGTLKAVIQCLRSKEGSSIPELAHSDAYQTREICSSDSGSDWGQGIYLTHSQGFDIASEGRGEESESATDSFPKKIKGLLRAVHNEGMQVLSLTESPYSDGEDHSIQQVSEPWLEERKAYINTISSLKDLITKMQLQREAEVYDSSQSHESFSDWRGELLLALQQVFLEERSVLLAAFRTELTALGTTDAVGLLNCLEQRIQEQGVEYQAAMECLQKADRRSLLSEIQALHAQMNGRKITLKREQESEKPSQELLEYNIQQKQSQMLEMQVELSSMKDRATELQEQLSSEKMVVAELKSELAQTKLELETTLKAQHKHLKELEAFRLEVKDKTDEVHLLNDTLASEQKKSRELQWALEKEKAKLGRSEERDKEELEDLKFSLESQKQRNLQLNLLLEQQKQLLNESQQKIESQRMLYDAQLSEEQGRNLELQVLLESEKVRIREMSSTLDRERELHAQLQSSDGTGQSRPPLPSEDLLKELQKQLEEKHSRIVELLNETEKYKLDSLQTRQQMEKDRQVHRKTLQTEQEANTEGQKKMHELQSKVEDLQRQLEEKRQQVYKLDLEGQRLQGIMQEFQKQELEREEKRESRRILYQNLNEPTTWSLTSDRTRNWVLQQKIEGETKESNYAKLIEMNGGGTGCNHELEMIRQKLQCVASKLQVLPQKASERLQFETADDEDFIWVQENIDEIILQLQKLTGQQGEEPSLVSPSTSCGSLTERLLRQNAELTGHISQLTEEKNDLRNMVMKLEEQIRWYRQTGAGRDNSSRFSLNGGANIEAIIASEKEVWNREKLTLQKSLKRAEAEVYKLKAELRNDSLLQTLSPDSEHVTLKRIYGKYLRAESFRKALIYQKKYLLLLLGGFQECEDATLALLARMGGQPAFTDLEVITNRPKGFTRFRSAVRVSIAISRMKFLVRRWHRVTGSVSININRDGFGLNQGAEKTDSFYHSSGGLELYGEPRHTTYRSRSDLDYIRSPLPFQNRYPGTPADFNPGSLACSQLQNYDPDRALTDYITRLEALQRRLGTIQSGALSLTTSWQHHSARPTAPLSLKFFHTH

SEQ ID NO: 55570 - protein, 284 aa, Homo sapiens
MAAAAGDADDEPRSGHSSSEGECAVAPEPLTDAEGLFSFADFGSALGGGGAGLSGRASGGAQSPLRYLHVLWQQDAEPRDELRCKIPAGRLRRAARPHRRLGPTGKEVHVQQLLEDGADPCAADDKGRTALHFASCNGNDQIVQLLLDHGADPNQRDGLGNTPLHLAACTNHVPVITTLLRGGARVDALDRAGRTPLHLAKSKLNILQEGHAQCLEAVRLEVKQIIHMLREYLERLGQHEQRERLDDLCTRLQMTSTKEQVDEVTDLLASFTSLSLQMQSMEKR

SEQ ID NO: 55571 - protein, 69 aa, Homo sapiens
MADPATRHLTPTKLPSTPRATCSVVGSLSIHCGSSQLPTAKNRIFRSSWGSITFGKGRVPRSRVLLSGL

SEQ ID NO: 55572 - protein, 323 aa, Homo sapiens
MRRREGHGTDSEMGQGPVRESQSSDPPALQFRISEYKPLNMAGVEQPPSPELRQEGVTEYEDGGAPAGDGEAGPQQAEDHPQNPPEDPNQDPPEDDSTCQCQACGPHQAAGPDLGSSNDGCPQLFQERSVIVENSSGSTSASELLKPMKKRKRREYQSPSEEESEPEAMEKQEEGKDPEGQPTASTPESEEWSSSQPATGEKKECWSWESYLEEQKAITAPVSLFQDSQAVTHNKNGFKLGMKLEGIDPQHPSMYFILTVAEVCGYRLRLHFDGYSECHDFWVNANSPDIHPAGWFEKTGHKLQPPKESPTPGLPGGHEAGGC

SEQ ID NO: 55573 - protein, 81 aa, Homo sapiens
MGDFVRYHYNGTFEDGKKFDSSYDRNTLVAIVVGVGRLITGMDRGLMGMCVNERRRLIVPPHLGYGSIGLAGLIPPDATLY

SEQ ID NO: 55574 - protein, 62 aa, Homo sapiens
  MOD_RES (1)..(1): Any amino acid
XKVRAGSDKLGSFPSLAVAKIIIIEFNPMYPKDNDIALMKLQFPLTFSAYLNWIYNVWKAEL

SEQ ID NO: 55575 - protein, 179 aa, Homo sapiens
FLFDKPVSPLLLASGMARDWPDARGIWHNDNKTFLVWVNEEDHLRVISMQKGGNMKEIETLFKSKDYEFMWNPHLGYILTCPSNLGTGLRAGVHIKLPNLGKHEKFSEVLKRLRLQKRGTGGVDTAAVGGVFDVSNADRLGFSEVELVQMVVDGVKLLIEMEQRLEQGQAIDDLMPAQK

SEQ ID NO: 55576 - protein, 96 aa, Homo sapiens
MEGSLAGSLAAPDRPQGPERLPGPAPRENIEGGAEAAEGEGGIFRSTRYLPVTKEGPRDILDGRGGISDGQPHPGLSEALPRVTSATHRISSCGQL

SEQ ID NO: 55577 - protein, 801 aa, Homo sapiens
MLKRKQSSRVEAQPVTDFGPDESLSDNADILWINKPWVHSLLRICAIISVISVCMNTPMTFEHYPPLQYVTFTLDTLLMFLYTAEMIAKMHIRGIVKGDSSYVKDRWCVFDGFMVFCLWVSLVLQVFEIADIVDQMSPWGMLRIPRPLIMIRAFRIYFRFELPRTRITNILKRSGEQIWSVSIFLLFFLLLYGILGVQMFGTFTYHCVVNDTKPGNVTWNSLAIPDTHCSPELEEGYQCPPGFKCMDLEDLGLSRQELGYSGFNEIGTSIFTVYEAASQEGWVFLMYRAIDSFPRWRSYFYFITLIFFLAWLVKNVFIAVIIETFAEIRVQFQQMWGSRSSTTSTATTQMFHEDAAGGWQLVAVDVNKPQGRAPACLQKMMRSSVFHMFILSMVTVDVIVAASNYYKGENFRRQYDEFYLAEVAFTVLFDLEALLKIWCLGFTGYISSSLHKFELLLVIGTTLHVYPDLYHSQFTYFQVLRVVRLIKISPALEDFVYKIFGPGKKLGSLVVFTASLLIVMSAISLQMFCFVEELDRFTTFPRAFMSMFQILTQEGWVDVMDQTLNAVGHMWAPVVAIYFILYHLFATLILLSLFVAVILDNLELDEDLKKLKQLKQSEANADTKEKLPLRLRIFEKFPNRPQMVKISKLPSDFTVPKIRESFMKQFIDRQQQDTCCLLRSLPTTSSSSCDHSKRSAIEDNKYIDQKLRKSVFSIRARNLLEKETAVTKILSKRPLPTSSPISIRCCLYLGRSHCHSSGVRMYRLFPHPCSGTLRKKTWRQRRKEPGTPCYCVYKQLVVFKG

SEQ ID NO: 55578 - protein, 350 aa, Homo sapiens
MLGAGLIKIRGDRCWRDLTCMDFHYETQPMPNPVAYYLHHSPWWFHRFETLSNHFIELLVPFFLFLGRRACIIHGVLQILFQAVLIVSGNLSFLNWLTMVPSLACFDDATLGFLFPSGPGSLKDRVLQMQRDIRGARPEPRFGSVVRRAANVSLGVLLAWLSVPVVLNLLSSRQVMNTHFNSLHIVNTYGAFGSITKERAEVILQGTASSNASAPDAMWEDYEFKCKPGDPSRRPCLISPYHYRLDWLMWFAAFQTYEHNDWIIHLAGKLLASDAEALSLLAHNPFAGRPPPRWVRGEHYRYKFSRPGGRHAAEGKWWVRKRIGAYFPPLSLEELRPYFRDRGWPLPGPL

SEQ ID NO: 55579 - protein, 188 aa, Homo sapiens
MAGLSRQLCALSHPKKAAETQTAEPGGAHAVCSRHPVRVKGLEGSEMESARENIDLQPGSSDPRSQPINLNHYATKKSVAESMLDVALFMSNAMRLKAVLEQGPSSHYYTTLVTLISLSLLLQVVIGVLLVVIARLNLNEVEKQWRLNQLNNAATILVFFTVVINVFITAFGAHKTGFLAARASRNPL

SEQ ID NO: 55580 - protein, 43 aa, Homo sapiens
MKFQYKEDHPFEYRKKEGEKIRKKYPDRVPAPGLVWGQPASSC

SEQ ID NO: 55581 - protein, 71 aa, Homo sapiens
  MOD_RES (1)..(1): Any amino acid
XGERHEGREGMTCYYLTHGWAGLIVVVENRHPKAYLHVQCDCTDSFNVVSTRGSLRTQDSVPPLHSPVPLP

SEQ ID NO: 55582 - protein, 151 aa, Homo sapiens
MERPLCSHLCSCLAMLALLSPLSLAQYDSWPHYPEYFQQPAPEYHQPQAPANVAKIQLRLAGQKRKHSEGRVEVYYDGQWGTVCDDDFSIHAAHVVCRELGYVEAKSWTASSSYGKGEGPIWLDNLHCTGNEATLAACTSNGWGVTDCKHT

SEQ ID NO: 55583 - protein, 736 aa, Homo sapiens
MLIPALQISDSESVGLEDGIEQSAYLTESKMNESKPGDSQNLACVFCRKHDDCPNKYGEKKTKEKWNLTVHYYCLLMSSGIWQRGKEEEGVYGFLIEDIRKEVNRASKLKCCVCKKNGASIGCVAPRCKRSYHFPCGLQRECIFQFTGNFASFCWDHRPVQIITSNNYRESLPCTICLEFIEPIPSYNILRSPCCKNAWFHRDCLQVQAINAGVFFFRCTICNNSDIFQKEMLRMGIHIPEKDASWELEENAYQELLQHYERCDVRRCRCKEGRDYNAPDSKWEIKRCQCCGSSGTHLACSSLRSWEQNWECLECRGIIYNSGEFQKAKKHVLPNSNNVGITDCLLEESSPKLPRQSPGSQSKDLLRQGSKFRRNVSTLLIELGFQIKKKTKRLYINKANIWNSALDAFRNRNFNPSYAIEVAYVIENDNFGSEHPGSKQEFLSLLMQHLENSSLFEGSLSKNLSLNSQALKENLYYEAGKMLAISLVHGGPSPGFFSKTLFNCLVYGPENTQPILDDVSDFDVAQIIIRINTATTVADLKSIINECYNYLELIGCLRLITTLSDKYMLVKDILGYHVIQRVHTPFESFKQGLKTLGVLEKIQAYPEAFCSILCHKPESLSAKILSELFTVHTLPDVKALGFWNSYLQAVEDGKSTTTMEDILIFATGCSSIPPAGFKPTPSIECLHVDFPVGNKCNNCLAIPITNTYKEFQENMDFTIRNTLRLEKEESSHYIGH

SEQ ID NO: 55584 - protein, 131 aa, Homo sapiens
  MOD_RES (1)..(1): Any amino acid
XIIVAEFHKKIKEAFEVFDHESNNTVDVREIGTIIRSLGCCPTEGELHDLIAEVEEEEPTGYIRFEKFLPVMTEILLERKYRPIPEDVLLRAFEVLDSAKRGFLTKDELIKYMTEEGKCDLLLITMTYVRN

SEQ ID NO: 55585 - protein, 748 aa, Homo sapiens
MTTEKSLVTEAENSQHQQKEEGEEAINSGQQEPQQEESCQTAAEGDNWCEQKLKASNGDTPTHEDLTKNKERTSESRGLSRLFSSFLKRPKSQVSEEEGKEVESDKEKGEGGQKEIEFGTSLDEEIILKAPIAAPEPELKTDPSLDLHSLSSAETQKHAKGQDLLKRVCEHLNLLEEDYFGLAIWDNATSKTWLDSAKEIKKQVRGVPWNFTFNVKFYPPDPAQLTEDITRYYLCLQLRQDIVAGRLPCSFATLALLGSYTIQSELGDYDPELHGVDYVSDFKLAPNQTKELEEKVMELHKSYRSMTPAQADLEFLENAKKLSMYGVDLHKAKDLEGVDIILGVCSSGLLVYKDKLRINRFPWPKVLKISYKRSSFFIKIRPGEQEQYESTIGFKLPSYRAAKKLWKVCVEHHTFFRLTSTDTIPKSKFLALGSKFRYSGRTQAQTRQASALIDRPAPHFERTASKRASRSLDGAAAVDSADRSPRPTSAPAITQGQVAEGGVLDASAKKTVVPKAQKETVKAEVKKEDEPPEQAEPEPTEAWKVEKTHIEVTVPTSNGDQTQKLAEKTEDLIRMRKKKRERLDGENIYIRHSNLMLEDLDKSQEEIKKHHASISELKKNFMESVPEPRPSEWDKRLSTHSPFRTLNINGQIPTGEGVKKTSVLPSERKVGGPEDEEKIKRQERSTERALPQQENEEILPKVSIPIPEDHKSLKKCHLYFSTFPSPRIPFMMSFLVILVLAVWWLVFL

SEQ ID NO: 55586 - protein, 262 aa, Homo sapiens
MFLAQRSLCSLSGRAKFLKTISSSKILGFSTSAKMSLKFTNAKRIEGLDSNVWIEFTKLAADPSVVNLGQGFPDISPPTYVKEELSKIAAIDSLNQYTRGFGHPSLVKALSYLYEKLYQKQIDSNKEILVTVGAYGSLFNTIQALIDEGDEVILIVPFYDCYEPMVRMAGATPVFIPLRSKPVYGKRWSSSDWTLDPQELESKFNSKTKAIILNTPHNPLGKVYNREELQVIADLCIKYDTLCISDEVYEWLVYSGNKHLKI

SEQ ID NO: 55587 - protein, 68 aa, Homo sapiens
MTTPNKTPPGADPKQLERTGTVREIGSQAVWSLSSCKPGFGVDQLRDDNLETYWQSDGSQPHLVNIQF

SEQ ID NO: 55588 - protein, 593 aa, Homo sapiens
MAELGELKHMVMSFRVSELQVLLGFAGRNKSGRKHELLAKALHLLKSSCAPSVQMKIKELYRRRFPRKTLGPSDLSLLSLPPGTSPPVHPDVTMKPLPFYEVYGELIRPTTLASTSSQRFEEAHFTFALTPQQVQQILTSREVLPGAKCDYTIQVQLRFCLCETSCPQEDYFPPNLFVKVNGKLCPLPGYLPPTKNGAEPKRPSRPINITPLARLSATVPNTIVVNWSSEFGRNYSLSVYLVRQLTAGTLLQKLRAKGIRNPDHSRALIKEKLTADPDSEVATTSLRVSLMCPLGKMRLTVPCRALTCAHLQSFDAALYLQMNEKKPTWTCPVCDKKAPYESLIIDGLFMEILSSCSDCDEIQFMEDGSWCPMKPKKEASEVCPPPGYGLDGLQYSPVQGGDPSENKKKVEVIDLTIESSSDEEDLPPTKKHCSVTSAAIPALPGSKGVLTSGHQPSSVLRSPAMGTLGGDFLSSLPLHEYPPAFPLGADIQGLDLFSFLQTESQHYGPSVITSLDEQDALGHFFQYRGTPSHFLGPLAPTLGSSHCSATPAPPPGRVSSIVAPGGALREGHGGPLPSGPSLTGCRSDIISLD

SEQ ID NO: 55589 - protein, 38 aa, Homo sapiens
MYNTVWNMEDLDLEYAKTDINCGTDLMFYIEMDPPGKK

SEQ ID NO: 55590 - protein, 144 aa, Homo sapiens
MVDKDTERDIEMKRQLRRLRELHLYSTWKKYQEAMKTSLGVPQRGDLEDLEEHVPGQTVSEEATGVHMMQVDPATLAKKLEDSTITGSHQQMSASPSSAPAEEATEKTKVEEEVKTRKPKKKTRKPSKKSRWNVLKCWDIFNIF

SEQ ID NO: 55591 - protein, 129 aa, Homo sapiens
MGLTFINALVFGVQGNTLRALGHDSPLNQFLAGAAAGAIQCVICCPMELAKTRLQLQDAGPARTYKGSLDCLAQIYGHEGLRGVNRGMVSTLLRETPSFGVYFLTYDALTRALGCEPGDRLLVPKLLLA

SEQ ID NO: 55592 - protein, 214 aa, Homo sapiens
MERHEMIAKPPVMSSHFAQDLWPENIQNSFQIGMLRRYEECRHDNLQLKKGCKSVGEHKVHKGGYNGLNQCLTTTQKEIFQCDKYGKVFHKFSNSNTYKTRHTGINLFKCIICGKAFKRSSTLTTHKKIHTGEKPYRCEECGKAFNQSANLTTHKRIHTGEKPYRCEECGKAFKQSSNLTTHKKIHTGEKPYKCEECGKAFNRSTDLTTHKIVH

SEQ ID NO: 55593 - protein, 100 aa, Homo sapiens
MRKRLSAPELRLSLTKGPGNDGASPTQSAPSSPDGSSDLEIDELETPSDSEQLDSGHEFEWEDELPRAEGLGTSETAERLGRGCMWDVTGEDGHHWRVFR

SEQ ID NO: 55594 - protein, 74 aa, Homo sapiens
MGHAASSTHWVQLSAVCCPGGRSGEGLSIQEIKHTVTRVQSSVKRSSGYTPRGFSFDPGFLIVLVCLIFSVLST

SEQ ID NO: 55595 - protein, 166 aa, Homo sapiens
MEQQDQSMKEGRLTLVLALATLIAAFGSSFQYGYNVAAVNSPALLMQQFYNETYYGRTGEFMEDFPLTLLWSVTVSMFPFGGFIGSLLVGPLVNKFGRKGALLFNNIFSIVPAILMGCSRVATSFELIIISRLLVGICAGVSSNVVPMYLGELAPKNLRGALGVVP

SEQ ID NO: 55596 - protein, 460 aa, Homo sapiens
MSLFKARDWWSTILGDKEEFDQGCLCLANVDNSGNGQDKIIVGSFMGYLRIFSPHPAKTGDGAQAEDLLLEVDLRDPVLQVEVGKFVSGTEMLHLAVLHSRKLCVYSVSGTLGNVEHGNQCQMKLMYEHNLQRTACNMTYGSFGGVKGRDLICIQSMDGMLMVFEQESYAFGRFLPGFLLPGPLAYSSRTDSFLTVSSCQQVESYKYQVLAFATDADKRQETEQQKLGSGKRLVVDWTLNIGEQALDICIVSFNQSASSVFVLGERNFFCLKDNGQIRFMKKLDWSPSCFLPYCSVSEGTINTLIGNHNNMLHIYQDVTLKWATQLPHIPVAVRVGCLHDLKGVIVTLSDDGHLQCSYLGTDPSLFQAPNVQSRELNYDELDVEMKELQKIIKDVNKSQGVWPMTEREDDLNVSVVVSPNFDSVSQATDVEVGTDLVPSVTVKQPRYTTMQVSIIINPVN

SEQ ID NO: 55597 - protein, 291 aa, Homo sapiens
MNGEEEFFDAVTGFDSDNSSGEFSEANQKVTGMIDLDTSKNNRIGKTGERPSQENGIQKHRTSLPAPMFSRSDFSVWTILKKCVGLELSKITMPIAFNEPLSFLQRITEYMEHVYLIHRASCQPQPLERMQSVAAFAVSAVASQWERTGKPFNPLLGETYELIREDLGFRFISEQVSHHPPISAFHSEGLNHDFLFHGSIYPKLKFWGKSVEAEPRGTITLELLKHNEAYTWTNPTCCVHNVIIGKLWIEQYGTVEILNHRTGHKCVLHFKPCGLFGKELHKVEGHIQDKK

SEQ ID NO: 55598 - protein, 148 aa, Homo sapiens
ARDEDERSPLHKACGHASHSLARLLLRHGADAGALDYGGASPLGRVLQTASCALQASPQRTVQALLNHGSPTVWPDAFPKVLKTCASVPAVIEVLFNSYPQLCLSESWKEVIPEEVFQARGLPFCPSLVQNFCLFLLLCMGSFALIFG

SEQ ID NO: 55599 - protein, 33 aa, Homo sapiens
MLRRLDKIRFRGHKRDDFLDLAESPNASDTECS

SEQ ID NO: 55600 - protein, 152 aa, Homo sapiens
MNVSETSFVGCVQNTTTEDQLLFGCRLKGMHTVNSKWLSVGTHYFITVMASGPSPCPLGLRLNVTVKQQFCQESLSSEFCSGHGKCLSEAWSKTYSCHCQPPFSGKYCQELDACSFKPCKNNGSCINKRENWDEQAYECVCHPPFTGLLGGK

SEQ ID NO: 55601 - protein, 121 aa, Homo sapiens
MAVAPSFNMTNPQPAIEGGISEVEIISQQVDEETKSIAPVQLVNFAYRDLPLAAVDLSTAGSQLLSNLDEDYQREGFQRIPVCWRDSLDQPGHSVRVLLRDCSTDCGAWDLGLHRKQNRGV

SEQ ID NO: 55602 - protein, 1027 aa, Homo sapiens
MLIEDVDALKSWLAKLLEPICDADPSALANYVVALVKKDKPEKELKAFCADQLDVFLQKETSGFVDKLFESLYTKNYLPLLEPVKPEPKPLVQEKEEIKEEVFQEPAEEERDGRKKKYPSPQKTRSESSERRTREKKREDGKWRDYDRYYERNELYREKYDWRRGRSKSRSKSRGLSRSRSRSRGRSKDRDPNRNVEHRERSKFKSERNDLESSYVPVSAPPPNSSEQYSSGAQSIPSTVTVIAPAHHSENTTESWSNYYNNHSSSNSFGRNLPPKRRCRDYDERGFCVLGDLCQFDHGNDPLVVDEVALPSMIPFPPPPPGLPPPPPPGMLMPPMPGPGPGPGPGPGPGPGPGPGPGHSMRLPVPQGHGQPPPSVVLPIPRPPITQSSLINSRDQPGTSAVPNLASVGTRLPPPLPQNLLYTVSEHTYEPDGYNPEAPSITSSGRSQYRQFFSRTQTQRPNLIGLTSGDMDVNPRAANIVIQTEPPVPVSINSNITRVVLEPDSRKRAMSGLEGPLTKKPWLGKQGNNNQNKPGFLRKNQYTNTKLEVKKIPQELNNITKLNEHFSKFGTIVNIQVAFKGDPEAALIQYLTNEEARKAISSTEAVLNNRFIRVLWHRENNEQPTLQSSAQLLLQQQQTLSHLSQQHHHLPQHLHQQQVLVAQSAPSTVHGGIQKMMSKPQTSGAYVLNKVPVKHRLGHAGGNQSDASHLLNQSGGAGEDCQIFSTPGHPKMIYSSSNLKTPSKLCSGSKSHDVQEVLKKKQEAMKLQQDMRKKRQEVLEKQIECQKMLISKLEKNKNMKPEERANIMKTLKELGEKISQLKDELKTSSAVSTPSKVKTKTEAQKELLDTELDLHKRLSSGEDTTELRKKLSQLQVEAARLGILPVGRGKTMSSQGRGRGRGRGGRGRGSLNHMVVDHRPKALTVGGFIEEEKEDLLQHFSMEFCSCCPGWSAMVRSRLTATSASLVQVILLPQPPKQLRLQEREDDGHELQAAFRHAPGAARTQILQSALWLRGHAPSLSPSPAGT

SEQ ID NO: 55603 - protein, 74 aa, Homo sapiens
MQPQESHVHYSRWEDGSRDGVSLGAVSSTEEASRCRRISQRLCTGKLGIAMKVLGGVALFWIIFILGYLTGYYV

SEQ ID NO: 55604 - protein, 325 aa, Homo sapiens
MTSKDYYFDSYAHFGIHEEMLKDEVRTLTYRNSMFHNRHLFKDKVVLDVGSGTGILCMFAAKAGARKVIGIECSSISDYAVKIVKANKLDHVVTIIKGKVEEVELPVEKVDIIISEWMGYCLFYESMLNTVLYARDKWLAPDGLIFPDRATLYVTAIEDRQYKDYKIHWWENVYGFDMSCIKDVAIKEPLVDVVDPKQLVTNACLIKEVDIYTVKVEDLTFTSPFCLQVKRNDYVHALVAYFNIEFTRCHKRTGFSTSPESPYTHWKQTVFYMEDYLTVKTGEEIFGTIGMRPNAKNNRDLDFTIDLDFKGQLCELSCSTDYRMR

SEQ ID NO: 55605 - protein, 66 aa, Homo sapiens
  MOD_RES (1)..(1): Any amino acid
XHGDDLIVTPFAQVLASLRSVRNNFTILTNLHGTSNKRSPAASQPPVSRVNPQGRPCHKVYLDVSR

SEQ ID NO: 55606 - protein, 139 aa, Homo sapiens
MLVLPSPCPQPLAFSSVETMEGPPRRTCRSPEPGPSSSIGSPQASSPPRPNHYLLIDTQGVPYTVLVDEESQREPGASGAPGQKKCYSCPVCSRVFEYMSYLQRHSITHSEVKPFECDICGKAFKRASHLARHHSIHLA

SEQ ID NO: 55607 - protein, 79 aa, Homo sapiens
MPNFCAAPNCTRKSTQSDLAFFRFPRDPARCQKWVENCRRADLEDKTPDQLNKHYRLCAKHFETSMICRTIHFAEASEN

SEQ ID NO: 55608 - protein, 89 aa, Homo sapiens
WFWTVVSSLTQEELARLLQFTTGSSQLPPGGFAALCPSFQIIAAPTHSTLPTAHTCFNQLCLPTYDSYEEVHRMLQLAISEGCEGFGML

SEQ ID NO: 55609 - protein, 245 aa, Homo sapiens
VEEEGDVSNRGVELLQLEPDEDQVRARILGCLQEPTKSRPDQPAAFGLLCRMADQTFISIVDWARRCMVFKELEVADQMTLLQNCWSELLVFDHIYRQVQHGKEGSILLVTGQEVELTTVATQAGSLLHSLVLRAQELVLQLLALQLDRQEFVCLKFIILFSLDLKFLNNHILVKDAQEKANAALLDYTLCHYPHCGDKFQQLLLCLVEVRALSMQAKEYLYHKHLGNEMPRNNLLIEMLQAKQT

SEQ ID NO: 55610 - protein, 96 aa, Homo sapiens
MERGDQPKRTRNENIFNCLYKNPEATFKLICFPWMGGGSTHFAKWGQDTHDLLEETASHHVAKAGLKLRRSSDPPASAYPCAGVSHRRREPPCLAK

SEQ ID NO: 55611 - protein, 188 aa, Homo sapiens
MAVESGVISTLIPQDPPEQELILVKVEDNFSWDEKFKQNGSTQSCQELFRQQFRKFCYQETPGPREALSRLQELCYQWLMPELHTKEQILELLVLEQFLSILPEELQIWVQQHNPESGEEAVTLLEDLEREFDDPGQQVPASPQGPAVPWKDLTCLRASQESTDIHLQPLKTQLKSWKPCLSPKSDFS

SEQ ID NO: 55612 - protein, 165 aa, Homo sapiens
MCLATCTRDGKPSARMLLLKGFGKDGFRFFTNFESRKGKELDSNPFASLVFYWEPLNRQVRVEGPVKKLPEEEAECYFHSRPKSSQIGAVVSHQSSVIPDREYLRKKNEELEQLYQDQEVPKPKSWGGYVLYPQVMEFWQGQTNRLHDRIVFRRGLPTGDSPLGP

SEQ ID NO: 55613 - protein, 172 aa, Homo sapiens
MSRSNVQPTAAPGQKVMENSSGTPDILTRHFTIDDFEIGRPLGKGKFGNVYLAREKKSHFIVALKVLFKSQIEKEGVEHQLRREIEIQAHLHHPNILRLYNYFYDRRRIYLILEYAPRGELYKELQKSCTFDEQRTATIMEELADALMYCHGKKVIHRDIKPENLLLGLKGE

SEQ ID NO: 55614 - protein, 260 aa, Homo sapiens
MESIFHEKVISNALKVWGLELILFNSPEYQRLRIDPINERSFICNYKEHWFTVRKLGKQWFNLNSLLTGPELISDTYLALFLAQLQQEGYSIFVVKGDLPDCEADQLLQMIRVQQMHRPKLIGEELAQLKEQRVHKTDLERVLEANDGSGMLDEDEEDLQRALALSRQEIDMEDEEADLRRAIQLSMQGSSRNISQDMTQTSGTNLTSEELRKRREAYFEKQQQKQQQQQQQQQQGDLSGQSSHPCERPATSSGALGSDL

SEQ ID NO: 55615 - protein, 215 aa, Homo sapiens
  MOD_RES (1)..(1): Any amino acid
XYLLTMDKLWRKRKPPVPLDWAEVQSQGEETNASDQQNEPQLGLKDQQVLDVKSYARLFSKSIETLRVHLAEKGDGAELIWDKDDPSAMDFVTSAANLRMHIFSMNMKSRFDIKSMAGNIIPAIATTNAVIAGLIVLEGLKILSGKIDQCRTIVKEKFAMVAPDVQIEDGKGTILISSEEGETEANNHKKLSEFGIRNGSRLQADDFLQDYTLLI

SEQ ID NO: 55616 - protein, 128 aa, Homo sapiens
MGKSASKQFHNEVLKAHNEYRQKHGVPPLKLCKNLNREAQQYSEALASTRILKHSPESSRGQCGENLAWASYDQTGHFTAMVWKNTKKMGVGKASASDGSSFVVARYFPAGNVVNEGFFEENVLPPKK

SEQ ID NO: 55617 - protein, 637 aa, Homo sapiens
MAAHLSYGRVNLNVLREAVRRELREFLDKCAGSKAIVWDEYLTGPFGLIAQYSLLKEHEVEKMFTLKGNRLPAADVKNIIFFVRPRLELMDIIAENVLSEDRRGPTRDFHILFVPRRSLLCEQRLKDLGVLGSFIHREEYSLDLIPFDGDLLSMESEGAFKECYLEGDQTSLYHAAKGLMTLQALYGTIPQIFGKGECARQVANMMIRMKREFTGSQNSIFPVFDNLLLLDRNVDLLTPLATQLTYEGLIDEIYGIQNSYVKLPPEKFAPKKQGDGGKDLPTEAKKLQLNSAEELYAEIRDKNFNAVGSVLSKKAKIISAAFEERHNAKTVGEIKQFVSQLPHMQAARGSLANHTSIAELIKDVTNGVSLLLPRLQCNGTILAHRNLCLPGSSDSPASASQVAGITASEDFFDKLTVEQEFMSGIDTDKVNNYIEDCIAQKHSLIKVLRLVCLQSVCNSGLKQKVLDYYKREILQTYGYEHILTLHNLEKAGLLKPQTGGRNNYPTIRKTLRLWMDDVNEQNPTDISYVYSGYAPLSVRLAQLLSRPGWRSIEEVLRILPGPHFEERQPLPTGLQKKRQPGENRVTLIFFLGGVTFAEIAALRFLSQLEDGGTEYVIATTKLMNGTSWIEALMEKPF

SEQ ID NO: 55618 - protein, 34 aa, Homo sapiens
  MOD_RES (1)..(1): Any amino acid
XDYLMQLMNDKKLMSSLPNFCGIFNHLERLLDEV

SEQ ID NO: 55619 - protein, 149 aa, Homo sapiens
  MOD_RES (1)..(1): Any amino acid
XDAEAEGLSGTTLLPKLIPSGAGREWLERRRATIRPWSTFVDQQRFSRPRNLGELCQRLVRNVEYYQSNYVFVFLGLILYCVVTSPMLLVALAVFFGACYILYLRTLESKLVLFGREVSPAHQYALAGGISFPFFWLAGAGSAVFWVLD

SEQ ID NO: 55620 - protein, 890 aa, Homo sapiens
MKSRQKGKKKGSAKERVFGCDLQEHLQHSGQEVPQVLKSCAEFVEEYGVVDGIYRLSGVSSNIQKLRQEFESERKPDLRRDVYLQDIHCVSSLCKAYFRELPDPLLTYRLYDKFAEAVGVQLEPERLVKILEVLRELPVPNYRTLEFLMRHLVHMASFSAQTNMHARNLAIVWAPNLLRSKDIEASGFNGTAAFMEVRVQSIVVEFILTHVDQLFGGAALSGGEVESGWRSLPGTRASGSPEDLMPRPLPYHLPSILQAGDGPPQMRPYHTIIEIAEHKRKGSLKVRKWRSIFNLGRSGHETKRKLPRGAEDREDKSNKGTLRPAKSMDSLSAAAGASDEPEGLVGPSSPRPSPLLPESLENDSIEAAEGEQEPEAEALGGTNSEPGTPRAGRSAIRAGGSSRAERCAGVHISDPYNVNLPLHITSILSVPPNIISNVSLARLTRGLECPALQHRPSPASGPGPGPGLGPGPPDEKLEASPASSPLADSGPDDLAPALEDSLSQEVQDSFSFLEDSSSSEPEWVGAEDGEVAQAEAAGAAFSPGEDDPGMGYLEELLGVGPQVEEFSVEPPLDDLSLDEAQFVLAPSCCSLDSAGPRPEVEEENGEEVFLSAYDDLSPLLGPKPPIWKGSGSLEGEAAGCGRQALGQGGEEQACWEVGEDKQAEPGGRLDIREEAEGTPQPPQPEEMEPEGQPSPDGCLCPCSLGLGGVGMRLASTLVQVQQVRSVPVVPPKPQFAKMPSAMCSKIHVAPANPCPRPGRLDGTPGERAWGSRASRSSWRNGGSLSFDAAVALARDRQRTEAQGVRRTQTCTEGGDYCLIPRTSPCSMISAHSPRPLSCLELPSEGAEGSGSRSRLSLPPREPQVPDPLLSSQRRSYAFETQANPGKGEGL

SEQ ID NO: 55621 - protein, 193 aa, Homo sapiens
MSAAWIPALGLAPIAITCFTRGLDIRKEKADVLCPGGCPLEEFSVYGNIVYASVSSICGAAVHRGVISNSGGPVRVYSLPGRENYSSVDANGIQSQMLSRWSASFTVTKGKSSTQEATGQAVSTAHPPTGKRLKKTPEKKTGNKDCKADIAFLIDGSFNIGQRRFNLQKNFVGKVALMLGIGTEGPHVGLVQA

SEQ ID NO: 55622 - protein, 118 aa, Homo sapiens
MTMYLWLKLLAFGFAFLDTEVFVTGQSPTPSPTGLTTAKMPSVPLSSDPLPTHTTAFSPASTFERENDFSETTTSLSPDNTSTQVSPDSLDNASAFNTTGVSSVQTPHLPTHADSQTP

SEQ ID NO: 55623 - protein, 55 aa, Homo sapiens
ESLPAPRPRRCGDPGLRRRGRWAHPWAFPKAKRNPGKVRSKRRDPPIQFQNLRRS

SEQ ID NO: 55624 - protein, 58 aa, Homo sapiens
  MOD_RES (1)..(1): Any amino acid
XRETRNRELVRITMENQGILKRLVDRKPHYDRRASEIDWQNSRRYIRNTTRYLLSQNE

SEQ ID NO: 55625 - protein, 2251 aa, Homo sapiens
MLRAFVQPGTPAYQPLPSHLSANTEVKFKGTLVHEAQLNYFYISPGGSNYGSPRPAHANMNANAAAGLAPEHIPTPGAALSWQAAIDAARQAKLMGSAGNATISTVSSTQRKRQQYGKPKKQGSTTATRPPRALLCLTLKNPIRRACISIVEWKPFEIIILLTIFANCVALAIYIPFPEDDSNATNSNLERVEYLFLIIFTVEAFLKVIAYGLLFHPNAYLRNGWNLLDFIIVVVGLFSAILEQATKADGANALGGKGAGFDVKALRAFRVLRPLRLVSGVPSLQVVLNSIIKAMVPLLHIALLVLFVIIIYAIIGLELFMGKMHKTCYNQEGIADVPAEDDPSPCALETGHGRQCQNGTVCKPGWDGPKHGITNFDNFAFAMLTVFQCITMEGWTDVLYWVNDAVGRDWPWIYFVTLIIIGSFFVLNLVLGVLSGEFSKEREKAKARGDFQKLREKQQLEEDLKGYLDWITQAEDIDPENEDEGMDEEKPRNMSMPTSETESVNTENVAGGDIEGENCGARLAHRISKSKFSRYWRRWNRFCRRKCRAAVKSNVFYWLVIFLVFLNTLTIASEHYNQPNWLTEVQDTANKALLALFTAEMLLKMYSLGLQAYFVSLFNRFDCFVVCGGILETILVETKIMSPLGISVLRCVRLLRIFKITRYWNSLSNLVASLLNSVRSIASLLLLLFLFIIIFSLLGMQLFGGKFNFDEMQTRRSTFDNFPQSLLTVFQILTGEDWNSVMYDGIMAYGGPSFPGMLVCIYFIILFICGNYILLNVFLAIAVDNLADAESLTSAQKEEEEEKERKKLARTASPEKKQELVEKPAVGESKEEKIELKSITADGESPPATKINMDDLQPNENEDKSPYPNPETTGEEDEEEPEMPVGPRPRPLSELHLKEKAVPMPEASAFFIFSSNNRFRLQCHRIVNDTIFTNLILFFILLSSISLAAEDPVQHTSFRNHILFYFDIVFTTIFTIEIALKILGNADYVFTSIFTLEIILKMTAYGAFLHKGSFCRNYFNILDLLVVSVSLISFGIQSSAINVVKILRVLRVLRPLRAINRAKGLKHVVQCVFVAIRTIGNIVIVTTLLQFMFACIGVQLFKGKLYTCSDSSKQTEAECKGNYITYKDGEVDHPIIQPRSWENSKFDFDNVLAAMMALFTVSTFEGWPELLYRSIDSHTEDKGPIYNYRVEISIFFIIYIIIIAFFMMNIFVGFVIVTFQEQGEQEYKNCELDKNQRQCVEYALKARPLRRYIPKNQHQYKVWYVVNSTYFEYLMFVLILLNTICLAMQHYGQSCLFKIAMNILNMLFTGLFTVEMILKLIAFKPKGYFSDPWNVFDFLIVIGSIIDVILSETNHYFCDAWNTFDALIVVGSIVDIAITEVNPAEHTQCSPSMNAEENSRISITFFRLFRVMRLVKLLSRGEGIRTLLWTFIKSFQALPYVALLIVMLFFIYAVIGMQVFGKIALNDTTEINRNNNFQTFPQAVLLLFRCATGEAWQDIMLACMPGKKCAPESEPSNSTEGETPCGSSFAVFYFISFYMLCAFLIINLFVAVIMDNFDYLTRDWSILGPHHLDEFKRIWAEYDPEAKGRIKHLDVVTLLRRIQPPLGFGKLCPHRVACKRLVSMNMPLNSDGTVMFNATLFALVRTALRIKTEGNLEQANEELRAIIKKIWKRTSMKLLDQVVPPAGDDEVTVGKFYATFLIQEYFRKFKKRKEQGLVGKPSQRNALSLQAGLRTLHDIGPEIRRAISGDLTAEEELDKAMKEAVSAASEDDIFRRAGGLFGNHVSYYQSDGRSAFPQTFTTQRPLHINKAGSSQGDTESPSHEKLVDSTFTPSSYSSTGSNANINNANNTALGRLPRPAGYPSTVSTVEGHGPPLSPAIRVQEVAWKLSSNRERHVPMCEDLELRRDSGSAGTQAHCLLLRRANPSRCHSRESQAAMAGQEETSQDETYEVKMNHDTEACSEPSLLSTEMLSYQDDENRQLTLPEEDKRDIRQSPKRGFLRSASLGRRASFHLECLKRQKDRGGDISQKTVLPLHLVHHQALAVAGLSPLLQRSHSPASFPRPFATPPATPGSRGWPPQPVPTLRLEGVESSEKLNSSFPSIHCGSWAETTPGGGGSSAARRVRPVSLMVPSQAGAPGRQFHGSASSLVEAVLISEGLGQFAQDPKFIEVTTQELADACDMTIEEMESAADNILSGGAPQSPNGALLPFVNCRDAGQDRAGGEEDAGCVRARGRPSEEELQDSRVYVSSL

SEQ ID NO: 55626 - protein, 146 aa, Homo sapiens
MTLLFAVGCVFFPLCFTALRWGLQNHTNLQMERQEAVLVASKLVSSVQAIMASTAGYIVSTSCKHIIDDQHWLSSAYTQFAVPYFIYDIYAMFLCHWHKHQVKGHGGDDGAARAPGSTWAIARGYLHKEFLMVLHHAAMVLVCFPL

SEQ ID NO: 55627 - protein, 103 aa, Homo sapiens
MARRPRHSIYSSDEDDEDFEMCDHDYDGLLPKSGKRHLGKTRWTREEDEKLKKLVEQNGTDDWKVIANYLPNRTDVQCQHRWQKVLNPELIKGPWTKEEDQRN

SEQ ID NO: 55628 - protein, 105 aa, Homo sapiens
MWYEDALASSHPIILYLHGNAGTRGGDHRVELYKVLSSLGYHVVTFDYRGWGDSVGTPSERGMTYDALHVFDWIKARSGDNPVYIWGHSLGTGVATNLVRRLCER

SEQ ID NO: 55629 - protein, 15 aa, Homo sapiens
SLCAVFGGGTQLTVL

SEQ ID NO: 55630 - protein, 252 aa, Homo sapiens
MSRGSSAGFDRHITIFSPEGRLYQVEYAFKAINQGGLTSVAVRGKDCAVIVTQKKVPDKLLDSSTVTHLFKITENIGCVMTGMTADSRSQVQRARYEAANWKYKYGYEIPVDMLCKRIADISQVYTQNAEMRPLGCWSFLFLGMILIGIDEEQGPQVYKCDPAGYYCGFKATAAGVKQTESTSFLEKKVKKKFDWTFEQTVETAITCLSTVLSIDFKPSEIEVGVVTVENPKFRILTEAEIDAHLVALAERD

SEQ ID NO: 55631 - protein, 74 aa, Homo sapiens
MKGLNHPNIVKLFEVIETEKTLYLVMEYASAGEVFDYLVSHGRMKEKEARAKFRQIVSAVHYCHQKNIVHRDLK

SEQ ID NO: 55632 - protein, 39 aa, Homo sapiens
MEKKECPEKSSSSEEELPRRDSGSSRNIDASKLIRLQGS

SEQ ID NO: 55633 - protein, 252 aa, Homo sapiens
  MOD_RES (1)..(1): Any amino acid
XMILLSELSRRRIRSINKLIRIGRNECVVVIRVDKEKGYIDLSKRRVSPEEAIKCEDKFTKSKTVYSILRHVAEVLEYTKDEQLESLFQRTAWVFDDKYKRPGYGAYDAFKHAVSDPSILDSLDLNEDEREVLINNINRRLTPQAVKIRADIEVACYGYEGIDAVKEALRAGLNCSTENMPIKINLIAPPRYVMTTTTLERTEGLSVLSQAMAVIKEKIEEKRGVFNVQMEVRSIDSFLIMTQEVPKRSSCR

SEQ ID NO: 55634 - protein, 144 aa, Homo sapiens
MQTQEILRILRLPELGDLGQFFRSLSATTLVSMGALAAILAYWFTHRPKALQPPCNLLMQSEEVEDSGGARRSVIGSGPQLLTHYYDDARTMYQVFRRGLSISGNGPCLGFRKPKQPYQWLSYQEVADRAEFLGSGLLQHNCKA

SEQ ID NO: 55635 - protein, 67 aa, Homo sapiens
MMVVLLGATTLVLVAVAPWVLSAAAGGKNLKSPQKVEVDIIDDNFILRWNRSDESVGNVTFSFDYQN

SEQ ID NO: 55636 - protein, 96 aa, Homo sapiens
MGGWTPFLRGPVWRRVRQPMEMGQCSEMLHKCGLLPQTVDRAYVLSEDQLCPWMAGCRCPIGRGSLMSSTAACGDGQTCTATTSYGPWSCVSSPSI

SEQ ID NO: 55637 - protein, 87 aa, Homo sapiens
MREIVHIQAGQCGNQIGAKFWEVISDEHGIDPSGNYVGDSDLQLERISVYYNEASCWSRTPGLKRSTCLGLPKCWECRHEPLHLVDV

SEQ ID NO: 55638 - protein, 147 aa, Homo sapiens
MGYKLQDLTDVQIMARLQEESLRQDYASTSASVSRHSSSVSLSSGKKGTCSDQEYDQYSLEDEEEFDHLPPPQPRLPRCSPFQRGIPHSQTFSSIRECRRSPSSQYFPSNNYQQQQYYSPQAQTPDQQPNRTNGDKLRRSMPNLARM

SEQ ID NO: 55639 - protein, 115 aa, Homo sapiens
MEVNCLTLKDLISPRQPRLDFAVEDGENAQKENIFVDRSRMAPKTPIKNEPIDLSKQKKFTPERNPITPVKFVDRQQAEPWTPTANLKMLISAASPDIRDREKKKGLFRPIENKD

SEQ ID NO: 55640 - protein, 53 aa, Homo sapiens
MVQWKRLCQLHYLWALGCYMLLATVALKLSFRLKCDSDHLGLESRESQSQYCR

SEQ ID NO: 55641 - protein, 53 aa, Homo sapiens
MDGSRRVRATSVLPRYGPPCLFKGHLSTKSNAAVDCSVPVSVSTSIKCLEVLV

SEQ ID NO: 55642 - protein, 897 aa, Homo sapiens
MFPTGFSSPSPSAAAAAQEVRSATDGNTSTTPPTSAKKRKLNSSSSSSSNSSNEREDFDSTSSSSSTPPLQPRDSASPSTSSFCLGVSVAASSHVPIQKKLRFEDTLEFVGFDAKMAEESSSSSSSSSPTAATSQQQQLKNKSILISSVASVHHANGLAKSSTTVSSFANSKPGSAKKLVIKNFKDKPKLPENYTDETWQKLKEAVEAIQNSTSIKYNLEELYQAVENLCSYKISANLYKQLRQICEDHIKAQIHQFREDSLDSVLFLKKIDRCWQNHCRQMIMIRSIFLFLDRTYVLQNSMLPSIWDMGLELFRAHIISDQKVQNKTIDGILLLIERERNGEAIDRSLLRSLLSMLSDLQIYQDSFEQRFLEETNRLYAAEGQKLMQEREVPEYLHHVNKRLEEEADRLITYLDQTTQKSLIATVEKQLLGEHLTAILQKGLNNLLDENRIQDLSLLYQLFSRVRGGVQVLLQQWIEYIKAFGSTIVINPEKDKTMVQELLDFKDKVDHIIDICFLKNEKFINAMKEAFETFINKRPNKPAELIAKYVDSKLRAGNKEATDEELEKMLDKIMIIFRFIYGKDVFEAFYKKDLAKRLLVGKSASVDAEKSMLSKLKHECGAAFTSKLEGMFKDMELSKDIMIQFKQVKYMQNQNVPGNIELTVNILTMGYWPTYVPMEVHLPPEMVKLQEIFKTFYLGKHSGRKLQWQSTLGHCVLKAEFKEGKKELQVSLFQTLVLLMFNEGEEFSLEEIKQATGIEDGELRRTLQSLACGKARVLAKNPKGKDIEDGDKFICNDDFKHKLFRIKINQIQMKETVEEQASTTERVFQDRQYQIDAAIVRIMKMRKTLSHNLLVSEVYNQLKFPVKPADLKKRIESLIDRDYMERDKENPNQYNYIA

SEQ ID NO: 55643 - protein, 984 aa, Homo sapiens
MSSAEIIGSTNLIILLEDEVFADFFNTFLSLPVFGQTPFYTVENSQWSLWPEIPCNLIAKYKGLLTWLEKCRLPFFCKTNLCFHYILCQEFISFIKSPEGAKMMRWKKADQWLLQKCIGGVRGMWRFYSYLTGSAGEELVDFWILAENILSIDEMDLEVRDYYLSLLLMLRATHLQEGSRVVTLCNMNIKSLLNLSIWHPNQSTTRREILSHMQKVALFKLQSYWLPNFYTHTKMTMAKEEACHGLMQEYETRLYSVCYTHIGGLPLNMSIKKCHHFQKRYSSRKAKRKMWQLVDPDSWSLEMDLKPDAIGMPLQETCPQEKVVIQMPSLKMASSKETRISSLEKDMHYAKISSMENKAKSHLHMEAPFETKVSTHLRTVIPIVNHSSKMTIQKAIKQSFSLGYIHLALCADACAGNPFRDHLKKLNLKVEIQLLDLWQDLQHFLSVLLNNKKNGNAIFRHLLGDRICELYLNEQIGPCLPLKSQTIQGLKELLPSGDVIPWIPKAQKEICKMLSPWYDEFLDEEDYWFLLFTTQNRFISSRQHKREFIGKEENILLYKRIQQSLELSQALADMKEMDYRQWRKIATEDLKQGGSLQVELTSPVFLTDITKMSFEELCYKNPKMAIQKISDDYKIYCEKAPKIDFKMEIIKETKTVSRSNRKMSLLKRTLVRKPSMRPRNLTEVLLNTQHLEFFREFLKERKAKIPLQFLTAVQKISIETNEKICKSLIENVIKTFFQGQLSPEEMLQCDAPIIKEIASMRHVTTSTLLTLQGHVMKSIEEKWFKDYQDLFPPHHQEVEVQSEVQISSRKPSKIVSTYLQESQKKGWMRMISFIRSFCKYRRFMLNPSKRQEFEDYLHQEMQNSKENFTTAHNTSGRSAPPSTNVRSADQENGEITLVKRRIFGHRIITVNFAINDLYFFSEMEKFNDLVSSAHMLQVNRAYNENDVILMRSKMNIIQKLFLNSDIPPKLRVLFLEGNPLLLTV

SEQ ID NO: 55644 - protein, 139 aa, Homo sapiens
  MOD_RES (1)..(1): Any amino acid
XGADGAWWRAQVVASYEETNEVEIRYVDYGGYKRVKVDVLRQIRSDFVTLPFQGAEVLLDSVMPLSDDDQFSPEADAAMSEMTGNTALLAQVTSYSPTGLPLIQLWSVVGDEVVLINRSLVERGLAQLASALCSLKISK

SEQ ID NO: 55645 - protein, 347 aa, Homo sapiens
MASSAEGDEGTVVALAGVLQSGFQELSLNKLATSLGASEQALRLIISIFLGYPFALFYRHYLFYKETYLIHLFHTFTGLSIAYFNFGNQLYHSLLCIVLQFLILRLMGRTITAVLTTFCFQMAYLLAGYYYTATGNYDIKWTMPHCVLTLKLIGLAVDYFDGGKDQNSLSSEQQKYAIRGVPSLLEVAGFSYFYGAFLVGPQFSMNHYMKLVQGELIDIPGKIPNSIIPALKRLSLGLFYLVGYTLLSPHITEDYLLTEDYDNHPFWFRCMYMLIWGKFVLYKYVTCWLVTEGVCILTGLGFNGFEEKGKAKWDACANMKVWLFETNPRFTGTIASFNINTNAWVAR

SEQ ID NO: 55646 - protein, 375 aa, Homo sapiens
  MOD_RES (1)..(1): Any amino acid
XIFMENVGAVKQLCKLTNNLEERIEELEIWNRKLARLKRLSSWKSSASEASTISKSSRAVSASSPRRAVHKKNNKVYFSGKRQACPNWVFQTLVITLIAVMAFCALTIVALYILSLKDQDRRVPNLPPSNITSSQEPALLPTASSSAPNTSLVTTPASLQVPEITFCEILPCQETYCCPIRGMKEVSSSPVQRQSEEKEFHQRRWSEDKSKSVLARNALSGPDWESDWIDTTISSIQIMEIQQIIDHQYCIQSLQCGSGNYNYNIPVNKHTPTNVKFSLEINTTEPLIVFQCKFTLGNICFHSKRGTKGLESHREISQEMTQGYQHIWSLPVAPFSDSMFHFRVAAPDLADCSTDPYFAGIFFTDYFFYFYRRCA

SEQ ID NO: 55647 - protein, 119 aa, Homo sapiens
MLHPETSPGRGHLLAVLLALLGTAWAEVWPPQLQEQAPMAGALNRKESFLLLSLHNRLRSWVQPPAADMRRLDWSDSLAQLAQARAALCGIPTPSLASGLWRTLQVGWNMQLLPAGLAS

SEQ ID NO: 55648 - protein, 138 aa, Homo sapiens
MSDSLVVCEVDPELTEKLRKFRFRKETDNAAIIMKVDKDRQMVVLEEEFQNISPEELKMELPERQPRFVVYSYKYVHDDGRVSYPLCFIFSSPVGCKPEQQMMYAGSKNRLVQTAELTKVQTGMGLQSVRERWCGSWV

SEQ ID NO: 55649 - protein, 468 aa, Homo sapiens
MSLLGDPLQALPPSAAPTGPLLAPPAGATLNRLREPLLRRLSELLDQAPEGRGWRRLAELAGSRGRLRLSCLDLEQCSLKVLEPEGSPSLCLLKLMGEKGCTVTELSDFLQAMEHTEVLQLLSPPGIKITVNPESKAVLAGQFVKLCCRATGHPFVQYQWFKMNKEIPNGNTSELIFNAVHVKDAGFYVCRVNNNFTFEFSQWSQLDVCDIPESFQRSVDGVSESKLQICVEPTSQKLMPGSTLVLQCVAVGSPIPHYQWFKNELPLTHETKKLYMVPYVDLEHQGTYWCHVYNDRDSQDSKKVEIIIGRTDEAVECTEDELNNLGHPDNKEQTTDQPLAKDKVALLIGNMNYREHPKLKAPLVDVYELTNLLRQLDFKVVSLLDLTEYEMRNAVDEFLLLLDKGVYGLLYYAGHGYENFGNSFMVPVDAPNPYRSENCLCVQNILKLMQEKETGLNVFLLDMCRKRN

SEQ ID NO: 55650 - protein, 150 aa, Homo sapiens
MSITRLHEQKLVQHVVSQNCDGLHLRSGLPRTAISELHGNMYIEVCTSCVPNREYVRVFDVTERTALHRHQTGRTCHKCGTQLRDTIVHFGERGTLGQPLNWEAATEAASRADTILCLGSSLKVLKKYPRLWCMTKPPSRRPKLYIVNLQ

SEQ ID NO: 55651 - protein, 656 aa, Homo sapiens
MSACNTFTEHVWKPGECKNCFKPKSLHQLPPDPEKAPITHGNVKTNANHSNNHRIRNTGNFRPPVAKKPTIAVKPTMIVADGQSICGELSIQEHCENKPVIIGWNRNRAALSQKPLNNNNEDDEGISHVPKPYGNNDSAKKMSDNNNGLTEVLKEIAGLDTAPQIRGNETNSRETFLGRINDCYKRSLERKLPPSCMIGGIKETQGKHVILSGSTEVISNEGGRFCYPEFSSGEESEEDVLFSNMEEEHESWDESDEELLAMEIRMRGQPRFANFRANTLSPVRFFVDKKWNTIPLRNKSLQRICAVDYDDSYDEILNGYEENSVVSYGQGSIQSMVSSDSTSPDSSLTEESRSETASSLSQKICNGGLSPGNPGDSKDMKEIEPNYESPSSNNQDKDSSQASKSSIKVPETHKAVLALRLEEKDGKIAVQTEKEESKASTDVAGQAVTINLVPTEEQAKPYRVVNLEQPLCKPYTVVDVSAAMASEHLEGPVNSPKTKSSSSTPNSPVTSSSLTPGQISAHFQKSSAIRYQEVWTSSTSPRQKIPKVELITSGTGPNVPPRKNCHKSAPTSPTATNISSKTIPVKSPNLSEIKFNSYNNAGMPPFPIIIHDEPTYARSSKNAIKVPIVINPNAYDNLAIYKSFLGTSGELSVKEK

SEQ ID NO: 55652 - protein, 157 aa, Homo sapiens
MPASWTSPQKSSALAPEDHGSSYEGSVSFRDVAIDFSREEWRHLDLSQRNLYRDVMLETYSHLLSVGYQVPKPEVVMLEQGKEPWALQGERPRHSCPGEKLWDHNQHRKIIGYKPASSQDQKIYSGEKSYECAEFGKSFTWKSQFKASQNSYRRKTI

SEQ ID NO: 55653 - protein, 22 aa, Homo sapiens
MSWPRRLLLRYLFPALLLHAVK

SEQ ID NO: 55654 - protein, 64 aa, Homo sapiens
  MOD_RES (1)..(1): Any amino acid
XILSLPHQASPVSRTPSLPAVDTSYINTSLIQDYRHPFHMTPMPYDLQALQHLLACRCSSSSFR

SEQ ID NO: 55655 - protein, 127 aa, Homo sapiens
MPKNKGKGGKNRRRGKNENESEKRELVFKEDGQEYAQVIKMLGNGRLEALCFDGVKRLCHIRGKLRKKDNKADVILKYNADEARSLKAYGELPEHAKINETDTFGPGDDDEIQFDDIGDDDEDIDDI

SEQ ID NO: 55656 - protein, 28 aa, Homo sapiens
IAAFFAESLPSVGGQIIPPAGYFSQVAE

SEQ ID NO: 55657 - protein, 98 aa, Homo sapiens
  MOD_RES (1)..(1): Any amino acid
XSPNNTNPFGSTFCFGLQRMIFEVMQNNHIASVTLYGPPRYSSVHLWPAGASRGHRLQREAQSLSLDSWTQELSTNKEAGEVNPCPMHIGKTWGSFCD

SEQ ID NO: 55658 - protein, 511 aa, Homo sapiens
SCGARRRAARGTSPGRRLSTAWSQPQPPPEEYAGADDVSQSPVAEEPSWVPSPRPPVPHESPEPPSGRSLVQRDIQAFLNQCGASPGEARHWLTQFQTCHHSADKPFAVIEVDEEVLKCQQGVSSLAFALAFLQRMDMKPLVVLGLPAPTAPSGCLSFWEAKAQLAKSCKVLVDALRHNAAAAVPFFGGGSVLRAAEPAPHASYGGIVSVETDLLQWCLESGSIPILCPIGETAARRSVLLDSLEVTASLAKALRPTKIIFLNNTGGLRDSSHKVLSNVNLPADLDLVCNAEWVSTKERQQMRLIVDVLSRLPHHSSAVITAASTLLTELFSNKGSGTLFKNAERMLRVRSLDKLDQGRLVDLVNASFGKKLRDDYLASLRPRLHSIYVSEGLPLSRCARYNAAAILTMEPVLGGTPYLDKFVVSSSRQGQGSGQMLWECLRRDLQTLFWRSRVTNPINPWYFKHSDGSFSNKQWIFFWFGLADIRDSYELVNHAKGLPDSFHKPASDPGS

SEQ ID NO: 55659 - protein, 41 aa, Homo sapiens
MIKECDMAKDCLYDMSFVMMKCFHHFFRKLKLSQKLLEKLV

SEQ ID NO: 55660 - protein, 46 aa, Homo sapiens
MLSRNDDICIYGGLGLGGLLLLAVVLLSACLCWLHRREHCLALEPL

SEQ ID NO: 55661 - protein, 92 aa, Homo sapiens
VFKSRTPPEAIALCSSLLEYTPSSRLSPLEACAHSFFDELRCLGTQLPNNRPLPPLFNFSAELSIQPSLNAILIPPHLRSPAGTTTLTPSSQ

SEQ ID NO: 55662 - protein, 38 aa, Homo sapiens
  MOD_RES (1)..(1): Any amino acid
XGVFGRCQKVPAMDFYRYEVSPVALQRLRVALQKLSGT

SEQ ID NO: 55663 - protein, 1022 aa, Homo sapiens [sequence omitted]

SEQ ID NO: 55664 - protein, 1063 aa, Homo sapiens
MPHLPLASFRPPFWGLRHSRGLPRFHSVSTQSEPHGSPISRRNREAKQKRLREKQATLEAEIAGESKSPAESIKAWRPKELVLYEIPTKPGEKKDVSGPLPPAYSPRYVEAAWYPWWVREGFFKPEYQARLPQATGETFSMCIPPPNVTGSLHIGHALTVAIQDALVRWHRMRGDQVLWVPGSDHAGIATQAVVEKQLWKERGVRRHELSREAFLREVWQWKEAKGGEICEQLRALGASLDWDRECFTMDVGSSVAVTEAFVRLYKAGLLYRNHQLVNWSCALRSAISDIEVENRPLPGHTQLRLPGCPTPVSFGLLFSVAFPVDGEPDAEVVVGTTRPETLPGDVAVAVHPDDSRYTHLHGRQLRHPLMGQPLPLITDYAVQPHVGTGAVKVTPAHSPADAEMGARHGLSPLNVIAEDGTMTSLCGDWLQGLHRFVAREKIMSVLSERGLFRGLQNHPMVLPICSRSGDVIEYLLKNQWFVRCQEMGARAAKAVESGALELSPSFHQKNWQHWFSHIGDWCVSRQLWWGHQIPAYLVVEDHAQGEEDCWVVGRSEAEAREVAAELTGRPGAELTLERDPDVLDTWFSSALFPFSALGWPQETPDLARFYPLSLLETGSDLLLFWVGRMVMLGTQLTGQLPFSKVLLHPMVRDRQGRKMSKSLGNVLDPRDIISGVEMQVLQEKLRSGNLDPAELAIVAAAQKKDFPHGIPECGTDALRFTLCSHGVQAGDLHLSVSEVQSCRHFCNKIWNALRFILNALGEKFVPQPAEELSPSSPMDAWILSRLALAAQECERGFLTRELSLVTHALHHFWLHNLCDVYLEAVKPVLWHSPRPLGPPQVLFSCADLGLRLLAPLMPFLAEELWQRLPPRPGCPPAPSISVAPYPSACSLEHWRQPELERRFSRVQEVVQVLRALQATYQLTKARPRVLLQSSEPGDQGLFEAFLEPLGTLGYCGAVGLLPPGAAAPSGWAQAPLSDTAQVYMELQGLVDPQIQLPLLAARRYKLQKQLDSLTARTPSEGEAGTQRQQKLSSLQLELSKLDKAASHLRQLMDEPPAPGSPEL

SEQ ID NO: 55665 - protein, 60 aa, Homo sapiens
MMSSVSTESKLQQAVSLQGVDPETCMIVFKNHWAQVVKILEKHDPLKNTQAKYGSIPPDE

SEQ ID NO: 55666 - protein, 1076 aa, Homo sapiens
MDIEFECTVSGKPVPTVNWMKNGDVVIPSDYFQIVGGSNLRILGVVKSDEGFYQCVAENEAGNAQTSAQLIVPKPAIPSSSVLPSAPRDVVPVLVSSRFVRLSWRPPAEAKGNIQTFTVFFSREGDNRERALNTTQPGSLQLTVGNLKPEAMYTFRVVAYNEWGPGESSQPIKVATQPELQVPGPVENLQAVSTSPTSILITWEPPAYANGPVQGYRLFCTEVSTGKEQNIEVDGLSYKLEGLKKFTEYSLRFLAYNRYGPGVSTDDITVVTLSDVPSAPPQNVSLEVVNSRSIKVSWLPPPSGTQNGFITGYKIRHRKTTRRGEMETLEPNNLWYLFTGLEKGSQYSFQVSAMTVNGTGPPSNWYTAETPENDLDESQVPDQPSSLHVRPQTNCIIMSWTPPLNPNIVVRGYIIGYGVGSPYAETVRVDSKQRYYSIERLESSSHYVISLKAFNNAGEGVPLYESATTRSITDLSTPMLPPVGVQAVALTHDAVRVSWADNSVPKNQKTSEVRLYTVRWRTSFSASAKYKSEDTTSLSYTATGLKPNTMYEFSVMVTKNRRSSTWSMTAHATTYEAAPTSAPKDLTVITREGKPRAVIVSWQPPLEANGKITAYILFYTLDKNIPIDDWIMETISGDRLTHQIMDLNLDTMYYFRIQARNSKGVGPLSDPILFRTLKVEHPDKMANDQGRHGDGGYWPVDTNLIDRSTLNEPPIGQMHPPHGSVTPQKNSNLLVIIVVTVGVITVLVVVIVAVICTRRSSAQQRKKRATHSAGKRKGSQKDLRPPDLWIHHEEMEMKNIEKPSGTDPAGRDSPIQSCQDLTPVSHSQSETQLGSKSTSHSGQDTEEAGSSMSTLERSLAARRAPRAKLMIPMDAQSNNPAVVSAIPVPTLESAQYPGILPSPTCGYPHPQFTLRPVPFPTLSVDRGFGAGRTVSEGPTTQQPPMLPPSQPEHSSSEEAPSRTIPTACVRPTHPLRSFANPLLPPPMSAIEPKVPYTPLLSQPGPTLPKTHVKTASLGLAGKARSPLLPVSVPTAPEVSEESHKPTEDSANVEMEWVKQYAISYYPLLLPASSFSV

SEQ ID NO: 55667 - protein, 193 aa, Homo sapiens
MEVAEPSSPTEEEEEEEEHSAEPRPRTRSNPEGAEDRAVGAQASVGSRSEGEGEAASADDGSLNTSGAGPKSWQVPPPAPEVQIRTPRVNCPEKVIICLDLSEEMSLPKLESFNGSKTNALNVSQKMIEMFVRTKHKIDKSHEFALVVVNDDTAWLSGLTSDPRELCSCLYDLETASCSTFTPPPDLEGLFSL

SEQ ID NO: 55668 - protein, 63 aa, Homo sapiens
MEQPHDEKDPASKRPHPVCLFVLPALRTHPSAQLGPLGGDAMIPTFTALLCLGDPGGSGVPSG

SEQ ID NO: 55669 - protein, 100 aa, Homo sapiens
MDPIEKDWCDWAMISRPYSTLRDCLEHFAELFDLGFPNPLAERIIFETHQIHFANCSLVQPTFSDPPEDVLLAMIIAPICLIPFLITLVVWRSKDSEAQA

SEQ ID NO: 55670 - protein, 109 aa, Homo sapiens
MKETIMNQEKLAKLQAQVRIGGKVNMFTNQGTVIHFNNPKVQASLAANTFTITGHAETKQLTEMLPSILNQLGADSLTSLRRLAEALPKQSVDGKAPLATGEDDDDEVP

SEQ ID NO: 55671 - protein, 57 aa, Homo sapiens
  MOD_RES (1)..(1): Any amino acid
XKSENGEAYQRKKAAATGLPEGPAVPVPSRGNLAQPGGSSWRRIALLILAITIHNVP

SEQ ID NO: 55672 - protein, 128 aa, Homo sapiens
MMKEFSSTAQGNREVFHAGTSQRHESHHNGDFCFQDIDKDIHDIEFQWQEDERNGHEALMTKIKKLTGSTERYDQNYAGNKPVKYQLGFSFHSHLPELHIFHTEEKIDNQVVKSIHDASLVSTAQRIS

SEQ ID NO: 55673 - protein, 188 aa, Homo sapiens
LDPPAVVAESVSSLTIADAFIAAGESSAPTPPRPALPRRFICSFPDCSANYSKAWKLDAHLCKHTGERPFVCDYEGCGKAFIRDYHLSRHILTHTGEKPFVCAANGCDQKFNTKSNLKKHFERKHENQQKQYICSFEDCKKTFKKHQQLKIHQCQHTNEPLFKLCMSKRMFLCGKNMDGTSETCERNP

SEQ ID NO: 55674 - protein, 58 aa, Homo sapiens
MSQKPAKEGPRLSKNQKYSEHFSIHCCPPFTFLNSKKEIVDRKYSICKSGCFYQKKEE

SEQ ID NO: 55675 - protein, 105 aa, Homo sapiens
MSFSDSSATFLLNEGSADSYTSRPSLDSDVSLEEDRESARREVESQAQQQLERAKHKPVAFAVRTNVSYCGVLDEECPVQGSGVNFEAKDFLHIKEEIWEPFQPE

SEQ ID NO: 55676 - protein, 2482 aa, Homo sapiens
MPPNINWKEIMKVDPDDLPRQEELADNLLISLSKVEVNELKSEKQENVIHLFRITQSLMKMKAQEVELALEEVEKAGEEQAKFENQLKTKVMKLENELEMAQQSAGGRDTRFLRNEICQLEKQLEQKDRELEDMEKELEKEKKVNEQLALRNEEAENENSKLRRENKRLKKKNEQLCQDIIDYQKQIDSQKETLLSRRGEDSDYRSQLSKKNYELIQYLDEIQTLTEANEKIEVQNQEMRKNLEESVQEMEKMTDEYNRMKAIVHQTDNVIDQLKKENDHYQLQVQELTDLLKSKNEEDDPIMVAVNAKVEEWKLILSSKDDEIIEYQQMLHNLREKLKNAQLDADKSNVMALQQGIQERDSQIKMLTEQVEQYTKEMEKNTCIIEDLKNELQRNKGASTLSQQTHMKIQSTLDILKEKTKEAERTAELAEADAREKDKELVEALKRLKDYESGVYGLEDAVVEIKNCKNQIKIRDREIEILTKEINKLELKISDFLDENEALRERVGLEPKTMIDLTEFRNSKHLKQQQYRAENQILLKEIESLEEERLDLKKKIRQMAQERGKRSATSGLTTEDLNLTENISQGDRISERKLDLLSLKNMSEAQSKNEFLSRELIEKERDLERSRTVIAKFQNKLKELVEENKQLEEGMKEILQAIKEMQKDPDVKGGETSLIIPSLERLVNAIESKNAEGIFDASLHLKAQVDQLTGRNEELRQELRESRKEAINYSQQLAKANLKIDHLEKETSLLRQSEGSNVVFKGIDLPDGIAPSSASIINSQNEYLIHLLQELENKEKKLKNLEDSLEDYNRKFAVIRHQQSLLYKEYLSEKETWKTESKTIKEEKRKLEDQVQQDAIKVKEYNNLLNALQMDSDEMKKILAENSRKITVLQVNEKSLIRQYTTLVELERQLRKENEKQKNELLSMEAEVCEKIGCLQRFKEMAIFKIAALQKVVDNSVSLSELELANKQYNELTAKYRDILQKDNMLVQRTSNLEHLECENISLKEQVESINKELEITKEKLHTIEQAWEQETKLGNESSMDKAKKSITNSDIVSISKKITMLEMKELNERQRAEHCQKMYEHLRTSLKQMEERNFELETKFAELTKINLDAQKVEQMLRDELADSVSKAVSDADRQRILELEKNEMELKVEVSKLREISDIARRQVEILNAQQQSRDKEVESLRMQLLDYQAQSDEKSLIAKLHQHNVSLQLSEATALGKLESITSKLQKMEAYNLRLEQKLDEKEQALYYARLEGRNRAKHLRQTIQSLRRQFSGALPLAQQEKFSKTMIQLQNDKLKIMQEMKNSQQEHRNMENKTLEMELKLKGLEELISTLKDTKGAQKVINWHMKIEELRLQELKLNRELVKDKEEIKYLNNIISEYERTISSLEEEIVQQNKFHEERQMAWDQREVDLERQLDIFDRQQNEILNAAQKFEEATGSIPDPSLPLPNQLEIALRKIKENIRIILETRATCKSLEEKLKEKESALRLAEQNILSRDKVINELRLRLPATAEREKLIAELGRKEMEPKSHHTLKIAHQTIANMQARLNQKEEVLKKYQRLLEKAREEQREIVKKHEEDLHILHHRLELQADSSLNKFKQTAWDLMKQSPTPVPTNKHFIRLAEMEQTVAEQDDSLSSLLVKLKKVSQDLERQREITELKVKEFENIKLQLQENHEDEVKKVKAEVEDLKYLLDQSQKESQCLKSELQAQKEANSRAPTTTMRNLVERLKSQLALKEKQQKALSRALLELRAEMTAAAEERIISATSQKEAHLNVQQIVDRHTRELKTQVEDLNENLLKLKEALKTSKNRENSLTDNLNDLNNELQKKQKAYNKILREKEEIDQENDELKRQIKRLTSGLQGKPLTDNKQSLIEELQRKVKKLENQLEGKVEEVDLKPMKEKNAKEELIRWEEGKKWQAKIEGIRNKLKEKEGEVFTLTKQLNTLKDLFAKADKEKLTLQRKLKTTGMTVDQVLGIRALESEKELEELKKRNLDLENDILYMRAHQALPRDSVVEDLHLQNRYLQEKLHALEKQFSKDTYSKPSQNQISGIESDDHCQREQELQKENLKLSSENIELKFQLEQANKDLPRLKNQVRDLKEMCEFLKKEKAEVQRKLGHVRGSGRSGKTIPELEKTIGLMKKVVEKVQRENEQLKKASGILTSEKMANIEQENEKLKAELEKLKAHLGHQLSMHYESKTKGTEKIIAENERLRKELKKETDAAEKLRIAKNNLEILNEKMTVQLEETGKRLQFAESRGPQLEGADSKSWKSIVVTRMYETKLKELETDIAKKNQSITDLKQLVKEATEREQKVNKYNEDLEQQIKILKHVPEGAETEQGLKRELQVLRLANHQLDKEKAELIHQIEANKDQSGAESTIPDADQLKEKIKDLETQLKMSDLEKQHLKEEIKKLKKELENFDPSFFEEIEDLKYNYKEEVKKNILLEEKVKKLSEQLGVELTSPVAASEEFEDEEESPVNFPIY

SEQ ID NO: 55677 - protein, 814 aa, Homo sapiens
MASRERLFELWMLYCTKKDPDYLKLWLDTFVSSYEQFLDVDFEKLPTRVDDMPPGISLLPDNILQVLRIQLLQCVQKMADGLEEQQQALSILLVKFFIILCRNLSNVEEIGTCSYINYVITMTTLYIQQLKSKKKEKEMADQTCIEEFVIHALAFCESLYDPYRNWRHRISGRILSTVEKSRQKYKPASLTVEFVPFFYQCFQESEHLKESLKCCLLHLFGAIVAGGQRNALQAISPATMEVLMRVLADCDSWEDGDPEEVGRKAELTLKCLTEVVHILLSSNSDQRQVETSTILENYFKLLNSDHSALPNQRRSRQWENRFIALQIKMLNTITAMLDCTDRPVLQAIFLNSNCFEHLIRLLQNCKVFQGQLDCLAISTIQALTAVMNKSPAAKEVFKERIGYTHMLEVLKSLGQPPLELLKELMNMAVEGDHTSVGILGISNVQPLLLLIQWLPELQSHDLQIFISDWLKRICCINRQSRTTCVNANMGIRIIETLDLHSSLHQTCAENLIAIHGSLGSQSVSSEEIRRLLRLLRVDESESVHPYVTPVTRAILTMARKLSLESALQYFNLSHSMAGISVPPIQKWPGSAFSFSAWFCLDQDQLTLGIANKGGKRKQLYSFFTGSGMGFEAFITHSGMLVVAVCTKREYATVMLPDHSFCDSLWHNITVVHMPGKRPFGQSFVYIYDNGQQKVSAPLRFPAMNEPFTSCCIGSAGQRTTTPPPSQIPDPPFSSPITPHRTSFGGILSSASWGGTIEKSKLITKLISAGTQDSEWGCPTSLEGQLGSVIIFYEPLQPPQVKALYLAGLQKFNLS

SEQ ID NO: 55678 - protein, 119 aa, Homo sapiens
MEEEASSPGLGCSKPHLEKLTLGITRILESSPGVTEVTIIEKPPAERHMISSWEQKNNCVMPEDVKNFYLMTNGFHMTWSVKLDVFSANKENMELPSLYLHPNHRRLEPSKKTAKFSSL

SEQ ID NO: 55679 - protein, 242 aa, Homo sapiens
  MOD_RES (1)..(1): Any amino acid
XTVKKVVNYLPRVGVGTSFGLPQTRRISLASPRQLFKASNMTQRWQHREISNFEYLMFLNTIAGRSYNDLNQYPVFPWVITNYESEELDLTLPTNFRDLSKPIGALNPKRAAFFAERYESWEDDQVPKFHYGTHYSTASFVLAWLLRIEPFTTYFLNLQGGKFDHADRTFSSISRAWRNSQRDTSDIKELIPEFYYLPEMFVNFNNYNLGVMDDGTVVSDVELPPWAKTSEEFVHINRLVPF

SEQ ID NO: 55680 - protein, 254 aa, Homo sapiens
MHTTESKNEHLEDENFQTSTTPQSLIDPNNTAQEETKTVLSDTEEIKPQTKKETYISCPLRGVLNVIITNGMLLAGFTIRNVPFINEHVHVPNTWSSILRSIALTIILIRAGLGLDPQALRHLKVVCFRLAVGPCLMEASAAAVFSHFIMKFPWQWAFLLGFVLGAVSPAVVVPYMMVLQENGYGVEEGIPTLLMAASSMDDILAITGFNTCLSIVFSSGGILNNAIASIRNVCISLLAGIVLGFFVRYFPSED

SEQ ID NO: 55681 - protein, 225 aa, Homo sapiens
MAGKDIPGQASLVFDVALLDLHNPKDSISIENKVVPENCERISQSGDFLRYHYNGTLLDGTLFDSSYSRNRTFDTYIGQGYVIPGMDEGLLGVCIGEKRRIVVPPHLGYGEEGRGNIPGSAVLVFDIHVIDFHNPSDSISITSHYKPPDCSVLSKKGDYLKYHYNASLLDGTLLDSTWNLGKTYNIVLGSGQVVLGMDMGLREMCVGEKRTVIIPPHLGYGEAGV

SEQ ID NO: 55682 - protein, 232 aa, Homo sapiens
MGEKSENCGVPEDLLNGLKVTDTQEAECAGPPVPDPKNQHSQSKLLRDDEAHLQEDQGEEECFHDCSASFEEEPGADKVENKSNEDVNSSELDEEYLIELEKNMSDEEKQKRREESTRLKEEGNEQFKKGDYIEAESSYSRALEMCPSCFQKERSILFSNRAAARMKQDKKEMAINDCSKAIQLNPSYIRAILRRAELYEKTDKLDEALEDYKSILEKDPSIHQAREACMVN

SEQ ID NO: 55683 - protein, 221 aa, Homo sapiens
MEFFISMSETIKYNDDDHKTLFLKTLNEQRLEGEFCDIAIVVEDVKFRAHRCVLAACSTYFKKLFKKLEVDSSSVIEIDFLRSDIFEEVLNYMYTAKISVKKEDVNLMMSSGQILGIRFLDKLCSQKRDVSSPDENNGQSKSKYCLKINRPIGDAADTQDDDVEEIGDQDDSPSDDTVEGTPPSQEDGKSPTTTLRVQEAILKELGSEEVRKVNCYGQEVE

SEQ ID NO: 55684 - protein, 56 aa, Homo sapiens
METRPRLGATCLLGFSFLLLVISSDGHNGLGKGFGDHIHWRTLEDGKKEAAARIHV

SEQ ID NO: 55685 - protein, 499 aa, Homo sapiens
MWKEIPIPFYLSVYFFDVMNPSEILKGEKPQVRERGPYVYREFRHKSNITFNNNDTVSFLEYRTFQFQPSKSHGSESDYIVMPNILVLGAAVMMENKPMTLKLIMTLAFTTLGERAFMNRTVGEIMWGYKDPLVNLINKYFPGMFPFKDKFGLFAELNNSDSGLFTVFTGVQNISRIHLVDKWNGLSKVDFWHSDQCNMINGTSGQMWPPFMTPESSLEFYSPEACRSMKLMYKESGVFEGIPTYRFVAPKTLFANGSIYPPNEGFCPCLESGIQNVSTCRFSAPLFLSHPHFLNADPVLAEAVTGLHPNQEAHSLFLDIHPVTGIPMNCSVKLQLSLYMKSVAGIGQTGKIEPVVLPLLWFAESGAMEGETLHTFYTQLVLMPKVMHYAQYVLLALGCVLLLVPVICQIRSQVGAGQRAARADSHSLACWGKGASDRTLWPTAAWSPPPAAVLRLCRSGSGHCWGLRSTLASFACRVATTLPVLEGLGPSLGGGTGGL

SEQ ID NO: 55686 - protein, 111 aa, Homo sapiens
MAAEEADVDIEGDVVAAAGAQPGSGENTASVLQKDHYLDSSWRTENGLIPWTLDNTISEENRAVIEKMLLEEEYYLSKKSQPEKVWLDQKEDDKKYMKRLNLAEDGPKFQS

SEQ ID NO: 55687 - protein, 242 aa, Homo sapiens
MMDLRNTPAKSLDKFIEDYLLPDTCFRMQINHAIDIICGFLKERCFRGSSYPVCVSKVVKGGSSGKGTTLRGRSDADLVVFLSPLTTFQDQLNRRGEFIQEIRRQLEACQRERAFSVKFEVQAPRWGNPRALSFVLSSLQLGEGVEFDVLPAFDALGQLTGGYKPNPQIYVKLIEECTDLQKEGEFSTCFTELQRDFLKQRPTKLKSLIRLVKHWYQNVWPSHQACVRRSLGSCHLSMPWSS

SEQ ID NO: 55688 - protein, 45 aa, Homo sapiens
MATLKDQLIYNLLKEEQTPQNKITVVGVGAVGMACAISILMKWIS

SEQ ID NO: 55689 - protein, 37 aa, Homo sapiens
MREGHHVHARADTSPPRSSFTNSWKPKGRRRLAGKPR

SEQ ID NO: 55690 - protein, 115 aa, Homo sapiens
MSSKIQPAPPEEYVPMVKEVGLALRTLLATVDETIPLLPASTHREIEMAQKLLNSDLGELINKMKLAQQYVMTSLQQEYKKQMLTAAHALAVDAKNLLDVIDQARLKMLGQTRPH

SEQ ID NO: 55691 - protein, 361 aa, Homo sapiens
MVRSVAWAGFMVLLMIPWGSAAKLVCYFTNWAQYRQGEARFLPKDLDPSLCTHLIYAFAGMTNHQLSTTEWNDETLYQEFNGLKKMNPKLKTLLAIGGWNFGTQKFTDMVATANNRQTFVNSAIRFLRKYSFDGLDLDWEYPGSQGSPAVDKERFTTLVQDLANAFQQEAQTSGKERLLLSAAVPAGQTYVDAGYEVDKIAQNLDFVNLMAYDFHGSWEKVTGHNSPLYKRQEESGAAASLNVDAAVQQWLQKGTPASKLILGMPTYGRSFTLASSSDTRVGAPATGSGTPGPFTKEGGMLAYYEVCSWKGATKQRIQDQKVPYIFRDNQWVGFDDVESFKTKVMLTLRQGDCKMTDVQAA

SEQ ID NO: 55692 - protein, 95 aa, Homo sapiens
MRYKVMKNWGVIGGIAAALAAGIYVIWGPITERKKRRKGLVPGLVNLGNTCFMNSLLQGLSACPAFIRWLEEFTSQYSRDQKEPPSHQYLSLTLL

SEQ ID NO: 55693 - protein, 203 aa, Homo sapiens
MSDTEEQEYEEEQPEEEAAEEEEEAPEEPEPVAEPEEERPKPSRPVVPPLIPPKIPEGERVDFDDIHRKRMEKDLLELQTLIDVHFEQRKKEEEELVALKERIERRRSERAEQQRFRTEKERERQAKLAEEKMRKEEEEAKKRAEDDAKKKKVLSNMGAHFGGYLVKAEQKRGKRQTGREMKVRILSERKKPLDIDYMGEEQL

SEQ ID NO: 55694 - protein, 154 aa, Homo sapiens
MRDLYHYITSYVVDGEIIIYGPAYSGRETAYSNASLLIQNVTREDAGSYTLHIIKGDDGTRGVTGRFTFTLHLETPKPSISSSNLNPRETMEAVSLTCDPETPDASYLWWMNGQSLPMTHSLKLSETNRTLFLLGVTKYTAGPYECEIRNPVSA

SEQ ID NO: 55695 - protein, 767 aa, Homo sapiens
MGHPPLEFSDCYLDSPDFRERLKCYEQELERTNKFIKDVIKDGNALISAMRNYSSAVQKFSQTLQSFQFDFIGDTLTDDEINIAESFKEFAELLNEVENERMMMVHNASDLLIKPLENFRKEQIGFTKERKKKFEKDGERFYSLLDRHLHLSSKKKESQLQEADLQVDKERHNFFESSLDYVYQIQEVQESKKFNIVEPTRNHFSSTREEMEELKKRMKEAPQTCKLPGQPTIEGYLYTQEKWALGISWVKYYCQYEKETKTLTMTPMEQKPGAKQGPLDLTLKYCVRRKTESIDKRFCFDIETNERPGTITLQALSEANRRLWMEAMDGKEPIYHSPITKQQEMELNEVGFKFVRKCINIIETKGIKTEGLYRTVGSNIQVQKLLNAFFDPKCPGDVDFHNSDWDIKTITSSLKFYLRNLSEPVMTYRLHKELVSAAKSDNLDYRLGAIHSLVYKLPEKNREMLELLIRHLVNVCEHSKENLMTPSNMGVIFGPTLMRAQEDTVAAMMNIKFQNIVVEILIEHFGKIYLGPPEESAAPPVPPPRVTARRHKPITISKRLLRERTVFYTSSLDESEDEIQHQTPNGTITSSIEPPKPPQHPKLPIQRSGETDPGRKSPSRPILDGKLEPCPEVDVGKLVSRLQDGGTKITPKATNGPMPGSGPTKTPSFHIKRPAPRPLAHHKEGDADSFSKVRPPGEKPTIIRPPVRPPDPPCRAATPQKPEPKPDIVAGNAGEITSSVVASRTRFFETASRKTGSSQGRLPGDES

SEQ ID NO: 55696 - protein, 243 aa, Homo sapiens
MTKRKKLRTSGEGLCPPKPLKNPRLGDFYGDPQSSMLGCLHHPEEPEGKLGPVPSTQQHGEEPGKAVSSSPDEETGSPCRLLRQPEKEPAPLPPSQNSFGRFVPQFAKSRKTVTRKEEMKDEDRGSGAFSLLFPSGNKPGPCWPGPSSHANGDPVAVAKAQPRTFVGIQASEASRMEDATNVVRGLIVELSNLNRLIMGTHRDLEAFKRLNYRKTKLGGKAPLPYPSKGPGNIPRGDPPWREL

SEQ ID NO: 55697 - protein, 146 aa, Homo sapiens
MAACRALKAVLVDLSGTLHIEDAAVPGAQEALKRFVTNTTKESKQDLLERLRKLEFDISEDEIFTSLTAARSLLERKQVRPMLLVDDRALPDFKGIQTSDPNAVVMGLAPEHFHYQILNQAFRLLLDGAPLIAIHKARYYKRKDGL

SEQ ID NO: 55698 - protein, 754 aa, Homo sapiens
MASGADSKGDDLSTAILKQKNRPNRLIVDEAINEDNSVVSLSQPKMDELQLFRGDTVLLKGKKRREAVCIVLSDDTCSDEKIRMNRVVRNNLRVRLGDVISIQPCPDVKYGKRIHVLPIDDTVEGITGNLFEVYLKPYFLEAYRPIRKGDIFLVRGGMRAVEFKVVETDPSPYCIVAPDTVIHCEGEPIKREDEEESLNEVGYDDIGGCRKQLAQIKEMVELPLRHPALFKAIGVKPPRGILLYGPPGTGKTLIARAVANETGAFFFLINGPEIMSKLAGESESNLRKAFEEAEKNAPAIIFIDELDAIAPKREKTHGEVERRIVSQLLTLMDGLKQRAHVIVMAATNRPNSIDPALRRFGRFDREVDIGIPDATGRLEILQIHTKNMKLADDVDLEQVANETHGHVGADLAALCSEAALQAIRKKMDLIDLEDETIDAEVMNSLAVTMDDFRWALSQSNPSALRETVVEVPQVTWEDIGGLEDVKRELQELVQYPVEHPDKFLKFGMTPSKGVLFYGPPGCGKTLLAKAIANECQANFISIKGPELLTMWFGESEANVREIFDKARQAAPCVLFFDELDSIAKARGGNIGDGGGAADRVINQILTEMDGMSTKKNVFIIGATNRPDIIDPAILRPGRLDQLIYIPLPDEKSRVAILKANLRKSPVAKEVEEDDPVPEIRRDHFEEAMRFARRSVSDNDIRKYEMFAQTLQQSRGFGSFRFPSGNQGGAGPSQGSGGGTGGSVYTEDNDDDLYG

SEQ ID NO: 55699 - protein, 310 aa, Homo sapiens
MSLRSGGRRRADPGADGEASRDDGATSSVSALKRLERSQWTDKMDLRFGFERLKEPGEKTGWLINMHPTEILDEDKRLGSAVDYYFIQDDGSRFKVALPYKPYFYIATRKGCEREVSSFLSKKFQGKIAKVETVPKEDLDLPNHLVGLKRNYIRLSFHTVEDLVKVRKEISPAVKKNREQDHASDAYTALLSSVLQRGGVITDEEETSKKIADQLDNIVDMREYDVPYHIRLSIDLKIHVAHWYNVRYRGNAFPVEITRRDDLVERPDPVVLAFDIETTKLPLKFPDAETDQIMMISYMIDGQGDCFRRY

SEQ ID NO: 55700 - protein, 670 aa, Homo sapiens
  MOD_RES (1)..(1): Any amino acid
XPEKDGAATRVDAVCTHRPDPKSPGLDRERLYWKLSQLTHGITELGPYTLDRHSLYVNGFTHQSSMTTTRTPDTSTMHLATSRTPASLSGPMTASPLLVLFTINFTITNLRYEENMHHPGSRKFNTTERVLQGLLRPVFKNTSVGPLYSGCRLTLLRPKKDGAATKVDAICTYRPDPKSPGLDREQLYWELSQLTHSITELGPYTLDRDSLYVNGFTQRSSVPTTSIPGTPTVDLGTSGTPVSKPGPSAASPLLVLFTLNFTITNLRYEENMQHPGSRKFNTTERVLQGLLRSLFKSTSVGPLYSGCRLTLLRPEKDGTATGVDAICTHHPDPKSPRLDREQLYWELSQLTHNITELGPYALDNDSLFVNGFTHRSSVSTTSTPGTPTVYLGASKTPASIFGPSAASHLLILFTLNFTITNLRYEENMWPGSRKFNTTERVLQGLLRPLFKNTSVGPLYSGCRLTLLRPEKDGEATGVDAICTHRPDPTGPGLDREQLYLELSQLTHSITELGPYTLDRDSLYVNGFTHRSSVPTTSTGVVSEEPFTLNFTINNLRYMADMGQPGSLKFNITDNVMQHLLSPLFQRSSLGARYTGCRVIALRSVKNGAETRVDLLCTYLQPLSGPGLPIKQVFHELSQQTHGITRLGPYSLDKDSLYLNGHHTLQRQSTT

SEQ ID NO: 55701 - protein, 183 aa, Homo sapiens
  MOD_RES (1)..(1): Any amino acid
XQMKTPEGCTEIQLPAEVRLVPSSCRGLQFVVGDGLHLRLQTQAKLGTKLISMFNQSSQTQECCTFYCQSCGEVIIKDRKLLRVLPLPSENWGALVGEWCCHPDPFANKSLHPQENDCFIGDSFFLVNLRTSLWQQRPELSPVEMCCVSSDNHCKLEPKANTKVICKRCKVMLGETVSSARSC

SEQ ID NO: 55702 - protein, 286 aa, Homo sapiens
MAPLLLQLAVLGAALAAAALVLISIVAFTTATKMPALHRHEEEKFFLNAKGQKETLPSIWDSPTKQLSVVVPSYNEEKRLPVMMDEALSYLEKRQKRDPAFTYEVIVVDDGSKDQTSKVAFKYCQKYGSDKVRVITLVKNRGKGGAIRMNQMAIACGSRAHLEKESIAQRSYFRTLLMYGFHFLVWFLCVKGIRDTQCGFKLFTREAASRTFSSLHVERWAFDVELLYIAQFFKIPIAEIAVNWTEIEGSKLVPFWSWLQMGKDLLFIRLRYLTGAWRLEQTRKMN

SEQ ID NO: 55703 - protein, 65 aa, Homo sapiens
MGLELYLDLLSQPCRAVYIFAKKNDIPFELRIVDLIKGQHLSDAFAQVNPLKKVPALKDGDFTLT

SEQ ID NO: 55704 - protein, 159 aa, Homo sapiens
MGNHAGKRELNAEKASTNSETNRGESEKKRNLGELSRTTSEDNEVFGEADANQNNGTSSQDTAVTDSKRTADPKNAWQDAHPADPGSRPHLIRLFSRDAPGREDNTFKDRPSESDELQTIQEDSAATSESLDVMASQKRPSQRHGSKYLATASTMDHAR

SEQ ID NO: 55705 - protein, 72 aa, Homo sapiens
LGIYDEGNFSFSNAWTYLVIINNMSQLFAMYCLLLFYKVLKEELSPIQPVGKFLCVKLVVFVSFCIRGNGKL

SEQ ID NO: 55706 - protein, 82 aa, Homo sapiens
MGLCPSTRETAPPAVLDAQSLAQSFFNRLWEVAGQWQKQVPLAARASQRQWLVSIHAIRNTRRKMEDRHVSLPSFNQLFGLS

SEQ ID NO: 55707 - protein, 101 aa, Homo sapiens
MAVAPSFNMTNPQPAIEGGISEVEIISQQVDEETKSIAPVQLVNFAYRDLPLAAVDLSTAGSQLLSNLDEDYQREGSNWLKPCCGKRAAVWQFPAHSSLLA

SEQ ID NO: 55708 - protein, 236 aa, Homo sapiens
MQPAERSRVPRIDPYGFERPEDFDDAAYEKFFSSYLVTLTRRAIKWSRLLQGGGVPRSRTVKRYVRKGVPLEHRARVWMVLSGAQAQMDQNPGYYHQLLQGERNPRLEDAIRTDLNRTFPDNVKFRKTTDPCLQRTLYNVLLAYGHHNQGVGYCQGMNFIAGYLILITNNEEESFWLLDALVGRILPENIFRTWKLIHGHRRQAPRELQGPAAGTGVSVPVPCVARLYTDDAPFQS

SEQ ID NO: 55709 - protein, 208 aa, Homo sapiens
MPAIPAHGAELEFVQIIIIVVVMMVMVVVITCLLSHYKLSARSFISRHSQGRRREDALSSEGCLWPSESTVSGNGIPEPQVYAPPRPTDRLAVPPFAQRERFHRFQPTYPYLQHEIDLPPTISLSDGEEPPPYQGPCTLQLRDPEQQLELNRESVRAPPNRTIFDSDLMDSARLGGPCPPSSNSGISATCYGSGGRMEGPPPTYSEVI

SEQ ID NO: 55710 - protein, 321 aa, Homo sapiens; identical to SEQ ID NO: 49154

SEQ ID NO: 55711 - protein, 283 aa, Homo sapiens
MDLTGLLLDEEGTFSLAGFQDFTFLPGHQKLSARIRRRLYYGWDWEADCSLEELSSPVADIAVELLQKAAPSPIRRLQKKYVAHVSREACISPCAMMLALVYIERLRHRNPDYLQHVSSSDLFLISMVRHPLPISLKSQEPAMSSAPPLLVPLQMVASKYLYDEGEEEEVFNDEWGAAGGVAVPTLNALERGFLSAMDWHLYTDPREIFEVLSWLESCVAEQQGRWRGWYTYTDLCVLLEQPTWQLALGSLCQRLVKLSCLLAVAYVSSVALAVASVAVIHQS

SEQ ID NO: 55712 - protein, 1121 aa, Homo sapiens
MAPTLFQKLFSKRTGLGAPGRDARDPDCGFSWPLPEFDPSQIRLIVYQDCERRGRNVLFDSSVKRRNEDISVSGSRCSSDANMLGEMMFGSVAMSYKGSTLKIHQIRSPPQLMLSKVFTARTGSSICGSLNTLQDSLEFINQDNNTLKADNNTVINGLLGNIGLSQFCSPRRAFSEQGPLRLIRSASFFAVHSNPMDMPGRELNEDRDSGIARSASLSSLLITPFPSPNSSLTRSCASSYQRRWRRSQTTSLENGVFPRWSIEESFNLSDESCGPNPGIVRKKKIAIGVIFSLSKDEDENNKFNEFFFSHFPLFESHMNKLKSAIEQAMKMSRRSADASQRSLAYNRIVDALNEFRTTICNLYTMPRIGEPVWLTMMSGTPEKNHLCYRFMKEFTFLMENASKNQFLPALITAVLTNHLAWVPTVMPNGQPPIKIFLEKHSSQSVDMLAKTHPYNPLWAQLGDLYGAIGSPVRLARTVVVGKRQDMVQRLLYFLTYFIRCSELQETHLLENGEDEAIVMPGTVITTTLEKGEIEESEYVLVTMHRNKSSLLFKESEEIRTPNCNCKYCSHPLLGQNVENISQQEREDIQNSSKELLGISDECQMISPSDCQEENAVDVKQYRDKLRTCFDAKLETVVCTGSVPVDKCALSESGLESTEETWQSEKLLDSDSHTGKAMRSTGMVVEKKPPDKIVPASFSCEAAQTKVTFLIGDSMSPDSDTELRSQAVVDQITRHHTKPLKEERGAIDQHQETKQTTKDQSGESDTQNMVSEEPCELPCWNHSDPESMSLFDEYFNDDSIETRTIDDVPFKTSTDSKDHCCMLEFSKILCTKNNKQNNEFCKCIETVPQDSCKTCFPQQDQRDTLSILVPHGDKESSDKKIAVGTEWDIPRNESSDSALGDSESEDTGHDMTRQVSSYYGGEQEDWAEEDEIPFPGSKLIEVSAVQPNIANFGRSLLGGYCSSYVPDFVLQGIGSDERFRQCLMSDLSHAVQHPVLDEPIAEAVCIIADMDKWTVQVASSQRRVTDNKLGKEVLVSSLVSNLLHSTLQLYKHNLSPNFCVMHLEDRLQELYFKSKMLSEYLRGQMRVHVKELGVVLGIESSDLPLLAAVASTHSPYVAQILL

SEQ ID NO: 55713 - protein, 312 aa, Homo sapiens
MEESEPERKRARTDEVPAGGSRSEAEDEDDEDYVPYVPLRQRRQLLLQKLLQRRRKGAAEEEQQDSGSEPRGDEDDIPLGPQSNVSLLDQHQHLKEKAEARKESAKEKQLKEEEKILESVAEGRALMSVKEMAKGITYDDPIKTSWTPPRYVLSMSEERHERVRKKYHILVEGDGIPPPIKSFKEMKFPAAILRGLKKKGIHHPTPIQIQGIPTILSGRDMIGIAFTGSGKTLVFTLPVIMFCLEQEKRLPFSKREGPYGLIICPSRELARQTHGILEYYCRLLQEDSSPLLRCALCIGGMSVKEQMETIRQ

SEQ ID NO: 55714 - protein, 42 aa, Homo sapiens
MYEILKALDYCHSMGIMHRDVKPHNVMIDHEHRKLRLIDWGL

SEQ ID NO: 55715 - protein, 131 aa, Homo sapiens
MSKDALNLAQMQEQTLQLEQQSKLKQLVNEDLRKQEESVQKHHQTFLESIRAAGTLFGEGFRAFVTDRDKVTATQVSRRLLSRPQDVLEGVVLSPSLEARVRDIAIMTRNIKKNRGLYRHILLYGPPGTGK

SEQ ID NO: 55716 - protein, 160 aa, Homo sapiens
MLGLRPPLLALVGLLSLGCVLSQECTKFKVSSCRECIESGPGCTWCQKLNFTGPGDPDSIRCDTRPQLLMRGCAADDIMDPTSLAETQEDHNGGQKQLSPQKVTLYLRPGQAAAFNVTFRRAKGYPIDLYYLMDLSYSMLDDLRNVKKLGGDLLRALNEI

SEQ ID NO: 55717 - protein, 121 aa, Homo sapiens
  MOD_RES (1)..(1): Any amino acid
XATQELLLQLQKDNRDGRQRKQELEKLMRGLEAESESLNQRLQDLSERERSLLRRRSQAAQPLQGEAREAARERAERVRRRLEEAERHKEYLEQHSRQLQEQWEELSSQKPGKPRPYKPRP

SEQ ID NO: 55718 - protein, 275 aa, Homo sapiens
  MOD_RES (1)..(1): Any amino acid
XDEEGIRRLGALTLEQPETGSCYVAQAGLELLDSSNPVSASPVTETTELVESLSLQGSYAGKIHSIGDAFRNFKNLRSLDLSRNLITSLKGIQYLCSLQDLNLYYNNIPSLVEVSRLQPLPFLKELDLRLNPVVRKDTDYRLFAVYTLQTLEKLDDRTVREGERKAAKLHFSQLGNSENFLLEVEKSSREKTMKNCVTGESSASKVSANVDSRIEMDSNKGLFIPFPNREIKDSLSTSATQGNGTRDQKLDTFPLGTQICMPQPISTVTLLYLSM

SEQ ID NO: 55719 - protein, 106 aa, Homo sapiens
  MOD_RES (1)..(1): Any amino acid
XFPGSSQARHVNHSATEALGELRERAPGQGTNGFQLLRHAVKRDLLPPRTPPYQGTHSVAQAGVQWHCYRLLQPLPPGLKCSSHLSLPNTWDHRHAPLHTASFFRC

SEQ ID NO: 55720 - protein, 361 aa, Homo sapiens
MDKLSGSRPRLGPPLPPPRCVDSPGWREDAPSPSFLPAPGTWRHKHPFLQAQEEDEEENKYELPPCEALPLSLAPAHLPGTEEDSLYLDHSGPLGPSKPSPPLPQPTMVRGLSRSPSFPTRPIPGCHFPLKGAVSLPVAGKQGPIFGRREQGASSRVVPGPPKKPDEDLYLECEPDPVLALTQTLSFQVLMPSGPLPRTSVVPRPTTAPQETRNGTADAASKEGRKSSLPSVAPTGSASAAEDSDLLTQPWYSGNCDRYAVESALLHLQKDGAYTVRPSSGPHGSQPFTLAVLLRGRVFNIPIRRLDGGRHYALGREGRNREELFSSVAAMVQHFMWHPLPLVDRHSGSRELTCLLFPTKP

SEQ ID NO: 55721 - protein, 470 aa, Homo sapiens
MLEPLNEGFLSRISGLLLCRWTCRHCCQKCYESSCCQSSEDEVEILGPFPAQTPPWLMASRSSDKDGDSVHTASEVPLTPRTNSPDGRRSSSDTSKSTYSLTRRISSLESRRPSSPLIDIKPIEFGVLSAKKEPIQPSVLRRTYNPDDYFRKFEPHLYSLDSNSDDVDSLTDEEILSKYQLGMLHFSTQYDLLHNHLTVRVIEARDLPPPISHDGSRQDMAHSNPYVKICLLPDQKNSKQTGVKRKTQKPVFEERYTFEIPFLEAQRRTLLLTVVDFDKFSRHCVIGKVSVPLCEVDLVKGGHWWKALIPSSQNEVELGELLLSLNYLPSAGRLNVDVIRAKQLLQTDVSQGSDPFVKIQLVHGLKLVKTKKTSFLRGTIDPFYNESFSFKVPQEELENASLVFTVFGHNMKSSNDFIGRIVIGQYSSGPSETNHWRRMLNTHRTAVEQWHSLRSRAECDRVSPASLEVT

SEQ ID NO: 55722 - protein, 85 aa, Homo sapiens
MGSQAAAEWRNWASWEVSSSLSGCSMGCFKDDRIVFWTWMFSTYFMEKWAPRQDDMLFYVRRKLAYSGSESGADGRKMRKRRARR

SEQ ID NO: 55723 - protein, 689 aa, Homo sapiens
MAGMSQRPPSMYWCVGPEESAVCPERAMETLNGAGDTGGKPSTRGGDPAARSRRTEGIRAAYRRGDRGGARDLLEEACDQCASQLEKGQLLSIPAAYGDLEMVRYLLSKRLVELPTEPTDDNPAVVAAYFGHTAVVQELLESLPGPCSPQRLLNWMLALACQRGHLGVVKLLVLTHGADPESYAVRKNEFPVIVRLPLYAAIKSGNEDIAIFLLRHGAYFCSYILLDSPDPSKHLLRKYFIEASPLPSSYPGKTALRVKWSHLRLPWVDLDWLIDISCQITELDLSANCLATLPSVIPWGLINLRKLNLSDNHLGELPGVQSSDEIICSRLLEIDISSNKLSHLPPGFLHLSKLQKLTASKNCLEKLFEEENATNWIGLRKLQELDISDNKLTELPALFLHSFKSLNSLNVSRNNLKVFPDPWACPLKCCKASRNALECLPDKMAVFWKNHLKDVDFSENALKEVPLGLFQLDALMFLRLQGNQLAALPPQEKWTCRQLKTLDLSRNQLGKNEDGLKTKRIAFFTTRGRQRSGTEAASVLEFPAFLSESLEVLCLNDNHLDTVPPSVCLLKSLSELYLGNNPGLRELPPELGQLGNLWQLDTEDLTISNVPAEIQKEGPKAMLSYLRAQLRKAEKCKLMKMIIVGPPRQGKSTLLEILQTGRAPQVVHGEATIRTTKWELQRPAGSRAK

SEQ ID NO: 55724 - protein, 357 aa, Homo sapiens
MASEGTNIPSPVVRQIDKQFLICSICLERYKNPKVLPCLHTFCERCLQNYIPAHSLTLSCPVCRQTSILPEKGVAALQNNFFITNLMDVLQRTPGSNAEESSILETVTAVAAGKPLSCPNHDGNIFSNDGQFKSRFGIRGRSPGQLQRPTGVAVHPSGDIIIADYDNKWVSIFSSDGKFKTKIGSGKLMGPKGVSVDRNGHIIVVDNKACCVFIFQPNGKIVTRFGSRGNGDRQFAGPHFAAVNSNNEIIITDFHNHSVKVFNQEGEFMLKFGSNGEGNGQFNAPTGVAVDSNGNIIVADWGNSRIQVFDGSGSFLSYINTSADPLYGPQGLALTSDGHVVVADSGNHCFKVYRYLQ

SEQ ID NO: 55725 - protein, 129 aa, Homo sapiens
MMKTLLLFVGLLLTWESGQVLGDQTVSDNELQEMSNQGSKYVNKEIQNAVNGVKQIKTLIEKTNEERKTLLSNLEEAKKKKEDALNETRESETKLKELPGVCNETMMALWEECKPCLKQTCMKFYARVC

SEQ ID NO: 55726 - protein, 444 aa, Homo sapiens
  MOD_RES (1)..(1): Any amino acid
XQKRRVPNKHYVYIIRVTWSSGSTEAIYRRYSKFFDLQMQMLDKFPMEGGQKDPKQRIIPFLPGKILFRRSHIRDVAVKRLIPIDEYCKALIQLPPYISQCDEVLQFFETRPEDLNPPKEEHIGKKKSGGDQTSVDPMVLEQYVVVANYQKQESSEISLSVGQVVDIIEKNESGWWFVSTAEEQGWVPATCLEGQDGVQDEFSLQPEEVSWRYWSLPRPVGRRRTLGDLYAISWRQEEKYTVIYPYTARDQDEMNLERGAVVEVIQKNLEGWWKIRYQGKEGWAPASYLKKNSGEPLPPKPGPGSPSHPGALDLDGVSRQQNAVGREKELLSSQRDGRFEGRPVPDGDAKQRSPKMRQRPPPRRDMTIPRGLNLPKPPIPPQVEEEYYTIAEFQTTIPDGISFQAGLKVEDHKNVHLESPVEVPLRRIKMRTALGKHVAASMEM

SEQ ID NO: 55727 - protein, 334 aa, Homo sapiens
MKGLYFQQSSTDEEITFVFQEKEDLPVTEDNFVKLQVKACALSQINTKLLAEMKMKKDLFPVGREIAGIVLDGILPLDSEDPGLCEVVRVHEHYLVHKPEKVTWTEAAGSIRDGVRAYTALHYLSHLSPGKSVLIMDGASAFGTIAIQLAHHRGAKVISTACSLEDKQCLERFRPPIARVIDVSNGKVHVAESCLEETGGLGVDIVLDAGVRLYSKDDEPAVKLQLLPHKHDIITLLGVGGHWVTTEENLQLDPPDSHCLFLKGATLAFLNDEVWNLSNVQQGKYLCILKDVMEKLSTGVFRPQLDEPIPLYEAKVSMEAVQKNQGRKKQVVQF

SEQ ID NO: 55728 - protein, 155 aa, Homo sapiens
MAASSSEISEMKGVEESPKVPGEGPGHSEAETGPPQVLAGVPDQPEAPQPGPNTTAAPVDSGPKAGLAPETTETPAGASETAQATDLSLSPGGESKANCSPEDPCQETVSKPEPAAGGRGRGPASGPGSQALKHRGAGGGSPHHHRLLRHQLRRV

SEQ ID NO: 55729 - protein, 183 aa, Homo sapiens [sequence omitted]

SEQ ID NO: 55730 - protein, 107 aa, Homo sapiens
MGPLQFRDVAIEFSLEEWHCLDAAQRNLYRDVMLENYRNLIFLGIVVSKPNLITCLEQGKKPLTMKRHEMIAKPPDGVSVFHPGCSELRSRHCIPVWATEQDSISKK

SEQ ID NO: 55731 - protein, 343 aa, Homo sapiens
MRLAFERFIGLPLSRWLGVRDQTRRQVKPNATLEKHFLTEGHRPKEPQLSLLAAQCGLTLQQTQRWFRRRRNQDRPQLTKKFCEASWRFLFYLSSFVGGLSVLYHESWLWAPVMCWDRYPNQTLKPSLYWWYLLELGFYLSLLIRLPFDVKRKDFKEQVIHHFVAVILMTFSYSANLLRIGSLVLLLHDSSDYLLEACKMVNYMQYQQVCDALFLIFSFVFFYTRLVLFPTQILYTTYYESISNRGPFFGYYFFNGLLMLLQLLHVFWSCLILRMLYSFMKKGQMEKDIRSDVEESDSSEEAAAAQEPLQLKNGAAGGPRPAPTDGPRSRVAGRLTNRHTTAT

SEQ ID NO: 55732 - protein, 60 aa, Homo sapiens
MSTEGGFGGTSSSDAQQSLQSFWPRVMEEIRNLTVKDFRVQELPLARIKKIMKLDEDVKM

SEQ ID NO: 55733 - protein, 925 aa, Homo sapiens
MSEFRIHHDVNELLSLLRVHGGDGAEVYIDLLQKNRTPYVTTTVSAHSAKVKIAEFSRTPEDFLKKYDELKSKNTRNLDPLVYLLSKLTEDKETLQYLQQNAKERAELAAAAVGSSTTSINVPAAASKISMQELEELRKQLGSVATGSTLQQSLELKRKMLRDKQNKKNSGQHLPIFPAWVYERPALIGDFLIGAGISTDTALPIGTLPLASQESAVVEDLLYVLVGVDGRYVSAQPLAGRQSRTFLVDPNLDLSIRELVHRILPVAASYSAVTRFIEEKSSFEYGQVNHALAAAMRTLVKEHLILVSQLEQLHRQGLLSLQKLWFYIQPAMRTMDILASLATSVDKGECLGGSTLSLLHDRSFSYTGDSQAQELCLYLTKAASAPYFEVLEKWIYRGIIHDPYSEFMVEEHELRKERIQEDYNDKYWDQRYTIVQQQIPSFLQKMADKILSTGKYLNVVRECGHDVTCPVAKEIIYTLKERAYVEQIEKAFNYASKVLLDFLMEEKELVAHLRSIKRYFLMDQGDFFVHFMDLAEEELRKPVEDITPPRLEALLELALRMSTANTDPFKDDLKVRVGCSGTCQIFTQVWQKRELCHAVATSSHRGPKAALPGLQCPRDSRAVRGPRCGLWSTDAVSTTPPVTEAHLRCRHVSCRKALTRYQMLFRHMFYCKHVERQLCSVWISNKTAKQHSLHSAQWFAGAFTLRQRMLNFVQNIQYYMMFEVMEPTWHILEKNLKSASNIDDVLGHHTGFLDTCLKDCMLTNPELLKVFSKLMSVCVMFTNCMQKFTQSMKLDGELGGQTLEHSTVLGLPAGAEERARKELARKHLAEHADTVQLVSGFEATINKFDKNFSAHLLDLLARLSIYSTSDCEHGMASVISRLDFNGFYTERLERLSAERSQKATPQVPVLRGPPAPAPRVAVTAQ

SEQ ID NO: 55734 - protein, 173 aa, Homo sapiens
MRPWSSPAQLVAGAQPAGRGDPLGPRPIPPPRFRRASSQREPPYPRPAEPALELAGSKCQPDTPAASLCPADSPSQHRVMPPGPASWANVGSRPHTVANGHELFEVSEERDEEVAAFCHMLDILRSGSDIQDYFLTGYVWSAVTPSPEHLGDEVNLKVTVLCDRLQEALTFTC

SEQ ID NO: 55735 - protein, 283 aa, Homo sapiens
MKRRQKRKHLENEESQETAEKGGGIQRIHRDSPQPQSPLAQVQERGETPPRSQHVSLSSYSSYKTCVSSLCVNKEERGMKIYYMQVQMNKGVAVSWETEETLESLEKQPRMEEVTLSEVVRVGTPPSDVSTRNLLSDSEPSGEEKEHEERTESDSLPGSPTVEDTPRAKTPDWLVTMENGFRCMACCRVFTTMEALQEHVQFGIREGFSCHVFHLTMAQLTGNMESESTQDEQEEENGNEKEEEEKPEAKEEEGQPTEEDLGLRRSWSQCPGCVFHSPKDRNS

SEQ ID NO: 55736 - protein, 901 aa, Homo sapiens
  MOD_RES (1)..(1): Any amino acid
XCQSKAPGVDDQMNKHHFPLPQGQDCVVEKNNQHKPKSHISNINVEAKFNTVVSQSAPNHCTLAASASTPPSNRKALSCVHITLCPKTSSKLDSGTLDERFHSLDAASKARMNSEFNFDLHTVSSRSLEPTSKLLTSKPVAQDQESLGFLGPKSSLDFQVVQPSLPDSNTITQDLKTIPSQNSQIVTSRQIQVNISDFEGHSNPEGTPVFADRLPEKMKTPLSAFSEKLSSDAVTQITTESPEKTLFSSEIFINAEDRGHEIIEPGNQKLRKAPVKFASSSSVQQVTFSRGTDGQPLLLPYKPSGSTKMYYVPQLRQIPPSPDSKSDTTVESSHSGSNDAIAPDFPAQVLGTRDDDLSATVNIKHKEGIYSKRVVTKASLPVGEKPLQNENADASVQVLITGDENLSDKKQQEIHSTRAVTEAAQAKEKESLQKDTADSSAAAAAEHSAQVGDPEMKNLPDTKAITQKEEIHRKKTVPEEAWPNNKESLQINIEESECHSEFENTTRSVFRSAKFYIHHPVHLPSDQDICHESLGKSVFMRHSWKDFFQHHPDKHREHMCLPLPYQNMDKTKTDYTRIKSLSINVNLGNKEVMDTTKSQVRDYPKHNGQISDPQRDQKVTPEQTTQHTVSLNELWNKYRERQRQQRQPELGDRKELSLVDRLDRLAKILQNPITHSLQVSESTHDDSRGERSVKEWSGRQQQRNKLQKKKRFKSLEKSHKNTGELKKSKVLSHHRAGRSNQIKIEQIKFDKYILSKQPGFNYISNTSSDCRPSEESELLTDTTTNILSGTTSTVESDILTQTDREVALHERSSSVSTIDTARLIQAFGHERVCLSPRRIKLYSSITNQQRRYLEKRSKHSKKVLNTGHPLVTSEHTRRRHIQIQGSKFTVSQASSKCISTV

SEQ ID NO: 55737 - protein, 1173 aa, Homo sapiens
MDPSAPQPRAETSGKDIWHPGERCLAPSPDNGKLCEASIKSITVDENGKSFAVVLYADFQERKIPLKQLQEVKFVKDCPRNLIFDDEDLEKPYFPNRKFPSSSVAFKLSDNGDSIPYTINRYLRDYQREGTRFLYGHYIHGGGCILGDDMGLGKTVQVISFLAAVLHKKGTREDIENNMPEFLLRSMKKEPLSSTAKKMFLIVAPLSVLYNWKDELDTWGYFRVTVLHGNRKDNELIRVKQRKCEIALTTYETLRLCLDELNSLEWSAVIVDEAHRIKNPKARVTEVMKALKCNVRIGLTGTILQNNMKELWCVMDWAVPGLLGSGTYFKKQFSDPVEHGQRHTATKRELATGRKAMQRLAKKMSGWFLRRTKTLIKDQLPKKEDRMVYCSLTDFQKAVYQTVLETEDVTLILQSSEPCTCRSGQKRRNCCYKTNSHGETVKTLYLSYLTVLQKVANHVALLQAASTSKQQETLIKRICDQVFSRFPDFVQKSKDAAFETLSDPKYSGKMKVLQQLLNHCRKNRDKVLLFSFSTKLLDVLQQYCMASGLDYRRLDGSTKSEERLKIVKEFNSTQDVNICLVSTMAGGLGLNFVGANVVVLFDPTWNPANDLQAIDRAYRIGQCRDVKVLRLISLGTVEEIMYLRQIYKQQLHCVVVGSENAKRYFEAVQGSKEHQGELFGIHNLFKFRSQGSCLTKDILEREGQVEAGIMTATTWLKEGPPAHKLEMPRQPDCQECRGTEQAAEPLAKEACDLCSDFSDEEPVGATGIKTAKNKAPDSSKASSSPGQLTLLQCGFSKLLETKCKAVEDSDGNTASDDESSDEQPTCLSTEAKDAGCEKNQDSLGTSKHQKLDNILNPKEKHIFYKSEKILEQNISSKSDEKKIKNTDKHCILQNVTESEDSDVICPTQYTTERFPDNSIRFKPPLEGSEDSETEHTVKTRNNDNSRNTDDKRNGIISKKLSPENTTLKSILKRKGTSDISDESDDIEISSKSRVRKRASSLRFKRIKETKKELHNSPKTMNKTNQVYAANEDHNSQFIDDYSSSDESLSVSHFSFSKQSHRPRTIRDRTSFSSKLPSHNKKNSTFIPRKPMKCSNEKVVNQEQSYESMDKFLDGVQEVAYIHSNQNVIGSSKAENHMSRWAAHDVFELKQFSQLPANIAVCSSKEYTISQPTL

SEQ ID NO: 55738 - protein, 209 aa, Homo sapiens
MAPFVHARAGKTKAQLAGGVILGVALWLRHDPQTTNLLYLELGDKPAPNTFYVGIYILIAVGAVMMFVGFLGCYGAIQESQCLLGTFFTCLVILFACEVAAGIWGFVNKDQIAKDVKQFYDQALQQAVVDDDANNAKAVVKTFHETLDCCGSSTLTALTTSVLKNNLCPSGSNIISNLFKEDCHQKIDDLFSGKLYLIGIAAIVVAVIM

SEQ ID NO: 55739 - protein, 106 aa, Homo sapiens
MEPRAVGVSKQDIREQIWGYMESQNLADFPRPVHHRIPNFKSKKTLLVPTPRLRTGLFNKITPPPGATKDILRKCATSQVPPERLGRQDRISKTCSIGNCLTSSKV

SEQ ID NO: 55740 - protein, 3530 aa, Homo sapiens
MAKEEDEEKKAKKGKKGKKAPEPEKPKRSLKGTSRLFMGFRDRTPKISKKGQFRSASAFFWGLHTGPQKTKRKRKARTVLKSTSKLMTQMRMGKKKRAMKGKKPSFMVIRFPGRRGYGRLRPRARSLSKASTAINWLTKKFLLKKAEESGSEQATVDAWLQRSSSRMGSRKLPFPSGAEILRPGGRLRRFPRSRSIYASGEPLGFLPFEDEAPFHHSGSRKSLYGLEGFQDLGEYYDYHRDGDDYYDRQSLHRYEEQEPYLAGLGPYSPAWPPYGDHYYGYPPEDPYDYYHPDYYGGPFDPGYTYGYGYDDYEPPYAPPSGYSSPYSYHDGYEGEAHPYGYYLDPYAPYDAPYPPYDLPYHTPYDVPYFDPYGVHYTVPYAEGVYGGGDEAIYPPEVPYFYPEESASAFVYPWVPPPIPSPHNPYAHAMDDIAELEEPEDAGVERQGTSFRLPSAAFFEQQGMDKPARSKLSLIRKFRLFPRPQVKLFGKEKLEVPLPPSLDIPLPLGDADEEEDEEELPPVSAVPYGHPFWGFLTPRQRNLQRALSAFGAHRGLGFGPEFGRPVPRPATSLARFLKKTLSEKKPIARLRGSQKARAGGPAVREAAYKRFGYKLAGMDPEKPGTPIVLRRAQPRARSSNDARRPPAPQPAPRTLSHWSALLSPPVPPRPPSSGPPPAPPLSPALSGLPRPASPYGSLRRHPPPWAAPAHVPPAPQASWWAFVEPPAVSPEVPPDLLAFPGPRPSFRGSRRRGAAFGFPGASPRASRRRAWSPLASPQPSLRSSPGLGYCSPLAPPSPQLSLRTGPFQPPFLPPARRPRSLQESPAPRRAAGRLGPPGSPLPGSPRPPSPPLGLCHSPRRSSLNLPSRLPHTWRRLSEPPTRAVKPQVRLPFHRPPRAGAWRAPLEHRESPREPEDSETPWTVPPLAPSWDVDMPPTQRPPSPWPGGAGSRRGFSRPPPVPENPFLQLLGPVPSPTLQPEDPAADMTRVFLGRHHEPGPGQLTKSAGPTPEKPEEEATLGDPQLPAETKPPTPAPPKDVTPPKDITPPKDVLPEQKTLRPSLSYPLAACDQTRATWPPWHRWGTLPQAAAPLAPIRAPEPLPKGGERRQAAPGRFAVVMPRVQKLSSFQRVGPATLKPQVQPIQDPKPRACSLRWSCLWLRADAYGPWPRVHTHPQSCHLGPGAACLSLRGSWEEVGPPSWRNKMHSIRNLPSMRFREQHGEDGVEDMTQLEDLQETTVLSNLKIRFERNLIYTYIGSILVSVNPYQMFGIYGPEQVQQYNGRALGENPPHLFAVANLAFAKMLDAKQNQCIIISGESGSGKTEATKLILRYLAAMNQKREVMQQVQILEATPLLESFGNAKTVRNDNSSRFGKFVEIFLEGGVISGAITSQYLLEKSRIVFQAKNERNYHIFYELLAGLPAQLRQAFSLQEAETYYYLNQGGNCEIAGKSDADDFRRLLAAMEVLGFSSEDQDSIFRILASILHLGNVYFEKYETDAQEVASVVSAREIQAVAELLQISPEGLQKAITFKVTETMREKIFTPLTVESAVDARDAIAKVLYALLFSWLITRVNALVSPRQDTLSIAILDIYGFEDLSFNSFEQLCINYANENLQYLFNKIVFQEEQEEYIREQIDWQEITFADNQPCINLISLKPYGILRILDDQCCFPQATDHTFLQKCHYHHGANPLYSKPKMPLPEFTIKHYAGKVTYQVHKFLDKNHDQVRQDVLDLFVRSRTRVVAHLFSSHAPQAAPQRLGKSSSVTRLYKAHTVAAKFQQSLLDLVEKMERCNPLFMRCLKPNHKKEPGLFEPDVVMAQLRYSGVLETVRIRKEGFPVRLPFQGFIDRYCCLVALKHDLPANGDMCVSVLSRLCKVMPNMYRVGVSKLFLKEHLYQLLESMREHVLNLAALTLQRCLRGFFIKRRFRSLRHKIILLQSRARGYLARQRYQQMRRSLVKFRSLVHAYVSRRRYLKLRAEWRCQVEGALLWEQEELSKREVVAVGHLEVPAELAGLLQAVAGLGLAQVPQVAPVRTPRLQAEPRVTLPLDINNYPMAKFVQCHFKEPAFGMLTVPLRTPLTQLPAEHHAEAVSIFKLILRFMGDPHLHGARENIFGNYIVQKGLAVPELRDEILAQLANQVWHNHNAHNAERGWLLLAACLSGFAPSPCFNKYLLKFVSDYGRNGFQAVCQHRLMQAMGRAQQQGSGAARTLPPTQLEWTATYEKASMALDVGCFNGDQFSCPVHSWSTGEEVAGDILRHRGLADGWRGWTVAMKNGVQWAELAGHDYVLDLVSDLELLRDFPRQKSYFIVGTEGPAASRGGPKVVFGNSWDSDEDMSTRPQPQEHMPKVLDSDGYSSHNQDGTNGETEAQRGTATHQESDSLGEPAVPHKGLDCYLDSLFDPVLSYGDADLEKPTAIAYRMKGGGQPGGGSSSGTEDTPRRPPEPKPIPGLDASTLALQQAFIHKQAVLLAREMTLQATALQQQPLSAALRSLPAEKPPAPEAQPTSVGTGPPAKPVLLRATPKPLAPAPLAKAPRLPIKPVAAPVLAQDQASPETTSPSPELVRYSTLNSEHFPQPTQQIKNIVRQYQQPFRGGRPEALRKDGGKVFMKRPDPHEEALMILKGQMTHLAAAPGTQVSREAVALVKPVTSAPRPSMAPTSALPSRSLEPPEELTQTRLHRLINPNFYGYQDAPWKIFLRKEVFYPKDSYSHPVQLDLLFRQILHDTLSEACLRISEDERLRMKALFAQNQLDTQKPLVTESVKRAVVSTARDTWEVYFSRIFPATGSVGTGVQLLAVSHVGIKLLRMVKGGQEAGGQLRVLRAYSFADILFVTMPSQNMLEFNLASEKVILFSARAHQVKTLVDDFILELKKDSDYVVAVRNFLPEDPALLAFHKGDIIHLQPLEPPRVGYSAGCVVRRKVVYLEELRRRGPDFGWRFGTIHGRVGRFPSELVQPAAAPDFLQLPTEPGRGRAAAVAAAVASAAAAQEVGRRREGPPVRARSADHGEDALALPPYTMLEFAQKYFRDPQRRPQDGLRLKSKEPRESRTLEDMLCFTKTPLQESLIELSDSSLSKMATDMFLAVMRFMGDAPLKGQSDLDVLCNLLKLCGDHEVMRDECYCQVVKQITDNTSSKQDSCQRGWRLLYIVTAYHSCSEVLHPHLTRFLQDVSRTPGLPFQGIAKACEQNLQKTLRFGGRLELPSSIELRAMLAGRSSKRQLFLLPGGLERHLKIKTCTVALDVVEEICAEMALTRPEAFNEYVIFVVTNRGQHVCPLSRRAYILDVASEMEQVDGGYMLWFRRVLWDQPLKFENELYVTMHYNQVLPDYLKGLFSSVPASRPSEQLLQQVSKLASLQHRAKDHFYLPSVREVQEYIPAQLYRTTAGSTWLNLVSQHRQQTQALSPHQARAQFLGLLSALPMFGSSFFFIQSCSNIAVPAPCILAINHNGLNFLSTETHELMVKFPLKEIQSTRTQRPTANSSYPYVEIALGDVAAQRTLQLQLEQGLELCRVVAVHVENLLSAHEKRLTLPPSEITLL

SEQ ID NO: 55741 - protein, 105 aa, Homo sapiens
MAMMVFPREEKLSQDEIVLGTKAVIQGLETLRGEHRALLAPLVAPEAGEAEPGSQERCILLRRSLEAIELGLGEAQVILALSSHLGAVESEKQKLRAQVRRLVQE

SEQ ID NO: 55742 - protein, 256 aa, Homo sapiens
  MOD_RES (1)..(1): Any amino acid
XDIALIGLAVMGQNLILNMNDHGFVVCAFNRTVSKVDDFLANEAKGTKVVGAQSLKEMVSKLKKPRRIILLVKAGQAVDDFIEKLRRCRDLKAKGILFVGSGVSGGEEGARYGPSLMPGGNKEAWPHIKTIFQGIAAKVGTGEPCCDWVGDEGAGHFVKMVHNGIEYGDMQLICEAYHLMKDVLGMAQDEMAQAFEDWNKTELDSFLIEITANILKFQDTDGKHLLPKIRDSAGQKGTGKWTAISALEYGVPVTLI

SEQ ID NO: 55743 - protein, 102 aa, Homo sapiens
  MOD_RES (1)..(1): Any amino acid
XFLLVWYYCTLTIRESILINNGSRIKGWWVFHHYVSTFLSGVMLTWPDGLMYQKFRNQFLSFSMYQSFVQFLQYYYQSGCLYRLRALGERHTMDLTVVLAAF

SEQ ID NO: 55744 - protein, 480 aa, Homo sapiens
MAAGGDHGSPDSYRSPLASRYASPEMCFVFSDRYKFRTWRQLWLWLAEAEQTLGLPITDEQIQEMKSNLENIDFKMAAEEEKRLRHDVMAHVHTFGHCCPKAAGIIHLGATSCYVGDNTDLIILRNALDLLLPKLARVISRLADFAKERASLPTLGFTHFQPAQLTTVGKRCCLWIQDLCMDLQNLKRVRDDLRFRGVKGTTGTQASFLQLFEGDDHKVEQLDKMVTEKAGFKRAFIITGQTYTRKVDIEVLSVLASLGASVHKICTDIRLLANLKEMEEPFEKQQIGSSAMPYKRNPMRSERCCSLARHLMTLVMDPLQTASVQWFERTLDDSANRRICLAEAFLTADTILNTLQNISEGLVVYPKVIERRIRQELPFMATENIIMAMVKAGGSRQDCHEKIRVLSQQAASVVKQEGGDNDLIERIQVDAYFSPIHSQLDHLLDPSSFTGRASQQVQRFLEEEVYPLLKPYESVMKTCP

SEQ ID NO: 55745 - protein, 124 aa, Homo sapiens
MSSEPPPPPQPPTHQASVGLLDTPRSRERSPSPLRGNVVPSPLPTRRTRTFSATVRASQGPVYKGVCKCFCRSKGHGFITPADGGPDIFLHISDVEGEYVPVEGDEVTYKMCSIPPKNEKLQAV

SEQ ID NO: 55746 - protein, 271 aa, Homo sapiens
  MOD_RES (1)..(1): Any amino acid
XEFTHLEFPRRVLPKELGQRMLYRDQNMTGWAYKKIELEDLRFPLVCGEGKKARVMATIGVTRGLGDHSLKVCSSTLPIKPFLSCFPEVRVYDLTQYEHCPDDVLVLGTDGLWDVTTDCEVAATVDRVLSAYEPNDHSSLDFISAPEPALSSCSLGTSAGWSPTMAAIRKKLVIVGDGACGKTCLLIVFSKDQFPEVYVPTVFENYIADIEVDGKQVELALWDTAGQEDYDRLRPLSYPDTDVILMCFSIDSPDSLENIPEKWTPEVKHFC

SEQ ID NO: 55747 - protein, 168 aa, Homo sapiens
PASPRGSSFIALSHKLGLPPGKASELLLPAAASLRQDLLLLQDQRSLWCWDLLHMKTSLPPGLPTQELLQIQASQEKQQKENLGQALKRLEKLLKQALERIPELQGIVGDWTFGRKQRQDSSAVVPTRTCSPLMCCSAAPLSSWTLSFHPAKAPPKTPSSLSFSAKSN

SEQ ID NO: 55748 - protein, 242 aa, Homo sapiens
MVLEMLNPIHYNITSIVPEAMPAATMPVLLLTGLFLLVWNYEGTSSIPGPGYCMGIGPLISHGRFLWMGIGSACNYYNRVYGEFMRVWISGEETLIISKSSSMFHIMKHNHYSSRFGSKLGLQCIGMHEKGIIFNNNPELWKTTRPFFMKALSGPGLVRMVTVCAESLKTHLDRLEEVTNESGYVDVLTLLRRVMLDTSNTLFLRIPLDESAIVVKIQGYFDAWQALLIKPDIFFKISWLYK

SEQ ID NO: 55749 - protein, 83 aa, Homo sapiens
MAGASELGTGPGAAGGDGDDSLYPIAVLIDELRNEDVQLRLNSIKKLSTIALALGVERTRSELLPFLTASFGKSGNCGRDCCS

SEQ ID NO: 55750 - protein, 262 aa, Homo sapiens
  MOD_RES (1)..(1): Any amino acid
XRTALSEKKPTVKPKSPEKSKPDEKDPEKSPTKKQEVPEEKYLTLEGFHKFVIDRARQDIRSVWRAILSCGYDLHFERCACIDVRHAQKASRKWTLEMDVALVQYINQLCRHLAITPARLHPHEVYLDPADAADPRVACLLMIGLPVLPVSQASQPPGRDLSLTAPAPSDVPIESLRLRFALLQSLNTTLETFFLPLVELRQTPMYTHSIAALLKEAKGQCLHLPWPCRKREVTCKTPGPESTGSVLGQPRQEDATPPQPFM

SEQ ID NO: 55751 - protein, 294 aa, Homo sapiens
MAAAFEASGALAAVATAMPAEHVAVQVPAPEPTPGPVRILRTAQDLSSPRTRTGDVLLAEPADFESLLLSRPVLEGLRAAGFERPSPVQLKAIPLGRCGLDLIVQAKSGTGKTCVFSTIALDSLVLENLSTQILILAPTREIAVQIHSVITAIGIKMEGLECHVFIGGTPLSQDKTRLKKCHIAVGSPGRIKQLIELDYLNPGSIRLFILDEADKLLEEGSFQEQINWIYSSLPASKQMLAVSATYPEFLANALTKYMRDPTFVRLNSSDPSLIALLCRFEAVLQSCQFIPFGT

SEQ ID NO: 55752 - protein, 153 aa, Homo sapiens
TQPREKTILSKRRCQKAKTKENVEDGRASIYQSVVTNTSKEMSCFSDFPMPEDFPNFLHNSKLLEYFRIFAKKFDLLKYIQFQTTVLSVRKCPDFSSSGQWKVVTQSNGKEQSAVFDAVMVCSGHHILPHIPLKSFPGFYQHQAWHLGHEPYL

SEQ ID NO: 55753 - protein, 264 aa, Homo sapiens
  MOD_RES (1)..(1): Any amino acid
XGTHGSLKTSAMRSNTRYYTGTQSRIRRMWNDTVRKQTESSFMAGDINSTPTLNRGTMGNHLLTNPVLQPRGGTSPYNTLIAESVGFNPSSPPVFNSPELEPGLAFRAHPCLFSSLFWLPPAGSYREPKHPLGGREACGMDTLPLNGNFNNSYSLRSGDFPPGDGGPEPPRGRNLADAAAFEKMIISELVHNNLRGSSSAAKGPPPPEPPVPPVPGGGGEEEAGGPGGADRAEIELLYKALEEPLLLPRAQSVLYQSDLDESES

SEQ ID NO: 55754 - protein, 185 aa, Homo sapiens
MGCCGCSGGCGSGCGGCGSGSGGCGSGCGGCGSSCCVPICCCKPVCCCVPACSCSSCGSCGGSKGGCGSCGSSKGGCGSCGCSQSNCCKPCCSSSGCGSFCCQSSCSKPCCCQSSCCQSSCCKPCCCQSSCCQSSCFKPCCCQSSCCKLCCCSSGCGSTCSQSSCCKPCCSQSSCCVPICCQYKI

SEQ ID NO: 55755 - protein, 1091 aa, Homo sapiens
MDIRKEKRLNMALQMSNFKKALNRFEKLVEQTAAQKRDERAGLFIHKEDAIGYDKFYASVQKLFGPDVKNQDVKRFYRKLCNNTDASADWCEIFGYFSSEEDPIASQLDEENLVFFVSRKRRILISGSRRRDVIKSIVKIPHLDLLITATQKGLITVFNNQMRVQTSTNVTDTSWITGCDYLLQLKRIVATTERTIIVWDYKAQGSSQENYFVIKPMDHCLLCVCVVPLPDHLCRDDILLGDDGGFVNRFTVNSDDFGIKQAKSKRKLQNQVLDSKNFKSVKRKLHNDWVMKIRYISALNCFGSCSLDSNHSLVLESLKRLEDNLPVREFSMPRGANTFCYCVKANVIVTGGDDKVIRLWHPNISTKPVGKLVGHMFSIAEIVTNEKDQHVVSLSSAKVFRVWDIQTLSLLQVFHDSQGGPGDMQIYSMIYDANHGMLITGSSVMDMYPLTRMIQDTKQVPHTHEREINVMLYNKYFHQVLTICSESIIRVWELETGLQVYQILEPHGFNTEVTSAAVDESGFLFATGAYNGTVRIWDFGSGQEMKVLPEGKDWKEDEHCLRRLIFLKAQEKHQQLVLALERNGTIKMIQGKEDDIYLMVIWELPDVVPFLQDGKHAVHLRMSTRDRNMAIPFPDVELIVERNFSQPTDNPTMDLLRVNCIDLLQVEGYNLIAAGTLNGVIILWNFVTSTVKKVYRPEDCFTVNPDLHPKHFKINDILFLFRTPECARRSSQDSICSSSQCESSKGPQSSKGSKQSIHDSEVKGEQTDVMVGKQQPMDKKHPGIANLPEAQPPILVTAHEDGHLRLWTLEGRLLKDMLPFTKHSAISLTSLYTDSCTRILLAGNVEGHVILCNISSFLDPPHDEKKFKQLLSWRAHSLEIIQVIYVEEKQVVLTASIDGSVRLWHALNGHYCGYFGQRRLFELSQTRDFILPCDVTEYPIEIKEESKFTEKQKYEYPLIFDREKWRKMSSVSLLFKRTPPKAFEVEQDFKFFKSLSSPKIRRYPLEGFVTENREAGIVFGSLPIYSISSPTSLRFLPLIGVEAQKDSSDGITGKKKGGHVQREKAPRRRSLKKNLVPQINLASSFFPAIPK

SEQ ID NO: 55756 - protein, 199 aa, Homo sapiens
MVMLWSLQKARPLWITNLQEDETEEMEGPQSPGQLLNPALAHSISVASCGNIFSCGAEDGKVRIFRVMGVKCEQELGFKGHTSGVSQVCFLPESYLLLTGGNDGKITLWDANSEVEKKQKSPTKRTHRKKPKRGTCTKQGGNTNASVTDEEEHGNILPKLNIEHGEKVNWLLGTKIKGHQNILVADQTSCISVYPLNEF

SEQ ID NO: 55757 - protein, 1086 aa, Homo sapiens
MNGGKECDGGDKEGGLPAIQVPVGWQRRVDQNGVLYVSPSGSLLSCLEQVKTYLLTDGTCKCGLECPLILPKVFNFDPGAAVKQRTAEDVKADEDVTKLCIHKRKIIAVATLHKSMEAPHPSLVLTSPGGGTNATPVVPSRAATPRSVRNKSHEGITNSVMPECKNPFKLMIGSSNAMGRLYVQELPGSQQQELHPVYPRQRLGSSEHGQKSPFRGSHGGLPSPASSGSQIYGDGSISPRTDPLGSPDVFTRSNPGFHGAPNSSPIHLNRTPLSPPSVMLHGSPVQSSCAMAGRTNIPLSPTLTTKSPVMKKPMCNFSTNMEIPRAMFHHKPPQGPPPPPPPSCALQKKPLTSEKDPLGILDPIPSKPVNQNPVIINPTSFHSNVHSQVPMMNVSMPPAVVPLPSNLPLPTVKPGHMNHGSHVQRVQHSASTSLSPSPVTSPVHMMGTGIGRIEASPQRSRSSSTSSDHGNFMMPPVGPQATSSGIKVPPRSPRSTIGSPRPSMPSSPSTKSDGHHQYKDIPNPLIAGISNVLNTPSSAAFPTASAGSSSVKSQPGLLGMPLNQILNQHNAASFPASSLLSAAAKAQLANQNKLAGNNSSSSSNSGAVAGSGNTEGHSTLNTMFPPTANMLLPTGEGQSGRAALRDKLMSQQKDALRKRKQPPTTVLSLLRQSQMDSSAVPKPGPDLLRKQGQGSFPISSMSQLLQSMSCQSSHLSSNSTPGCGASNTALPCSANQLHFTDPSMNSSVLQNIPLRGEAVHCHNANTNFVHSNSPVPNHHLAGLINQIQASGNCGMLSQSGMALGNSLHPNPPQSRISTSSTPVIPNSIVSSYNQTSSEAGGSGPSSSIAIAGTNHPAITKTTSVLQDGVIVTTAAGNPLQSQLPIGSDFPFVGQEHALHFPSNSTSNNHLPHPLNPSLLSSLPISLPVNQQHLLNQNLLNILQPSAGEGDMSSINNTLSNHQLTHLQSLLNNNQMFPPNQQQQQLLQGYQNLQAFQGQSTIPCPANNNPMACLFQNFQVRMQEDAALLNKRISTQPGLTALPENPNTTLPPFQDTPCGAREVEDTNRRFGSLQPCPEKEQKKWKAK

SEQ ID NO: 55758 - protein, 136 aa, Homo sapiens
MDGRRVPAQPAAEVRPGQGRGATAGPRGAAPPAGRVTVSVRDRVRGRTDAGTSLQGPPGHGPGPAPTPFWALPGVTPDPGEGVPRAEATRHVSGPVWCPSPRQGPSLCPLSKALPWLGGSVASHPPVPGPAALALP

SEQ ID NO: 55759 - protein, 677 aa, Homo sapiens
MADKRLLFYKYVYKRYRTDPRSGIIIGAEGDPPKSIELDGTFVGAEAPGELGGLGPGPAEARELDASRREVIQILKDLKQKHPDKDLEQLVGIANYYALLHQQKSRAFYRIQATRLMTGAGNVLRRHAADASRRAAPAEGAGEDEDDGASRIFFEPSLYHCLENCGSVLLSVTCQGGEGNSTFYVDYRTEDGSAKAGSDYEYSEGTLVFKPGETQKELRIGIIDDDIFEEDEHFFVRLLNLRVGDAQGMFEPDGGGRPKGRLVAPLLATVTILDDDHAGIFSFQDRLLHVSECMGTVDVRVVRSSGARGTVRLPYRTVDGTARGGGVHYEDACGELEFGDDETMKTLQVKIVDDEEYEKKDNFFIELGQPQWLKRGISALLLNQGDGDRKLTAEEEEARRIAEMGKPVLGENCRLEVIIEESYDFKNTVDKLIKKTNLALVIGTHSWREQFLEAITVSAGDEEEEEDGSREERLPSCFDYVMHFLTVFWKVLFACVPPTEYCHGWACFGVSILVIGLLTALIGDLASHFGCTVGLKDSVNAVVFVALGTSIPDTFASKVAALQDQCADASIGNVTGSNAVNVFLGLGVAWSVAAVYWAVQGRPFEVRTGTLAFSVTLFTVFAFVGIAVLLYRRRPHIGGELGGPRGPKLATTALFLGLWLLYILFASLEAYCHIRGF

SEQ ID NO: 55760 - protein, 532 aa, Homo sapiens
MKLADSVMAGKASDGSIKWQLCYDISARTWWMDEFHPFIEALLPHVRAFAYTWFNLQARKRKYFKKHEKRMSKEEERAVKDELLSEKPEVKQKWASRLLAKLRKDIRPEYREDFVLTVTGKKPPCCVLSNPDQKGKMRRIDCLRQADKVWRLDLVMVILFKGIPLESTDGERLVKSPQCSNPGLCVQPHHIGVSVKELDLYLAYFVHAADSSQSESPSQPSDADIKDQPENGHLGFQDSFVTSGVFSVTELVRVSQTPIAAGTGPNFSLSDLESSSYYSMSPGAMRRSLPSTSSTSSTKRLKSVEDEMDSPGEEPFYTGQGRSPGSGSQSSGWHEVEPGMPSPTTLKKSEKSGFSSPSPSQTSSLGTAFTQHHRPVITGPRASPHATPSTLHFPTSPIIQQPGPYFSHPAIRYHPQETLKEFVQLVCPDAGQQAGQVGFLNPNGSSQGKVHNPFLPTPMLPPPPPPPMARPVPLPVPDTKPPTTSTEGGAASPTSPTYSTPSTSPANRFVSVGPRDPSFVNIPQQTQSWYLG

SEQ ID NO: 55761 - protein, 265 aa, Homo sapiens
MPREIITLQLGQCGNQIGFEFWKQLCAEHGISPEGIVEEFATEGTDRKDVFFYQADDEHYIPRAVLLDLEPRVIHSILNSPYAKLYNPENIYLSEHGGGAGNNWASGFSQVVSYSLAGPTTRWGEKIHEDIFDIIDREADGSDSLEGFVLCHSIAGGTGSGLGSYLLERLNDRYPKKLVQTYSVFPNQDEMSDVVVQPYNSLLTLKRLTQNADCVVVLDNTALNRIATDRLHIQNPSFSQINQLVSTIMSASTTTLRYPGYMNND

SEQ ID NO: 55762 - protein, 38 aa, Homo sapiens
MDNRQNRQGLLVSPRLVQKGEIRTPGLKRSSRLDLQKC

SEQ ID NO: 55763 - protein, 490 aa, Homo sapiens
MAGEGDQQDAAHNMGNHLPLLPAESEEEDEMEVEDQDSKEAKKPNIINFDTSLPTSHTYLGADMEEFHGRTLHDDDSCQVIPVLPQVMMILIPGQTLPLQLFHPQEVSMVRNLIQKDRTFAVLAYSNVQEREAQFGTTAEIYAYREEQDFGIEIVKVKAIGRQRFKVLELRTQSDGIQQAKVQILPECVLPSTMSAVQLESLNKCQIFPSKPVSREDQCSYKWWQKYQKRKFHCANLTSWPRWLYSLYDAETLMDRIKKQLREWDENLKDDSLPSNPIDFSYRVAACLPIDDVLRIQLLKIGSAIQRLRCELDIMNKCTSLCCKQCQETEITTKNEIFSLSLCGPMAAYVNPHGYVHETLTVYKACNLNLIGRPSTEHSWFPGYAWTVAQCKICASHIGWKFTATKKDMSPQKFWGLTRSALLPTIPDTEDEISPDKMESRSVAQAGVRWHDLGSLQAPPPGFPPSSCLSLPSSSDYRRTPPCLANFLYF

SEQ ID NO: 55764 - protein, 450 aa, Homo sapiens
MGGMKYIFSLLFFLLLEGGKTEQVKHSETYCMFQDKKYRVGERWHPYLEPYGLVYCVNCICSENGNVLCSRVRCPNVHCLSPVHIPHLCCPRCPDSLPPVNNKVTSKSCEYNGTTYQHGELFVAEGLFQNRQPNQCTQCSCSEGNVYCGLKTCPKLTCAFPVSVPDSCCRVCRGDGELSWEHSDGDIFRQPANREARHSYHRSHYDPPPSRQAGGLSRFPGARSHRGALMDSQQASGTIVQIVINNKHKHGQVCVSNGKTYSHGESWHPNLRAFGIVECVLCTCNVTKQECKKIHCPNRYPCKYPQKIDGKCCKVCPGKKAKELPGQSFDNKGYFCGEETMPVYESVFMEDGETTRKIALETERPPQVEVHVWTIRKGILQHFHIEKISKRMFEELPHFKLVTRTTLSQWKIFTEGEAQISQMCSSRVCRTELEDLVKVLYLERSEKGHC

SEQ ID NO: 55765 - protein, 671 aa, Homo sapiens
KGERWSGLRHEGQWSPGRGPVLALQARKKRTKAKKDKAQRKSETQHRGSAPHSESDLPEQEEEILGSDDDEQEDPNDYCKGGYHLVKIGDLFNGRYHVIRKLGWGHFSTVWLSWDIQGKKFVAMKVVKSAEHYTETALDEIRLLKSVRNSDPNDPNREMVVQLLDDFKISGVNGTHICMVFEVLGHHLLKWIIKSNYQGLPLPCVKKIIQQVLQGLDYLHTKCRIIHTDIKPENILLSVNEQYIRRLAAEATEWQRSGAPPPSGSAVSTAPQPKPADKMSKNKKKKLKKKQKRQAELLEKRMQEIEEMEKESGPGQKRPNKQEESESPVERPLKENPPNKMTQEKLEESSTIGQDQTLMERDTEGGAAEINCNGVIEVINYTQNSNNETLRHKEDLHNANDCDVQNLNQESSFLSSQNGDSSTSQETDSCTPITSEVSDTMVCQSSSTVGQSFSEQHISQLQESIRAEIPCEDEQEQEHNGPLDNKGKSTAGNFLVNPLEPKNAEKLKVKIADLGNACWVHKHFTEDIQTRQYRSLEVLIGSGYNTPADIWSTACMAFELATGDYLFEPHSGEEYTRDEDHIALIIELLGKVPRKLIVAGKYSKEFFTKKGDLKHITKLKPWGLFEVLVEKYEWSQEEAAGFTDFLLPMLELIPEKRATAAECLRHPWLNS

SEQ ID NO: 55766 - protein, 134 aa, Homo sapiens
VSCAYQVARGMEYLASKKCIHRDLAARNVLVTEDNVMKIADFGLARDIHHIDYYKKTTNGRLPVKWMAPEALFDRIYTHQSDVWSFGVLLWEIFTLGGSPYPGVPVEELFKLLKEGHRMDKPSNCTNELPAAGT

SEQ ID NO: 55767 - protein, 403 aa, Homo sapiens
MASGSCQGCEEDEETLKKLIVRLNNVQEGKQIETLVQILEDLLVFTYSERASKLFQGKNIHVPLLIVLDSYMRVASVQQVGWSLLCKLIEVCPGTMQSLMGPQDVGNDWEVLGVHQLILKMLTVHNASVNLSVIGLKTLDLLLTSGKITLLILDEESDIFMLIFDAMHSFPANDEVQKLGCKALHVLFERVSEEQLTEFVENKDYMILLSALTNFKDEEEIVLHVLHCLHSLAIPCNNVEVLMSGNVRCYNIVVEAMKAFPMSERIQEVSCCLLHRLTLGNFFNILVLNEVHEFVVKAVQQYPENAALQISALSCLALLTETIFLNQDLEEKNENQENDDEGEEDKLFWLEACYKALTWHRKNKHVQEAACWALNNLLMYQNSLHEKIGDEDGQGLFEAVISG

SEQ ID NO: 55768 - protein, 91 aa, Homo sapiens
MADSVKTFLQDLARLDARIQQKREEQRRRRASSVLAQRRAQSIERKQESEPRIVSRIFQCCAWNGGVFWFSLLLFYRVFIPVLQSVTARII

SEQ ID NO: 55769 - protein, 145 aa, Homo sapiens
GITCCVLLLLNCSGVPMSLASSFLTGSVAKCENEGEVLQIPFITDNPCIMCVCLVAPMKEIPITAPSNGRARLSLVFYASARRALSQSLGCAVLFIVKTLWSIWECAAPHVQAVCLRVCSIKKGRNFSQKEANVPSVPALSEESV

SEQ ID NO: 55770 - protein, 245 aa, Homo sapiens
TVFCMQLAARIRPRDLEEFFSTVGKVRDVRMISDRNSRRSKGIAYVEFVDVSSVPLAIGLTGQRVLGVPIIVQASQAEKNRAAAMANNLQKGSAGPMRLYVGSLHFNITEDMLRGIFEPFGRIESIQLMMDSETGRSKGYGFITFSDSECAKKALEQLNGFELAGRPMKVGHVTERTDASSASSFLDSDELERTGIDLGTTGRLQLMARLAEGSGSVAQFGVQLCDPGSPQPLPLWLKPSSHPNL

SEQ ID NO: 55771 - protein, 55 aa, Homo sapiens
MSDIEEVVEEYEEEEQEGKRKRVYSFGSKTAWFETDPPLLSSLAAWTSLLSRSSC

SEQ ID NO: 55772 - protein, 394 aa, Homo sapiens
GDRVILLKRVDQNWYEGKIPGTNRQGIFPVSYVEVVKKNTKGAEDYPDPPIPHSYSSDRIHSLSSNKLASSEPAPPPTHKVSPGSDKGALQGTGQGWLSLTASCLPANPLAPTPPRFLDNFLGELEKLGALTLSADQAKPTILEDAILEIKEEPAVLLPLSPATAPAESPSTHAGVASAAAQPYHAEPLQDPRTTTQSNFAELRKMRRGFSDPKKAPEVLGDNFVASACTSVGSLPVPLPVIGEEDEGIYEGIVSGIQRGPPEPQEGDAWWCGHDGSEGTPHLHIEEEEEEEKPNCLKHPIATPTDPRTPKEDSNAAKPSNEPQRPVFTHENIQGGGEPFQALYNYTPRNEDELELRESDVIDVMEKCDDGWFVGTSRRTKFFGTFPGNYVKRL

SEQ ID NO: 55773 - protein, 669 aa, Homo sapiens
MADNLDEFIEEQKARLAEDKAELESDPPYMEMKGKLSAKLSENSKILISMAKENIPPNSQQTRGSLGIDYGLSLPLGEDYERKKHKLKEELRQDYRRYLTQERLKLERNKEYNQFLRGKEESSEKFRQVEKSTEPKSQRNKKPIGQVKPDLTSQIQTSCENSEGPRKDVLTPSEAYEELLNQRRLEEDRYRQLDDEIELRNRRIIKKANEEVGISNLKHQRFASKAGIPDRRFHRFNEDRVFDRRYHRPDQDPEVSEEMDERFRYESDFDRRLSRVYTNDRDGVSPYWPGWFPTPDLRQSTHVGLPKCWNYSAPDNETSKSANQDTCSPFAGMLFGGEDRELIQRRKEKYRLELLEQMAEQQRNKRREKDLELRVAASGAQDPEKSPDRLKQFSVAPRHFEEMIPPERPRIAFQTPLPPLSAPSVPPIPSVHPVPSQNEDLRSGLSSALGEMVSPRIAPLPPPPLLPPLATNYRTPYDDAYYFYGSRNTFDPSLAYYGSGMMGVQPAAYVSAPVTHQLAQPVVNTVGQNELKITSDQVINSGLIFEDKPKPSKQSLQSYQEALQQQIREREERRKKEREEKEEYEAKLEAEMRTYNPWGKGGGGAPLRDAKGNLITDLNRMHRQNIDAYHNPDARTYEDKRAVVSLDPNLATSNAENLEDAANKSSGLE

SEQ ID NO: 55774 - protein, 79 aa, Homo sapiens
MASAEPLTALSRWYLYAIHGYFCEVMFTAAWEFVVNLNWKFPGVTSVWALFIYGTSILIVERMYLRLRGRCPLLLRCLI

SEQ ID NO: 55775 - protein, 759 aa, Homo sapiens
MAARLLAPPGPDSFKPFTPESLANIERRIAESKLKKPPKADGSHREDDEDSKPKPNSDLEAGKSLPFIYGDIPQGLVAVPLEDFDPYYLTQKTFVVLNRGKTLFRFSATPALYILSPFNLIRRIAIKILIHSVFSMIIMCTILTNCVFMTFSNPPDWSKNVEYTFTGIYTFESLVKIIARGFCIDGFTFLRDPWNWLDFSVIMMAYITEFVNLGNVSALRTFRVLRALKTISVIPGLKTIVGALIQSVKKLSDVMILTVFCLSVFALIGLQLFMGNLRNKCVVWPINFNESYLENGTKGFDWEEYINNKTNFYTVPGMLEPLLCGNSSDAGQCPEGYQCMKAGRNPNYGYTSFDTFSWAFLALFRLMTQDYWENLYQLTLRAAGKTYMIFFVLVIFVGSFYLVNLILAVVAMAYEEQNQATLEEAEQKEAEFKAMLEQLKKQQEEAQAAAMATSAGTVSEDAIEEEGEEGGGSPRSSSEISKLSSKSAKERRNRRKKRKQKELSEGEEKGDPEKVFKSESEDGMRRKAFRLPDNRIGRKFSIMNQSLLSIPGSPFLSRHNSKSSIFSFRGPGRFRDPGSENEFADDEHSTVEESEGRRDSLFIPIRARERRSSYSGYSGYSQGSRSSRIFPSLRRSVKRNSTVDCNGVVSLIGGPGSHIGGRLLPEVKIDKAATDDSVRKNTNRSRLGMAVSPAPSPPLSLLCPSHLVCLDPTPVNTPAISVFFLAYFYFSLQFSPYYSPCLLLSFILCSIFPIFPPCF

SEQ ID NO: 55776 - protein, 195 aa, Homo sapiens
DINDNAPMFEKDELELFVEENNPVGSVVAKIRANDPDEGPNAQIMYQIVEGDMRHFFQLDLLNGDLRAMVELDFEVRREYVLVVQATSAPLVSRATVHILLVDQNDNPPVLPDFQILFNNYVTNKSNSFPTGVIGCIPAHDPDVSDSLNYTFVQGNELRLLLLDPATGELQLSRDLDNNRPLEALMEVSVSGQRG

SEQ ID NO: 55777 - protein, 353 aa, Homo sapiens
  MOD_RES (335)..(335): Any amino acid
MSEPIRVLVTGAAGQIAYSLLYSIGNGSVFGKDQPIILVLLDITPMMGVLDGVLMELQDCALPLLKDVIATDKEDVAFKDLDVAILVGSMPRREGMERKDLLKANVKIFKSQGAALDKYAKKSVKVIVVGNPANTNCLTASKSAPSIPKENFSCLTRLDHNRAKAQIALKLGVTANDVKNVIIWGNHSSTQYPDVNHAKVKLQGKEVGVYEALKDDSWLKGEFVTTVQQRGAAVIKARKLSSAMSAAKAICDHVRDIWFGTPEGEFVSMGVISDGNSYGVPDDLLYSFPVVIKNKTWKFVEGLPINDFSREKMDLTAKELTEEKESAFEFLSSAXLDNDVTKCFKAEESKCRL

SEQ ID NO: 55778 - protein, 228 aa, Homo sapiens [sequence omitted]

SEQ ID NO: 55779 - protein, 104 aa, Homo sapiens
MVNELYPYIVEFEEEAKNPGLETHRKRKRSGNSDSIERDAAQEAEAGTGLEPGSNSGQCSVPLKKGKDAPIKKESLGHWSQGLKISMQDPKMQPCTSSCDQPGF

SEQ ID NO: 55780 - protein, 367 aa, Homo sapiens
MLTFMASDSEEEVCDERTSLMSAESPTPRSCQEGRQGPEDGENTAQWRSQENEEDGEEDPDRYVCSGVPGRPPGLEEELTLKYGAKHVIMLFVPVTLCMIVVVATIKSVRFYTEKNGQLIYTPFTEDTPSVGQRLLNSVLNTLIMISVIVVMTIFLVVLYKYRCYKFIHGWLIMSSLMLLFLFTYIYLGEVLKTYNVAMDYPTLLLTVWNFGAVGMVCIHWKGPLVLQQAYLIMISALMALVFIKYLPEWSAWVILGAISVYAAMVWTVGMAKLDPSSQGALQLPYDPEMEEDSYDSFGEPSYPEVFEPPLTGYPGEELEEEEERGVKLGLGDFIFYSVLVGKAAATGSGDWNTTLACFVAILIICL

SEQ ID NO: 55781 - protein, 17 aa, Homo sapiens
PLKATHAVKGVTGHEQL

SEQ ID NO: 55782 - protein, 171 aa, Homo sapiens
MESREKDLEEALEAGGCDLETLRNIIQGRPLPADLRAKVWKIALNVAGKGDSLASWDGILDLPEQNTIHKDCLQFIDQLSVPEEKAAELLLDIESVITFYCKSRNIKYSTSLSWIHLLKPLVHLQLPRSDLYNCFYAIMNKYIPRDCSQKGRPFHLFRLLIQYHEPELCSY

SEQ ID NO: 55783 - protein, 279 aa, Homo sapiens
MELVRRLMPLTLLILSCLAELTMAEAEGNASCTVSLGGANMAETHKAMILQLNPSENCTWTIERPENKSIRIIFSYVQLDPDGSCESENIKVFDGTSSNGPLLGQVCSKNDYVPVFESSSSTLTFQIVTDSARIQRTVFVFYYFFSPNISIPNCGGYLDTLEGSFTSPNYPKPHPELAYCVWHIQVEKDYKIKLNFKEIFLEIDKQCKFDFLAIYDGPSTNSGLIGQVCGRVTPTFESSSNSLTVVLSTDYANSYRGFSASYTSIYAENINTTSLTCSS

SEQ ID NO: 55784 - protein, 222 aa, Homo sapiens
  MOD_RES (1)..(1): Any amino acid
XPQRKTQSGCFDLDSSLLHLKSFSSRSPRPCLNIEDDPDIHEKPFLSSSAPPITSLSLLGNFEESVLNYRFDPLGIVDGFTAEVGASGAFCPTHLTLPVEVSFYSVSDDNAPSPYMTLFNPNKTVVKMFVVIYDLRDMPANHQTFLRQRTFSVPVKQEVKRSVNKENIRHTEERLLRYLIHLRFQSSKSGKIYLHRDVRLLFSRKSMEVDSGAAYELKSYTE

SEQ ID NO: 55785 - protein, 60 aa, Homo sapiens
  MOD_RES (1)..(1): Any amino acid
XEVLGFGLGSSTSTQHLPFRFYDQGRRGSSDPTVQRSVFASVDKVPDPSLCSCISYMCQS

SEQ ID NO: 55786 - protein, 408 aa, Homo sapiens
MADLEAVLADVSYLMAMEKSKATPAARASKKILLPEPSIRSVMQKYLEDRGEVTFEKIFSQKLGYLLFRDFCLNHLEEARPLVEFYEEIKKYEKLETEEERVARSREIFDSYIMKELLACSHPFSKSATEHVQGHLGKKQVPPDLFQPYIEEICQNLRGDVFQKFIESDKFTRFCQWKNVELNIHLTMNDFSVHRIIGRGGFGEVYGCRKADTGKMYAMKCLDKKRIKMKQGETLALNERIMLSLVSTGDCPFIVCMSYAFHTPDKLSFILDLMNGGDLHYHLSQHGVFSEADMRFYAAEIILGLEHMHNRFVVYRDLKPANILLDEHGHVRISDLGLACDFSKKKPHASVGTHGYMAPEVLQKGSRCLCGVAPSPPRGWVGAPSPPVYSFPGAFLCRFLNVILKSEK

SEQ ID NO: 55787 - protein, 151 aa, Homo sapiens
MPVAATNSETAMQQVLDNLGSLPSATGAAELDLIFLRGIMESPIVRSLAKAHERLEETKLEAVRDNNLELVQEILRDLAQLAEQSSTAAELAHILQEPHFQSLLETHDSVASKTYETPPPSPGLDPTFSNQPVPPDAVRMVGIRKTAGEHL

SEQ ID NO: 55788 - protein, 208 aa, Homo sapiens
MHWLRKVQGLCTLWGTQMSSRTLYINSRQLVSLQWGHQEVPAKFNFASDVLDHWADMEKAGKRLPSPALWWVNGKGKELMWNFRELSENSQQAANILSGACGLQRGDRVAVMLPRVPEWWLVILGCIRAGLIFMPGTIQMKSTDILYRLQMSKAKAIVAGDEVIQEVDTVASECPSLRIKLLVSEKSCDGWLNFKKLLKYKVRHREVK

SEQ ID NO: 55789 - protein, 376 aa, Homo sapiens
MQRAVSVVARLGFRLQAFPPALCRPLSCAQEVLRRTPLYDFHLAHGGKMVAFAGWSLPVQYRDSHTDSHLHTRQHCSLFDVSHMLQGTLSLFTNEAGGILDDLIVTNTSEGHLYVVSNAGCWEKDLALMQDKVRELQNQGRDVGLEVLDNALLALQGPTAAQVLQAGVADDLRKLPFMTSAVMEVFGVSGCRVTRCGYTGEDGVEISVPVAGAVHLATAILKNPEVKLAGLAARDSLRLEAGLCLYGNDIDEHTTPVEGSLSWTLGKRRRAAMDFPGAKVIVPQLKGRVQRRRVGLMCEGAPMRAHSPILNMEGTKIGTVTSGCPSPSLKKNVAMGYVPCEYSRPGTMLLVEVRRKQQMAVVSKMPFVPTNYYTLK

SEQ ID NO: 55790 - protein, 95 aa, Homo sapiens
MLLSVMEGELEARDLVIEALRARRKEVFIQERYGRFNLNDPFLALQRDYEAGAGDKEKKPVCTNPLSILEAVMAHCKKMQERMSAQLAAAESRQK

SEQ ID NO: 55791 - protein, 119 aa, Homo sapiens
  MOD_RES (1)..(1): Any amino acid
XLFVSGLPLDIKPRELYLLFRPFKGYEGSLIKLTSKQPVGFVSFDSRSEAEAAKNALNGIRFDPEIPQTLRLEFAKANTKMAKNKLVGTPNPSTPLPNTVPQFIAREPLGGANEHGERQ

SEQ ID NO: 55792 - protein, 981 aa, Homo sapiens
MDFSSVVCLPPSVIAVNGLDGGGAGENDDEPVLVSLSAAPSPQSEAVANELQELSLQPELTLGLHPGRNPNLPPLSERKNVLQLKLQQRRTREELVSQGIMPPLKSPAAFHEQRRSLERARTEDYLKRKIRSRPERSELVRMHILEETSAEPSLQAKQLKLKRARLADDLNEKIAQRPGPMELVEKNILPVESSLKEAIIVGQVNYPKVADSSSFDEDSSDALSPEQPASHESQGSVPSPLEARVSEPLLSATSASPTQQSQPKSASEKSQRSKKAKELKPKVKKLKYHQYIPPDQKQDRGAPPMDSSYAKILQQQQLFLQLQILNQQQQQHHNYQAILPAPPKSAGEALGSSGTPPVRSLSTTNSSSSSGAPGPCGLARQNSTSLTGKPGALPANLDDMKVAELKQELKLRSLPVSGTKTELIERLRAYQDQISPVPGAPKAPAATSILHKAGEVVVAFPAARLSTGPALVAAGLAPAEVVVATVASSGVVKFGSTGSTPPVSPTPSERSLLSTGDENSTPGDTFGEMVTSPLTQLTLQASPLQILVKEEGPRAGSCCLSPGGRAELEGRDKDQMLQEKDKQIEALTRMLRQKQQLVERLKLQLEQEKRAQQPAPAPAPLGTPVKQENSFSSCQLSQQPLGPAHPFNPSLAAPATNHIDPCAVAPGPPSVVVKQEALQPEPEPVPAPQLLLGPQGPSLIKGVAPPTLITDSTGTHLVLTVTNKNADSPGLSSGSPQQPSSQPGSPAPAPSAQMDLEHPLQPLFGTPTSLLKKEPPGYEEAMSQQPKQQENGSSSQQMDDLFDILIQSGEISADFKEPPSLPGKEKPSPKTVCGSPLAAQPSPSAELPQAAPPPPGSPSLPGRLEDFLESSTGLPLLTSGHDGPEPLSLIDDLHSQMLSSTAILDHPPSPMDTSELHFVPEPSSTMGLDLADGHLDSMDWLELSSGGPVLSLAPLSTTAPSLFSTDFLDGHDLQLHWDSCL

SEQ ID NO: 55793 - protein, 138 aa, Homo sapiens
  MOD_RES (1)..(1): Any amino acid
XKGWWWENAIAALFRRHIPVSWLIRATLSESENFEAAVGKLAKTPLIADVYYIVGGTSPREGVVITRNRDGPADIWPLDPLNGAWFRVETNYDHWKPAPKEDDRRTSAIKALNATGQANLSLEALFQLHNLYYGNERR

SEQ ID NO: 55794 - protein, 378 aa, Homo sapiens
MPAVSKGDGMRGLAVFISDIRNCKSKEAEIKRINKELANIRSKFKGDKALDGYSKKKYVCKLLFIFLLGHDIDFGHMEAVNLLSSNRYTEKQIGYLFISVLVNSNSELIRLINNAIKNDLASRNPTFMGLALHCIASVGSREMAEAFAGEIPKVLVAGDTMDSVKQSAALCLLRLYRTSPDLVPMGDWTSRVVHLLNDQHLGVVTAATSLITTLAQKNPEEFKTSVSLAVSRLSRIVTSASTDLQDYTYYFVPAPWLSVKLLRLLQCYPPPDPAVRGRLTECLETILNKAQEPPKSKKVQHSNAKNAVLFEAISLIIHHDRCVGCLCTGSRCAQVRKPFLRDYVNCSQRSFSPEDGRPGSCVLCCLRLCRLSSWPSCR

SEQ ID NO: 55795 - protein, 458 aa, Homo sapiens
  MOD_RES (1)..(1): Any amino acid
XAPPSPLQLPGGNVTITYSYAGARAPMGQGFLLSYSQDWLMCLQEEFQCLNHRCVSAVQRCDGVDACGDGSDEAGCSSDPFPGLTPRPVPSLPCNVTLEDFYGVFSSPGYTHLASVSHPQSCHWLLDPHDGRRLAVRFTALDLGFGDAVHVYDGPGPPESSRLLRSLTHFSNGKAVTVETLSGQAVVSYHTVAWSNGRGFNATYHVRGYCLPWDRPCGLGSGLGAGEGLGERCYSEAQRCDGSWDCADGTDEEDCPGCPPGHFPCGAAGTSGATACYLPADRCNYQTFCADGADERRCRHCQPGNFRCRDEKCVYETWVCDGQPDCADGSDEWDCSYVLPRKVITAAVIGSLVCGLLLVIALGCTCKLYAIRTQEYSIFAPLSRMEAEIVQQQAPPSYGQLIAQGAIPPVEDFPTENPNDNSVLGNLRSLLQILRQDMTPGGGPGARRRQRGRLMRRL

SEQ ID NO: 55796 - protein, 287 aa, Homo sapiens
MLHLTDIQLQDNKTFLAMLNHVLNVDGFYFSTTYDLTHTLQRLSNTSPEFQEMSLLERADQRFVWNGHLLRELSAQPEVHRFALPVLHGFITMHSCSINGKYFDWILISRRSCFRAGVRYYVRGIDSEGHAANFVETEQIVHYNGSKASFVQTRGSIPVFWSQRPNLKYKPLPQISKVANHMDGFQRHFDSQVIIYGKQVIINLINQKGSEKPLEQTFATMVSSLGSGMMRYIAFDFHKECKNMRWDRLSILLDQVAEMQDELSGLCWPGGGKPGRRVPKQLHGLSR

SEQ ID NO: 55797 - protein, 145 aa, Homo sapiens
  MOD_RES (1)..(1): Any amino acid
XTPLGNVEECYRYFTSVLFCHGVRRPPFSIDLFKEEQLLALEDYVVNTYFRHFKLYKYVFTPQVRLDLSLTYMGLQPPKLWPESETGHIHVLRAYIKTQVNKELEQLQGLVEERLKASEERLSSKLTALERPFQLPPGKGKSKTK

SEQ ID NO: 55798 - protein, 71 aa, Homo sapiens
MAGRVPSLLVLLVFPSSCLAFRSPLSVFKRFKETTRPFSNECLGTTRPVVPIDSSDFALDIRMPGVTPKQS

SEQ ID NO: 55799 - protein, 1238 aa, Homo sapiens
MTIWQMQKQAQRGSPARTHSMMSLSVRPQRRLLSARVNRSQSFAGVLGSHERGPRSFPVFSPPGPPRKPPALSRVSRMFSVAHPAAKVPQPERLDLVYTALKRGLTAYLEVHQQEQEKLQGQIRESKRNSRLGFLYDLDKQVKSIERFLRRLEFHASKIDELYEAYCVQRRLRDGAYNMVRAYTTGSPGSREARDSLAEATRGHREYTESMCLLESELEAQLGEFHLRMKGLAGFARLCVGDQYEICMKYGRQRWKLRGRIEGSGKQVWDSEETIFLPLLTEFLSIKVTELKGLANHVVVGSVSCETKDLFAALPQVVAVDINDLGTIKLSLEVTWSPFDKDDQPSAASSVNKASTVTKRFSTYSQSPPDTPSLREQAFYNMLRRQEELENGTAWSLSSESSDDSSSPQLSGTARHSPAPRPLVQQPEPLPIQVAFRRPETPSSGPLDEEGAVAPVLANGHAPYSRTLSHISEASVDAALAEASVEAVGPESLAWGPSPPTHPAPTHGEHPSPVPPALDPGHSATSSTLGTTGSVPTSTDPAPSAHLDSVHKSTDSGPSELPGPTHTTTGSTYSAITTTHSAPSPLTHTTTGSTHKPIISTLTTTGPTLNIIGPVQTTTSPTHTMPSPTHTTASPTHTSTSPTHTPTSPTHKTSMSPPTTTSPTPSGMGLVQTATSPTHPTTSPTHPTTSPILINVSPSTSLELATLSSPSKHSDPTLPGTDSLPCSPPVSNSYTQADPMAPRTPHPSPAHSSRKPLTSPAPDPSESTVQSLSPTPSPPTPAPQHSDLCLAMAVQTPVPTAAGGSGDRSLEEALGALMAALDDYRGQFPELQGLEQEVTRLESLLMRQGLTRSRASSLSITVEHALESFSFLNEDEDEDNDVPGDRPPSSPEAGAEDSIDSPSARPLSTGCPALDAALVRHLYHCSRLLLKLGTFGPLRCQEAWALERLLREARVLEAVCEFSRRWEIPASSAQEVVQFSASRPGFLTFWDQCTERLSCFLCPVERVLLTFCNQYGARLSLRQPGLAEAVCVKFLEDALGQKLPRRPQPGPGEQLTVFQFWSFVETLDSPTMEAYVTETAEEVLLVRNLNSDDQAVVLKALRLAPEGRLRRDGLRALSSLLVHGNNKVMAAVSTQLRSLSLGPTFRERALLCFLDQLEDEDVQTRVAGCLALGCIKAPEGIEPLVYLCQTDTEAVREAARQSLQQCGEEGQSAHRRLEESLDALPRIFGPGSMASTAF

SEQ ID NO: 55800 - protein, 59 aa, Homo sapiens
MAPSTPLLTVRGSEGLYMVNGPPHFTESTVFPRESGKNCKVCIFSKDGTLFAWGNGENF

SEQ ID NO: 55801 - protein, 110 aa, Homo sapiens
MFPVFSGCFQELQEKNKSLELVSFEEVAVHFTWEEWQDLDDAQRTLYRDVMLETYSSLVSLGHYITKPEMIFKLEQGAEPWIVEETPNLRLSAVQIIDDLIERSHESHDR

SEQ ID NO: 55802 - protein, 544 aa, Homo sapiens
MSGSRERDNMLHLHHSWTPNIDRLAEDGVKLTQHISAASLCTPSRAAFLTGRYPVRSGMVSSIGYRVLQWTGASGGLPTNETTFAKILKEKGYATGLIGKWHLGLNCESASDHCHHPLHHGFDHFYGMPFSLMGDCARWELSEKRVNLEQKLNFLFQVLALVALTLVAGKLTHLIPVSWMPVIWSALSAVLLLASSYFVGALIVHADCFLMRNHTITEQPMCFQRTTPLILQEVASFLKRNKHGPFLLFVSFLHVHIPLITMENFLGKSLHGLYGDNVEEMDWMVGRILDTLDVEGLSNSTLIYFTSDHGGSLENQLGNTQYGGWNGIYKGGKGMGGWEGGIRVPGIFRWPGVLPAGRVIGEPTSLMDVFPTVVRLAGGEVPQDRVIDGQDLLPLLLGTAQHSDHEFLMHYCERFLHAARWHQRDRGTMWKVHFVTPVFQPEGAGACYGRKVCPCFGEKVVHHDPPLLFDLSRDPSETHILTPASEPVFYQVMERVQQAVWEHQRTLSPVPLQLDRLGNIWRPWLQPCCGPFPLCWCLREDDPQ

SEQ ID NO: 55803 - protein, 233 aa, Homo sapiens
MAAGTAVGAWVLVLSLWGAVVGAQNITARIGEPLVLKCKGAPKKPPQRLEWKLNTGRTEAWKVLSPQGGGPWDSVARVLPNSSLFLPAVGIQDEGIFRCQAMNRNGKETKSNYRVRVYQIPGKPEIVDSASELTAGVPNKVVEESRRSRKRPCEQEVGTCVSEGSYPAGTLSWHLDGKPLVPNEKGVSVKEQTRRHPETGLFTLQSELMVTPARGGDPRPTFSCSFSPGLPRH

SEQ ID NO: 55804 - protein, 114 aa, Homo sapiens
MITLITEQLQKQTLDELKCTRFSISLPLPDHADISNCGNSFQLVSVWARRQAASCPLPGALPHPPQSCPGDLEVSATFPEAAHSLVIWMPAKLGSSGATRKTPGVCGLRWTLTR

SEQ ID NO: 55805 - protein, 43 aa, Homo sapiens
MQIFVKTLTGKTITLEVEPSDTIENVKAKIQDKEGIPPDQQRL

SEQ ID NO: 55806 - protein, 192 aa, Homo sapiens
MLQTLYDYFWWERLWLPVNLTWADLEDRDGRVYAKASDLYITLPLALLFLIVRYFFELYVATPLAALLNIKEKTRLRAPPNATLEHFYLTSGKQPKQVEVELLSRQSGLSGRQVERWFRRRRNQDRPSLLKKFREASWRFTFYLIAFIAGMAVIVDKPWFYDMKKVWEGYPIQSTIPSQYWYYMIELSFYWS

SEQ ID NO: 55807 - protein, 171 aa, Homo sapiens
MSVKGCFTDFHIDFGGTSVWYHVFRGGKIFWLIPPTLHNLALYEEWVLSGKQSDIFLGDRVERCQRIELKQGYTFFIPSGWIHAVYTPVDSLVFGGNILHSFNVPMQLRIYEIEDRTRVQPKFRYPFYYEMCWYVLERYVYCVTQRSHLTQEYQRESMLIDAPRKPSIDGF

SEQ ID NO: 55808 - protein, 276 aa, Homo sapiens
MPQTVILPGPAPWGFRLSGGIDFNQPLVITRITPGSKAAAANLCPGDVILAIDGFGTESMTHADAQDRIKAAAHQLCLKIDRGETHLWSPQVSEDGKAHPFKINLESEPQDGNYFEHKHNIRPKPFVIPGRSSEPTASVPPESDVYRMLHDNRNEPTQPRQSGSFRVLQGMVDDGSDDRPAGTRSVRAPVTKVHGGSGGAQRMPLCDKCGSGIVGAVVKARDKYRHPECFVCADCNLNLKQKGYFFIEGELYCETHARARTKPPEGYDTVTLYPKA

SEQ ID NO: 55809 - protein, 62 aa, Homo sapiens
MEDVEARFAHLLQPIRDLTKNWEVDVAAQLGEYLEECHLLRRNTGDEPALGKMLAGSDLHFF

SEQ ID NO: 55810 - protein, 269 aa, Homo sapiens
  MOD_RES (1)..(1): Any amino acid
XSSNLLEEAAAKPKSLWKSVFSGYKKDKKKKADDKSCPSTPSSGATVDSGKHRVLPVVRAELQLRRQLSFSEDSDLSSDDVLEKSSQKSRRESIYVPHALAFRRSCASKPRTYTEEELNAKLTRRVQKAARRQAKQEELKRLHRAQIIQRQLQQVEERQRRLEERGVAVEKALRGEADYWGESYYSDLIDLHLGGMGKKDDPKLMQEWFKLVQEKNAMVRYESELMIFARELELEDRQSRLQQELRERMAVEGEWGKAPMEARVGATSR

SEQ ID NO: 55811 - protein, 39 aa, Homo sapiens
MFWKFDLHSSSHIDTLLEREDVTLKELMDEEDVLQECKA

SEQ ID NO: 55812 - protein, 115 aa, Homo sapiens
MANEVIKCKAAVAWEAGKPLSIEEIEVAPPKAHEVRIKIIATAVCHTDAYTLSGADPEGCFPVILGHEGAGIVESVGEGVTKLKAGDTVIPLYIPQCGECKFCLNPKTNLCQKIR

SEQ ID NO: 55813 - protein, 104 aa, Homo sapiens
  MOD_RES (1)..(1): Any amino acid
XGYGGGGPGYSGGSRGYGSGGQGYGNQGSGYGGSGSYDSYNNGGGGGFGGGSGSNFGGGGSYNDFGNYNNQSSNFGPMKGGNFGGRSSGPYGGGGQYFAKPRNQ

SEQ ID NO: 55814 - protein, 136 aa, Homo sapiens
MAGDACMVGAINPELYKFPEDKSETDFPDGCLGRLWFSVEYEQEAERLLVGLIKAQHLQAPSETCSPLVKLYLLPDERRFLQSKTKRKTSNPQFDEHFIFQVSSKTITQRVLKFSVYHVDRQRKHQLLGQVLFPLK

SEQ ID NO: 55815 - protein, 208 aa, Homo sapiens
QKKKMAVSAKLYGSGDQEAWQKGVLFASGQNLARQLMETPANEMTPTRFAEIIEKNLKSASSKTEVHIRPKSWIEEQAMGSFLSVAKGSDEPPVFLEIHYKGSPNANEPPLVFVGKGITFDSGGISIKASANMDLMRADMGGAATICSAIVSAAKLNLPINIIGAMDVALGSGATGVFTNSSWLWNKLFEASIETGDRVWRMPLFEHY

SEQ ID NO: 55816 - protein, 81 aa, Homo sapiens
FYILITRLTPIKYDGNLKIFHDDGVFWVTFSCIAILIPVVFMGCLRILNILTCGVIGSYSVVLAIDSYWSTSLSYITLNVL

SEQ ID NO: 55817 - protein, 631 aa, Homo sapiens
LTCTDLATLTNILEHREAPIHLDFDGCPLEPHCPEALVGCGQIENLSFKSRKCGDAFAEALSRSLPTMGRLQMLGLSSNSICVSTLLCLARVAVTCPTVRMLQAREADLIFLLSPPTETTAELQRAPDLQESDGQRKGAQSRSLTLRLQKCQLQVHDAEALIALLQEGPHLEEVDLSGNQLEDEGCRLMAEAASQLHIARKLDLSNNGLSVAGVHCVLRAVSACWTLAELHISLQHKTVIFMFAQEPEEQKGPQERAAFLDSLMLQMPSELPLSSRRMRLTHCGLQEKHLEQLCKALGGSCHLGHLHLDFSGNALGDEGAARLAQLLPGLGALQSLNLSENGLSLDAVLGLVRCFSTLQWLFRLDISFESQHILLRGDKTSSLSECPLEPPSLTRLCATLKDCPGPLELQLSCEFLSDQSLETLLDCLPQLPQLSLLQLSQTGLSPKSPFLLANTLSLCPRVKKVDLRSLHHATLHFRSNEEEEGVCCGRFTGCSLSQEHVESLCWLLSKCKDLSQVDLGSEQSFRIHFSREDQAGKTLRLSECSFRPEHVSRLATGLSKSLQLTELTLTQCCLGQKQLAILLSLVGRPAGLFSLRDSTRHTEKLSFPTLEACALGFKKKRKKERKKVSED

SEQ ID NO: 55818 - protein, 327 aa, Homo sapiens
MISRQRLCAVPPPNFEMPVSIPVSSHNSLVYSNPVSSLGNPNLLPLAHPSLQRNSMSPGVTHRPPSAGNTGGLMGGDLTSGAGTSAGNGYGNPRNSPGLLVSPGNLNKNMQAKSPPPMNLGMNNRKPDLRVLIPPGSKNTMPSVSEDVDLLLNQRINNSQSAQSLATPVVSVATPTLPGQGMGGYPSAISTTYGTEYSLSSADLSSLSGFNTASALHLGSVTGWQQQHLHNMPPSALSQLGLNIKSEPVSPPRDRTTTPSRYPQHTRHEAGRSPVDSLSSCSSSYDGSDREDHRNEFHSPIGLTRPSPDERESPSVKRMRLSEGWAT

SEQ ID NO: 55819 - protein, 78 aa, Homo sapiens
MLLSAVCVMLNLAGSILSCQNAQLVNSLEGCQLIKFDSVEVCVCCELQHQSSGCSNLGETLKLNPLQENCNAVRLTLK

SEQ ID NO: 55820 - protein, 935 aa, Homo sapiens
MSCGNEFVETLKKIGYPKADNLNGEDFDWLFEGVEDESFLKWFCGNVNEQNVLSERELEAFSILQKSGKPILEGAALDEALKTCKTSDLKTPRLDDKELEKLEDEVQTLLKLKNLKIQRRNKCQLMASVTSHKSLRLNAKEEEATKKLKQSQGILNAMITKISNELQALTDEVTQLMMFFRHSNLGQGTNPLVFLSQFSLEKYLSQEEQSTAALTLYTKKQFFQGIHEVVESSNEDNFQLLDIQTPSICDNQEILEERRLEMARLQLAYICAQHQLIHLKASNSSMKSSIKWAEESLHSLTSKAVDKENLDAKISSLTSEIMKLEKEVTQIKDRSLPAVVRENAQLLNMPVVKGDFDLQIAKQDYYTARQELVLNQLIKQKASFELLQLSYEIELRKHRDIYRQLENLVQELSQSNMMLYKQLEMLTDPSVSQQINPRNTIDTKDYSTHRLYQVLEGENKKKELFLTHGNLEEVAEKLKQNISLVQDQLAVSAQEHSFFLSKRNKDVDMLCDTLYQGGNQLLLSDQDFVKMENYEALVGFDLCNTPLSSVAQKIMSAMHSGDLVDSKTWGKSTETMEVINKSSVKYSVQLEDRKTQSPEKKDLKSLRSQTSRGSAKLSPQSFSVRLTDQLSADQKQKSISSLTLSSCLIPQYNQEASVLQKKGHKRKHFLMENINNENKGSINLKRKHITYNNLSEKTSKQMALEEDTDDAEGYLNSGNSGALKKHFCDIRHLDDWAKSQLIEMLKQAAALVITVMYTDGSTQLGADQTPVSSVRGIVVLVKRQAEGGHGCPDAPACGPVLEGFVSDDPCIYIQIEHSAIWDQEQEAHQQFARNVLFQTMKCKCPVICFNAKDFVRIVLQFFGNDGSWKHGLWFMATISYFGASSDTNFGSDGKPCHSGEQRGDGEDVSTSWGSSQGIGARSSFCCRRTVSYNEQ

SEQ ID NO: 55821 - protein, 233 aa, Homo sapiens
MQLREKLSNLHLKEEKIKPDTNGAVVKTNANAEKTDEEEKEDRAAQSLLNKLIRSNLVDNTNQVEVLQRDPNSPLYSVKSFEELRLKPQLLQGVYAMGFNRPSKIQENALPLMLAEPPQNLIAQSQSGTGKTAAFVLAMLSQVEPANKYPQCLCLSPTYELALQTGKVIEQMGKFYPELKLAYAVRGNKLERGQKISEQIVIGTPGTVLDWCSKLKFIDPKKIKVFVLDEADV

SEQ ID NO: 55822 - protein, 956 aa, Homo sapiens
MATRGGAGVAMAVWSLLSARAVTAFLLLFLPRFLQAQTFSFPFQQPEKCDNNQYFDISALSCVPCGANQRQDARGTSCVCLPGFQMISNNGGPAIICKKCPENMKGVTEDGWNCISCPSDLTAEGKCHCPIGHILVERDINGTLLSQATCELCDGNENSFMVVNALGDRCVRCEPTFVNTSRSCACSEPNILTGGLCFSSTGNFPLRRISAARYGEVGMSLTSEWFAKYLQSSAAACWVYANLTSCQALGNMCVMNMNSYDFATFDACGLFQFIFENTAGLSTVHSISFWRQNLPWLFYGDQLGLAPQVLSSTSLPTNFSFKGENQNTKLKFVAASYDIRGNFLKWQTLEGGVLQLCPDTETRLNAAYSFGTTYQQNCEIPISKILIDFPTPIFYDVYLEYTDENQHQYILAVPVLNLNLQHNKIFVNQDSNSGKWLLTRRIFLVDAVSGRENDLGTQPRVIRVATQISLSVHLVPNTINGNIYPPLITIAYSDIDIKDANSQSVKVSFSVTYEMDHGEAHVQTDIALGVLGGLAVLASLLKTAGWKRRIGSPMIDLQTVVKFLVYYAGDLANVFFIITVGTGLYWLIFFKAQKSVSVLLPMPIQEERFVTYVGCAFALKALQFLHKLISQITIDVFFIDWERPKGKVLKAVEGEGGVRSATVPVSIWRTYFVANEWNEIQTVRKINSLFQVLTVLFFLEVVGFKNLALMDSSSSLSRNPPSYIAPYSCILRYAVSAALWLAIGIIQVVFFAVFYERFIEDKIRQFVDLCSMSNENLCSQRGLVPNTDGQTFEIAISNQMRQHYDRIHETLIRKNGPARLLSSSASTFEQSIKAYHMMNKFLGSFIDHVHKEMDYFIKDKLLLERILGMEFMEPMEKSIFYNDEGYSFSSVLYYGNEATLLIFDLLFFCVVDLACQNFILASFLTYLQQEIFRYIRNTVGQKNLASKTLVDQRFLI

SEQ ID NO: 55823 - protein, 909 aa, Homo sapiens
MITSAAGIISLLDEDEPQLKEFALHKLNAVVNDFWAEISESVDKIEVLYEDEGFRSRQFAALVASKVFYHLGAFEESLNYALGAGDLFNVNDNSEYVETIIAKCIDHYTKQCVENADLPEGEKKPIDQRLEGIVNKMFQRCLDDHKYKQAIGIALETRRLDVFEKTILESNDVPGMLAYSLKLCMSLMQNKQFRNKVLRVLVKIYMNLEKPDFINVCQCLIFLDDPQAVSDILEKLVKEDNLLMAYQICFDLYESASQQFLSSVIQNLRTVGTPIASVPGSTNTGTVPGSEKDSDSMETEEKTSSAFVGKTPEASPEPKDQTLKMIKILSGEMAIELHLQFLIRNNNTDLMILKNTKDAVRNSVCHTATVIANSFMHCGTTSDQFLRDNLEWLARATNWAKFTATASLGVIHKGHEKEALQLMATYLPKDTSPGSAYQEGGGLYALGLIHANHGGDIIDYLLNQLKNASNDIVRHGGSLGLGLAAMGTARQDVYDLLKTNLYQDDAVTGEAAGLALGLVMLGSKNAQAIEDMVGYAQETQHEKILRGLAVGIALVMYGRMEEADALIESLCRDKDPILRRSGMYTVAMAYCGSGNNKAIRRLLHVAVSDVNDDVRRAAVESLGFILFRTPEQCPSVVSLLSESYNPHVRYGAAMALGICCAGTGNKEAINLLEPMTNDPVNYVRQGALIASALIMIQQTEITCPKVNQFRQLYSKVINDKHDDVMAKFGAILAQGILDAGGHNVTISLQSRTGHTHMPSVVGVLVFTQFWFWFPLSHFLSLAYTPTCVIGLNKDLKMPKVQYKSNCKPSTFAYPAPLEVPKEKEKEKVSTAVLSITAKAKKKEKEKEKKEEEKMEVDEAEKKEEKEKKKEPEPNFQLLDNPARVMPAQLKVLTMPETCRYQPFKPFSLL

SEQ ID NO: 55824 - protein, 478 aa, Homo sapiens
MWLAAAAPSLARRLLFLGPPPPPLLLLVFSRSSRRRLHSLGLAAMPEKRPFERLPADVSPINYSLCLKPDLLDFTFEGKLEAAAQVRQATNQIVMNCADIDIITASYAPEGDEEIHATGFNYQNEDEKVTLSFPSTLQTGTGTLKIDFVGELNDKMKGFYRSKYTTPSGEVRYAAVTQFEATDARRAFPCWDEPAIKATFDISLVVPKDRVALSNMNVIDRKPYPDDENLVEVKFARTPVMSTYLVAFVVGEYDFVETRSKDGVCVRVYTPVGKAEQGKFALEVAAKTLPFYKDYFNVPYPLPKIDLIAIADFAAGAMENWGLVTYRETALLIDPKNSCSSSRQWVALVVGHELAHQWFGNLVTMEWWTHLWLNEGFASWIEYLCVDHCFPEYDIWTQFVSADYTRAQELDALDNSHPIEVSVGHPSEVDEIFDAISYSKGASVIRMLHDYIGDKDFKKGMNMYLTKFQQKNAATGNL

SEQ ID NO: 55825 - protein, 57 aa, Homo sapiens
MAASGSGMAQKTWELANNMQEAQSIDEIYKYDKKQQQEILAAKPWTKENGSSLCCSG

SEQ ID NO: 55826 - protein, 34 aa, Homo sapiens
MVQAIKWVDEVVPAAPYVTTLETLDKYNCDFCVH

SEQ ID NO: 55827 - protein, 181 aa, Homo sapiens
MFFSYGTKILYQNTEALQSKFFSPLQKAMLPPNSFQGKVAFITGGGTGLGKGMTTLLSSLGAQCVIASRKMDVLKATAEQISSQTGNKVHAIQCDVRDPDMVQNTVSELIKVAGHPNIVINNAAGNFISPTERLSPNAWKTITDIVLNGTAFVTLEIGKQLIKAQKGAAFLSITTIYAETG

SEQ ID NO: 55828 - protein, 670 aa, Homo sapiens
MHLRIHARRSPPRRPAWTLGIWFLFWGCIVSSVWSSSNVASSSSTSSSPGSHSQHEHHFHGSKHHSVPISIYRSPVSLRGGHAGATYIFGKSGGLILYTWPANDRPSTRSDRLAVGFSTTVKDGILVRIDSAPGLGDFLQLHIEQGKIGVVFNIGTVDISIKEERTPVNDGKYHVVRFTRNGGNATLQVDNWPVNEHYPTGNTDNERFQMVKQKIPFKYNRPVEEWLQEKGRQLTIFNTQAQIAIGGKDKGRLFQGQLSGLYYDGLKVLNMAAENNPNIKINGSVRLVGEVPSILGTTQTTSMPPEMSTTVMETTTTMATTTTRKNRSTASIQPTSDDLVSSAECSSDDEDFVECEPSTGRSGGELVIPLLVEDPLATPPIATRAPSITLPPTFRPLLTIIETTKDSLSMTSEAGLPCLSDQGSDGCDDDGLVISGYGSGETFDSNLPPTDDEDFYTTFSLVTDKSLSTSIFEGGYKAHAPKWESKDFRPNKVSETSRTTTTSLSPELIRFTASSSSGMVPKLPAGKMNNRDLKPQPDIVLLPLPTAYELDSTKLKSPLITSPMFRNVPTANPTEPGIRRVPGASEVIRESSSTTGMVVGIVAAAALCILILLYAMYKYRNRDEGSYQVDETRNYISNSAQSNGTLMKEKQQSSKSGHKKQKNKDREYYV

SEQ ID NO: 55829 - protein, 1094 aa, Homo sapiens
MPCGFSPSPVAHHLVPGPPDTPAQQLRCGWTVGGWLLSLVRGLLPCLPPGARTAEGPIMVLAGPLAVSLLLPSLTLLVSHLSSSQDVSSEPSSEQQLCALSKHPTVAFEDLQPWVSNFTYPGARDFSQLALDPSGNQLIVGARNYLFRLSLANVSLLQATEWASSEDTRRSCQSKGKTEEECQNYVRVLIVAGRKVFMCGTNAFSPMCTSRQVGNLSRTIEKINGVARCPYDPRHNSTAVISSQGELYAATVIDFSGRDPAIYRSLGSGPPLRTAQYNSKWLNEPNFVAAYDIGLFAYFFLRENAVEHDCGRTVYSRVARVCKNDVGGRFLLEDTWTTFMKARLNCSRPGEVPFYYNELQSAFHLPEQDLIYGVFTTNVNSIAASAVCAFNLSAISQAFNGPFRYQENPRAAWLPIANPIPNFQCGTLPETGPNENLTERSLQDAQRLFLMSEAVQPVTPEPCVTQDSVRFSHLVVDLVQAKDTLYHVLYIGTESGTILKALSTASRSLHGCYLEELHVLPPGRREPLRSLRILHSARALFVGLRDGVLRVPLERCAAYRSQGACLGARDPYCGWDGKQQRCSTLEDSSNMSLWTQNITACPVRNVTRDGGFGPWSPWQPCEHLDGDNSGSCLCRARSCDSPRPRCGGLDCLGPAIHIANCSRNGAWTPWSSWALCSTSCGIGFQVRQRSCSNPAPRHGGRICVGKSREERFCNENTPCPVPIFWASWGSWSKCSSNCGGGMQSRRRACENGNSCLGCGVEFKTCNPEGCPEVRRNTPWTPWLPVNVTQGGARQEQRFRFTCRAPLADPHGLQFGRRRTETRTCPADGSGSCDTDALVEVLLRSGSTSPHTVSGGWAAWGPWSSCSRDCELGFRVRKRTCTNPEPRNGGLPCVGDAAEYQDCNPQACPVRGAWSCWTSWSPCSASCGGGHYQRTRSCTSPAPSPGEDICLGLHTEEALCATQACPEGWSPWSEWSKCTDDGAQSRSRHCEELLPGSSACAGNSSQSRPCPYSEIPVILPASSMEEATDCAGKRNRTYLMLRSSQPSGTPLQSLDSFHILLQTAKLCWGPHCFEMGSISSTWWPRASPASWALGS

SEQ ID NO: 55830 - protein, 169 aa, Homo sapiens
DWVSFLRSFGQLTLCPRNGTVTGKWRGSHVVGLLTTLNFGDGPDRNKTRTFQATVLGSQMGLKGSSAGQLVLITARVTTERTAGTCLYFSAVPGILPSSQPPISCSEEGAGNATLSPRMGEECVSVWSHEGLVLTKLLTSVRASDGSPGFCRLPADYCILKVPGNNSTL

SEQ ID NO: 55831 - protein, 404 aa, Homo sapiens
MQDFVKLLGLRHRREVVGRSAIFGGEHFMLEETDWYLLNLFRLWWHYGISFLRLQMWVEEVMEKFMRIYKYQAHGYAFSGVEELLYSLGESTFVNMTQHSVAESLLQVGVTQRFIDDVVSAVLRASYGQSAAMPAFAGAMSLAGAQGSLWSVEGGNKLVCSGLLKLTKANVIHATVTSVTLHSTEGKALYQVAYENEVGNSSDFYDIVVIATPLHLDNSSSNLTFAGFHPPIDDVQGSFQPTVVSLVHGYLNSSYFGFPDPKLFPFANILTTDFPSFFCTLDNICPVNISASFRRKQPQEAAVWRVQSPKPLFRTQLKTLFRSYYSVQTAEWQAHPLYGSRPTLPRFALHDQLFYLNALEWAASSVEVMAVAAKNVALLAYNRWYQDLDKIDQKDLMHKVKTEL

SEQ ID NO: 55832 - protein, 82 aa, Homo sapiens
MPNDDFCPGLTIKAMGAERAPQRQPCNTISHRESWPHWPCTSSSSSPSSSAWWPPRTGRLNAAKTPSRNACRILTMSSCSRW

SEQ ID NO: 55833 - protein, 218 aa, Homo sapiens
SDKNAMASLQGCETLNAALTSPTRMDAVAAKVPNDGQNPGPEEEKLDESMERPESPKEFLDLDNHNAATKRQSSLSASEYLYGTPPPLSSGMGFGSSAFPPHSVMLQTGPPYTPQRPASHFQPRAYSSPVAALPPHHPGATQPNGLSQEGPIYRCQEEGLGHFQAVMMEQIGTRSGIRGPFQEMYRPSGFKRFSCLILPSSWDYRCPPPHLAEFCMIL

SEQ ID NO: 55834 - protein, 44 aa, Homo sapiens
MQKFIEADYYELDWYYEECSDALPQLSLLALRDPDLSSSKSKGK

SEQ ID NO: 55835 - protein, 74 aa, Homo sapiens
MSGSDGGLEEEPELSITLTLRMLMHGKEVGSIIGKKGETVKRIREQSSARITISEGSCPERITTITGSTAAVFH

SEQ ID NO: 55836 - protein, 938 aa, Homo sapiens
MEIKEEGASEEGQHFLPTAQANDPGDCQFTSIQKTPNEPQLEFILACKDLVAPVRDRKLNTLVQISVIHPVEQSLTRYSSTEIVEGTRDPLFLTGVTFPSEYPIYEETKIKLTVYDVKDKSHDTVRTSVLPEHKDPPPEVGRSFLGYASFKVGELLKSKEQLLVLSLRTSDGGKVVGTIEVSVVKMGEIEDGEADHITTDVQGQKCALVCECTAPESVSGKDNLPFLNSVLKNPVCKLYRFPTSDNKWMRIREQMSESILSFHIPKELISLHIKEDLCRNQEIKELGELSPHWDNLRKNVLTHCDQMVNMYQDILTELSKETGSSFKSSSSKGEKTLEFVPINLHLQRMQVHSPHLKDALYDVITVGAPAAHFQGFKNGGLRKLLHRFETERRNTGYQFIYYSPENTAKAKEVLSNINQLQPLIATHADLLLNSASQHSPDSLKNSLKMLSEKTELFVHAFKDQLVRSALLALYTARPGGILKKPPSPKSSTEESSPQDQPPVMRGQDSIPHHSDYDEEEWDRVWANVGKSLNCIIAMVDKLIERDGGSEGSGGNNDGEKEPSLTDAIPSHPREDWYEQLYPLILTLKDCMGEVVNRAKQSLTFVLLQELAYSLPQCLMLTLRRDIVFSQALAGLVCGFIIKLQTSLYDPGFLQQLHTVGLIVQYEGLLSTYSDEIGMLEDMAVGISDLKKVAFKIIEAKSNDVLPVITGRREHYVVEVKLPARMFESLPLQIKEGQLLHVYPVLFNVGINEQQTLAERFGDVSLQESINQENFELLQEYYKIFMEKMPPDYISHFQEQNDLKALLENLLQNIQSKKRKNVEIMWLAATICRKLNGIRFTCCKSAKDRTSMSVTLEQCSILRDEHQLHKDFFIRALDCMRSRQTQGALNESDDPETGCLTDNKPTSRHFYPVALLLVSSHLLVVWLILSLALLLAKYQ

SEQ ID NO: 55837 - protein, 133 aa, Homo sapiens
MAVVNVTVVMGTRTFSNIHSERKQVQKEEERTWDWCWMAQWVTTNGYDQYDDLNMHLEKLRVVQISRKECAKRINQLSRNMICAWNEPGTNGIFKVLTPAQPPPPSRETVGHLWFVLFMEPRDSSKWVSSVGA

SEQ ID NO: 55838 - protein, 106 aa, Homo sapiens
MADRDSGSEQGGAALGSGGSLGHPGSGSGSGGGGGGGGGGGGSGGGGGGAPGGLQHETQELASKRVDIQNKRFYLDVKQNAKGRFLKIAEVGAGGNKSRLTLSMSV

SEQ ID NO: 55839 - protein, 29 aa, Homo sapiens
MKLIILEHYSQASEWAAKYIRNRIIQFNP

SEQ ID NO: 55840 - protein, 103 aa, Homo sapiens
KSQKIHGCQILETVYKHSCGGLPPVRSALEKILAVCHGVMYKQLSAWMLHGLLLDQHEEFFIKQGPSSGNVSAQPEEDEEDLGIGGLTGKQLRELQDLSQKTM

SEQ ID NO: 55841 - protein, 80 aa, Homo sapiens
MALSQGLFTFKDVAIEFSQEEWECLDPAQRALYRDVMLENYRNLLSLDEDNIPPEDAFYSIRELRETLVFLIPYSSKICL

SEQ ID NO: 55842 - protein, 163 aa, Homo sapiens
MAAVRVLVASRLAAASAFTSLSPGGRTPSQRAALHLSVPRPAARVALVLSGCGVYDGTEIHEASAILVHLSRGGAEVQIFAPDVPQMHVIDHTKGQPSEGESRNVLTESARIARGKITDLANLSAANHDAAIFPGGFGAAKNLDSVSLWTSSLWNCERYMSVM

SEQ ID NO: 55843 - protein, 200 aa, Homo sapiens
  MOD_RES (1)..(1): Any amino acid
XLLKHLQRMVSVPQVKASALKVVTLTANDKTSVSFSSLPGQGVIYNVIVWDPFLNTSAAYIPAHTYACSFEAGEGSCASLGRVSSKVFFTLFALLGFFICFFGHRFWKTELFFIGFIIMGFFFYILITRLTPIKYDVNLILTAVTGSVGGMFLVAVWWRFGILSICMLCVGLVLGFLISSVTFFTPLETGSLSVTHAGLQ

SEQ ID NO: 55844 - protein, 411 aa, Homo sapiens
MQSNKTFNLEKQNHTPRKHHQHHHQQQHHQQQQQQPPPPPIPANGQQASSQNEGLTIDLKNFRKPGEKTFTQRSRLFVGNLPPDITEEEMRKLFEKYGKAGEVFIHKDKGFGFIRLETRTLAEIAKVELDNMPLRGKQLRVRFACHSASLTVRNLPQFPRPVTVEPMDQLDDEEGLPEKLVIKNQQFHKEREQPPRFAQPGSFEYEYAMRWKALIEMEKQQQDQVDRNIKEAREKLEMEMEAARHEHQVMLMRQDLMRRQEELRRMEELHNQEVQKRKQLELRQEEERRRREEEMRRQQEEMMRRQQEGFKGTFPDAREQEIRMGQMAMGGAMGINNRGAMPPAPVPAGTPAPPGPATMMPDGTLGLTPPTTERFGQAATMEGIGAIGGTPPAFNRAAPGAEFAPNKRRRY

SEQ ID NO: 55845 - protein, 45 aa, Homo sapiens
  MOD_RES (1)..(1): Any amino acid
XSRTESSPAGRRWPRVARSPHLAATSPWLCAGTRCLYSLGKAEPK

SEQ ID NO: 55846 - protein, 142 aa, Homo sapiens
MAPEIHMTGPMCLIENTNGELVANPEALKILSAITQPVVVVAIVGLYRTGKSYLMNKLAGKNKGFSLGSTVKSHTKGIWMWCVPHPKKPEHTLVLLDTEGLGDVKKGDNQNDSWIFTLAVLLSSTLVYNSMGTINQQAMDQL

SEQ ID NO: 55847 - protein, 113 aa, Homo sapiens
MYIFCTDCWLIAVLYFTWLVFDWNTPKKGGRRSQWVRNWAVWRYFRDYFPIQLVKTHNLLTTRNYIFGYHPHGIMGLGAFCNFSTEATEVSKKFPGIRPYLATLAGNFRMPVL

SEQ ID NO: 55848 - protein, 384 aa, Homo sapiens
MGAFLDKPKTEKHNAHGAGNGLRYGLSSMQGWRVEMEDAHTAVVGIPHGLEDWSFFAVYDGHAGSRVANYCSTHLLEHITTNEDFRAAGKSGSALELSVENVKNGIRTGFLKIDEYMRNFSDLRNGMDRSGSTAVGVMISPKHIYFINCGDSRAVLYRNGQVCFSTQDHKPCNPREKERIQNAGGSVMIQRVNGSLAVSRALGDYDYKCVDGKGPTEQLVSPEPEVYEILRAEEDEFIILACDGIWDVMSNEELCEYVKSRLEVSDDLENVCNWVVDTCLHKGSRDNMSIVLVCFSNAPKVSDEAVKKDSELDKHLESRVEEIMEKSGEEGMPDLAHVMRILSAENIPNLPPGGGLAGKRNVIEAVYSRLNPHRESDGEGTPKT

SEQ ID NO: 55849 - protein, 379 aa, Homo sapiens
MADIDNKEQSELDQDLDDVEEVEEEETGEETKLKARQLTVQMMQNPQILAALQERLDGLVETPTGYIESLPRVVKRRVNALKNLQVKCAQIEAKFYEEVHDLERKYAVLYQPLFDKRFEIINAIYEPTEEECEWKPDEEDEISIPASCLGEFSTEELKEKAKIEDEKKDEEKEDPKGIPEFWLTVFKNVDLLSDMVQEHDEPILKHLKDIKVKFSDAGQPMSFVLEFHFEPNEYFTNEVLTKTYRMRSEPDDSDPFSFDGPEIMGCTGCQIDWKKGKNVTLKTIKKKQKHKGRGTVRTVTKTVSNDSFFNFFAPPEVPESGDLDDDAEAILAADFEIGHFLRERIIPRSVLYFTGEAIEDDDDDYDEEGEEADEVMFTK

SEQ ID NO: 55850 - protein, 296 aa, Homo sapiens
MAFSGIYKLDDGKPYLNNCFPARNLLRVPEEGQGHWLVVQKGNLKKKPKGLVGAQAERRESLKATSFEFKGKKESRRENQVDLPGHILDQAFLLKHHCVRKPSDLCTINVSGLKFSKAKENDFKHFHSVIYINASENLLPLEAFHTFPALKELDLAFNGIKTIYVKYGDFKLLEFLDLSFNSLTVEAICDLGILPHLRVLLLTGNGLTSLPPNLAVAEQEASVTSLTSKRYILRFPALETLMLDDNRLSNPSCFASLAGLRRLKKLSLDENRIIRIPYLQQVQLYDESVDWNGGRG

SEQ ID NO: 55851 - protein, 1037 aa, Homo sapiens
MTSPQLEWTLQTLLEQLNEDELKSFKSLLWAFPLEDVLQKTPWSEVEEADGKKLAEILVNTSSENWIRNATVNILEEMNLTELCKMAKAEMMEDGQVQEIDNPELGDAEEDSELAKPGEKEGWRNSMEKQSLVWKNTFWQGDIDNFHDDVTLRNQRFIPFLNPRTPRKLTPYTVVLHGPAGVGKTTLAKKCMLDWTDCNLSPTLRYAFYLSCKELSRMGPCSFAELISKDWPELQDDIPSILAQAQRILFVVDGLDELKVPPGALIQDICGDWEKKKPVPVLLGSLLKRKMLPRAALLVTTRPRALRDLQLLAQQPIYVRVEGFLEEDRRAYFLRHFGDEDQAMRAFELMRSNAALFQLGSAPAVCWIVCTTLKLQMEKGEDPVPTCLTRTGLFLRFLCSRFPQGAQLRGALRTLSLLAAQGLWAQMSVFHREDLERLGVQESDLRLFLDGDILRQDRVSKGCYSFIHLSFQQFLTALFYTLEKEEGEDRDGHAWDIGDVQKLLSGEERLKNPDLIQVGHFLFGLANEKRAKELEATFGCRMSPDIKQELLQCKAHLHANKPLSVTDLKEVLGCLYESQEEELAKVVVAPFKEISIHLTNTSEVMHCSFSLKHCQDLQKLSLQVAKGVFLENYMDFELDIEFERCTYLTIPNWARQDLRSLRLWTDFCSLFSSNSNLKFLEVKQSFLSDSSVRILCDHVTRSTCHLQKVEIKNVTPDTAYRDFCLAFIGKKTLTHLTLAGHIEWERTMMLMLCDLLRNHKCNLQYLRLGGHCATPEQWAEFFYVLKANQSLKHLRLSANVLLDEGAMLLYKTMTRPKHFLQMLSLENCRLTEASCKDLAAVLVVSKKLTHLCLAKNPIGDTGVKFLCEGLSYPDCKLQTLVLQQCSITKLGCRYLSEALQEACSLTNLDLSINQIARGLWILCQALENPNCNLKHLRLWSCSLMPFYCQHLGSALLSNQKLETLDLGQNHLWKSGIIKLFGVLRQRTGSLKILRLKTYETNLEIKKLLEEVKEKNPKLTIDCNASGATAPPCCDFFC

SEQ ID NO: 55852 - protein, 362 aa, Homo sapiens
MHRKHLQEIPDLSSNVATSFTWGWDSSKTSELLSGMGVSALEKEEPDSENIPQELLSNLGHPESPPRKRLKSKGSDKDFVIVRRPKLNRENFPGVSWDSLPDELLLGIFSCLCLPELLKVSGVCKRWYRLASDESLWQTLDLTGKNLHPDVTGRLLSQGVIAFRCPRSFMDQPLAEHFSPFRVQHMDLSNSVIEVSTLHGILSQCSKLQNLSLEGLRLSDPIVNTLAKNSNLVRLNLSGCSGFSEFALQTLLSSCSRLDELNLSWCFDFTEKHVQVAVAHVSETITQLNLSGYRKNLQKSDLSTLVRRCPNLVHLDLSDSVMLKNDCFQEFFQLNYLQHLSLSRCYDIIPETLLPYPQAPET

SEQ ID NO: 55853 - protein, 349 aa, Homo sapiens
MKDVPGFLQQSQNSGPGQPAVWHRLEELYTKKLWHQLTLQVLDFVQDPCFAQGDGLIKLYENFISEFEHRVNPLSLVEIILHVVRQMTDPNVALTFLEKTREKVKSSDEAVILCKTAIGALKLNIGDLQVTKETIEDVEEMLNNLPGVTSVHSRFYDLSSKYYQTIGNHASYYKDALRFLGCVDIKDLPVSEQQERAFTLGLAGLLGEGVFNFGELLMHPVLESLRNTDRQWLIDTLYAFNSGNVERFQTLKTAWGQQPDLAANEAQLLRKIQLLCLMEVELLVMKALSVGLVKGSIDEVDKRVHMTWVQPRVLDLQQIKGMKDRLEFWCTDVKSMEMLVEHQAHDILT

SEQ ID NO: 55854 - protein, 158 aa, Homo sapiens
MVALPMVLVLLLVLSRGESELDAKIPSTGDATEWRNPHLSMLGSCQPAPSCQKCILSHPSCAWCKQLNFTASGEAEARRCARREELLARGCPLEELEEPRGQQEVLQDQPLSQGARGEGATQLAPQRVRVTLRPGEPQQLQVRFLRAEGYPVDLYYLM

SEQ ID NO: 55855 - protein, 63 aa, Homo sapiens
MAAMPLKAQYQEMVTFEDVAVHFTKTEWTGLSPAQRALYRSVMLENFGNLTALGRSHKCSVSC

SEQ ID NO: 55856 - protein, 67 aa, Homo sapiens
MAALDSLSLFTSLGLSEQKARETLKNSALSAQLREAATQLPLSMCGVTPWTPSTLWTSSGNVAWVSL

SEQ ID NO: 55857 - protein, 735 aa, Homo sapiens
MPAIMTMLADHAARQLLDFSQKLDINLLDNVVNCLYHGEGAQQRMAQEVLTHLKEHPDAWTRVDTILEFSQNMNTKYYGLQILENVIKTRWKILPRNQCEGIKKYVVGLIIKTSSDPTCVEKEKVYIGKLNMILVQILKQEWPKHWPTFISDIVGASRTSESLCQNNMVILKLLSEEVFDFSSGQITQVKSKHLKDSMCNEFSQIFQLCQFVMENSQNAPLVHATLETLLRFLNWIPLGYIFETKLISTLIYKFLNVPMFRNVSLKCLTEIAGVSVSQYEEQFVTLFTLTMMQLKQMLPLNTNIRLAYSNGKDDEQNFIQNLSLFLCTFLKEHDQLIEKRLNLRETLMEALHYMLLVSEVEETEIFKICLEYWNHLAAELYRESPFSTSASPLLSGSQHFDVPPRRQLYLPMLFKVRLLMVSRMAKPEEVLVVENDQGEVVREFMKDTDSINLYKNMRETLVYLTHLDYVDTERIMTEKLHNQVNGTEWSWKNLNTLCWAIGSISGAMHEEDEKRFLVTVIKDLLGLCEQKRGKDNKAIIASNIMYIVGQYPRFLRAHWKFLKTVVNKLFEFMHETHDGVQDMACDTFIKIAQKCRRHFVQVQVGEVMPFIDEILNNINTIICDLQPQQVHTFYEAVGYMIGAQTDQTVQEHLIEKYMLLPNQVWDSIIQQATKNVDILKDPETVKQLGSILKTNVRACKAVGHPFVIQLGRIYLDMLNVYKCLSENISAAIQAI

SEQ ID NO: 55858 - protein, 182 aa, Homo sapiens
PKRASMVHSLIEAYALHKQMRDEASGFCYLNDAVLGILRLRRKFERILYVDLDLHHGDGVEDAFSFTSKVMTVSLHKFSPGFFPGTGDVSDVGLGKGRYYSVNVPIQDGIQDEKYYQICESVLKEVYQAFNPKAVVLQLGADTIAGDPMCSFNMTPVGIGKCLKYILQWQLATLILGGDRRL

SEQ ID NO: 55859 - protein, 65 aa, Homo sapiens
MHTSTSSSVTKSYISSQTNGETGQLVHRFTVPAPVVIILIILCVMAGIIGTILLISYSIRRLIKA

SEQ ID NO: 55860 - protein, 129 aa, Homo sapiens
EEGIARKALYKLTAARADQGAEMEDRMSRQGQRTPSAQILCIDEATASVDQKTDQLLQQTICKRFANKTVLTIAHRLNTILNSDRVLVLQAGRVVELDSPATLRNQPHSLFQQLLQSSQQGVPASLGGP

SEQ ID NO: 55861 - protein, 364 aa, Homo sapiens
MSGARSKLALFLCGCYVVALGAHTGEESVADHHEAEYYVAAVYEHPSILSLNPLALISRQEALELMNQNLDIYEQQVMTAAQKDVQIIVFPEDGIHGFNFTRTSIYPFLDFMPSPQVVRWNPCLEPHRFNDTEVLQRLSCMAIRGDMFLVANLGTKEPCHSSDPRCPKDGRYQFNTNVVFSNNGTLVDRYRKHNLYFEAAFDVPLKVDLITFDTPFAGRFGIFTCFDILFFDPAIRVLRDYKVKHVVYPTAWMNQLPLLAAIEIQKAFAVAFGINVLAANVHHPVLGMTGSGIHTPLESFWYHDMENPKSHLIIAQVAKNPVGLIGAENATGETDPSHRSHSVAQTGVEWHDLSSPKPLPPRLK

SEQ ID NO: 55862 - protein, 144 aa, Homo sapiens
MFKLRNSSSPATGEDPEGSDILNYFESYLAVASTVPSMLCLVANFLLVNRVAVHIRVLASLTVILAIFMVITALVKVDTSSWTRGFFAVTIVCMVILSGASTVFSSSIYGMTGSFPMRNSQALISEDLLCPGDAKMNKHQSPRS

SEQ ID NO: 55863 - protein, 207 aa, Homo sapiens
MTSVAKVYYSQTTQTESRPLMGPGIRRRRVLTKDGRSNVRMEHIADKRFLYLKDLWTTFIDMQWRYKLLLFSATFAGTWFLFGVVWYLVAVAHGDLLELDPPANHTPCVVQVHTLTGAFLFSLESQTTIGYGFRYISEECPLAIVLLIAQLVLTTILEIFITGSPEKICFPVSCEWKDPSQYVPLKRVQYPGPMERAWKEEVGLTEQ

SEQ ID NO: 55864 - protein, 1782 aa, Homo sapiens
MAKPTSKDSGLKEKFKILLGLGTPRPNPRSAEGKQTEFIITAEILRELSMECGLNNRIRMIGQICEVAKTKKFEEHAVEALWKAVADLLQPERPLEARHAVLALLKAIVQGQGERLGVLRALFFKVIKDYPSNEDLHERLEVFKALTDNGRHITYLEEELADFVLQWMDVGLSSEFLLVLVNLVKFNSCYLDEYIARMVQMICLLCVRTASSVDIEVSLQVLDAVVCYNCLPAESLPLFIVTLCRTINVKELCEPCWKLMRNLLGTHLGHSAIYNMCHLMEDRAYMEDAPLLRGAVFFVGMALWGAHRLYSLRNSPTSVLPSFYQAMACPNEVVSYEIVLSITRLIKKYRKELQVVAWDILLNIIERLLQQLQTLDSPELRTIVHDLLTTVEELCDQNEFHGSQERYFELVERCADQRPESSLLNLISYRAQSIHPAKDGWIQNLQALMERFFRSESRGAVRIKVLDVLSFVLLINRQFYEEELINSVVISQLSHIPEDKDHQVRKLATQLLVDLAEGCHTHHFNSLLDIIEKVMARSLSPPPELEERDVAAYSASLEDVKTAVLGLLVILQTKLYTLPASHATRVYEMLVSHIQLHYKHSYTLPIASSIRLQAFDFLLLLRADSLHRLGLPNKDGVVRFSPYCVCDYMEPERGSEKKTSGPLSPPTGPPGPAPAGPAVRLGSVPYSLLFRVLLQCLKQESDWKVLKLVLGRLPESLRYKVLIFTSPCSVDQLCSALCSMLSGPKTLERLRGAPEGFSRTDLHLAVVPVLTALISYHNYLDKTKQREMVYCLEQGLIHRCASQCVVALSICSVEMPDIIIKALPVLVVKLTHISATASMAVPLLEFLSTLARLPHLYRNFAAEQYASVFAISLPYTNPSKFNQYIVCLAHHVIAMWFIRCRLPFRKDFVPFITKGLRSNVLLSFDDTPEKDSFRARSTSLNERPKSLRIARPPKQGLNNSPPVKEFKESSAAEAFRCRSISVSEHVVRSRIQTSLTSASLGSADENSVAQADDSLKNLHLELTETCLDMMARYVFSNFTAVPKRSPVGEFLLAGGRTKTWLVGNKLVTVTTSVGTGTRSLLGLDSGELQSGPESSSSPGVHVRQTKEAPAKLESQAGQQVSRGARDRVRSMSGGHGLRVGALDVPASQFLGSATSPGPRTAPAAKPEKASAGTRVPVQEKTNLAAYVPLLTQGWAEILVRRPTGNTSWLMSLENPLSPFSSDINNMPLQELSNALMAAERFKEHRDTALYKSLSVPAASTAKPPPLPRSNTDSAVVMEEGSPGEVPVLVEPPGLEDVEAALGMDRRTDAYSRSSSVSSQEEKSLHAEELVGRGIPIERVVSSEGGRPSVDLSFQPSQPLSKSSSSPELQTLQDILGDPGDKADVGRLSPEVKARSQSGTLDGESAAWSASGEDSRGQPEGPLPSSSPRSPSGLRPRGYTISDSAPSRRGKRVERDALKSRATASNAEKVPGINPSFVFLQLYHSPFFGDESNKPILLPNESFERSVQLLDQIPSYDTHKIAVLYVGEGQSNSELAILSNEHGSYRYTEFLTGLGRLIELKDCQPDKVYLGGLDVCGEDGQFTYCWHDDIMQAVFHIATLMPTKDVDKHRCDKKRHLGNDFVSIVYNDSGEDFKLGTIKGQFNFVHVIVTPLDYECNLVSLQCRKDMEGLVDTSVAKIVSDRNLPFVARQMALHANMASQVHHSRSNPTDIYPSKWIARLRHIKRLRQRICEEAAYSNPSLPLVHPPSHSKAPAQTPAEPTPGYEVGQRKRLISSVEDFTEFV

SEQ ID NO: 55865 - protein, 33 aa, Homo sapiens
MLRPQGLLWLPLLFTSVCVMLNSNVLLWITALA

SEQ ID NO: 55866 - protein, 173 aa, Homo sapiens
  MOD_RES (1)..(1): Any amino acid
XECAEPYMIFKEADATKNKEKLEKLKSQADQFCQRLGKYRMPFAWTAIHLMNIVSSAGSLERDSTEVEISTGERKGSWSERRNSSIVGRRSLERTTSGDDACNLTSFRPATLTVTNFFKQVLFCHVGILGRCLCINFFNFRKVVIVLYMYGRVIPRNLKTLRIKIIKATIRMR

SEQ ID NO: 55867 - protein, 146 aa, Homo sapiens
MLEAHMQSYKGNDPLGEWERYIQWVEENFPENKEYLITLLEHLMKEFLDKKKYHNDPRFISYCLKFAEYNSDLHQFFEFLYNHGIGTLSSPLYIAWAGHLEAQGELQHASAVLQRGIQNQAEPREFLQQQYRLFQTRLTETHLPAQ

SEQ ID NO: 55868 - protein, 135 aa, Homo sapiens
  MOD_RES (1)..(1): Any amino acid
XIQDKLNKTKDDISKNMSFLKVDKEYVKALPSQGLSSSAVLEKLKEYSSMDAFWQEGRASGTVYSGEEKLTELLVKAYGDFAWSNPLHPDIFPGLRKIEAEIVRIACSLFNGGPDSCGCVSICKGHPIALFFRLK

SEQ ID NO: 55869 - protein, 249 aa, Homo sapiens
MGTALDIKIKRANKVYHAGPIQIINSTIEMVKPGKFPSGKTEIPFEFPLHLKGNKVLYETYHGVFVNIQYTLRCDMKRSLLAKDLTKTCEFIVHSAPQKGKFTPSPVDFTITPETLQNVKERALLPKFLLRGHLNSTNCVITQPLTGELVVESSEAAIRSVELQLVRVETCGCAEGYARDATEIQNIQIADGDVCRGLSVPIYMVFPRLFTCPTLETTNFKVEFEVNIVVLLHPDHLITENFPLKLCRI

SEQ ID NO: 55870 - protein, 475 aa, Homo sapiens
MGEIIMGNIELTRYTRPTPVQKHAIPIIKEKRDLMACAQTGSGKTAAFLLPILSQIYSDGPGEALRAMKENGRYGRRKQYPISLVLAPTRELAVQIYEEARKFSYRSRVRPCVVYGGADIGQQIRDLERGCHLLVATPGRLVDMMERGKIGLDFCKYLVLDEADRMLDMGFEPQIRRIVEQDTMPPKGVRHTMMFSATFPKEIQMLARDFLDEYIFLAVGRVGSTSENITQKVVWVEESDKRSFLLDLLNATGKDSLTLVFVETKKGADSLEDFLYHEGYACTSIHGDRSQRDREEALHQFRSGKSPILVATAVAARGLDISNVKHVINFDLPSDIEEYVHRIGRTGRVGNLGLATSFFNERNINITKDLLDLLVEAKQEVPSWLENMAYEHHYKGSSRGRSKSRFSGGFGARDYRQSSGASSSSFSSSRASSSRSGGGGHGSSRGFGGGGYGGFYNSDGYGGNYNSQGVDWWGN

SEQ ID NO: 55871 - protein, 60 aa, Homo sapiens
MARQSHQKRTPDFHDKYGNAVLASGATFCIVTWTYVATQVGIEWNLSPVGRVTPKEWRNQ

SEQ ID NO: 55872 - protein, 150 aa, Homo sapiens
MAAPSRLLIRGGRVVNDDFSEVADVLVEDGVVRALGHDLLPPGGAPAGLRVLDAAGKLVLPGGIDTHTHMQFPFMGSRSIDDFHQGTKVKEEMKILVQDKGVNSFKMFMAYKDLYMVTDLELYEAFSRCKEIGAIAQVHAENGDLIAEGA

SEQ ID NO: 55873 - protein, 93 aa, Homo sapiens
MASLQRSRVLRCCSCRLFQAHQVKKSVKWTCKACGEKQSFLQVSPTKQKASGAQACSEPFQGVPACHSWDHPLSNRVPQTRSSCFRASCSFRK

SEQ ID NO: 55874 - protein, 270 aa, Homo sapiens
MALLRRPTGPSPTPEDVSMKEENLCQAFSDALLCKIEDIDNEDWENPQLCSDYVKDIYQYLRQLEVLQSINPHFLDGRDINGRMRAILVDWLVQVHSKFRLLQETLYMCVGIMDRFLQVQPVSRKKLQLVGITALLLASKYEEMFSPNIEDFVYITDNAYTSSQIREMETLILKELKFELGRPLPLHFLRRASKAGENLKQQYYTGYTENEVLEVMQHMAKNVVKVNENLTKFIAIKNKYASSKLLKISMIPQLNSKAVKDLASPLIGRS

SEQ ID NO: 55875 - protein, 89 aa, Homo sapiens
MNIFDRKINFDALLKFSHITPSTQQHLKKVYASFALCMFVAAAGAYVHMVTHFIQAGLLSALGSLILMIWLMATPHSHETEQKRLGLLA

SEQ ID NO: 55876 - protein, 193 aa, Homo sapiens
  MOD_RES (1)..(1): Any amino acid
XLGEKASRLLEKFGRRKDADSETVKAAKVWKLAEVLVGEQQQCQDAKSQQKEQMLLLEKKSAAYSQVLLRCLTLLQRLLQEHRLKTQSELDRINAQYLEVKCGAMILKLRMEELKILSDTYTVEKVEVHRLIRDRLEGAIHLQEQDMENSRQVLNSYEVLGEEFDRLVKEYTVLKQATENKRWALQEFSKVYR

SEQ ID NO: 55877 - protein, 47 aa, Homo sapiens
MLCDTMGLDGAEGAGLCMDDIPHILKGCMPDRYQDSLCGLCLRHQLY

SEQ ID NO: 55878 - protein, 115 aa, Homo sapiens
MAPTQGPRAPLEFGGPLGAAALLLLLPATMFHLLLAARSGPARLLGPPASLPGLEVLWSPRALLLWLAWLGLQAALYLLPARKVAEGQELKDKSRLRYPINGNPIYDFFLGRELN

SEQ ID NO: 55879 - protein, 29 aa, Homo sapiens
  MOD_RES (1)..(1): Any amino acid
XYQDLLNVKLALDIEIATYRKLLEGEENR

SEQ ID NO: 55880 - protein, 1618 aa, Homo sapiens
MEQTVLVPPGPDSFNFFTRESLAAIERRIAEEKAKNPKPDKKDDDENGPKPNSDLEAGKNLPFIYGDIPPEMVSEPLEDLDPYYINKKTFIVLNKGKAIFRFSATSALYILTPFNPLRKIAIKILVHSLFSMLIMCTILTNCVFMTMSNPPDWTKNVEYTFTGIYTFESLIKIIARGFCLEDFTFLRDPWNWLDFTVITFAYVTEFVDLGNVSALRTFRVLRALKTISVIPGLKTIVGALIQSVKKLSDVMILTVFCLSVFALIGLQLFMGNLRNKCIQWPPTNASLEEHSIEKNITVNYNGTLINETVFEFDWKSYIQDSRYHYFLEGFLDALLCGNSSDAGQCPEGYMCVKAGRNPNYGYTSFDTFSWAFLSLFRLMTQDFWENLYQLTLRAAGKTYMIFFVLVIFLGSFYLINLILAVVAMAYEEQNQATLEEAEQKEAEFQQMIEQLKKQQEAAQQAATATASEHSREPSAAGRLSDSSSEASKLSSKSAKERRNRRKKRKQKEQSGGEEKDEDEFQKSESEDSIRRKGFRFSIEGNRLTYEKRYSSPHQSLLSIRGSLFSPRRNSRTSLFSFRGRAKDVGSENDFADDEHSTFEDNESRRDSLFVPRRHGERRNSNLSQTSRSSRMLAVFPANGKMHSTVDCNGVVSLVGGPSVPTSPVGQLLPEGTTTETEMRKRRSSSFHVSMDFLEDPSQRQRAMSIASILTNTVEELEESRQKCPPCWYKFSNIFLIWDCSPYWLKVKHVVNLVVMDPFVDLAITICIVLNTLFMAMEHYPMTDHFNNVLTVGNLVFTGIFTAEMFLKIIAMDPYYYFQEGWNIFDGFIVTLSLVELGLANVEGLSVLRSFRLLRVFKLAKSWPTLNMLIKIIGNSVGALGNLTLVLAIIVFIFAVVGMQLFGKSYKDCVCKIASDCQLPRWHMNDFFHSFLIVFRVLCGEWIETMWDCMEVAGQAMCLTVFMMVMVIGNLVVLNLFLALLLSSFSADNLAATDDDNEMNNLQIAVDRMHKGVAYVKRKIYEFIQQSFIRKQKILDEIKPLDDLNNKKDSCMSNHTAEIGKDLDYLKDVNGTTSGIGTGSSVEKYIIDESDYMSFINNPSLTVTVPIAVGESDFENLNTEDFSSESDLEESKEKLNESSSSSEGSTVDIGAPVEEQPVVEPEETLEPEACFTEGCVQRFKCCQINVEEGRGKQWWNLRRTCFRIVEHNWFETFIVFMILLSSGALAFEDIYIDQRKTIKTMLEYADKVFTYIFILEMLLKWVAYGYQTYFTNAWCWLDFLIVDVSLVSLTANALGYSELGAIKSLRTLRALRPLRALSRFEGMRVVVNALLGAIPSIMNVLLVCLIFWLIFSIMGVNLFAGKFYHCINTTTGDRFDIEDVNNHTDCLKLIERNETARWKNVKVNFDNVGFGYLSLLQVATFKGWMDIMYAAVDSRNVELQPKYEESLYMYLYFVIFIIFGSFFTLNLFIGVIIDNFNQQKKKFGGQDIFMTEEQKKYYNAMKKLGSKKPQKPIPRPGNKFQGMVFDFVTRQVFDISIMILICLNMVTMMVETDDQSEYVTTILSRINLVFIVLFTGECVLKLISLRHYYFTIGWNIFDFVVVILSIVGKKYLKFLNSVK

SEQ ID NO: 55881 - protein, 120 aa, Homo sapiens
  MOD_RES (1)..(1): Any amino acid
XLIYPKVLDTVIPVWLNHAMHTFIFPITLAEVVLRPHSYPSKKTGLTLLAAASIAYISRILWLYFETGTWVYPVFAKLSLLGLAAFFSLSYVFIASIYLLGEKLNHWKWGDMRQPRKKRK

SEQ ID NO: 55882 - protein, 80 aa, Homo sapiens
CDVIAQGIVMAVKDLEIKIPVVVRLQGTRVDDAKALIADSGLKILACDDLDEAARMVVKLSEIVTLAKQAHVDVKFQLPI

SEQ ID NO: 55883 - protein, 52 aa, Homo sapiens
MEGQDEVSAREQHFHSQVRESTICFLLFAILYVVSYFIITRYKRKSGSPSVP

SEQ ID NO: 55884 - protein, 75 aa, Homo sapiens
ASLHVVDAALVDCSVALAKPFDKFQFERLGYFSVDPDSHQGKRRGLTLAQGGVKWCNHSSLWPQTTGLKLFSCLS

SEQ ID NO: 55885 - protein, 87 aa, Homo sapiens
MTEYKLVVVGAGGVGKSALTIQLIQNHFVDEYDPTIEDSYRKQVVIDGETCLLDILDTAGQEEYSAMRDQYMRTGEGFLCVFAINNT

SEQ ID NO: 55886 - protein, 163 aa, Homo sapiens
PGGKGKRLPEVYCIVSRLGCFSLFSRILDEVEKRRGISPALVQPLMRSVMEAPFPALGKTILVKNFLPGSGTEVIELCRPLDSRLEHVDFESLFSSLSVRHLVCVFASLLLERRVIFIADKLSTPTSRCCHPPWSTSCARRRPSSSGCSPARCHCSGSCRWKR

SEQ ID NO: 55887 - protein, 865 aa, Homo sapiens
MARMPGSGDCNTSAGGSASAAAAAAENNGERGEGERGAGGRGRRHSRPHYCSAGEEEEEEEEEDEIQEVQITGDEEEEEDGGGGLEEDEEEEEEEEMGLDWDEPLEPEDSAGEELEPEPVHMINMDQSAALEPEAPPRLLAPRARGGPPGDGSELDPDVLQRPERARLSENTRLATRYAVRIFREYLSEKAQSPDFETMDKGALCRVLRSFYAEARSKSGQLYSKSSLISIRSSLNRYLNEPPYCRTLDLTKDPELRSANLTLAAVIRKLEEQGAGPVVQKQAITRADLRKLYTSSVFSTNTPFGLLNKVWFETCMYFCTRGRENQRELEEDSFGLAMDEDGRKFVYFKSLGPYHKSRSSSWSKKRAESSDEENLPRMYETGTEFCPYASFVKYLSKRNPLCKAFFQRPRDHCSEGDVTWYENKAIGKNLLGTRMQMLSKAAKLSKTYTNHCIGAVSIATLNSIAGIGTKLGSPAPQGCYAEALNGAARHHSHHPPTHPSHHHRPQPPSLGNTYILPKDSQVGPDVKSEAAPKRALYESVFGSGEICGPTSPKRLCIRPSEPVDAVVVVSVKHDPLPLLPEANGHRSTNSPTIVSPAIVSPTQDSRPNMSRPLITRSPASPLNNQGIPTPAQLTKSNAPVHIDVGGHMYTSSLATLTKYPESRIGRLFDGTEPIVLDSLKQHYFIDRDGQMFRYILNFLRTSKLLIPDDFKDYTLLYEEAKYFQLQPMLLEMERWKQDRETGRFSRPCECLVVRVAPDLGERITLSGDKSLIEEVFPEIGDVMCNSVNAGWNHDSTHVIRFPLNGYCHLNSVQVLERLQQRGFEIVGSCGGGVDSSQFSEYVLRRELRRTPRVPSVIRIKQEPLD

SEQ ID NO: 55888 - protein, 71 aa, Homo sapiens
MATLGHTFPFYAGPKPTFPMDTTLASIIMIFLTALATFIVILPGIRGKTRLFWLLRVVTSLFIGAAILGTP

SEQ ID NO: 55889 - protein, 95 aa, Homo sapiens
MSAAPLVGYSSSGSEDESEDGMRTRPGDGSHRRGQSPLPRQRFPVPDSVLNMFPGTEEGPEDDSTKHGGRMKPRRSSWICLMCCCPMPRHMSPGW

SEQ ID NO: 55890 - protein, 172 aa, Homo sapiens
MLMPKKNRIAIYELLFKEGVMVAKKDVHMPKHPELADKNVPNLHVMKAMQSLKSRGYVKEQFAWRHFYWYLTNEGIQYLRDYLHLPPEIVPATLRRSRPETGRPRPKGLEGERPARLTRGEADRDTYRRSAVPPGADKKAEAGAGSATEFQFVLIAHDCSQIMSFVKRKHVQ

SEQ ID NO: 55891 - protein, 21 aa, Homo sapiens
  MOD_RES (1)..(1): Any amino acid
XTFQKSSSLLRHKYEHTDSYD

SEQ ID NO: 55892 - protein, 1223 aa, Homo sapiens
MRRLAAEELGVVTMQRIFNSFVYTEKISNGESEVQQLAKKIREKFNRYLDVVNRNKQVVEASYTAHLTSPLTAIQDCCTIPPSMMEFDGNFNTNVSRTISCDRLSTTVNSRAFNPGRDLNSVLADNLKSNPGIKWQYFSSEEGIFTVFPAHKFRCKGSYEHRSRPIYVSTVRPQSKHIVVILDHGASVTDTQLQIAKDAAQVILSAIDEHDKISVLTVADTVRTCSLDQCYKTFLSPATSETKRKMSTFVSSVKSSDSPTQHAVGFQKAFQLIRSTNNNTKFQANTDMVIIYLSAGITSKDSSEEDKKATLQVINEENSFLNNSVMILTYALMNDGVTGLKELAFLRDLAEQNSGKYGVPDRMALPVIKGSMMVLNQLSNLETTVGRFYTNLPNRMIDEAVFSLPFSDEMGDGLIMTVSKPCYFGNLLLGIVGVDVNLAYILEDVTYYQDSLASYTFLIDDKGYTLMHPSLTRPYLLSEPPLHTDIIHYENIPKFELVRQNILSLPLGSQIIAVPVNSSLSWHINKLRETGKEAYNVSYAWKMVQDTSFILCIVVIQPEIPVKQLKNLNTVPSSKLLYHRLDLLGQPSACLHFKQLATLESPTIMLSAGSFSSPYEHLSQPETKRMVEHYTAYLSDNTRLIANPGLKFSVRNEVMATSHVTDEWMTQMEMSSLNTYIVRRYIATPNGVLRIYPGSLMDKAFDPTRRQWYLHAVANPGLISLTGPYLDVGGAGYVVTISHTIHSSSTQLSSGHTVAVMGIDFTLRYFYKVLMDLLPVCNQDGGNKIRCFIMEDRGYLVAHPTLIDPKGHAPVEQQHITHKEPLVANDILNHPNFVKKNLCNSFSDRTVQRFYKFNTSLAGDLTNLVHGSHCSKYRLARIPGTNAFVGIVNETCDSLAFCACSMVDRLCLNCHRMEQNECECPCECPLEVNECTGNLTNAENRNPSCEVHQEPVTYTAIDPGLQDALHQCVNSRCSQRLESGDCFGVLDCEWCMVDSDGKTHLDKPYCAPQKECFGGIVGAKSPYVDDMGAIGDEVITLNMIKSAPVGPVAGGIMGCIMVLVLAVYAYRHQIHRRSHQHMSPLAAQEMSVRMSNLENDRDERDDDSHEDRGIISNTRFIAAVIERHAHSPERRRRYWGRSGTESDHGYSTMSPQEDSENPPCNNDPLSAGVDVGNHDEDLDLDTPPQTAALLSHKFHHYRSHHPTLHHSHHLQAAVTVHTVDAEC

SEQ ID NO: 55893 - protein, 1372 aa, Homo sapiens
MAAVPQNNLQEQLERHSARTLNNKLSLSKPKFSGFTFKKKTSSDNNVSVTNVSVAKTPVLRNKDVNVTEDFSFSEPLPNTTNQQRVKDFFKNAPAGQETQRGGSKSLLPDFLQTPKEVVCTTQNTPTVKKSRDTALKKLEFSSSPDSLSTINDWDDMDDFDTSETSKSFVTPPQSHFVRVSTAQKSKKGKRNFFKAQLYTTNTVKTDLPPPSSESEQIDLTEEQKDDSEWLSSDVICIDDGPIAEVHINEDAQESDSLKTHLEDERDNSEKKKNLEEAELHSTEKVPCIEFDDDDYDTDFVPPSPEEIISASSSSSKCLSTLKDLDTSDRKEDVLSTSKDLLSKPEKMSMQELNPETSTDCDARQISLQQQLIHVMEHICKLIDTIPDDKLKLLDCGNELLQQRNIRRKLLTEVDFNKSDASLLGSLWRYRPDSLDGPMEGDSCPTGNSMKELNFSHLPSNSVSPGDCLLTTTLGKTGFSATRKNLFERPLFNTHLQKSFVSSNWAETPRLGKKNESSYFPGNVLTSTAVKDQNKHTASINDLERETQPSYDIDNFDIDDFDDDDDWEDIMHNLAASKSSTAAYQPIKEGRPIKSVSERLSSAKTDCLPVSSTAQNINFSESIQNYTDKSAQNLASRNLKHERFQSLSFPHTKEMMKIFHKKFGLHNFRTNQLEAINAALLGEDCFILMPTGGGKSLCYQLPACVSPGVTVVISPLRSLIVDQVQKLTSLDIPATYLTGDKTDSEATNIYLQLSKKDPIIKLLYVTPEKICASNRLISTLENLYERKLLARFVIDEAHCVSQWGHDFRQDYKRMNMLRQKFPSVPVMALTATANPRVQKDILTQLKILRPQVFSMSFNRHNLKYYVLPKKPKKVAFDCLEWIRKHHPYDSGIIYCLSRRECDTMADTLQRDGLAALAYHAGLSDSARDEVQQKWINQDGCQVICATIAFGMGIDKPDVRFVIHASLPKSVEGYYQESGRAGRDGEISHCLLFYTYHDVTRLKRLIMMEKDGNHHTRETHFNNLYSMVHYCENITECRRIQLLAYFGENGFNPDFCKKHPDVSCDNCCKTKDYKTRDVTDDVKSIVRFVQEHSSSQGMRNIKHVGPSGRFTMNMLVDIFLGSKSAKIQSGIFGKGSAYSRHNAERLFKKLILDKILDEDLYINANDQAIAYVMLGNKAQTVLNGNLKVDFMETENSSSVKKQKALVAKVSQREEMVKKCLGELTEVCKSLGKVFGVHYFNIFNTVTLKKLAESLSSDPEVLLQIDGVTEDKLEKYGAEVISVLQKYSEWTSPAEDSSPGISLSSSRGPGRSAAEELDEEIPVSSHYFASKTRNERKRKKMPASQRSKRRKTASSGSKAKGWSFPMLPRLVSNS

SEQ ID NO: 55894 - protein, 126 aa, Homo sapiens
MGPGHSGQWQEETFTAWCNSHLRKAGTQIENIEEDFRDGLKLMLLLEVISGERLAKPERGKMRVHKISNVNKALDFIASKGVKLVSIGAEEIVDGNVKMTLGMIWTIILRFAIQDISVEETSAKEG

SEQ ID NO: 55895 - protein, 164 aa, Homo sapiens
MYLWRRTGRQCAPIRSASQAEEEPSVEPVKKSQHRSSSSAPHHNHRSGTSRGLSRQETFDSETQESRDSAYVEPKEDYSHDHVDHYASHRDHNHRDETHGSSDHRHRESRHRSRDVDREQDHNECNKQRSRHKSKDRYCEKDGEVISKKRNEAGEWNRDVYIRQ

SEQ ID NO: 55896 - protein, 8 aa, Homo sapiens
  MOD_RES (1)..(1): Any amino acid
XAKSHPAL

SEQ ID NO: 55897 - protein, 935 aa, Homo sapiens
MTSPQLEWTLQTLLEQLNEDELKSFKSLLWAFPLEDVLQKTPWSEVEEADGKKLAEILVNTSSENWIRNATVNILEEMNLTELCKMAKAEMMEDGQVQEIDNPELGDAEEDSELAKPGEKEGWRNSMEKQSLVWKNTFWQGDIDNFHDDVTLRNQRFIPFLNPRTPRKLTPYTVVLHGPAGVGKTTLAKKCMLDWTDCNLSPTLRYAFYLSCKELSRMGPCSFAELISKDWPELQDDIPSILAQAQRILFVVDGLDELKVPPGALIQDICGDWEKKKPVPVLLGSLLKRKMLPRAALLVTTRPRALRDLQLLAQQPIYVRVEGFLEEDRRAYFLRHFGDEDQAMRAFELMRSNAALFQLGSAPAVCWIVCTTLKLQMEKGEDPVPTCLTRTGLFLRFLCSRFPQGAQLRGALRTLSLLAAQGLWAQMSVFHREDLERLGVQESDLRLFLDGDILRQDRVSKGCYSFIHLSFQQFLTALFYTLEKEEGEDRDGHAWDIGDVQKLLSGEERLKNPDLIQVGHFLFGLANEKRAKELEATFGCRMSPDIKQELLQCKAHLHANKPLSVTDLKEVLGCLYESQEEELAKVVVAPFKEISIHLTNTSEVMHCSFSLKHCQDLQKLSLQVAKGVFLENYMDFELDIEFESSNSNLKFLEVKQSFLSDSSVRILCDHVTRSTCHLQKVEIKNVTPDTAYRDFCLAFIGKKTLTHLTLAGHIEWERTMMLMLCDLLRNHKCNLQYLRLGGHCATPEQWAEFFYVLKANQSLKHLRLSANVLLDEGAMLLYKTMTRPKHFLQMLSLENCRLTEASCKDLAAVLVVSKKLTHLCLAKNPIGDTGVKFLCEGLSYPDCKLQTLVLQQCSITKLGCRYLSEALQEACSLTNLDLSINQIARGLWILCQALENPNCNLKHLRILDLLSSAIRSLKLWTWARIICGRVA

SEQ ID NO: 55898 - protein, 134 aa, Homo sapiens
  MOD_RES (1)..(1): Any amino acid
XKAAWGKVGAHAGEYGAEALERMFLSFPTTKTYFPHFDLSHGSAQVKGHGKKVADALTNAVAHVDDMPNALSALSDLHAHKLRVDPVNFKVSGGPGAIWVEGRDGAFLSGQRITRVAGGVAQAAAAGLGRTDPL

SEQ ID NO: 55899 - protein, 49 aa, Homo sapiens
MPGFDYKFLEKPKRRLLCPLCGKPMREPVQVSTCGHRFCDTCLQEFLRS

SEQ ID NO: 55900 - protein, 697 aa, Homo sapiens
MRPVSVWQWSPWGLLLCLLCSSCLGSPSPSTGPEKKAGSQGLRFRLAGFPRKPYEGRVEIQRAGEWGTICDDDFTLQAAHILCRELGFTEATGWTHSAKYGPGTGRIWLDNLSCSGTEQSVTECASRGWGNSDCTHDEDAGVICKDQRLPGFSDSNVIEVEHHLQVEEVRIRPAVGWGRRPLPVTEGLVEVRLPDGWSQVCDKGWSAHNSHVVCGMLGFPSEKRVNAAFYRLLAQRQQHSFGLHGVACVGTEAHLSLCSLEFYRANDTARCPGGGPAVVSCVPGPVYAASSGQKKQQQSKPQGEARVRLKGGAHPGEGRVEVLKASTWGTVCDRKWDLHAASVVCRELGFGSAREALSGARMGQGMGAIHLSEVRCSGQELSLWKCPHKNITAEDCSHSQDAGVRCNLPYTGAETRETWYWDSGNITEVVMSGVRCTGTELSLDQCAHHGTHITCKRTGTRFTAGVICSETASDLLLHSALVQETAYIEDRPLHMLYCAAEENCLASSARSANWPYGHRRLLRFSSQIHNLGRADFRPKAGRHSWVWHECHGHYHSMDIFTHYDILTPNGTKVAEGHKASFCLEDTECQEDVSKRYECANFGEQGITVGCWDLYRHDIDCQWIDITDVKPGNYILQVVINPNFEVAESDFTNNAMKCNCKYDGHRIWVHNCHIGDAFSEEANRRFERYPGQTSNQII

SEQ ID NO: 55901 - protein, 63 aa, Homo sapiens
MVGVAEVSCGQAESSEKPNAEDMTSKDYYFDSYAHFGIHEEMLKDEVRTLTYRNSMFHNRHLF

SEQ ID NO: 55902 - protein, 203 aa, Homo sapiens
MGCDRNCGLIAGAVIGAVLAVFGGILMPVGDLLIQKTIKKQVVLEEGTIAFKNWVKTGTEVYRQFWIFDVQNPQEVMMNSSNIQVKQRGPYTYRVRFLAKENVTQDAEDNTVSFLQPNGAIFEPSLSVGTEADNFTVLNLAVAAASHIYQNQFVQMILNSLINKSKSSMFQVRTLRELLWGYRDPFLSLVPYPVTTTVGLFYP

SEQ ID NO: 55903 - protein, 149 aa, Homo sapiens
MAAVGSGGYARNDAGEKLPSVMAGVPARRGQSSPPPAPPICLRRRTRLSTASEETVQNRVSLEKVLGITAQNSSGLTCDPGTGHVAYLAGCVVVILDPKENKQQHIFNTARKSLSALAFSPDGKYIVTGEPCPVQSPAAVTTPPSLEWA

SEQ ID NO: 55904 - protein, 164 aa, Homo sapiens
MAPEHEIPKIGWYSRFARHPFYGSAGVNSGVMLMNLTRIRSTQFKNSMIPTGLAWEDMLYPLYQKYKNAITWGDQDLLNIIFYFNPECLYVFPCQWNYRPDHCMYGSNCREAEHEGVSVLHGNRGVYHDDKQPTFRALYEAIRDILRRGGKRKFVLSWISFFVM

SEQ ID NO: 55905 - protein, 132 aa, Homo sapiens
MNQEDLDPDSTTDVGDVTNTEEELIRECEEMWKDMEECQNKLSLIGTETLTDSNAQLSLLIMQVKCLTAELSQWQKKTPETIPLTEDVLITLGKEEFQKLRQDLEMVLSTKESKNEKLKEDLEREQRWLDEQ

SEQ ID NO: 55906 - protein, 205 aa, Homo sapiens
MIIPPMFGAVQSVRDGLEKRYIASYLALTVVGMGSWCFHMTLKYEMQLLDELPMIYSCCIFVYCMFECFKIKNSVNYHLLFTLVLFSLIVTTVYLKVKEPIFHQVMYGMLVFTLVLRSIYIVTWVYPWLRGLGYTSLGIFLLGFLFWNIDNIFCESLRNFRKKVPPIIGITTQFHAWWHILTGLGSYLHILFSLYTRTLYLRYRP

SEQ ID NO: 55907 - protein, 1005 aa, Homo sapiens
MNGNTALAIAKRLGYISVVDTLKVVTEEVTTTTTTITEKHKLNVPETMTEVLDVSDEEGDDTMTGDGGEYLRPEDLKELGDDSLPSSQFLDGMNYLRYSLEGGRSDSLRSFSSDRSHTLSHASYLRDSAVMDDSVVIPSHQVSTLAKEAERNSYRLSWGTENLDNVALSSSPIHSGRASPCLERDNSSFLVSFMVDARGGAMRGCRHNGLRIIIPPRKCTAPTRVTCRLVKRHRLATMPPMVEGEGLASRLIEVGPSGAQFLGPVIVEIPHFAALRGKERELVVLRSENGDSWKEHFCDYTEDELNEILNGMDEVLDSPEDLEKKRICRIITRDFPQYFAVVSRIKQDSNLIGPEGGVLSSTVVPQVQAVFPEGALTKRIRVGLQAQPMHSELVKKILGNKATFSPIVTLEPRRRKFHKPITMTIPVPKASSDVMLNGFGGDAPTLRLLCSITGGTTPAQWEDITGTTPLTFVNECVSFTTNVSARFWLIDCRQIQESVTFASQVYREIICVPYMAKFVVFAKSHDPIEARLRCFCMTDDKVDKTLEQQENFAEVARSRDVEVLEGKPIYVDCFGNLVPLTKSGQHHIFSFFAFKENRLPLFVKVRDTTQEPCGRLSFMKEPKSTRGLVHQAICNLNITLPIYTKESESDQEQEEEIDMTSEKNPQDEQERIEERLAYIADHLGFSWTELARELDFTEEQIHQIRIENPNSLQDQSHALLKYWLERDGKHATDTNLVECLTKINRMDIVHLMETNTEPLQERISHSYAEIEQTITLDHSEGFSVLQEELCTAQHKQKEEQAVSKESETCDHPPIVSEEDISVGYSTFQDGVPKTEGDSSATALFPQTHKEQVQQDFSGKMQDLPEESSLEYQQEYFVTTPGTETSETQKAMIVPSSPSKTPEEVSTPAEEEKLYLQTPTSSERGGSPIIQEPEEPSEHREESSPRKTSLVIVESADNQPETCERLDEDAAFEKGDDMPEIPPETVTEEEYIDEHGHTVVKKDNNE

SEQ ID NO: 55908 - protein, 474 aa, Homo sapiens
RDAKGQYLFDLLCHHLNLLEKDYFGIRFVDPDKQRHWLEFTKSVVKQLRSQPPFTMCFRVKFYPADPAALKEEITRYLVFLQIKRDLYHGRLLCKTSDAALLAAYILQAEIGDYDSGKHPEGYSSKFQFFPKHSEKLERKIAEIHKTELSGQTPATSELNFLRKAQTLETYGVDPHPCKDVSGNAAFLAFTPFGFVVLQGNKRVHFIKWNEVTKLKFEGKTFYLYVSQKEEKKIILTYFAPTPEACKHLWKCGIENQAFYKLEKSSQVRTVSSSNLFFKGSRFRYSGRVAKEVMESSAKIKREPPEIHRAGMVPSRSCPSITHGPRLSSVPRTRRRAVHISIMEGLESLRDSAHSTPVRSTSHGDTFLPHVRSSRTDSNERVAVIADEAYSPADSVLPTPVAEHSLELMLLSRQINGATCSIEEEKESEASTPTATEVEALGGELRALCQGHSGPEEEQAMVCLQNPLSGEPAH

SEQ ID NO: 55909 - protein, 399 aa, Homo sapiens
MGRKKIQITRIMDERNRQVTFTKRKFGLMKKAYELSVLCDCEIALIIFNSTNKLFQYASTDMDKVLLKYTEYNEPHESRTNSDIVETLRKKGLNGCDSPDPDADDSVGHSPESEDKYRKINEDIDLMISRQRLCAVPPPNFEMPVSIPVSSHNSLVYSNPVSSLGNPNLLPLAHPSLQRNSMSPGVTHRPPSAGNTGGLMGGDLTSGAGTSAGNGYGNPRNSPGLLVSPGNLNKNMQAKSPPPMNLGMNNRKPDLRVLIPPGSKNTMPSVSEDVDLLLNQRINNSQSAQSLATPVVSVATPTLPGQGMGGYPSAISTTYGTEYSLSSADLSSLSGFNTASALHLGSVTGWQQQHLHNMPPSALSQLGQNLFLLLETVPPPLRDTHNTRATRRGDLLLTA

SEQ ID NO: 55910 - protein, 197 aa, Homo sapiens
MFLSYRSDLPAYMFPGGSSPTTEEKKSLKRTFQQIQEEEDDDYPGSYSPQDPSAGPLLTEELIKALQDLENAASGDATVRQKIASLPQEVQDVSLLEKITDKEAAERLSKTVDEACLLLAEYNGRLAAELEDRRQLARMLVEYTQNQKDVLSEKEKKLEEYKQKLARVTQVRKELKSHIQSLPDLSLLPNVTGGLAP

SEQ ID NO: 55911 - protein, 256 aa, Homo sapiens
NSARWLPEPGLGLAYGTNKGDLVICRPETSRATWRTDRDMGLMNAIGLQPRNPATSVTSQGTQTLALQLQNAETQTEREVPEPGTAASGPGEGEGSEYGASGEDALSRIQRLMAEGGMTAVVQREQSTTMASMGGFGNNIIVSHRIHRSSQTGTEPGAAHTSSPQPSTSRGLLPEAGQLAERGLSPRTASWDQPGTPGREPTQPTLPSSSPVPIPVSLPSAEGPTLHCELTNNNHLLDGGSSRGDAAGPRGEPRNR

SEQ ID NO: 55912 - protein, 207 aa, Homo sapiens
  MOD_RES (1)..(1): Any amino acid
XEKLLETIDQLYLEYAKRAAPFNNWMEGAMEDLQDTFIVHTIEEIQVRQLVPRRDQALTEEHARQQHNERLRKQFGAQANVIGPWIQTKMEEIGRISIEMHGTLEDQLSHLRQYEKSIVNYKPKIDQLEGDHQLIQEALIFDNKHTNYTMEHIRVGWEQLLTTIARTINEVENQILTRDAKGISQEQMNEFRASFNHFDRDHSGTLG

SEQ ID NO: 55913 - protein, 501 aa, Homo sapiens
MDSKKRSSTEAEGSKERGLVHIWQAGSFPITPERLPGWGGKTVLQAALGVKHGVLLTEDGEVYSFGTLPWRSGPVEICPSSPILENALVGQYVITVATGSFHSGAVTDNGVAYMWGENSAGQCAVANQQYVPEPNPVSIADSEASPLLAVRILQLACGEEHTLALSISREIWAWGTGCQLGLITTAFPVTKPQKVEHLAGRVVLQVACGAFHSLALVQCLPSQDLKPVPERCNQCSQLLITMTDKEDHVIISDSHCCPLGVTLTESQAENHASTALSPSTETLDRQEEVFENTLVANDQSVATELNAVSAQITSSDAMSSQQNVMGTTEISSARNIPSYPDTQAVNEYLRKLSDHSVREDSEHGEKPVPSQPLLEEAIPNLHSPPTTSTSALNSLVVSCASAVGVRVAATYEAGALSLKKVMNFYSTTPCETGAQAGSSAIGPEGLKDSREEQVKQESMQGKKSSSLVDIREEETEGGSRRLSLPGLLSQGMENTESQTRQ

SEQ ID NO: 55914 - protein, 35 aa, Homo sapiens
DSERRQILIAKSPLAPFTSFVYTIKEEGLVLQAGK

SEQ ID NO: 55915 - protein, 122 aa, Homo sapiens
  MOD_RES (1)..(1): Any amino acid
XYLRIGDMGGFAIWCKKAKAPRPVPKPRGLSRDMQGLSLDAASQPSKGGLLERTASRLGSRASTLRRNDSIYEASSLYGISAMDGVPFTLHPRFEGKSCSPLYNYGFVVEKTAAARLPPSVS

SEQ ID NO: 55916 - protein, 234 aa, Homo sapiens
MSGCGLFLRTTAAARACRGLVVSTANRRLLRTSPPVRAFAKELFLGKIKKKEVFPFPEVSQDELNEINQFLGPVEKFFTEEVDSRKIDQEGKIPDETLEKLKSLGLFGLQVPEEYGGLGFSNTMYSRLGEIISMDGSITVTLAAHQAIGLKGIILAGTEEQKAKYLPKLASGEHIAAFCLTEPASGSDAASIRSRATLSEDKKHYILNGSKSQGPCMSGLRSDWQLELDGQRQS

SEQ ID NO: 55917 - protein, 196 aa, Homo sapiens
MTLQWAAVATFLYAEIGLILIFCLPFIPPQRWQKIFSFNVWGKIATFWNKAFLTIIILLIVLFLDAVREVRKYSSVHTIEKSSTSRPDAYEHTQMKLFRSQRNLYISGFSLFFWLVLRRLVTLITQLAKELSNKGVLKTQAENTNKAAKKFMEENEKLKRILKSHGKDEECVLEAENKKLVEDQEKLKTELRKTSD

SEQ ID NO: 55918 - protein, 504 aa, Homo sapiens
MFYVIGGITVSVVAFFFTIKFLFELAARVVSFLQNEDRERRGDRTIYDYVRGNYLDPRSCKVSWDWKDPYEVGHSMAFRVHLFYKNGQPFPAHRPVGLRVHISHVELAVEIPVTQEVLQEPNSNVVKVAFTVRKAGRYEITVKLGGLNVAYSPYYKIFQPGMVVPSKTKIVCHFSTLVLTCGQPHTLQIVPRDEYDNPTNNSMSLRDEHNYTLSIHELGPQEEESTGVSFEKSVTSNRQTFQVFLRLTLHSRGCFHACISYQNQPINNGEFDIIVLSEDEKNIVERNVSTSGVSIYFEAYLYNATNCSSTPWHLPPMHMTSSQRRPSTAVDEEDEDSPSECHTPEKVKKPKKVYCYVSPKQFSVKEFYLKIIPWRLYTFRVCPGTKFSYLGPDPVHKLLTLVVDDGIQPPVELSCKERNILAATFIRSLHKNIGGSETFQDKVNFFQRELRQVHMKRPHSKVTLKVSRHALLESSLKATRNFSISDWSKNFEVVFQDEEGASQP

SEQ ID NO: 55919 - protein, 188 aa, Homo sapiens
MAARTGHTALRRVVSGCRPKSATAAGAQAPVRNGRYSMQEMYDVVSGVEDYKHFVPWCKKSDVISKRSGYCKTRLEIGFPPVLERYTSVVTLVKPHLVKASCTDGRLFNHLETIWRFSPGLPGYPRTCTLDFSISFEFRSLLHSQLATLFFDEVVKQMVAAFERRACKLYGPETNIPRELMLHEVHHT

SEQ ID NO: 55920 - protein, 376 aa, Homo sapiens
MSGPVPSRARVYTDVNTHRPREYWDYESHVVEWGNQDDYQLVRKLGRGKYSEVFEAINITNNEKVVVKILKPVKKKKIKREIKILENLRGGPNIITLADIVKDPVSRTPALVFEHVNNTDFKQLYQTLTDYDIRFYMYEILKALDYCHSMGIMHRDVKPHNVMIDHEHRKLRLIDWGLAEFYHPGQEYNVRVASRYFKGPELLVDYQMYDYSLDMWSLGCMLASMIFRKEPFFHGHDNYDQLVRIAKVLGTEDLYDYIDKYNIELDPRFNDILGRHSRKRWERFVHSENQHLVSPEALDFLDKLLRYDHQSRLTAREAMEHPYFYTVVKDQARMGSSSMPGGSTPVSSANMMSALFFQGFLQCQPLHPLDLWQAHQ

SEQ ID NO: 55921 - protein, 286 aa, Homo sapiens
MGPEALSSLLLLLLVASGDADMKGHFDPAKCRYALGMQDRTIPDSDISASSSWSDSTAARHSRLESSDGDGAWCPAGSVFPKEEEYLQVDLQRLHLVALVGTQGRHAGGLGKEFSRSYRLRYSRDGRRWMGWKDRWGQEVISGNEDPEGVVLKDLGPPMVARLVRFYPRADRVMSVCLRVELYGCLWRDGLLSYTAPVGQTMYLSEAVYLNDSTYDGHTVGGLQYGGLGQLADGVVGLDDFRKSQELRVWPGYDYVGWSNHSFSSGYVEMEFEFDRLRAFQAMQVH

SEQ ID NO: 55922 - protein, 73 aa, Homo sapiens
MGPEALSSLLLLLLVASGDADMKGHFDPAKCRYALGMQDRTIPDSDISASSSWSDSTAARHSRLESSDGDGAW

SEQ ID NO: 55923 - protein, 82 aa, Homo sapiens
MGFSSDEYLSLVARLIIHFRDIHNKKSQASVSAQLQLQQVALQQQQQQQQFQQQQQAALQQQQQQQQQQQFQAQQSAMQQQF

SEQ ID NO: 55924 - protein, 109 aa, Homo sapiens
METDCNPMELSSMSGFEEGSELNGFEGTDMKDMRLEAEAVVNDVLFAVNNMFVSKSLRCADDVAYINVETKERNRYCLELTEAGLKVVGYAFDQVDDHLQTPYHETVYS

SEQ ID NO: 55925 - protein, 55 aa, Homo sapiens
MSAPRLLISIIIMVSGCTGSMAEEASKNLQSWWKCEGEASMSSNGQQKPQIIIPV

SEQ ID NO: 55926 - protein, 25 aa, Homo sapiens
MSQWNQVQQLEIKFLEQVDQFYDDN

SEQ ID NO: 55927 - protein, 65 aa, Homo sapiens
NRELQIMRKLDHCNIVRLRYFFYSSGEKVDEVYLNLVLDYVPETVYRVARHYSRAKQTLPVIYVK

SEQ ID NO: 55928 - protein, 1115 aa, Homo sapiens
MAQALLVPPGPESFRLFTRESLAAIEKRAAEEKAKKPKKEQDNDDENKPKPNSDLEAGKNLPFIYGDIPPEMVSEPLEDLDPYYINKKTFIVMNKGKAIFRFSATSALYILTPLNPVRKIAIKILVHSLFSMLIMCTILTNCVFMTLSNPPDWTKNVEYTFTGIYTFESLIKILARGFCLEDFTFLRDPWNWLDFSVIVMAYVTEFVSLGNVSALRTFRVLRALKTISVIPGLKTIVGALIQSVKKLSDVMILTVFCLSVFALIGLQLFMGNLRNKCLQWPPSDSAFETNTTSYFNGTMDSNGTFVNVTMSTFNWKDYIGDDSHFYVLDGQKDPLLCGNGSDAGQCPEGYICVKAGRNPNYGYTSFDTFSWAFLSLFRLMTQDYWENLYQLTLRAAGKTYMIFFVLVIFLGSFYLVNLILAVVAMAYEEQNQATLEEAEQKEAEFQQMLEQLKKQQEEAQAVAAASAASRDFSGIGGLGELLESSSEASKLSSKSAKEWRNRRKKRRQREHLEGNNKGERDSFPKSESEDSVKRSSFLFSMDGNRLTSDKKFCSPHQSLLSIRGSLFSPRRNSKTSIFSFRGRAKDVGSENDFADDEHSTFEDSESRRDSLFVPHRHGERRNSNVSQASMSSRMVPGLPANGKMHSTVDCNGVVSLGTTTETEVRKRRLSSYQISMEMLEDSSGRQRAVSIASILTNTMEELEESRQKCPPCWYRFANVFLIWDCCDAWLKVKHLVNLIVMDPFVDLAITICIVLNTLFMAMEHYPMTEQFSSVLTVGNLVFTGIFTAEMVLKIIAMDPYYYFQEGWNIFDGIIVSLSLMELGLSNVEGLSVLRSFRLLRVFKLAKSWPTLNMLIKIIGNSVGALGNLTLVLAIIVFIFAVVGMQLFGKSYKECVCKINDDCTLPRWHMNDFFHSFLIVFRVLCGEWIETMWDCMEVAGQTMCLIVFMLVMVIGNLVVLNLFLALLLSSFSSDNLAATDDDNEMNNLQIAVGRMQKGIDYVKNKMRECFQKAFFRKPKVIEIHEGNKIDSCMSNNTGIEISKELNYLRDGNGTTSGVGTGSSVEKYVIDENDYMSFINNPSLTVTVPIAVGESDFENLNTEEFSSESELEESKEE

SEQ ID NO: 55929 - protein, 80 aa, Homo sapiens
  MOD_RES (1)..(1): Any amino acid
XFDRFQDTVSQHVVKVDFLNRIHKKHPPNRRCRDTSAGFWRAPHRSAKKGGTGPSCVLPPLRVGRSCEHVLSNPLHRDRS

SEQ ID NO: 55930 - protein, 74 aa, Homo sapiens
MTMDKSELVQKAKLAEQAERYDDMAAAMKAVTEQGHELSNEERNLLSVAYKNVVGARRSSWRVISSIEQKTERN

SEQ ID NO: 55931 - protein, 44 aa, Homo sapiens
MLSVRVAAAVVRALPRRAGLNTFALGLQKCFGFIFHCCKELPCL

SEQ ID NO: 55932 - protein, 263 aa, Homo sapiens
MPARTAPARVPTLAVPAISLPDDVRRRLKDLERDSLTEKECVKEKLNLLHEFLQTEIKNQLCDLETKLRKEELSEEGYLAKVKSLLNKDLSLENGAHAYNREVNGRLENGNQARSEARRVGMADANSPPKPLSKPRTPRRSKSDGEAKPEPSPSPRITRKSTRQTTITSHFAKGPAKRKPQEESERAKSDESIKEEDKDQDEKRRRVTSRERVARPLPAEEPERAKSGTRTEKEEERDEKEEKRLRSQTKEPMRRSTEVNPKI

SEQ ID NO: 55933 - protein, 159 aa, Homo sapiens
MGTSHPAFLVLGCLLTGLSLILCQLSLPSILPNENEKVVQLNSSFSLRCFGESEVSWQYPMSEEESSDVEIRNEENNSGLFVTVLEVSSASAAHTGLYTCYYNHTQTEENELEGRHIYIYVPDPDVAFVPLGMTDYLVIVEDDDSAIIPCRTTDPETPV

SEQ ID NO: 55934 - protein, 103 aa, Homo sapiens
MTPSLSLSEPTCNRDKGLDQKTSMTSLTSSPACVLLAPSAPAKHASFLFLGRACSCLKAFTWAVPLLELAGPSAAALTSKDSWHMRKKPRRGEQRSQEWLLLS

SEQ ID NO: 55935 - protein, 732 aa, Homo sapiens
MSSARTPLPTLNERDTEQPTLGHLDSKPSSKSNMIRGRNSATSADEQPHIGNYRLLKTIGKGNFAKVKLARHILTGKEVAVKIIDKTQLNSSSLQKLFREVRIMKVLNHPNIVKLFEVIETEKTLYLVMEYASGGEVFDYLVAHGRMKEKEARAKFRQIVSAVQYCHQKFIVHRDLKAENLLLDADMNIKIADFGFSNEFTFGNKLDTFCGSPPYAAPELFQGKKYDGPEVDVWSLGVILYTLVSGSLPFDGQNLKELRERVLRGKYRIPFYMSTDCENLLKKFLILNPSKRGTLEQIMKDRWMNVGHEDDELKPYVEPLPDYKDPRRTELMVSMGYTREEIQDSLVGQRYNEVMATYLLLGYKSSELEGDTITLKPRPSADLTNSSAPSPSHKVQRSVSANPKQRRFSDQAGPAIPTSNSYSKKTQSNNAENKRPEEDRESGRKASSTAKVPASPLPGLERKKTTPTPSTNSVLSTSTNRSRNSPLLERASLGQASGLPPTESNCEVPRPSTAPQRVPVASPSAHNISSSGGAPDRTNFPRGVSSRSTFHAGQLRQVRDQQNLPYGVTPASPSGHSQGRRGASGSIFSKFTSKFVRRNLNEPESKDRVETLRPHVVGSGGNDKEKEEFREAKPRSLRFTWSMKTTSSMEPNEMMREIRKVLDANSCQSELHEKYMLLCMHGTPGHEDFVQWEMEVCKLPRLSLNGVRFKRISGTSMAFKNIASKIANELKL

SEQ ID NO: 55936 - protein, 163 aa, Homo sapiens
MMVRWALLCEFWGDIAKEFYWKTPCPGPFLRYNFDVTKGKIFIEWMKGATTNICYNVLDRNVHEKKLGDKVAFYWEGNEPGETTQITYHQLLVQVCQFSNVLRKQGIQKGDRVAIYMPMIPELVVAMLACARIGALHSIVFAGFSSESLCERILDSSCSLLIT

SEQ ID NO: 55937 - protein, 545 aa, Homo sapiens
MSVSFHTHTKELWTWMEDLQKEMLEDVCADSVDAVQELIKQFQQQQTATLDATLNVIKEGEDLIQQLRDSAVSNNKTPHSSSISHIESVLQQLDDAQVQMEELFHERKIKLDIFLQLRIFEQYTIEVTAELDAWNEDLLRQMNDFNTEDLTLAEQRLQRHTERKLAMNNMTFEVIQQGQDLHQYITEVQASGIELICEKDIDLAAQVQELLEFLHEKQHELELNAEQTHKRLEQCLQLRHLQAEVKQVLGWIRNGESMLNASLVNASSLSEAEQLQREHEQFQLAIESLFHATSLQKTHQSALQVQQKAEVLLQAGHYDADAIRECAEKVALHWQQLMLKMEDRLKLVNASVAFYKTSEQVCSVLESLEQEYRRDEDWCGGRDKLGPAAEIDHVIPLISKHLEQKEAFLKACTLARRNAEVFLKYIHRNNVSMPSVASHTRGPEQQVKAILSELLQRENRVLHFWTLKKRRLDQCQQYVVFERSAKQALDWIQETGEFYLSTHTSTGETTEETQELLKEYGEFRVPAKQITRIQNGEARHKLGDT

SEQ ID NO: 55938 - protein, 268 aa, Homo sapiens
MTPGTQSPFFLLLLLTVLTATTAPKPATVVTGSGHASSTPGGEKETSATQRSSVPSSTEKNALSTGVSFFFLSFHISNLQFNSSLEDPSTDYYQELQRDISEMFLQIYKQGGFLGLSNIKFRPGSVVVQLTLAFREGTINVHDVETQFNQYKTEAASRYNLTISDVSVSDVPFPFSAQSGAGVPGWGIALLVLVCVLVALAIVYLIALAVCQCRRKNYGQLDIFPARDTYHPMSEYPTYHTHGRYVPPSSTDRSPYEKEWRVDRERLA

SEQ ID NO: 55939 - protein, 22 aa, Homo sapiens
  MOD_RES (1)..(1): Any amino acid
XLDKCRNEMMTMTEQRLLDLTC

SEQ ID NO: 55940 - protein, 1172 aa, Homo sapiens
MVQVEFYVNENTFKERLKLFFIKNQRSSLRIRLFNFSLKLLTCLLYIVRVLLDDPALGIGCWGCPKQNYSFNDSSSEINWAPILWVERKMTLWAIQVIVAIISFLETMLLIYLSYKGNIWEQIFRVSFVLEMINTLPFIITIFWPPLRNLFIPVFLNCWLAKHALENMINDFHRAILRTQSAMFNQVLILFCTLLCLVFTGTCGIQHLERAGENLSLLTSFYFCIVTFSTVGYGDVTPKIWPSQLLVVIMICVALVVLPLQFEELVYLWMERQKSGGNYSRHRAQTEKHVVLCVSSLKIDLLMDFLNEFYAHPRLQDYYVVILCPTEMDVQVRRVLQIPLWSQRVIYLQGSALKDQDLMRAKMDNGEACFILSSRNEVDRTAADHQTILRAWAVKDFAPNCPLYVQILKPENKFHVKFADHVVCEEECKYAMLALNCICPATSTLITLLVHTSRGQEGQESPEQWQRMYGRCSGNEVYHIRMGDSKFFREYEGKSFTYAAFHAHKKYGVCLIGLKREDNKSILLNPGPRHILAASDTCFYINITKEENSAFIFKQEEKRKKRAFSGQGLHEGPARLPVHSIIASMGTVAMDLQGTEHRPTQSGGGGGGSKLALPTENGSGSRRPSIAPVLELADSSALLPCDLLSDQSEDEVTPSDDEGLSVVEYVKGYPPNSPYIGSSPTLCHLLPVKAPFCCLRLDKGCKHNSYEDAKAYGFKNKLIIVSAETAGNGLYNFIVPLRAYYRSRKELNPIVLLLDNKPDHHFLEAICCFPMVYYMEGSVDNLDSLLQCGIIYADNLVVVDKESTMSAEEDYMADAKTIVNVQTMFRLFPSLSITTELTHPSNMRFMQFRAKDSYSLALSKLEKRERENGSNLAFMFRLPFAAGRVFSISMLDTLLYQSFVKDYMITITRLLLGLDTTPGSGYLCAMKITEGDLWIRTYGRLFQKLCSSSAEIPIGIYRTESHVFSTSEPHDLRAQSQISVNVEDCEDTREVKGPWGSRAGTGGSSQGRHTGGGDPAEHPLLRRKSLQWARRLSRKAPKQAGRAAAAEWISQQRLSLYRRSERQELSELVKNRMKHLGLPTTGYEDVANLTASDVMNRVNLGYLQDEMNDHQNTLSYVLINPPPDTRLEPSDIVYLIRSDPLAHVASSSQSRKSSCSHKLSSCNPETRDETQL

SEQ ID NO: 55941 - protein, 221 aa, Homo sapiens
  MOD_RES (1)..(1): Any amino acid
XEWAMADNQSKNLPKADRQALNEAERVLLALRRYLRAEQKEQRHTLRHYQHVAAVDPEKAQQMRFQVHTHLQVIEERVNQSLGLLDQNPHLAQELRPQIQELLHSEHLGPSELEAPAPGGSSEDKGGLQPPDSKDDTPMTLPKGSTEQDAASPEKEKMNPLEQYERKVNASVPRGFPFHSSEIQRDELAPAGTGVSREAVSGLLIMGAGGGSLIVLSMLLL

SEQ ID NO: 55942 - protein, 77 aa, Homo sapiens
MLHCRLTSGFEGRVLSLAKVKKTGKRKSLPLLRPSLCFRRIKDKRGQLAAPVLKAEKILTEKMEITALLSSEKEHPL

SEQ ID NO: 55943 - protein, 198 aa, Homo sapiens
MNYKRVSNTPLRTVDGSPMMKAVVHAVDGTAENGIHPLSSSEVDELIHKADEVTLSEAGSTAGAAETRGAVEGAARTTPSRREITGVQAQPGEATSGPPGIQPGQEPPVTMIFMGYQNVEDEAETKKVLGLQDTITAELVVIEDAAEPKEPAPPNGSAAEPPTEAASREENQAGPEATTSDPQDLDMKKHRCKCCSIM

SEQ ID NO: 55944 - protein, 103 aa, Homo sapiens
MSDKDDIETPLLTEAAPILEDGNCEPAKNSESVDQGAKPESKSEPVVSTRKRPETKPSSDLETSKVLPIQDNVSKDVPQTRWGYWGSWGKSILSSASATVATV

SEQ ID NO: 55945 - protein, 45 aa, Homo sapiens
MAKPFFRLQKFLRRTQFLLFFLTAAYLMTGSLLLLQRVRVALPQG

SEQ ID NO: 55946 - protein, 432 aa, Homo sapiens
MSFRDLRNFTEMMRALGYPRHISMENFRTPNFGLVSEVLLWLVKRYEPQTDIPPDVDTEQDRVFFIKAIAQFMATKAHIKLNTKKLYQADGYAVKELLKITSVLYNAMKTKGMEGSEIVEEDVNKFKFDLGSKIADLKAARQLASEITSKGASLYDLLGMEVELREMRTEAIARPLEINETEKVMRIAIKEILTQVQKTKDLLNNVASDEANLEAKIEKRKLELERNRKRLETLQSVRPCFMDEYEKTEEELQKQYDTYLEKFQNLTYLEQQLEDHHRMEQERFEEAKNTLCLIQNKLKEEEKRLLKSGSNDDSDIDIQEDDESDSELEERRLPKPQTAMEMLMQGRPGKRIVGTMQGGDSDDNMEAAPALLGKCKTSSSKKQEDSEESEIDMEDDDDEDDDLEDESISLSPTKPNRRVRKSEPLDESDNDF

SEQ ID NO: 55947 - protein, 83 aa, Homo sapiens
MPPATGGGLAESELRPRRGRCGPQAARAAGRDVAAEAVARSPKRPAWGSRRFEAVGWWALLALVTLLSFATRFHRLDEPPHIW

SEQ ID NO: 55948 - protein, 425 aa, Homo sapiens
MEPGCDEFLPPPECPVFEPSWAEFQDPLGYIAKIRPIAEKSGICKIRPPADWQPPFAVEVDNFRFTPRVQRLNELEAQTRVKLNYLDQIAKFWEIQGSSLKIPNVERKILDLYSLSKIVIEEGGYEAICKDRRWARVAQRLHYPPGKNIGSLLRSHYERIIYPYEMFQSGANHVPEPTEEDIEKHPELKKLQIYGPGPKMMGLGLMAKDKDKTVHKKVTCPPTVTVKDEQSGGGNVSSTLLKQHLSLEPCTKTTMQLRKNHSSAQFIDSYICQVCSRGDEDDKLLFCDGCDDNYHIFCLLPPLPEIPRGIWRCPKCILAECKQPPEAFGFEQATQEYSLQSFGEMADSFKSDYFNMPVHMVPTELVEKEFWRLVSSIEEDVTVEYGADIHSKEFGSGFPVSNSKQNLSPEEKEYATSGWNLNVMP

SEQ ID NO: 55949 - protein, 489 aa, Homo sapiens
  MOD_RES (1)..(1): Any amino acid
XDCGEEEECNNPCCNASNCTLRPGAECAHGSCCHQCKLLAPGTLCREQARQCDLPEFCTGKSPHCPTNFYQMDGTPCEGGQAYCYNGMCLTYQEQCQQLWGPGARPAPDLCFEKVNVAGDTFGNCGKDMNGEHRKCNMRDAKCGKIQCQSSEARPLESNAVPIDTTIIMNGRQIQCRGTHVYRGPEEEGDMLDPGLVMTGTKCGYNHICFEGQCRNTSFFETEGCGKKCNGHGVCNNNQNCHCLPGWAPPFCNTPGHGGSIDSGPMPPESVGPVVAGVLVAILVLAVLMLMYYCCRQNNKLGQLKPSALPSKLRQQFSCPFRVSQNSGTGHANPTFKLQTPQGKRKVINTPEILRKPSQPPPRPPPDYLRGGSPPAPLPAHLSRAARNSPGPGSQIERTESSRRPPPSRPIPPAPNCIVSQDFSRPRPPQKALPANPVPGRRSLPRPGGASPLRPPGAGPQQSRPLAALAPKRVWKTCNLKTGDQFQSQ

SEQ ID NO: 55950 - protein, 109 aa, Homo sapiens
  MOD_RES (1)..(1): Any amino acid
XEAAPHDIGYVKQAMFHYFQVLFQGKIGLPILCVGSVWKSWELLKEGFLLALTQGREIQAQNFFSSFTLMKLRHSSALGGASLGARHIGHLLPMDYSANAIAFYSYTFS

SEQ ID NO: 55951 - protein, 145 aa, Homo sapiens
MFRAQWMFELAPGVSSSNLENRPCRAARGSLQKTSADTKGKQEQAKEEKARELFLKAVEEEQNGALYEAIKFYRRAMQLVPDIEFKITYTRSPDGDGVGNSYIEDNDDDSKMADLLSYFQQQLTFQESVLKLCQPELESSQIHIS

SEQ ID NO: 55952 - protein, 209 aa, Homo sapiens
MFSPPVSSGKNGPTSLASGHFTGSNVEDRSSSGSWGNGGHPSPSRNYGDGTPYDHMTSRDLGSHDNLSPPFVNSRIQSKTERGSYSSYGRESNLQGCHQQSLLGGDMDMGNPGTLSPTKPGSQYYQYSSNNPRRRPLHSSAMEVQTKKVRKVPPGLPSSVYAPSASTADYNRDSPGYPSSKPATSTFPSSFFMQDGHHSSDPWSSSSGM

SEQ ID NO: 55953 - protein, 165 aa, Homo sapiens
MSRQVVRSSKFRHVFGQPAKADQCYEDVRVSQTTWDSGFCAVNPKFVALICEASGGGAFLVLPLGKTGRVDKNAPTVCGHTAPVLDIAWCPHNDNVIASGSEDCTVMVWEIPDGGLMLPLREPVVTLEGHTKRVGIVAWHTTAQNVLLSAGCDNVIMVWDVGTGA

SEQ ID NO: 55954 - protein, 54 aa, Homo sapiens
MASVSELACIYSALILHDDEVTVTLRRRKWKQRKKNPRSLMMTWALVFLTKPLL

SEQ ID NO: 55955 - protein, 316 aa, Homo sapiens
MCPGLPRPMSRSSFQLFLQPFFICYKLNICSTRLSSSPMARSPGNVCVPPTGWSLECLQDWASFLRLAIPSMLMLCMEWWAYEVGSFLSGILGMVELGAQSIVYELAIIVYMVPAGFSVAASVRVGNALGAGDMEQARKSSTVSLLITVLFAVAFSVLLLSCKDHVGYIFTTDRDIINLVAQVVPIYAVSHLFEALACTSGGVLRGSGNQKVGAIVNTIGYYVVGLPIGIALMFATTLGVMGCPENLEGILTNDVGKTGEPQSDQQMRQEEPLPEHPQDGAKLSRKQLVLRRGLLLLGVFLILLVGILVRFYVRIQ

SEQ ID NO: 55956 - protein, 177 aa, Homo sapiens
MKIAVIGQSLFGQEVYCHLRKEGHEVVGVFTVPDKDGKADPLGLEAEKDGVPVFKYSRWRAKGQALPDVVAKYQALGAELNVLPFCSQFIPMEIISAPRHGSIIYHPSLLPRHRGASAINWTLIHGDKKGGFSIFWADDGLDTGDLLLQKECEVLPDDTVSTLYNRFLFPEGIKGMV

SEQ ID NO: 55957 - protein, 92 aa, Homo sapiens
MRRFLLLYATQQGQAKAIAEEICEQAVVHGFSADLHCISESDKYDLKTETAPLVVVVSTTGTGDPPDTARKFVKEIQNQTLPVDFFAHLRSR

SEQ ID NO: 55958 - protein, 106 aa, Homo sapiens
MEIPNPPTSKCITYWKRKVKSEYMRLRQLKRLQANMGAKALYVANFAKVQEKTQILNEEWKKLRVQPVQSMKPVSGHPFLKKCTIESIFPGFASQHMLMRSLNTVA

SEQ ID NO: 55959 - protein, 175 aa, Homo sapiens
MDDKEYVGFATLPNQVHRKSVKKGFDFTLMVAGESGLGKSTLVNSLFLTDLYRDRKLLGAEERIMQTVEITKHAVDIEEKGVRLRLTIVDTPGFGDAVNNTECWKPVAEYIDQQFEQYFRDESGLNRKNIQDNRVHCCLYFISPFGHGYGPSLRLLAPPGAVKGTGQEHQGQGCH

SEQ ID NO: 55960 - protein, 70 aa, Homo sapiens
  MOD_RES (1)..(1): Any amino acid
XCGAMLSPLLARSNTSQASLNGIYQSPIDFNNSEFYGFSEFFYCTEDVLRIGGRYHGPTFAKAAQLVAHK

SEQ ID NO: 55961 - protein, 58 aa, Homo sapiens
VMRDPNTKRSRGFGFVTYATVEEVDAAMNARPHKVDGRVVEATMILGITTISLQILDP

SEQ ID NO: 55962 - protein, 267 aa, Homo sapiens
  MOD_RES (1)..(1): Any amino acid
XELGAARAWENLGEQMGKAPRVPVPPAGLSLPLKDPPASQAVSLLTEYAASLGIFLLFREDQPPGPCFPFSVSAELDGVVCPAGTANSKTEAKQQAALSALCYIRSQLENPENILTHEQRCAALVSAGFDLLLDERSPYWACKGTVAGVILEREIPRARGHVKEIYKLVALGTGSSCCAGWLEFSGQQLHDCHGLVIARRALLRFLFRQLLLATQGGPKGKEQSVLAPQPGPGPPFTLKPRVFLHLYISNTPKGAARDIYLPPTSEG

SEQ ID NO: 55963 - protein, 202 aa, Homo sapiens
MAGGMSAECPEPGPGGLQGQSPGPGRQCPPPITPTSWSLPPWRAYVAAAVLCYINLLNYMNWFIIAGVLLDIQEVFQISDNHAGLLQTVFLALLPVPGHRGHWLGQLLHHRAHRPGRPLREGPAHPRAGCLLHLYPRWKWSGLRAGVGCDDADWELALGPPSHALPGGRGLDPAYPAGSRPTPGSCRDTGGGGRGRLQEQLV

SEQ ID NO: 55964 - protein, 240 aa, Homo sapiens
  MOD_RES (1)..(1): Any amino acid
XLNITCRFAGVFHVEKNGRYSISRTEAADLCKAFNSTLPTMAQMEKALSIGFETCRYGFIEGHVVIPRIHPNSICAANNTGVYILTSNTSQYDTYCFNASAPPEEDCTSVTDLPNAFDGPITITIVNRDGTRYVQKGEYRTNPEDIYPSNPTDDDVSSGSSSERSSTSGDRNDVTGGRRDPNHSEGSTTLLEGYTSHYPHTKESRTFIPVTSAKTGSFGVTAVTVGDSNSNVNRSLSGDQ

SEQ ID NO: 55965 - protein, 70 aa, Homo sapiens
MLPPLIDPWDPGLTARDLLFRGGCRYRKRPRVVLDVTEQPVPLGSWRRSLCAPGEADAGEFQAGGSGEPH

SEQ ID NO: 55966 - protein, 424 aa, Homo sapiens
MFLSSVGFSVVMMSIWPYLQKIDPTADTSFLGWVIASYSLGQMVASPIFGLWSNYRPRKEPLIVSILISVAANCLYAYLHIPASHNKYYMLVARGLLGIGAGNVAVVRSYTAGATSLQERTSSMANISMCQALGFILGPEHRVDDSGRQCKSINFEEASTDEAQVPQGNIDQVAVVAINVLFFVTLFIFALFETIITPLTMDMYAWTQEQAVLYNGIILAALGVEAVVIFLGVKLLSKKIGERAILLGGLIVVWVGFFILLPWGNQFPKIQWEDLHNNSIPNTTFGEIIIGLWKSPMEDDNERPTGCSIEQAWCLYTPVIHLAQFLTSAVLIGLGYPVCNLMSYTLYSKILGPKPQGVYMGWLTASGSGARILGPMFISQVYAHWGPRWAFSLVCGIIVLTITLLGVVYKRLIALSVRYGRIQE

SEQ ID NO: 55967 - protein, 88 aa, Homo sapiens
MADTATTASAAAASAASASSDAPPFQLGKPRFQQTSFYGRFRHFLDIIDPRTLFVTEMESCTVPQAHCNPCLLGSETSQRGCAAAGGL

SEQ ID NO: 55968 - protein, 79 aa, Homo sapiens
MEVPTAYMISPKEREKDSSDSILQDLTWTMCEKALNLQLETLLEAPSHQSSHQDTERHPLLWSFQGSWQLFYRKRELFA

SEQ ID NO: 55969 - protein, 147 aa, Homo sapiens
MPGFLVRILPLLLVLLLLGPTRGLRSRFLPWAFHLPRQAPKSQLPLHKRGTKTAPNEHASSNRSGRRRRRQQWNATQRMFEIDYSRDSFLKDGQPFRYISGSIHYSRVPRFYWKDRLLKMKMAGLNAIQTYVPWNFHEPWPGQYQFS

SEQ ID NO: 55970 - protein, 124 aa, Homo sapiens
MRHLEGQLEEKNQELQRARQREKMNEEHNKRLSDTVDRLLTESNERLQLHLKERMAALEEKNVLIQESETFRKNLEESLHDKERLAEEIEKLRSELDQLKMRTGSLIEPTIPRTHLDTSAELRY

SEQ ID NO: 55971 - protein, 207 aa, Homo sapiens
MKLCSLAVLVPIVLFCEQHVFAFQSGQVLAALPRTSRQVQVLQNLTTTYEIVLWQPVTADLIVKKKQVHFFVNASDVDNVKAHLNVSGIPCSVLLADVEDLIQQQISNDTVSPRASASYYEQYHSLNEIYSWIEFITERHPDMLTKIHIGSSFEKYPLYVLKVSGKEQAAKNAIWIDCGIHAREWISPAFCLWFIGHTSFATFALGN

SEQ ID NO: 55972 - protein, 688 aa, Homo sapiens
MALQSQVWSLATPMPMAESSLYRQRLEVIAEKRRLQEEIRAARREVEEEKLRVERLKRKSLRERWLMDGAAAVPEPSEDPTSKDPQSPEGQAQARIRNLEDSLFTLQSQLQLLQSASTGAQHKPSGRPSWRRQGHRPLSQSIVEAGSVGQTDLNKRASLPAGLVGTPPESPSEPREDVLGFLPGPRQVPGAAGDSSEANGPCPSPIPTPEQGLSQRAVPSEGRVGEAKGGGVVSVVWEGLRATEDCATGATGPELEAKVEEVVLEAIGDRKGAGSLELPAWVKEDRGIVEVVWEGVGGSDAEAMGEIGRVPEVVQTSSPRLQERLEAAASIEGEDVPQGSPEGDGQGGSGGEEGSFIWVERVTLSEEWEELLVEGLEGPEVAGRERGDESPLGAEGAKTGGGEETWEAEKRKAEESMGIGSEEKPGTGRDEAEMSPVVERKGGEKKLELESRGSAEKLGTEREGGEEPLGIERKVEGHLRAEKEGDEEKRGAEEEEVEEPLGVEKKGGEEEPEATKEPLEAERKGGEETLEAEKRGGEESLETEKTQGTEGDLNLEQGSREGSESQAEEMNEAGPPLEANTETRPEKEGPQPQEKPVGALEEEGVKPQTAAEGQGPLGDATPLLAETPAPEQPAECQPLLQGEGPSANPSAHPVPTYAPARQPEPSAPTEGEEASGPKQKTCQCCAVM

SEQ ID NO: 55973 - protein, 151 aa, Homo sapiens
MADTDLFMECEEEELEPWQKISDVIEDSVVEDYNSVDKTTTVSVSQQPVSAPVPIAAHASVAGHLSTSTTVSSSGAQNSDSTKKTLVTLIANNNAGNPLVQQGGQPLILTQNPAPGLGTMVTQPVLRPVQVMQNANHVTSSPVASQPIFIT

SEQ ID NO: 55974 - protein, 145 aa, Homo sapiens
  MOD_RES (1)..(1): Any amino acid
XGVPAFGSAPAFTSPLGSTGGKVFGEGTAAASAGGFGFGSSSNTTSFGTLASQNAPTFGSLSQQTSGFGTQSSGFSGFGSGTGGLSRVLVAGEAEGVSAGLSIPGTNRILSFFPEKCWSRLFRPTLPSKHIHPERNNRNQNSQGA

SEQ ID NO: 55975 - protein, 193 aa, Homo sapiens
MAQKPLRLLACGDVEGKFDILFNRVQAIQKKSGNFDLLLCVGNFFGSTQDAEWEEYKTGIKKGRKGIFTGSSGLQIVYLSGTESLNEPVPGYSFSPKDVSSLRMMLCTTSQFKGVDILLTSPWPKCVGNFGNSSGEVDTKKCGSALVSSLATGLKPRYHFAALEKTYYERLPYRNHIILQENAQHATRFIALA

SEQ ID NO: 55976 - protein, 1554 aa, Homo sapiens
MREAAAALVPPPAFAVTPAAAMEEPPPPPPPPPPPPEPETESEPECCLAARQEGTLGDSACKSPESDLEDFSDETNTENLYGTSPPSTPRQMKRMSTKHQRNNVGRPASRSNLKEKMNAPNQPPHKDTGKTVENVEEYSYKQEKKIRAALRTTERDRKKNVQCSFMLDSVGGSLPKKSIPDVDLNKPYLSLGCSNAKLPVSVPMPIARPARQTSRTDCPADRLKFFETLRLLLKLTSVSKKKDREQRGQENTSGFWLNRSNELIWLELQAWHAGRTINDQDFFLYTARQAIPDIINEILTFKVDYGSFAFVRDRAGFNGTSVEGQCKATPGTKIVGYSTHHEHLQRQRVSFEQVKRIMELLEYIEALYPSLQALQKDYEKYAAKDFQDRVQALCLWLNITKDLNQKLRIMGTVLGIKNLSDIGWPVFEIPSPRPSKGNEPEYEGDDTEGELKELESSTDESEEEQISDPRVPEIRQPIDNSFDIQSRDCISKKLERLESEDDSLGWGAPDWSTEAGFSRHCLTSIYRPFVDKALKQMGLRKLILRLHKLMDGSLQRARIALVKNDRPVEFSEFPDPMWGSDYVQLSRTPPSSEEKCSAVSWEELKAMDLPSFEPAFLVLCRVLLNVIHECLKLRLEQRPAGEPSLLSIKQLVRECKEVLKGGLLMKQYYQFMLQEVLEDLEKPDCNIDAFEEDLHKMLMVYFDYMRSWIQMLQQLPQASHSLKNLLEEEWNFTKEITHYIRGGEAQAGKLFCDIAGMLLKSTGSFLEFGLQESCAEFWTSADDSSASDEIRRSVIEISRALKELFHEARERASKALGFAKMLRKDLEIAAEFRLSAPVRDLLDVLKSKQYVKVQIPGLENLQMFVPDTLAEEKSIILQLLNAAAGKDCSKDSDDVLIDAYLLLTKHGDRARDSEDSWGTWEAQPVKVVPQVETVDTLRSMQVDNLLLVVMQSAHLTIQRKAFQQSIEGLMTLCQEQTSSQPVIAKALQQLKNDALELCNRISNAIDRVDHMFTSEFDAEVDESESVTLQQYYREAMIQGYNFGFEYHKEVVRLMSGEFRQKIGDKYISFARKWMNYVLTKCESGRGTRPRWATQGFDFLQAIEPAFISALPEDDFLSLQALMNECIGHVIGKPHSPVTAIHRNSPRPMKVPRCHSDPPNPHLIIPTPEGFRGSSVPENDRLASIAAELQFRSLSRHSSPTEERDEPAYPRGDSSGSTRRSWELRTLISQSKDTASKLGPIEAIQKSVRLFEEKRYREMRRKNIIGQVCDTPKSYDNVMHVGLRKVTFKWQRGNKIGEGQYGKVYTCISVDTGELMAMKEIRFQPNDHKTIKETADELKIFEGIKHPNLVRYFGVELHREEMYIFMEYCDEGTLEEVSRLGLQEHVIRLYSKQITIAINVLHEHGIVHRDIKGANIFLTSSGLIKLGDFGCSVKLKNNAQTMPGEVNSTLGTAAYMAPEVITRAKGEGHGRAADIWSLGCVVIEMVTGKRPWHEYEHNFQIMYKVGMGHKPPIPERLSPEGKDFLSHCLESDPKMRWTASQLLDHSFVKVCTDEE

SEQ ID NO: 55977 - protein, 37 aa, Homo sapiens
MQGKLQPPMEREARDGVPSGKARSASEPQALGTEECF

SEQ ID NO: 55978 - protein, 447 aa, Homo sapiens
MSALTPTLVFCHMHVETSYIEDNCNQNGAISLIFSLKEEVGALAKVLRLFEENDVNLTHIESRPSRLKKDEYEFFTHLDKRSLPALTNIIKILRHDIGATVHELSRDKKKDTVPWFPRTIQELDRFANQILSYGAELDADHPGFKDPVYRARRKQFADIAYNYRHGQPIPRVEYMEEEKKTWGTVFKTLKSLYKTHACYEYNHIFPLLEKYCGFHEDNIPQLEDVSQFLQTCTGFRLRPVAGLLSSRDFLGGLAFRVFHCTQYIRHGSKPMYTPEPDICHELLGHVPLFSDRSFAQFSQEIGLASLGAPDEYIEKLATIYWFTVEFGLCKQGDSIKAYGAGLLSSFGELQYCLSEKPKLLPLELEKTAIQNYTVTEFQPLYYVAESFNDAKEKVRNFAATIPRPFSVRYDPYTQRIEVLDNTQQLKILADSINSEIGILCSALQKIK

SEQ ID NO: 55979 - protein, 78 aa, Homo sapiens
MAGEQKPSSNLLEQFILLAKGTSGSALTALISQVLEAPGVYVFGELLELANVQEPGWSRSPDLMIHPPRPPKVLGLQA

SEQ ID NO: 55980 - protein, 155 aa, Homo sapiens; identical to SEQ ID NO: 41120

SEQ ID NO: 55981 - protein, 41 aa, Homo sapiens
MKQYASPMPTQTDVKLKFKPLSKKVVSAALQFSLSCIFLRE

SEQ ID NO: 55982 - protein, 213 aa, Homo sapiens
MAGALAGLAAGLQVPRVAPSPDSDSDTDSEDPSLRRSAGGLLRSQVIHSGHFMVSSPHSDSLPRRRDQEGSVGPSDFGPRSIDPTLTRLFECLSLAYSGKLVSPKWKNFKGLKLLCRDKIRLNNAIWRAWYIQYFFTNSRLPQPPMPSNFPEPPSFSPVVDSLFSSGTLGPEVPPASSAMTHLSGHSRLQARNSCPGPLDSSAFLSSDFLLPE

SEQ ID NO: 55983 - protein, 661 aa, Homo sapiens
MGVDFDVKTFCHNLRATKPPYECPVETCRKVYKSYSGIEYHLYHYDHDNPPPPQQTPLRKHKKKGRQSRPANKQSPSPSEVSQSPGREVMSYAQAQRMVEVDLHGRVHRISIFDNLDVVSEDEEAPEEAPENGSNKENTETPAATPKSGKHKNKEKRKDSNHHHHHNVSASTTPKLPEVVYRELEQDTPDAPPRPTSYYRYIEKSAEELDEEVEYDMDEEDYIWLDIMNERRKTEGVSPIPQEIFEYLMDRLEKESYFESHNKGDPNALVDEDAVCCICNDGECQNSNVILFCDMCNLAVHQECYGVPYIPEGQWLCRRCLQSPSRAVDCALCPNKGGAFKQTDDGRWAHVVCALWIPEVCFANTVFLEPIDSIEHIPPARWKLTCYICKQRGSGACIQCHKANCYTAFHVTCAQQAGLYMKMEPVRETGANGTSFSVRKTAYCDIHTPPGSARRLPALSHSEGEEDEDEEEDEGKGWSSEKVKKAKAKSRIKMKKARKILAEKRAAAPVVSVPCIPPHRLSKITNRLTIQRKSQFMQRLHSYWTLKRQSRNGVPLLRRLQTHLQSQRNCDQVGRDSEDKNWALKEQLKSWQRLRHDLERARLLVELIRKREKLKRETIKVQQIAMEMQLTPFLILLRKTLEQLQEKDTGNIFSEPVPLSE

SEQ ID NO: 55984 - protein, 266 aa, Homo sapiens
MGILSFLPVLATESDWADCKSPQPWGHMLLWTAVLFLAPVAGTPAAPPKAVLKLEPWINVLQEDSVTLTCRGTHSPESDSIPWFHNGNLIPTHTQPSYRFKANNNDSGEYTCQTGQTSLSDPVHLTVLSEWLVLQTPHLEFQEGETIVLRCHSWKDKPLVKVTFFQNGKSKKFSRSDPNFSIPQANHSHSGDYHCTGNIGYTLYSSKPVTITVQAPSSSPMGIIVAVVTGIAVAAIVAAVVALIYCRKKRISATWTSNDCHQKETT

SEQ ID NO: 55985 - protein, 57 aa, Homo sapiens
MRQASWCHQGWATGVCDRAPDFLSPSEDQVLRPALGSSVALNCTAWVVSGPHCSLPS

SEQ ID NO: 55986 - protein, 135 aa, Homo sapiens
MLQKKIEEKDLKVDVIVTLGGLAGRFDQIMASVNTLFQATHITPFPIIIIQEESLIYLLQPGKHRLHVDTGMEGDWCGLIPVGQPCMQVTTTGLKWNLRTCDYTRTTWIAKDNPVPRLIRLIRLNHICKVPLAIK

SEQ ID NO: 55987 - protein, 186 aa, Homo sapiens
MFLCQGFRKYLPEHLNDLKKENFSLKLRIYFLEERMQQKYEASREDIYKRNIELKVEVESLKRELQDKKQHLDKTWADVENLNSQNEAELRRQFEERQQETEHVYELLENKIQLLQEESRLAKNEAARMAALVEAEKECNLELSEKLKGVTKNWEDVPGDQVKPDQYTEALAQRDKRIEELNQSLA

SEQ ID NO: 55988 - protein, 412 aa, Homo sapiens
MHVRSLRAAAPHSFVALWAPLFLLRSALADFSLDNEVHSSFIHRRLRSQERREMQREILSILGLPHRPRPHLQGKHNSAPMFMLDLYNAMAVEEGGGPGGQGFSYPYKAVFSTQGPPLASLQDSHFLTDADMVMSFVNLVEHDKEFFHPRYHHREFRFDLSKIPEGEAVTAAEFRIYKDYIRERFDNETFRISVYQVLQEHLGRESDLFLLDSRTLWASEEGWLVFDITATSNHWVVNPRHNLGLQLSVETLDGQSINPKLAGLIGRHGPQNKQPFMVAFFKATEVHFRSIRSTGSKQRSQNRSKTPKNQEALRMANVAENSSSDQRQACKKHELYVSFRDLGWQDWIIAPEGYAAYYCEGECAFPLNSYMNATNHAIVQTLVGVTPSWGVVTWAGQAAGPPDPAASKLGPE

SEQ ID NO: 55989 - protein, 87 aa, Homo sapiens
MRVQDTSGTYYWHIPTGTTQWEPPGRASPSQGSSPQEESQLTWTGFAHGEGFEDGEFWKDEPSDEAPMELGLKEPEEGTLTFPAQSL

SEQ ID NO: 55990 - protein, 148 aa, Homo sapiens
MGLCREEDGFVRHALGEGGLQIGEGALPGRGWVVGARGSPAVDLWEPCVLNSAAAQSVSRLFAGHLLRPSLAGLGDSSEKSRPVSLANYALEPRRRTLLDRKMSPKRIAKRRSPPADAIPKSKKVKDTRAAASRRVPGARSCQVSHRS

SEQ ID NO: 55991 - protein, 155 aa, Homo sapiens
  MOD_RES (1)..(1): Any amino acid
XLAPYFTSEPLSAVQKLGGPVVLHCSAQPVTTRISWLHNGKTLDGNLEHVKIHQGTLTILSLNSSLLGYYQCLANNSIGAIVSGPATVSVAVLGDFGSSTKHVITAEEKSAGFIGCRVPESNPKAEVRYKIRGKWLEHSTGWPVAHAYNPSTLGS

SEQ ID NO: 55992 - protein, 52 aa, Homo sapiens
QTQRNLYRDVMLENYKNLVAVDWESHINTKWSAPQQNFLQGKTSSVVEMETN

SEQ ID NO: 55993 - protein, 144 aa, Homo sapiens
MSQLHFYRFYLEFGCLRKAFRHKFRLPPPSSDFLADVVGLQTEQRAGDLPKTMEGPLPSNAKAAINLQDDPIIQKYGSKKVGLTRCLLTKEEMRTFHFPLQGFPDCENFLLTKCNGSIADNSPLFGLDCEMCLTSKGRELTRIS

SEQ ID NO: 55994 - protein, 159 aa, Homo sapiens
MMKQRTEPWTVENEMKVAKNPDRWEGIKDINTGRSCAVRSKAGNKPITNQLGLTFQLPLPELEIFQGEGKIYECNQVQKFISHSSSVSPLQRIYSGVKTHIFNKHRNDFVDFPLLSQEQKAHIRRKPYECNEQGKVFRVSSSLPNHQVIHTADKPNRCH

SEQ ID NO: 55995 - protein, 273 aa, Homo sapiens
PPATMRIWLLGGLLPFLLLLSGLQRPTEGSEVAIKIDFDFAPGSFDDQYQGCSKQVMEKLTQGDYFTKDIEAQKNYFRMWQKAHLAWLNQGKVLPQNMTTTHAVAILFYTLNSNVHSDFTRAMASVARTPQQYERSFHFKYLHYYLTSAIQLLRKDSIMENGTLCYEVHYRTKDVHFNAYTGATIRFGQFLSTSLLKEEAQEFGNQTLFTIFTCLGAPVQYFSLKKEVLIPPYELFKVINMSYHPRGDWLQLRSTGNLSTYNCQLLKGILYLN

SEQ ID NO: 55996 - protein, 73 aa, Homo sapiens
  MOD_RES (1)..(1): Any amino acid
XLSGVSLEGSELMFPDLVQLICAYCHTRSPEPSTTQPLTKSWRPSPIWALSSGAPPSTSRLSGARLEAQCCPS

SEQ ID NO: 55997 - protein, 864 aa, Homo sapiens
MGNRGMEDLIPLVNRLQDAFSAIGQNADLDLPQIAVVGGQSAGKSSVLENFVGRDFLPRGSGIVTRRPLVLQLVNATTEYAEFLHCKGKKFTDFEEVRLEIEAETDRVTGTNKGISPVPINLRVYSPHVLNLTLVDLPGMTKVPVGDQPPDIEFQIRDMLMQFVTKENCLILAVSPANSDLANSDALKVAKEVDPQGQRTIGVITKLDLMDEGTDARDVLENKLLPLRRGYIGVVNRSQKDIDGKKDITAALAAERKFFLSHPSYRHLADRMGTPYLQKVLNQQLTNHIRDTLPGLRNKLQSQLLSIEKEVEEYKNFRPDDPARKTKALLQMVQQFAVDFEKRIEGSGDQIDTYELSGGARINRIFHERFPFELVKMEFDEKELRREISYAIKNIHGIRTGLFTPDMAFETIVKKQVKKIREPCLKCVDMVISELISTVRQCTKKLQQYPRLREEMERIVTTHIREREGRTKEQVMLLIDIELAYMNTNHEDFIGFANAQQRSNQMNKKKTSGNQVIRKGWLTINNIGIMKGGSKEYWFVLTAENLSWYKDDEEKEKKYMLSVDNLKLRDVEKGFMSSKHIFALFNTEQRNVYKDYRQLELACETQEEVDSWKASFLRAGVYPERVGDKEKASETEENGSDSFMHSMDPQLERQVETIRNLVDSYMAIVNKTVRDLMPKTIMHLMINNTKEFIFSELLANLYSCGDQNTLMEESAEQAQRRDEMLRMYHALKEALSIIGDINTTTVSTPMPPPVDDSWLQVQSVPAGRRSPTSSPTPQRRAPAVPPARPGSRGPAPGPPPAGSALGGAPPVPSRPGASPDPFGPPPQVPSRPNRAPPGVPSRKGPASPTRPAAPRPAEAPLLDL

SEQ ID NO: 55998 - protein, 566 aa, Homo sapiens
NNEDPYGDIWLTDKQPEEHNFSDTKIISLSHLEMTWTNRRNFPALLVRILHKSKLRYYGKPDKKMIEPYQTFLEVADSSGTVSVIMWNALCPEWYKSLRVGLVLLLQDYSVKKSYPFRIQPVPVDPQIKLISTMEICLNLRDPPTNIIIIPEKQVKPEWRLPKLNHRFTTRSELDDMPENCICDVIGLLVFVGRVQRSKKKENREDFWSYRWIHIADGTSEQPFIVELFSTSQPEIFENIYPMAYFVCTQLKVVRNDNQVPKLLYLTTTNESGVFITGHRGQPYTYDAKNANRPSTSQAARVEIQERNGKRHQDDEPVNSQYFQTTSTNLSLSNKIRILQGPHANPVAVPQPGASVQTKGIKPGMPSIFNRRANINANLQGKARKTISDRWESQLWREKKFGLIDHLHYSRVYPESIPRKFMFEHRKFLSDQYNSQPAKYVPPEGRPPKLDDFKSARSLGHFEVTILGLNHEIAIDVAFLPMYCPEDIRTSQIDTLLTSMNYSCAYPQDTTGNDRLPGPRAVAGDIIKAATELDRVHIVGILDICNLGNNKVEVYLHKIYSPENTS

SEQ ID NO: 55999 - protein, 42 aa, Homo sapiens
MSAQAQMRALLDQLMGTARDGESERPTRRGSGVGVRRGRRAA

SEQ ID NO: 56000 - protein, 130 aa, Homo sapiens
MEDGTPKHIIQMTGFKMEEKEALVKLLLKLDCTFIKSEKYKNCTHLIAERLCKSEKFLAACAAGKWILTKDYIIHSAKSGRWLDETTYEWGYKIEKDSRYSPQMQSAPKRWREELKRTGAPGAFHRWKVV

SEQ ID NO: 56001 - protein, 134 aa, Homo sapiens
MTSMASLFSFTSPAVKRLLGWKQGDEEEKWAEKAVDALVKKLKKKKGAMEELEKALSSPGQPSKCVTIPRSLDGRLQVSHRKGLPHVIYCRVWRWPDLQSHHELKPLDICEFPFGSKQKEVCINPYHYKRVESP

SEQ ID NO: 56002 - protein, 628 aa, Homo sapiens
MVAERTHKAAATGARGPGELGAPGTVALVAARAERGARLPSPGSCGLLTLALCSLALSLLAHFRTAELQARVLRLEAERGEQQMETAILGRVNQLLDEKWKLHSRRRREAPKTSPGCNCPPGPPGQPGTRGFPGFPGPIGLDGKPGHPGPKGDMGLTGPPGQPGPQGQKGEKGQCGEYPHRLLPLLNSVRLAPPPVIKRRTFQGEQSQASIQGPPGPPGPPGPSGPLGHPGLPGPMGPPGLPGPPGPKGDPGIQGYHGRKGERGMPGMPGKHGAKGAPGIAVAGMKGEPGIPGTKGEKGAEGSPGLPGLLGQKGEKGDAGNSIGGGRGEPGPPGLPGPPGPKGEAGVDGQVGPPGQPGDKGERGAAGEQGPDGPKGSKGEPGKGEMVDYNGNINEALQEIRTLALMGPPGLPGQIGPPGAPGIPGQKGEIGLPGPPGHDGEKGPRGKPGDMGPPGPQGPPGKDGPPGVKGENGHPGSPGEKGEKGETGQAGSPGLQGVPGPKGEAGLDGAKGEKGFQGEKGDRGPLGLPGASGLDGRPGPPGTPGPIGVPGPAGPKGERGSKGDPGMTGPTGAAGLPGLHGPPGDKGNRGHRGFKGEKGEPGLPGLDGLDAPCPLGEDGLPVQGCWNK

SEQ ID NO: 56003 - protein, 180 aa, Homo sapiens
MRKMLAAVSRVLSGASQKPASRVLVASRNFANDATFEIKKCDLHRLEEGPPVTTVLTREDGLKYYRMMQTVRRMELKADQLYKQKIIRGFCHLCDGQEACCVGLEAGINPTDHLITAYRAHGFTFTRGLSVREILAELTGRKGGCAKGKGGSMHMYAKNFYGGNGIVGAQVVKDEDCVLL

SEQ ID NO: 56004 - protein, 79 aa, Homo sapiens
MKNLLTEKCISSHNFHQKVIKQRMEKKVDSRYFKDGAVKKPYSAKTLSNKKSSASFGIRRELPSTSHLVQYRGTHTCTR

SEQ ID NO: 56005 - protein, 39 aa, Homo sapiens
MWVLGIAATFCGLFLLPGENTQRPAAEARLCAANPVLPV

SEQ ID NO: 56006 - protein, 160 aa, Homo sapiens
  MOD_RES (1)..(1): Any amino acid
XVRAGARLVEVALCRFVPGWRGVGLGDSEYTYFCNGGKIIDKRLQELGARHFYDTGHADDCVGLELVVEPWIAGLWPALRKHFRSSRGQEEISGALPVASPASSRTDLVKSELLHIESQVELLRFDDSGRKDSEVLKQNAVNSNQSNVVIEDFESSLTRS

SEQ ID NO: 56007 - protein, 60 aa, Homo sapiens
MTEGSMGVTLEASAEADLKAGNSCPELVPSRRSKLRKPKPVPLRKKAIGGEFSDTNAAVE

SEQ ID NO: 56008 - protein, 146 aa, Homo sapiens
MYLWLKLLAFGFAFLDTEVFVTGQSPTPSPTDAYLNASETTTLSPSGSAVISTTTIATTPSKPTCDEKYANITVDYLYNKETKLFTAKLNVNENVECGNNTCTNNEVHNLTECKNASVSISHNSCTAPDKTLILDVPPGVEKFQLH

SEQ ID NO: 56009 - protein, 315 aa, Homo sapiens
MADPKYADLPGIARNEPDVYETSDLPEDDQAEFDAEELTSTSVEHIIVNPNAAYDKFKDKRVGTKGLDFSDRIGKTKRTGYESGEYEMLGEGLGVKETPQQKYQRLLHEVQELTTEVEKIKTTVKESATEEKLTPVLLAKQLAALKQQLVASHLEKLLGPDAAINLTDPDGALAKRLLLQLEATKNSKGGSGGKTTGTPPDSSLVTYELHSRPEQDKFSQAAKVAELEKRLTELETAVRCDQDAQNPLSAGLQGACLMETVELLQAKVSALDLAVLDQVEARLQSVLGKVNEIAKHKASVEDADTQSKPCSLVSS

SEQ ID NO: 56010 - protein, 265 aa, Homo sapiens
MSFLVSKPERIRRWVSEKFIVEGLRDLELFGEQPPGDTRRKTNDASSESIASFSKQEVMSSFLPEGGCYELLTVIGKGFEDLMTVNLARYKPTGEYVTVRRINLEACSNEMVTFLQGELHVSKLFNHPNIVPYRATFIADNELWVVTSFMAYGSAKDLICTHFMDGMNELAIAYILQGVLKALDYIHHMGYVHRISRVMMPSLTSTVWESQPVNWPTAMSPLRICLPPRSSDVPQRLCPNCFVLSPPSPILRAASLRTTVESLAW

SEQ ID NO: 56011 - protein, 106 aa, Homo sapiens
MEYDEKLARFRQAHLNPFNKQSGPRQHEQGPGEEVPDVTPEEALPELPPGEPEFRCPERVMDLGLSEDHFSRPVGLFLASDVQQLRQAIEECKQVILELPEQSEKQ

SEQ ID NO: 56012 - protein, 141 aa, Homo sapiens
MAVSTVFSTSSLMLALSRHSLLSPLLSVTSFRRFYRGDSPTDSQKDMIEIPLPPWQERTDESIETKRARLLYESRKRGMLENCILLSLFAKEHLQHMTEKQLNLYDRLINEPSNDWDIYYWATGTGYDKQHNVKIGQFRLI

SEQ ID NO: 56013 - protein, 134 aa, Homo sapiens
MNQLRGKKSCHTGLGRSAGWNIPIGLLYCDLPEPRKPLEKAVANFFSGSCAPCADGTDFPQLCQLCPGCGCSTLNQYFGYSGAFKCLKDGAGDVAFVKHSTIFENLANKADRDQYELLCLDNTRKPVDEYKDCH

SEQ ID NO: 56014 - protein, 182 aa, Homo sapiens
MLGSKKKYIVNGNSGIKAQQIQFADQKQEFNKRPTKIGRRSLSRSISQSSTDSYSSAASYTDSSDDETSPRDKQQKNSKGSSDFCVKNIKQAEFGRREIEIAEQEMPALMALRKRAQGEKPLAGAKIVGCTHITAQTAVLMETLGALGAQCRWAACNIYSTLNEVAAALAESGFPVFAWKGE

SEQ ID NO: 56015 - protein, 104 aa, Homo sapiens
  MOD_RES (1)..(1): Any amino acid
XIFLHLEHVQGHIRLTYFGQWSEVEPQCCGEAVDNLYSAPEVGGISELTEACDWWSFGSLLYELLTGMLLQFEPTRRLGMGEGGVSKLKSHPFFSTIQWSKLVG

SEQ ID NO: 56016 - protein, 160 aa, Homo sapiens
MPRVYIGRLSYQARERDVERFFKGYGKILEVDLKNGLLCSEPTHVFGRTRWLTLANGNQKTSESNLVVTYPQLRGASPCPKVGKDQVQTELWPTFADQESTLALIREPLVCGNCQFADVKRVPDWVMVSPEVAPQLCHSVSTATSLILTSHGEVRFLQGK

SEQ ID NO: 56017 - protein, 588 aa, Homo sapiens
  MOD_RES (1)..(1): Any amino acid
XINLAMEIAEKHLDIPKMLDAEDLVYTARPDERAIMTYVSCYYHAFAGAQKAETAANRICKVLAVNQENERLEQAEKGYEEWLLNEIRRLERLEHLAEKFRQKASTHETWAYGKEQILLQKDYESASLTEVRALLRKHEAFESDLAAHQDRVEQIAAIAQELNELDYHDAVNVNDRCQKICDQWDRLGTLTQKRREALERMEKLLETIDQLHLEFAKRAAPFNNWMEGAMEDLQDMFIVHSIEEIQSLITAHEQFKATLPEADGERQSIMAIQNEVEKVIQSYNIRISSSNPYSTVTMDELRTKWDKVKQLVPIRDQSLQEELARQHANERLRRQFAAQANAIGPWIQNKMEEIARSSIQITGALEDQMNQLKQYEHNIINYKNNIDKLEGDHQLIQEALVFDNKHTNYTMEHIRVGWELLLTTIARTINEVETQILTRDAKGITQEQMNEFRASFNHFDRRKNGLMDHEDFRACLISMGYDLGEAEFARIMTLVDPNGQGTVTFQSFIDFMTRETADTDTAEQVIASFRILASDKPYILAEELRRELPPDQAQYCIKRMPAYSGPGSVPGALDYAAFSSALYGESDL

SEQ ID NO: 56018 - protein, 111 aa, Homo sapiens
MALGPRCGAIRACRRVLERAFSLRKAHSIKDMENTLQLVRNIIPPLSSTKHKGQDGRIGVVGGCQEYTGAPYFAAISALKVGADLSHVFCASAAAPVIKAYSPELIVHPVL

SEQ ID NO: 56019 - protein, 42 aa, Homo sapiens
NLLLLAWYFGSLLVIFCVELACGVWTYEQELMSEESHLAIEQ

SEQ ID NO: 56020 - protein, 35 aa, Homo sapiens
MAISQHQFYLDRKQSKSKIHAARSLSEIAIDLTET

SEQ ID NO: 56021 - protein, 1455 aa, Homo sapiens
  MOD_RES (1)..(1): Any amino acid
XPDHLQMAVQGKRPMPGMQQQMPTLPPPSVSATGPGPGPGPGPGPGPGPAPPNYSRPHGMGGPNMPPPGPSGVPPGMPGQPPGGPPKPWPEGPMANAAAPTSTPQKLIPPQPTGRPSPAPPAVPPAASPVMPPQTQSPGQPAQPAPMVPLHQKQSRITPIQKPRGLDPVEILQEREYRLQARIAHRIQELENLPGSLAGDLRTKATIELKALRLLNFQRQLRQEVVVCMRRDTALETALNAKAYKRSKRQSLREARITEKLEKQQKIEQERKRRQKHQEYLNSILQHAKDFKEYHRSVTGKIQKLTKAVATYHANTEREQKKENERIEKERMRRLMAEDEEGYRKLIDQKKDKRLAYLLQQTDEYVANLTELVRQHKAAQVAKEKKKKKKKKKAENAEGQTPAIGPDGEPLDETSQMSDLPVKVIHVESGKILTGTDAPKAGQLEAWLEMNPGYEVAPRSDSEESGSEEEEEEEEEEQPQAAQPPTLPVEEKKKIPDPDSDDVSEVDARHIIENAKQDVDDEYGVSQALARGLQSYYAVAHAVTERVDKQSALMVNGVLKQYQIKGLEWLVSLYNNNLNGILADEMGLGKTIQTIALITYLMEHKRINGPFLIIVPLSTLSNWAYEFDKWAPSVVKVSYKGSPAARRAFVPQLRSGKFNVLLTTYEYIIKDKHILAKIRWKYMIVDEGHRMKNHHCKLTQVLNTHYVAPRRLLLTGTPLQNKLPELWALLNFLLPTIFKSCSTFEQWFNAPFAMTGEKVDLNEEETILIIRRLHKVLRPFLLRRLKKEVEAQLPEKVEYVIKCDMSALQRVLYRHMQAKGVLLTDGSEKDKKGKGGTKTLMNTIMQLRKICNHPYMFQHIEESFSEHLGFTGGIVQGLDLYRASGKFELLDRILPKLRATNHKVLLFCQMTSLMTIMEDYFAYRGFKYLRLDGTTKAEDRGMLLKTFNEPGSEYFIFLLSTRAGGLGLNLQSADTVIIFDSDWNPHQDLQAQDRAHRIGQQNEVRVLRLCTVNSVEEKILAAAKYKLNVDQKVIQAGMFDQKSSSHERRAFLQAILEHEEQDESRHCSTGSGSASFAHTAPPPAGVNPDLEEPPLKEEDEVPDDETVNQMIARHEEEFDLFMRMDLDRRREEARNPKRKPRLMEEDELPSWIIKDDAEVERLTCEEEEEKMFGRGSRHRKEVDYSDSLTEKQWLKTLKAIEEGTLEEIEEEVRQKKSSRKRKRDSDAGSSTPTTSTRSRDKDDESKKQKKRGRPPAEKLSPNPPNLTKKMKKIVDAVIKYKDSSSGRQLSEVFIQLPSRKELPEYYELIRKPVDFKKIKERIRNHKYRSLNDLEKDVMLLCQNAQTFNLEGSLIYEDSIVLQSVFTSVRQKIEKEDDSEGEESEEEEEGEEEGSESESRSVKVKIKLGRKEKAQDRLKGGRRRPSRGSRAKPVVSDDDSEEEQEEDRSGSGSEED

SEQ ID NO: 56022 - protein, 243 aa, Homo sapiens
RRANLIIPYPETDNWYLSLQLMCPENAEDCEQAVVHVETTLYLVPCLNDCGPYGQCLLLRRHSYLYASCSCKAGWRGWSCTDNSTAQTVAQQRAATLLLTLSNLMFLAPIAVSVRRFFLVEASVYAYTMFFSTFYHACDQPGEAVLCILSYDTLQYCDFLGSGAAIWVTILCMARLKTVLKYVLFLLGTLVIAMSLQLDRRGMWNMLGPCLFAFVIMASMWVRSRAGWHCCPGARRREPGPLL

SEQ ID NO: 56023 - protein, 710 aa, Homo sapiens
MAGLGPGVGDSEGGPRPLFCRKGALRQKVVHEVKSHKFTARFFKQPTFCSHCTDFIWGIGKQGLQCQVCSFVVHRRCHEFVTFECPGAGKGPQTDDPRNKHKFRLHSYSSPTFCDHCGSLLYGLVHQGMKCSCCEMNVHRRCVRSVPSLCGVDHTERRGRLQLEIRAPTADEIHVTVGEARNLIPMDPNGLSDPYVKLKLIPDPRNLTKQKTRTVKATLNPVWNETFVFNLKPGDVERRLSVEVWDWDRTSRNDFMGAMSFGVSELLKAPVDGWYKLLNQEEGEYYNVPVADADNCSLLQKFEACNYPLELYERVRMGPSSSPIPSPSPSPTDPKRCFFGASPGRLHISDFSFLMVLGKGSFGKVMLAERRGSDELYAIKILKKDVIVQDDDVDCTLVEKRVLALGGRGPGGRPHFLTQLHSTFQTPDRLYFVMEYVTGGDLMYHIQQLGKFKEPHAAFYAAEIAIGLFFLHNQGIIYRDLKLDNVMLDAEGHIKITDFGMCKENVFPGTTTRTFCGTPDYIAPEIIAYQPYGKSVDWWSFGVLLYEMLAGQPPFDGEDEEELFQAIMEQTVTYPKSLSREAVAICKGFLTKHPGKRLGSGPDGEPTIRAHGFFRWIDWERLERLEIPPPFRPRPCGRSGENFDKFFTRAAPALTPPDRLVLASIDQADFQGFTYVNPDFVHPDARSPTSPVPVPVISCTPAFQLCPRGF

SEQ ID NO: 56024 - protein, 224 aa, Homo sapiens
MARRGPGWRPLLLLVLLAGAAQGGLYFRRGQTCYRPLRGDGLAPLGRSTYPRPHEYLSPADLPKSWDWRNVDGVNYASITRNQHIPQYCGSCWAHASTSAMADRINIKRKGAWPSTLLSVQNVIDCGNAGSCEGGNDLSVWDYAHQHGIPDETCNNYQAKDQECDKFNQCGTCNEFKECHAIRNYTLWRVGDYGSLSGREKMMAEIYANGPIRGGVSPSCPGWS

SEQ ID NO: 56025 - protein, 347 aa, Homo sapiens
MLPAVGSADEEEDPAEEDCPELVPIETTQSEEEEKSGLGAKIPVTIITGYLGAGKTTLLNYILTEQHSKRVAVILNEFGEGSALEKSLAVSQGGELYEEWLELRNGCLCCSVKDSGLRAIENLMQKKGKFDYILLETTGLADPGAVASMFWVDAELGSDIYLDGIITIVDSKYGLKHLTEEKPDGLINEATRSINGLGQILETQRSSLQKKLQHVPGTQPHLDQSIVTITFEVPGNAKEEHLNMFIQNLLWEKNVRNKDNHCMEVIRLKGLVSIKDKSQQVIVQGVHELYDLEETPVSWKDDTERTNRLVLLGRNLDKDILKQLFIATVTETEKQWTTRFQEDQVCT

SEQ ID NO: 56026 - protein, 230 aa, Homo sapiens
MEKWYLMTVVVLIGLTVRWTVSLNSYSGAGKPPMFGDYEAQRHWQEITFNLPVKQWYFNSSDNNLQYWGLDYPPLTAYHSLLCAYVAKFINPDWIALHTSRGYESQAHKLFMRTTVLIADLLIYIPAVVLYCCCLKEISTKKKIANALCILLYPGLILIDYGHFQYNSVSLGFALWGVLGISCDCDLLGSLAFCLAINYKQMELYHALPFFCFLLGKCFKKGLKGKGNGI

SEQ ID NO: 56027 - protein, 257 aa, Homo sapiens
MAEKFDCHYCRDPLQGKKYVQKDGHHCCLKCFDKFCANTCVECRKPIGADSKEVHYKNRFWHDTCFRCAKCLHPLANETFVAKDNKILCNKCTTREDSPKCKGCFKAIVAGDQNVEYKGTVWHKDCFTCSNCKQVIGTGSFFPKGEDFYCVTCHETKFAKHCVKCNKAITSGGITYQDQPWHADCFVCVTCSKKLAGQRFTAVEDQYYCVDCYKNFVAKKCAGCKNPITAPTSGAGIRVERGLVPRGWWFFIEKIEA

SEQ ID NO: 56028 - protein, 414 aa, Homo sapiens
MGRPRVRQAWPGCCGHTGRLPAGRGYLASHMCDPAGAELIGDGMSDPTPPSNACTGHIQDPASQRLTWNKSPKSVLVIKKMRDASLLQPFKELCTHLMEENMIVYVEKKVLEDPAIASDESFGAVKKKFCTFREDYDDISNQIDFIICLGGDGTLLYASSLFQGSVPPVMAFHLGSLGFLTPFSFENFQSQVTQVIEGNAAVVLRSRLKVRVVKELRGKKTAVHNGLGENGSQAAGLDMDVGKQAMQYQVLNEVVIDRGPSSYLSNVDVYLDGHLITTVQGDGVIVSTPTGSTAYAAAAGASMIHPNVPAIMITPICPHSLSFRPIVVPAGVELKIMLSPEARNTAWVSFDGRKRQEIRHGDSISITTSCYPLPSICVRDPVSDWFESLAQCLHWNVRKKQAHFEEEEEEEEEG

SEQ ID NO: 56029 - protein, 472 aa, Homo sapiens
  MOD_RES (1)..(1): Any amino acid
XAPAVPAPSQKAPAVPAPSQKAPAIPAPSRKASAASASPRKASAVPAPPQKTPPPSQKAPSVPTIPQKAVSPTAPKKKSLLLPAPSQKALPTSPTEYQMALSPPASRGKLPGDFDVLPTGIPGRAVLERSQSGGKPEPVVTVRTQETDVVEMTTQAKSPESPFTVTKKESKDILISQTKEVTLEAFRGQGKLEDWAHWAKLEERSPDLPGVRSKELEQRKRWVKAKELAVEGPSQEHSRPFSVEALTLTKLMITANSKEQPSKSALVSLPSWLLATPQASATSMMASVPSRPGQLSLLEGKPVVVREQPESHTWVKEGKRPWGEMKEQPWGEMKEPPWDPKGPPKVPFRSKPTSASLKREGISQAPIPLTASPWEDLRPSPLSETLISKMEATARASQQPKRVSQEPMRMPAQHPLATVGSSSEILLPMLLELETVRNTATKAEEIQEESGVLNLLPSLQHSQHSEWPDAGA

SEQ ID NO: 56030 - protein, 64 aa, Homo sapiens
  MOD_RES (1)..(1): Any amino acid
XEFSRSPAICPACNSTLSGKLDIVRTELSPSEEYKAMVLAGLRPEIVLDISSRALAFWTYQYFL

SEQ ID NO: 56031 - protein, 173 aa, Homo sapiens
MSTDSSLLLHDVTMAGLQELRFPEEKPLLRGQDATELESSDAFLLAADTDWKEHDIETPYGLLHVVIRGSPKGNRPAILTYHDVGLNHKLCFNTFFNFEDMQEITKHFVVCHVDAPGQQVGASQFPQGYQFPSMEQLAAMLPSVVQHFGFKYVIGIGVGAGAYVLAKFAVSLP

SEQ ID NO: 56032 - protein, 670 aa, Homo sapiens
MNGNTALAIAKRLGYISVVDTLKVVTEEVTTTTTTITEKHKLNVPETMTEVLDVSDEEGDDTMTGDGGEYLRPEDLKELGDDSLPSSQFLDGMNYLRYSLEGGRSDSLRSFSSDRSHTLSHASYLRDSAVMDDSVVIPSHQVSTLAKEAERNSYRLSWGTENLDNVALSSSPIHSGFLVSFMVDARGGAMRGCRHNGLRIIIPPRKCTAPTRVTCRLVKRHRLATMPPMVEGEGLASRLIEVGPSGAQFLGPVIVEIPHFAALRGKERELVVLRSENGDSWKEHFCDYTEDELNEILNGMDEVLDSPEDLEKKRICRIITRDFPQYFAVVSRIKQDSNLIGPEGGVLSSTVVPQVQAVFPEGALTKRIRVGLQAQPMHSELVKKILGNKATFSPIVTLEPRRRKFHKPITMTIPVPKASSDVMLNGFGGDAPTLRLLCSITGGTTPAQWEDITGTTPLTFVNECVSFTTNVSARFWLIDCRQIQESVTFASQVYREIICVPYMAKFVVFAKSHDPIEARLRCFCMTDDKVDKTLEQQENFAEVARSRDVEVLEGKPIYVDCFGNLVPLTKSGQHHIFSFFAFKENRLPLFVKVRDTTQEPCGRLSFMKEPKSTRGLVHQAICNLNITLPIYTKESESDQEQEEEIHRMSRNGSRKGWLILLITLASAGQN

SEQ ID NO: 56033 - protein, 82 aa, Homo sapiens
MSRRRKHDDSPSPKKTPHKTVAAEECGSVVEPGRRRLRSARGSWPCGAREGPPGPVRQREQPPTAALCSKSNPEGMKHQRER

SEQ ID NO: 56034 - protein, 132 aa, Homo sapiens
MWNEVHEEKEQAAKQSVSCDECIPLPRAGHCAPSEAIEKLVALLNTLDRWIDETPPVDQPSRFGNKAYRTWYAKLDEEAENLVATVVPTHLAAAVPEVAVYLKESVGNSTRIDYGTGHEAAFAAFLCCLCKI

SEQ ID NO: 56035 - protein, 502 aa, Homo sapiens
MPGVANSGPSTSSRETANPCSRKKVHFGSIHDAVRAGDVKQLSEIVVRGASINELDVLHKFTPLHWAAHSGSLECLHWLLWHGADITHVTTRGWTASHIAAIRGQDACVQALIMNGANLTAQDDRGCTPLHLAATHGHSFTLQIMLRSGVDPSVTDKREWRPVHYAAFHGRLGCLQLLVKWGCSIEDVDYNGNLPVHLAAMEGHLHCFKFLVSRMSSATQVLKAFNDNGENVLDLAQRFFKQNILQFIQGAEYEGKDLEDQETLAFPGHVAAFKGDLGMLKKLVEDGVININERADNGSTPMHKAAGQGHIECLQWLIKMGADSNITNKAGERPSDVAKRFAHLAAVKLLEELQKYDIDDENEIDENDVKYFIRHGVEGSTDAKDDLCLSDLDKTDARMRAYKKIVELRHLLEIAESNYKHLGGITEEDLKQKKEQLESEKTIKELQGQLEYERLRREKLECQLDEYRAEVDQLRETLEKIQVPNFVAMTALLVSQTKRRGE

SEQ ID NO: 56036 - protein, 172 aa, Homo sapiens
MGKDYYCILGIEKGASDEDIKKAYRKQALKFHPDKNKSPQAEEKFKEVAEAYEVLSDPKKREIYDQFGEEGLKGGAGGTDGQGGTFRYTFHGDPHATFAAFFGGSNPFEIFFGRRMGGGRDSEEMEIDGDPFSAFGFSMNGYPRDRNSVGPSRLKQDPPVIHELRVSLEEIY

SEQ ID NO: 56037 - protein, 54 aa, Homo sapiens
MVLENVKEMWTEVPKSGKGKKKSKPVNKDRYISKMFLRGDSVIVVLRNPLIAGK

SEQ ID NO: 56038 - protein, 56 aa, Homo sapiens
MIVLGWMFFVGLVCYMGTFPELMPPTLKWQERWPVQESKTQLRRRALGLALPPRLE

SEQ ID NO: 56039 - protein, 602 aa, Homo sapiens
MRITAAILTARSRWRLRNSISAFLFTVTFAWCPPGLSNLTILSCPDHLSQDVFCLHESKFEEERMVAGWLTNYSQDSVTFEDVAVDFTQEEWTLLDQTQRNLYRDVMLENYKNLVAVDWESHINTKWSAPQQNFLQGKTSSVVEMERNHFGEELFDFNQCEKALSEHSCLKTHRRTYFRKKTCECNQCEKAFRKPSIFTLHKKTDIGEELPNCNQCETAFSQHLHLVCKKTSQNLHLVCKKTHTQEKPYKCSDCEKGLPSSSHLRECVRIYGGERPYTHKEYVETFSHSTALFVHMQTQDGEKFYECKACGKPFTESSYLTQHLRTHSRVLPIEHKKFGKAFAFSPDLAKHIRLRTRGKHYVCNECGKEFTCFSKLNIHIRVHTGEKPYECNKCGKAFTDSSGLIKHRRTHTGEKPYECKECGKAFANSSHLTVHMRTHTGEKPYQCKECGKAFINSSSFKSHMQTHPGVKPYDCQQCGKAFIRSSFLIRHLRSHSAERPFECEECGKAFRYSSHLSQHKRIHTGERPYKCQKCGQAFSISSGLTVHMRTHTGERPFECQECGKAFTRSTYLIRHLRSHSVEKPYKECGQTFSNSSCLTECV

SEQ ID NO: 56040 - protein, 201 aa, Homo sapiens
  MOD_RES (1)..(1): Any amino acid
XGGGNGHKPGCEKPGNEARGSGESGIQGFRGQGVSSNMREISKEGNRLLGGSGDNYRNSETSPGMFNFDTFWKNFKSKLGFINWDAINKNQVPPPSTRALLYFSRLWEDFKQNTPFLNWKAIIEGADASSLQKRAGRDDQPGAGWQEVAAVTSKNYNYNQHAYPTAYGGKYSVKTPAKGGVSPSSSASRVQPGLLQWVKFW

SEQ ID NO: 56041 - protein, 134 aa, Homo sapiens
MSWKKALRIPGGLRAATVTLMLAMLSTPVAEGRDSPVEPTVTISPSRTEALNHHNLLVCSVTDFYPAQIKVRWFRNDQEETTGVVSTPLIRNGDWTFQILVMLEMTPQHGDVYTCHVEHPSLQNPITVEWRLLH

SEQ ID NO: 56042 - protein, 36 aa, Homo sapiens
YKQRASRLVQRRQDDIKDESSEFSSHSSQSILKTKL

SEQ ID NO: 56043 - protein, 403 aa, Homo sapiens
AKKLTNALSKSLSCASSREPLHPMFPDQPEKPLNLAHIVPPRPVTSMNDTLFSHSVPSSGSPFITRSMLESSNRLDEEHRLIARYAARLAAESSSSVHILNMKSYKLHILQQPPQQRSAPDISFTIDANKQQRQLIAELENKNREILQEIQRLRLEHEQASQPTPEKAQQNPTLLAELRLLRQRKDELEQRMSALQESRRELMVQLEGLMKLLKTQGAGSPRSSPSHTISRPIPMPIRSASACSTPTHTPQDSLTGVGGDVQEAFAQSSRRNLRNDLLVAADSITNTMSSLVKELNSEVGSETESNVDSEFARTQFEDLVPSPTSEKAFLAQIHARKPGYIHSGATTSTMRGDMVTEDADPYVQPEDENYENDSVRQLENELQMEEYLKQKLQDEAYQVSLQG

SEQ ID NO: 56044 - protein, 80 aa, Homo sapiens
  MOD_RES (1)..(1): Any amino acid
XCGNMAREGLRTLVVAKKALTEEQYQDFEVPQGGRGSREPGEGDGTAVPHRRGGPAAGRRAAHAGDAAQRRDQDMDANRR

SEQ ID NO: 56045 - protein, 56 aa, Homo sapiens
MAEYDLTTRIAHFLDRHLVFPLLEFLSVKEERWRGFYLYTALPRKGKRWFVGTHKK

SEQ ID NO: 56046 - protein, 288 aa, Homo sapiens
MADGPRCKRRKQANPRRNNVTNYNTVVETNSDSDDEDKLHIVEEESVTDAADCEGVPEDDLPTDQTVLPGRSSEREGNAKNCWEDDRTPDAFSQLLTCPYCDRGYKRFTSLKEHIKYRHEKNEDNFSCSLCSYTFAYRTQLERHMTSHKSGRDQRHVTQSGCNRKFKCTECGKAFKYKHHLKEHLRIHSGEKPYECPNCKKRFSHSGSYSSHISSKKCISLIPVNGRPRTGLKTSQCSSPSLSASPGSPTRPQIRQKIENKPLQEQLSVNQIKTEPVDYEFKPIVVAS

SEQ ID NO: 56047 - protein, 53 aa, Homo sapiens
  MOD_RES (1)..(1): Any amino acid
XHKRIHTGEKPYKCEECGKGFKCPSTLTTHKFFVYCREVAVLLENCYSHLYPH

SEQ ID NO: 56048 - protein, 574 aa, Homo sapiens
MENWPTPSELVNTGFQSVLSQGNKKPQNRKEKEEKVEKRSNSDSKENRETKLNGPGENVSEDEAQSSNQRKRGWKRDREKRDDQDDVSSVRSEGGNIRGSFRGRGRGRGRGRGRGRGNPRLNFDYSYGYQEHGERTDQPFQTELNTSMMYYYDDGTGVQVYPVEEALLKEYIKRQIEYYFSVENLERDFFLRGKMDEQGFLPISLIAGFQRVQALTTNLNLILEALKDSTEVEIVDEKMRKKIEPEKWPIPGPPPRSVPPTDFSQLIDCPEFVPGQAFCSHTESAPNSPRIGSPLSPKKNSETSILQAMSRGLSTSLPDLDSEPWIEVKKRHQPAPVKLRESVSVPEGSLNQLCSSEEPEQEELDFLFDEEIEQIGRKNTFTDWSDNDSDYEIDDQDLNKILIVTQTPPYVKKHPGGDRTGTHMSRAKITSELAKVINDGLYYYEQDLWMEEDENKHTAIKQEVENFKKLNLISKEQFENLTPELPFEPNQEVPVAPSQSRQDLTDELAQKLFDVSEITSAAMVHSLPTAVPESPRIHPTRTPKTPRTPRLQDPNKTPRFYPVVKEPKAIDVKS

SEQ ID NO: 56049 - protein, 72 aa, Homo sapiens
MARRGPGWRPLLLLVLLAGAAQGGLYFRRGQTCYRPLRGDGLAPLGRRSDQHQEEGSVALHPPVRAERHRLR

SEQ ID NO: 56050 - protein, 110 aa, Homo sapiens
MRSECVLGAASDSGQEAPRDTWFLQGWKASRRFLIKGSVAGGAVYLVYDQELLGPSDKSQAALQKAGEVVPPAMYQFSQYVCQQTGLQIPQLPAPPKIYFPIRDSWNAGI

SEQ ID NO: 56051 - protein, 50 aa, Homo sapiens
MPQGLLSSELSPVSFRGKIPGFCREGNLGTHKGRTPCEDGGRDWGDRPTS

SEQ ID NO: 56052 - protein, 400 aa, Homo sapiens
MEGESKQLLCDVMIVAEDVEIEAHRVVLAACSPYFCAMFTGDMSESKAKKIEIKDVDGQTLSKLIDYIYTAEIEVTEENVQVLLPAASLLQLMDVRQNCCDFLQSQLHPTNCLGIRAFADVHTCTDLLQQANAYAEQHFPEVMLGEEFLSLSLDQVCSLISSDKLTVSSEEKVFEAVISWINYEKETRLEHMAKLMEHVRLPLLPRDYLVQTVEEEALIKNNNTCKDFLIEAMKYHLLPLDQRLLIKNPRTKPRTPVSLPKVMIVVGGQAPKAIRSVECYDFEEDRWDQIAELPSRRCRAGVVFMAGHVYAVGGFNGSLRVRTVDVYDGVKDQWTSIASMQERRSTLGAAVLNDLLYAVGGFDGSTGLASVEAYSYKTNEWFFVAPMNTRRSSVGVGVVE

SEQ ID NO: 56053 - protein, 325 aa, Homo sapiens
MSMSPTVIILACLGFFLDQSVWAHVGGQDKPFCSAWPSAVVPQGGHVTLRCHYRRGFNIFTLYKKDGVPVPELYNRIFWNSFLISPVTPAHAGTYRCRGFHPHSPTEWSAPSNPLVIMVTGLYEKPSLTARLGPTVRAGENVTLSCSSQSSFDIYHLSREGEAHELRLPAVPSINGTFQADFPLGPATHGETYRCFGSFHGSPYEWSDPSDPLPVSVTDAAVMNQEPAGHRTVNREDSDEQDPQEVTYAQLDHCIFTQRKITGPSQRSKRPSTDTSVCIELPNAEPRALSPAHEHHSQALMGSSRETTALSQTQLASSNVPAAGI

SEQ ID NO: 56054 - protein, 162 aa, Homo sapiens
MKTIEVDGIKVRIQIWDTAGQERYQTITKQYYRRAQGIFLVYDISSERSYQHIMKWVSDVDEVGDATSLPGCGEGASPGKARRGPDGKANASRKLCLPQPWMKTSGTHQKASRRSLLGIRLMRSRNGRWEESKGSSWRRSMAWTSMKQVPAPTSTLKSHSRV

SEQ ID NO: 56055 - protein, 205 aa, Homo sapiens
MNGPADGEVDYKKKYRNLKRKLKFLIYEHECFQEELRKAQRKLLKVSRDKSFLLDRLLQYENVDEDSSDSDATASSDNSETEGTPKLSDTPAPKRKRSPPLGGAPSPSSLSLPPSTGFPLQASGVPSPYLSSMAVGPPDCPVGGPLTFPGRGSGAGVGTTLTPLPPPKMPPPTILSTVPRQMFSDAGSGDDALDGDDDLVIDIPE

SEQ ID NO: 56056 - protein, 144 aa, Homo sapiens
  MOD_RES (1)..(1): Any amino acid
XVEKDHLAKPFFPAIYKEFEELHKMVKKMCQDYLSSSGLCSQETLEINNDKVAESLGITEFLRKKEIHPDNLGPKHLSRDMDGEQLEGASSEKREREAAEEGLASVKRPRREALSNDTTESLAANSRGREKPRPLHALAAVRRA

SEQ ID NO: 56057 - protein, 235 aa, Homo sapiens
  MOD_RES (1)..(1): Any amino acid
XSLLSSWDYRHASDSHTCVKTKHNEIMAIFFTSGTSGYPKMTAHTHSSFGLGLSVNGRFWLDLTPSDVMWNTSDTGWAKSAWSSVFSPWIQGACVFTHHLPRFEPTSILQTLSKYPITVFCSAPTVYRMLVQNDITSYKFKSLKHCVSAGEPITPDVTEKWRNKTGLDIYEGYGQTETVLICGNFKGMKIKPGSMGKPSPAFDVKVCTSPSRRMFNNPICTLPTYRLPPYKLSLL

SEQ ID NO: 56058 - protein, 206 aa, Homo sapiens
  MOD_RES (1)..(1): Any amino acid
XCSEEEHPMEGPAHLTLNSEVGSLLFSEGGAGRGGAGDVHQPTKGKEEFVATFKGNEFFCYDLSHNPIQSSTDEITLAFRTLQRNGLMLHTGKSADYVNLSLKSGAVWLVINLGSGAFEALVEPVNGKFNDNAWHDVRVTRNLRQVTISVDGILTTTGYTQEDYTMLGSDDFFYIGGSPNTADLPGSPVSNNFMGCLKDVVYKNND

SEQ ID NO: 56059 - protein, 382 aa, Homo sapiens
MTPALTALLCLGLSLGPRTRVQAGPFPKPTLWAEPGSVISWGSPVTIWCQGSLEAQEYQLDKEGSPEPLDRNNPLEPKNKARFSIPSMTQHHAGRYRCHYYSSAGWSEPSDPLELVMTGFYNKPTLSALPSPVVASGGNMTLRCGSQKGYHHFVLMKEGEHQLPRTLDSQQLHSGGFQALFPVGPVTPSHRWRFTCYYYYTNTPRVWSHPSDPLEILPSGQIYDTVSLSAQPGPTVASGENVTLLCQSRGYFDTFLLTKEGAAHPPLRLRSMYGAHKYQAEFPMSPVTSAHAGTYRCYGSYSSNPHLLSFPSEPLELMVSGHSGGSSLPPTGPPSTPASHAKDYTVENLIRMGMAGLVLVFLGILLFEAQHSQRNPQDAAGR

SEQ ID NO: 56060 - protein, 702 aa, Homo sapiens
MASSVAPYEQLVRQVEALKAENSHLRQELRDNSSHLSKLETETSGMKEVLKHLQGKLEQEARVLVSSGQTEVLEQLKALQMDITSLYNLKFQPPTLGPEPAARTPEGSPVHGSGPSKDSFGELSRATIRLLEELDRERCFLLNEIEKEEKEKLWYYSQLQGLSKRLDELPHVETQFSMQMDLIRQQLEFEAQHIRSLMEERFGTSDEMVQRAQIRASRLEQIDKELLEAQDRVQQTEPQALLAVKSVPVDEDPETEVPTHPEDGTPQPGNSKVEVVFWLLSMLATRDQEDTARTLLAMSSSPESCVAMRRSGCLPLLLQILHGTEAAAGGRAGAPGAPGAKDARMRANAALHNIVFSQPDQGLARKEMRVLHVLEQIRAYCETCWDWLQARDGGPEGGGAGSAPIPIEPQICQATCAVMKLSFDEEYRRAMNELGGLQAVAELLQVDYEMHKMTRDPLNLALRRYAGMTLTNLTFGDVANKATLCARRGCMEAIVAQLASDSEELHQVVSSILRNLSWRADINSKKVLREAGSVTALVQCVLRATKESTLKSVLSALWNLSAHSTENKAAICQVDGALGFLVSTLTYKCQSNSLAIIESGGGILRNVSSLVATREDYRQVLRDHNCLQTLLQHLTSHSLTIVSNACGTLWNLSARSARDQELLWDLGAVGMLRNLVHSKHKMIAMGSAAALRNLLAHRPAKH

SEQ ID NO: 56061 - protein, 248 aa, Homo sapiens
MERRRITSAARRSYVSSGEMMVGGLAPGRRLGPGTRLSLARMPPPLPTRVDFSLAGALNAGFKETRASERAEMMELNDRFASYIEKVRFLEQQNKALAAELNQLRAKEPTKLADVYQAELRELRLRLDQLTANSARLEVERDNLAQDLATVRQKLQDETNLRLEAENNLAAYRQEADEATLARLDLERKIESLEEEIRFLRKIHEEEYQDLLNVKLALDIEIATYRKLLEGEENRITIPVQTFSNLQI

SEQ ID NO: 56062 - protein, 48 aa, Homo sapiens
MSDNDDIEVESDADKRAHHNALERKRRDHIKDSFHSLRDSVPSLQGEK

SEQ ID NO: 56063 - protein, 1517 aa, Homo sapiens
MEAATTLHPGPRPALPLGGPGPLGEFLPPPECPVFEPSWEEFADPFAFIHKIRPIAEQTGICKVRPPPDWQPPFACDVDKLHFTPRIQRLNELEAQTRVKLNFLDQIAKYWELQGSTLKIPHVERKILDLFQLNKLVAEEGGFAVVCKDRKWTKIATKMGFAPGKAVGSHIRGHYERILNPYNLFLSGDSLRCLQKPNLTTDTKDKEYKPHDIPQRQSVQPSETCPPARRAKRMRAEAMNIKIEPEETTEARTHNLRRRMGCPTPKCENEKEMKSSIKQEPIERKDYIVENEKEKPKSRSKKATNAVDLYVCLLCGSGNDEDRLLLCDGCDDSYHTFCLIPPLHDVPKGDWRCPKCLAQECSKPQEAFGFEQAARDYTLRTFGEMADAFKSDYFNMPVHMVPTELVEKEFWRLVSTIEEDVTVEYGADIASKEFGSGFPVRDGKIKLSPEEEEYLDSGWNLNNMPVMEQSVLAHITADICGMKLPWLYVGMCFSSFCWHIEDHWSYSINYLHWGEPKTWYGVPGYAAEQLENVMKKLAPELFVSQPDLLHQLVTIMNPNTLMTHEVPVYRTNQCAGEFVITFPRAYHSGFNQGFNFAEAVNFCTVDWLPLGRQCVEHYRLLHRYCVFSHDEMICKMASKADVLDVVVASTVQKDMAIMIEDEKALRETVRKLGVIDSERMDFELLPDDERQCVKCKTTCFMSAISCSCKPGLLVCLHHVKELCSCPPYKYKLRYRYTLDDLYPMMNALKLRAESYNEWALNVNEALEAKINKKKSLVSFKALIEESEMKKFPDNDLLRHLRLVTQDAEKCASVAQQLLNGKRQTRYRSGGGKSQNQLTVNELRQFVTQLYALPCVLSQTPLLKDLLNRVEDFQQHSQKLLSEETPSAAELQDLLDVSFEFDVELPQLAEMRIRLEQARWLEEVQQACLDPSSLTLDDMRRLIDLGVGLAPYSAVEKAMARLQELLTVSEHWDDKAKSLLKARPRHSLNSLATAVKEIEEIPAYLPNGAALKDSVQRARDWLQDVEGLQAGGRVPVLDTLIELVTRGRSIPVHLNSLPRLETLVAEVQAWKECAVNTFLTENSPYSLLEVLCPRCDIGLLGLKRKQRKLKEPLPNGKKKSTKLESLSDLERALTESKETASAMATLGEARLREMEALQSLRLANEGKLLSPLQDVDIKICLCQKAPAAPMIQCELCRDAFHTSCVAVPSISQGLRIWLCPHCRRSEKPPLEKILPLLASLQRIRVRLPEGDALRYMIERTVNWQHRAQQLLSSGNLKFVQDRVGSGLLYSRWQASAGQVSDTNKVSQPPGTTSFSLPDDWDNRTSYLHSPFSTGRSCIPLHGVSPEVNELLMEAQLLQVSLPEIQELYQTLLAKPSPAQQTDRSSPVRPSSEKNDCCRGKRDGINSLERKLKRRLEREGLSSERWERVKKMRTPKKKKIKLSHPKDMNNFKLERERSYELVRSAETHSLPSDTSYSEQEDSEDEDAICPAVSCLQPEGDEVSEVWAIEDVLSLNSETL

SEQ ID NO: 56064 - protein, 169 aa, Homo sapiens
MELELYGVDDKFYSKLDQEDALLGSYPVDDGCRIHVIDHSGARLGEYEDVSRVEKYTISQEAYDQRQDTVRSFLKRSKLGRYNEEERAQQEAEAAQRLAEEKAQASSIPVGSRCEVRAAGQSPRRGTVMYVGLTDFKPGYWIGVRYDEPLGKNDGSVNGKRYFECQAKY

SEQ ID NO: 56065 - protein, 93 aa, Homo sapiens
  MOD_RES (1)..(1): Any amino acid
XEVLDRLIQQGADAHSKELNKLPLPSKSVDWTHFGGSPPSDEIRTLRDQLLLLHNQLLYERFKRQQHALRNRRLLRKVIKAAALEEHNAAMIS

SEQ ID NO: 56066 - protein, 280 aa, Homo sapiens
KAIRSFLSKLESVSEDPTQLEEVEKDVHAASSPGMGGAAASWAGWAVTGVSSLTSKLIRSHPTTAPTETNIPQRPTPEGVPAPAPTPVPATPTTSGHWETQEEDKDTAEDSSTADRWDDEDWGSLEEAESVLAQQDDWSTGGQVSRASQVSNSDHKSSKSPESDWSSWEAEGSWEQGWQEPSSQEPPPDGTRLASEYNWGGPESSDKGDPFATLSARPSTQPRPDSWGEDNWEGLETDSRQVKAELARKKREERRREMEAKRAERKVAKGPMKLGARKLD

SEQ ID NO: 56067 - protein, 109 aa, Homo sapiens
MSAKAISEQTGKELLYKFICTTSAIQNRFKYARVTPDTDWARLLQDHPWLLSQNLVVKPDQLIKRRGKLGLVGVNLTLDGVKSWLKPRLGQEATVGKATGFLKNFLIEP

SEQ ID NO: 56068 - protein, 121 aa, Homo sapiens
  MOD_RES (1)..(1): Any amino acid
XALGEVEDEGLLASLFRDRFPEAQWRERPDVGRYLRELSGSGLERLRREPERLAEERAQLLQQTRDLAFANYKTFIRGAECTERIHRLFGDVEASLGRLLDRLPSFQQSCRCDAPGAKGVL

SEQ ID NO: 56069 - protein, 45 aa, Homo sapiens
MAGASVKVAVRVRPFNSREMSRDSKCIIQMSGSTTRSSGVSCTEW

SEQ ID NO: 56070 - protein, 917 aa, Homo sapiens
  MOD_RES (1)..(1): Any amino acid
XNNPVFRSTVDAVQGGRDVLRLYGYTEEQPDGLSFPEGQEEPDEHQVATVTLEVLLLRTELSLLLQNTHPRQQALEQLLEDKVEDDMLQLSEFDPLLREIAPGPLTTPSVPGSTPGPCFLCGSAPGTLHCPSCKQALCPACDHLFHGHPSRAHHLRQTLPGVLQGTHLSPSLPASAQPRPQSTSLLALGDSSLSSPNPASAHLPWHCAACAMLNEPWAVLCVACDRPRGCKGLGLGTEGPQGTGGLEPDLARGRWACQSCTFENEAAAVLCSICERPRLAQPPSLVVDSRDAGICLQPLQQGDALLASAQSQVWYCIHCTFCNSSPGWVCVMCNRTSSPIPAQHAPRPYASSLEKGPPKPGPPRRLSAPLPSSCGDPEKQRQDKMREEGLQLVSMIREARRAWLDRHGNLDEAVEECVRTRRRKVQELQSLGFGPEEGSLQALFQHGGDVSRALTELQRQRLEPFRQRLWDSGPEPTPSWDGPDKQSLVRRLLAVYALPSWGRAELALSLLQETPRNYELGDVVEAVRHSQDRAFLRRLLAQECAVCGWALPHNRMQALTSCECTICPDCFRQHFTIALKEKHITDMVCPACGRPDLTDDTQLLSYFSTLDIQLRESLEPDAYALFHKKLTEGVLMRDPKFLWCAQCSFGFIYEREQLEATCPQCHQTFCVRCKRQWEEQHRGRSCEDFQNWKRMNDPEYQAQGLAMYLQENGIDCPKCKFSYALARGGCMHFHCTQCRHQFCSGCYNAFYAKNKCPEPNCRVKKSLHGHHPRDCLFYLRDWTALRLQKLLQDNNVMFNTEPPAGARAVPGGGCRVIEQKEVPNGLRDEACGKETPAGYAGLCQAHYKEYLVSLINAHSLDPATLYEVEELETATERYLHVRPQPLAGEDPPAYQARLLQKLTEEVPLGQSIPRRRK

SEQ ID NO: 56071 - protein, 158 aa, Homo sapiens
WNSPKKLRVKNKHVEFFRNFYLTFLEYDGNLLRRELFVCPSQPPPGAEQLQQALAQLDEEDPCFEFRQQQLTVHRVHVTFLPHEPPPPRPHDVTLVAQLSMDRTWPTMWCTVRGPYTPSTSFATWPWPRPSRLTSSSVTLTSCLPILSTTTSGPPLSS

SEQ ID NO: 56072 - protein, 141 aa, Homo sapiens
MKRSSVSSGGAGRLSMQELRSQDVNKQGLYTPQTKEKPTFGKLSINKPTSERKVSLFGKRWSLALSPRLECSGAISAHCNLCLASSSNSPASASRVAGITELVDMDPGIVNLVYFPVLRKSRTRDHLMTKHSFSSVFDNSV

SEQ ID NO: 56073 - protein, 150 aa, Homo sapiens
MASSSGSKAEFIVGGKYKLVRKIGSGSFGDIYLAINITNGEEVAVKLESQKARHPQLLYESKLYKILQGGVGIPHIRVLFLLPRQECNSVISAHCNLGLPGSSNFPASAFQVAGLQMISRIEYVHTKNFIHRDIKPDNFLMGIGRHCNKL

SEQ ID NO: 56074 - protein, 245 aa, Homo sapiens
MPVDWKSSHTRTLHLLTLNLSEKGVSDSLLFDTSDDEELREQLDMHSIIVSCVNDEPLFTADQVIEEIEEMMQESPDPEDDETPTQSDRLSMLSQEIQTLKRSSTGSYEERVKRLSVSELNEILEEIETAIKEYSEELVQQLALRDELEFEKEVKNSFISVLIEVQNKQKEHKETAKKKKKLKNGSSQNGKNERSHMPGTYLTTVIPYEKKNGPPSVEDLQILTKILRAMKEDSEKVPSLLTDYI

SEQ ID NO: 56075 - protein, 866 aa, Homo sapiens
  MOD_RES (1)..(1): Any amino acid
XEVVLEGKFSNDDSSSYDKPITFLSLKLRLVNILIGALQTETDPNNTQMILGAMLNIVQDSALLEAIGCQMEMGGGENNLKSHSRTNSGISSASGGSTEPTTPDSERPAQALLRDYGSTALNTDSAAGLLIRSIHLVTQRLNSQWRQDMSISLAALELLSGLAKVKVMVDSGDRKRAISSVCTYIVYQCSRPAPLHSRDLHSMIVAAFQCLCVWLTEHPDMLDEKDCLKEVLEIVELGISGSKSKNNEQEVKYKGDKEPNPASMRVKDAAEATLTCIMQLLGAFPSPSGPASPCSLVNETTLIKYSRLPTINKHSFRYFVLDNSVILAMLEQPLGNEQNDFFPSVTVLVRGMSGRLAWAQQLCLLPRGAKANQKLFVPEPRPVPKNDVGFKYSVKHRPFPEEVDKIPFVKADLSIPDLHEIVTEELEERHEKLRSGMAQQIAYEIHLEQQSEEELQKRSFPDPVTDCKPPPPAQEFQTARLFLSHFGFLSLEALKEPANSRLPPHLIALDSTIPGFFDDIGYLDLLPCRPFDTVFIFYMKPGQKTNQEILKNVESSRTVQPHFLEFLLSLGWSVDVGRHPGWTGHVSTSWSINCCDDGEGSQQEEVISSEDIGASIFNGQKKVLYYADALTEIAFVVPSPVESLTDSLESNISDQDSDSNMDLMPGILKQPSLTLELFPNHTDNLNSSQRLSPSSRMRKLPQGRPVPPLGPETRVSVVWVERYDDIENFPLSELMTEISTGVETTANSSTSLRSTTLEKEVPVIFIHPLNTGLFRIKIQGATGKFNMVIPLVDGMIVSRRALGFLVRQTVINICRRKRLESDSYSPPHVRRKQKITDIVNKYRNKQLEPEFYTSLFQEVGLKNCSS

SEQ ID NO: 56076 - protein, 506 aa, Homo sapiens
MNQDGLGESAKNIEGSSGNTSLPLVLKKLLLSRDETLQVASAHCITAVLVHSPAKHASAFIHADIPEFLFEHLSSSSEVLVWSSCNCLTLLVEEPLFFSKCHTVYGIEAVVRSLQGSLKMNNIELHKQGLLLFAEILTRQPEEIKLFTSSAMCRDAGRALQEAVSSPVLEVAAEALKATSAFLRKDHQSTPPVQYGELQALLEAMLNRCAEFSQTLLSRRPLGHASSRDSEKAILQRGKFLLSTLEGFRSACRLAIEFQSEPSAQENPFTAPSAKKEDTLEAFSEFLLSACDSLCIPMVMRHLEQTTHPALMEVFLSILHNLFVIVPHMKEKFSKKLASSSFIRLTLELKARFCSGLSHSALNQVCSNFLYYMCLNLLSAPEKTGPPSKEELSAVSELLQHGLPQISSRSPESLAFLSDRQYMEGAARQRQYCILLLFYLAYIHEDRFVSEAELFEAVQSFLLSLQDQGERPPLVVFKASIYLLAICQDKDNTLREQLHCSLISIS

SEQ ID NO: 56077 - protein, 143 aa, Homo sapiens
  MOD_RES (1)..(1): Any amino acid
XNFVRVPYFIDLKKPQDQGLNHTCNYYLQPEEDVTIGVWHTVPAVWWKNAQGKDQMWYEDALASSHPIILYLHGNAGTRGGDHRVELYKVLSSLGYHVVTFDYRAWRQIWCGASVSERRLQMPLYWNLHSLISAKKLRAIHFQ

SEQ ID NO: 56078 - protein, 181 aa, Homo sapiens
MEGAVLEAGGARCFCRFGCELSKYENPGYSSPRSDYFKNYMIIITQNRMSFLANMFHTMDFNFVSRYSCGPTVYDHAHLGHACSYVRFDIIRRILTKVFGCSIVMVMGITDVDDKIIKRANEMNISPASLASLYEEDFKQDMAALKVLPPTVYLRVTENIPQIISFIEGIIARGNAYSTAK

SEQ ID NO: 56079 - protein, 434 aa, Homo sapiens
MSILKIHAREIFDSRGNPTVEVDLFTSKGLFRAAVPSGASTGIYEALELRDNDKTRYMGKGVSRPIKYINEFLAPALCTQKLNVTEQEKIDKLMIEMDGTENKSKFGANAILGVSLAVCKAGAVEKGVPLYRHIADLAGNSEVILPVPAFNVINGGSHAGNKLAMQEFMILPVGAANFREAMRIGAEVYHNLKNVIKEKYGKDATNVGDEGGFAPNILENKEGLELLKTAIGKAGYTDKVVIGMDVAASEFFRSGKYDLDFKSPDDPSRYISPDQLADLYKSFIKDYPVVSIEDPFDQDDWGAWQKFTASAGIQVVGDDLTVTNPKRIAKAVNEKSCNCLLLKVNQIGSVTESLQACKLAQANGWGVMVSHRSGETEDTFIADLVVGLCTGQIKTGAPCRSERLAKYNQLLRIEEELGSKAKFAGRNFRNPLAK

SEQ ID NO: 56080 - protein, 70 aa, Homo sapiens
MPVPWFLLSLALGRSPVVLSLERLVGPQDATHCSPGLSCRLWVTYSACLGTSCLLRAPCWRLRTCRQSWC

SEQ ID NO: 56081 - protein, 734 aa, Homo sapiens
MKTPWKVLLGLLGAAALVTIITVPVVLLNKGTDDATADSRKTYTLTDYLKNTYRLKLYSLRWISDHEYLYKQENNILVFNAEYGNSSVFLENSTFDEFGHSINDYSISPDGQFILLEYNYVKQWRHSYTASYDIYDLNKRQLITEERIPNNTQWVTWSPVGHKLAYVWNNDIYVKIEPNLPSYRITWTGKEDIIYNGITDWVYEEEVFSAYSALWWSPNGTFLAYAQFNDTEVPLIEYSFYSDESLQYPKTVRVPYPKAGAVNPTVKFFVVNTDSLSSVTNATSIQITAPASMLIGDHYLCDVTWATQERISLQWLRRIQNYSVMDICDYDESSGRWNCLVARQHIEMSTTGWVGRFRPSEPHFTLDGNSFYKIISNEEGYRHICYFQIDKKDCTFITKGTWEVIGIEALTSDYLYYISNEYKGMPGGRNLYKIQLSDYTKVTCLSCELNPERCQYYSVSFSKEAKYYQLRCSGPGLPLYTLHSSVNDKGLRVLEDNSALDKMLQNVQMPSKKLDFIILNETKFWYQMILPPHFDKSKKYPLLLDVYAGPCSQKADTVFRLNWATYLASTENIIVASFDGRGSGYQGDKIMHAINRRLGTFEVEDQIEAARQFSKMGFVDNKRIAIWGWSYGGYVTSMVLGSGSGVFKCGIAVAPVSRWEYYDSVYTERYMGLPTPEDNLDHYRNSTVMSRAENFKQVEYLLIHGTADDNVHFQQSAQISKALVDVGVDFQAMV

SEQ ID NO: 56082 - protein, 235 aa, Homo sapiens
MVEKEEAGGGISEEEAAQYDRQIRLWGLEAQKRLRASRVLLVGLKGLGAEIAKNLILAGVKGLTMLDHEQVTPEDPGAQFLIRTGSVGRNRAEASLERAQNLNPMVDVKVDTEDIEKKPESFFTQFDAVCLTCCSRDVIVKVDQICHKNSIKFFTGDVFGYHGYTFANLGEHEFVEEKTKVAKVSQGVEDGPDTKRAKLDSSETTMVKKAGVAQSQLTATSTSQVQEIFLPQPPK

SEQ ID NO: 56083 - protein, 62 aa, Homo sapiens
DMQDYGLIIDGAALSLIMKPREDGSSGNYRELFLEICRSCSAVLCCRMAPLQKAQVLPARPR

SEQ ID NO: 56084 - protein, 111 aa, Homo sapiens
MSDPYMPSYYAPSIGFPYSLGEAAWSTAGDQPMPYLTTYGQMSNGEHHYIPDGVFSQPGALGNTPPFLGQHGFNFFPGNADFSTWGTSGSQGQSTQSSAYSSSYGYPPSSL

SEQ ID NO: 56085 - protein, 46 aa, Homo sapiens
MASRKEGTGSTATSSSSTAGAAGKGKGKGGSGDSAVKQVQIDGLFS

SEQ ID NO: 56086 - protein, 47 aa, Homo sapiens
MRAGPGPTVTLALVLAVSWAMELKPTAPPIFTGRPFVVAWDVPTQDC

SEQ ID NO: 56087 - protein, 803 aa, Homo sapiens
ETLALLKAQIDPVLLKNSSQQDNSSRESPSLEDEETKKEEETPKQEEQKESEKMKSEEQPMDLENRSTANVLEETTVKKEKEDEKELVKLPVIVKLEKPLPENEEKKIIKEESDSFKENVKPIKVEVKECRADPKDTKSSMEKPVAQEPERIEFGGNIKSSHEITEKSTEETEKLKNDQQAKIPLKKREIKLSDDFDSPVKGPLCKSVTPTKEFLKDEIKQEEETCKRISTITALGHEGKQLVNGEVSDERVAPNFKTEPIETKFYETKEESYSPSKDRNIITEGNGTESLNSVITSMKTGELEKETAPLRKDADSSISVLEIHSQKAQIEEPDPPEMETSLDSSEMAKDLSSKTALSSTESCTMKGEEKSPKTKKDKRPPILECLEKLEKSKKTFLDKDAQRLSPIPEEVPKSTLESEKPGSPEAAETSPPSNIIDHCEKLASEKEVVECQSTSTVGGQSVKKVDLETLKEDSEFTKVEMDNLDNAQTSGIEEPSETKGSMQKSKFKYKLVPEEETTASENTEITSERQKEGIKLTIRISSRKKKPDSPPKVLEPENKQEKTEKEEEKTNVGRTLRRSPRISRPTAKVAEIRDQKADKKRGEGEDEVEEESTALQKTDKKEILKKSEKDTNSKVSKVKPKGKVRWTGSRTRGRWKYSSNDESEGSGSEKSSAASEEEEEKESEEAILADDDEPCKKCGLPNHPELILLCDSCDSGYHTACLRPPLMIIPDGEWFCPPCQHKLLCEKLEEQLQDLDVALKKKERAERRKERLVYVGISIENIIPPQEPDFSEDQEEKKKDSKK

SEQ ID NO: 56088 - protein, 1090 aa, Homo sapiens
  MOD_RES (1)..(1): Any amino acid
XRLSYNVREKDIQRFFSGYGRLLEVDLKNGYGFVEFEDSRDADDAVYELNGKELCGERVIVEHARGPRRDRDGYSYGSRSGGGGYSSRRTSGRDKYGPPVRTEYRLIVENLSSRCSWQDLKDFMRQAGEVTYADAHKERTNEGVIEFRSYSDMKRALDKLDGTEINGRNIRLIEDKPRTSHRRSYSGSRSRSRSRRRSRSRSRRSSRSRSRSISKSRSRPARMEGHAGMEGHAEMEMLRTLKGPSTGEVSMHLVAGDSPGSGPHLPATAFIIPASSATLGLPSSALDVSCFPREPIHVGAPEQVAGCEPVSATVLPQLSAGPASSSTSTVRLLEWTEAAAPPPGGGLRFRISEYKPLNMAGVEQPPSPELRQEGVTEYEDGGAPAGDGEAGPQQAEDHPQNPPEDPNQDPPEDDSTCQCQACGPHQAAGPDLGSSNDGCPQLFQERSVIVENSSGSTSASELLKPMKKRKRREYQSPSEEESEPEAMEKQEEGKDPEGQPTASTPESEEWSSSQPATGEKKECWSWESYLEEQKAITAPVSLFQDSQAVTHNKNGFKLGMKLEGIDPQHPSMYFILTVAEVCGYRLRLHFDGYSECHDFWVNANSPDIHPAGWFEKTGHKLQPPKGYKEEEFSWSQYLRSTRAQAAPKHLFVSQSHSPPPLGFQVGMKLEAVDRMNPSLVCVASVTDVVDSRFLVHFDNWDDTYDYWCDPSSPYIHPVGWCQKQGKPLTPPQDYPDPDNFCWEKYLEETGASAVPTWAFKVRPPHSFLVNMKLEAVDRRNPALIRVASVEDVEDHRIKIHFDGWSHGYDFWIDADHPDIHPAGWCSKTGHPLQPPLGPREPSSASPGGCPPLSYRSLPHTRTSKYSFHHRKCPTPGCDGSGHVTGKFTAHHCLSGCPLAERNQSRLKAELSDSEASARKKNLSGFSPRKKPRHHGRIGRPPKYRKIPQEDFQTLTPDVVHQSLFMSALSAHPDRSLSVCWEQHCKLLPGVAGISASTVAKWTIDEVFGFVQTLTGCEDQARLFKDEARIVRVTHVSGKTLVWTVAQLGDLVCSDHLQEGKGILETGVHSLLCSLPTHLLAKLSFASDSQY

SEQ ID NO: 56089 - protein, 65 aa, Homo sapiens
MDPGSRWRNLPSGPSLKHLTDPSYGIPREQQKAALQELTRAHVESFNYAVHEGLGLAVQEFQCTV

SEQ ID NO: 56090 - protein, 47 aa, Homo sapiens
MAQSSPQLDIQVLHDLRQRFPEIPEGVVSQCMLQNNNNLEACCRALS

SEQ ID NO: 56091 - protein, 139 aa, Homo sapiens
MQAACWYVLFLLQPTVYLVTCANLTNGGKSELLKSGSSKSTLKHIWTESSKDLSISRLLSQTFRGKENDTDLDLRYDTPEPYSEQDLWDWLRNSTDLQEPRPRAKRRPIVKTGKFKKMFGWGDFHSNIKTVKLNLLITG

SEQ ID NO: 56092 - protein, 629 aa, Homo sapiens
MEQTVLVPPGPDSFNFFTRESLAAIERRIAEEKAKNPKPDKKDDDENGPKPNSDLEAGKNLPFIYGDIPPEMVSEPLEDLDPYYINKKTFIVLNKGKAIFRFSATSALYILTPFNPLRKIAIKILVHSLFSMLIMCTILTNCVFMTMSNPPDWTKNVEYTFTGIYTFESLIKIIARGFCLEDFTFLRDPWNWLDFTVITFAYVTEFVDLGNVSALRTFRVLRALKTISVIPGLKTIVGALIQSVKKLSDVMILTVFCLSVFALIGLQLFMGNLRNKCIQWPPTNASLEEHSIEKNITVNYNGTLINETVFEFDWKSYIQDSRYHYFLEGFLDALLCGNSSDAGQCPEGYMCVKAGRNPNYGYTSFDTFSWAFLSLFRLMTQDFWENLYQLTLRAAGKTYMIFFVLVIFLGSFYLINLILAVVAMAYEEQNQATLEEAEQKEAEFQQMIEQLKKQQEAAQQAATATASEHSREPSAAGRLSDSSSEASKLSSKSAKERRNRRKKRKQKEQSGGEEKDEDEFQKSESEDSIRRKGFRFSIEGNRLTYEKRYSSPHQSLLSIRGSLFSPRRNSRTSLFSFRGRAKDVGSENDFADDEHSTFEDNESRRDSLFVPRRHGERRNSNLSQTRNNH

SEQ ID NO: 56093 - protein, 181 aa, Homo sapiens
MDILSLLMFGIPLKNTDPRVLEKQELQQPTYVALSYINRFMTDAARREQESLKKKIQPKLSLTLSSSVSRGNVSTPPRHSSGSLTPPVTPPITPSSSFRSSTPTGSEYDEEEVDYEESDSDESWTTESAISSEAILSSMCMNGGEEKPFACPVPGCKKRYKNVNGIKYHAKNGHRTQIRVR

SEQ ID NO: 56094 - protein, 93 aa, Homo sapiens
MVSKSRWKLLAMLALVLVVMVWYSISREDRYIELFYFPIPEKKEPCLQGEAESKASKLFGNYSRDQPIFLRLEDYFWVKTPSAYELPYGTKGS

SEQ ID NO: 56095 - protein, 403 aa, Homo sapiens
MAIPGIPYERRLLIMADPRDKALQDYRKKLLEHKEIDGRLKELREQLKELTKQYEKSENDLKALQSVGQIVGEVLKQLTEEKFIVKATNGPRYVVGCRRQLDKSKLKPGTRVALDMTTLTIMRYLPREVDPLVYNMSHEDPGNVSYSEIGGLSEQIRELREVIELPLTNPELFQRVGIIPPKGCLLYGPPGTGKTLLARAVASQLDCNFLKVVSSSIVDKYIGESARLIREMFNYARDHQPCIIFMDEIDAIGGRRFSEGTSADREIQRTLMELLNQMDGFDTLHRVKMIMATNRPDTLDPALLRPGRLDRKIHIDLPNEQARLDILKIHAGPITKHGEIDYEAIVKLSDGFNGADLRNVCTEAGMFAIRADHDFVVQEDFMKAVRKVADSKKLESKLDYKPV

SEQ ID NO: 56096 - protein, 185 aa, Homo sapiens
MSIGPNFQLGLKDGIILCELINKLQPGSVKKVNESSLNWPQLENIGNFIKAIQAYGMKPHDIFEANDLFENGNMTQVQTTLVALAGLAKTKGFHTTIDIGVKYAEKQTRRFDEGKLKAGQSVIGLQMGTNKCASQAGMTAYGTRRHLYDPKMQTDKPFDQTTISLQMGTNKGASQAGMLAPGTRR

SEQ ID NO: 56097 - protein, 77 aa, Homo sapiens
ISVRGQDRLIISTPNQRNEKPTQSVSSPEATSGSTGSVEKKQQRRSIRTRSESEKSTEVVPKKKIKKEQVGFLHVES

SEQ ID NO: 56098 - protein, 61 aa, Homo sapiens
MSTEGGGRRCQAQVSRRISFSASHRLYSKFLSDEENLKLFGKCNNPNGHGHNYKGGDYAAP

SEQ ID NO: 56099 - protein, 145 aa, Homo sapiens
MDEIEHDITKARQKKTKVGSFRINPDGTQERRKIPLAQSEAFLTDLLEKVCERMNDYKLEEDPVTKERTFKRFAPRKGDKIYQEFKKLYFYSDAYRPLKFACETIIEEYEDEISSLIAQETHYLADKLCSEKSDLCETSANHTEL

SEQ ID NO: 56100 - protein, 56 aa, Homo sapiens
  MOD_RES (1)..(1): Any amino acid
XISRNQEGPGEMGKAVLIPKDDQEKMKELFKINQFNLMASDLIALNRSLPDVRLEG

SEQ ID NO: 56101 - protein, 187 aa, Homo sapiens
MGRRAQQESAQAENHLNGKNSSLTLTGETSSAKLPRCRQGGWAGDSVKASKFRRKASEEIEDFRLRPQSLNGSDYGGDIPIIPDLEEVQEEDFVLQVAAPPSIQIKRVMTYRDLDNDLMKYSAIQTLDGEIDLKLLTKVLAPEHEVREDDVGWDWDHLFTEVSSEVLTEWDPLQTEKEDPAGQARHT

SEQ ID NO: 56102 - protein, 166 aa, Homo sapiens
MSGCFPVSGLRCLSRVCHGLVREALTSPSPTASPAARLLRTLAETPPADTFLLGNWCWMCQRLWPWPANQPLPGGLLPRPLSLAPSSSSSCCSPPCSQDGRMAAQGAPRFLLTFDFDETIVDENSDDSIVRAAPGQRLPESLRATYREGFYNEYMQRVFKYLGEQG

SEQ ID NO: 56103 - protein, 113 aa, Homo sapiens
MESGSTAASEEARSLRECELYVQKHNIQALLKDSIVQLCTARPERPMAFLREYFERLEKEEAKQIQNLQKAGTRTDSREDEISPPPPNPVVKGRRRRGAISAEVYTEEDAASY

SEQ ID NO: 56104 - protein, 37 aa, Homo sapiens
MSLLDCFCTSRTQVESLRPEKQSETSIHQYLEEDLTT

SEQ ID NO: 56105 - protein, 89 aa, Homo sapiens
MGEPGFFVTGDRAGGRSWCLRRVGMSAGWLLLEDGCEVTVGRGFGVTYQLVSKICPLMISRNHCVLKQNPEGQWTIMDNKGTTSLSKER

SEQ ID NO: 56106 - protein, 95 aa, Homo sapiens
  MOD_RES (1)..(1): Any amino acid
XQNYFADGVLSLGELQELFSGIDGHLTDNLETEKLCDYFSEHLGVYRPVLAALESLNRAVLAAMDATKLVSGVADGGGSTVRQWASAVLWDPPQS

SEQ ID NO: 56107 - protein, 140 aa, Homo sapiens
  MOD_RES (1)..(1): Any amino acid
XVDLGSGDGRIVLAAHRCGLRPAVGYELNPWLVALARLHAWRAGCAGSVCYRRKDLWKLPLLEDKLRTELPAGARVVSGRFPLPTWQPVTAVGEGLDRVWAYDVPEGGQAGEAASSRIPIQAAPGPSSAPIPGGLISQAS

SEQ ID NO: 56108 - protein, 641 aa, Homo sapiens
MERGLPLLCAVLALVLAPAGAFRNDKCGDTIKIESPGYLTSPGYPHSYHPSEKCEWLIQAPDPYQRIMINFNPHFDLEDRDCKYDYVEVFDGENENGHFRGKFCGKIAPPPVVSSGPFLFIKFVSDYETHGAGFSIRYEIFKRGPECSQNYTTPSGVIKSPGFPEKYPNSLECTYIVFVPKMSEIILEFESFDLEPDSNPPGGMFCRYDRLEIWDGFPDVGPHIGRYCGQKTPGRIRSSSGILSMVFYTDSAIAKEGFSANYSVLQSSVSEDFKCMEALGMESGEIHSDQITASSQYSTNWSAERSRLNYPENGWTPGEDSYREWIQVDLGLLRFVTAVGTQGAISKETKKKYYVKTYKIDVSSNGEDWITIKEGNKPVLFQGNTNPTDVVVAVFPKPLITRFVRIKPATWETGISMRFEVYGCKITDYPCSGMLGMVSGLISDSQITSSNQGDRNWMPENIRLVTSRSGWALPPAPHSYINEWLQIDLGEEKIVRGIIIQGGKHRENKVFMRKFKIGYSNNGSDWKMIMDDSKRKAKSFEGNNNYDTPELRTFPALSTRFIRIYPERATHGGLGLRMELLGCEVEGTINTDQECPCARALAKDAKKKKRWADSTHCRCVRSIHGEMWSSGKGVCSLDANL

SEQ ID NO: 56109 - protein, 112 aa, Homo sapiens
MASADKNGGSVSSVSSSRLQSRKPPNLSITIPPPEKETQAPGEQDSMLPERKNPAYLKSVSLQEPRSRWQESSEKRPGFRRQASLSQSIRKGAAQWFGVSGDWEGQRQQWQR

SEQ ID NO: 56110 - protein, 80 aa, Homo sapiens
MASDEGKLFVGGLSFDTNEQSLEQVFSKYGQISEVVVVKDRETQRSRGFGFVTFENIDDAKDAMMAMNGKSVDGRQIRVD

SEQ ID NO: 56111 - protein, 173 aa, Homo sapiens
  MOD_RES (1)..(1): Any amino acid
XNEETFGYEVPIKEEGDYVLVLKFAEVYFAQSQQKVFDVRLNGHVVVKDLDIFDRVGHSTAHDEIIPMSIRKGKLSVQGEVSTFTGKLYIEFVKMYQSFSLIRDWRRKKRKKKKKNMMKGLISKNRPIRTGCSQAPAHPTPMPRTTAASCFPSWWPSESSFQPSSASAGCENK

SEQ ID NO: 56112 - protein, 146 aa, Homo sapiens
MDGKVAVQECGPPAVSWVPEEGEKLDQEDEDQVKDRGQWTNKMEFVLSVAGEIIGLGNVWRFPYLCYKNGGGAFFIPYFIFFFVCGIPVFFLEVALGQYTSQGSVTAWRKICPLFQGIGLASVVIESYLNVYYIIILAWALFYLFS

SEQ ID NO: 56113 - protein, 240 aa, Homo sapiens
MADQAPFDTDVNTLTRFVMEEGRKARGTGELTQLLNSLCTAVKAISSAVRKAGIAHLYGIAGSTNVTGDQVKKLDVLSNDLVMNMLKSSFATCVLVSEEDKHAIIVEPEKRGKYVVCFDPLDGSSNIDCLVSVGTIFGIYRKKSTDEPSEKDALQPGRNLVAAGYALYGSATMLVLAMDCGVNCFMLDPFPESLAGVSGPQDEWCPCAATPAQRSPAHRSPHPGLGDPVRSSSLHLSFLV

SEQ ID NO: 56114 - protein, 200 aa, Homo sapiens
MRFCPFAERTRLVLKAKGIRHEVININLKNKPEWFFKKNPFGLVPVLENSQGQLIYESAITCEYLDEAYPGKKLLPDDPYEKACQKMILELFSKVPSLVGSFIRSQNKEDYAGLKEEFRKEFTKLEEVLTNKKTTFFGGNSISMIDYLIWPWFERLEAMKLNECVDHTPKLKLWMAAMKEDPTVSALLTSEKDWQGFLEL

SEQ ID NO: 56115 - protein, 87 aa, Homo sapiens
MLNDQLMLLERTFLNPRAFPEERYYSHVLWAPRTGSVVTFPGLSNACSRARDTASGSEAWAEVQRQLSIVVTALEGAAATLRPVADL

SEQ ID NO: 56116 - protein, 331 aa, Homo sapiens
MIEDVQSLLDEEQEQMFAFRSRARSTDTFNYATYHTLEEIYDFLDLLVAENPHLVSKIQIGNTYEGRPIYVLKFSTGGSKRPAIWIDTGIHSREWVTQASGVWFAKKITQDYGQDAAFTAILDTLDIFLEIVTNPDGFAFTHSTNRMWRKTRSHTAGSLCIGVDPNRNWDAGFGLSGASSNPCSETYHGKFANSEVEVKSIVDFVKDHGNIKAFISIHSYSQLLMYPYGYKTEPVPDQDELDQLSKAAVTALASLYGTKFNYGSIIKAIYQASGSTIDWTYSQGIKYSFTFELRDTGRYGFLLPASQIIPTAKETWLALLTIMEHTLNHPY

SEQ ID NO: 56117 - protein, 108 aa, Homo sapiens
MSAAFPGASLYLPMAQSVAVGPLGSTIPMAYYPVGPIYPPGSTVLVEGGYDAGARFGAGATAGNIPPPPPGCPPNAAQLAVMQGANVLVTQRKGNFFMGGSDGGYTIW

SEQ ID NO: 56118 - protein, 160 aa, Homo sapiens
MVIPVPEAESNVNYYNRLYKGEFKQPKQFIHIQPFNLDNEQPDYDMDSEDETLLNRLNRKMEIKPLQFEIMIDRLEKASSNQLVTLQEAKLLLNEDDYLIKAVYDYWVRKRKNCRGPSLIPQIKQEKRDGSTNNDPYVAFRRRTEKMQTRKNRKNDEASY

SEQ ID NO: 56119 - protein, 562 aa, Homo sapiens
MEPEPEPAAVEVPAGRVLSARELFAARSRSQKLPQRSHGPKDFLPDGSAAQAERLRRCREELWQLLAEQRVERLGSLVAAEWRPEEGFVELKSPAGKFWQTMGFSEQGRQRLHPEEALYLLECGSIHLFHQDLPLSIQEAYQLLLTDHTVTFLQYQVFSHLKRLGYVVRRFQPSSVLSPYERQLNLDASVQHLEDGDGKRKRSSSSPRSINKKAKALDNSLQPKSLAASSPPPCSQPSQCPEEKPQESSPMKGPGGPFQLLGSLGPSPGPAREGVGCSWESGRAENGVTGAGKRRWNFEQISFPNMASDSRHTLLRAPAPELLPANVAGRETDAESWCQKLNQRKEKLSRREREHHAEAAQFQEDVNADPEVQRCSSWREYKELLQRRQVQRSQRRAPHLWGQPVTPLLSPGQASSPGTPSACHIFEGHWQLRNHRTLERAWMNWDGLRLKEDVGGGSGPTSTVSSPAAAAGPVWEGLEMPWSFSISLCCRQHTFLMEVPGCWRSLGAWKSSLMFTRPTLWPHSERITLANPMPGCALVDLMSLSQTSAASSGCLTRVGMSL

SEQ ID NO: 56120 - protein, 228 aa, Homo sapiens
  MOD_RES (1)..(1): Any amino acid
XAVNTARGLYQRWCELLQESAAVGREELDWTTNELRNGLRSIEWDLEDLEETIGIVEANPGKFKLPAGDLQERKVFVERMREAVQEMKDHMVSPTAVAFLERNNREILAGKPAAQKSPSDLLDASAVSATSRYIEEQQATQQLIMDEQDQQLEMVSGSIQVLKHMSGRVGEELDEQGIMLDAFAQEMDHTQSRMDGVLRKLAKVSHMTSVPGPQSHLPLCLIHVPTWK

SEQ ID NO: 56121 - protein, 166 aa, Homo sapiens
MRTVAGTPVMAFPRGCLASSRLFSLTLKKLVMLKEMDKDLNSVVIAVKLQGSKRILRSNEIVLPASGLVETELQLTFSLQYPHFLKRDANKLQIMLQRRKRYKNRTILGYKTLAVGLINMAEVMQHPNEGALVLGLHSNVKDVSVPVAEIKIYSLSSQPIDHEGIK

SEQ ID NO: 56122 - protein, 38 aa, Homo sapiens
MEADSPAGPGAPEPLAEGAAAEFSSLLRRIKGKLFTWQ

SEQ ID NO: 56123 - protein, 209 aa, Homo sapiens
MSACSSSEISVKEFLAKAKEDFLKKWENPTQNNAGLEDFERKKTLGTGSFGRVMLVKHKATEQYYAMKILDKQKVVKLKQIEHTLNEKRILQAVNFPFLVRLEYAFKDNSNLYMVMEYVPGGEMFSHLRRIGRFSEPHARFYAAQIVLTFEYLHSLDLIYRDLKPENLLIDHQGYIQVTDFGFAKRVKGRTWTLCGTPEYLAPEIILSK

SEQ ID NO: 56124 - protein, 793 aa, Homo sapiens
MEGSPSLRRMTVMREKGRRQAVRGPAFMFNDRGTSLTAEEERFLDAAEYGNIPVVRKMLEESKTLNVNCVDYMGQNALQLAVGNEHLEVTELLLKKENLARIGDALLLAISKGYVRIVEAILNHPGFAASKRLTLSPCEQELQDDDFYAYDEDGTRFSPDITPIILAAHCQKYEVVHMLLMKGARIERPHDYFCKCGDCMEKQRHDSFSHSRSRINAYKGLASPAYLSLSSEDPVLTALELSNELAKLANIEKEFKNDYRKLSMQCKDFVVGVLDLCRDSEEVEAILNGDLESAEPLEVHRHKASLSRVKLAIKYEVKKLGKILRSPFMKFVAHAASFIIFLGLLVFNASDRFEGITTLPNITVTDYPKQIFRVKTTQFTWTEMLIMVWVLGMMWSECKELWLEGPREYILQLWNVLDFGMLSIFIAAFTARFLAFLQATKAQQYVDSYVQESDLSEVTLPPEIQYFTYARDKWLPSDPQIISEGLYAIAVVLSFSRIAYILPANESFGPLQISLGRTVKDIFKFMVLFIMVFFAFMIGMFILYSYYLGAKVNAAFTTVEESFKTLFWSIFGLSEVTSVVLKYDHKFIENIGYVLYGIYNVTMVVVLLNMLIAMINSSYQEIEDDSDVEWKFARSKLWLSYFDDGKTLPPPFSLVPSPKSFVYFIMRIVNFPKCRRRRLQKDIEMGMGNSKSRLNLFTQSNSRVFESHSFNSILNQPTRYQQIMKRLIKRYVLKAQVDKENDEVNEGELKEIKQDISSLRYELLEDKSQATEELAILIHKLSEKLNPSMLRCE

SEQ ID NO: 56125 - protein, 172 aa, Homo sapiens
MMLGTEGGEGFVVKVRGLPWSCSADEVQRFFSDCKIQNGAQGIRFIYTREGRPSGEAFVELESEDEVKLALKKDRETMGHRYVEVFKSNNVEMDWVLKHTGPNSPDTANDGFVRLRGLPFGCSKEEIVQFFSGILKSLRAVELKLELIMIHHESLWPCSGQVLMTDLGLVEG

SEQ ID NO: 56126 - protein, 71 aa, Homo sapiens
MASSGAGDPLDSKRGEAPFAQRIDPTREKLTPEQLHSMRQAELAQWQKVLPRRRTRNIVTGLGIGALVLAI

SEQ ID NO: 56127 - protein, 903 aa, Homo sapiens
  MOD_RES (1)..(1): Any amino acid
XKCEVSHRRAFHGWNEFDISEDEPLWKKYISQFKNPLIMLLLASAVISVLMHQFDDAVSITVAILIVVTVAFVQEYRSEKSLEELSKLVPPECHCVREGKLEHTLARDLVPGDTVCLSVGDRVPADLRLFEAVDLSIDESSLTGETTPCSKVTAPQPAATNGDLASRSNIAFMGTLVRCGKAKGVVIGTGENSEFGEVFKMMQAEEAPKTPLQKSMDLLGKQLSFYSFGIIGIIMLVGWLLGKDILEMFTISVSLAVAAIPEGLPIVVTVTLALGVMRMVKKRAIVKKLPIVETLGCCNVICSDKTGTLTKNEMTVTHIFTSDGLHAEVTGVGYNQFGEVIVDGDVVHGFYNPAVSRIVEAGCVCNDAVIRNNTLMGKPTEGALIALAMKMGLDGLQQDYIRKAEYPFSSEQKWMAVKCVHRTQQDRPEICFMKGAYEQVIKYCTTYQSKGQTLTLTQQQRDVYQQEKARMGSAGLRVLALASGPELGQLTFLGLVGIIDPPRTGVKEAVTTLIASGVSIKMITGDSQETAVAIASRLGLYSKTSQSVSGEEIDAMDVQQLSQIVPKVAVFYRASPRHKMKIIKSLQKNGSVVAMTGDGVNDAVALKAADIGVAMGQTGTDVCKEAADMILVDDDFQTIMSAIEEGKGIYNNIKNFVRFQLSTSIAALTLISLATLMNFPNPLNAMQILWINIIMDGPPAQSLGVEPVDKDVIRKPPRNWKDSILTKNLILKILVSSIIIVCGTLFVFWRELRDNVITPRDTTMTFTCFVFFDMFNALSSRSQTKSVFEIGLCSNRMFCYAVLGSIMGQLLVIYFPPLQKVFQTESLSILDLLFLLGLTSSVCIVAEIIKKVERSREKIQKHVSSTSSSFLEVWLWERSGQQLVEIHPHLETGLPLTEDVSCV

SEQ ID NO: 56128 - protein, 52 aa, Homo sapiens
MALPQGLLTFRDVAIEFSQEEWKCLDPAQRTLYRDVMLENYRNLVSLDGVFL

SEQ ID NO: 56129 - protein, 68 aa, Homo sapiens
MASQKRPSQRHGSKYLATASTMDHARHGFLPRARFPKFLSWEEEIVALDHPWLDAENPPGSGILSSAS

SEQ ID NO: 56130 - protein, 204 aa, Homo sapiens
MAKKSMPGGRLQSEGGSGLDSSPFLSEANAERIVQTLCTVRGAALKVGQMLSIQDNSFISPQLQHIFERVRQSADFMPRWQMLRVLEEELGRDWQAKVASLEEVPFAAASIGQVHQGLLRDGTEVAVKIQYPGIAQSIQSDVQNLLAVLKMSAALPAGLFAEQSLQALQQELAWECDYRREAACAQNFRQLLANDPFFRVPAVV

SEQ ID NO: 56131 - protein, 129 aa, Homo sapiens
  MOD_RES (1)..(1): Any amino acid
XSLLYAQKQLMMDHIKSMHGTLKSIEGPPNLGINLPLSIKPATQNSANQNKEDTKSMNGKEKLEKKSPSPVKKSMETKKVASPGWTCWECDCLFMQRDVYISHVRKEHGKWEEEPHPLTSSRSSVTPSH

SEQ ID NO: 56132 - protein, 98 aa, Homo sapiens
  MOD_RES (1)..(1): Any amino acid
XDVEHTGATSEFYDKFTIRYHISTIFKSLWQNIAHHGTFMEEFNSGKQFVRYINMLINDTTFLLDESLESLKRIHEVQEEMKNKEQWDQLPRSLQCST

SEQ ID NO: 56133 - protein, 531 aa, Homo sapiens
MRAVRRHLFPQHSAPGRGVVWEWLSDDGSWTAYEASVCDYLEQQVARGNQLVDLAPLGYNYTVNYTTHTQTNKTSSFCRSVRRQAGPPYPVTTIIAPPGHTGVACSCHQCLSGSRTGPVSGRYRHSMTNLPAYPVPQHPPHRTASVFGTHQAFAPYNKPSLSGARSAPRLNTTNAWGAAPPSLGSQPLYRSSLSHLGPQHLPPGSSTSGAVSASLPSGPSSSPGSVPATVPMQMPKPSRVQQALAGMTSVLMSAIGLPVCLSRAPQPTSPPASRLASKSHGSVKRLRKMSVKGATPKPEPEPEQVIKNYTEELKVPPDEDCIICMEKLSTASGYSDVTDSKAIGSLAVGHLTKCSHAFHLLCLLAMYCNGNKDGSLQCPSCKTIYGEKTGTQPQGKMEVLRFQMSLPGHEDCGTILIVYSIPHGIQGPEHPNPGKPFTARGFPRQCYLPDNAQGRKVLELLKVAWKRRLIFTVGTSSTTGETDTVVWNEIHHKTEMDRNITGHGYPDPNYLQNVLAELAAQGVTEDCLEQQ

SEQ ID NO: 56134 - protein, 41 aa, Homo sapiens
MLNKMTLHPQQIMIGPRFNRALFDPLLVVLLALQLLVVAGL

SEQ ID NO: 56135 - protein, 106 aa, Homo sapiens
MGQADVSRPVNPDAVDFSREPWNKEADQPTTEPGMVLDSVEAGDTTPPTKRKSKFSGFGKIFKPWKWRKKKSSDKFKETSEVLERKISMRKPREELVKRGVLLEDP

SEQ ID NO: 56136 - protein, 203 aa, Homo sapiens
MKEEGVKLLREAMGIYISTLKTEFTQGMILPTMNGESVDPVGQPALKTEERKAKPAPSKTQARPVGVKIPTCKITLKETFLTSPEELYRVFTTQELVQAFTHAPATLEADRGGKFHMVDGNVSGEFTDLVPEKHIVMKWRFKSWPEGHFATITLTFIDKNGETELCMEGRGIPAPEEERTRQGWQRYYFEGIKQTFGYGARLF

SEQ ID NO: 56137 - protein, 158 aa, Homo sapiens
MKRTTVCSCRCSKKAPRLSRLSRQMVPQLQLPEPPALSVMYSYLHSRKIKILEIFHKVGQGENQRITREEFIAAVKAVGVPLKNQEVEDIVIYLSSLGKHNTITMDILANTYKQWSMAQQRSSLATAREHYILAKHRDSLKGPLKKQEVDSAPQLPKV

SEQ ID NO: 56138 - protein, 1072 aa, Homo sapiens
PKENSELPEDEDEEENDEDVEQEVPIEPPSATTTTTIGISATSATFTNVFGKKRANVVTTPSTNRKNKKNKTKETPPTAHLILPEQHMSLAQQKADKNKINGEPRGGGAGGNSDSDNLDSTDCNSESSSGGKSQELNFVMDVNSSKYPSLLLHSQEEKTSTATSKTQTRLEGEVTPNSLSTSYKTVSLPLSSPNIKLNLTSPKRGQKREEGWKEVVRRSKKLSVPASVVSRIMGRGGCNITAIQDVTGAHIDVDKQKDKNGERMITIRGGTESTRYAVQLINALIQDPAKELEDLIPKNHIRTPASTKSIHANFSSGVGTTAASSKNAFPLGAPTLVTSQATTLSTFQPANKLNKNVPTNVRSSFPVSLPLAYPHPHFALLAAQTMQQIRHPRLPMAQFGGTFSPSPNTWGPFPVRPVNPGNTNSSPKHNNTSRLPNQNGTVLPSESAGLATASCPITVSSVVAASQQLCVTNTRTPSSVRKQLFACVPKTSPPATVISSVTSTCSSLPSVSSAPITSGQAPTTFLPASTSQAQLSSQKMESFSAVPPTKEKVSTQDQPMANLCTPSSTANSCSSSASNTPGAPETHPSSSPTPTSSNTQEEAQPSSVSDLSPMSMPFASNSEPAPLTLTSPRMVAADNQDTSNLPQLAVPAPRVSHRMQPRGSFYSMVPNATIHQDPQSIFVTNPVTLTPPQGPPAAVQLSSAVNIMNGSQMHINPANKSLPPTFGPATLFNHFSSLFDSSQVPANQGWGDGPLSSRVATDASFTVQSAFLGNSVLGHLENMHPDNSKAPGFRPPSQRVSTSPVGLPSIDPSGSSPSSSSAPLASFSGIPGTRVFLQGPAPVGTPSFNRQHFSPHPWTSASNSCDSPIPSVSSGSSSPLSATSAPPTLGQPKGVSASQDRKIPPPIGTERLARIRQGGSVAQAPAGTSFVAPVGHSGIWSFGVNAVSEGLSGWSQSVMGNHPMHQQLSDPSTFSQHQPMERDDSGMVAPSNIFHQPMGLPISMYGGTIIPSHPQLADVPGGPLFNGLHNPDPAWNPMIKVIQNSTECTDAQQIWPGTWAPHIGNMHLKYVN

SEQ ID NO: 56139 - protein, 113 aa, Homo sapiens
MISPDARMLASQNIVIILCGNKKDLDADREVTFLEASRFAQENELMFLETSALTGENVEEAFVQCARKILNKIESGELDPERMGSGIQYGDAALRQLRSPRRAQAPNAQECGC

SEQ ID NO: 56140 - protein, 265 aa, Homo sapiens
MARKALKLASWTSMALAASGIYFYSNKYLDPNDFGAVRVGRAVATTAVISYDYLTSLKSVPYGSEEYLQLRSKVHLRSARRLCELCCANRGTFIKVGQHLGALDYLLPEEYTSTLKVLHSQAPQSSMQEIRQVIREDLGKEIHDLFQSFDDTPLGTASLAQVHKAVLHDGRTVAVKVQHPKVRAQSSKDILLMEVLVLAVKQLFPEFEFMWLVDEAKKNLPLELDFLNEGRNAEKVSQMLRHFDFLKISRHLGKMYSEMIFVNGF

SEQ ID NO: 56141 - protein, 182 aa, Homo sapiens
MAGQRTCQRRSSRAGPGKMQEPPKSIEEFLKFQNWDYWPREIHFRDDDKWSCTLKKIKEDSSFVSIYTHLWENVPRIFEALLIMESKLKEYSLILQNHTSEIFKWKSMISETSSYRKLERYGEFLKKYHKKKKIMLSDEMETEKNIEGCSFTGFKANELTQLPRHLDAEQIYLFILKAHNFD

SEQ ID NO: 56142 - protein, 32 aa, Homo sapiens
  MOD_RES (1)..(1): Any amino acid
XQFLLNYLKEKDVADGNVSDFDNEEGNLFILA

SEQ ID NO: 56143 - protein, 62 aa, Homo sapiens
MDHGGVGPYELGMEHCEKFEISETSVNRGPEKIRPECFELLRVLGKGGYGKVFQVRKVTGAN

SEQ ID NO: 56144 - protein, 222 aa, Homo sapiens
MAAATELNRPSSGDRNLERRCRPNLSREVLYEIFRSLHTLVGQPFLAKLQSPIKEENTTAVEEIGRTEMGNKNEVNDKFSIGDLQEEEKHKESDLRDVKKTQIHFDPEVVQIKAGKAEIDRRISAFIERKQAEINENNVREFCNVIDCNQENSCARTDAIFTPYPGFKSHVKVSRVVNTYGPQTRPEGIPGSGHKPNSMLRDCGNQAVEERLQNIEAHLRLQ

SEQ ID NO: 56145 - protein, 435 aa, Homo sapiens
MRKLLTNLPAAAVLSAQVYSAVLQGLWEENVCGTPGRTRVCTALLYGQVCPFQDSTDGLRTITSILFNWPPENTSVYYQPPQRSSFRIKLAFRNLSWPGLGLEDHQEIVLGQLVLPEPNEAKPDDPAPRPGQHALTMPALEPAPPLLADLGPALEPESPAALGPPGYLHSAPGPAPAPGEGPPPGTVLEPQSAPESSCPCRGSVKNQPSEELPDMTTFPPRLLAEQLTLMDAELFKKVVLHECLGCIWGQGHLKGNEHMAPTVRATIAHFNRLTNCITTSCLGDHSMRARDRARVVEHWIKVARECLSLNNFSSVHVIVSALCSNPIGQLHKTWAGVSSKSMKELKELCKKDTAVKRDLLIKRDDGENNGNSYRKLSPQRPCEVAVVCITLYRRGNSLREARLQDWVTHTGSVDLGQWRGALRWPPRRGTPRESR

SEQ ID NO: 56146 - protein, 37 aa, Homo sapiens
MHVIKRDGRQERVMFDKITSRIQKLCYGLNMDFVDPM

SEQ ID NO: 56147 - protein, 155 aa, Homo sapiens
MHVESSAEPGKAPKHAGQKKTYRAIAETYAFLPREAVTRFLMSCTECQKRMHFNSNGLEPKENEPPSPLVSGIIDYNMPLTSTYLKQMKLRVMNSQEQDETSVSSEDFDMSDSTWMSADPHLASSLSPSQDERMRSPQNLHSQEDGGVCLQGPTA

SEQ ID NO: 56148 - protein, 111 aa, Homo sapiens
MAPKKKGKKGKAKGTPIVDGLAPEDMSKEQVKLSPPSFFLAFRRPHAPLPCMGPCSVPHLTHCTWPGGGACQPHPGGAGPRAGGTKLLPAGAGQDPHLLGDHTEAAGGEEG

SEQ ID NO: 56149 - protein, 128 aa, Homo sapiens
MVCGGFACSKNALCALNVVYMLVSLLLIGVAAWGKGLGLVSSIHIIGGVIAVGVFLLLIAVAGLVGAVNHHQVLLFFYMIILGLVFIFQFVISCSCLAINRSKQIILRCTASGLLGYLLPLGCLVNFP

SEQ ID NO: 56150 - protein, 206 aa, Homo sapiens
MNNNFCRALVDRRPLGPPSCMQLGVMPPPRQAPLPPAEPLGNVPFLLYPGPAEPPYYDAYAGVFPYVPFPGAFGVYEYPFEPAFIQKRNERERQRVKCVNEGYARLRGHLPGALAEKRLSKVETLRAAIRYIKYLQELLSSAPDGSTPPASRGLPGTGPCPAPPATPRPDRPGDGEARAPSSLVPESSESSCFSPSPFLESEESWH

SEQ ID NO: 56151 - protein, 103 aa, Homo sapiens
MSARSRHERRQQPSRGQHAHRLWDPDDRDINRSPQLLSFIREAQRLLWQSMEGHRLSRRGLDDGWDPFAALPLEAPVGGAAAAPALQPGPRRNTRYRNKRQRG

SEQ ID NO: 56152 - protein, 25 aa, Homo sapiens
MASKPAAGKSRGEKRKRVVLTLKEK

SEQ ID NO: 56153 - protein, 201 aa, Homo sapiens
MLHVEMLTLVFLVLWMCVFSQDPGSKAVADRYAVYWNSSNPRFQRGDYHIDVCINDYLDVFCPHYEDSVPEDKTERYVLYMVNFDGYSACDHTSKGFKRWECNRPHSPNGPLKFSEKFQLFTPFSLGFEFRPGREYFYISSAIPDNGRRSCLKLKVFVRPTNDTVHESAEPSRGENAAQTPRIPSRLLAILLFLLAMLLTL

SEQ ID NO: 56154 - protein, 184 aa, Homo sapiens
  MOD_RES (1)..(1): Any amino acid
XSSLSDDQVPEAFLVMLLIQFSTMVVDRALYLRKTVLGKLAFQVALVLAIHLWMFFILPAVTERMFNQNVVAQLWYFVKCIYFALSAYQIRCGYPTRILGNFLTKKYNHLNLFLFQGFRLVPFLVELRAVMDWVWTDTTLSLSSWMCVEDIYANIFIIKCSRETEKIHWLEMTELEEFSVFSGC

SEQ ID NO: 56155 - protein, 2213 aa, Homo sapiens
MARGARPSAAGGGGGGAEPPERAGPGRPRGSPPGRARPSLAPRPGPEPSRPRAAPETSGGDTAGAGRCGGRRAAKLGPGRRGWWALLALQLHLLRALAQGRCAPYFKTEPGLPQIHLEGNRLVLTCLAEGSWPLEFKWMRDDSELTTYSSEYKYIIPSLQKLDAGFYRCVVRNRMGALLQRKSEVQVAYMGSFMDTDQRKTVSQGRAAILNLLPITSYPRPQVTWFREGHKIIPSNRIAITLENQLVILATTTSDAGAYYVQAVNEKNGENKTSPFIHLSIARDVGTPETMAPTIVVPPGNRSVVAGSSETTLECIASARPVEDLSVTWKRNGVRITSGLHSFGRRLTISNPTSADTGPYVCEAALPGSAFEPARATAFLFIIEPPYFTAEPESRISAEVEETVDIGCQAMGVPLPTLQWYKDAISISRLQNPRYKVLASGGLRIQKLRPEDSGIFQCFASNEGGEIQTHTYLDVTNIAPVFTQRPVDTTVTDGMTAILRCEVSGAPKPAITWKRENHILASGSVRIPRFMLLESGGLQIAPVFIQDAGNYTCYAANTEGSLNASATLTVWNRTSIVHPPEDHVVIKGTTATLHCGATHDPRVSLRYVWKKDNVALTPSSTSRIVVEKDGSLLISQTWSGDIGDYSCEIVSEGGNDSRMARLEVIELPHSPQNLLVSPNSSHSHAVVLSWVRPFDGNSPILYYIVELSENNSPWKVHLSNVGPEMTGVTVSGLTPARTYQFRVCAVNEVGRGQYSAETSRLMLPEEPPSAPPKNIVASGRTNQSIMVQWQPPPETEHNGVLRGYILRYRLAGLPGEYQQRNITSPEVNYCLVTDLIIWTQYEIQVAAYNGAGLGVFSRAVTEYTLQGVPTAPPQNVQTEAVNSTTIQFLWNPPPQQFINGINQGYKLLAWPADAPEAVTVVTIAPDFHGVHHGHITNLKKFTAYFTSVLCFTTPGDGPPSTPQLVWTQEDKPGAVGHLSFTEILDTSLKVSWQEPLEKNGIITGYQISWEVYGRNDSRLTHTLNSTTHEYKIQGLSSLTTYTIDVAAVTAVGTGLVTSSTISSGVPPDLPGAPSNLVISNISPRSATLQFRPGYDGKTSISRWIVEGQVGAIGDEEEWVTLYEEENEPDAQMLEIPNLTPYTHYRFRMKQVNIVGPSPYSPSSRVIQTLQAPPDVAPTSVTVRTASETSLRLRWVPLPDSQYNGNPESVGYRIKYWRSDLQSSAVAQVVSDRLEREFTIEELEEWMEYELQMQAFNAVGAGPWSEVVRGRTRESVPSAAPENVSAEAVSSTQILLTWTSVPEQDQNGLILGYKILFRAKDLDPEPRSHIVRGNHTQSALLAGLRKFVLYELQVLAFTRIGNGVPSTPLILERTKDDAPGPPVRLVFPEVRLTSVRIVWQPPEEPNGIILGYQIAYRLASSSPHTFTTVEVGATVRQFTATDLAPESAYIFRLSAKTRQGWGEPLEATVITTEKRERPAPPRELLVPQAEVTARSLRLQWVPGSDGASPIRYFTMQVRELPRGEWQTYSSSISHEATACVVDRLRPFTSYKLRLKATNDIGDSDFSSETEAVTTLQDVPGEPPGSVSATPHTTSSVLIQWQPPRDESLNGLLQGYRIYYRELEYEAGSGTEAKTLKNPIALHAELTAQSSFKTVNSSSTSTMCELTHLKKYRRYEVIMTAYNIIGESPASAPVEVFVGEAAPAMAPQNVQVTPLTASQLEVTWDPPPPESQNGNIQGYKIYYWEADSQNETEKMKVLFLPEPVVRLKNLTSHTKYLVSISAFNAAGDGPKSDPQQGRTHQAAPGAPSFLAFSEITSTTLNVSWGEPAAANGILQGYRVVYEPLAPVQGVSKVVTVEVRGNWQRWLKVRDLTKGVTYFFRVQARTITYGPELQANITAGPAEGSPGSPRDVLVTKSASELTLQWTEGHSGDTPTTGYVIEARPSDEGLWDMFVKDIPRSATSYTLSLDKLRQGVTYEFRVVAVNEAGYGEPSNPSTAVSAQVEAPFYEEWWFLLVMALSSLIVILLVVFALVLHGQNKKYKNCSTGKGISTMEESVTLDNGGFAALELSSRHLNVKSTFSKKNGTRSPPRPSPGGLHYSDEDICNKYNGAVLTESVSLKEKSADASESEATDSDYEDALPKHSFVNHYMSDPTYYNSWKRRAQGRAPAPHRYEAVAGSEAGAQLHPVITTQSAGGVYTPAGPGARTPLTGFSSFV

SEQ ID NO: 56156 - protein, 155 aa, Homo sapiens
MSSTVSYWILNSTRNSIATLQGGRRLYSRYVSNRNKLKWRLFSRVPPTLNSSPCGGFTLCKAYRHTSTEEDDFHLQLSPEQINEVLRAGETTHKILDLESRVPNSVLRFESNQLAANSPVEDRRGVASCLQTNGLMFGIFDGHGGHACAQAVSER

SEQ ID NO: 56157 - protein, 51 aa, Homo sapiens
MSWSPSLTTQTCGAWEMKERLGTGGFGNVIRWHNQPLRLDTFMKTESSIGI

SEQ ID NO: 56158 - protein, 143 aa, Homo sapiens
MSTNENANTPAARLHRFKNKGKDSTEMRRRRIEVNVELRKAKKDDQMLKRRNVSSFPDDATSPLQENRNNQGTVNWSVDDIVKGINSSNVENQLQATQAARKLLSREKQPPIDNIIRAGLIPKFVSFLGRTDCSPIQFESAWA

SEQ ID NO: 56159 - protein, 187 aa, Homo sapiens
MVSHSELRKLFYSADAVCFDVDSTVIREEGIDELAKICGVEDAVSEMTRRAMGGAVPFKAALTERLALIQPSREQVQRLIAEQPPHLTPGIRELVSRLQERNVQVFLISGGFRSIVEHVASKLNIPATNVFANRLKFYFNGEYAGFDETQPTAESGGKGKVIKLLKEKFHFKKIIMIGDGATDMEAC

SEQ ID NO: 56160 - protein, 172 aa, Homo sapiens
MERAAPSRRVPLPLLLLGGLALLAAGVDADVLLEACCADGHRMATHQKDCSLPYATESKECRMVQEQCCHSQLEELHCATGISLANEQDRCATPHGDNASLEATFVKRCCHCCLLGRAAQAQGQSCEYSLMVGYQCGQVFQACCVKSQETGDLDVGGLQETGGGPCKQQCRD

SEQ ID NO: 56161 - protein, 262 aa, Homo sapiens
  MOD_RES (1)..(1): Any amino acid
XLFGSVADDQKLMIWDTRSNNTSKPSHSVDAHTAEVNCLSFNPYSEFILATGSADKTVALWDLRNLKLKLHSFESHKDEIFQVQWSPHNETILASSGTDRRLNVWDLSKIGEEQSPEDAEDGPPELLFIHGGHTAKISDFSWNPNEPWVICSVSEDNIMQVWQMMVSHFFTQAGVQWCNLGSLQLPPPRFDRFSCLSLLSSWDYRQRTFIMMKTLKEAWIQKDKGPRYVFTCCDFRLPFFLLNPESDLTLVLRQTLFSYPSI

SEQ ID NO: 56162 - protein, 169 aa, Homo sapiens
MTEAEVRGLCIKSREIFLSQPILLELEAPLKICGDIHGQYTDLLRLFEYGGFPPEANYLFLGDYVDRGKQSLETICLLLAYKIKYPENFFLLRGNHECASINRIYGFYDECKRRFNIKLWKTFTDCFNCLPIAAIVDEKIFCCHGGLSPDLQSMEQIRRIMRPTDVPDT

SEQ ID NO: 56163 - protein, 34 aa, Homo sapiens
  MOD_RES (1)..(1): Any amino acid
XFWDNNGGRDYALRGPEHPGSGGAPEPQGWIHFI

SEQ ID NO: 56164 - protein, 323 aa, Homo sapiens
  MOD_RES (1)..(1): Any amino acid
XAGLRKRGRSGSAAQAEGLCKQWLQRAWQERRLLLREPRYTLLVAACLCLAEVPPFVFFFMCCASYRVHSIFVLRLFNDPVAMVLLFLSINLLLAQRWGWGCCFFSLAVSVKMNVLLFAPGLLFLLLTQFGFRGALPKLGICAGLQVVLGLPFLLENPSGYLSRSFDLGRQFLFHWTVNWRFLPEALFLHRAFHLALLTAHLTLLLLFALCRWHRTGESILSLLRDPSKRKVPPQPLTPNQIVSTLFTSNFIGICFSRSLHYQFYVWYFHTLPYLLWAMPARWLTHLLRLLVLGLIELSWNTYPSTSCSSAALHICHAVILLQ

SEQ ID NO: 56165 - protein, 243 aa, Homo sapiens
MDRKTTSWDTKFYEKWYVCNREKLCESLQAVFVQSYLDQGTQIFLNNSIEKSGWLFIQLYHSFVSSVFSLFMSRTSINGLLGRGSMFVFSPDQFQRLLKINPDWKTHRLLDLGAGDGEVTKIMSPHFEEIYATELSETMIWQLQKKKYRVLGINEWQNTGFQYDVISCLNLLDRCDQPLTLLKDIRSVLEPTRGRVILALVLPFHPYVENVGGKWEKPSEILEIKGQNWEEQVNSLPEVFRKA

SEQ ID NO: 56166 - protein, 86 aa, Homo sapiens
MAAPVRRTLLGVAGGWRRFERLWAGSLSSRSLALAAAPSSNGSPWRLLGALCLQRPPVVSKPLTPLQEEMASLLQQKLMKRMTEHP

SEQ ID NO: 56167 - protein, 256 aa, Homo sapiens
AAGGARRFLCGVVEGFYGRPWVMEQRKELFRRLQKWELNTYLYAPKDDYKHRMFWREMYSVEEAEQLMTLISAAREYEIEFIYAISPGLDITFSNPKEVSTLKRKLDQVSQFGCRSFALLFDDIDHNMCAADKEVFSSFAHAQVSITNEIYQYLGEPETFLFCPTGPKVVSKEIPVESIEEVSKIIKRAPVIWDNIHANDYDQKRLFLGPYKGRSTELIPRLKGVLTNPNCEFEANYVAIHTLATWYKSNMNGVRK

SEQ ID NO: 56168 - protein, 94 aa, Homo sapiens
MAASIVRRGMLLARQVVLPQLSPAGKRYLLSSAYVDSHKWEAREKEHYCLADLASLMDKTFERKLPVSSLTISRLIDNISSREEIDHAEYYLYK

SEQ ID NO: 56169 - protein, 104 aa, Homo sapiens
MREIVHIQAGQCGNQIGTKFWEVISDEHGIDPAGGYVGDSALQLERINVYYNESSSQKYVPRAALVDLEPGTMDSVRSGPFGQLFRPDNFIFAHHGITSHPPCR

SEQ ID NO: 56170 - protein, 284 aa, Homo sapiens
  MOD_RES (1)..(1): Any amino acid
XHKALDEKVRERLRVSLERVSALEEELAAANQEIVALREQNVHIQRKMASSEGSTESEHLEGMEPGQKVHEKRLSNGSIDSTDETSQIVELQELLEKQNYEMAQMKERLAALSSRVGEVEQEAETARKDLIKTEEMNTKYQRDIREAMAQKEDMEERITTLEKRYLSAQRESTSIHDMNDKLENELANKEAILRQVQYLCLGFLLVCAFSSFSQNGMEEKNRQLQERLELAEQKLQQTMRKAETLPEVEAELAQRIAALTKAEERHGNIEERMRHLEGQLEEKN

SEQ ID NO: 56171 - protein, 679 aa, Homo sapiens
MPVLGVASKLRQPAVGSKPVHTALPIPNLGTTGSQHCSSRPLELTETESSMLSCQLALKSTCEFGEKKPLQGKAKEKEDSKIYTDWANHYLAKSGHKRLIKDLQQDIADGVLLAEIIQIIANEKVEDINGCPRSQSQMIENVDVCLSFLAARGVNVQGLSAEEIRNGNLKAILGLFFSLSRYKQQQHHQQQYYQSLVELQQRVTHASPPSEASQAKTQQDMQSSLAARYATQSNHSGIATSQKKPTRLPGPSRVPAAGSSSKVQGASNLNRRSQSFNSIDKNKPPNYANGNEKDSSKGPQSSSGVNGNVQPPSTAGQPPASAIPSPSASKPWRSKSMNVKHSATSTMLTVKQSSTATSPTPSSDRLKPPVSEGVKTAPSGQKSMLEKFKLVNARTALRPPQPPSSGPSDGGKDDDAFSESGEMEGFNSGLNSGGSTNSSPKVSPKLAPPKAGSKNLSNKKSLLQPKEKEEKNRDKNKVCTEKPVKEEKDQVTEMAPKKTSKIASLIPKGSKTTAAKKESLIPSSSGIPKPGSKVPTVKQTISPGSTASKESEKFRTTKGSPSQSLSKPITMEKASASSCPAPLEGREAGQASPSGSCTMTVAQSSGQSTGNGAVQLPQQQQHSHPNTATVAPFIYRAHSENEGTALPSADSCTSPTKMDLSYSKTAKQCLEEISGEDPE

SEQ ID NO: 56172 - protein, 77 aa, Homo sapiens
MKTGPFAEHSNQLWNISAVPSWSKVNQGLIRMYKAEASPSDTWGLGISHLGHGQSEKHQPPQPRKAAVQLCPDELGG

SEQ ID NO: 56173 - protein, 122 aa, Homo sapiens
MPHSYPALSAEQKKELSDIALRIVAPGKGILAADESVGSMAKRLSQIGVENTEENRRLYRQVLFSADDRVKKCIGGVIFFHETLYQKDDNGVPFVRTIQDKGIVVGIKVDKGVVPLAGTDGE

SEQ ID NO: 56174 - protein, 99 aa, Homo sapiens
MSSRKLSGPKGRRLSIHVVTWNVASAAPPLDLSDLLQLNNRNLNLDIYVIGSPMSVCRGSSYWSLPSISICPISRFCLLNPPPLACLGTGGTKVESTSA

SEQ ID NO: 56175 - protein, 105 aa, Homo sapiens
MAEDEPDAKSPKTGGRAPPGGAEAGEPTTLLQRLRGTISKAVQNKVEGILQDVQKFSDNDKLYLYLQLPSGPTTGDKSSEPSTLSNEEYMYAYRWIRNHLEEHTD

SEQ ID NO: 56176 - protein, 125 aa, Homo sapiens
MAEVPELASEMMAYYSGNEDDLFFEADGPKQMKCSFQDLDLCPLDGGIQLRISDHHYSKGFRQAASVVVAMDKLRKMLVPCPQTFQENDLSTFFPFIFEEEPIFFDTWDNEAYVHDAPVRSLNCT

SEQ ID NO: 56177 - protein, 86 aa, Homo sapiens
MGQPSLTWMLMVVVASWFITTAATDTSEARWCSECHSNATCTEDEAVTTCTCQEGFTGDGLTCVDLDECAIPGAHNCSANSSCVNT

SEQ ID NO: 56178 - protein, 106 aa, Homo sapiens
MATLSVIGSSSLIAYAVFHNIQKSPEIRPLFYLSFCDLLLGLCWLTETLLYGASVANKDIICYNLQAVGQIFYISSFLYTVNYIWYLYTELRMKHTQSGQSTSPLV

SEQ ID NO: 56179 - protein, 98 aa, Homo sapiens
MVSNLKRIMAQKWMPDQISVSEFIAETTEDYNSPTTSSFTTRLHNCRNTVTLLEEALDQDRTALQKVKKSVKAIYNSGQDHVQNEENYAQVLDKFGSN

SEQ ID NO: 56180 - protein, 67 aa, Homo sapiens
MLIKVKTLTGKEIEIDIEPTDKVERIKERVEEKEGIPPQQQRLIYSGKQILHSLAFLGRHARRPSVP

SEQ ID NO: 56181 - protein, 18 aa, Homo sapiens
FARSARPKQDPKEGKRKC

SEQ ID NO: 56182 - protein, 170 aa, Homo sapiens
MARAGPRLVLSEEAVRAKSGLGPHRDLAELQSLSIPGTYQEKITHLGHSLMSLTGLKSLDLSRNSLVSLEGIQYLTALESLNLYYNCISSLAEVFRLHALTELVDVDFRLNPVVKVEPDYRLFVVHLLPKLQQLDDRPVRASERKASRLHFASEDSLDSKESVPASLKEG

SEQ ID NO: 56183 - protein, 262 aa, Homo sapiens
MADAASQVLLGSGLTILSQPLMYVKVLIQVGYEPLPPTIGRNIFGRQVCQLPGLFSYAQHIASIDGRRGLFTGLTPRLCSGVLGTVVHGKVLQELGPGNVQKEVSSSFDHVIKETTREMIARSAATLITHPFHVITLRSMVQFIGRESKYCGLCDSIITIYREEGILGFFAGLVPRLLGDILSLWLCNSLAYLVNTYALDSGVSTMNEMKSYSQAVTGFFASMLTYPFVLVSNLMAVNNCGLAGGCPPYSPIYTSWIDCWCM

SEQ ID NO: 56184 - protein, 117 aa, Homo sapiens
MEMRVPAQLLGLLLLWLRGARCDIQVTQSPSSLSASVGDRVTITCRASQGISNGLSWYQQKPGQAPTLLIYAASSLQSGVPSRFSGSGSGTDFTLTISSLQPEDVATYYCLQDYTTP

SEQ ID NO: 56185 - protein, 906 aa, Homo sapiens
MDSTACLKSLLLTVSQYKAVKSEANATQLLRHLEVISGQKLTRLFTSNQILTSECLSCLVELLEDPNISASLILSIIGLLSQLAVDIETRDCLQNTYNLNSVLAGVVCRSSHTDSVFLQCIQLLQKLTYNVKIFYSGANIDELITFLIDHIQSSEDELKMPCLGLLANLCRHNLSVQTHIKTLSNVKSFYRTLITLLAHSSLTVVVFALSILSSLTLNEEVGEKLFHARNIHQTFQLIFNILINGDGTLTRKYSVDLLMDLLKNPKIADYLTRYEHFSSCLHQVLGLLNGKDPDSSSKVLELLLAFCSVTQLRHMLTQMMFEQSPPGSATLGSHTKCLEPTVALLRWLSQPLDGSENCSVLALELFKEIFEDVIDAANCSSADRFVTLLLPTILDQLQFTEQNLDEALTRKKCERIAKAIEVLLTPLCGDDTLKMHIAKILTTVKCTTLIEQQFTYGKIDLGFGTKVADSELCKLAADVILKTLDLINKLKPLVPGMEVSFYKILQDPRLITPLAFALTSDNREQVQSGLRILLEAAPLPDFPALVLGESIAANNAYRQQETEHIPRKMPWQSSNHSFPTSIKCLTPHLKDGVPGLNIEELIEKLQSGMVVKDQICDVRISDIMDVYEMKLSTLASKESRLQDLLETKALALAQADRLIAQHRCQRTQAETEARTLASMLREVERKNEELSVLLKAQQVESERAQSDIEHLFQHNRKLESVAEEHEILTKSYMELLQRNESTEKKNKDLQITCDSLNKQIETVKKLNESLKEQNEKSIAQLIEKEEQRKEVQNQLVDREHKLANLHQKTKVQEEKIKTLQKEREDKEETIDILRKELSRTEQIRKELSIKASSLEVQKAQLEGRLEEKESLVKLQQEELNKHSHMIAMIHSLSGGKINPETVNLSI

SEQ ID NO: 56186 - protein, 418 aa, Homo sapiens
MAPPLLLLLLASGAAACPLPCVCQNLSESLSTLCAHRGLLFVPPNVDRRTVELRLADNFIQALGPPDFRNMTGLVDLTLSRNAITRIGARAFGDLESLRSLHLDGNRLVELGTGSLRGPVNLQHLILSGNQLGRIAPGAFDDFLESLEDLDLSYNNLRQVPWAGIGAMPALHTLNLDHNLIDALPPGAFAQLGQLSRLDLTSNRLATLAPDPLFSRGRDAEASPAPLVLSFSGNPLHCNCELLWLRRLARPDDLETCASPPGLAGRYFWAVPEGEFSCEPPLIARHTQRLWVLEGQRATLRCRALGDPAPTMHWVGPDDRLVGNSSRARAFPNGTLEIGVTGAGDAGGYTCIATNPAGEATARVELRVLALPHGGNSRPGAAAWPGSPSLVFILSTSGSPVYLEGQGALSSVLASRPG

SEQ ID NO: 56187 - protein, 1733 aa, Homo sapiens
MLKQPLTYRLSKEMAKNDPIELPTSRSKNVTNQKKPTPFSSRMSFRSSFASLFSFRKSGKETSKLPSLGQKGCDGHAGPPMPVRGAAVQAKIYNSPLENHLVDSTFVPKPAVMREESGMPPPWDASLLENEFFQVLDDLDSKLAQEQSASSVNTRTPLNYGSRTQFGHFYSSGNRHGNITERHKKHYNETSNMSIYDILRPGTPREGFKTFSPRTSTIYDMYRTREPRVFKEDYVQKNTFGSTSLCFDSRQRSALPATGHFTARSLHFPATTQSKSGFIPPRHQQSPKRTPLSSIIWNRSDSSRDRENQEEFLRAPSPMEIDPADKYVYPRGFQENKRYESYHSQNVYQRVSLNAPMENAMSPDTFENSENMPFYHQSNTFTRSFFSNTFGRSGEQRRFGQGPFWGQEKGHSFWSDFHRSRKSFSSSDRDFEMISMEANSVSAIHGHNVSSEHWESFSSGYGTDVSRGQEEPHPWQFDFQRSTLDSMVVSHGNETQLTPHFGTPNVCSMTGSSYHVKSSELVSQQDSSPVEVHINKEASSFGIAQTLASSFKTSFSQISDDRRNPQSPNLQNPTVTLQKIFPNKPASHPMRSHTEVTVTSSNSVDSLPLAKSQPNILVTEVNNEKDLNESISEEDKQLSKMDQTNKAGEIPQPVSQTGISNSLPDFQNPLSQDSAKSNGFGFNASTIISSKKSPRVFSRKDTSKMYIPHTDKSNDIKQDKRFTENRKLGSTASLPFIQEHRTPPSFPRTDQGCHQELTVNNEDISRIITNNHWSSALTDTQNAQYSKCKLTPGHKTSCDSLDLSSAALPDSSPSKNSSLDAPVVPSTTVFSRRSPSDKDPSLGEREEKDNAGKNQKNQFIVSHSENQERNDSPVPTHDEVVDVKCHSHSPFRNERGKGKIRHHISCIEKLSKTESISVPTSDHRSLIEANQSNSKVSELDTIYCTLPRKSSSFLIHGRQSGSKIMAASLRNGPPPFQIKNNVEDAMGNYMLNKFSPSSPESANECSKVLSDSALEAPEATERMTNVKSSGSTSVRKGPLPFLINRAMSCPSGEPHASTGREGRKKPLTSGMDASELTPRAWERIISPVESDSSVRDCSLTKRQHQKENFQEYTEKEGKMAASRRSVFALSNEDPLPFCSDLSGKERGKTLHKVKTTSTFSVSGDEDNVKCLEVVSIYYTLPRKPSKKFCNLLQQYTQNTNLLIESPQVETETFPNALEKDKQNYSTREQSGTPSCENLKMSVNSDQTLTTENMTAFRLSNRGPLAPTLQEMASVEAAVSLPEEESKAREIFSDNLAKTPLGDSENKKERGKKLQSETLHTSLMLQRKNVSEEKSENCQQSINSSNSGPSSLPALSEVNIGNSQTRRSSWECTGSGRAIPFTGSGKCPQKDHTSTAVGDGSSGSQPREGRGDIGTNCQKMTNKTLSHSESQVFALTPALHKLQLGEETQSDEPNLESLQSEPRELPQRSQEANMTESRKAEDEMQKSAWDQPSLPEGNKNKTNLDDLVKGENRSSVKHRLAAMSKASRKFPAKDVSPRRHVATIFPQSGSRSGFDHLSLGTVECNPLFPEPTPKSAESIGESRLSENGKHVKKSENLLPITVLPNREPSTHVSNQKSNSISQRHQNEFKNVSESPSKHENSKDVTAAQNLVRESGAPSPITFTSLREAEFSDNQRRLSPPFPLEPAQKSRVSSPLASFLQQQRSASSLEWEPEPHLYRSKSLKSINVHGDLLRK

SEQ ID NO: 56188 - protein, 185 aa, Homo sapiens
MAHRPKRTFRQRAADSSDSDGAEESPAEPGAPRELPVPGSAEEEPPSGGGRAQVAGLPHRVRGPRGRGRVWASSRRATKAAPRADEGSESRTLDVSTDEEDKIHHSSESKDDQGLSSDSSSSLGEKELSSTVSRNEETSEESQEDEKQDTWEQQQMRKAVKIIEERDIDLSCGNGSSKVKKFDTS

SEQ ID NO: 56189 - protein, 124 aa, Homo sapiens
MDILFRIRGGLDLAFQLATPNEIFLKKALKHVLSDLSTKLSSNALVFRICHSSVYIWPSSDINTIPGELTDASACKNILRFIQFEPEEDIKRKFMRKKDKKLSDMHQIVNIDLMLEMSTSLAAV

SEQ ID NO: 56190 - protein, 56 aa, Homo sapiens
IPGEKLVTERNKKRLEKEKHEKGAQKTDCQKFFRGHKLTTRLTVDVLGNLSSTCSQ

SEQ ID NO: 56191 - protein, 159 aa, Homo sapiens
MASGVAVSDGVIKVFNDMKVRKSSTPEEVKKRKKAVLFCLSEDKKNIILEEGKEILVGDVGQTVDDPYATFVKMLPDKDCRYALYDATYETKESKKEDLVFIFWAPESAPLKSKMIYASSKDAIKKKLTGIKHELQANCYEEVKDRCTLAEKLGGSAVI

SEQ ID NO: 56192 - protein, 328 aa, Homo sapiens
MPVGGLLRNVSQHFDFKRKALKQTFNLNPNLILRGGMKFYECKECGKIFRYNSKLIRHQMSHTGEKPFKCKECGKAFKSSYDCIVHEKNHIGEGPYECKECGKGLSSNTALTQHQRIHTGEKPYECKECGKAFRRSAAYLQHQRLHTGEKLYKCKECWKAFGCRSLFIVHQRIHTGEKPYQCKECGKAFTQKIASIQHQRVHTGEKPYECKVCGKAFKWYGSFVQHQKLHPVEKKPVKVLGPSLVSPQCSSPAIPPVLLQGSCSASAVAVPSLTFPHAVLIPTSGNFFMLLPTSGIPSSSAQIVRVFQGLTPTVKPSPVILTPSSHSS

SEQ ID NO: 56193 - protein, 78 aa, Homo sapiens
MMHFKSGLELTELQNMTVPEDDNISNDSNDFTEVENGQINSKFISDRESRRSLTNSHLEKKKCDEYIPGTTSLGMSVF

SEQ ID NO: 56194 - protein, 607 aa, Homo sapiens
MERSPPQSPGPGKAGDAPNRRSGHVRGARVLSPPGRRARLSSPGPSRSSEAREELRRHLVGLIERSRVVIFSKSYCPHSTRVKELFSSLGVECNVLELDQVDDGARVQEVLSEITNQKTVPNIFVNKVHVGGCDQTFQAYQSGLLQKLLQEDLAYDYDLIIIGGGSGGLSCAKEAAILGKKVMVLDFVVPSPQGTSWGLGGTCVNVGCIPKKLMHQAALLGQALCDSRKFGWEYNQQVRHNWETMTKAIQNHISSLNWGYRLSLREKAVAYVNSYGEFVEHHKIKATNKKGQETYYTAAQFVIATGERPRYLGIQGDKEYCITSDDLFSLPYCPGKTLVVGASYVALECAGFLAGFGLDVTVMVRSILLRGFDQEMAEKVGSYMEQHGVKFLRKFIPVMVQQLEKGSPGKLKVLAKSTEGTETIEGVYNTVLLAIGRDSCTRKIGLEKIGVKINEKSGKIPVNDVEQTNVPYVYAVGDILEDKPELTPVAIQSGKLLAQRLFGASLEKIYHTLFWPLEWTVAGRENNTCYAKIICNKFDHDRVIGFHILGPNAGEVTQGFAAAMKCGLTKQLLDDTIGIHPTCGEVFTTLEITKSSGLDITQKGCCG

SEQ ID NO: 56195 - protein, 143 aa, Homo sapiens
MGCDRNCGLIAGAVIGAVLAVFGGILMPVGDLLIQKTIKKQVVLEEGTIAFKNWVKTGTEVYRQFWIFDVQNPQEVMMNSSNIQVKQRGPYTYRVRFLAKENVTQDAEDNTVSFLQPNGAIFEPSLSVGTEADNFTVLNLAVA

SEQ ID NO: 56196 - protein, 295 aa, Homo sapiens
  MOD_RES (1)..(1): Any amino acid
XVLKATAGLRLLPGEKAQKLLQKVKKVFKASPFLVGDDCVSIMNGTDEGVSAWITINFLTGSLKTPGGSSVGMLDLGGGSTQIAFLPRVEGTLQASPPGYLTALRMFNRTYKLYSYSYLGLGLMSARLAILGGVEGQPAKDGKELVSPCLSPSFKGEWEHAEVTYRVSGQKAAASLHELCAARVSEVLQNRVHRTEEVKHVDFYAFSYYYDLAAGVGLIDAEKGGSLVVGDFEIAAKYGGSHLEREGTCLIPSVSDPGDTAAEQPLLMHGPHLRQPATPGVRLSQEQSAEAHSEN

SEQ ID NO: 56197 - protein, 35 aa, Homo sapiens
DCYCYNQNSQVEWKYIWSTMQGDCVLLCGACQEDI

SEQ ID NO: 56198 - protein, 616 aa, Homo sapiens
MEDSQDLNEQSVKKTCTESDVSQSQNSRSMEMQDLASPHTLVGGGDTPGSSKLEKSNLSSTSVTTNGTGVSLLAVKTEPLNSSETTATTGDGALDTFTGSVITSSGYSPRSAHQYSPQLYPSKPYPHILSTPAAQTMSAYAGQTQYSGMQQPAVYTAYSQTGQPYSLPTYDLGVMLPAIKTESGLSQTQSPLQSGCLSYSPGFSTPQPGQTPYSYQMPGSSFAPSSTIYANNSVSNSTNFSGSQQDYPSYTAFGQNQYAQYYSASTYGAYMTSNNTADGTPSSTSTYQLQESLPGLTNQPGEFDTMQSPSTPIKDLDERTCRSSGSKSRGRGRKNNPSPPPDSDLERVFVWDLDETIIVFHSLLTGSYAQKYGKDPPMAVTLGLRMEEMIFNLADTHLFFNDLEECDQVHIDDVSSDDNGQDLSTYSFATDGFHAAASSANLCLPTGVRGGVDWMRKLAFRYRRVKELYNTYKNNVGGLLGPAKRDAWLQLRAEIEGLTDSWLTNALKSLSIISTRSNCINVLVTTTQLIPALAKVLLYSLGGAFPIENIYSATKIGKESCFERIVSRFGTNITYVVIGDGRDEEHAANQHNMPFWRISSHSDLLALHQALELEYL

SEQ ID NO: 56199 - protein, 536 aa, Homo sapiens
MVLDLDLFRVDKGGDPALIRETQEKRFKDPGLVDQLVKADSEWRRCRFRADNLNKLKNLCSKTIGEKMKKKEPVGDDESVPENVLSFDDLTADALANLKVSQIKKVRLLIDEAILKCDAERIKLEAERFENLREIGNLLHPSVPISNDEDVDNKVERIWGDCTVRKKYSHVDLVVMVDGFEGEKGAVVAGSRGYFLKGVLVFLEQALIQYALRTLGSRGYIPIYTPFFMRKEVMQEVAQLSQFDEELYKVIGKGSEKSDDNSYDEKYLIATSEQPIAALHRDEWLRPEDLPIKYAGLSTCFRQEVGSHGRDTRGIFRVHQFEKIEQFVYSSPHDNKSWEMFEEMITTAEEFYQSLGIPYHIVNIVSGSLNHAASKKLDLEAWFPGSGAFRELVSCSNCTDYQARRLRIRYGQTKKMMDKRKNNLHLSTQNKLEASLFSPKKVEFVHMLNATMCATTRTICAILENYQTEKGITVPEKLKEFMPPGLQELIPFVKPAPIEQEPSKKQKKQHEGSKKKAAARDVTLENRLQNMEVTDA

SEQ ID NO: 56200 - protein, 110 aa, Homo sapiens
MASVAVDPQPSVVTRVVNLPLVSSTYDLMSSAYLSTKDQYPYLKSVCEMAENGVKTITSVAMTSALPIIQKLEPQIAVANTYACKGLDRIEERLPILNQPSTQVSLGQKC

SEQ ID NO: 56201 - protein, 174 aa, Homo sapiens
VKLKPHEEPLRSEILSGKFTILNVRDPTGASIALFTARLHHPHKSVQHVVLQALFYLLDRAVDSFETQRNGLVFIYDMCGSNYANFELDLGKKVLNLLKLPFSSTDLEKPQHSSMENIQHLEQTSPKASSLKCDKLLSSFPSKMQQFISGPKCPRSFYQQIKNHSRKTPVISTK

SEQ ID NO: 56202 - protein, 132 aa, Homo sapiens
MDGFYDQQVPFMVPGKSRSEECRGRPVIDRKRKFLDTDLAHDSEELFQDLSQLQEAWLAEAQVPDDEQFVPDFQSDNLVLHAPPPTKIKRELHSPSSELSSCSHEQALGANYGEKCLYNYCAYDRKPPSGFK

SEQ ID NO: 56203 - protein, 231 aa, Homo sapiens [sequence omitted]

SEQ ID NO: 56204 - protein, 121 aa, Homo sapiens
  MOD_RES (1)..(1): Any amino acid
XLYAVLRLGSPDIHIMAPLIRSILLVGPSGMGKKMLVKAVCTETGANLFDLSPENLLGKYPGRNGAQMMVHIVFKVRSPQLLAFAVLRPVATKEGGFEVTSPISLLGSPTPTALCDLDWKC

SEQ ID NO: 56205 - protein, 31 aa, Homo sapiens
  MOD_RES (1)..(1): Any amino acid
XASQSAGDINTIYQPPEPRSRHLSVSRIASN

SEQ ID NO: 56206 - protein, 10 aa, Homo sapiens
MALPHDSNET

SEQ ID NO: 56207 - protein, 385 aa, Homo sapiens
REGGDVGAMGLGPVFLLLAGIFPFAPPGAAAEPHSLRYNLTVLSWDGSVQSGFLAEVHLDGQPFLRYDRQKCRAKPQGQWAEDVLGNKTWDRETRDLTGNGKDLRMTLAHIKDQKEGLHSLQEIRVCEIHEDNSTRSSQHFYYDGELFLSQNVETEEWTVPQSSRAQTLAMNVRNFLKEDAMKTKTHYHAMHADCLQELRRYLESSVVLRRRVPPMVNVTRSEASEGNITVTCRASSFYPRNITLTWRQDGVSLSHDTQQWGDVLPDGNGTYQTWVATRICQGEEQRFTCYMEHSGNHSTHPVPSGKVLVLQSHWQTFHVSAVAAAAAAIFVIIIFYVRCCKKKTSAAEGPELVSLQVLDQHPVGTSDHRDATQLGFQPLMSALG

SEQ ID NO: 56208 - protein, 675 aa, Homo sapiens
MCRECCEYDQIECVCPGKREVVGYTIPCCRNEENECDSCLIHPGCTIFENCKSCRNGSWGGTLDDFYVKGFYCAECRAGWYGGDCMRCGQVLRAPKGQILLESYPLNAHCEWTIHAKPGFVIQLRFVMLSLEFDYMCQYDYVEVRDGDNRDGQIIKRVCGNERPAPIQSIGSSLHVLFHSDGSKNFDGFHAIYEEITACSSSPCFHDGTCVLDKAGSYKCACLAGYTGQRCENLLEAGKSKIKASEDSLSVLEERNCSDPGGPVNGYQKITGGPGLINGRHAKIGTVVSFFCNNSYVLSGNEKRTCQQNGEWSGKQPICIKACREPKISDLVRRRVLPMQVQSRETPLHQLYSAAFSKQKLQSAPTKKPALPFGDLPMGYQHLHTQLQYECISPFYRRLGSSRRTCLRTGKWSGRAPSCIPICGKIENITAPKTQGLRWPWQAAIYRRTSGVHDGSLHKGAWFLVCSGALVNERTVVVAAHCVTDLGKVTMIKTADLKVVLGKFYRDDDRDEKTIQSLQISAIILHPNYDPILLDADIAILKLLDKARISTRVQPICLAASRDLSTSFQESHITVAGWNVLADVRSPGFKNDTLRSGVVSVVDSLLCEEQHEDHGIPVSVTDNMFCASWEPTAPSDICTAETGGIAAVSFPGRASPEPRWHLMGLVSWSYDKTCS

SEQ ID NO: 56209 - protein, 32 aa, Homo sapiens
MDSLEEPQKKVFKARKTMRVSDRQQLEAVYKV

SEQ ID NO: 56210 - protein, 140 aa, Homo sapiens
  MOD_RES (1)..(1): Any amino acid
XFCVRCKRQWEEQHRGRSCEDFQNWKRMNDPEYQAQGLAMYLQENGIDCPKCKFSYALARGGCMHFHCTQCRHQFCSGCYNAFYAKNKCPEPNCRVKKSLHGHHPRDCLFYLRDWTALRLQKLLQSLQLGPGQSLEAAAE

SEQ ID NO: 56211 - protein, 35 aa, Homo sapiens
MWGDSRPANRTGPFRVRQTLVGTDLPVHSARTQEK

SEQ ID NO: 56212 - protein, 143 aa, Homo sapiens
MTVVMAVCSLPLTIRCFTQAVAPDSSSEMGDLLAFRFYAFNPILDPWVFILFRKAVFQRLKLWVCCLCLGPAHGDSQTPLSQLASGRRDPRAPSAPVGKEGSCVPLSAWGEGQVEPLPPTQQSSGSAVGTSSKAEASVACSLC

SEQ ID NO: 56213 - protein, 115 aa, Homo sapiens
MSLIDASGNQLVLTVQRLADEGPVQSPSPHELQVLSPLSPLSPEPPGAPVPQPLQPGSLRSPPDSEAYYGETDSDADGPATQEKPRRPRRRGPTRPTPPGAPPDEVYLSDSPAEP

SEQ ID NO: 56214 - protein, 58 aa, Homo sapiens
MLPAVGSADEEEDPAEEDCPELVPMETTQSEEEEKSGLGAKIPVTIITGYLVIQRLLC

SEQ ID NO: 56215 - protein, 83 aa, Homo sapiens
  MOD_RES (1)..(1): Any amino acid
XSGQIGFMLCSKNPSTNFQEPVQPLTQQQVAQMQLKYYNSDVHRAAFVLPEFARKVGGLRGWVVGPRDPERPPDWPHVPPGPE

SEQ ID NO: 56216 - protein, 63 aa, Homo sapiens
AQSVREVFARQLMQVRGVSGEKAAALVDRYSTPASLLAAYDACATPKEQETLLSTIKCGRLQR

SEQ ID NO: 56217 - protein, 79 aa, Homo sapiens
TVAGIVGSSYGILQLFSSTLVGCWSDVVGRRSSLLACILLSALGYLLLGAATNVFLFVLARVPAGLYFLMWFQRRNGRL

SEQ ID NO: 56218 - protein, 173 aa, Homo sapiens
MVSQEGSEVELLVSPGARSEHGRYLQDPIVSIDLSEWLRIIEFLLQGLKVYGSVYHINHGNPFNMEVLVDSWPEYQMVIIRPQKQEMTDDMDSYTNVYRMFSKEPQKSEEVLKNCEIVNWKQRLQIQGLQESLGEGIRVATFSKSVKVEHSRALLLVTEDILKLNASSKSKLG

SEQ ID NO: 56219 - protein, 222 aa, Homo sapiens
MKENYCLQAALVCLGMLCHSHAFAPERRGHLRPSFHGHHEKGKEGQVLQRSKRGWVWNQFFVIEEYTGPDPVLVGRLHSDIDSGDGNIKYILSGEGAGTIFVIDDKSGNIHATKTLDREERAQYTLMAQAVDRDTNRPLEPPSEFIVKVQDINDNPPEFLHETYHANVPERSNVGTSVIQVTASDADDPTYGNSAKLVYSILEGQPYFSVEAQTGIIRTALP

SEQ ID NO: 56220 - protein, 80 aa, Homo sapiens
MIAAYKGHTDVVRYLLEQRADPNAKAHCGATALHFAAEAGHIDIVKELIKWRAAIVVNGHGMTPLKVAAESCKADVVELL

SEQ ID NO: 56221 - protein, 118 aa, Homo sapiens
MDRSATAATAPPAAPAGEGGPPAPPPNLTSNRRLQQTQAQVDEVVDIMRVNVDKVLERDQKLSELDDRADALQAGASQFETSAAKLKRKYWWKNLKMMIILGVICAIILIIIIVYFST

SEQ ID NO: 56222 - protein, 178 aa, Homo sapiens
  MOD_RES (1)..(1): Any amino acid
XKKKLRPPTCWGFTVVHETEKHEKQQWYLCCDTQMELREWFATFLFVQHDGLVWPSEPSRVSRAVPEVRLGSVSLIPLRGSENEMRRSVAAFTADPLSVSGSPCLWAGGWGPGWVPAFYSTVDDCPDCPPRLPSGPLPPALVGALIGLFGSHHSKEPLLPGPGSWESPLPGPGSWEPG

SEQ ID NO: 56223 - protein, 102 aa, Homo sapiens
MQGKLQPPMEREARDGVPSGKVFLKDLSSTPMASNNTASIAQARKLVEQLKMEANIDRIKVSKAAADLMAYCEAHAKEDPLLTPVPASENPFREKKFFCAIL

SEQ ID NO: 56224 - protein, 111 aa, Homo sapiens
MGLLECCARCLVGAPFASLVATGLCFFGVALFCGCGHEALTGTEKLIETYFSKNYQDYEYLINVIHAFQYVIYGTASFFFLYGALLLAEGFYTTGAVRQIFGDYKTTICGK

SEQ ID NO: 56225 - protein, 221 aa, Homo sapiens
MAASMFYGRLVAVATLRNHRPRTAQRAAAQVLGSSGLFNNHGLQVQQQQQRNLSLHEYMSMELLQEAGVSVPKGYVAKSPDEAYAIAKKLGSKDVVIKAQVLAGGRGKGTFESGLKGGVKIVFSPEEAKAVSSQMIGKKLFTKQTGEKGRICNQVLVCERKYPRREYYFAITMERSFQGPVLIGSSHGGVNIEDVAAESPEAIIKEPIDIEEGIKKEQALQ

SEQ ID NO: 56226 - protein, 145 aa, Homo sapiens
MPLGHIMRLDLEKIALEYIVPCLHEAMVACYPGNGTGYVRHVDNPNGDGRCITCIYYLNKNWDAKLHGGILRIFPEGKSFIADVEPIFDRLLFFWSDRRNPHEVQPSYATRYAMTVWYFDAEERAEAKKKFRNLTRKTESALTED

SEQ ID NO: 56227 - protein, 194 aa, Homo sapiens
  MOD_RES (1)..(1): Any amino acid
XNWRFEQEVEEWEEEQSCKIPQMESSTNSSSQDYSTSQEPSVASSHGVRCLSSEHAVIVKEQTAQAIANTARAYEKSGVEAALSELKEAEPKKPMPQETNLAEQSEQPPKANDAESTAQPNSEVMLSPAMQGVILAIAKARQTFDRDGSEAGLIKAFHEEYSRLYQLAKETPTSHSDPRLQHVLVYFFQNEAPK

SEQ ID NO: 56228 - protein, 728 aa, Homo sapiens
MLLPQGKEAVEGKKCQGRQRRAGLSEVWSRKLRNESLGTWSTQGCKTVLTDASHTKCLCDRLSTFAILAQQPREIIMESSGTPSVTLIVGSGLSCLALITLAVVYAALWRYIRSERSIILINFCLSIISSNILILVGQTQTHNKSICTTTTAFLHFFFLASFCWVLTEAWQSYMAVTGKIRTRLIRKRFLCLGWGLPALVVATSVGFTRTKGYGTDHYCWLSLEGGLLYAFVGPAAAVVLVNMVIGILVFNKLVSRDGILDKKLKHRAGQMSEPHSGLTLKCAKCGVVSTTALSATTASNAMASLWSSCVVLPLLALTWMSAVLAMTDKRSILFQILFAVFDSLQGFVIVMVHCILRREVQDAFRCRLRNCQDPINADSSSSFPNGHAQIMTDFEKDVDIACRSVLHKDIGPCRAATITGTLSRISLNDDEEEKGTNPEGLSYSTLPGNVISKVIIQQPTGLHMPMSMNELSNPCLKKENSELRRTVYLCTDDNLRGADMDIVHPQERMMESDYIVMPRSSVNNQPSMKEESKMNIGMETLPHERLLHYKVNPEFNMNPPVMDQFNMNLEQHLAPQEHMQNLPFEPRTAVKNFMASELDDNAGLSRSETGSTISMSSLERRKSRYSDLDFEKVMHTRKRHMELFQELNQKFQTLDRFRDIPNTSSMENPAPNKNPWDTFKNPSEYPHYTTINVLDTEAKDALELRPAEWEKCLNLPLDVQEGDFQTEV

SEQ ID NO: 56229 - protein, 245 aa, Homo sapiens
MAGSSSLEAVRRKIRSLQEQADAAEERAGTLQRELDHERKLRETAEADVASLNRRIQLVEEELDRAQERLATALQKLEEAEKAADESERGMKVIESRAQKDEEKMEIQEIQLKEAKHIAEDADRKYEEVARKLVIIESDLERAEERAELSEGQVRQLEEQLRIMDQTLKALMAAEDKYSQKEDRYEEEIKVLSDKLKEAETRAEFAERSVTKLEKSIDDLEDQLYQQLEQNRRLTNELKLALNED

SEQ ID NO: 56230 - protein, 24 aa, Homo sapiens
MEAREPGRPTPTYHLVPNTSQSQV

SEQ ID NO: 56231 - protein, 194 aa, Homo sapiens
MPLHKYPVWLWKRLQLREGICSRLPGHYLRSLEEERTPTPVHYRPHGAKFKINPKNGQRERVEDVPIPIYFPPESQRGLWGGEGWILGQIYANNDKLSKRLKKVWKPQLFEREFYSEILDKKFTVTVTMRTLDLIDEAYGLDFYILKTPKEDLCSKFGMDLKRGMLLRLARQDPQLHPEDPERRAAIYDKYKEF

SEQ ID NO: 56232 - protein, 429 aa, Homo sapiens
MQLPRWWELGDPCAWTGQGRGTRRMSPATTGTFLLTVYSIFSKVHSDRNVYPSAGVLFVHVLEREYFKGEFPPYPKPGEISNDPITFNTNLMGYPDRPGWLRYIQRTPYSDGVLYGSPTAENVGKPTIIEITAYNRRTFETARHNLIINIMSAEEFFIKNMNVEEMLASEVLGDFLGAVKNVWQPERLNAINITSALDRGGRVPLPINDLKEGVYVMVGADVPFSSCLREVENPQNQLRCSQEMEPVITCDKKFRTQFYIDWCKISLVDKTKQVSTYQEVIRGEGILPDGGEYKPPSDSLKSRDYYTDFLITLAVPSAVALVLFLILAYIMCCRREGVEKRNMQTPDIQLVHHSAIQKSTKELRDMSKNREIAWPLSTLPVFHPVTGEIIPPLHTDNYDSTNMPLMQTQQNLPHQTQIPQQQTTGKWYP

SEQ ID NO: 56233 - protein, 197 aa, Homo sapiens
  MOD_RES (1)..(1): Any amino acid
XSLLMNRRKFLYQFKNVRWAKGRRETYLCYVVKRRDSATSFSLDFGYLRNKNGCHVELLFLRYISDWDLDPGRCYRVTWFTSWSPCYDCARHVADFLRGNPNLSLRIFTARLYFCEDRKAEPEGLRRLHRAGVQIAIMTFKDYFYCWNTFVENHERTFKAWEGLHENSVRLSRQLRRILLPLYEVDDLRDAFRTLGL

SEQ ID NO: 56234 - protein, 223 aa, Homo sapiens
METPLDVLSRAASLVHADDEKREAALRGEPRIQTLPVASALSSHRTGPPPISPSKRKFSMEPGDEDLDCDNDHVSKMSRIFNPHLNKTANGDCRRDPRERSRSPIERAVAPTMSLHGSHLYTSLPSLGLEQPLALTKNSLDASRPAGLSPTLTPGERQQNRPSVITCASAGARNCNLSHCPIAHSGCAAPGPASYRRPPSAATTCDPVVEEHFRRSLGKNYKE

SEQ ID NO: 56235 - protein, 229 aa, Homo sapiens
MKGGKVHQTCPFHNRTSVLTGLVITNDPVSDSLFVKGCFELQERCLQNPLENLELTYGYLLEEDVKCLSQYPSLGYLKHLNLSYVLLFRISLEPLGALLEKIAASLETLILEGCQIHYSQLSAILPGLSRCSQLTTFYFGRNCMSMGALKDLLRHTSGLSKLSLETYPAPEESLNSLVRVNWEIFTPLRAELMCTLREVRQPKRIFIGPTPCPSCGSSLSEELELHLCC

SEQ ID NO: 56236 - protein, 120 aa, Homo sapiens
MSAKELCENDDLATSLVLDPYLGFQTHKMNTSAFPSRSSRHFSKSDSFSHNNPVRFRPIKGRQEELKEVIERFKKDEHLEKAFKCLTSGEWARHYFLNKNKMQEKLFKEHVFIYLRMFAT

SEQ ID NO: 56237 - protein, 154 aa, Homo sapiens
MSVKGCFTDFHIDFGGTSVWYHVFRGGKIFWLIPPTLHNLALYEEWVLSGKQSDIFLGDRVERCQRIELKQGYTFFIPSGWIHAVYTPVDSLVFGGNILHSFNVPMQLRIYEIEDRTRVQPKFRYPFYYEMCWYVLERYVYCVTQRSHLTQEYQ

SEQ ID NO: 56238 - protein, 201 aa, Homo sapiens
MAAGFGRCCRVLRSISRFHWRSQHTKANRQREPGLGFSFEFTEQQKEFQATARKFAREEIIPVAAEYDKTGEYPVPLIRRAWELGLMNTHIPENCGGLGLGTFDACLISEELAYGCTGVQTAIEGNSLGQMPIIIAGNDQQKKKYLGRMTEEPLMCAYCVTEPGAGSDVAGIKTKAEKKGDEYIINGQKMWITNGGKANWN

SEQ ID NO: 56239 - protein, 334 aa, Homo sapiens
MGKKGKKEKKGRGAEKTAAKMEKKVSKRSRKEEAVVVPQGGGQLWVFGGEFASPNGEQFYHYKDLWVLHLATKTWEQVKSTGGPSGRSGHRMVAWKRQLILFGGFHESTRDYIYYNDVYAFNLDTFTWSKLSPSGTGPTPRSGCQMSVTPQGGIVVYGGYSKQRVKKDVDKGTRHSDMFLLKPEDGREDKWVWTRMNPSGVKPTPRSGFSVAMAPNHQTLFFGGVCDEEEEESLSGEFFNDLYFYDATRNRWFEGQLKGPKSEKKKRRRGRKEEPEGGSRPACGGAGTQGPVQLVKEVVAEDGTVVTIKQVLTAPGSAGQPRSEDEDSLEEAGS

SEQ ID NO: 56240 - protein, 199 aa, Homo sapiens
APKRAKRRTVEGGSSSVFSMFDQTQIQEFKEAFTVIDQNRDGIIDKEDLRDTFAAMGRLNVKNEELDAMMKEASGPINFTVFLTMFGEKLKGADPEDVITGAFKVLDPEGKGTIKKKFLEELLTTQCDRFSQEEVSGDRGGAGAAKGLGPGRLRACARRPYVFPQIKNMWAAFPPDVGGNVDYKNICYVITHGDAKDQE

SEQ ID NO: 56241 - protein, 367 aa, Homo sapiens
MASLSQLSGHLNYTCGAENSTGASQARPHAYYALSYCALILAIVFGNGLVCMAVLKERALQTTTNYLVVSLAVADLLVATLVMPWVVYLEVTGGVWNFSRICCDVFVTLDVMMCTASILNLCAISIDRYTAVVMPVHYQHGTGQSSCRRVALMITAVWVLAFAVSCPLLFGFNTTGDPTVCSISNPDFVIYSSVVSFYLPFGVTVLVYARIYVVLKQRRRKRILTRQNSQCNSVRPGFPQQTLSPDPAHLELKRYYSICQDTALGGPGFQERGGELKREEKTRNSLMPLREKKATQMVAIVLGAFIVCWLPFFLTHVLNTHCQTCHVSPELYSATTWLGYVNSALNPVIYTTFNIEFRKAFLKILSC

SEQ ID NO: 56242 - protein, 88 aa, Homo sapiens
MGLLTFRDVAIEFSLEEWQCLDTAQRNLYKNVILENYRNLVFLGIAVSKQDLITCLEQEKEPLTVKRHEMVNEPPAVDKHPCTFYECD

SEQ ID NO: 56243 - protein, 36 aa, Homo sapiens
MGSCCSCLNRDSVPDNHPTKFKVTNVDDEGVELGSG

SEQ ID NO: 56244 - protein, 204 aa, Homo sapiens
MSGDHLHNDSQIEADFRLNDSHKHKDKHKDREHRHKEHKKEKDREKSKHSNSEHKDSEKKHKEKEKTKHKDGSSEKHKDKHKDRDKEKRKEEKVRASGDAKIKKEKENGFSSPPQIKDEPEDDGYFVPPKEDIKPLKRPRDEDDADYKPKKIKTEDTKKEKKRKLEEEEDGKLKKPKNKDKDKKVPEPDNKKKKPKKEEEQKWK

SEQ ID NO: 56245 - protein, 60 aa, Homo sapiens
MGNGESQLSSVPAQKLGWFIQEYLKPYEECQTLIDEMVNTICDVLQEPEQFPLVQGVAIA

SEQ ID NO: 56246 - protein, 37 aa, Homo sapiens
MGKNREMRLTHICCCCLLYQLGFLSNGIVSDGIYTAQ

SEQ ID NO: 56247 - protein, 174 aa, Homo sapiens
MGEGAGGGKAKRSMGRATGRMTTSFFPLFWQAGPQPLMSEPPVYCNLVDLRRCPRSPPPGPACPLLQRLDAWEQHLDPNSGRCFYINSLTGCKSWKPPRRSRSETNPGSMEGTQTLKRNNDVLQPQAKGFRSDTGTPEPLDPQGSLSLSQRTSQLDPPALQAPRPLPQLLDDPH

SEQ ID NO: 56248 - protein, 59 aa, Homo sapiens
MGTIHLFRKPQRSFFGKLLREFRLVAADRRSWKILLFGVINLICTGFLLMWCSSTNSIV

SEQ ID NO: 56249 - protein, 131 aa, Homo sapiens
MAVKLHGGIDILVSNAAVNPFFGSLMDVTEEVWDKTLDINVKAPALMTKAVVPEMEKRGGGSVVIVSSIAAFSPSPGFSPYNVSKTALLGLNNTLAIELAPRNIRVNCLHLDLSRLASAGCSGWTRKKRKA

SEQ ID NO: 56250 - protein, 139 aa, Homo sapiens
MAAQCVTKVALNVSCANLLDKDIGSKSDPLCVLFLNTSGQQWYEVERTERIKNCLNPQFSKTFIIDYYFEVVQKLKFGVYDIDNKTIELSDDDFLGECECTLGQIVSSKKLTRPLVMKTGRPAGKGSITISAEEIKDNR

SEQ ID NO: 56251 - protein, 136 aa, Homo sapiens
MDDWKSRLVIKSMLPHFAMVGNRQEPRKLQESGKKPSWMEEEDLSFLYKSSPGRKHQGTVKRRQEEDHFQFPDMADGGYPNKIKRPCLEDVTLAMGPGAHPSTACAELQVPPLTINPSPAAMGVAGQSLLLENNPM

SEQ ID NO: 56252 - protein, 68 aa, Homo sapiens
MARERGQLVFLEGLKSAVDVVFQAQKEPHPLQFLRHLRKNFSPGLVFNITGLRLVFLLFLLSEHWPQT

SEQ ID NO: 56253 - protein, 172 aa, Homo sapiens
MEPEREGTERHPRKVRESRQAPNKLVGAAEAMKAGWDLEESQPEAKKARLSTILFTDNCEVTHDQLCELLKYAVLGKSNVPKPSWCQLFHQNHLNNVVVFVLQGMSQLHFYRFYLEFGCLRKAFRHKFRLPPPSSDFLADVVGLQTEQRAGDLPKTMEGPLPSNAKAAINLQ

SEQ ID NO: 56254 - protein, 142 aa, Homo sapiens
  MOD_RES (1)..(1): Any amino acid
XDFHLSHSLGKGPGAEGGSGSPETQLQVDQDYLIALSLQQQQPRGPLGLTDLELAQQLQQEEYQQQQAAQPVRMRTRVLSLQVGCCLGAHTPGFHLMLCRVQNTCYSCTGLFKVSSLRVLPLPVPLPWSPFLSSSPYSLSQS

SEQ ID NO: 56255 - protein, 22 aa, Homo sapiens
  MOD_RES (1)..(1): Any amino acid
XDRGSTLGRLYFGRGTQLTVWP

SEQ ID NO: 56256 - protein, 248 aa, Homo sapiens
MAVYWCTEALPLSVTALLPIVLFPFMGILPSNKVCPQYFLDTNFLFLSGLIMASAIEEWNLHRRIALKILMLVGVQPARLILGMMVTTSFLSMWLSNTASTAMMLPIANAILKSLFGQKEVRKDPSQESEENTAKTTLGRQRFHWICRLTPGRRMNIVGTSGRASSSPSPTQPVLGAQPHSRAQPLTSSCLASSRGWLWISFLYGGLSFRGWRKNKSEIRTNAEDRARAVIREEYQNLGPIKFAEQAV

SEQ ID NO: 56257 - protein, 281 aa, Homo sapiens
DESGEEKNGDEDCQRGGQKKKGNKHKWVPLQIDMKPEVPREKLASRPTRPPEPRHIPANRGEIKAHFDYQFGYRKFDGVEGPRTPKYMNNITYYFDNVSSTELYSVDQELLKDYIKRQIEYYFSVDNLERDFFLRRKMDADGFLPITLIASFHRVQALTTDISLIFAALKDSKVVEIVDEKVRRREEPEKWPLPPIVDYSQTDFSQLLNCPEFVPRQHYQKETESAPGSPRAVTPVPTKTEEVSNLKTLPKGLSASLPDLDSENWIEVKKRPRPSPARPKK

SEQ ID NO: 56258 - protein, 86 aa, Homo sapiens
MTKTSTCIYHFLVLSWYTFLNYYISQEGKDEVKPKILANGARWKYMTLLNLSSSRTGLLGLTSTSQEALGSSCRPFSTGSPAWMMC

SEQ ID NO: 56259 - protein, 57 aa, Homo sapiens
MAGPATQSPMKLMVCHLQAVPPRGAGAARTLSGHPLGSPEQLPQPGPAAGRLLEPTP

SEQ ID NO: 56260 - protein, 69 aa, Homo sapiens
MSSQKGNVARSRPQKHQNTFSFKNDKFDKSVQTKKINAKLHDGVCQRCKEVLEWRVKYSKYKPLSKPKK

SEQ ID NO: 56261 - protein, 223 aa, Homo sapiens
MLQEESDLSLIIAQIVQKLKGSNLYSQLERQAWGSWEKRILKSLNSMCTELSIPLARKRPVGEQKELLNKWNEMGTDEPDLSLFRPVYAPKDFLEVLINLRNPNYENGDSLSFRTHLGLIQVPLKVKDIPELKECFVELGLNIGQLGIDDSTQVPPELFENEHVRIGQKVLAEQDSAAAQQYIRQGSPTALRAELWALILNISSQPEDVLYYEQLKTNVIQHD

SEQ ID NO: 56262 - protein, 145 aa, Homo sapiens
RIPDPSHLPLVAPWKTYPLFFGTAIFSFEGIGMVLPLENKMKDPRKFPLILYLGMVIVTILYISLGCLGYLQFGANIQGSITLNLPNCWLYQSVKLLYSIGIFFTYALQFYVPAEIIIPFFVSRAPEHCELVVDLFVRTVLVCLT

SEQ ID NO: 56263 - protein, 117 aa, Homo sapiens
  MOD_RES (1)..(1): Any amino acid
XSISAIHILFCTVWAVGLASYLLHRTQQNILHEEEGRFKLFFCLSLLSSWDYRELSGLVIITAWIILCHSSSKNPVGGRIQLAIAIVITLFPFISWVYIYINKEMRSSWPTHCKTVI

SEQ ID NO: 56264 - protein, 103 aa, Homo sapiens
MSFIFDWIYSGFSSVLQFLGLYKKTGKLVFLGLDNAGKTTLLHMLKDDRLGQHVPTLHPTSEELTIAGMTFTTFDLGGHVQARRVWKNYLPAINGIVFLVDCA

SEQ ID NO: 56265 - protein, 601 aa, Homo sapiens
  MOD_RES (1)..(1): Any amino acid
XRVAKLVASSLQTPVNPITGARVAQYEREDPLKALAAAEAILEDEEEEKVAQPAGASADLNTSFSGVDEHAPISYEDFVNFPDIHHSNEEYFKKVEELKAAHIETMAKLEKMYQDKLHLKEVQPVVIREDSLSDSSRSVSEKNSYHPVSLMTSFSEPDLGQSSSLYVSSSEEELPNLEKEYPRKNRMMTYAKELINNMWTDFCVEDYIRCKDTGFHAAEKRRKKRKEWVPTITVPEPFQMMIREQKKKEESMKSKSDIEMVHKALKKQEEDPEYKKKFRANPVPASVFLPLYHDLVKQKEERRRSLKEKSKEALLASQKPFKFIAREEQKRAAREKQLRDFLKYKKKTNRFKARPIPRSTYGSTTNDKLKEEELYRNLRTQLRAQEHLQNSSPLPCRSACGCRNPRCPEQAVKLKCKHKVRCPTPDFEDLPERYQKHLSEHKSPKLLTVCKPFDLHASPHASIKREKILADIEADEENLKETRWPYLSPRRKSPVRCAGVNPVPCNCNPPVPTVSSRGREQAVRRSLEEKKMLEEERNRILTKQKQRMKELQKLLTTRAKAYDSHQSLAQISKSRVKCLRPGAMAHACNPSTLRGQDRQIT

SEQ ID NO: 56266 - protein, 165 aa, Homo sapiens
MSREMQDVDLAEVKPLVEKGETITGLLQEFDVQEQDIETLHGSVHVTLCGTPKGNRPVILTYHDIGMNHKTCYNPLFNYEDMQEITQHFAVCHVDAPGQQDGAASFPAGYMYPSMDQLAEMLPGVLQQFGLKSIIGMGTGAGAYILTRFALNNPEMVEGLVLINV

SEQ ID NO: 56267 - protein, 202 aa, Homo sapiens
  MOD_RES (1)..(1): Any amino acid
XGHLLVEADDVRAWSCPQHNAYRLYHCEAEQVAVCQYCCYYSGAHQGHSVCDVEIRRNEIRKMLMKQQDRLEEREQDIEDQLYKLESDKRLVEEKVNQLKEEVRLQYEKLHQLLDEDLRQTVEVLDKAQAKFCSENAAQALHLGERMQEAKKLLGSLQLLFDKTEDVSFMKNTKSVKILMDSRCPVHCPQDPDLHEQQPFPH

SEQ ID NO: 56268 - protein, 131 aa, Homo sapiens
MPAAHATSSAPTVTLVQLPNGQTVQVHGVIQAAQPSVIQSPQVQTVQSSCKDLKRLFSGTQISTIAESEDSQESVDSVTDSQKRREILSRRPSYRKILNDLSSDAPGVPRIEEEKSEEETSAPAITTVTVP

SEQ ID NO: 56269 - protein, 75 aa, Homo sapiens
MPHTELGTKPLQAPGFRVDSSSWTLPRPKSIRPRAAPERSRSVNDLSYYQRDPAGRPWLFEKPLFTRDASQLKGT

SEQ ID NO: 56270 - protein, 359 aa, Homo sapiens
SREQSDDETEESVKFKRLHKLVNSTRRVRKKLIRVEEMKKPSTEGGEEHVFENSPVLDERSALYSGVHKKPLFFDGSPEKPPEDDSDSLTTSPSSSSLDTWGAGRKLVKTFSKGESRGLIKPPKKMGTFFSYPEEEKAQKVSRSLTEGEMKKGLGSLSHGVSTDGVCFYDNHRRRHHLLVSLEEFQSVRKQIRLKKTDTNYSCSRAFLCQRPSRKGVTSTTCDLQLLRQKGKGGGSCGFPGRRVRGRTSVSEFNITYVVERSLYSHLNLTQLVRPASDRTLSKAERQDLRRCLLEEDEEAKRKWAATVDRCTKRVLLRIHQKSRTCSFGGFDLTNRSLHVGSNNSDPMGKEGDFVYKEV

SEQ ID NO: 56271 - protein, 429 aa, Homo sapiens
MVKLIHTLADHGDDVNCCAFSFSLLATCSLDKTIRLYSLRDFTELPHSPLKFHTYAVHCCCFSPSGHILASCSTDGTTVLWNTENGQMLAVMEQPSGSPVRVCQFSPDSTCLASGAADGTVVLWNAQSYKLYRCGSVKDGSLAACAFSPNGSFFVTGSSCGDLTVWDDKMRCLHSEKAHDLGITCCDFSSQPVSDGEQGLQFFRLASCGQDCQVKIWIVSFTHILGFELKYKSTLSGHCAPVLACAFSHDGQMLVSGSVDKSVIVYDTNTENILHTLTQHTRYVTTCAFAPNTLLLATGSMDKTVNIWQFDLETLCQARRTEHQLKQFTEDWSEEDVSTWLCAQDLKDLVGIFKMNNIDGKELLNLTKESLADDLKIDGYSYEKEAMENWISKKKRTSPMTNLVLPSAVLTPNRTLKMAINRWLETHQK

SEQ ID NO: 56272 - protein, 2507 aa, Homo sapiens
MARFGDEMPARYGGGGSGAAAGVVVGSGGGRGAGGSRQGGQPGAQRMYKQSMAQRARTMALYNPIPVRQNCLTVNRSLFLFSEDNVVRKYAKKITEWPPFEYMILATIIANCIVLALEQHLPDDDKTPMSERLDDTEPYFIGIFCFEAGIKIIALGFAFHKGSYLRNGWNVMDFVVVLTGILATVGTEFDLRTLRAVRVLRPLKLVSGIPSLQVVLKSIMKAMIPLLQIGLLLFFAILIFAIIGLEFYMGKFHTTCFEEGTDDIQGESPAPCGTEEPARTCPNGTKCQPYWEGPNNGITQFDNILFAVLTVFQCITMEGWTDLLYNSNDASGNTWNWLYFIPLIIIGSFFMLNLVLGVLSGEFAKERERVENRRAFLKLRRQQQIERELNGYMEWISKAEEVILAEDETDGEQRHPFDGALRRTTIKKSKTDLLNPEEAEDQLADIASVGSPFARASIKSAKLENSTFFHKKERRMRFYIRRMVKTQAFYWTVLSLVALNTLCVAIVHYNQPEWLSDFLYYAEFIFLGLFMSEMFIKMYGLGTRPYFHSSFNCFDCGVIIGSIFEVIWAVIKPGTSFGISVLRALRLLRIFKVTKYWASLRNLVVSLLNSMKSIISLLFLLFLFIVVFALLGMQLFGGQFNFDEGTPPTNFDTFPAAIMTVFQILTGEDWNEVMYDGIKSQGGVQGGMVFSIYFIVLTLFGNYTLLNVFLAIAVDNLANAQELTKDEQEEEEAANQKLALQKAKEVAEVSPLSAANMSIAVKEQQKNQKPAKSVWEQRTSEMRKQNLLASREALYNEMDPDERWKAAYTRHLRPDMKTHLDRPLVVDPQENRNNNTNKSRAAEPTVDQRLGQQRAEDFLRKQARYHDRARDPSGSAGLDARRPWAGSQEAELSREGPYGRESDHHAREGSLEQPGFWEGEAERGKAGDPHRRHVHRQGGSRESRSGSPRTGADGEHRRHRAHRRPGEEGPEDKAERRARHREGSRPARGGEGEGEGPDGGERRRRHRHGAPATYEGDARREDKERRHRRRKENQGSGVPVSGPNLSTTRPIQQDLGRQDPPLAEDIDNMKNNKLATAESAAPHGSLGHAGLPQSPAKMGNSTDPGPMLAIPAMATNPQNAASRRTPNNPGNPSNPGPPKTPENSLIVTNPSGTQTNSAKTARKPDHTTVDIPPACPPPLNHTVVQVNKNANPDPLPKKEEEKKEEEEDDRGEDGPKPMPPYSSMFILSTTNPLRRLCHYILNLRYFEMCILMVIAMSSIALAAEDPVQPNAPRNNVLRYFDYVFTGVFTFEMVIKMIDLGLVLHQGAYFRDLWNILDFIVVSGALVAFAFTGNSKGKDINTIKSLRVLRVLRPLKTIKRLPKLKAVFDCVVNSLKNVFNILIVYMLFMFIFAVVAVQLFKGKFFHCTDESKEFEKDCRGKYLLYEKNEVKARDREWKKYEFHYDNVLWALLTLFTVSTGEGWPQVLKHSVDATFENQGPSPGYRMEMSIFYVVYFVVFPFFFVNIFVALIIITFQEQGDKMMEEYSLEKNERACIDFAISAKPLTRHMPQNKQSFQYRMWQFVVSPPFEYTIMAMIALNTIVLMMKFYGASVAYENALRVFNIVFTSLFSLECVLKVMAFGILNYFRDAWNIFDFVTVLGSITDILVTEFGNNFINLSFLRLFRAARLIKLLRQGYTIRILLWTFVQSFKALPYVCLLIAMLFFIYAIIGMQVFGNIGIDVEDEDSDEDEFQITEHNNFRTFFQALMLLFRSATGEAWHNIMLSCLSGKPCDKNSGILTRECGNEFAYFYFVSFIFLCSFLMLNLFVAVIMDNFEYLTRDSSILGPHHLDEYVRVWAEYDPAAWGRMPYLDMYQMLRHMSPPLGLGKKCPARVAYKRLLRMDLPVADDNTVHFNSTLMALIRTALDIKIAKGGADKQQMDAELRKEMMAIWPNLSQKTLDLLVTPHKSTDLTVGKIYAAMMIMEYYRQSKAKKLQAMREEQDRTPLMFQRMEPPSPTQEGGPGQNALPSTQLDPGGALMAHESGLKESPSWVTQRAQEMFQKTGTWSPEQGPPTDMPNSQPNSQSVEMREMGRDGYSDSEHYLPMEGQGRAASMPRLPAENQRRRGRPRGNNLSTISDTSPMKRSASVLGPKARRLDDYSLERVPPEENQRHHQRRRDRSHRASERSLGRYTDVDTGLGTDLSMTTQSGDLPSKERDQERGRPKDRKHRQHHHHHHHHHHPPPPDKDRYAQERPDHGRARARDQRWSRSPSEGREHMAHRQGSSSVSGSPAPSTSGTSTPRRGRRQLPQTPSTPRPHVSYSPVIRKAGGSGPPQQQQQQQQQQQQQAVARPGRAATSGPRRYPGPTAEPLAGDRPPTGGHSSGRSPRMERRVPGPARSESPRACRHGGARWPASGPHVSEGPPGPRHHGYYRGSDYDEADGPGSGGGEEAMAGAYDAPPPVRHASSGATGRSPRTPRASGPACASPSRHGRRLPNGYYPAHGLARPRGPGSRKGLHEPYSESDDDWC

SEQ ID NO: 56273 - protein, 157 aa, Homo sapiens
MSTPDPPLGGTPRPGPSPGPGPSPGAMLGPSPGPSPGSAHSMMGPSPGPPSAGHPIPTQGPGGYPQDNMHQMHKPMESMHEKGMSDDPRYNQMKGMGMRSGGHAGMGPPPSPMDQHSQGYPSPLGGSEHASSPVPASGPSSGPQMSSGPGGAPLDGA

SEQ ID NO: 56274 - protein, 313 aa, Homo sapiens
MAAAALGQLFEGMKAFKGKDQQVRLFRPWLNMDRMLRSAMRLCLPSFDKLELLECIRRLIEVDKDWVPDAAGTSLYVRPVLIGNEPSLGVSQPTRALLFVILCPVGAYFPGGSVTPVSLLADPAFIRAWVGGVGNYKLGGNYGPTVLVQQEALKRGCEQVLWLYGPDHQLTEVGTMNIFVYWTHEDGVLELVTPPLNGVILPGVVRQSLLDMAQTWGEFRVVERTITMKQLLRALEEGRVREVFGSGTACQVCPVHRILYKDRNLHIPTMENGPELILRFQKELKEIQVSCRELGNGLGACSLEKLVSHEPLD

SEQ ID NO: 56275 - protein, 98 aa, Homo sapiens
MASQKRPSQRHGSKYLATASTMDHARHGFLPRHRDTGILDSIGRFFGGDRGAPKRGSGKDSHHPARTAHYGSLPQKSHGRTQDENPVVHFFKNIAGAR

SEQ ID NO: 56276 - protein, 587 aa, Homo sapiens
MESSSSSNSYFSVGPTSPSAVVLLYSKELKKWDEFEDILEERRHVSDLKFAMKCYTPLVYKGITPCKPIDIKCSVLNSEEIHYVIKQLSKESLQSVDVLREEVSEILDEMSHKLRLGAIRFCAFTLSKVFKQIFSKLQRAIQEHPVVLLPSHRSYIDFLMLSFLLYNYDLPVPVIAAGMDFLGMKMVGELLRMSGAFFMRRTFGGNKLYWAVFSEYVKTMLRNGYAPVEFFLEGTRSRSAKTLTPKFGLLNIVMEPFFKREVFDTYLVPISISYDKILEETLYVYELLGVPKPKESTTGLLKARKILSENFGSIHVYFGDPVSLRSLAAGRMSRSSYNLVPRYIPQKQSEDMHAFVTEVAYKMELLQIENMVLSPWTLIVAVLLQNRPSMDFDALVEKTLWLKGLTQAFGGFLIWPDNKPAEEVVPASILLHSNIASLVKDQVILKVDSGDSEVVDGLMLQHITLLMCSAYRNQLLNIFVRPSLVAVALQMTPGFRKEDVYSCFRFLRDVFADEFIFLPGNTLKDFEEGCYLLCKSEAIQVTTKDILVTEKGNTVLEFLVGLFKPFVESYQIICKYLLSEEEDHFSE

SEQ ID NO: 56277 - protein, 50 aa, Homo sapiens
MALRVVRSVRALLCTLRAVPSPAAPCPPRPWQLGVGAVRTLRTGPALLSG

SEQ ID NO: 56278 - protein, 133 aa, Homo sapiens
  MOD_RES (1)..(1): Any amino acid
XKETMSLADSLYNLQLIQEFCQEYLNQCCHFTLEDMLYAASSIKSNYLVFMAELFWWFEVVKPSFVQPRVVRPQGAEPVKDMPSIPVLNAAKRNVLDSSSDFPSSGEGATFTQSHHHLPSRYSRPQAHSSASG

SEQ ID NO: 56279 - protein, 72 aa, Homo sapiens
MSGKDRIEIFPSRMAQTIMKARLKGAQTGRNLLKKKSDALTLRFRQILKKIIETKMLMGEVMREAAFSLAEA

SEQ ID NO: 56280 - protein, 183 aa, Homo sapiens
MFAEFFGGRNPFDTFFGQRNGEEGMDIDDPFSGFPMGMGGFTNVNFGRSRSAQEPARKKQDPPVTHDLRVSLEEIYSGCTKKMKISHKRLNPDGKSIRNEDKILTIEVKKGWKEGTKITFPKEGDQTSNNIPADIVFVLKDKPHNIFKRDGSDVIYPARISLREALCGCTVNVPTLDGRTIPV

SEQ ID NO: 56281 - protein, 121 aa, Homo sapiens
SDIPILFSLQRVLLILGLFFTGLLPFVPIREQFFEIPMPSIILKLKEPHTMSRSQKFLIWLSDLLLMRKALFDHLTARGIQVYIWVLNEEQEYKRAFDLGATGVMTDYPTKLRDFLHNFSA

SEQ ID NO: 56282 - protein, 75 aa, Homo sapiens
MSGFNFGGTGAPTGGFTFGTAKTATTTPATGFSFSTSGTGGFNFGAPFQPATSTPSTGLFSLATQTPATQTTGFT

SEQ ID NO: 56283 - protein, 119 aa, Homo sapiens
METRPQSKDSTSVQDFSKAESCKVAIIDRLTRNSVYDSNLEAALECENWLENQQGNQERHLREMFTHMNSLSEETDHKHDVYWKSFNQKSVLITEDRVPKGSYAFHTLEKSLKQKSNLM

SEQ ID NO: 56284 - protein, 334 aa, Homo sapiens
MSTQDERQINTEYAVSLLEQLKLFYEQQLFTDIVLIVEGTEFPCHKMVLATCSSYFRAMFMSGLSESKQTHVHLRNVDAATLQIIITYAYTGNLAMNDSTVEQLYETACFLQVEDVLQRCREYLIKKINAENCVRLLSFADLFSCEELKQSAKRMVEHKFTAVYHQDAFMQLSHDLLIDILSSDNLNVEKEETVREAAMLWLEYNTESRSQYLSSVLSQIRIDALSEVTQRAWFQGLPPNDKSVVVQGLYKSMPKFFKPRLGMTKEEMMIFIEASSENPCSLYSSVCYSPQAEKVYKLCSPPADLHKVGTVVTPDNDIYIAGGQVPLKHKNKSQ

SEQ ID NO: 56285 - protein, 320 aa, Homo sapiens
GTLYPAYYSYKAVKSKDIKEYVKWMMYWIIFALFTTAETFTDIFLCWFPFYYELKIAFVAWLLSPYTKGSSLLYRKFVHPTLSSKEKEIDDCLVQAKDRSYDALVHFGKRGLNVAATAAVMAASKVARLFHFIFSLDLREGQVTLLRGVTNSKLIQLGSEARPPALLTSTWSGSEGQGALSERLRSFSMQDLTTIRGDGAPAPSGPPPPGSGRASGKHGQPKMSRSASESASSSVCTCCSTCRTWKVVEGDVNEGGMKAWEPHQVQNPLAFSDDEEEDLLDFMYKYKAPRRMELPLEAPPRILRSRFRKKSTSSSATETT

SEQ ID NO: 56286 - protein, 13 aa, Homo sapiens
MAGRGSLVSWRAF

SEQ ID NO: 56287 - protein, 88 aa, Homo sapiens
MASLDDPGEVREGFLCPLCLKDLQSFYQLHSHYEEEHSGEDRDVKGQIKSKRRGPCLSPAVVESFNSRDSSHQLWCCHRNMIIVVANR

SEQ ID NO: 56288 - protein, 58 aa, Homo sapiens
MGCKGDASGVCYKMGVLVVLTVLWLFSSVKADSKAITTSLTTKWFSTPLLLEASCGVE

SEQ ID NO: 56289 - protein, 148 aa, Homo sapiens
MAVVSEDDFQHSSNSTYRTTSSSLRADQEALLEKLLDRPPPGLQRPEDRFCGTYIIFFSLGIGSLLPWNFFITAKEYWMFKLRNSSSPATGEDPEGSDILNYFESYLAVASTVPSMLCLVANFLLVNRRSHGRDGQRRGLIGGLGCIQ

SEQ ID NO: 56290 - protein, 1018 aa, Homo sapiens
MLVGSQSFSPGGPNGIIRSQSFAGFSGLQERRSRCNSFIENSSALKKPQAKLKKMHNLGHKNNNPPKEPQPKRVEEVYRALKNGLDEYLEVHQTELDKLTAQLKDMKRNSRLGVLYDLDKQIKTIERYMRRLEFHISKVDELYEAYCIQRRLQDGASKMKQAFATSPASKAARESLTEINRSFKEYTENMCTIEVELENLLGEFSIKMKGLAGFARLCPGDQYEIFMKYGRQRWKLKGKIEVNGKQSWDGEETVFLPLIVGFISIKVTELKGLATHILVGSVTCETKELFAARPQVVAVDINDLGTIKLNLEITWYPFDVEDMTASSGAGNKAAALQRRMSMYSQGTPETPTFKDHSFFSNLPDDIFENGKAAEEKMPLSLSFSDLPNGDCALTSHSTGSPSNSTNPEITITPAEFNLSSLASQNEGMDDTSSASSRNSLGEGQEPKSHLKEEDPEEPRKPASAPSEACRRQSSGAGAEHLFLENDVAEALLQESEEASELKPVELDTSEGNITKQLVKRLTSAEVPMATDRLLSEGSVGGESEGCRSFLDGSLEDAFNGLLLALEPHKEQYKEFQDLNQEVMNLDDILKCKPAVSRSRSSSLSLTVESALESFDFLNTSDFDEEEDGDEVCNVGGGADSVFSDTETEKHSYRSVHPEARGHLSEALTEDTGVGTSVAGSPLPLTTGNESLDITIVRHLQYCTQLVQQIVFSSKTPFVARSLLEKLSRQIQVMEKLAAVSDENIGNISSVVEAIPEFHKKLSLLSFWTKCCSPVGVYHSPADRVMKQLEASFARTVNKEYPGLADPVFRTLVSQILDRAEPLLSSSLSSEVVTVFQYYSYFTSHGVSDLESYLSQLARQVSMVQTLQSLRDEKLLQTMSDLAPSNLLAQQEVLRTLALLLTREDNEVSEAVTLYLAAASKNQHFREKALLYYCEALTKTNLQLQKAACLALKILEATESIKMLVTLCQSDTEEIRNVASETLLSLGEDGRLAYEQLDKFPRDCVKVGGRHGTEVATAF

SEQ ID NO: 56291 - protein, 140 aa, Homo sapiens
  MOD_RES (1)..(1): Any amino acid
XSLQETIQSLKLTNQELLRKGSSNNQDVVTCDMACKGLLQQVQGPRLPWTRLLLLLLVFAVGFLCHDLRSHSSFQAGWGRHCRSGAPTCSPWCGPACSWPGLTPMPQSASFLPTVPLTLRGLVTVSPVSLRGYRSSSPIP

SEQ ID NO: 56292 - protein, 161 aa, Homo sapiens
MMPSCNRSCSCSRGPSVEDGKWYGVRSYLHLFYEDCAGTALSDDPEGPPVLCPRRPWPSLCWKISLSSGTLLLLLGVAALTTGYAVPPKLEGIGEGEFLVLDQRAADYNQALGTCRLAGTALCVAAGVLLAICLFWAMIGWLSQDTKAEPLDPEADSHVEV

SEQ ID NO: 56293 - protein, 119 aa, Homo sapiens
MEERGDSEPTPGCSGLGPGGVRGFGDGGGAPSWAPEDAWMGTHPKYLEMMELDIGDATQVYVAFLVYLDLMESKSWHEVNCVGLPELQLICLVGTEIEGEGLQTVVPTPITASLSHNRW

SEQ ID NO: 56294 - protein, 437 aa, Homo sapiens
MAQVAVSTLPVEEESSSETRMVVTFLVSALESMCKELAKSKAEVACIAVYETDVFVVGTERGCAFVNARTDFQKDFAKYCVAEGLCEVKPPCPVNGMQVHSGETEILRKAVEDYFCFCYGKALGTTVMVPVPYEKMLRDQSAVVVQGLPEGVAFQHPENYDLATLKWILENKAGISFIINRPFLGPESQLGGPGMVTDAERSIVSPSESCGPINVKTEPMEDSGISLKAEAVSVKKESEDPNYYQYNMQGSHPSSTSNEVIEMELPMEDSTPLVPSEEPNEDPEAEVKIEGNTNSSSVTNSAAGVEDLNIVQVTVPDNEKERLSSIEKIKQLREQVNDLFSRKFGEAIGVDFPVKVPYRKITFNPGCVVIDGMPPGVVFKAPGYLEISSMRRILEAAEFIKFTVIRPLPGLELSNGLLEAKARGLLEARSLRPAWAT

SEQ ID NO: 56295 - protein, 186 aa, Homo sapiens
DPLLRVQEVLNGTEVNLQHLTALVDCRSLHLDYVQALTGFCYDGVEGLIYLALFSFVTALMFSSIVCSVPHTWQQKRGPDEDGEEEAAPGPRQAHDSLYRVHMPSLYSCGSSYGSETSIPAAAHTVSNAPVTEYMSQNANFQNPRCENTPLIGRESPPPSRYLAALDSGSHAGWQFKPMDSARTLW

SEQ ID NO: 56296 - protein, 265 aa, Homo sapiens
MVVVGILLAYLAGWVLEWRWLAVLGCVPPSLMLLLMCFMPETPRFLLTQHRRQEAMAALRFLWGSEQGWEDPPIGAEQSFHLALLRQPGIYKPFIIGVSLMAFQQLSGVNAVMFYAETIFEEAKFKDSSLASVVVGVIQVLFTAVAALIMDRAGRRLLLVLSGVVMVFSTSAFGAYFKLTQGGPGNSSHVAISAPVSAQPVDASVGLAWLAVGSMCLFIAGFAVGWGPIPWLLMSEIFPLHVKGVATGICVLTNWLMAFLVTKEF

SEQ ID NO: 56297 - protein, 135 aa, Homo sapiens
MQIPKHISIEDITATSTSTTGTSHLVKCAEKEKTFCVNGGECFMVKDLSNPSRYLCKCPNEFTGDRCQNYVMASFYKAEELYQKRVLTITGICIALLVVGIMCVVAYCKTKKQRKKLHDRLRQSLRSERNNMMNI

SEQ ID NO: 56298 - protein, 113 aa, Homo sapiens
MSFKRPCPCKFPPHILPPLGARQGQSLESSCRERLEVFGQRTAGVQPEANVACWVGRGQHGRPLTSARCSLRTENRTLAHSSVSALPEVWIGVPLRDVNGMTHTHTQIKDYMA

SEQ ID NO: 56299 - protein, 58 aa, Homo sapiens
RKGSPDHVEFKSGAGTELSVREAALAPTAPLLVALLLGPKLLLVVGVSAIYICWKQKA

SEQ ID NO: 56300 - protein, 219 aa, Homo sapiens
VVWWLNLLSIALYLLSGSIIAVAMQRGARLPAEVAGLSQVLLRGGGQVLLGWTLHYFPFFLMGRVLYFHHYFPAMLFSSMLTGILWDTLLRLCAWGLASWPLARGIHVAGILSLLLGTAYRSPKNSAAHQDPALGVQLEWNPALERAGREPQLRPQHHGEDSASWAAPSCTAQGRMGARGWEWVRVCVCEGMLSISLWNTDRVTGQLSVINSKIVQAIV

SEQ ID NO: 56301 - protein, 407 aa, Homo sapiens
RFFLKFFLKCNQNCLKNAGNPRDMRRFQVVVSTTVNVDGHVLAVSDNMFVHNNSKHGRRARRLDPSEGTPSYLEHATPCIKAISPSEGWTTGGATVIIIGDNFFDGLQVIFGTMLVWSELITPHAIRVQTPPRHIPGVVEVTLSYKSKQFCKGTPGRFIYTALNEPTIDYGFQRLQKVIPRHPGDPERLPKEVILKRAADLVEALYGMPHNNQEIILKRAADIAEALYSVPRNHNQLPALANTSVHAGMMGVNSFSGQLAVNVSEASQATNQGFTRNSSSVSPHGYVPSTTPQQTNYNSVTTSMNGYGSAAMSNLGGSPTFLNGSAANSPYAIVPSSPTMASSTSLPSNCSSSSGIFSFSPANMVSAVKQKSAFAPVVRPQTSPPPTCTSTNGNSLQAISGMIVPPM

SEQ ID NO: 56302 - protein, 708 aa, Homo sapiens
MPLFFRKRKPSEEARKRLEYQMCLAKEAGADDILDISKCELSEVLIVHTNHLTSLLPKSCSLLSLATIKVLDLHDNQLTALPDDLGQLTALQVLNVERNQLMQLPRSIGNLTQLQTLNVKDNKLKELPDTVGELRSLRTLNISGNEIQRLPQMLAHVRTLEMLSLDASAMVYPPREVCGAGTAAILQFLCKESGLEYYPPSQYLLPILEQDGIENSRDSPDGPTDRFSREELEWQNRFSDYEKRKEQKMLEKLEFERRLELGQREHTQLLQQSSSQKDEILQTVKEEQSRLEQGLSEHQRHLNAERQRLQEQLKQTEQNISSRIQKLLQDNQRQKKSSEILKSLENERIRMEQLMSITQEETESLRRRDVASAMQQMLTESCKNRLIQMAYESQRQNLVQQACSSMAEMDERFQQILSWQQMDQNKAISQILQESAMQKAAFEALQVKKDLMHRQIRSQIKLIETELLQLTQLELKRKSLDTESLQEMISEQRWALSSLLQQLLKEKQQREEELREILTELEAKSETRQENYWLIQYQRLLNQKPLSLKLQEEGMERQLVALLEELSAEHYLPIFAHHRLSLDLLSQMSPGDLAKVGVSEAGLQHEILRRVQELLDAARIQPELKPPMGEVVTPTAPQEPPESVRPSAPPAELEVQASECVVCLEREAQMIFLNCGHVCCCQQCCQPLRTCPLCRQDIAQRLRIYHSS

SEQ ID NO: 56303 - protein, 252 aa, Homo sapiens
MRWLWPLAVSLAVILAVGLSRVSGGAPLHLGRHRAETQEQQSRSKRGTEDEEAKGVQQYVPEEWAEYPRPIHPAGLQPTKPLVATSPNPGKDGGTPDSGQELRGNLTGAPGQRLQIQNPLYPVTESSYSAYAIMLLALVVFAVGIVGNLSVMCIVWHSYYLKSAWNSILASLALWDFLVLFFCLPIVIFNEITKQRLLGDVSCRAVPFMEVSSLGVTTFSLCALGIDRFHVATSTLPKRTSATSWWPTSPPS

SEQ ID NO: 56304 - protein, 126 aa, Homo sapiens
MCIAEIDLIPRDRPFVCAPSSKTGSVTTTYCCNQDHCNKIELPTTGPFSVKSSPGLGPVELAAVIAGPVCFVCISLMLMVYICHNRTVIHHRVPNEEDPSLDRPFISEGTTLKDLIYDMTTSGSGS

SEQ ID NO: 56305 - protein, 58 aa, Homo sapiens
MIPVTEFRQFSEQQPAFRVLKPWWDVFTDYLSVAMLMIGVFGCTLQAVSLKLSGFILF

SEQ ID NO: 56306 - protein, 102 aa, Homo sapiens
MANDSPAKSLVDIDLSSLRDPAGIFELVEVVGNGTYGQVYKGRHVKTGQLAAIKVMDVTEDEEEEIKLEINMLKKYSHHRNIATYYGAFIKKSPPGHDDQLW

SEQ ID NO: 56307 - protein, 250 aa, Homo sapiens
  MOD_RES (1)..(1): Any amino acid
XGIQLSHVTWSADSKVLLFGMANGEIHIYDNQGNFMIKMKLSCLVNVTGAISIAGIHWYHGTEGYVEPDCPCLAVCFDNGRCQIMRHENDQNPVLIDTGMYVVGIQWNHMGSVLAVAGFQKAAMQDKDVNIVQFYTPFGEHLGTLKVPGKEISALSWEGGGLKIALAVDSFIYFANIRPNYKWGYCSNTVVYAYTRPDRPEYCVVFWDTKNNEKYVKYVKGLISITTCGDFCILATKADENHPQYHCLLQ

SEQ ID NO: 56308 - protein, 663 aa, Homo sapiens
MVAERTHKAAATGARGPGELGAPGTVALVAARAERGARLPSPGSCGLLTLALCSLALSLLAHFRTAELQARVLRLEAERGEQQMETAILGRVNQLLDEKWKLHSRRRREAPKTSPGCNCPPGPPGPTGRPGLPGVKGQPGEKGSPGDAGLSIIGPRGPPGQPGTRGFPGFPGPIGLDGKPGHPGPKGDMGLTGPPGQPGPQGQKGEKGQCGEYPHRLLPLLNSVRLAPPPVIKRRTFQGEQSQASIQGPPGPPGPPGPSGPLGHPGLPGPMGPPGLPGPPGPKGDPGIQGYHGRKGERGMPGMPGKHGAKGAPGIAVAGMKGEPGIPGTKGEKGAEGSPGLPGLLGQKGEKGDAGNSIGGGRGEPGPPGLPGPPGPKGEAGVDGQVGPPGQPGDKGERGAAGEQGPDGPKGSKGEPGKGEMVDYNGNINEALQEIRTLALMGPPGLPGQIGPPGAPGIPGQKGEIGLPGPPGHDGEKGPRGKPGDMGPPGPQGPPGKDGPPGVKGENGHPGSPGEKGEKGETGQAGSPGLQGVPGPKGEAGLDGAKGEKGFQGEKGDRGPLGLPGASGLDGRPGPPGTPGPIGVPGPAGPKGERGSKGDPGMTGPTGAAGLPGLHGPPGDKGNRGHRGFKGEKGEPGLPGLDGLDAPCPLGEDGLPVQGCWNK

SEQ ID NO: 56309 - protein, 374 aa, Homo sapiens
MAMIELGFGRQNFHPLKRKSSLLLKLIAVVFAVLLFCEFLIYYLAIFQCNWPEVKTTASDGEQTTREPVLKAMFLADTHLLGEFLGHWLDKLRREWQMERAFQTALWLLQPEVVFILGDIFDEGKWSTPEAWADDVERFQKMFRHPSHVQLKVVAGNHDIGFHYEMNTYKVERFEKVFSSERLFSWKGINFVMVNSVALNGDGCGICSETEAELIEVSHRLNCSREHYPLYRRSDANCSGEDAAPAEERDIPFKENYDVLSREASQKLLWWLQPRLVLSGHTHSACEVHHGGRVPELSVPSFSWRNRNNPSFIMGSITPTDYTLSKCYLPREDVVLIIYCGVVGFLVVLTLTHFGLLASPFLSGLNLLGKRKTR

SEQ ID NO: 56310 - protein, 91 aa, Homo sapiens
MAQFVRNLVEKTPALVNAAVTYSKPRLATFWYYAKVELVPPTPAEIPRAIQSLKKIVNSAQTGSFKQLTVKVPQLKRDEETLETVLRRLKR

SEQ ID NO: 56311 - protein, 562 aa, Homo sapiens
MASTEGANNMPKQVEVRMHDSHLGSEEPKHRHLGLRLCDKLGKNLLLTLTVFGVILGAVCGGLLRLASPIHPDVVMLIAFPGDILMRMLKMLILPLIISSLITGLSGLDAKASGRLGTRAMVYYMSTTIIAAVLGVILVLAIHPGNPKLKKQLGPGKKNDEVSSLDAFLDLIRNLFPENLVQACFQQIQTVTKKVLVAPPPDEEANATSAVVSLLNETVTEVPEETKMVIKKGLEFKDGMNVLGLIGFFIAFGIAMGKMGDQAKLMVDFFNILNEIVMKLVIMIMWYSPLGIACLICGKIIAIKDLEVVARQLGMYMVTVIIGLIIHGGIFLPLIYFVVTRKNPFSFFAGIFQAWITALGTASSAGTLPVTFRCLEENLGIDKRVTRFVLPVGATINMDGTALYEAVAAIFIAQMNGVVLDGGQIVTVSLTATLASVGAASIPSAGLVTMLLILTAVGLPTEDISLLVAVDWLLDRMRTSVNVVGDSFGAGIVYHLSKSELDTIDSQHRVHEDIEMTKTQSIYDDMKNHRESNSNQCVYAAHNSVIVDECKSLHYVEYQSWV

SEQ ID NO: 56312 - protein, 181 aa, Homo sapiens
  MOD_RES (1)..(1): Any amino acid
XTVQCRKASFELYGADFVFGEDFQPWLIEINASPTMAPSTAVTARLCAGVQADTLRVVIDRMLDRNCDTGAFELIYKQAPALLCLRGPQLEVPCCLCPLKSEQFLAPVGRSRPKANSRPDCDKPRAEACPMKRLSPLKPLPLVGTFQRRRGLGDMKLGKPLLRFPTALVLDPTPNKKKQVK

SEQ ID NO: 56313 - protein, 97 aa, Homo sapiens
MSLPEELPLLPCTALVEHMTETYLRLTAPQPIPAGGSLGPAAEGDGAGSKAPEETPPATEKAEHSELKSPWQAAGICPLNPFLVPLELLGRAATPAR

SEQ ID NO: 56314 - protein, 13 aa, Homo sapiens
MVKEKKKADKKGE

SEQ ID NO: 56315 - protein, 94 aa, Homo sapiens
MPFTLHLRSRLPSAIRSLILQKKPNIRNTSSMAGELRPASLVVLPRSLAPAFERFCQVNTGPLPLLGQSEPEKWMLPPQGAISETRNELPSPLF

SEQ ID NO: 56316 - protein, 133 aa, Homo sapiens
MELQTLQEALKVEIQVHQKLVAQMKQDPQIFFLSNQNADLKKQLHELQAKITALSEKQKRVVEQLRKNLIVKQEQPDKFQIQPLPQSENKLQTAQQQPLQQLQQQQQYHHHHAQQSAAASPNLTASQKTVTTA

SEQ ID NO: 56317 - protein, 101 aa, Homo sapiens
QLGGGGGYWAVVVLFVIGLFAAGAFILYKFKRKRPGRTVYAQMHNEKEQEMTSPVSHSEDVQGAVQGEEFIDDDLDSQTLGNHSGVVLSINSREMHSYLVS

SEQ ID NO: 56318 - protein, 401 aa, Homo sapiens
NKSTSTPTSPGPRTHSTPSIPVLTAGQSGLYSPQYISYIPQIHMGPAVQAPQMYPYPVSNSVPGQQGKYRGAKGSLPPQRSDQHQPASAPPMMQAAAAAGPPLVAATPYSSYIPYNPQQFPGQPAMMQPMAHYPSQPVFAPMLQSNPRMLTSGSHPQAIVSSSTPQYPSAEQPTPQALYATVHQSYPHHATQLHAHQPQPATTPTGSQPQSQHAAPSPVQQHQAGQAPHLGSGQPQQNLYHPGALTGTPPSLPPGPSAQSPQSSFPQPAAVYAIHHQQLPHGFTNMAHVTQAHVQTGITAAPPPHPGAPHPPQVMLLHPPQSHGGPPQGAVPQSGVPALSASTPSPYPYIGHPQGEQPGQAPGFPGGADDRIREFSLAGGIWHGRAEGLQVGQDARVLGGE

SEQ ID NO: 56319 - protein, 364 aa, Homo sapiens
DLHDEEETSVPGRPGSTKRRQCYPKAIPECLRDSYPRPDQPCYLYVIGMVLTTPLPDELNFRRRKLYPPEDTTRCFGILTAKPIPQIPHFPVYTRSGEVTISIELKKSGFMLSLQMLELITRLHQYIFSHILRLEKPALEFKPTDADSAYCVLPLNVVNDSSTLDIDFKFMEDIEKSEARIGIPSTKYTKETPFVFKLEDYQDAVIIPRYRNFDQPHRFYVADVYTDLTPLSKFPSPEYETFAEYYKTKYNLDLTNLNQPLLDVDHTSSRLNLLTPRHLNQKGKALPLSSAEKRKAKWESLQNKQILVPELCAIHPIPASLWRKAVCLPSILYRLHCLLTAEELRAQTASDAGVGVRSLPADFS

SEQ ID NO: 56320 - protein, 465 aa, Homo sapiens
MMAISPALLFMDRNLLARKQSARLDKHNDLGWKLFGKAPLRENAQKDSKRIQKEYEDKAGRPSKPPSPKQNVRKNLDFEPLSTTALILEDRPANLPAKPAEEAQKHRQQYEEMVVQAKKRELKEAQRRKKQLEERCRVEESIGNAVLTWNNEILPNWETMWCSRKVRDLWWQGIPPSVRGKVWSLAIGNELNITHELFDICLARAKERWRSLSTGGSEVENEDAGFSAADREASLELIKLDISRTFPNLCIFQQGGPYHDMLHSILGAYTCYRPDVGYVQGMSFIAAVLILNLDTADAFIAFSNLLNKPCQMAFFRVDHGLMLTYFAAFEVFFEENLPKLFAHFKKNNLTPDIYLIDWIFTLYSKSLPLDLACRIWDVFCRDGEEFLFRTALGILKLFEDILTKMDFIHMAQFLTRLPEDLPAEELFASIATIQMQSRNKKWAQVLTALQKDSREMEKGSPSLRH

SEQ ID NO: 56321 - protein, 61 aa, Homo sapiens
  MOD_RES (1)..(1): Any amino acid
XLIQLPANSVTKVSIQFERALLKWTEYTPDPNHGFYVRWEHGPSLCFSVAHLSSAPLCPAW

SEQ ID NO: 56322 - protein, 580 aa, Homo sapiens
MMEALGFLKLEVNGPMVTVALSVALLALLKWYSTSAFSRLEKLGLRHPKPSPFIGNLTFFRQGFWESQMELRKLYGPLCGYYLGRRMFIVISEPDMIKQVLVENFSNFTNRMASGLEFKSVADSVLFLRDKRWEEVRGALMSAFSPEKLNELGLLIMQERIKGHMGGQQAPQRIPPTRLSKPSGIYVNLHYATLPFCMVPLISQACDLLLAHLKRYAESGDAFDIQRCYCNYTTDVVASVAFGTPVDSWQAPEDPFVKHCKRFFEFCIPRPILVLLLSFPSIMVPLARILPNKNRDELNGFFNKLIRNVIALRDQQAAEERRRDFLQMVLDARHSASPMGVQDFDIVRDVFSSTGCKPNPSRQHQPSPMARPLTVDEIVGQAFIFLIAGYEIITNTLSFATYLLATNPDCQEKLLREVDVFKEKHMAPEFCSLEEGLPYLDMVIAETLRMYPPAFRFTREAAQDCEVLGQRIPAGAVLEMAVGALHHDPEHWPSPETFNPERFTAEARQQHRPFTYLPFGAGPRSCLGVRLGLLEVKLTLLHVLHKFRFQACPETQVPLQLESKSALGPKNGVYIKIVSR

SEQ ID NO: 56323 - protein, 187 aa, Homo sapiens
MASNVTNKTDPRSMNSRVFIGNLNTLVVKKSDVEAIFSKYGKIVGCSVHKGFAFVQYVNERNARAAVAGEDGRMIAGQVLDINLAAEPKVNRGKAGVKRSAAEMYGSVTEHPSPSPLLSSSFDLDYDFQRDYYDRMYSYPARVPPPPPIARAVVPSKRQRVSGNTSRRGKSGFNSKSGQRGSSKSGK

SEQ ID NO: 56324 - protein, 114 aa, Homo sapiens
MERRRLWGSIQSRYISMSVWTSPRRLVELAGQSLLKDEALAIAALELLPRELFPPLFMAAFDGRHSQTLKAMVQAWPFTCLPLGVLMKGQHLHLETFKAVLDGLDVLLAQEVRP

SEQ ID NO: 56325 - protein, 98 aa, Homo sapiens
MLLQSQTMGVSHSFTPKGITIPQREKPGHMYQNEDYLQNGLPTETTVLGTVQILCCLLISSLGAILVFAPYPSHFNPAISTTLMSGYPFLGALCGRSQ

SEQ ID NO: 56326 - protein, 189 aa, Homo sapiens
MAAGGSAPEPRVLVCLGALLAGWVAVGLEAVVIGEVHENVTLHCGNISGLRGQVTWYRNNSEPVFLLSSNSSLRPAEPRFSLVDATSLHIESLSLGDEGIYTCQEILNVTQWFQVWLQVANPPPSAPQCWAQMASGSFMLQLTCRWDGGYPDPDFLWIEEPGGVIVGKSKLGVEMLSESQLSDGKKFKC

SEQ ID NO: 56327 - protein, 90 aa, Homo sapiens
MPAALVENSQVICEVWASNLEEEMRKIREIVLSYSYIAMDTEFPGVVVRPIGEFRSSIDYQYQLLRCNVDLLKIIQLGLTFTNEKGEYPS

SEQ ID NO: 56328 - protein, 74 aa, Homo sapiens
MEPPGRSSRSTASHTLHQYCCPTQVLDSMKLTPSGRLAESREEEEEEETEEEEEEDAHQFCCPASECSSPSSRP

SEQ ID NO: 56329 - protein, 123 aa, Homo sapiens
MRTLEDSSGTVLHRLIQEQLRYGNLTETRTLLAIQQQALRGGAGTGGTGSPQASLEILAPEDSQVLQQATRQEPQGQEHQGGENHLAENTLYRLCPQPSKGEELPTYEEAKAHSQYYAAQQAG

SEQ ID NO: 56330 - protein, 142 aa, Homo sapiens
KATDAEADVASLNRRIQLVEEELDRAQERLATALQKLEEAEKAADESERGMKVIESRAQKDEEKMEIQEIQLKEAKHIAEDADRKYEEVARKLVIIESDLERAEERAELSEGQVRQLEEQLRIMDQTLKALMAAEDKQMCRA

SEQ ID NO: 56331 - protein, 259 aa, Homo sapiens
MTSQEKTEEYPFADIFDEDETERNFLLSKPVCFVVFGKPGVGKTTLARYITQAWKCIRVEALPILEEQIAAETESGVMLQSMLISGQSIPDELVIKLMLEKLNSPEVCHFGYIITEIPSLSQDAMTTLQQIELIKNLNLKPDVIINIKCPDYDLCQRISGQRQHNNTGYIYSRDQWDPEVIENHRKKKKEAQKDGKGEEEEEEEEQEEEEAFIAEMQMVAEILHHLVQRPEDYLENVENIVKLYKETILQTLEEVMAEH

SEQ ID NO: 56332 - protein, 219 aa, Homo sapiens
  MOD_RES (1)..(1): Any amino acid
XTPLPGNGAAQAGGNGWLQVSLALVPRGPAEAATKPILSYENILKCAFQEITVQQAAEDVSTIDHFLEISSEEKPGVERVHKLCNESRKLWRALQSIHTTSTSQRLWSESRCQENFFLVLGIDAAQKNLSGGQGHIMEDCDLKEPEGLLTVSSFCLQHCKALIQTKLSGPPGSKQGRLMTCSRFLKTPSCGGGQHITIPRKRMFTPRKLKLTLFNSDVC

SEQ ID NO: 56333 - protein, 26 aa, Homo sapiens
MEPEFLYDLLQLPKGVEPPAEEELSK

SEQ ID NO: 56334 - protein, 139 aa, Homo sapiens
MAADEGSAEKQAGEAHMAADGETNGSCENSDASSHANAAKHTQDSARVNPQDGTNTLTRIAENGVSERDSEAAKQNHVTADDFVQTSVIGSNGYILNKPALQAQPLRTTSTLASSLPGHAAKTLPGGAGKGRTPSAFPQ

SEQ ID NO: 56335 - protein, 111 aa, Homo sapiens
MRVESGSAQERGILLESLSTLLEKTTASHEGRAPGNRELTGQCGQLPRSEPSGRSDRGPQPCSARPSHLVSGRRLPCRPLGLPQRGPGTGKRGKGSLFVRPTSCPPRSAVS

SEQ ID NO: 56336 - protein, 437 aa, Homo sapiens
  MOD_RES (1)..(1): Any amino acid
XNTVGQNELKITSDQVINSGLIFEDKPKPSKQSLQSYQEALQQQIREREERRKKEREEKEEYEAKLEAEMRTYNPWGKGGGGAPLRDAKGNLITDLNRMHRQNIDAYHNPDARTYEDKRAVVSLDPNLATSNAENLEDAANKSSGHMQTQSSPFARGNVFGEPPTELQIKQQELYKNFLRFQIEEKKQREEAERERLRIAEEKEERRLAEQRARIQQEYEEEQEKKREKEEEQRLKNEEHIRLAEERQKEAERKKKEEEEKYNLQLQHYCERDNLIGEETKHMRQPSPIVPALQNKIASKLQRPPSVDSIIRSFIHESSMSRAQSPPVPARKNQLRAEEEKKNVIMELSEMRKQLRSEERRLQERLLHMDSDDEIPIRKKERNPMDIFDMARHRLQAPVRRQSPKGLDAATFQNVHDFNELKDREHTVLKSGMDEIA

SEQ ID NO: 56337 - protein, 77 aa, Homo sapiens
MAAQVTLEDALSNVDLLEELPLPDQQPCIEPPPSSLLYQPNFNTNFEDRNAFVTGIARYIEQATVHSSMCKNNTCWF

SEQ ID NO: 56338 - protein, 394 aa, Homo sapiens
MDENEHQKAVPYSREFKQKYDYFRKKLKKPADIPNRFEMKLHRNNIFEESYRRIMSVKRPDVLKARLWIEFESEKGLDYGGVAREWFFLLSKEMFNPYYGLFEYSATDNYTLQINPNSGLCNEDHLSYFTFIGRVAGLAVFHGKLLDGFFIRPFYKMMLGKQITLNDMESVDSEYYNSLKWILENDPTELDLMFCIDEENFGQTYQVDLKPNGSEIMVTNENKREYIDLVIQWRFVNRVQKQMNAFLEGFTELLPIDLIKIFDENELELLMCGLGDVDVNDWRQHSIYKNGYCPNHPVIQWFWKAVLLMDAEKRIRLLQFVTGTSRVPMNGFAELYGSNGPQLFTIEQWGSPEKLPRAHTCFNRLDLPPYETFEDLREKLLMAVENAQGFEGVD

SEQ ID NO: 56339 - protein, 78 aa, Homo sapiens
MASAELDYTIEIPDQPCWSQSLLHGLLLAAFTIAGGWHLCWDRGATHTPARLGSTGANAAWLSPSMHHPKLRAPLRHS

SEQ ID NO: 56340 - protein, 74 aa, Homo sapiens
MRCSQCRVAKYCSAKCQKKAWPDHKRECKCLKSCKPRYPPDSVRLLGRVVFKLMDGAPSESEKLYSFYDLESNI

SEQ ID NO: 56341 - protein, 212 aa, Homo sapiens
MALSSEPAEMPRQFPKLNISEVDEQVRLLAEKVFAKVLREEDSKDALSLFTVPEDCPIGQKEAKERELQKELAEQKSVETAKRKKSFKMIRSQSLSLQMPPQQDWKGPPAASPAMSPTTPVVTGATSLPTPAPYAMPEFQRVTISGDYCAGITLEDYEQAAKSLAKALMIREKYARLAYHRFPRITSQYLGHPRADTAPPEEGLPGGHPLCV

SEQ ID NO: 56342 - protein, 152 aa, Homo sapiens
MEMESAAASTRFHQPHMERKMSAMACEIFNELRLEGKLCDVVIKERNVSVAASFFLFSRALFTSGWNNTEKKVYNIPGISPDMMKLIIEYAYTRTVPITPDNVEKLLAAADQFNIMGIVRGCCEFLKSELCLDNCIGICKFTDYYYCPELRQ

SEQ ID NO: 56343 - protein, 82 aa, Homo sapiens
  MOD_RES (1)..(1): Any amino acid
XKVKLNLVQHVRSVKHQQTEGLRKLQLHQQGLAPEEDNLSEIFFVKDCPPNELETASLGARTCDDDLTEQQLRSTSAYLSTY

SEQ ID NO: 56344 - protein, 51 aa, Homo sapiens
SAAGMGASGAPQPPNILLLLMDDMHVFRGQLLRACRCWCQAGRRQTDTFPT

SEQ ID NO: 56345 - protein, 185 aa, Homo sapiens
MARKKLKKFTTLEIVLSVLLLVLFIISIVLIVLLAKESLKSTAPDPGTTGTPDPGTTGTPDPGTTGTTHARTTGPPDPGTTGTTPVSAECPVVNELERINCIPDQPPTKATCDQRGCCWNPQGAVSVPWCYYSKNHSYHVEGNLVNTNAGFTARLKNLPSSPVFGSNVDNVLLTAEYQTSNRFHF

SEQ ID NO: 56346 - protein, 595 aa, Homo sapiens
MSENLDKSNVNEAGKSKSNDSEEGLEDAVEGADEALQKAIKSDSSSPQRVQRPHSSPPRFVTVEELLETARGVTNMALAHEIVVNGDFQIKPVELPENSLKKRVKEIVHKAFWDCLSVQLSEDPPAYDHAIKLVGEIKETLLSFLLPGHTRLRNQITEVLDLDLIKQEAENGALDISKLAEFIIGMMGTLCAPARDEEVKKLKDIKEIVPLFREIFSVLDLMKVDMANFAISSIRPHLMQQSVEYERKKFQEILERQPNSLDFVTQWLEEASEDLMTQKYKHALPVGGMAAGSGDMPRLSPVAVQNYAYLKLLKWDHLQRPFPETVLMDQSRFHELQLQLEQLTILGAVLLVTFSMAAPGISSQADFAEKLKMIVKILLTDMHLPSFHLKDVLTTIGEKVCLEVSSCLSLCGSSPFTTDKETVLKGQIQAVASPDDPIRRIMESRILTFLETYLASGHQKPLPTVPGGLSPVQRELEEVAIKFARLVNYNKMVFCPYYDAILRKRWISFGNFFGSSNTDMSPWNCRTDYPMSLHIRFPKNHVIEAPMTIQLCFQEPCNKALSLLNIPLEAKGILDRSFLQRRLKPYRIRFCCRAL

SEQ ID NO: 56347 - protein, 81 aa, Homo sapiens
MYLVSGGLNNTVNIWDLKSKRVHRSLKDHKDQVTCVTYNWNDCYIASGSLSGEIILHSVTTNLSSTPFGHGSNQALQSSVE

SEQ ID NO: 56348 - protein, 155 aa, Homo sapiens
MDPLFQQTHKQVHEIQSCMGRLETADKQSVHIVENEIQASIDQIFSRLERLEILSSKEPPNKRQNARLRVDQLKYDVQHLQTALRNFQHRRHAREQQERQREELLSRTFTTNGTQKKILDIANMLGLSNTVMRLIEKRAFQDKYFMIAANRFLDF

SEQ ID NO: 56349 - protein, 60 aa, Homo sapiens
MDVLAEANGTFALNLLKTLGKDNSKNVFFSPMSMSCALAMVYMGAKGNTAAQMAQILSFN

SEQ ID NO: 56350 - protein, 55 aa, Homo sapiens
MDGRRVPAQPAAEQRKNRCWNVVAGAPWPWAWPSPDSFLGPPRSHPRPWGRSPAG

SEQ ID NO: 56351 - protein, 139 aa, Homo sapiens
MFSINPLENLKVYISSRPPLVVFMISVSAMAIAFLTLGYFFKIKEIKSPEMAEDWNTFLLRFNDLDLCVSENETLKHLTNDTTTPESTMTSGQARASTQSPQALEDSGPVNISVSITLTLDPLKPFGGYSRNVTHLYST

SEQ ID NO: 56352 - protein, 228 aa, Homo sapiens
MDLVLRVADYYFFTPYVYPATWPEDDIFRQAISLLIVTNVGAYILYFFCATLSYYFVFDHALMKHPQFLKNQVRREIKFTVQALPWISILTVALFLLEIRGYSKLHDDLGEFPYGLFELVVSIISFLFFTDMFIYWIHRGLHHRLVYKRLHKPHHIWKIPTPFASHAFHPIDGFLQSLPYHIYPFIFPLHKVVYLSLYILVNIWTISIHDGNGCKNEKLFNGEFTKTE

SEQ ID NO: 56353 - protein, 531 aa, Homo sapiens
MAALLRSARWLLRAGAAPRLPLSLRLLPGGPGRLHAASYLPAARAGPVAGGLLSPARLYAIAAKEKDIQEESTFSSRKISNQFDWALMRLDLSVRRTGRIPKKLLQKVFNDTCRSGGLGGSHALLLLRSCGSLLPELKLEERTEFAHRIWDTLQKLGAVYDVSHYNALLKVYLQNEYKFSPTDFLAKMEEANIQPNRVTYQRLIASYCNVGDIEGASKILGFMKTKDLPVTEAVFSALVTGHARAGDMENAENILTVMRDAGIEPGPDTYLALLNAYAEKGDIDHVKQTLEKVEKSELHLMDRDLLQIIFSFSKAGYPQYVSEILEKVTCERRYIPDAMNLILLLVTEKLEDVALQILLACPVSKEDGPSVFGSFFLQHCVTMNTPVEKLTDYCKKLKEVQMHSFPLQFTLHCALLANKTDLAKALMKAVKEEGFPIRPHYFWPLLVGRRKEKNVQGIIEILKGMQELGVHPDQETYTDYVIPCFDSVNSARAILQENGCLSDSDMFSQAGLRSEAANGNLDFVLSFYFPI

SEQ ID NO: 56354 - protein, 144 aa, Homo sapiens
MGGLEPCSRLLLLPLLLAVSGLRPVQAQAQSDCSCSTVSPGVLAGIVMGDLVLTVLIALAVYFLGRLVPRGRGAAEGMVMEVLIWNDKTPSTHHSACLCTPQHPSPPAATRKQRITETESPYQELQGQRSDVYSDLNTQRPYYK

SEQ ID NO: 56355 - protein, 122 aa, Homo sapiens
MPGTPGSLEMGLLTFRDVAIEFSPEEWQCLDTAQQNLYRNVMLENYRNLAFLGIALSKPDLITYLEQGKEPWNMKQHEMVDEPTDGVLLHRQAGVQWRDLVPLLTATSASPIEVILLSQPPE

SEQ ID NO: 56356 - protein, 141 aa, Homo sapiens
MFPVLEPHQVGLIRSYNSKTMTCELVTFRDVAIDFSRQEWEYLDPNQRDLYRDVMLENYRNLVSLGGHSISKPVVVDLLERGKEPWMILREETQFTDLDLQCEIISYIEVPTYETDISSTQLQSIYKREKLYECKKCQKKF

SEQ ID NO: 56357 - protein, 133 aa, Homo sapiens
MWVMLQTLNDEVPKYRDQIPSPGLMVFPKPVTALEYTFSRSDPTSYAGYIEDLKKFLKPYTLEEQKNLTVCPDGALFEQKGPVYVACQFPISLLQACSGMNDPDFGYSQGNPCILVKMNRIIGLKPEGVPRID

SEQ ID NO: 56358 - protein, 170 aa, Homo sapiens
  MOD_RES (1)..(1): Any amino acid
XMVLVGTQDAISAANPRVIDDSRARKLSTDLKRCTYYETCATYGLNVERVFQDVAQKVVALRKKQQLAIGPCKSLPNSPSHSAVSAASIPAVHINQATNGGGSAFSDYSSSVPSTPSISQRELRIETIAASSTPTPIRKQSKRRSNIFTLMNRRPEGCLPKATQRVSWPS

SEQ ID NO: 56359 - protein, 98 aa, Homo sapiens
MSEQGDLNQAIAEEGGTEQETATPENGIVKSESLDEEEKLELQRRLEAQNQERRKSKSGAGKGKLTRSLAVCEESSARPGGESLQDQESIHLQLSSFS

SEQ ID NO: 56360 - protein, 92 aa, Homo sapiens
MSEEQFGGDGAAAAATAAGAKIDASKNEEDEGHSNSSPRHSEAATAQREEWKMFIGGLSWDTTKKDLKDYFSKFGEVVDCTLKLDPITGRSR

SEQ ID NO: 56361 - protein, 368 aa, Homo sapiens
MEPTEPMEPTEPMEPTEPMEPTEPMEPTEPMEPARSAHRGGEALLRELEVLVQDVVRTSSWWERHGVDCAILALSLFALPAGFLCLRWENALVFASGITILGVCHYTLTVKGSHLATHGALTESKRWSKIWLLFFVEVCTAFTAEHATHGHVKMHHAYTNVVGLGDSSTWRLPCLNRYVYMFLAPFLLPIATPLVAVERLRKVELGTALRTLALISLGLYSHYWLLLNVSGFKNPSSALGCMFLTRSLLAHPYLHVNIFQHIGLPMFSRDNKPRRIHMMSLGVLNLARLPVLDWAFGHSIISCHVEHHLFPRLSDNMCLKVKPVVSQFLREKQLPYNEDSYLARFQLFLRRYEEFMVQAPPITELVGL

SEQ ID NO: 56362 - protein, 130 aa, Homo sapiens
MPLRDKYCQTDHHHHGCCEPVYILEPGDPPLLQQPLQTSKSGIQQIIECFRSGTKQLKHILLKDVDTIFECKLCRSLFRGLPNLITHKKFYCPPSLQMDDNLPDVNDKQSQAINDLLEAIYPSVDKREYI

SEQ ID NO: 56363 - protein, 44 aa, Homo sapiens
MIIEMATGNPYLPSSSDLDLLHKIVLKVGNRKREKAQGDQSQSY

SEQ ID NO: 56364 - protein, 408 aa, Homo sapiens
MSYTGFVQGSETTLQSTYSDTSAQPTCDYGYGTWNSGTNRGYEGYGYGYGYGQDNTTNYGYGMATSHSWEMPSSDTNANTSASGSASADSVLSRINQRLDMVPHLETDMMQGGVYGSGGERYDSYESCDSRAVLSERDLYRSGYDYSELDPEMEMAYEGQYDAYRDQFRMRGNDTFGPRAQGWARDARSGRPMASGYGRMWEDPMGARGQCMSGASRLPSLFSQNIIPEYGMFQGMRGGGAFPGGSRFGFGFGNGMKQMRRTWKTWTTADFRTKKKKRKQGGSPDEPDSKATRTDCSDNSDSDNDEGTEGEATEGLEGTEAVEKGSRVDGEDEEGKEDGREEGKEDPEKGALTTQDENGQTKRKLQAGKKSQDKQKKRQRDRMVERLLLLLDLPQPRRRPAPGLSRQS

SEQ ID NO: 56365 - protein, 492 aa, Homo sapiens
MLQGLLGSDDEEQEDPKDYCKGGYHPVKIGDVFNGRYHVVRKLGWGHFSTVWLCWDIQRKRFVALKVVKSAGHYTETAVDEIKLLKCVRDSDPSDPKRETIVQLIDDFRISGVNGVHVCMVLEVLGHQLLKWIIKSNYQGLPVPCVKSIVRQVLHGLDYLHTKCKIIHTDIKPENILLCVGDAYIRRLAAEATEWQQAGAPPPSRSIVSTAPQEVLTGKLSKNKRKKMRRKRKQQKRLLEERLRDLQRLEAMEAATQAEDSGLRLDGGSGSTSSSGCFSGSLFSPASCSILSGSSNQRETGGLLSPSTPFGASNLLVNPLEPQNADKIKIKIADLGNACWVHKHFTEDIQTRQYRAVEVLIGAEYGPPADIWSTACMAFELATGDYLFEPHSGEDYSRDEDHIAHIVELLGDIPPAFALSGRYSREFFNRRGELRHIHNLKHWGLYEVLMEKYEWPLEQATQFSAFLLPMMEYIPEKRASAADCLQHPWLNP

SEQ ID NO: 56366 - protein, 41 aa, Homo sapiens
MAHYKTEQDDWLIIYLKYLLFVFNFFFWVSEFCTHILFPEH

SEQ ID NO: 56367 - protein, 92 aa, Homo sapiens
MGEVEAPGRLWLESPPGGAPPIFLPSDGQALVLGRGPLTQVTDRKCSRTQVELVADPETRTVAVKQMRREMLSCRRSVCGSQTPAGRTWRSC

SEQ ID NO: 56368 - protein, 667 aa, Homo sapiens
MLYKQLRQACEDHVQAQILPFREDSLDSVLFLKKINTCWQDHCRQMIMIRSIFLFLDRTYVLQNSTLPSICPVSYCLYRDMGLELFRTHIISDKMVQSKTIDGILLLIERERSGEAVDRSLLRSLLGMLSDLQVYKDSFELKFLEETNCLYAAEGQRLMQEREVPEYLNHVSKRLEEEGDRVITYLDHSTQKPLIACVEKQLLGEHLTAILQKGLDHLLDENRVPDLAQMYQLFSRVRGGQQALLQHWSEYIKTFGTAIVINPEKDKDMVQDLLDFKDKVDHVIEVCFQKNERFVNLMKESFETFINKRPNKPAELIAKHVDSKLRAGNKEATDEELERTLDKIMILFRFIHGKDVFEAFYKKDLAKRLLVGKSASVDAEKSMLSKLKHECGAAFTSKLEGMFKDMELSKDIMVHFKQHMQNQSDSGPIDLTVNILTMGYWPTYTPMEVHLTPEMIKLQEVFKAFYLGKHSGRKLQWQTTLGHAVLKAEFKEGKKEFQVSLFQTLVLLMFNEGDGFSFEEIKMATGIEDSELRRTLQSLACGKARVLIKSPKGKEVEDGDKFIFNGEFKHKLFRIKINQIQMKETVEEQVSTTERVFQDRQYQIDAAIVRIMKMRKTLGHNLLVSELYNQLKFPVKPGDLKKRIESLIDRDYMERDKDNPNQYHYVA

SEQ ID NO: 56369 - protein, 122 aa, Homo sapiens
MWPPDPDPDPDPEPAGGSRPGPAVPGLRALLPARAFLCSLKGRLLLAESGLSFITFICYVASSASAFLTAPLLEFLLALYFLFADAMQLNDKWQGLCWPMMDFLRCVTAALIYFAISITAIA

SEQ ID NO: 56370 - protein, 191 aa, Homo sapiens
MSALLRLLRTGAPAAACLRLGTSAGTGSRRAMALYHTEERGQPCSQNYRLFFKNVTGHYISPFHDIPLKVNSKETWEDPHEKDKSTNCFGDNDPIDVCEIGSKILSCGEVIHVKILGILALIDEGETDWKLIAINANDPEASKFHDIDDVKKFKPGYLEATLNWFRLYKVPDGKPENQFAFNGEFKNKAFA

SEQ ID NO: 56371 - protein, 266 aa, Homo sapiens
AASAGNVAKVQQILLLRKNGLNDRDKMNRTALHLACANGHPEVVTLLVDRKCQLNVCDNENRTALMKAVQCQEEKCATILLEHGADPNLADVHGNTALHYAVYNEDISVATKLLLYDANIEAKNKDDLTPLLLAVSGKKQQMVEFLIKKKANVNAVDKLESSHQLISEYKEERIPKHSSQNSNSVDESSEDSLSRQSLALLPRLECYSMISAHCNLCFLGSHNSSASTSQVAGTTGFLANRVLMIHGLPQMTKTSILILRMSQNQA

SEQ ID NO: 56372 - protein, 429 aa, Homo sapiens
MSQLRATKSGLVVRAVICIFIFLYLRNPTPAESEEEPAQPEVVECGFYPDELCSALFEGKGAAPIAKFCKTPHKSEIHAHLHTPGNCSRISRGLHFITRPLSAEEGDFSLAYIITIHKELAMFVQLLRAIYVPQNVYCIHVDEKAPMKYKTAVQTLVNCFENVFISSKTEKVAYAGFTRLQADINCMKVLVHSKFQWNYVINLCGQDFPIKTNREIIHYIRSKWSDKNITPGVIQPLHIKSKTSQSHLEFVPKGSIYAPPNNRFKDKPPHNLTIYFGSAYYVLTRKFVEFILTDIHAKDMLQWSKDIRSPEQHYWVTLNRLKDAPGATPNAGWEGNVRAIKRKSEEGNVHDGCKGRYVEDICVYGPGDLPWLIQSPSLFANKFEPSTDPLVVTCLERRHRLQVLRQAEVPIEPHWHFQQQSHFNMRLNR

SEQ ID NO: 56373 - protein, 707 aa, Homo sapiens
MVSWGRFICLVVVTMATLSLARPSFSLVEDTTLEPEGAPYWTNTEKMEKRLHAVPAANTVKFRCPAGGNPMPTMRWLKNGKEFKQEHRIGGYKVRNQHWSLIMESVVPSDKGNYTCVVENEYGSINHTYHLDVVERSPHRPILQAGLPANASTVVGGDVEFVCKVYSDAQPHIQWIKHVEKNGSKYGPDGLPYLKVLKHSGINSSNAEVLALFNVTEADAGEYICKVSNYIGQANQSAWLTVLPKQQAPGREKEITASPDYLEIAIYCIGVFLIACMVVTVILCRMKNTTKKPDFSSQPAVHKLTKRIPLRRQVTVSAESSSSMNSNTPLVRITTRLSSTADTPMLAGVSEYELPEDPKWEFPRDKLTLGKPLGEGCFGQVVMAEAVGIDKDKPKEAVTVAVKMLKDDATEKDLSDLVSEMEMMKMIGKHKNIINLLGACTQDGPLYVIVEYASKGNLREYLRARRPPGMEYSYDINRVPEEQMTFKDLVSCTYQLARGMEYLASQKCIHRDLAARNVLVTENNVMKIADFGLARDINNIDYYKKTTNGRLPVKWMAPEALFDRVYTHQSDVWSFGVLMWEIFTLGGSPYPGIPVEELFKLLKEGHRMDKPANCTNELYMMMRDCWHAVPSQRPTFKQLVEDLDRILTLTTNEEYLDLSQPLEQYSPSYPDTRSSCSSGDDSVFSPDPMPYEPCLPQYPHINGSVKT

SEQ ID NO: 56374 - protein, 115 aa, Homo sapiens
MEREMVLCLAQTIHTQEGALPRPSISAEPGTVISPGSHVTFMCRGPVGVQTFRLEREDRAKYKDSYNVFRLGPSESEARFHIDSVSEGNAGLYRCLYYKPPGWSEHSDFLELLVK

SEQ ID NO: 56375 - protein, 78 aa, Homo sapiens
  MOD_RES (1)..(1): Any amino acid
XITHAEPANVFDINSHTGEIWLKNSIRSLDALHNITPGRDCLWSLEVQAKDRGSPSFSTTALLKIDITDAEVRRLRSN

SEQ ID NO: 56376 - protein, 300 aa, Homo sapiens
MLQFVRAGARAWLRPTGSQGLSSLAEEAARATENPEQVASEGLPEPVLRKVELPVPTHRRPVQAWVESLRGFEQERVGLADLHPDVFATAPRLDILHQVAMWQKNFKRISYAKTKTRAEVRGGGRKPWPQKGTGRARHGSIRSPLWRGGGVAHGPRGPTSYYYMLPMKVRALGLKVALTVKLAQDDLHIMDSLELPTGDPQYLTELAHYRRWGDSVLLVDLTHEEMPQSIVEATSRLKTFNLIPAVGLNVHSMLKHQTLVLTLPTVAFLEDKLLWQDSRYRPLYPFSLPYSDFPRPLPHA

SEQ ID NO: 56377 - protein, 875 aa, Homo sapiens
MEAATLFLKFLLELQEEGWFRGFLDALDHAGYSGLYEAIESWDFKKIEKLEEYRLLLKRLQPEFKTRIIPTDIISDLSECLINQECEEILQICSTKGMMAGAEKLVECLLRSDKENWPKTLKLALEKERNKFSELWIVEKGIKDVETEDLEDKMETSDIQIFYQEDPECQNLSENSCPPSEVSDTNLYSPFKPRNYQLELALPAMKGKNTIICAPTGCGKTFVSLLICEHHLKKFPQGQKGKVVFFANQIPVYEQQKSVFSKYFERHGYRVTGISGATAENVPVEQIVENNDIIILTPQILVNNLKKGTIPSLSIFTLMIFDECHNTSKQHPYNMIMFNYLDQKLGGSSGPLPQVIGLTASVGVGDAKNTDEALDYICKLCASLDASVIATVKHNLEELEQVVYKPQKFFRKVESRISDKFKYIIAQLMRDTESLAKRICKDLENLSQIQNREFGTQKYEQWIVTVQKACMVFQMPDKDEESRICKALFLYTSHLRKYNDALIISEHARMKDALDYLKDFFSNVRAAGFDEIEQDLTQRFEEKLQELESVSRDPSNENPKLEDLCFILQEEYHLNPETITILFVKTRALVDALKNWIEGNPKLSFLKPGILTGRGKTNQNTGMTLPAQKCILDAFKASGDHNILIATSVADEGIDIAQCNLVILYEYVGNVIKMIQTRGRGRARGSKCFLLTSNAGVIEKEQINMYKEKMMNDSILRLQTWDEAVFREKILHIQTHEKFIRDSQEKPKPVPDKENKKLLCRKCKALACYTADVRVIEECHYTVLGDAFKECFVSRPHPKPKQFSSFEKRAKIFCARQNCSHDWGIHVKYKTFEIPVIKIESFVVEDIATGVQTLYSKWKDFHFEKIPFDPAEMSK

SEQ ID NO: 56378 - protein, 1281 aa, Homo sapiens
MSGPTDETAGDLPVKDTGLNLFGMGGLQETSTTRTMKSRQAVSRVSREELEDRFLRLHDENILLKQHARKQEDKIKRMATKLIRLVNDKKRYERVGGGPKRLGRDVEMEEMIEQLQEKVHELEKQNETLKNRLISAKQQLQTQGYRQTPYNNVQSRINTGRRKANENAGLQECPRKGIKFQDADVAETPHPMFTKYGNSLLEEARGEIRNLENVIQSQRGQIEELEHLAEILKTQLRRKENEIELSLLQLREQQATDQRSNIRDNVEMIKLHKQLVEKSNALSAMEGKFIQLQEKQRTLRISHDALMANGDELNMQLKEQRLKCCSLEKQLHSMKFSERRIEELQDRINDLEKERELLKENYDKLYDSAFSAAHEEQWKLKEQQLKVQIAQLETALKSDLTDKTEILDRLKTERDQNEKLVQENRELQLQYLEQKQQLDELKKRIKLYNQENDINADELSEALLLIKAQKEQKNGDLSFLVKVDSEINKDLERSMRELQATHAETVQELEKTRNMLIMQHKINKDYQMEVEAVTRKMENLQQDYELKVEQYVHLLDIRAARIHKLEAQLKDIAYGTKQYKFKPEIMPDDSVDEFDETIHLERGENLFEIHINKVTFSSEVLQASGDKEPVTFCTYAFYDFELQTTPVVRGLHPEYNFTSQYLVHVNDLFLQYIQKNTITLEVHQAYSTEYETIAACQLKFHEILEKSGRIFCTASLIGTKGDIPNFGTVEYWFRLRVPMDQAIRLYRERAKALGYITSNFKGPEHMQSLSQQAPKTAQLSSTDSTDGNLNELHITIRCCNHLQSRASHLQPHPYVVYKFFDFADHDTAIIPSSNDPQFDDHMYFPVPMNMDLDRYLKSESLSFYVFDDSDTQENIYIGKVNVPLISLAHDRCISGIFELTDHQKHPAGTIHVILKWKFAYLPPSGSITTEDLGNFIRSEEPEVVQRLPPASSVSTLVLAPRPKPRQRLTPVDKKVSFVDIMPHQSDVSQEGSVDEVKENTEKMQQGKDDVSLLSEGQLAEQSLASSEDETEITEDLEPEVEEDMSASDSDDCIIPGPISKNIKQSLALSPGLGCSSAISAHCNFRLPGSSDFPASASQVDGITGACHHTQPSEKIRIEIIALSLNDSQVTMDDTIQRLFVECRFYSLPAEETPVSLPKPKSGQWVYYNYSNVIYVDKENNKAKRDILKAILQKQEMPNRSLRFTVVSDPPEDEQDLECEDIGVAHVDLADMFQEGRDLIEQNIDVFDARADGEGIGKLRVTVEALHALQSVYKQYRDDLEA

SEQ ID NO: 56379 - protein, 2458 aa, Homo sapiens
MSGSTQPVAQTWRATEPRYPPHSLSYPVQIARTHTDVGLLEYQHHSRDYASHLSPGSIIQPQRRRPSLLSEFQPGNERSQELHLRPESHSYLPELGKSEMEFIESKRPRLELLPDPLLRPSPLLATGQPAGSEDLTKDRSLTGKLEPVSPPSPPHTDPELELVPPRLSKEELIQNMDRVDREITMVEQQISKLKKKQQQLEEEAAKPPEPEKPVSPPPIESKHRSLVQIIYDENRKKAEAAHRILEGLGPQVELPLYNQPSDTRQYHENIKINQAMRKKLILYFKRRNHARKQWEQKFCQRYDQLMEAWEKKVERIENNPRRRAKESKVREYYEKQFPEIRKQRELQERMQRVGQRGSGLSMSAARSEHEVSEIIDGLSEQENLEKQMRQLAVIPPMLYDADQQRIKFINMNGLMADPMKVYKDRQVMNMWSEQEKETFREKFMQHPKNFGLIASFLERKTVAECVLYYYLTKKNENYKSLVRRSYRRRGKSQQQQQQQQQQQQQQQQQPMPRSSQEEKDEKEKEKEAEKEEEKPEVENDKEDLLKEKTDDTSGEDNDEKEAVASKGRKTANSQGRRKGRITRSMANEANSEEAITPQQSAELASMELNESSRWTEEEMETAKKGLLEHGRNWSAIARMVGSKTVSQCKNFYFNYKKRQNLDEILQQHKLKMEKERNARRKKKKAPAAASEEAAFPPVVEDEEMEASGVSGNEEEMVEEAEATVNNSSDTESIPSPHTEAAKDTGQNGPKPPATLGADGPPPGPPTPPPEDIPAPTEPTPASEATGAPTPPPAPPSPSAPPPVVPKEEKEEETAAAPPVEEGEEQKPPAAEELAVDTGKAEEPVKSECTEEAEEGPAKGKDAEAAEATAEGALKAEKKEGGSGRATTAKSSGAPQDSDSSATCSADEVDEAEGGDKNRLLSPRPSLLTPTGDPRANASPQKPLDLKQLKQRAAAIPPIQVTKVHEPPREDAAPTKPAPPAPPPPQNLQPESDAPQQPGSSPRGKSRSPAPPADKEAEKPVFFPAFAAEAQKLPGDPPCWTSGLPFPVPPREVIKASPHAPDPSAFSYAPPGHPLPLGLHDTARPVLPRPPTISNPPPLISSAKHPSVLERQIGAISQGMSVQLHVPYSEHAKAPVGPVTMGLPLPMDPKKLAPFSGVKQEQLSPRGQAGPPESLGVPTAQEASVLRGTALGSVPGGSITKGIPSTRVPSDSAITYRGSITHGTPADVLYKGTITRIIGEDSPSRLDRGREDSLPKGHVIYEGKKGHVLSYEGGMSVTQCSKEDGRSSSGPPHETAAPKRTYDMMEGRVGRAISSASIEGLMGRAIPPERHSPHHLKEQHHIRGSITQGIPRSYVEAQEDYLRREAKLLKREGTPPPPPPSRDLTEAYKTQALGPLKLKPAHEGLVATVKEAGRSIHEIPREELRHTPELPLAPRPLKEGSITQGTPLKYDTGASTTGSKKHDVRSLIGSPGRTFPPVHPLDVMADARALERACYEESLKSRPGTASSSGGSIARGAPVIVPELGKPRQSPLTYEDHGAPFAGHLPRGSPVTTREPTPRLQEGSLSSSKASQDRKLTSTPREIAKSPHSTVPEHHPHPISPYEHLLRGVSGVDLYRSHIPLAFDPTSIPRGIPLDAAAAYYLPRHLAPNPTYPHLYPPYLIRGYPDTAALENRQTIINDYITSQQMHHNAATAMAQRADMLRGLSPRESSLALNYAAGPRGIIDLSQVPHLPVLVPPTPGTPATAMDRLAYLPTAPQPFSSRHSSSPLSPGGPTHLTKPTTTSSSERERDRDRERDRDREREKSILTSTTTVEHAPIWRPGTEQSSGSSGGGGGSSSRPASHSHAHQHSPISPRTQDALQQRPSVLHNTGMKGIITAVEPSTPTVLRSTSTSSPVRPAATFPPATHCPLGGTLDGVYPTLMEPVLLPKEAPRVARPERPRADTGHAFLAKPPARSGLEPASSPSKGSEPRPLVPPVSGHATIARTPAKNLAPHHASPDPPAPPASASDPHREKTQSKPFSIQELELRSLGYHGSSYSPEGVEPVSPVSSPSLTHDKGLPKHLEELDKSHLEGELRPKQPGPVKLGGEAAHLPHLRPLPESQPSSSPLLQTAPGVKGHQRVVTLAQHISEVITQDYTRHHPQQLSAPLPAPLYSFPGASCPVLDLRRPPSDLYLPPPDHGAPARGSPHSEGGKRSPEPNKTSVLGGGEDGIEPVSPPEGMTEPGHSRSAVYPLLYRDGEQTEPSRMGSKSPGNTSQPPAFFSKLTESNSAMVKSKKQEINKKLNTHNRNEPEYNISQPGTEIFNMPAITGTGLMTYRSQAVQEHASTNMGLEAIIRKALMGGGGKAKVSGRPSSRKAKSPAPGLASGDRPPSVSSVHSEGDCNRRTPLTNRVWEDRPSSAGSTPFPYNPLIMRLQAGVMASPPPPGLPAGSGPLAGPHHAWDEEPKPLLCSQYETLSDSE

SEQ ID NO: 56380 - protein, 191 aa, Homo sapiens
  MOD_RES (1)..(1): Any amino acid
XTPTPPTAPTPVTSAPALVAATAISTIVVAASTTVTTPTTATTTVSISPTTKGSKSPAKVSDGGSSSTDFKMVSSGLTENQLQLSVEVLTSHSCSEEGLEDAANVLLQLSRGDSGTRDTVLKLLLNGARHLGYTLCKQIGTLLAELREYNLEQQRRAQCETLSPDGLPEEQPQTTKLKGKMQSRFLRFRLS

SEQ ID NO: 56381 - protein, 120 aa, Homo sapiens
KPLGTQELVPGLRCQENGQELSPIALEPGPEPHRAKQEARNQKRAQGRGEVEADEQLCIPPLNSQTCLLGSEENLAPLAGEKAVPPGNDPVSPAMVRSRNPGKDDCAKEEMAVAADAATL

SEQ ID NO: 56382 - protein, 191 aa, Homo sapiens
  MOD_RES (1)..(1): Any amino acid
XLACGQTRWSGEEGKDSWGGAGGEGREARKLTAPSLLCLLFCGWCCLCPAPLSCLSSLCLGSQVFFWRQKIKPTISGHPDSKKHSLKKMEKTLQVVETLRLVELPKEAKPKLGESPELADPCVLAKTTEETEVELGQQGQSLLQLPRTAVKSVSTLMVSALQSGWQMCSWKSSVSSASVSSQVRTQSPLKT

SEQ ID NO: 56383 - protein, 345 aa, Homo sapiens
MAFWGWRAAAALRLWGRVVERVEAGGGVGPFQACGCRLVLGGRDDVSAGLRGSHGARGEPLDPARPLQRPPRPEVPRAFRRQPRAAAPSFFFSSIKGGRRSISFSVGASSVVGSGGSSDKGKLSLQDVAELIRARACQRVVVMVGAGISTPSGIPDFRSPGSGLYSNLQQYDLPYPEAIFELPFFFHNPKPFFTLAKELYPGNYKPNVTHYFLRLLHDKGLLLRLYTQNIDGLERVSGIPASKLVEAHGTFASATCTVCQRPFPGEDIRVEPFASLTEAVRSSVPRLLINRDLVGPLAWHPRSRDVAQLGDVVHGVESLVELLGWTEEMRDLVQRETGKLDGPDK

SEQ ID NO: 56384 - protein, 60 aa, Homo sapiens
MNSTLFSQVENHSVHSNFSEKNAQLLAFENDDCHLPLAMIFTLALAYGAVIILGVSGNLA

SEQ ID NO: 56385 - protein, 128 aa, Homo sapiens
MGFLQLLVVAVLASEHRVAGAAEVFGNSSEDPVPGGCNLEFDLDIDPNIYLEYNFFETTIKFAPANLGYARGVDPPPCDAGTDQDSRWRLQYDVYQYFLPENDLTEEMLLKHLQRMVSVPQVKASALK

SEQ ID NO: 56386 - protein, 126 aa, Homo sapiens
MWQLTSLLLFVATWGISGTPAPLDSVFSSSERAHQVLRIRKRANSFLEELRHSSLERECIEEICDFEEAKEIFQNVDDTLAFWSKHVDGDQCLVLPLEHPCASLCCGHGTCIDGIGSFSCDCRSGW

SEQ ID NO: 56387 - protein, 112 aa, Homo sapiens
MVISESMDILFRIRGGLDLAFQLATPNEIFLKKALKHVLSDLSTKLSSNALVFRICHSSVYIWPSSDINTIPGELTDASACKNILRFIQFEPEEDIKRKFMRKKDKKLSDML

SEQ ID NO: 56388 - protein, 95 aa, Homo sapiens
MESIFHEKQPSGNMDDSGFFSIQVISNALKVWGLELILFNSPEYQRLRIDPINERSFICNYKEHWFTVRKLGKQVILYLSLRVICQIAKLTNSCR

SEQ ID NO: 56389 - protein, 29 aa, Homo sapiens
MKNCVTGESSASKVSANVDSRIEMDSNKG

SEQ ID NO: 56390 - protein, 685 aa, Homo sapiens
MASKTKASEALKVVARCRPLSRKEEAAGHEQILTMDVKLGQVTLRNPRAAPGELPKTFTFDAVYDASSKQADLYDETVRPLIDSVLQGFNGTVFAYGQTGTGKTYTMQGTWVEPELRGVIPNAFEHIFTHISRSQNQQYLVRASYLEIYQEEIRDLLSKEPGKRLELKENPETGVYIKDLSSFVTKNVKEIEHVMNLGNQTRAVGSTHMNEVSSRSHAIFIITVECSERGSDGQDHIRVGKLNLVDLAGSERQNKAGPNTAGGAATPSSGGGGGGGGSGGGAGGERPKEASKINLSLSALGNVIAALAGNRSTHIPYRDSKLTRLLQDSLGGNAKTIMVATLGPASHSYDESLSTLRFANRAKNIKNKPRVNEDPKDTLLREFQEEIARLKAQLEKRGMLGKRPRRKSSRRKKAVSAPPGYPEGPVIEAWVAEEEDDNNNNHRPPQPILESALEKNMENYLQEQKERLEEEKAAIQDDRSLVSEEKQKLLEEKEKMLEDLRREQQATELLAAKYKAMESKLLIGGRNIMDHTNEQQKMLELKRQEIAEQKRREREMQQEMMLRDEETMELRGTYTSLQQEVEVKTKKLKKLYAKLQAVKAEIQDQHDEYIRVRQDLEEAQNEQTRELKLKYLIIENFIPPEEKNKIMNRLFLDCEEEQWKFQPLVPAGVLTLSPRLKCSGTISAH

SEQ ID NO: 56391 - protein, 42 aa, Homo sapiens
MQVSIACTEQNLRSRSSEDRLCGPRPGPGGGPQSAFPPGPSA

SEQ ID NO: 56392 - protein, 110 aa, Homo sapiens
MGQPSLTWMLMVVVASWFITTAATDTSEARWCSECHSNATCTEDEAVTTCTCQEGFTGDGLTCVDLDECAIPGAHNCSANSSCVNTPGSFSCVCPEGFRLSPGLGCTDVD

SEQ ID NO: 56393 - protein, 78 aa, Homo sapiens
  MOD_RES (1)..(1): Any amino acid
XPPMINLISVGGQHQGVFGLPRCPGESSHICDFIRKTLNAGAYSKVVQERGLDFTEVAKPRKPFPYRRPPCTHRTAWG

SEQ ID NO: 56394 - protein, 30 aa, Homo sapiens
  MOD_RES (1)..(1): Any amino acid
XDERLKQKAESLKLENCEKLSKLIGLRRGG

SEQ ID NO: 56395 - protein, 407 aa, Homo sapiens
  MOD_RES (1)..(1): Any amino acid
XLVDLAANSLLNKLIHQSLVESSHRVEVLQKDPSSPLYSVKTFEELRLKEELLKGIYAMGFNRPSKIQEMALPMMLAHPPQNLIAQSQSGTGKTAAFVLAMLSRVNALELFPQCLCLAPTYELALQTGRVVEQMGKFCVDVQVMYAIRGNRNWCFKLKLIDLTKIRVFVLDEADVMIDTQGFSDHSIRIQRALPSECQMLLFSATFEDSVWHFAERIIPDPNVIKLRKEELTLNNIRQYYVLCEHRKDKYQALCNIYGSITIGQAIIFCQTRRNAKWLTVEMIQDGHQVSLLSGELTVEQRASIIQRFRDGKEKVLITTNVCARGIDVKQVTIVVNFDLPVKQGEEPDYETYLHRIGRTGRFGKKGLAFNMIEVDELPSLMKIQDHFNSSIKQLNAEDMDEIEKIDY

SEQ ID NO: 56396 - protein, 101 aa, Homo sapiens
MDAVPTIFDFCTHIKSMKLKSRNLLKKNNSCSPAGPSNLKSNISSQQVLLEHSYAFRNPMEAKKRIIKLEKEIASLRRKMKTCLQKERRATRRWIKATCLV

SEQ ID NO: 56397 - protein, 143 aa, Homo sapiens
MAVFVVLLALVAGVLGNEFSILKSPGSVVFRNGNWPIPGERIPDVAALSMGFSVKEDLSWPGLAVGNLFHRPRATVMVMVKGVNKLALPPGSVISYPLENAVPFSLDSVANSIHSLFSEETPVVLQLAPSEESVYGREGKLSV

SEQ ID NO: 56398 - protein, 164 aa, Homo sapiens
MAAKSQPNIPKAKSLDGVTNDRTASQGQWGRAWEVDWFSLASVIFLLLFAPFIVYYFIMACDQYSCALTGPVVDIVTGHARLSDIWAKTPPITRKAAQLYTLWVTFQVLLYTSLPDFCHKFLPGYVGGIQEGAVTPAGVVNKYQINGLQAWLLTHLLWFANAHL

SEQ ID NO: 56399 - protein, 47 aa, Homo sapiens
TSVAQVAPVDLDGMQQDIEQVWEELLSIPELQWRQGFTMLTRVVWNS

SEQ ID NO: 56400 - protein, 195 aa, Homo sapiens
MLSRVVLSAAATAGPYVLGTGLILYALSKEIYVISAETFTALSVLGVMVYGIKKYGPFVADFADKLNEQKLAQLEEAKQASIQHIQNAIDTEKSQQALVQKRHYLFDVQRNNIAMALEVTYRERLYRVYKEVKNRLDYHISVQNMMRRKEQEHMINWVEKHVVQSISTQQEKETIAKCIADLKLLAKKAQAQPVM

SEQ ID NO: 56401 - protein, 204 aa, Homo sapiens
MVRGRISRLSVRDVRFPTSLGGHGADAMHTDPDYSAAYVVIETDAEDGIKGCGITFTLGKGTEVVVCAVNALAHHVLNKDLKDIVGDFRGFYRQLTSDGQLRWIGPEKGVVHLATAAVLNAVWDLWAKQEGKPVWKLLVDMGRIRRTAGLSRGNSLATGTSNSEGPWKVQNVDGAVFSQRSKCWHKDTLLTRHRAPGWGTQMTR

SEQ ID NO: 56402 - protein, 126 aa, Homo sapiens
MIRVQQMHRPKLIGEELAQLKEQRVHKTDLERVLEANDGSGMLDEDEEDLQRALALSRQEIDMEDEEADLRRAIQLSMQGSSRNISQDMTQTSGTNLTSEELRKRREAYFEKQQQKQQQQQQQQQQ

SEQ ID NO: 56403 - protein, 326 aa, Homo sapiens
  MOD_RES (1)..(1): Any amino acid
XDPEKLGEFLQKDNISVHYFCLILSSKLPQRGQSNRGFHGFLPEDIKKEAARASRKICFVCKKKGAAINCQKDQCLRNFHLPCGQERGCLSQFFGEYKSFCDKHRPTQNIQHGHVGEESCILCCEDLSQQSVENIQSPCCSQAIYHRKCIQKYAHTSAKHFFKCPQCNNRKEFPQEMLRMGIHIPDRDAAWELEPGAFSDLYQRYQHCDAPICLYEQGRDSFEDEGRWCLILCATCGSHGTHRDCSSLRSNNYIPENSGDIPCCSSTFHPEEHFCRDNTLEENPGLSWTDWPEPSLLEKPESSRGRRSYSWRSKGVRITNSCKKSK

SEQ ID NO: 56404 - protein, 47 aa, Homo sapiens
MWSPQDRKYNSPPTQLSLKPNSQSLRSGNWSERKSHRLPRLPKRHSH

SEQ ID NO: 56405 - protein, 55 aa, Homo sapiens
MAGAPSPASLPPCSLISDCCASNQRDSVGVGPSEPGWSAVVQSQLTATSASEALH

SEQ ID NO: 56406 - protein, 197 aa, Homo sapiens
MTTLTRQDLNFGQGREAGPAGPGAGASGPAGFLERATGLCPPAVVADVLCEFLEVAVHLILYVREVYPVGIFQKRKKYNVPVQMSCHPELNQYIQDTLHCVKPLLEKNDVEKVVVVILDKEHRPVEKFVFEITQPPLLSISSDSLLSHVEQLLRAFILKISVCDAVLDHNPPGCTFTVLVHTREAATRNMEKIQVIK

SEQ ID NO: 56407 - protein, 178 aa, Homo sapiens
MGRRRAPAGGSLGRALMRHQTQRSRSHRHTDSWLHTSELNDGYDWGRLNLQSVTEQSSLDDFLATAELAGTEFVAEKLNIKFVPAEARTGLLSFEESQRIKKLHEENKQFLCIPRRPNWNQNTTPEELKQAEKDNFLEWRRQLVRLEEEQKLILTPFERNLDFWRQLWRVIERSAGHL

SEQ ID NO: 56408 - protein, 81 aa, Homo sapiens
MLDSCKLKSACNLPFICNKKIINTAGTSNAEVPLADPGMYQLDITLRRGQSLAARDRGGTSDPYVKFKIGGKEVFRSKIIH

SEQ ID NO: 56409 - protein, 307 aa, Homo sapiens
MSQSNRELVVDFLSYKLSQKGYSWSQFSDVEENRTEAPEGTESEMETPSAINGNPSWHLADSPAVNGATGHSSSLDAREVIPMAAVKQALREAGDEFELRYRRAFSDLTSQLHITPGTAYQSFEQVVNELFRDGVNWGRIVAFFSFGGALCVESVDKEMQVLVSRIAAWMATYLNDHLEPWIQENGGWLDWWCFCSAHLRVIITDGGDWGGPILPLGSAGSPDLHLNPTPVWCLRIEAATLWDLSCFHFCSQLSGLCGPHLQDTFVELYGNNAAAESRKGQERFNRWFLTGMTVAGVVLLGSLFSRK

SEQ ID NO: 56410 - protein, 341 aa, Homo sapiens
MSASQDSRSRDNGPDGMEPEGVIESNWNEIVDSFDDMNLSESLLRGIYAYGFEKPSAIQQRAILPCIKGYDVIAQAQSGTGKTATFAISILQQIELDLKATQALVLAPTRELAQQIQKVVMALGDYMGASCHACIGGTNVRAEVQKLQMEAPHIIVGTPGRVFDMLNRRYLSPKYIKMFVLDEADEMLSRGFKDQIYDIFQKLNSNTQVVLLSATMPSDVLEVTKKFMRDPIRILVKKEELTLEGIRQFYINVEREEWKLDTLCDLYETLTITQAVIFINTRRKVDWLTEKMHARDFTVSAMHGDMDQKERDVIMREFRSGSSRVLITTDLLNRSRWTVWP

SEQ ID NO: 56411 - protein, 103 aa, Homo sapiens
MESALPAAGFLYWVGAGTVAYLALRISYSLFTALRVWGVGNEAGVGPGLGEWADDTIGTAWHGGKIQRGYSEHFIWQWHAPCPTLDHLFCNQDFCRFLLSVPP

SEQ ID NO: 56412 - protein, 47 aa, Homo sapiens
MSERCCSRYRDGVSPRVQAGLKLLASCDPSASASQSAGHHAWPEVET

SEQ ID NO: 56413 - protein, 79 aa, Homo sapiens
MAALLRRLLQRERPSAASGRPVGRREANLGTDAGVAVRVRFAPSPTESHSTAAQAGVQRRDHGSLQPQRPQAQVILPPQ

SEQ ID NO: 56414 - protein, 119 aa, Homo sapiens
MEEEDESRGKTEESGEDRGDGPPDRDPTLSPSAFILRAIQQAVGSSLQGDLPNDKDGSRCHGLRWRRCRSPRSEPRSQESGGTDTATVSVGHGHGQLPRRAGECPGSPGYLGSQPPGPA

SEQ ID NO: 56415 - protein, 60 aa, Homo sapiens
MAERAALEELVKLQGERVRGLKQQKASAELIEEEVAKLLKLKAQLGPDESKQKFVLKTPK

SEQ ID NO: 56416 - protein, 58 aa, Homo sapiens
  MOD_RES (1)..(1): Any amino acid
XMLTSEGLRCVWKSFLLDAYKQTDSVVLTLNFPRQISLCFGKNSAAELYIVSKKEKVP

SEQ ID NO: 56417 - protein, 76 aa, Homo sapiens
MSAEASARPLRVGSRVEVIGKGHRGTVAYVGATLFATGKWVGVILDEAKGKNDGTVQGRKYFTCDEGHGIFVRQSQ

SEQ ID NO: 56418 - protein, 22 aa, Homo sapiens
MSLLKHQSLRPDEDSSHDLMLL

SEQ ID NO: 56419 - protein, 1711 aa, Homo sapiens
MGKKWRDAAEMERGCSDREDNAESRRRSRSASRGRFAESWKRLSSKQGSTKRSGLPSQQTPAQKSWIERAFYKRECVHIIPSTKDPHRCCCGRLIGQHVGLTPSISVLQNEKNESRLSRNDIQSEKWSISKHTQLSPTDAFGTIEFQGGGHSNKAMYVRVSFDTKPDLLLHLMTKEWQLELPKLLISVHGGLQNFELQPKLKQVFGKGLIKAAMTTGAWIFTGGVNTGVIRHVGDALKDHASKSRGKICTIGIAPWGIVENQEDLIGRDVVRPYQTMSNPMSKLTVLNSMHSHFILADNGTTGKYGAEVKLRRQLEKHISLQKINTRIGQGVPVVALIVEGGPNVISIVLEYLRDTPPVPVVVCDGSGRASDILAFGHKYSEEGGLINESLRDQLLVTIQKTFTYTRTQAQHLFIILMECMKKKELITVFRMGSEGHQDIDLAILTALLKGANASAPDQLSLALAWNRVDIARSQIFIYGQQWPVGSLEQAMLDALVLDRVDFVKLLIENGVSMHRFLTISRLEELYNTRHGPSNTLYHLVRDVKKREYPGFGWIYFKGNLPPDYRISLIDIGLVIEYLMGGAYRCNYTRKRFRTLYHNLFGPKRDDIPLRRGRKTTKKREEEVDIDLDDPEINHFPFPFHELMVWAVLMKRQKMALFFWQHGEEAMAKALVACKLCKAMAHEASENDMVDDISQELNHNSRDFGQLAVELLDQSYKQDEQLAMKLLTYELKNWSNATCLQLAVAAKHRDFIAHTCSQMLLTDMWMGRLRMRKNSGLKVILGILLPPSILSLEFKNKDDMPYMSQAQEIHLQEKEAEEPEKPTKEKEEEDMELTAMLGRNNGESSRKKDEEEVQSKHRLIPLGRKIYEFYNAPIVKFWFYTLAYIGYLMLFNYIVLVKMERWPSTQEWIVISYIFTLGIEKMREILMSEPGKLLQKVKVWLQEYWNVTDLIAILLFSVGMILRLQDQPFRSDGRVIYCVNIIYWYIRLLDIFGVNKYLGPYVMMIGKMMIDMMYFVIIMLVVLMSFGVARQAILFPNEEPSWKLAKNIFYMPYWMIYGEVFADQIDPPCGQNETREDGKIIQLPPCKTGAWIVPAIMACYLLVANILLVNLLIAVFNNTFFEVKSISNQVWKFQRYQLIMTFHERPVLPPPLIIFSHMTMIFQHLCCRWRKHESDPDERDYGLKLFITDDELKKVHDFEEQCIEEYFREKDDRFNSSNDERIRVTSERVENMSMRLEEVNEREHSMKASLQTVDIRLAQLEDLIGRMATALERLTGLERAESNKIRSRTSSDCTDAAYIVRQSSFNSQEGNTFKLQESIDPAGEETMSPTSPTLMPRMRSHSFYSVNMKDKGGIEKLESIFKERSLSLHRATSSHSVAKEPKAPAAPANTLAIVPDSRRPSSCIDIYVSAMDELHCDIDPLDNSVNILGLGEPSFSTPVPSTAPSSSAYATLAPTDRPPSRSIDFEDITSMDTRSFSSDYTHLPECQNPWDSEPPMYHTIERSKSSRYLATTPFLLEEAPIVKSHSFMFSPSRSYYANFGVPVKTAEYTSITDCIDTRCVNAPQAIADRAAFPGGLGDKVEDLTCCHPEREAELSHPSSDSEENEAKGRRATIAISSQEGDNSERTLSNNITVPKIERANSYSAEEPSAPYAHTRKSFSISDKLDRQRNTASLRNPFQRSKSSKPEGRGDSLSMRRLSRTSAFQSFESKHN

SEQ ID NO: 56420 - protein, 1159 aa, Homo sapiens
MAQQANVGELLAMLDSPMLGVRDDVTAVFKENLNSDRGPMLVNTLVDYYLETSSQPALHILTTLQEPHDKHLLDRINEYVGKAATRLSILSLLGHVIRLQPSWKHKLSQAPLLPSLLKCLKMDTDVVVLTTGVLVLITMLPMIPQSGKQHLLDFFDIFGRLSSWCLKKPGHVAEVYLVHLHASVYALFHRLYGMYPCNFVSFLRSHYSMKENLETFEEVVKPMMEHVRIHPELVTGSKDHELDPRRWKRLETHDVVIECAKISLDPTEASYEDGYSVSHQISARFPHRSADVTTSPYADTQNSYGCATSTPYSTSRLMLLNMPGQLPQTLSSPSTRLITEPPQATLWSPSMVCGMTTPPTSPGNVPPDLSHPYSKVFGTTAGGKGTPLGTPATSPPPAPLCHSDDYVHISLPQATVTPPRKEERMDSARPCLHRQHHLLNDRGSEEPPGSKGSVTLSDLPGFLGDLASEEDSIEKDKEEAAISRELSEITTAEAEPVVPRGGFDSPFYRDSLPGSQRKTHSAASSSQGASVNPEPLHSSLDKLGPDTPKQAFTPIDLPCGSADESPAGDRECQTSLETSIFTPSPCKIPPPTRVGFGSGQPPPYDHLFEVALPKTAHHFVIRKTEELLKKAKGNTEEDGVPSTSPMEVLDRLIQQGADAHSKELNKLPLPSKSVDWTHFGDEIRTLRDQLLLLHNQLLYERFKRQQHALRNRRLLRKVIKAAALEEHNAAMKDQLKLQEKDIQMWKVSLQKEQARYNQLQEQRDTMVTKLHSQIRQLQHDREEFYNQSQELQTKLEDCRNMIAELRIELKKANNKVCHTELLLSQVSQKLSNSESVQQQMEFLNRQLLVLGEVNELYLEQLQNKHSDTTKEVEMMKAAYRKELEKNRSHVLQQTQRLDTSQKRILELESHLAKKDHLLLEQKKYLEDVKLQARGQLQAAESRYEAQKRITQVFELEILDLYGRLEKDGLLKKLEEEKAEAAEAAEERLDCCNDGCSDSMVGHNEEASGHNGETKTPRPSSARGSSGSRGGGGSSSSSSELSTPEKPPHQRAGPFSSRWETTMGEASASIPTTVGSLPSSKSFLGMKARELFRNKSESQCDEDGMTSSLSESLKTELGKDLGVEAKIPLNLDGPHPSPPTPDSVGQLHIMDYNETHHEHS

SEQ ID NO: 56421 - protein, 452 aa, Homo sapiens
  MOD_RES (1)..(1): Any amino acid
XQVWGGQPVYPQETDDACIFPDGGPCPSGSWSQKRSFVYVWKTWGQYWQVLGGPVSGLSIGTGRAMLGTHTMEVTVYHRRGSRSYVPLAHSSSAFTITDQVPFSVSVSQLRALDGGNKHFLRNQPLTFALQLHDPSGYLAEADLSYTWDFGDSSGTLISRALVVTHTYLEPGPVTAQVVLQAAIPLTSCGSSPVPGTTDGHRPTAEAPNTTAGQVPTTEVVGTTPGQAPTAEPSGTTSVQVPTTEVISTAPVQMPTAESTAAQVTTTEWVETTARELPIPEPEGPDASSIMSTESITGSLGPLLDGTATLRLVKRQVPLDCVLYRYGSFSVTLDIVQGIESAEILQAVPSGEGDAFELTVSCQGGLPKEACMEISSPGCQPPAQRLCQPVLPSPACQLVLHQILKGGSGTYCLNVSLADTNSLAVVSTQLIMPVPGILLTGQEAGLGQVPLI

SEQ ID NO: 56422 - protein, 65 aa, Homo sapiens
MGSQHSAAARPSSCRRKQEDDRDGLLAEREQEEAIAQFPYVEFTGRDSITCLTCQGTGYIPTELQ

SEQ ID NO: 56423 - protein, 66 aa, Homo sapiens
MWKWILTHCASAFPHLPGCCCCCFLLLFLVSSVPVTCQALGQDMVSPEATNSSSSSFSSPSSAGRH

SEQ ID NO: 56424 - protein, 119 aa, Homo sapiens
METDLNSQDRKDLDKFIKFFALKTVQVIVQARLGEKICTRSSSSPTGSDWFNLAIKDIPEVTHEAKKALAGQLPAVGRSMCVEISLKTSEGDSMELEIWCLEMNEKCDKEIKVSYTVYN

SEQ ID NO: 56425 - protein, 176 aa, Homo sapiens
GFLMKNSWQITPRNNISLVKFGPHVSLNVFFGKPGPWFEDCEMDGDKNSIFHDIDGSVTGYKDAYVGRMDNYLIRHPSCVNVSKWNAVICSGTYAQVYVQTWSTQNLSMTITRDEYPSNPMVLRGINQKAAFPQYQPVVMLEKGYTIHWNGPAPRTTFLYLVNFNKYVSVTVISNS

SEQ ID NO: 56426 - protein, 89 aa, Homo sapiens
KVAKASAALAALEKLFSGPNAANNKKKKIIPQAKGVVNTAVSAAVQAVRGRGRGTLTRGAFVGATAAPGYIAPGYGTPYGYSTAAPAYG

SEQ ID NO: 56427 - protein, 90 aa, Homo sapiens
MAHLKRLVKLHIKRHYHKKFWKLGAVIFFFIIVLVLMQREVSVQYSKEESRMERNMKNKNKMLDLMLEAVNNIKDAMPKMQIGAPVRQNI

SEQ ID NO: 56428 - protein, 157 aa, Homo sapiens
  MOD_RES (1)..(1): Any amino acid
XTSSVKQPWDHTTTTTTNRPGTTRAPAKPPGSGLDLADALDDQDDGRRKPGIGGRERWNHVTTTTKRPVTTRAPANTLGNDFDLADALDDRNDRDDGRRKPIAGGGGFSDKDLEDIVGGGEYKPDKGKGDGRYGSNDDPGSGGFLNPEAPVGHVKGK

SEQ ID NO: 56429 - protein, 388 aa, Homo sapiens
MFRLNSLSALAELAVGSRWYHGGSQPIQIRRRLMMVAFLGASAVTASTGLLWKRAHAESPPCVDNLKSDIGDKGKNKDEGDVCNHEKKTADLAPHPEEKKKKRSGFRDRKVMEYENRIRAYSTPDKIFRYFATLKVISEPGEAEVFMTPEDFVRSITPNEKQPEHLGLDQYIIKRFDGKARFSKKKILHRVRKKSKGSILQRRKKALQKEERTRHGSTKHNEQEVRRTIMEWLEKAGVQWHHLSSLQPPTPWFKRFFCLSLLSSWDYRHTPPCPANFFIFSRDRVSPCWPGWSRYPDLMIRPPWLRKVLGLQKISQEREKFADEGSIFYTLGECGLISFSDYIFLTTVLSTPQRNFEIAFKMFDLNGDGEVDMEEFEQVQSIIRSQTS

SEQ ID NO: 56430 - protein, 714 aa, Homo sapiens
MLPGLALLLLAAWTARALEVYPELQITNVVEANQPVTIQNWCKRGRKQCKTHPHFVIPYRCLVGEFVSDALLVPDKCKFLHQERMDVCETHLHWHTVAKETCSEKSTNLHDYGMLLPCGIDKFRGVEFVCCPLAEESDNVDSADAEEDDSDVWWGGADTDYADGSEDKVVEVAEEEEVAEVEEEEADDDEDDEDGDEVEEEAEEPYEEATERTTSIATTTTTTTESVEEVVREVCSEQAETGPCRAMISRWYFDVTEGKCAPFFYGGCGGNRNNFDTEEYCMAVCGSAMSQSLLKTTQEPLARDPVKLPTTAASTPDAVDKYLETPGDENEHAHFQKAKERLEAKHRERMSQVMREWEEAERQAKNLPKADKKAVIQHFQEKVESLEQEAANERQQLVETHMARVEAMLNDRRRLALENYITALQAVPPRPRHVFNMLKKYVRAEQKDRQHTLKHFEHVRMVDPKKAAQIRSQVMTHLRVIYERMNQSLSLLYNVPAVAEEIQDEVDELLQKEQNYSDDVLANMISEPRISYGNDALMPSLTETKTTVELLPVNGEFSLDDLQPWHSFGADSVPANTENEVEPVDARPAADRGLTTRPGSGLTNIKTEEISEVKMDAEFRHDSGYEVHHQKLVFFAEDVGSNKGAIIGLMVGGVVIATVIVITLVMLKKKQYTSIHHGVVEVDAAVTPEERHLSKMQQNGYENPTYKFFEQMQN

SEQ ID NO: 56431 - protein, 60 aa, Homo sapiens
MGSKCCKGGPDEDAVERQRRQKNSQKSEPTQMGEWIDNLWYMHITDYSSAIKSVDLKGRG

SEQ ID NO: 56432 - protein, 71 aa, Homo sapiens
PGVTVKDVNQQEFVRALAAFLKKSGKLKVPEWVDTVKLAKHKELAPYDENWFYTRAELHCHQAGVHWCRLG

SEQ ID NO: 56433 - protein, 51 aa, Homo sapiens
MGAAVLCASFMSFGVKRRWFALGAALQLAISTYAAYIGGYVHYGDWLKVRM

SEQ ID NO: 56434 - protein, 295 aa, Homo sapiens
MTTHVTLEDALSNVDLLEELPLPDQQPCIEPPPSSIMYQANFDTNFEDRNAFVTGIARYIEQATVHSSMNEMLEEGHEYAVMLYTWRSCSRAIPQVKCNEQPNRVEIYEKTVEVLEPEVTKLMKFMYFQRKAIERFCSEVKRLCHAERRKDFVSEAYLLTLGKFINMFAVLDELKNMKCSVKNDHSAYKRAAQFLRKMADPQSIQESQNLSMFLANHNRITQQLEVIPGYEELLADIVNICVDYYENKMYLTPSEKHMLLKVMGFGLYLMDGNVSNIYKLDAKKRINLSKIDKFF

SEQ ID NO: 56435 - protein, 108 aa, Homo sapiens
MALAARLWRLLPFRRGAAPGSRLPAGTSGSRGHCGPCRFRGFEVMGNPGTFKRGLLLSALSYLGFETYQVISQAAVVHATAKESRCVTEGRVWRCDLSSLQPLPPGFK

SEQ ID NO: 56436 - protein, 811 aa, Homo sapiens
TQKNKDALQPIKEDRTGKAQDDAFWLQSLITDAFHDKGFQKIKEYFQQKESHFPQKYNRLLLYRLDRSINKELDKNEFQSVSLLLKCIQRFLVDGLKEDEPLLIRQGLIPKLVSWFERTTGILTSEGLASDTSLICVIEDFFDTALIISRSSSEGKIQMLDSFLLSLGFLVTEKTVNHLLQQEGLKTFNCILHAVPREERKKFPLSEGMCHLMKDLARTLLTVGDYDQQVAISEALCRLTIKKSRDELVHKWFDDEVIAEAFKEIKDREFETDSRRFLNHLNNRLGDQRRVYSFPCIAAFADEHEMRKPADEKLEKFWIDFNLGSQSVTFYIDNAENTLWDSVTLPKEAVMNFSITETEKIKIFIIYLKKPMIISYKEVMKIEIHFDLQFNISQVSIQALGEDKQMLPDQTKISSELFSKSDKEDRESPSGLERETEQAEESTNMVEFMSAEDDRCLITLHLNDQSEPPVIGEPASDSHLQPVPPFGVPDFPQQPKSHYRKHLFSESNQDSSTSELSWTSNQKKKSLKSYSSRKKTRTRSNLRILPVFPPSSGSGHEKDQAKLLSPSEKEIPEQNNTTSPKTSEQKFQDSFAFLTAEDSAQKTELQDPHSLSELSSLKHSEDEEKPKIVNQESLTESTSLKHKLRNLEDKDIPEGSFAKSQQSRLEEEVAPGSPFSITEERELPEGISTSSLEVVPENLNGSAILPTFENFTKKRKRKYELRYRKRPFNSENAKKAPDCLIKLLNQMQLFRLNKLERFQNLVLQELSSLKQDIQALEHLEKEVLEFWGKQSADLQSFCDLQVLRFNSTQTS

SEQ ID NO: 56437 - protein, 131 aa, Homo sapiens
MSKISEAVKRARAAFSSGRTRPLQFRIQQLEALQRLIQEQEQELVGALAADLHKNEWNAYYEEVVYVLEEIEYMIQKLPEWAADEPVEKTPQTQQDELYIHSEPLGVVLVIGTWNYPFNLTIQPMVGAIAA

SEQ ID NO: 56438 - protein, 205 aa, Homo sapiens
MGTGPAQTPRSTRAGPEPSPAPPGPGDTGDSDVTQEGSGPAGIRGGETVIRAGMGDSPGRGAPERRHKAQPGRARKYEWRPEGPTSMGSLGQREDLQDEDRNSAFTWKVQANNRAYNGQFKEKVILCWQRKKYKTNVIRTAKYNFYSFLPLNLYEQFHRVSNLFFLIIIILQSIPDISTLPWFSLSTPMVCLLFIRATRDLVDDM

SEQ ID NO: 56439 - protein, 77 aa, Homo sapiens
MHCGLLEEPDMDSTDEEKENNRASKPHSTPATLQWLEENYEIAEGVCIPRSALYMHYLDFCEKNDTQPVNAASFGKQ

SEQ ID NO: 56440 - protein, 135 aa, Homo sapiens
MWTLVSWVALTAGLVAGTRCPDGQFCPVACCLDPGGASYSCCRPLLDKWPTTLSRHLGGPCQVDAHCSAGHSCIFTVSGTSSCCPFPEAVACGDGHHCCPRGFHCSADGRSCFQRSGNNSVGAIQCPDSQFECPD

SEQ ID NO: 56441 - protein, 674 aa, Homo sapiens
MSTRTPLPTVNERDTENVAIKIIDKTQLNPTSLQKLFREVRIMKILNHPNIVKLFEVIETEKTLYLIMEYASGGEVFDYLVAHGRMKEKEARSKFRQIVSAVQYCHQKRIVHRDLKAENLLLDADMNIKIADFGFSNEFTVGGKLDTFCGSPPYAAPELFQGKKYDGPEVDVWSLGVILYTLVSGSLPFDGQNLKELRERVLRGKYRIPFYMSTDCENLLKRFLVLNPIKRGTLEQIMKDRWINAGHEEDELKPFVEPELDISDQKRIDIMVGMGYSQEEIQESLSKMKYDEITATYLLLGRKSSELDASDSSSSSNLSLAKVRPSSDLNNSTGQSPHHKVQRSVSSSQKQRRYSDHAGPAIPSVVAYPKRSQTSTADSDLKEDGISSRKSSGSAVGGKGIAPASPMLGNASNPNKADIPERKKSSTVPSSNTASGGMTRRNTYVCSERTTADRHSVIQNGKENSTIPDQRTPVASTHSISSAATPDRIRFPRGTASRSTFHGQPRERRTATYNGPPASPSLSHEATPLSQTRSRGSTNLFSKLTSKLTRRNMSFRFIKSRNVSAEQKDENKEAKPRSLRFTWSMKTTSSMDPGDMMREIRKVLDANNCDYEQRERFLLFCVHGDGHAENLVQWEMEVCKLPRLSLNGVRFKRISGTSIAFKNIASKIANELKL

SEQ ID NO: 56442 - protein, 91 aa, Homo sapiens
MASATEDPVLERYFKGHKAAITSLDLSPNGKQLATASWDTFLMLWNFKPHARAYRYVGHKDVVTSVQFSPHGNLLASASRDRTVRLWIPDK

SEQ ID NO: 56443 - protein, 103 aa, Homo sapiens
MNLFKTNHVFFLLLLAHIIALESIAWFTVFYFGNGWIPTLITAFVLATSQAQAGWLQHDYGHLSVYRKPKWNHLVHKFVIGHLKGASANWWNHRHFQHHAKPN

SEQ ID NO: 56444 - protein, 87 aa, Homo sapiens
SSWSMTFEERENRRLQEASMRLEQENDDLAHELVTSKIALRNDLDQAEDKADVLNKELLLTKQRLVETEEEKRKQEEETAQENHMCN

SEQ ID NO: 56445 - protein, 263 aa, Homo sapiens
MELKAEEEEVGGVQPVSIQAFASSSTLHGLAHIFSYERLSLKRALWALCFLGSLAVLLCVCTERVQYYFHYHHVTKLDEVAASQLTFPAVTLCNLNEFRFSQVSKNDLYHAGELLALLNNRYEIPDTQMADEKQLEILQDKANFRSFKPKPFNMREFYDRAGHDIRDMLLSCHFRGEVCSAEDFKVKPMQVAKELRRCTLPGTVFQGTQRARKGLHTLWKVLHVQLGPRWAAAAEDHEGWDGQWAGNHAGHPAGRVPACVGGD

SEQ ID NO: 56446 - protein, 737 aa, Homo sapiens
MELDMAMEPDRKAAVSHWQQQSYLDSGIHSGATTTAPSLSGKGNPEEEDVDTSQVLYEWEQGFSQSFTQEQVADIDGQYAMTRAQRMLKHAVVNLINYQDDAELATRAIPELTKLLNDEDQVVVNKAAVMVHQLSKKEASRHAIMRSPQMVSAIVRTMQNTNDVETARCTAGTLHNLSHHREGLLAIFKSGGIPALVKMLGSPVDSVLFYAITTLHNLLLHQEGAKMAVRLAGGLQKMVALLNKTNVKFLAITTDCLQILAYGNQESKLIILASGGPQALVNIMRTYTYEKLLWTTSRVLKVLSVCSSNKPAIVEAGGMQALGLHLTDPSQRLVQNCLWTLRNLSDAATKQEGMEGLLGTLVQLLGSDDINVVTCAAGILSNLTCNNYKNKMMVCQVGGIEALVRTVLRAGDREDITEPAICALRHLTSRHQEAEMAQNAVRLHYGLPVVVKLLHPPSHWPLIKATVGLIRNLALCPANHAPLREQGAIPRLVQLLVRAHQDTQRRTSMGGTQQQFVEGVRMEEIVEGCTGALHILARDVHNRIVIRGLNTIPLFVQLLYSPIENIQRVAAGVLCELAQDKEAAEAIEAEGATAPLTELLHSRNEGVATYAAAVLFRMSEDKPQDYKKRLSVELTSSLFRTEPMAWNETADLGLDIGAQGEPLGYRQDDPSYRSFHSGGYGQDALGMDPMMEHEMGGHHPGADYPVDGLPDLGHAQDLMDGLPPGDSNQLAWFDTDL

SEQ ID NO: 56447 - protein, 178 aa, Homo sapiens
  MOD_RES (1)..(1): Any amino acid
XAEKATLFLGTLDTIFLFSYAVGLFISGIVGDRLNLRWVLSFGMCSSALVVFVFGALTEWLRFYNKWLYCCLWIVNGLLQSTGWPCVVAVMGNWFGKAGRGVVFGLWSACASVGNILGACLASSVLQYGYEYSLAYACLKLVNYSFFFWLPFYLSNNFGWKEAEADKLSIWYDVGGII

SEQ ID NO: 56448 - protein, 161 aa, Homo sapiens
MLPMFGIMPSKKVASAYFKDFHLLLIGVICLATSIEKWNLHKRIALKMVMMVGVNPAWLTLGFMSSTAFLSMWLSNTSTAAMVMPIAEAVVQQIINAEAEVEATQMTYFNGSTNHGLEIDESVNGHEINERKEKTKPVPGYNNDTGKISSKVELEKYLQVR

SEQ ID NO: 56449 - protein, 260 aa, Homo sapiens
PDRIRPIYSGKFFDRTPCWPSLITPPEAKKYFNFRYPPAGVERVFYGRANDPQIAPYLTHGIRSKISVLANTLINPQPITTFQQKIKDKKESIYLSNRRAPLGKSHDQAPGLPKGMDTTNTTFGTAVIKEYSAKDVVNPPKSYEEVFKEGNEGHDLYVVSHNDYYAGEAKNRKYNPSSFHRCSVYGVPTPHFNDGRAMAKSLYWLHELQMKRGAKFVSKRADDFKEKFQHKLGRVLDPIAETMNVPPDCTFGACLRPEEY

SEQ ID NO: 56450 - protein, 363 aa, Homo sapiens
MSGPVPSRARVYTDVNTHRPREYWDYESHVVEWGNQDDYQLVRKLGRGKYSEVFEAINITNNEKVVVKILKPVKKKKIKREIKILENLRGGPNIITLADIVKDPVSRTPALVFEHVNNTDFKQLYQTLTDYDIRFYMYEILKLRLIDWGLAEFYHPGQEYNVRVASRYFKGPELLVDYQMYDYSLDMWSLGCMLASMIFRKEPFFHGHDNYDQLVRIAKVLGTEDLYDYIDKYNIELDPRFNDILGRHSRKRWERFVHSENQHLVSPEALDFLDKLLRYDHQSRLTAREAMEHPYFYTVVKDQARMGSSSMPGGSTPVSSANMMSGISSVPTPSPLGPLAGSPVIAAANPLGMPVPAAAGAQQ

SEQ ID NO: 56451 - protein, 530 aa, Homo sapiens
MEVPGPPVSSKPGETSVKWQLCYDTTAKMWWMDEFHPFIEALLPHVRAFAYTWFNLQARKRKYFKKHEKRMSKDEERAVKDELLGEKPEVKQKWASRLLAKLRKDIRPECREDFVLSITGKKAPGCVLSNPDQKGKMRRIDCLRQADKVWRLDLVMVILFKGIPLESTDGERLVKAAQCGHPVLCVQPHHIGVAVKELDLYLAYFVRERDAEQSGSPRTGMGSDQEDSKPITLDTTDFQESFVTSGVFSVTELIQVSRTPVVTGTGPNFSLGELQGHLAYDLNPASTGLRRTLPSTSSSGSKRHKSGSMEEDVDTSPGGDYYTSPSSPTSSSRNWTEDMEGGISSPVKKTEMDKSPFNSPSPQDSPRLSSFTQHHRPVIAVHSGIARSPHPSSALHFPTTSILPQTASTYFPHTAIRYPPHLNPQDPLKDLVSLACDPASQQPGPLNGSGQLKMPSHCLSAQMLAPPPPGLPRLALPPATKPATTSEGGATSPTSPSYSPPDTSPANRSFVGLGPRDPAGIYQAQSWYLG

SEQ ID NO: 56452 - protein, 184 aa, Homo sapiens
MDRGSLLPFQLWCPRPFGTYSQNQPRPPSAALKPSACPEPGGGAEPDHGPAHSENTPPALATEVPASQPAPLLSAAAAGDEGRVLLDTWYVIKPGNTKEKVAFFVAHQCGGGSRASSMKVKGHWGSDSSKAKRRRRCLDPTKAPPDPGGREGPPAAEEGPASAGEDVDLLSVAEMVALVEQRAA

SEQ ID NO: 56453 - protein, 16 aa, Homo sapiens
MGPGRCLLTALLLLAL

SEQ ID NO: 56454 - protein, 150 aa, Homo sapiens
  MOD_RES (1)..(1): Any amino acid
XEETVYLLSRMGNSRSALKMIMEELHDVDKAIEFAKEQDDGELWEDLILYSIDKPPFITGLLNNIGTHVDPILLIHRIKEGMEIPNLRDSLVKILQDYNLQILLREGCKKILVADSLSLLKKMHRTQMKGVLVDEENICESCLSPILPSE

SEQ ID NO: 56455 - protein, 156 aa, Homo sapiens
  MOD_RES (1)..(1): Any amino acid
XLTGYWNSFVKMFPGNRGLASERWHPVLRTLKNRIEENTGHTFNSLLCNLYRNEKDSVDWHSDDEPSLGRCPIIASLSFGATRTFEMRKKPPPEENGDYTYVERVKIPLDHGTLLIMEGATQADWQHRVPKEYHSREPRVNLTFRTVYPDPRGAPW

SEQ ID NO: 56456 - protein, 151 aa, Homo sapiens
MAAQVTLEDALSNVDLLEELPLPDQQPCIEPPPSSLLYQPNFNTNFEDRNAFVTGIARYIEQATVHSSMNEMLEEGQEYAVMLYTWRSCSRAIPQVKCNEQPNRVEIYEKTVEVLEPEVTKLMNFMYFQRNAIERFCGEVRRLCHAERRKD

SEQ ID NO: 56457 - protein, 191 aa, Homo sapiens
LMVSKIWTPDTFFRNGKKSIAHNMTTPNKLFRIMQNGTILYTMRLTINADCPMRLVNFPMDGHACPLKFGSYNVHFEGKKDNSSNSLLYLICFKYLDAYPKSEIIYTWKKGPLYSVEVPEESSSLLQYDLIGQTVSSETIKSNTGEYVIMTVYFHLQRKMGYFMIQIYTPCIMTVILSQVSFWINKESVPA

SEQ ID NO: 56458 - protein, 761 aa, Homo sapiens
MAQWNQLQQLDTRYLEQLHQLYSDSFPMELRQFLAPWIESQDWAYAASKESHATLVFHNLLGEIDQQYSRFLQESNVLYQHNLRRIKQFLQSRYLEKPMEIARIVARCLWEESRLLQTAATAAQQGGQANHPTAAVVTEKQQMLEQHLQDVRKRVQDLEQKMKVVENLQDDFDFNYKTLKSQGDMQDLNGNNQSVTRQKMQQLEQMLTALDQMRRSIVSELAGLLSAMEYVQKTLTDEELADWKRRQQIACIGGPPNICLDRLENWITSLAESQLQTRQQIKKLEELQQKVSYKGDPIVQHRPMLEERIVELFRNLMKSAFVVERQPCMPMHPDRPLVIKTGVQFTTKVRLLVKFPELNYQLKIKVCIDKDSGDVAALRGSRKFNILGTNTKVMNMEESNNGSLSAEFKHLTLREQRCGNGGRANCDASLIVTEELHLITFETEVYHQGLKIDLETHSLPVVVISNICQMPNAWASILWYNMLTNNPKNVNFFTKPPIGTWDQVAEVLSWQFSSTTKRGLSIEQLTTLAEKLLGPGVNYSGCQITWAKFCKENMAGKGFSFWVWLDNIIDLVKKYIMGFISKERERAILSTKPPGTFLLRFSESSKEGGVTFTWVEKDISGKTQIQSVEPYTKQQLNNMSFAEIIMGYKIMDATNILVSPLVYLYPDIPKEEAFGKYCRPESQEHPEADPGSAAPYLKTKFICVTPTTCSNTIDLPMSPRTLDSLMQFGNNGEGAEPSAGGQFESLTFDMELTSECATSPM

SEQ ID NO: 56459 - protein, 676 aa, Homo sapiens
MAEAAAAAGGTGLGAGASYGSAADRDRDPDPDRAGRRLRVLSGHLLGRPREALSTNECKARRAASAATAAPTATPAAQESGTIPKKRQEVMKWNGWGYNDSKFIFNKKGQIELTGKRYPLSGMGLPTFKEWIQNTLGVNVEHKTTSKASLNPSDTPPSVVNEDFLHDLKETNISYSQEADDRVFRAHGHCLHEIFLLREGMFERIPDIVLWPTCHDDVVKIVNLACKYNLCIIPIGGGTSVSYGLMCPADETRTIISLDTSQMNRILWVDENNLTAHVEAGITGQELERQLKESGYCTGHEPDSLEFSTVGGWVSTRASGMKKNIYGNIEDLVVHIKMVTPRGIIEKSCQGPRMSTGPDIHHFIMGSEGTLGVITEATIKIRPVPEYQKYGSVAFPNFEQGVACLREIAKQRCAPASIRLMDNKQFQFGHALKPQVSSIFTSFLDGLKKFYITKFKGFDPNQLSVATLLFEGDREKVLQHEKQVYDIAAKFGGLAAGEDNGQRGYLLTYVIAYIRDLALEYYVLGESFETSAPWDRVVDLCRNVKERITRECKEKGVQFAPFSTCRVTQTYDAGACIYFYFAFNYRGISDPLTVFEQTEAAAREEILANGGSLSHHHGEHEPHSTSTHHGRYRIPQICGRSFPPLDNFQDSSRFLPEPSTQECISPWFHHIHSLPF

SEQ ID NO: 56460 - protein, 31 aa, Homo sapiens
MNLYFAQVVFKAKVKRRPEMSRGLLAVRGAF

SEQ ID NO: 56461 - protein, 1240 aa, Homo sapiens
MFINIKSILWMCSTLIVTHALHKVKVGKSPPVRGSLSGKVSLPCHFSTMPTLPPSYNTSEFLRIKWSKIEVDKNGKDLKETTVLVAQNGNIKIGQDYKGRVSVPTHPEAVGDASLTVVKLLASDAGLYRCDVMYGIEDTQDTVSLTVDGVVFHYRAATSRYTLNFEAAQKACLDVGAVIATPEQLFAAYEDGFEQCDAGWLADQTVRYPIRAPRVGCYGDKMGKAGVRTYGFRSPQETYDVYCYVDHLDGDVFHLTVPSKFTFEEAAKECENQDARLATVGELQAAWRNGFDQCDYGWLSDASVRHPVTVARAQCGGGLLGVRTLYRFENQTGFPPPDSRFDAYCFKRRMSDLSVIGHPIDSESKEDEPCSEETDPVHDLMAEILPEFPDIIEIDLYHSEENEEEEEECANATDVTTTPSVQYINGKHLVTTVPKDPEAAEARRGQFESVAPSQNFSDSSESDTHPFVIAKTELSTAVQPNESTETTESLEVTWKPETYPETSEHFSGGEPDVFPTVPFHEEFESGTAKKGAESVTERDTEVGHQAHEHTEPVSLFPEESSGEIAIDQESQKIAFARATEVTFGEEVEKSTSVTYTPTIVPSSASAYVSEEEAVTLIGNPWPDDLLSTKESWVEATPRQVVELSGSSSIPITEGSGEAEEDEDTMFTMVTDLSQRNTTDTLITLDTSRIITESFFEVPATTIYPVSEQPSAKVVPTKFVSETDTSEWISSTTVEEKKRKEEEGTTGTASTFEVYSSTQRSDQLILPFELESPNVATSSDSGTRKSFMSLTTPTQSEREMTDSTPVFTETNTLENLGAQTTEHSSIHQPGVQEGLTTLPRSPASVFMEQGSGEAAADPETTTVSSFSLNVEYAIQAEKEVAGTLSPHVETTFSTEPTGLVLSTVMDRVVAENITQTSREIVISERLGEPNYGAEIRGFSTGFPLEEDFSGDFREYSTVSHPIAKEETVMMEGSGDAAFRDTQTSPSTVPTSVHISHISDSEGPSSTMVSTSAFPWEEFTSSAEGSGEQLVTVSSSVVPVLPSAVQKFSGTASSIIDEGLGEVGTVNEIDRRSTILPTAEVEGTKAPVEKEEVKVSGTVSTNFPQTIEPAKLWSRQEVNPVRQEIESETTSEEQIQEEKSFESPQNSPATEQTIFDSQTFTETELKTTDYSVLTTKKTYSDDKEMKEEDTSLVNMSTPDPDANGLESYTTLPEATEKSHFFLATALVTESIPAEHVVTDSPI

SEQ ID NO: 56462 - protein, 275 aa, Homo sapiens
  MOD_RES (1)..(1): Any amino acid
XSQELHLRPESHSYLPELGKSEMEFIESKRPRLELLPDPLLRPSPLLATGQPAGSEDLTKDRSLTGKLEPVSPPSPPHTDPELELVPPRLSKEELIQNMDRVDREITMVEQQISKLKKKQQQLEEEAAKPPEPEKPVSPPPIESKHRSLVQIIYDENRKKAEAAHRILEGLGPQVELPLYNQPSDTRQYHENIKINQAMRKKLILYFKRRNHARKQWEQKFCQRYDQLMEAWEKKVERIENNPRRRAKESKVREYYEKQFPEIRKQRELQERMQR

SEQ ID NO: 56463 - protein, 87 aa, Homo sapiens
MILNSLSLCYHNKLILAPMVRVGTLPMRLLALDYGADIVYCERCSAQWTLSPLMIELSSAPVKESRTGWSSRWGLQTQSEPLLWPGL

SEQ ID NO: 56464 - protein, 156 aa, Homo sapiens
MWLLYLLVPALFCRAGGSIPIPQKLFGEVTSPLFPKPYPNNFETTTVITVPTGYRVKLVFQQFDLEPSEGCFYDYVKKEFMSQGNKMLLTFHTDFSNEENGTIMFYKGFLAYYQAVDLDECASRSKSGEEDPQPQCQHLCHNYVGGYFCSCRPGYE

SEQ ID NO: 56465 - protein, 15 aa, Homo sapiens
MVTHSKFPAAGMSRP

SEQ ID NO: 56466 - protein, 657 aa, Homo sapiens
MSPTPPLFSLPEARTRFTKSTREALNNKNIKPLLSTFSQVPGSENEKKCTLDQAFRGILEEEIINHSSCENVLAIISLAIGGVTEGICTASTPFVLLGDVLDCLPLDQCDTIFTFVEKNVATWKSNTFYSAGKNYLLRMCNDLLRRLSKSQNTVFCGRIQLFLARLFPLSEKSGLNLQSQFNLENVTVFNTNEQESTLGQKHTEDREEGMDVEEGEMGDEEAPTTCSIPIDYNLYRKFWSLQDYFRNPVQCYEKISWKTFLKYSEEVLAVFKSYKLDDTQASRKKMEELKTGGEHVYFAKFLTSEKLMDLQLSDSNFRRHILLQYLILFQYLKGQVKFKSSNYVLTDEQSLWIEDTTKSVYQLLSENPPDGERFSKMVEHILNTEENWNSWKNEGCPSFVKDRTSDTKPTRIIRKRTAPEDFLGKGPTKKILMGNEELTRLWNLCPDNMEACKSETREHMPTLEEFFEEAIEQADPENMVENEYKAVNNSNYGWRALRLLARRSPHFFQPTNQQFKSLPEYLENMVIKLAKELPPPSEEIKTGEDEDEEDNDALLKENESPDVRRDKPVTGEQIEVFANKLGEQWKILAPYLEMKDSEIRQIECDSEDMKMRAKQLLVAWQDQEGVHATPENLINALNKSGLSDLAESLTNDNETNS

SEQ ID NO: 56467 - protein, 344 aa, Homo sapiens
  MOD_RES (1)..(1): Any amino acid
XFPGVSWMEAGQQRVVEKVAEESGRLWSEEQPAHPLQVGAVYLGEEELLHDPMGQDRAAEEANAVLGLDTQGDHMVMLSVIPGEAEDKVSSEPSGVTCGAGGAEDSRCNVRESLFSLDGAGAHFPDREEEYYTEPEVAESDAAPTEDSNNTESLKSPKVNCEERNITGLENFTLKILNMSQDLMDFLNPNGSDCTLVLFYTPWCRFSASLAPHFNSLPRAFPALHFLALDASQHSSLSTRFGTVAVPNILLFQGAKPMARFNHTDRTLETLKIFIFNQTGIEAKKNVVVTQADQIGPLPSTLIKSVDWLLVFSLFFLISFIMYATIRTESIRWLIPGQEQEHVE

SEQ ID NO: 56468 - protein, 101 aa, Homo sapiens
MVAPVLETSHVFCCPNRVRGVLNWSSGPRGLLAFGTSCSVVLYDPLKRVVVTNLNGHTARVNCIQWICKQDGSPSTELVSGGSDNQVIHWEIEDNQIWARL

SEQ ID NO: 56469 - protein, 58 aa, Homo sapiens
MLTENGQVLSCGSNSFGQLGVPHGPRRCVVPQAIELHKEKVVCIAAGLRHAVAATGQH

SEQ ID NO: 56470 - protein, 167 aa, Homo sapiens
MKSNIYEDLEESLRMKLSLTKVVNGCRLGKIKNLGKTGDHTMDIPGCLLYTKTGSAPHLTHHTLHNIHGVPAMAQLTLSSLAEHHEVLTEYKEGVGKFIGMPESLLYCSLHDPVSPCPAGYVTNKSVSVWSVAGRVEMTVSKFMAIQKALQPDWFQCLSDGEVSCKE

SEQ ID NO: 56471 - protein, 190 aa, Homo sapiens
MGTPKPRILPWLVSQLDLGQLEGVAWVNKSRTRFRIPWKHGLRQDAQQEDFGIFQAWAEATGAYVPGRDKPDLPTWKRNFRSALNRKEGLRLAEDRSKDPHDPHKIYEFVNSGVGDFSQPDTSPDTNGGGSTSDTQEDILDELLGNMVLAPLPDPGPPSLAVAPEPCPQPLRSPSLDNPTPFPNLGPSEN

SEQ ID NO: 56472 - protein, 61 aa, Homo sapiens
MMSDEKNLGVSQKLVSPSRSTSSCSSKQGSRQDSWEVVEGLRGEMNYTQEPPVQKGFLLKK

SEQ ID NO: 56473 - protein, 176 aa, Homo sapiens
MVRCYVEIVEKLPERRPDPATIEGCAQLKPNNYLLAWHTPFNEKGSGFGAATKAMCIGLRYWKPERLETLIEVSVECGRMTHNHPTGFLGSLCTALFVSFAAQGKPLVQWGRDMLRAVPLAEEYCRKTIRHTAEYQEHWFYFEAKWQFYLEERKISKDSENKAIFPDNYDAEEREK

SEQ ID NO: 56474 - protein, 309 aa, Homo sapiens
MAEHAPRRCCLGWDFSTQQVKVVAVDAELNVFYEESVHFDRDLPEFGTQGGVHVHKDGLTVTSPVLMWVQALDIILEKMKASGFDFSQVLALSGAGQQHGSIYWKAGAQQALTSLSPDLRLHQQLQDCFSISDCPVWMDSSTTAQCRQLEAAVGGAQALSCLTGSRAYERFTGNQIAKIYQQNPEAYSHTERISLVSSFAASLFLGSYSPIDYSDGSGMNLLQIQDKVWSQACLGACAPHLEEKLSPPVPSCSVVGAISSYYVQRYGFPPGCKVVAFTGDNPGHGFKSLPCHLICSNDLFLVQTPHLLP

SEQ ID NO: 56475 - protein, 1030 aa, Homo sapiens
MVTLGAGVRLFTGVYPVVLNQIRATSEASAITRTTMPAPELTSTSRAEDTRDTGVQLRKRKIPQARHSRKRQRTFSFRSLGSAARSGAESEARAKMAAAKPTLTDSLSFCLAQLAAAAGEALGGEKDPATNETPLSRALLALRTRHIKAAGGIERFRARGGLRPLLALLRRAAAAGSAPSQAGPGSAPSSAASGASSPAPASGPAPSAVSSSSPTPPVRLRKTLDLALSILADCCTEGACRTEVRRLGGILPLVTILQCMKTDSIQNRTARALGNLAMEPESCGDIHCAGAVPLLVESLTACQDSQCLQSVVRALRNLADSPQHRLALAQQGAVRPLAELLATAPDAALTLALVRALLELSRGCSRACAEQLSLGGGLGPLVSLASHPKRAVREGTILILANLCAQGLIRPALGNAGGVEVLVDELRQRRDPNGASPTSQQPLVRAVCLLCREAINRARLRDAGGLDLLMGLLRDPRASAWHPRIVAALVGFLYDTGALGRLQALGLVPLLAGQLCGEAGEEEEEGREAASWDFPEERTPERAQGGSFRSLRSWLISEGYATGPDDISPDWSPEQCPPEPMEPASPAPTPTSLRAPRTQRTPGRSPAAAIEEPWGREGPALLLLSRFSQAPDPSGALVTGPALYGLLTYVTGAPGPPSPRALRILSRLTCNPACLEAFVRSYGAALLRAWLVLGVAPDDWPAPRARPTLHSRHRELGERLLQNLTVQAESPFGVGALTHLLLSGSPEDRVACALTLPFICRKPSLWRRLLLEQGGLRLLLAALTRPAPHPLFLFFAADSLSCLQDLVSPTVSPAVPQAVPMDLDSPSPCLYEPLLGPAPVPAPDLHFLLDSGLQLPAQRAASATASPFFRALLSGSFAEAQMDLVPLRGLSPGAAWPVLHHLHGCRGCGAALGPVPPPGQPLLGSEAEEALEAAGRFLLPGLEEELEEAVGRIHLGPQGGPESVGEVFRLGRPRLAAHCARWTLGSEQCPRKRGLALVGLVEAAGEEAGPLTEALLAVVMGIELGARVPA

SEQ ID NO: 56476 - protein, 351 aa, Homo sapiens
  MOD_RES (1)..(1): Any amino acid
XSVLHHWNEIYYFVEQLAHKFISPQLRMSFIVFSTRGTTLMKLTEDREQIRQGLEELQKVLPGGDTYMHEGFERASEQIYYENRQGYRTASVIIALTDGELHEDLFFYSEREANRSRDLGAIVYCVGVKDFNETQLARIADSKDHVFPVNDGFQALQGIIHSILKKSCIEILAAEPSTICAGESFQVVVRGNGFRHARNVDRVLCSFKINDSVTLNEKPFSVEDTYLLCPAPILKEVGMKAALQVSMNDGLSFISSSVIITTTHCSDGSILAIALLILFLLLALALLWWFWPLCCTVIIKEVPPPPAEESEVSDHSRMAVGGQGGRVGWRAGWAAGHLAPCRAELSQAQRI

SEQ ID NO: 56477 - protein, 160 aa, Homo sapiens
MAELQEVQITEEKPLLPGQTPEAAKTHSVETPYGSVTFTVYGTPKPKRPAILTYHDVGLNYKSCFQPLFQFEDMQEIIQNFVRVHVDAPGMEEGAPVFPLGYQYPSLDQLADMIPCVLQYLNFSTIIGVGVGAGAYILARYALNHPDTVEGLVLINIDPN

SEQ ID NO: 56478 - protein, 71 aa, Homo sapiens
MERLQKAKMDNQVLGYKDLAAIPKDKAILDIERPDLMIYEPHFTYSLLEHVELPRSRERSLSPKSTSPPPS

SEQ ID NO: 56479 - protein, 182 aa, Homo sapiens
MAALDSLSLFTSLGLSEQKARETLKNSAQQTLGSTIDKATGILLYGLASRLRDTRRLSFLVSYIASKKIHTEPQLSAALEYVRSHPLDPIDTVDFERECGVGVIVTPEQIEEAVEAAINRHRPQLLVERYHFNMGLLMGEARAVLKWADGKMIKNEVDMQVLHLLGPKLEADLEKKFKVAKA

SEQ ID NO: 56480 - protein, 52 aa, Homo sapiens
MASPGCLWLLAVALLPWTCASRALQHLDPPAPLPLVIWHGMASCKPNTGMTP

SEQ ID NO: 56481 - protein, 114 aa, Homo sapiens
MCSRQRSGFGCITNWWKMGTRHPAHPAQPEELTSSLHAFKNKAFKKSKVCGVCKQIIDGQGISCRACKYSCHKKCEAKVVIPCGVQVRLEQAPGSSTLSSSLCRDKPLRPVILS

SEQ ID NO: 56482 - protein, 459 aa, Homo sapiens
MDDFERRRELRRQKREEMRLEAERIAYQRNDDDEEEAARERRRRARQERLRQKQEEESLGQVTDQVEVNAQNSVPDEEAKTTTTNTQVEGDDEAAFLERLARREERRQKRLQEALERQKEFDPTITDASLSLPSRRMQNDTAENETTEKEEKSESRQERYEIEETETVTKSYQKNDWRDAEENKKEDKEKEEEEEEKPKRGSIGENQIKDEKIKKDKEPKEEVKSFMDRKKGFTEVKSQNGEFMTHKLKHTENTFSRPGGRASVDTKEAEGAPQVEAGKRLEELRRRRGETESEEFEKLKQKQQEAALELEELKKKREERRKVLEEEEQRRKQEEADRKLREEEEKRRLKEEIERRRAEAAEKRQKMPEDGLSDDKKPFKCFTPKGSSLKIEERAEFLNKSVQKSSGVKSTHQAAIVSKIDSRLEQYTSAIEGTKSAKPTKPAASDLPVPAEGVRNIKS

SEQ ID NO: 56483 - protein, 44 aa, Homo sapiens
MDVVLESLKCLCNLVLSSPVAQMLAAEARLVVKLTERVGLYRER

SEQ ID NO: 56484 - protein, 172 aa, Homo sapiens
MRFARSKRGLRLKTVDSCFQDLKESRLVEDTFTIDEVSEVLNGLQAVVHSEVESELINTAYTNVLLLRQLFAQAEKWYLKLQTDISELENRELLEQVAEFEKAEITSSNKKPILDVTKPKLAPLNEGGTAELLNKEILRLQEENEKLKSRLKTIEIQATNALDEKSKLEKAL

SEQ ID NO: 56485 - protein, 76 aa, Homo sapiens
MQYDEDDDEITPDLWQEACWIVISSYFDEKGLVRQQLDSFDEFIQMSVQRIVEDAPPIDLQAEAQHASGEVEEPVR

SEQ ID NO: 56486 - protein, 684 aa, Homo sapiens
  MOD_RES (1)..(1): Any amino acid
XPRSSTHVPLVLPLLVLLLLAPARQAAAQRCPQACICDNSRRHVACRYQNLTEVPDAIPELTQRLDLQGNLLKVIPAAAFQGVPHLTHLDLRHCEVELVAEGAFRGLGRLLLLNLASNHLRELPQEALDGLGSLRRLELEGNALEELRPGTFGALGALATLNLAHNALVYLPAMAFQGLLRVRWLRLSHNALSVLAPEALAGLPALRRLSLHHNELQALPGPVLSQARGLARLELGHNPLTYAGEEDGLALPGLRELLLDGGALQALGPRAFAHCPRLHTLDLRGNQLDTLPPLQGPGQLRRLRLQGNPLWCGCQARPLLEWLARARVRSDGACQGPRRLRGEALDALRPWDLRCPGDAAQEEEELEERAVAGPRAPPRGPPRGPGEERAVAPCPRACVCVPESRHSSCEGCGLQAVPRGFPSDTQLLDLRRNHFPSVPRAAFPGLGHLVSLHLQHCGIAELEAGALAGLGRLIYLYLSDNQLAGLSAAALEGAPRLGYLYLERNRFLQVPGAALRALPSLFSLHLQDNAVDRLAPGDLGRTRALRWVYLSGNRITEVSLGALGPARELEKLHLDRNQLREVPTGALEGLPALLELQLSGNPLRALRDGAFQPVGRSLQHLFLNSSGLEQICPGAFSGLGPGLQSLHLQKNQLRALPALPSARRTPIKGRQCGADKVGKEKGRL

SEQ ID NO: 56487 - protein, 151 aa, Homo sapiens
MAVEALHCGLNPRGIDHPAHAEGIKLQIEGEGVESQSIKNKNFQKVPDQKGTPKRLQAEAETAKSATVKLSKPVALWTQQDVCKWLKKHCPNQYQIYRRALLRLTDKKLERMGIAQENLRQHILQQVLQLKVREEVRNLQLLTQASSEGSP

SEQ ID NO: 56488 - protein, 140 aa, Homo sapiens
MADLDKLNIDSIIQRLLEVRGSKPGKNVQLQENEIRGLCLKSREIFLSQPILLELEAPLKICGDIHGQYYDLLRLFEYGGFPPESNYLFLGDYVDRGKQSLETICLLLAYKIKYPENFFLLRGNHECASINRIYGFYDEC

SEQ ID NO: 56489 - protein, 1124 aa, Homo sapiens
MQTSRHSFSQTTGCVCRSPLFLESSTSWPPLSLLPNLLPIIASIENNICGEHWDEWTRMLLSREMHQCRSDEYNCSSGMCIRSSWVCDGDNDCRDWSDEANCTAIYHTCEASNFQCRNGHCIPQRWACDGDTDCQDGSDEDPVNCEKKCNGFRCPNGTCIPSSKHCDGLRDCSDGSDEQHCEPLCTHFMDFVCKNRQQCLFHSMVCDGIIQCRDGSDEDAAFAGCSQDPEFHKVCDEFGFQCQNGVCISLIWKCDGMDDCGDYSDEANCENPTEAPNCSRYFQFRCENGHCIPNRWKCDRENDCGDWSDEKDCGDSHILPFSTPGPSTCLPNYYRCSSGTCVMDTWVCDGYRDCADGSDEEACPLLANVTAASTPTQLGRCDRFEFECHQPKTCIPNWKRCDGHQDCQDGRDEANCPTHSTLTCMSREFQCEDGEACIVLSERCDGFLDCSDESDEKACSDELTVYKVQNLQWTADFSGDVTLTWMRPKKMPSASCVYNVYYRVVGESIWKTLETHSNKTNTVLKVLKPDTTYQVKVQVQCLSKAHNTNDFVTLRTPEGLPDAPRNLQLSLPREAEGVIVGHWAPPIHTHGLIREYIVEYSRSGSKMWASQRAASNFTEIKNLLVNTLYTVRVAAVTSRGIGNWSDSKSITTIKGKVIPPPDIHIDSYGENYLSFTLTMESDIKVNGYVVNLFWAFDTHKQERRTLNFRGSILSHKVGNLTAHTSYEISAWAKTDLGDSPLAFEHVMTRGVRPPAPSLKAKAINQTAVECTWTGPRNVVYGIFYATSFLDLYRNPKSLTTSLHNKTVIVSKDEQYLFLVRVVVPYQGPSSDYVVVKMIPDSRLPPRHLHVVHTGKTSVVIKWESPYDSPDQDLLYAVAVKDLIRKTDRSYKVKSRNSTVEYTLNKLEPGGKYHIIVQLGNMSKDSSIKITTVSLSAPDALKIITENDHVLLFWKSLALKEKHFNESRGYEIHMFDSAMNITAYLGNTTDNFFKISNLKMGHNYTFTVQARCLFGNQICGEPAILLYDELGSGADASATQAARSTDVAAVVVPILFLILLSLGVGFAILYTKHRRLQSSFTAFANSHYSSRLGSAIFSSGDDLGEDDEDAPMITGFSDDVPMVIA

SEQ ID NO: 56490 - protein, 48 aa, Homo sapiens
MTSIFHFAIIFMLILQIRIQLSEESEFLVDRSKNGLIHVPKDLSQKTT

SEQ ID NO: 56491 - protein, 98 aa, Homo sapiens
MHDKGITTAAVCVYPARVCDAVKALKAAGCNIPVASVAAGFPAGQTHLKTRLEEIRLAVEDGATEIDVVINRSLVLTGQWEALYDEIRQFRKACGEAH

SEQ ID NO: 56492 - protein, 269 aa, Homo sapiens
  MOD_RES (1)..(1): Any amino acid
XVKVTAVDWHFEEAVDGECPPQRSILEQLAEKNFELVINLSMRGAGGRRLSSFVTKGYRTRRLAADFSVPLIIDIKCTKLFVELTAFHLQALGQIGPAPPLKVHVDCMTSQKLVRLPGLIDVHVHLREPGGTHKEDFASGTAAALAGGITMVCAMPNTRPPIIDAPALALAQKLAEAGARCDFALFLGASSENAGTLGTVAGSAAGLKLYLNETFSELRLDSVVQWMEHFETWPSHLPIVAHAEQQTVAAVLMVAQLTQRSVHICHVAR

SEQ ID NO: 56493 - protein, 221 aa, Homo sapiens
MDFSKLPKILDEDKESTFGYVHGVSGPVVTACDMAGAAMYELVRVGHSELVGEIIRLEGDMATIQVYEETSGVSVGDPVLRTGKPLSVELGPGIMGAIFDGIQRPLSDISSQTQSIYIPRGVNVSALSRDIKWDFTPCKNLRVGSHITGGDIYGIVSENSLIKHKIMLPPRNRGTVTYIAPPGNYDTSDVVLELEFEGVKEKFTMVQVWPVRQVRPVTEKL

SEQ ID NO: 56494 - protein, 111 aa, Homo sapiens
QKEDDVACSRRLSWGSSRRRNNSSSSFSPHFLGPGVGGAASKGCLIRNTRGFLSSGGSPLRPANASLEEMASLEEEACSLKLKLRVRMIQLRNPTRSRKGRGIDFETRAPQ

SEQ ID NO: 56495 - protein, 38 aa, Homo sapiens
MPGTQLILYDGSLTFRDVAIEFSLEEWQCLDTAQQNLY

SEQ ID NO: 56496 - protein, 73 aa, Homo sapiens
MYFCWGADSRELQRRRTAGSPGAELLQAASGERHSLLLLTNHRVLSCGDNSRGQLGRRGAQRGELPGIGNPNC

SEQ ID NO: 56497 - protein, 47 aa, Homo sapiens
ILTARSRWRLRNSISAFLFTVTFAWCPPGLSNLTILSCPEMRSCCVA

SEQ ID NO: 56498 - protein, 93 aa, Homo sapiens
PQQQMPPQYGQQGVSGYCQQGQQPYYSQQPQPPHLPPQAQYLPSQSQQRYQPQQDMSQEGYGTRSQPPLAPGKPNHEDLNLIQQERPSSLPRT

SEQ ID NO: 56499 - protein, 68 aa, Homo sapiens
MSLWLGAPVPDIPPDSAVELWKPGAQDASSQAQGGSSCILREEARMPHSAGGTAGVGLEAAEPTALLT

SEQ ID NO: 56500 - protein, 1728 aa, Homo sapiens
MAGASVKVAVRVRPFNSREMSRDSKCIIQMSGSTTTIVNPKQPKETPKSFSFDYSYWSHTSPEDINYASQKQVYRDIGEEMLQHAFEGYNVCIFAYGQTGAGKSYTMMGKQEKDQQGIIPQLCEDLFSRINDTTNDNMSYSVEVSYMEIYCERVRDLLNPKNKGNLRVREHPLLGPYVEDLSKLAVTSYNDIQDLMDSGNKARTVAATNMNETSSRSHAVFNIIFTQKRHDAETNITTEKVSKISLVDLAGSERADSTGAKGTRLKEGANINKSLTTLGKVISALAEMDSGPNKNKKKKKTDFIPYRDSVLTWLLRENLGGNSRTAMVAALSPADINYDETLSTLRYADRAKQIRCNAVINEDPNNKLIRELKDEVTRLRDLLYAQGLGDITDMTNALVGMSPSSSLSALSSRAASVSSLHERILFAPGSEEAIERLKETEKIIAELNETWEEKLRRTEAIRMEREALLAEMGVAMREDGGTLGVFSPKKTPHLVNLNEDPLMSECLLYYIKDGITRVGREDGERRQDIVLSGHFIKEEHCVFRSDSRGGSEAVVTLEPCEGADTYVNGKKVTEPSILRSGNRIIMGKSHVFRFNHPEQARQERERTPCAETPAEPVDWAFAQRELLEKQGIDMKQEMEQRLQELEDQYRREREEATYLLEQQRLDYESKLEALQKQMDSRYYPEVNEEEEEPEDEVQWTERECELALWAFRKWKWYQFTSLRDLLWGNAIFLKEANAISVELKKKVQFQFVLLTDTLYSPLPPDLLPPEAAKDRETRPFPRTIVAVEVQDQKNGATHYWTLEKLRQRLDLMREMYDRAAEVPSSVIEDCDNVVTGGDPFYDRFPWFRLVGRAFVYLSNLLYPVPLVHRVAIVSEKGEVKGFLRVAVQAISADEEAPDYGSGVRQSGTAKISFDDQHFEKFQSESCPVVGMSRSGTSQEELRIVEGQGQGADVGPSADEVNNNTCSAVPPEGLLLDSSEKAALDGPLDAALDHLRLGNTFTFRVTVLQASSISAEYADIFCQFNFIHRHDEAFSTEPLKNTGRGPPLGFYHVQNIAVEVTKSFIEYIKSQPIVFEVFGHYQQHPFPPLCKDVLSPLRPSRRHFPRVMPLSKPVPATKLSTLTRPCPGPCHCKYDLLVYFEICELEANGDYIPAVVDHRGGMPCMGTFLLHQGIQRRITVTLLHETGSHIRWKEVRELVVAPGGGQHLGRPWPADASLHFRRLLLSCVFLWPFLLRTPGRIRNTPETDESLIDPNILSLNILSSGYIHPAQDDRTFYQFEAAWDSSMHNSLLLNRVTPYREKIYMTLSAYIEMENCTQPAVVTKDFCMVFYSRDAKLPASRSIRNLFGSGSLRASESNRVTGVYELSLCHVADAGSPGMQRRRRRVLDTSVAYVRGEENLAGWRPRSDSLILDHQWELEKLSLLQEVEKTRHYLLLREKLETAQRPVPEALSPAFSEDSESHGSSSASSPLSAEGRPSPLEAPNERQRELAVKCLRLLTHTFNREYTHSHVCVSASESKLSEMSVTLLRDPSMSPLGVATLTPSSTCPSLVEGRYGATDLRTPQPCSRPASPEPELLPEADSKKLPSPARATETDKEPQRLLVPDIQEIRVSPIVSKKGYLHFLEPHTSGWARRFVVVRRPYAYMYNSDKDTVERFVLNLATAQVEYSEDQQAMLKTPNTFAVCTEHRGILLQAASDKDMHDWLYAFNPLLAGTIRSKLSRRRSAQMRV

SEQ ID NO: 56501 - protein, 322 aa, Homo sapiens
MGILSFLPVLATESDWADCKSPQPWGHMLLWTAVLFLAPVAGTPAAPPKAVLKLEPWINVLQEDSVTLTCRGTHSPESDSIPWFHNGNLIPTHTQPSYRFKANNNDSGEYTCQTGQTSLSDPVHLTVLSEWLVLQTPHLEFQEGETIVLRCHSWKDKPLVKVTFFQNGKSKKFSRSDPNFSIPQANHSHSGDYHCTGNIGYTLYSSKPVTITVQAPSSSPMGIIVAVVTGIAVAAIVAAVVALIYCRKKRISANSTDPVKAAQFEPPGRQMIAIRKRQPEETNNDYETADGGYMTLNPRAPTDDDKNIYLTLPPNDHVNSNN

SEQ ID NO: 56502 - protein, 226 aa, Homo sapiens
MPPSWSPLMCGRAAEAAASSRTPGREMGQAVTRRLGAGARAAPRRAMDGRTPRPQDAPASKPMMDLLIFLCAQYHLNPSSYTIDLLSAEQNHIKFKPNTPIGMLEVEKVILKPKMLDKKKPTPIIPEKTVRVVINFKKTQKTIVRVSPHASLQELAPIICSKCEFDPLHTLLLKDYQSQEPLDLTKSLNDLGLRELYAMDVNRATSVTVFSKSSLQESCQISQNLD

SEQ ID NO: 56503 - protein, 129 aa, Homo sapiens
MKRTWRREAPNGVALCQLTSLFQGLQLGHPKTGQVTAHRRRGVLPFTSGSPMSAPAVFCPRESSEGGDCKHRDAQAPRRPSSCRSEKDWTPFWDCSTRVATPPGWIRIPVIHLLALWTTRPLACFPSLY

SEQ ID NO: 56504 - protein, 196 aa, Homo sapiens
MSKLPRELTRDLERSLPAVASLGSSLSHSQSLSSHLLPPPEKRRAISDVRRTFCLFVTFDLLFISLLWIIELNTNTGIRKNLEQEIIQYNFKTSFFDIFVLAFFRFSGLLLGYAVLRLRHWWVIAVTTLVSSAFLIVKVILSELLSKGAFGYLLPIVSFVLAWLETWFLDFKVLPQEAEEERWYLAAQVAVARGPL

SEQ ID NO: 56505 - protein, 23 aa, Homo sapiens
MAFTQLTFRDVAIEFSQDEWKCL

SEQ ID NO: 56506 - protein, 108 aa, Homo sapiens
FHFVSQCCQGKECSNTSDALDPPLKNVSSNAECPACYESNGTSCHGKPWKCYEEEQCVFLVAELKNGLLVCISSFQWLRHEYLQETIIHYKELATWQFCRILHLPIAS

SEQ ID NO: 56507 - protein, 109 aa, Homo sapiens
MLKVTVPSCSASSCSSVTASAAPGTASLVPDYWIDGSNRDALSDFFEVESELGRGATSIVYRCKQKGTQKPYALKVLKKTVDKKIVRTEIGVLLRLSHPNIDCGKGILQ

SEQ ID NO: 56508 - protein, 57 aa, Homo sapiens
  MOD_RES (1)..(1): Any amino acid
XAIPHPRGHAHLAALVNHESYNFSHRIDHLSFGELVPAIINPLDGTEKIAIDLFFVF

SEQ ID NO: 56509 - protein, 115 aa, Homo sapiens
MLENYRNLVSLGICLPDLSIISMMKQRTEPWTVENEMKVAKNPDRWEGIKDINTGRSCAVRSKAGNKPITNQLGLTFQLPLPELEIFQGEGKIYECNQVQKFISHSSSVSPLQRI

SEQ ID NO: 56510 - protein, 393 aa, Homo sapiens
MPGRSCVALVLLAAAVSCAVAQHAPPWTEDCRKSTYPPSGPTYRGAVPWYTINLDLPPYKRWHELMLDKAPVVIVNSLKNMINTFVPSGKIMQVVDEKLPGLLGNFPGPFEEEMKGIAAVTDIPLGEIISFNIFYELFTICTSIVAEDKKGHLIHGRNMDFGVFLGWNINNDTWVITEQLKPLTVNLDFQRNNKTVFKASSFAGYVGMLTGFKPGLFSLTLNERFSINGGYLGILEWILGKKDVMWIGFLTRTVLENSTSYEEAKNLLTKTKILAPAYFILGGNQSGEGCVITRDRKESLDVYELDAKQGRWYVVQTNYDRWKHPFFLDDRRTPAKMCLNRTSQENISFETMYDVLSTKPVLNKLTVYTTLIDVTKGQFETYLRDCPDPCIGW

SEQ ID NO: 56511 - protein, 26 aa, Homo sapiens
MASPDRSKRKILKAKKTMPLSCRKQV

SEQ ID NO: 56512 - protein, 163 aa, Homo sapiens
MEHAATTGPRPGPPSRRVENVSPLGLAAPAMGLKSARSPKGQEGAGSCTLGLISARRGTFTAQPGREAGLVTAWEWGHSPAWDPPGEWVAVPPQVVLRAKDWLPGAPGGTAVWATSLEAEVPPDLALNKEQQLQISKELVDIQITTHHLHEQHEAEIFQLKSE

SEQ ID NO: 56513 - protein, 198 aa, Homo sapiens
  MOD_RES (1)..(1): Any amino acid
XKMAEQEQRKIPLVPENLLKKRKAYQALKATQAKQALLAKKEQKKGKGLRFKRLESFLHDSWRQKRDKVRLRRLEVKPHALELPDKHSLAFVVRIERIDGVSLLVQRTIARLRLKKIFSGVFVKVTPQNLKMLRIVEPYVTWGFPNLKSVRELILKRGQAKVKNKTIPLTDNTVIEEHLGECYSLGISWGRKPGSLKL

SEQ ID NO: 56514 - protein, 609 aa, Homo sapiens
MYDNMSTMVYIKEDKLEKLTQDEIISKTKQVIQGLEALKNEHNSILQSLLETLKCLKKDDESNLVEEKSNMIRKSLEMLELGLSEAQVMMALSNHLNAVESEKQKLRAQVRRLCQENQWLRDELANTQQKLQKSEQSVAQLEEEKKHLEFMNQLKKYDDDISPSEDKDTDSTKEPLDDLFPNDEDDPGQGIQQQHSSAAAAAQQGGYEIPARLRTLHNLVIQYASQGRYEVAVPLCKQALEDLEKTSGHDHPDVATMLNILALVYRDQNKYKDAANLLNDALAIREKTLGKDHPAVAATLNNLAVLYGKRGKYKEAEPLCKRALEIREKVLGKDHPDVAKQLNNLALLCQNQGKYEEVEYYYQRALEIYQTKLGPDDPNVAKTKNNLASCYLKQGKFKQAETLYKEILTRAHEREFGSVDDENKPIWMHAEEREECKGKQKDGTSFGEYGGWYKACKVDSPTVTTTLKNLGALYRRQGKFEAAETLEEAAMRSRKQGLDNVHKQRVAEVLNDPENMEKRRSRESLNVDVVKYESGPDGGEEDGTGSLKRSGSFSKLRASIRRSSEKLVRKLKGGSSRESEPKNPGASLAEPLFVENDSSSSGLEDATAN

SEQ ID NO: 56515 - protein, 587 aa, Homo sapiens
MNYIFGNNTLLYSRGSRGGNTSSSHGSAGPKQKHWAKKGSSDELQAEPEPSRWQQIVAFFTRRHSFIDCISVATSSTQANPPPVLVNTDSLETPTYVNGTDADYEYEEITLERGNSGLGFSIAGGTDNPHIGDDSSIFITKIITGGAAAQDGRLRVNDCILRVNEVDVRDVTHSKAVEALKEAGSIVRLYVKRRKPVSEKIMEIKLIKGPKGLGFSIAGGVGNQHIPGDNSIYVTKIIEGGAAHKDGKLQIGDKLLAVNNVCLEEVTHEEAVTALKNTSDFVYLKVAKPTSMYMNDGYAPPDITNSSSQPVDNHVSPSSFLGQTPASPARYSPVSKAVLGDDEITREPRKVVLHRGSTGLGFNIVGGEDGEGIFISFILAGGPADLSGELRKGDRIISVNSVDLRAASHEQAAAALKNAGQAVTIVAQYRPEEYSRFEAKIHDLREQMMNSSISSGSGSLRTSQKRSLYVRALFDYDKTKDSGLPSQGLNFKFGDILHVINASDDEWWQARQVTPDGESDEVGVIPSKRRVEKKERARLKTVKFNSKTRDKGSFNDKRKKNLFSRKFPFYKNKDQSEQETSDADRDP

SEQ ID NO: 56516 - protein, 218 aa, Homo sapiens
MGDAPSPEEKLHLITRNLQEVLGEEKLKEILKERELKIYWGTATTGKPHVAYFVPMSKIADFLKAGCEVTILFADLHAYLDNMKAPWELLELRVSYYENVIKAMLESIGVPLEKLKFIKGTDYQLSKEYTLDVYRLSSVVTQHDSKKAGAEVVKQVEHPLLSGLLYPGLQPPALASQSAEIAASAWLPPHLGSEERLCLAAHRLGCEEPLCPAAQSWK

SEQ ID NO: 56517 - protein, 167 aa, Homo sapiens
MSCTRYRAASATKQYTRGSLPGRIWELFIAALLCPLMVNVTVVYQNGLPVISVRLPSRRERCQFTLKPISDSVGVFLRQLQEEDRGIDRVAIYSPDGVRVAASTGIDLLLLDDFKLVINDLTYHVRPPKRDLLSHENAATLNDVKTLVQQLYTTLCIEQHQLNKERE

SEQ ID NO: 56518 - protein, 225 aa, Homo sapiens
  MOD_RES (1)..(1): Any amino acid
XERAISPGLLVRALLLLLLLLGLAARTVAAGRARGLPAPTAEAAFGLGAAAAPTSATRVPAAGAVAAAEVTVEDAEALPAAAGEQEPRGPEPDDETELRPRGRSLVIISTLDGRIAALDPENHGKKQWDLDVGSGSLVSSSLSKPEVFGNKMIIPSLDGALFQWDQDRESMETVPFTVESLLESSYKFGDDVVLVGGKSLTTYGLSAYSGKMLFCLLHPPASALC

SEQ ID NO: 56519 - protein, 178 aa, Homo sapiens
MASETHNVKKRNFCNKIEDHFIDLPRKKISNFTNKNMKEVKKSPKQLAAYINRTVGQTVKSPDKLRKVIYRRKKVHHPFPNPCYRKKQSPGSGGCDMANKENELACAGHLPEKLHHDSRTYLVNSSDSGSSQTESPSSKYSGFFSEVSQDHETMAQVLFSRNMRLNVALTFWRKRSIS

SEQ ID NO: 56520 - protein, 334 aa, Homo sapiens
MAAVTHYLYLCQFSWMLIQSVNFWYVLVMNDEHTERRYLLFFLLSWGLPAFVVILLIVILKGIYHQSMSQIYGLIHGDLCFIPNVYAALFTAALVPLTCLVVVFVVFIHAYQVKPQWKAYDDVFRGRTNAAEIPLILYLFALISVTWLWGGLHMAYRHFWMLVLFVIFNSLQGLYVFMVYFILHNQMCCPMKASYTVEMNGHPGPSTAFFTPGSGMPPAGGEISKSTQNLIGAMEEVPPDWERASFQQGSQASPDLKPSPQNGATFPSSGGYGQGSLIADEESQEFDDLIFALKTGAGLSVSDNESGQGSQEGGTLTDSQIVELRRIPIADTHL

SEQ ID NO: 56521 - protein, 249 aa, Homo sapiens
MDKQNSQMNASHPETNLPVGYPPQYPPTAFQGPPGYSGYPGPQVSYPPPPAGHSGPGPAGFPVPNQPVYNQPVYNQPVGAAGVPWMPAPQPPLNCPPGLEYLSQIDQILIHQQIELLEVLTGFETNNKYEIKNSFGQRVYFAAEDTDCCTRNCCGPSRPFTLRIIDNMGQEVITLERPLRCSSCCCPCCLQEIEIQAPPGVPIGYVIQTWHPCLPKFTIQNEKREDVLKISGPCVVCSCCGDVDFEIKS

SEQ ID NO: 56522 - protein, 505 aa, Homo sapiens
MGNGESQLSSVPAQKLGWFIQEYLKPYEECQTLIDEMVNTICDVLQEPEQFPLVQGVAIGGSYGRKTVLRGNSDGTLVLFFSDLKQFQDQKRSQRDILDKTGDKLKFCLFTKWLKNNFEIQKSLDGFTIQVFTKNQRISFEVLAAFNALSLNDNPSPWIYRELKRSLDKTNASPGEFAVCFTELQQKFFDNRPGKLKDLILLIKHWHQQCQKKIKDLPSLSPYALELLTVYAWEQGCRKDNFDIAEGVRTVLELIKCQEKLCIYWMVNYNFEDETIRNILLHQLQSARPVILDPVDPTNNVSGDKICWQWLKKEAQTWLTSPNLDNELPAPSWNVLPAPLFTTPGHLLDKFIKEFLQPNKCFLEQIDSAVNIIRTFLKENCFRQSTAKIQIVRGGSTAKGTALKTGSDADLVVFHNSLKSYTSQKNERHKIVKEIHEQLKAFWREKEEELEVSFEPPKWKAPRVLSFSLKSKVLNESVSFDVLPAFNALAEFWLHTQPRGLCRAH

SEQ ID NO: 56523 - protein, 422 aa, Homo sapiens
MANGGGGGGGSSGGGGGGGGSSLRMSSNIHANHLSLDASSSSSSSSSSSSSSSSSSSSSSVHEPKMDALIIPVTMEVPCDSRGQRMWWAFLASSMVTFFGGLFIILLWRTLKYLWTVCCHCGGKTKEAQKINNGSSQADGTLKPVDEKEEAVAAEVGWMTSVKDWAGVMISAQTLTGRVLVVLVFALSIGALVIYFIDSSNPIESCQNFYKDFTLQIDMAFNVFFLLYFGLRFIAANDKLWFWLEVNSVVDFFTVPPVFVSVYLNRSWLGLRFLRALRLIQFSEILQFLNILKTSNSIKLVNLLSIFISTWLTAAGFIHLVENSGDPWENFQNNQALTYWECVYLLMVTMSTVGYGDVYAKTTLGRLFMVFFILGGLAMFASYVPEIIELIGNRKKYGGSYSAVSGRKQCLPATCPKLLLSS

SEQ ID NO: 56524 - protein, 34 aa, Homo sapiens
MAKPSHSSYVLQQLNNQREWGFLCDCCIAIDDIY

SEQ ID NO: 56525 - protein, 434 aa, Homo sapiens
MAEAVFHAPKRKRRVYETYESPLPIPFGQDHGPLKEFKIFRAEMINNNVIVRNAEDIEQLYGKGYFGKGILSRSRPSFTISDPKLVAKWKDMKTNMPIITSKRYQHSVEWAAELMRRQGQDESTVRRILKDYTKPLEHPPVKRNEEAQVHDKLNSGMVSNMEGTAGGERPSVVNGDSGKSGGVGDPREPLGCLQEGSGCHPTTESFEKSVREDASPLPHVCCCKQDALILQRGLHHEDGSQHIGLLHPGDRGPDHEYVLVEEAECAMSEREAAPNEEAFFLVYALGCLSIYYEKEPLTIVKLWKAFTVVQPTFRTTYMAYHYFRSKGWVPKVGLKYGTDLLLYRKGPPFYHASYSVIIELVDDHFEGSLRRPLSWKSLAALSRVSVNVSKELMLCYLIKPSTMTDKEMESPECMKRIKVQVGKLREIHVIPKIL

SEQ ID NO: 56526 - protein, 175 aa, Homo sapiens
MMEGQRGAPRRSRGRPVSRGGAGHKAKRVTGGRGGRQGPSPAFHCALCQLQVNSETQLKQHMSSRRHKDRLAGKTPKPSSQHSKLQKHAALAVSILKSKLALQKQLTKTLAARFLPSPLPTAATAICALPGPLALRPAPTAATTLFPAPILGPALFRTPAGAVRPATGPIVLAPY

SEQ ID NO: 56527 - protein, 179 aa, Homo sapiens
MWNSNDGGGFESYGSSSYGGAGGYTQSPGGFGSPAPSQAEKKSRARAQHIVPCTISQLLSATLVDEVFRIGNVEISQVTIVGIIRHAEKAPTNIVYKIDDMTAAPMDVRQWVDTDDTSSENTVVPPETYVKVAGHLRSFQNKKSLVAFKIMPLEDMNEFTTHILEVINAHMVLSKANSQ

SEQ ID NO: 56528 - protein, 194 aa, Homo sapiens
VTPEKKAEEERDEEEDKRRKGEEVTPISAIRHEGKTDSERTDTAADGETTATEELEKTQDDLMKHQTNISELKRTFLETSTDTAVTNEWEKRLSTSPVRLAARQEDAPMIEPLVPEETKEETEISEKVIFLQQGSAPFLESQTKQSSGEKLMDGSEIFSLLESARKPTEFIGGVTSTSQSWVQKMETKTESSGI

SEQ ID NO: 56529 - protein, 130 aa, Homo sapiens
MWQELLKVMRTIDDRIVHELNTTVPTASFAGKIDASQTCKQLYESLMAAHASRDRVIKNCIAQTSAVVKNLREEREKNLDDLTLLKQLRKEQTKLKWMQSELNVEEVVNDRSWKVFNERCRIHFKPPKNE

SEQ ID NO: 56530 - protein, 712 aa, Homo sapiens
MKIKFKIKVVPALWCFYGGESALGVQSINWQTAFNRQAHHTDKFSSQELILRRGQNFQVLMIMNKGLGSNERLEFIVSTGPYPSESAMTKAVFPLSNGSSGGWSAVLQASNGNTLTISISSPASAPIGRYTMALQIFSQGGISSVKLGTFILLFNPWLNVDSVFMGNHAEREEYVQEDAGIIFVGSTNRIGMIGWNFGQFEEDILSICLSILDRSLNFRRDAATDVASRNDPKYVGRVLSAMINSNDDNGVLAGNWSGTYTGGRDPRSWNGSVEILKNWKKSGFSPVRYGQCWVFAGTLNTALRSLGIPSRVITNFNSAHDTDRNLSVDVYYDPMGNPLDKGSDSVWNFHVWNEGWFVRSDLGPSYGGWQVLDATPQERSQGVFQCGPASVIGVREGDVQLNFDMPFIFAEVNADRITWLYDNTTGKQWKNSVNSHTIGRYISTKAVGSNARMDVTDKYKYPEGSDQERQVFQKALGKLKPNTPFAATSSMGLETEEQEPSIIGKLKVAGMLAVGKEVNLVLLLKNLSRDTKTVTVNMTAWTIIYNGTLVHEVWKDSATMSLDPEEEAEHPIKISYAQYEKYLKSDNMIRITAVCKVPDESEVVVERDIILDNPTLTLEVLNEARVRKPVNVQMLFSNPLDEPVRDCVLMVEGSGLLLGNLKIDVPTLGPKEGSRVRFDILPSRSGTKQLLADFSCNKFPAIKAMLSIDVAE

SEQ ID NO: 56531 - protein, 670 aa, Homo sapiens
MQKFIEADYYELDWYYEECSDVLCAERVGQMTKTYNDIDAVTRLLEEKERDLELAARIGQSLLKKNKTLTERNELLEEQVEHIREEVSQLRHELSMKDELLQFYTSAAEESEPESVCSTPLKRNESSSSVQNYFHLDSLQKKLKDLEEENVVLRSEASQLKTETITYEEKEQQLVNDCVKELRDANVQIASISEELAKKTEDAARQQEEITHLLSQIVDLQKKAKACAVENEELVQHLGAAKDAQRQLTAELRELEDKYAECMEMLHEAQEELKNLRNKTMPNTTSRRYHSLGLFPMDSLAAEIEGTMRKELQLEEAESPDITHQKRVFETVRNINQVVKQRSLTPSPMNIPGSNQSSAMNSLLSSCVSTPRSSFYGSDIGNVVLDNKTNSIILETEAADLGNDERSKKPGTPGTPGSHDLETALRRLSLRRENYLSERRFFEEEQERKLQELAEKGELRSGSLTPTESIMSLGTHSRFSEFTGFSGMSFSSRSYLPEKLQIVKPLEGSATLHHWQQLAQPHLGGILDPRPGVVTKGFRTLDVDLDEVYCLNDFEEDDTGDHISLPRLATSTPVQHPETSGERSQARVTVSGSRSYPSRPQASPEEMQEPPAATEEEEEEEEEEGSGEGTTISPVNLAPFPEAEFWAILTSVPGTIRSGSLSVASARLCG

SEQ ID NO: 56532 - protein, 152 aa, Homo sapiens
MEYASKGELYDYISERRRLSERETRHFFRQIVSAVHYCHKNGVVHRDLKLENILLDDNCNIKIADFGLSNLYQKDKFLQTFCGSPLYASPEIVNGRPYRGPEVDSWALGVLLYTLVYGTMPFDGFDHKNLIRQISSGEYREPTQPSDARGLI

SEQ ID NO: 56533 - protein, 84 aa, Homo sapiens
AAAAAQGYGAFLPYAAELPIFPQLIAVVPWKWRKSYSRQLSSPCPGGPRTIWTPPWSYRLSPHPSSLKKTKKQKKLFLIVVIIV

SEQ ID NO: 56534 - protein, 114 aa, Homo sapiens
  MOD_RES (1)..(1): Any amino acid
XQEVLPKIHEDKHYPCTLVGTWNTWYGEQDQAVHLWRYEGGYPALTEVMNKLRENKEFLEFRKARSDMLLSRKNQLLLEFSFWNEPVPRSGPNIYELRSYQLRPGTMIEWGNYW

SEQ ID NO: 56535 - protein, 256 aa, Homo sapiens
VHKFLNRNRDQLDPAVVEMLGQSQLQLVGSLFQEAEPQSRGGRGRPTLASRFQQALEDLIARLGRSHVYFIQCLTPNPGKLPGLFDVGHVTEQLHQAAILEAVGTRSANFPVRVPFEAFLASFQALGSEGQEDLSDREKCGAVLSQVLGAESPLYHLGATKVLLQEQGWQRLEELRDQQRSQALVDLHRSFHTCISRQRVLPRMQARMRGFQARKRYLRRRAALGQLNTILLVAQPLLQRRQRLQLGRWQGWHSSE

SEQ ID NO: 56536 - protein, 46 aa, Homo sapiens
MSETVICSSRATVMLYDDGNKRWLPAGTGPQAWPQLLLEPNSGKSA

SEQ ID NO: 56537 - protein, 169 aa, Homo sapiens
MAAIRKKLVIVGDGACGKTCLLIVFSKDQFPEVYVPTVFENYIADIEVDGKQVELALWDTAGQEDYDRLRPLSYPDTDVILMCFSIDSPDSLENIPEKWTPEVKHFCPNVPIILVGNKKDLRQDEHTRRELAKMKQEPVRSEEGRDMANRISAFGYLECSAKTKEGVRE

SEQ ID NO: 56538 - protein, 31 aa, Homo sapiens
MRWTPAAADICFTKELHSHFFSLGKCVPVCR

SEQ ID NO: 56539 - protein, 138 aa, Homo sapiens
AISSQFDDFSRDLCVQALLDIMDMFCDRLSCHGKAEECIGLCRALLSALHWLLRCTAASAERLREGLEAGTPAAGEKQLAMCLQRLEKTLSSTKNRALLHIAKLEEASLHTSQGLGQGGTRANQPTATGFWPPSASLS

SEQ ID NO: 56540 - protein, 115 aa, Homo sapiens
MIAAPEIPTDFNLLQESETHFSSDTDFEDIEGKNQKQGKGKTCKKGKKGPAEKGKGGNGGGKPPSGPNRMNGHHQQNGVENMMLFEVVKMGKSAMQSVVDDWIESYKHDRDIALL

SEQ ID NO: 56541 - protein, 155 aa, Homo sapiens
MHLCGGNGLLTQTDPKEQQRQLKKQKNRAAAQRSRQKHTDKADALHQHESLEKDNLALRKEIQSLQAELAWWSRTLHVHERLCPMDCASCSAPGLLGCWDQAEGLLGPGPQGQHGCREQLELFQTPGSCYPAQPLSPGPQPHDSPSLLQCPLPSL

SEQ ID NO: 56542 - protein, 371 aa, Homo sapiens
MAIECRVCGDKASGFHYGVHACEGCKGFFRRTIRLKLIYDRCDLNCRIHKKSRNKCQYCRFQKCLAVGMSHNAIRFGRMPQAEKEKLLAEISSDIDQLNPESADLRALAKHLYDSYIKSFPLTKAKARAILTGKTTDKSPFVIYDMNSLMMGEDKIKFKHITPLQEQSKEVAIRIFQGCQFRSVEAVQEITEYAKSIPGFVNLDLNDQVTLLKYGVHEIIYTMLASLMNKDGVLISEGQGFMTREFLKSLRKPFGDFMEPKFEFAVKFNALELDDSDLAIFIAVIILSGDRPGLLNVKPIEDIQDNLLQALELQLKLNHPESSQLFAKLLQKMTDLRQIVTEHVQLLQVIKKTETDMSLHPLLQEIYKDLY

SEQ ID NO: 56543 - protein, 80 aa, Homo sapiens
ESQSQKRSLHSVSEERTDEMTHKETNEQEERLLATASFTKSSRSSRTRSSKAILLPDLSEPNNEPLFSPASEVPRKAKER

SEQ ID NO: 56544 - protein, 53 aa, Homo sapiens
  MOD_RES (1)..(1): Any amino acid
XTAHEFKKHFELPILKGRDAAASEADRQLGEERLRELTSIVNRWQDGHGGSRL

SEQ ID NO: 56545 - protein, 302 aa, Homo sapiens
  MOD_RES (1)..(1): Any amino acid
XTRLVSPRDRGGAGGSLRLKSLFTEPSEPLPEESKPVEMPFHHCHRDPLPPPGLTPERLHARRQLYAACAVCFVFMAGEVVGGYLAHSLAIMTDAAHLLADVGSMMGSLFSLWLSTRPATRTMTFGWHRSEWPLCCTRLGPPTATGLGEQSMHRWRRGLKSPCPWGTPASGRHLCTCWGTSCRALGYWLPPSSSTSSLNTRQPTPSAPSSSPSVPLDPPLPPSETFFESSWKVPPAMWGSNLCGIRCCRCQESGQPMSCTCGPLRSLTMLPLHTWPSTPPLTLKPSWLKPHPGSTPGLDSPA

SEQ ID NO: 56546 - protein, 2952 aa, Homo sapiens
GRGSGFPGKRRPRGAGLSGRGGRGRSKLKSGIGAVVLPGVSTADISSNKDDEENSMHNTVVLFSSSDKFTLNQDMCVVCGSFGQGAEGRLLACSQCGQCYHPYCVSIKITKVVLSKGWRCLECTVCEACGKATDPGRLLLCDDCDISYHTYCLDPPLQTVPKGGWKCKWCVWCRHCGATSAGLRCEWQNNYTQCAPCASLSSCPVCYRNYREEDLILQCRQCDRWMHAVCQNLNTEEEVENVADIGFDCSMCRPYMPASNVPSSDCCESSLVAQIVTKVKELDPPKTYTQDGVCLTESGMTQLQSLTVTVPRRKRSKPKLKLKIINQNSVAVLQTPPDIQSEHSRDGEMDDSREGELMDCDGKSESSPEREAVDDETKGVEGTDGVKKRKRKPYRPGIGGFMVRQRSRTGQGKTKRSVIRKDSSGSISEQLPCRDDGWSEQLPDTLVDESVSVTESTEKIKKRYRKRKNKLEETFPAYLQEAFFGKDLLDTSRQSKISLDNLSEDGAQLLYKTNMNTGFLDPSLDPLLSSSSAPTKSGTHGPADDPLADISEVLNTDDDILGIISDDLAKSVDHSGLDLCTFQVESSPFPFDIGPVTDDPSSLPQPNVNQSSRPLSEEQLDGILSPELDKMVTDGAILGKLYKIPELGGKDVEDLFTAVLSPANTQPTPLPQPPPPTQLLPIHNQDAFSRMPLMNGLIGSSPHLPHNSLPPGSGLGTFSAIAQSSYPDARDKNSAFNPMASDPNNSWTSSAPTVEGENDTMSNAQRSTLKWEKEEALGEMATVAPVLYTNINFPNLKEEFPDWTTRVKQIAKLWRKASSQERAPYVQKARDNRAALRINKVQMSNDSMKRQQQQDSIDPSSRIDSELFKDPLKQRESEHEQEWKFRQQMRQKSKQQAKIEATQKLEQVKNEQQQQQQQQFGSQHLLVQSGSDTPSSGIQSPLTPQPGNGNMSPAQSFHKELFTKQPPSTPTSTSSDDVFVKPQAPPPPPAPSRIPIQDSLSQAQTSQPPSPQVFSPGSSNSRPPSPMDPYAKMVGTPRPPPVGHSFSRRNSAAPVENCTPLSSVSRPLQMNETTANRPSPVRDLCSSSTTNNDPYAKPPDTPRPVMTDQFPKSLGLSRSPVVSEQTAKGPIAAGTSDHFTKPSPRADVFQRQRIPDSYARPLLTPAPLDSGPGPFKTPMQPPPSSQDPYGSVSQASRRLSVDPYERPALTPRPIDNFSHNQSNDPYSQPPLTPHPAVNESFAHPSRAFSQPGTISRPTSQDPYSQPPGTPRPVVDSYSQSSGTARSNTDPYSQPPGTPRPTTVDPYSQQPQTPRPSTQTDLFVTPVTNQRHSDPYAHPPGTPRPGISVPYSQPPATPRPRISEGFTRSSMTRPVLMPNQDPFLQAAQNRGPALPGPLVRPPDTCSQTPRPPGPGLSDTFSRVSPSAARDPYDQSPMTPRSQSDSFGTSQTAHDVADQPRPGSEGSFCASSNSPMHSQGQQFSGVSQLPGPVPTSGVTDTQNTVNMAQADTEKLRQRQKLREIILQQQQQKKIAGRQEKGSQDSPAVPHPGPLQHWQPENVNQAFTRPPPPYPGNIRSPVAPPLGPRYAVFPKDQRGPYPPDVASMGMRPHGFRFGFPGGSHGTMPSQERFLVPPQQIQGSGVSPQLRRSVSVDMPRPLNNSQMNNPVGLPQHFSPQSLPVQQHNILGQAYIELRHRAPDGRQRLPFSAPPGSVVEASSNLRHGNFIPRPDFPGPRHTDPMRRPPQGLPNQLPVHPDLEQVPPSQQEQGHSVHSSSMVMRTLNHPLGGEFSEAPLSTSVPSETTSDNLQITTQPSDGLEEKLDSDDPSVKELDVKDLEGVEVKDLDDEDLENLNLDTEDGKVVELDTLDNLETNDPNLDDLLRSGEFDIIAYTDPELDMGDKKSMFNEELDLPIDDKLDNQCVSVEPKKKEQENKTLVLSDKHSPQKKSTVTNEVKTEVLSPNSKVESKCETEKNDENKDNVDTPCSQASAHSDLNDGEKTSLHPCDPDLFEKRTNRETAGPSANVIQASTQLPAQDVINSCGITGSTPVLSSLLANEKSDNSDIRPSGSPPPPTLPASPSNHVSSLPPFIAPPGRVLDNAMNSNVTVVSRVNHVFSQGVQVNPGLIPGQSTVNHSLGTGKPATQTGPQTSQSGTSSMSGPQQLMIPQTLAQQNRERPLLLEEQPLLLQDLLDQERQEQQQQRQMQAMIRQRSEPFFPNIDFDAITDPIMKAKMVALKGINKVMAQNNLGMPPMVMSRFPFMGQVVTGTQNSEGQNLGPQAIPQDGSITHQISRPNPPNFGPGFVNDSQRKQYEEWLQETQQLLQMQQKYLEEQIGAHRKSKKALSAKQRTAKKAGREFPEEDAEQLKHVTEQQSMVQKQLEQIRKQQKEHAELIEDYRIKQQQQCAMAPPTMMPSVQPQPPLIPGATPPTMSQPTFPMVPQQLQHQQHTTVISGHTSPVRMPSLPGWQPNSAPAHLPLNPPRIQPPIAQLPIKTCTPAPGTVSNANPQSGPPPRVEFDDNNPFSESFQERERKERLREQQERQRIQLMQEVDRQRALQQRMEMEQHGMVGSEISSSRTSVSQIPFYSSDLPCDFMQPLGPLQQSPQHQQQMGQVLQQQNIQQGSINSPSTQTFMQTNERRQVGPPSFVPDSPSIPVGSPNFSSVKQGHGNLSGTSFQQSPVRPSFTPALPAAPPVANSSLPCGQDSTITHGHSYPGSTQSLIQLYSDIIPEEKGKKKRTRKKKRDDDAESTKAPSTPHSDITAPPTPGISETTSTPAVSTPSELPQQADQESVEPVGPSTPNMAAGQLCTELENKLPNSDFSQATPNQQTYANSEVDKLSMETPAKTEEIKLEKAETESCPGQEEPKLEEQNGSKVEGNAVACPVSSAQSPPHSAGAPAAKGDSGNELLKHLLKNKKSSSLLNQKPEGSICSEDDCTKDNKLVEKQNPAEGL

SEQ ID NO: 56547 - protein, 67 aa, Homo sapiens
MDSVAFEDVAVNFTLEEWALLDPSQKNLYRDVMRETFRNLASVGKQWEDQNIEDPFKIPRRNIRETL

SEQ ID NO: 56548 - protein, 1095 aa, Homo sapiens
MDQKILSLAAEKTADKLQEFLQTLREGDLTNLLQNQAVKGKVAGALLRAIFKGSPCSEEAGTLRRRKIYTCCIQLVESGDLQKEIASEIIGLLMLEAHHFPGPLLVELANEFISAVREGSLVNGKSLELLPIILTALATKKENLAYGKGVLSGEECKKQLINTLCSGRWDQQYVIQLTSMFKDVPLTAEEVEFVVEKALSMFSKMNLQEIPPLVYQLLVLSSKGSRKSVLEGIIAFFSALDKQHNEEQSGDELLDVVTVPSGELRHVEGTIILHIVFAIKLDYELGRELVKHLKVGQQGDSNNNLSPFSIALLLSVTRIQRFQDQVLDLLKTSVVKSFKDLQLLQGSKFLQNLVPHRSYVSTMILEVVKNSVHSWDHVTQGLVELGFILMDSYGPKKVLDGKTIETSPSLSRMPNQHACKLGANILLETFKIHEMIRQEILEQVLNRVVTRASSPISHFLDLLSNIVMYAPLVLQSCSSKVTEAFDYLSFLPLQTVQRLLKAVQPLLKVSMSMRDCLILVLRKAMFANQLDARKSAVAGFLLLLKNFKVLGSLSSSQCSQSLSVSQVHVDVHSHYNSVANETFCLEIMDSLRRCLSQQADVRLMLYEGFYDVLRRNSQLANSVMQTLLSQLKQFYEPKPDLLPPLKLEACILTQGDKISLQEPLDYLLCCIQHCLAWYKNTVIPLQQGEEEEEEEEAFYEDLDDILESITNRMIKSELEDFELDKSADFSQSTSIGIKNNICAFLVMGVCEVLIEYNFSISSFSKNRFEDILSLFMCYKKLSDILNEKAGKAKTKMANKTSDSLLSMKFVSSLLTALFRVLLWRYTSIPTSVEESGKKEKGKSISLLCLEGLQKIFSAVQQFYQPKIQQFLRALDVTDKEGEEREDADVSVTQRTAFQIRQFQRSLLNLLSSQEEDFNSKEALLLVTVLTSLSKLLEPSSPQFVQMLSWTSKICKENSREDALFCKSLMNLLFSLHVSYKSPVILLRDLSQDIHGHLGDIDQDVEVEKTNHFAIVNLRTAAPTVCLLVLSQAEKVLEEVDWLITKLKGQVSQETLSVSPGVSELRRNSKKYGKAGEAVWFSSDPPVLFFHFLRTE

SEQ ID NO: 56549 - protein, 127 aa, Homo sapiens
MSRRSQRLTRYSQGDDDGSSSSGGSSVAGSQSTLFKDSPLRTLKRKSSNMKRLSPAPQLGPSSDAHTSYYSESLVHESWFPPRSSLEELHGDANWGYSDVDQQSSSSRLRSAVSRAGSLLWMVATSP

SEQ ID NO: 56550 - protein, 97 aa, Homo sapiens
MNTSLSWFEQLDVLLNATDGNVVRNKQWLYPLGVSTELIGLCICFFCSSGCIFLGSPPQNSTAVTPAVLWEESEIMQKELKLLQYQPAPGAAAETAG

SEQ ID NO: 56551 - protein, 17 aa, Homo sapiens
MQRLMMLLATSGACLGL

SEQ ID NO: 56552 - protein, 197 aa, Homo sapiens
MCGNNMSTPLPAIVPAARKATAAVIFLHGLGDTGHGWAEAFAGIRSSHIKYICPHAFDIIGLSPDSQEDESGIKQAAENIKALIDQEVKNGIPSNRIILGGFSQGGALSLYTALTTQQKLAGVTALSCWLPLRASFPQGPIGGANRDISILQCHGDCDPLVPLMFGSLTVEKLKTLVNPANVTFKTYEGMMHSSCQQ

SEQ ID NO: 56553 - protein, 238 aa, Homo sapiens
MEAVKQGSATVGLKSKTHAVLVALKRAQSELAAHQKKILHVDNHIGISIAGLTADARLLCNFMRQECLDSRFVFDRPLPVSRLVSLIGSKTQIPTQRYGRRPYGVGLLIAGYDDMGPHIFQTCPSANYFDCRAMSIGARSQSARTYLERHMSEFMECNLNELVKHGLRALRETLPAEQDLTTKNVSIGIVGKDLEFTIYDDDDVSPFLEGLEERPQRKAQPAQPADEPAEKADEPMEH

SEQ ID NO: 56554 - protein, 124 aa, Homo sapiens
MPNKNKKEKESPKAGKSGKSSKEGQDTVESEQISVRKNSLVAVPSTVSAKIKVPVSQPIVKKDKRQNSSRFSASNNRELQKLPSLKDCKCTRFETYVYRGPTFHTHGFCGPTVGLEYAWIWLRL

SEQ ID NO: 56555 - protein, 439 aa, Homo sapiens
MWPQPRLPPHPAMSEKTQQGKLAAAKKKLKAYWQRKSPGIPAGANRKKKVNGSSPDTATSGGYHSPGDSATGIYGEGRASSTTLQDLESQYQELAVALDSSSAIISQLTENINSLVRTSKEEKKHEIHLVQKLGRSLFKLKNQTAEPLAPEPPAGPSKVEQLQDETNHLRKELESVGRQLQAEVENNQMLSLLNRRQEERLREQEERLHEQEERLHEQEERLCEQEERLREQEERLLCEQEKLPGQERLLEEVEKLLEQERRQEEQERLLERERLLDEVEELLEQERLRQQDERLWQQETLRELERLRELERLRELERMLELGWEALYEQRAEPRSGFEELNNENKSTLQLEQQVKELEKSGGAEEPRGSESAAAARPVPGAPVPQGAWMCGQAGWTPQEHPGLSGEAVGTGEAAGGAEEAACHSFRAAENRELNITII

SEQ ID NO: 56556 - protein, 164 aa, Homo sapiens
MKSHPRKKAKNSQKGPFRNVCCTCFPLSDPSETSCCSEDTHPSRPGPPGPQQHYLAGVTCRSPGSGRWEKEKHEDGVKWRQLEHKGPYFAPPYEPLPDGVRFFYEGRPVRLSVAAEEVATFYGRMLDHEYTTKEVFRKNFFNDWRKEMAVEEREVIKSLDKCDF

SEQ ID NO: 56557 - protein, 98 aa, Homo sapiens
  MOD_RES (1)..(1): Any amino acid
XFFLVRAFILHKADPVPNGLRALPVFYACTVGINLFSIMYTGAPWLKSPRRWLACAHFRRLQASCWALTNFLCGVPSSSRWDVQFSVPLSSGSLYVPG

SEQ ID NO: 56558 - protein, 139 aa, Homo sapiens
MSLKLPRNWDFNLKVEAAKIARSRSVMTGEQMAAFHPSSTPNPLERPIKMGWLKKQRSIVKNWQQRYFVLRAQQLYYYKDEEDTKPQQCLASAWMRLWPMNRNSAPIWCPSWWRNVQSSSWSTAGMKRASSVCLGRTTW

SEQ ID NO: 56559 - protein, 179 aa, Homo sapiens
MVSVARELTVGINGFGRIGRLVLRACMEKGVKVVAVNDPFIDPEYMVYMFKYDSTHGRYKGSVEFRNGQLVVDNHEISVYQCKEPKQIPWRAVGSPYVVESTGVYLSIQAASDHISAGAQRVVISAPSPDAPMFVMGVNENDYNPGSMNIVSNASCTTNCLAPLAKVIHERFGIVEGLM

SEQ ID NO: 56560 - protein, 953 aa, Homo sapiens
  MOD_RES (1)..(1): Any amino acid
XQLCWLPLLAPLLLLRPPGVQSAGPIRAFVVPHSHMDVGWVYTVQESMRAYAANVYTSVVEELARGQQRRFIAVEQEFFRLWWDGVASDQQKYQVRQLLEEGRLEFVIGGQVMHDEAVTHLDDQILQLTEGHGFLYETFGIRPQFSWHVDPFGASATTPTLFALAGFNAHLGSRIDYDLKAAMQEARGLQFVWRGSPSLSERQEIFTHIMDQYSYCTPSHIPFSNRSGFYWNGVAVFPKPPQDGVYPNMSEPVTPANINLYAEALVANVKQRAAWFRTPHVLWPWGCDKQFFNASVQFANMDPLLDHINSHAAELGVSVQYATLGDYFRALHALNVTWRVRDHHDFLPYSTEPFQAWTGFYTSRSSLKGLARRASALLYAGESMFTRYLWPAPRGHLDPTWALQQLQQLRWAVSEVQHHDAITGTESPKVRDMYATHLASGMLGMRKLMASIVLDELQPQAPMAASSDAGPAGHFASVYNPLAWTVTTIVTLTVGFPGVRVTDEAGHPVPSQIQNSTETPSAYDLLILTTIPGLSYRHYNIRPTAGAQEGTQEPAATVASTLQFGRRLRRRTSHAGRYLVPVANDCYIVLLDQDTNLMHSIWERQSNRTVRVTQEFLEYHVNGDVKQGPISDNYLFTPGKAAVPAWEAVEMEIVAGQLVTEIRQYFYRNMTAQNYTYAIRSRLTHVPQGHDGELLCHRIEQEYQAGPLELNREAVLRTSTNLNSQQVIYSDNNGYQMQRRPYVSYVNNSIARNYYPMVQSAFMEDGKSRLVLLSERAHGISSQGNGQVEVMLHRRLWNNFDWDLGYNLTLNDTSVVHPVLWLLLGSWSLTTALRQRSALALQHRPVVLFGDLAGTAPKLPGPQQQEAVTLPPNLHLQILSIPGWRYSSNHTEHSQNLRKGHRGEAQADLRRVLLRLYHLYEVGEDPVLSQPVTVNLEVNFPTPIQTISQGSKP

SEQ ID NO: 56561 - protein, 165 aa, Homo sapiens
ATAAASEIKREEKEDEENTSAADHSEEEKKELKAPRARTSPDEDEDDLLPPEQKAEREKERRVANNARERLRVRDINEAFKELGRMCQLHLNSEKPQTKLLILHQAVSVILNLEQQVRERNLNPKAACLKRREEEKVSGVVGDPQMVLSAPHPGLSEAHNPAGHM

SEQ ID NO: 56562 - protein, 26 aa, Homo sapiens
  MOD_RES (1)..(1): Any amino acid
XHGIDDSSDAVEVKVKGGGHSTHNLT

SEQ ID NO: 56563 - protein, 46 aa, Homo sapiens
  MOD_RES (1)..(1): Any amino acid
XKWDRCLADAVVKIEMGFHHVAQAGLELRVQTIHLPWPPNVPGLQA

SEQ ID NO: 56564 - protein, 788 aa, Homo sapiens
MKKASRSVGSVPKVSAISKTQTAEKIKPENSSSASTGGKLVKPGTAASLSKTKSSDDLLAGMAGGVTVTNGVKGKKSTCPSAAPSASAPAMTTVENKSKISTGTASSTKRSTSTGNKESSSTRERLRERTRLNQSKKLPSAGQGANDMALAKRSRSRTATECDVRMSKSKSDNQISDRAALEAKVKDLLTLAKTKDVEILHLRNELRDMRAQLGINEDHSEGDEKSEKETIMAHQPTDVESTLLQLQEQNTAIREELNQLKNENRMLKDRLNALGFSLEQRLDNSEKLFGYQSLSPEITPGNQSDGGGTLTSSVEGSAPGSVEDLLSQDENTLMDHQHSNSMDNLDSECSEVYQPLTSSDDALDAPSSSESEGIPSIERSRKGSSGNASEVSVACLTERIHQMEENQHSTSEELQATLQELADLQQITQELNSENERLGEEKVILMESLCQQSDKLEHFSRQIEYFRSLLDEHHISYVIDEDVKSGRYMELEQRYMDLAENARFEREQLLGVQQHLSNTLKMAEQDNKEAQEMIGALKERSHHMERIIESEQKGKAALAATLEEYKATVASDQIEMNRLKAQLENEKQKVAELYSIHNSGDKSDIQDLLESVRLDKEKAETLASSLQEDLAHTRNDANRLQDAIAKVEDEYRAFQEEAKKQIEDLNMTLEKLRSDLDEKETERSDMKETIFELEDEVEQHRAVKLHDNLIISDLENTVKKLQDQKHDMEREIKTLHRRLREESAEWRQFQADLQTAVVIANDIKSEAQEEIGDLKRRLHEAQEKNEKL

SEQ ID NO: 56565 - protein, 167 aa, Homo sapiens
MGTTAPGPIHLLELCDQKLMEFLCNMDNKDLVWLEEIQEEAERMFTREFSKEPELMPKTPSQKNRRKKRRISYVQDENRDPIRRRLSRRKSRSSQLSSRRLRSKDSVEKLATVVGENGSVLRRVTRAAAAAAAATMALAAPSSPTPESPTMLTKKPEDNHTQCQLVP

SEQ ID NO: 56566 - protein, 126 aa, Homo sapiens
MATAVEPEDQDLWEEEGILMVKLEDDFTCRPESVLQRDDPVLETSHQNFRRFRYQEAASPREALIRLRELCHQWLRPERRTKEQILELLVLEQFLTVLPGELQSWVRGQRPESGEEAVTLVEGLQK

SEQ ID NO: 56567 - protein, 99 aa, Homo sapiens
LTQHSWQSLKDRYLKHLRGQEHKYLLGDAPVSPSSQKLKRKAEEDPEAADSGGEEAERGASRISARVGLGSFSWLPGVHLGIFGSSAWPRPLLTSGTTE

SEQ ID NO: 56568 - protein, 292 aa, Homo sapiens [sequence omitted]

SEQ ID NO: 56569 - protein, 286 aa, Homo sapiens
  MOD_RES (1)..(1): Any amino acid
XLGRMLGKGEFGSVREAQLKQEDGSFVKVAVKMLKADIIASSDIEEFLREAACMKEFDHPHVAKLVGVSLRSRAKGRLPIPMVILPFMKHGDLHAFLLASRIGENPFTLIRFMVDIACGMEYLSSRNFIHRDLAARNCMLAEDMTVCVADFGLSRKIYSGDYYRQGCASKLPVKWLALESLADNLYTVQSDVWAFGVTMWEIMTRGQTPYAGIENAEIYNYLIGGNRLKQPPECMEDVLTLPLHPSQGLPRPSDNLLYDLMYQCWSADPKQRPSFTCLRMELENIL

SEQ ID NO: 56570 - protein, 96 aa, Homo sapiens
MTLLPGDNSDYDYSALSCTSDASFHPAFLPQRQAIKGAFYRRAQRLRPQDEPRQGCQPEDRRRRIIINVGGIKYSLPWTTLDEFPLTRLGQLKACT

SEQ ID NO: 56571 - protein, 143 aa, Homo sapiens
MGIPGVKGQPGLPGPPGLPGPGFAGPPGPPGPVGLPGEIGIRGPKGDPGPDGPSGPPGPPGKPGRPGTIQGLEGSADFLCPTNCPPGMKGPPGLQGVKGHAGKRGILGDPGHQGKPGPKGDVGASGEQGIPGPPGPQGIRGYP

SEQ ID NO: 56572 - protein, 38 aa, Homo sapiens
MGSSQSVEIPGGGTEGYHVLRERDPDPQSGGGACGGRC

SEQ ID NO: 56573 - protein, 58 aa, Homo sapiens
  MOD_RES (1)..(1): Any amino acid
XNEQRGEEFHLPLEMPLSIFVEAEEKRENFISCTFLNPEQIIPKVPQESLFMAQDFNC

SEQ ID NO: 56574 - protein, 1041 aa, Homo sapiens
MEAKVRPSRRSRAQRDRGRRREAARDARAQSPSSGDEPEPSPGKENAGLRGAPPRGAAPAPRTARPPRRRRRESSSQEEEVIDGFAIASFSTLEALEKDMALKPHERKEKWERRLIKKPRESETCPPAEPSENRRPLEAGSPGQDLEPACDGARKVPLQPSKQMKVTVSKGGDRDSDDDSVLEATSSRDPLSDSSAHAVSGRGYSCDSESGPDDKASVGSEKLFAPGTDKGPALEKSEAKAGPVPKVSGLERSRELSAESFLPTASPAPHAAPCPGPPPGSRANPLVKKEPPAPHRHTPQPPPPQPRGLLPTHVPASLGAFAGHSQAAANGLHGLSRSSSAPLGLGKHVSLSPHGPGPHLSTSHLALRSQAQHQLHAAMFAAPPTLPPPPALPASSLVLPGHPADASLAVSFSQPIMYCQPHSGILIDHELLRQELNTRFLVQSAERPGASLGPGALLRAEFHQHQHTHQHTHQHTHQHQHTFAPFPAGLPPTPPAAPPPFDKYAPKLDSPYFRHSSFFPSFPPAIPGLPTLLPHPGPFGSLQGAFQPKTSSPIEVARRAGAVHTLLQKAPGVSDPYRAVVKKPGRWCAVHVQIAWQIYRHQQKIKEMQLDPHKLEVGAKLDLFGRPPAPGVFAGFHYPQDLARPLFPSTGAAHPASNPFGPSAHPGSFLPTGPLTDPFSRPSTFGGLGSLSSHAFGGLGSHALAPGGSIFAPKEGSSVHGLPSPHEAWNRLHRAPPSFPAPPPWPKSVDAERVSALTNHDREPDNGKEEQERDLLEKTRLLSRASPATPAGHPVSGLLLRAQSELGRSGAPAEREAEPRVKESRSPAKEEAAKMPARASPPHSKAAPGDVKVKEERGEDEASEPPAGGLHPAPLQLGLGRERLGAPGFAWEPFRGLELPRRAFPAAAPAPGSAALLEPPERPYRDREPHGYSPERLRGELERARAPHLPPAAPALDGALLPSLGALHFPRLSPAALHNGLLARTPPAAAALGAPPPLVTAAGPPTPPGPPRSRTTPLGGLGPGEARDYSPSRNPPEVEAR

SEQ ID NO: 56575 - protein, 1259 aa, Homo sapiens
MSSLPGCIGLDAATATVESEEIAELQQAVVEELGISMEELRHFIDEELEKMDCVQQRKKQLAELETWVIQKESEVAHVDQLFDDASRAVTNCESLVKDFYSKLGLQYRDSSSEDESSRPTEIIEIPDEDDDVLSIDSGDAGSRTPKDQKLREAMAALRKSAQDVQKFMDAVNKKSSSQDLHKGTLSQMSGELSKDGDLIVSMRILGKKRTKTWHKGTLIAIQTVGPGKKYKVKFDNKGKSLLSGNHIAYDYHPPADKLYVGSRVVAKYKDGNQVWLYAGIVAETPNVKNKLRFLIFFDDGYASYVTQSELYPICRPLKKTWEDIEDISCRDFIEEYVTAYPNRPMVLLKSGQLIKTEWEGTWWKSRVEEVDGSLVRILFLDDKRCEWIYRGSTRLEPMFSMKTSSASALEKKQGQLRTRPNMGAVRSKGPVVQYTQDLTGTGTQFKPVEPPQPTAPPAPPFPPAPPLSPQAGDSDLESQLAQSRKQVAKKSTSFRPGSVGSGHSSPTSPALSENVSGGKPGINQTYRSPLGSTASAPAPSALPAPPAPPVFHGMLERAPAEPSYRAPMEKLFYLPHVCSYTCLSRVRPMRNEQYRGKNPLLVPLLYDFRRMTARRRVNRKMGFHVIYKTPCGLCLRTMQEIERYLFETGCDFLFLEMFCLDPYVLVDRKFQPYKPFYYILDITYGKEDVPLSCVNEIDTTPPPQVAYSKERIPGKGVFINTGPEFLVGCDCKDGCRDKSKCACHQLTIQATACTPGGQINPNSGYQYKRLEECLPTGVYECNKRCKCDPNMCTNRLVQHGLQVRLQLFKTQNKGWGIRCLDDIAKGSFVCIYAGKILTDDFADKEGLEMGDEYFANLDHIESVENFKEGYESDAPCSSDSSGVDLKDQEDGNSGTEDPEESNDDSSDDNFCKDEDFSTSSVWRSYATRRQTRGQKENGLSETTSKDSHPPDLGPPHIPVPPSIPVGGCNPPSSEETPKNKVASWLSCNSVSEGGFADSDSHSSFKTNEGGEGRAGGSRMEAEKASTSGLGIKDEGDIKQAKKEDTDDRNKMSVVTESSRNYGYNPSPVKPEGLRRPPSKTSMHQSRRLMASAQSNPDDVLTLSSSTESEGESGTSRKPTAGQTSATAVDSDDIQTISSGSEGDDFEDKKNMTGPMKRQVAVKSTRGFALKSTHGIAIKSTNMASVDKGESAPVRKNTRQFYDGEESCYIIDAKLEGNLGRYLNVRPLSPPLDAGLSHGPQISFNILYKPFSCYKLLISK

SEQ ID NO: 56576 - protein, 20 aa, Homo sapiens
MMAWTTARTSSQKRTADLKQ

SEQ ID NO: 56577 - protein, 83 aa, Homo sapiens [sequence omitted]

SEQ ID NO: 56578 - protein, 222 aa, Homo sapiens
MDQFSTAVVIVCLLAIGRLNIRLRNCLFRSLVSQETSFFDENRTGDLISRLTSDTTMVSDLVSQNINVFLRNTVKVTGVVVFMFSLSWQLSLVTFMGFPIIMMVSNIYGKYYKRLSKEVQNALARASNTAEETISAMKTVRSFANEEEEAEVYLRKLQQVYKLNRKEAAAYMYYVWGSGLTLLVVQVSILYYGGHLVISGQMTSGNLIAFIIYEFVLGDCME

SEQ ID NO: 56579 - protein, 191 aa, Homo sapiens
METNSSLPTNISGGTPAVSAGYLFLDIITYLVFAVTFVLGVLGNGLVIWVAGFRMTHTVTTISYLNLAVADFCFTSTLPFFMVRKAMGGHWPFGWFLCKFVFTIVDINLFGSVFLIALIALDRCVCVLHPVWTQNHRTVSLAKKVIIGPWVMALLLTLPVIIRVTTVPGKTGTVACTFNFSPWTNDPKERI

SEQ ID NO: 56580 - protein, 89 aa, Homo sapiens
  MOD_RES (1)..(1): Any amino acid
XRLLWCPADAPGRARILVEESREATHGTPAALRTLRSPATAVPRATNSTYLNEKSLQLTEKCKNLQYGIESFSNKTKGCDPTLLAYILD

SEQ ID NO: 56581 - protein, 2312 aa, Homo sapiens [sequence omitted]

SEQ ID NO: 56582 - protein, 81 aa, Homo sapiens
ERFNKLVVRMTKSLAELQRALAGEVGMSNELDDVARSLFIGHIPNIWRRLAPDTLKSLGNWMVYFLRRFSQYMLWLLLDGS

SEQ ID NO: 56583 - protein, 387 aa, Homo sapiens
  MOD_RES (1)..(1): Any amino acid
XPSTSGKRSSDGSLSHEEDLAKVIELQEIISKQSREQSQMKERLASLSSHVTELEEDLDTARKDLIKSEEMNTKLQRDVREAMAQKEDMEERITTLEKRYLAAQREATSVHDLNDKLENEIANKDSMHRQTEDKNRQLQERLELAEQKLQQTLRKAETLPEVEAELAQRVAALSKSDLLSSGSSAAKEAKLLELTSKLRKAEERHGNIEERLRQMEAQLEEKNQELQRARQREKMNEEHNKRLSDTVDKLLSESNERLQLHLKERMAALEDKNSLLREVESAKKQLEETQHDKDQLVLNIEALRAELDHMRLRGASLHHGRPHLGSVPDFRFPMADGHTDSYSTSAVLRRPQKGRLAALRDEPSKARYKLLMSRIGNVPSKLVSWQM

SEQ ID NO: 56584 - protein, 142 aa, Homo sapiens
MAGLQELRFPEEKPLLRGQDATELESSDAFLLAADTDWKEHDIETPYGLLHVVIRGSPKGNRPAILTYHDVGLNHKLCFNTFFNFEDMQEITKHFVVCHVDAPGQQVGASQFPQGYQFPSMEQLAAMLPSVVQHFGFKYVIG

SEQ ID NO: 56585 - protein, 351 aa, Homo sapiens
MLTARCLSDDTLAHLEAAGHVCVLKDAFDFESRSEIANLILAENCEAALALHLYRGGRLLQGHRIPFGVIFGGTDVNEDANQAEKNTVMGRVLEEARFAVAFTESMKEMAQAQWKARQISLAVTSAVPVQPHAKGKVYVQSQGIATTPNAAFNWNTFLQRSEINQSADNLHIFLLICGLRQVKDPLYLVDAFSAWHQEEPNVHLVIVGPEVDPVFTREVKAKVKRAAGVRLIGEMPQEDLHAVVKNCFAVVNSSVSEGMSAAILEAMDLEVPVLARNIPGNAAVVKHEVTGLLFSNPQEFVHLAKRLVSDPALEKEIVVNGREYVRMYHSWQVERDTYQQLIRKLEGSTED

SEQ ID NO: 56586 - protein, 73 aa, Homo sapiens
  MOD_RES (1)..(1): Any amino acid
XKRESNLDPERVPGSQSGSIWRFQSRGGRDIPAPGRSRPGAGEPQWGPQETEEESQEKAGSRRFCVTFSGMFC

SEQ ID NO: 56587 - protein, 35 aa, Homo sapiens
  MOD_RES (1)..(1): Any amino acid
XIKETCYPDIPDPYKSSILSLIKFKISSKVWLNRR

SEQ ID NO: 56588 - protein, 230 aa, Homo sapiens
MTPSEGARAGTGRELEMLDSLLALGGLVLLRDSVEWEGRSLLKALVKKSALCGEQVHILGCEVSEEEFREGFDSDINNRLVYHDFFRDPLNWSKTEEAFPGGPLGALRAMCKRTDPVPVTIALDSLSWLLLRLPCTTLCQVLHAVSHQDSCPGDSSSVGKVSVLGLLHEELHGPGPVGALSSLAQTEVTLGGTMGQASAHILCRRPRQRPTDQTQWFSILPDFSLDLQEG

SEQ ID NO: 56589 - protein, 190 aa, Homo sapiens
  MOD_RES (1)..(1): Any amino acid
XNRYHNSHPLRERARKLSQGILIIRFEMPYNIWCDGCKNHIGMGVRYNAEKKKVGNYYTTPIYRFRMKCHLCVNYIEMQTDPANCDYVIVSGAQRKEERWDMADNEQVLTTEAGDGRHVPAGAWRGRPQHTQEGAAHTEPHPGGPERLEGRLRPQQHAAEKVPGEGGSSPGSERMHGGPRPGSSPPPTTS

SEQ ID NO: 56590 - protein, 332 aa, Homo sapiens
MAEYDLTTRIAHFLDRHLVFPLLEFLSVKEIYNEKELLQGKLDLLSDTNMVDFAMDVYKNLYSDDIPHALREKRTTVVAQLKQLQAETEPIVKMFEDPETTRQMQSTRDGRMLFDYLADKHGFRQEYLDTLYRYAKFQYECGNYSGAAEYLYFFRVLVPATDRNALSSLWGKLASEILMQNWDAAMEDLTRLKETIDNNSVSSPLQSLQQRTWLIHWSLFVFFNHPKGRDNIIDLFLYQPHMLADKLNMTPEEAERWIVNLIRNARLDAKIDSKLGHVVMGNNAVSPYQQVIEKTKSLSFRSQMLAMNIEKKLNQNSRSEAPNWATQDSGFY

SEQ ID NO: 56591 - protein, 55 aa, Homo sapiens
MGSPLRFDGRVVLVTGAGAGLGRAYALAFAERGALVVVEMEFHCVSQDGLDLLTS

SEQ ID NO: 56592 - protein, 116 aa, Homo sapiens
MRLPWELLVLQSFILCLADDSTLHGPIFIQEPSPVMFPLDSEEKKVKLNCEVKGNPKPHIRWKLNGTDVDTGMDFRYSVVEGSLLINNPNKTQDAGTYQCTATNSFGTIVSREAKL

SEQ ID NO: 56593 - protein, 126 aa, Homo sapiens
MRLPGCTLAASEAAPLLNPLVDDYVASEGAVQRVLVPAYAKQLSPATQLAIQRATPETGPENGTKLPPPRPEDMLNAAAALDSALEESGPGSTGELRHSLGLTVSPCRTRGSGQKNSRRKRDLVLS

SEQ ID NO: 56594 - protein, 4222 aa, Homo sapiens
MMPAQYALTSSLVLLVLLSTARAGPFSSRSNVTLPAPRPPPQPGGHTVGAGVGSPSSQLYEHTVEGGEKQVVFTHRINLPPSTGCGCPPGTEPPVLASEVQALRVRLEILEELVKGLKEQCTGGCCPASAQAGTGQTDVRTLCSLHGVFDLSRCTCSCEPGWGGPTCSDPTDAEIPPSSPPSASGSCPDDCNDQGRCVRGRCVCFPGYTGPSCGWPSCPGDCQGRGRCVQGVCVCRAGFSGPDCSQRSCPRGCSQRGRCEGGRCVCDPGYTGDDCGMRSCPRGCSQRGRCENGRCVCNPGYAGEDCGVRSCPRGCSQRGRCKDGRCVCDPGYTGEDCGTRSCPWDCGEGGRCVDGRCVCWPGYTGEDCSTRTCPRDCRGRGRCEDGECICDTGYSGDDCGVRSCPGDCNQRGRCEDGRCVCWPGYTGTDCGSRACPRDCRGRGRCENGVCVCNAGYSGEDCGVRSCPGDCRGRGRCESGRCMCWPGYTGRDCGTRACPGDCRGRGRCVDGRCVCNPGFTGEDCGSRRCPGDCRGHGLCEDGVCVCDAGYSGEDCSTRSCPGGCRGRGQCLDGRCVCEDGYSGEDCGVRQCPNDCSQHGVCQDGVCICWEGYVSEDCSIRTCPSNCHGRGRCEEGRCLCDPGYTGPTCATRMCPADCRGRGRCVQGVCLCHVGYGGEDCGQEEPPASACPGGCGPRELCRAGQCVCVEGFRGPDCAIQTCPGDCRGRGECHDGSCVCKDGYAGEDCGEEVPTIEGMRMHLLEETTVRTEWTPAPGPVDAYEIQFIPTTEGASPPFTARVPSSASAYDQRGLAPGQEYQVTVRALRGTSWGLPASKTITTMIDGPQDLRVVAVTPTTLELGWLRPQAEVDRFVVSYVSAGNQRVRLEVPPEADGTLLTDLMPGVEYVVTVTAERGRAVSYPASVRANTGSSPLGLLGTTDEPPPSGPSTTQGAQAPLLQQRPQELGELRVLGRDETGRLRVVWTAQPDTFAYFQLRMRVPEGPGAHEEVLPGDVRQALVPPPPPGTPYELSLHGVPPGGKPSDPIIYQGIMDKDEEKPGKSSGPPRLGELTVTDRTSDSLLLRWTVPEGEFDSFVIQYKDRDGQPQVVPVEGPQRSAVITSLDPGRKYKFVLYGFVGKKRHGPLVAEAKILPQSDPSPGTPPHLGNLWVTDPTPDSLHLSWTVPEGQFDTFMVQYRDRDGRPQVVPVEGPERSFVVSSLDPDHKYRFTLFGIANKKRYGPLTADGTTAPERKEEPPRPEFLEQPLLGELTVTGVTPDSLRLSWTVAQGPFDSFMVQYKDAQGQPQAVPVAGDENEVTVPGLDPDRKYKMNLYGLRGRQRVGPESVVAKTAPQEDVDETPSPTELGTEAPESPEEPLLGELTVTGSSPDSLSLFWTVPQGSFDSFTVQYKDRDGRPRAVRVGGKESEVTVGGLEPGHKYKMHLYGLHEGQRVGPVSAVGVTAPQQEETPPATESPLEPRLGELTVTDVTPNSVGLSWTVPEGQFDSFIVQYKDKDGQPQVVPVAADQREVTVYNLEPERKYKMNMYGLHDGQRMGPLSVVIVTAPLPPAPATEASKPPLEPRLGELTVTDITPDSVGLSWTVPEGEFDSFVVQYKDRDGQPQVVPVAADQREVTIPDLEPSRKYKFLLFGIQDGKRRSPVSVEAKTVARGDASPGAPPRLGELWVTDPTPDSLRLSWTVPEGQFDSFVVQFKDKDGPQVVPVEGHERSVTVTPLDAGRKYRFLLYGLLGKKRHGPLTADGTTEARSAMDDTGTKRPPKPRLGEELQVTTVTQNSVGLSWTVPEGQFDSFVVQYKDRDGQPQVVPVEGSLREVSVPGLDPAHRYKLLLYGLHHGKRVGPISAVAITAGREETETETTAPTPPAPEPHLGELTVEEATSHTLHLSWMVTEGEFDSFEIQYTDRDGQLQMVRIGGDRNDITLSGLESDHRYLVTLYGFSDGKHVGPVHVEALTVPEEEKPSEPPTATPEPPIKPRLGELTVTDATPDSLSLSWTVPEGQFDHFLVQYRNGDGQPKAVRVPGHEEGVTISGLEPDHKYKMNLYGFHGGQRMGPVSVVGVTAAEEETPSPTEPSMEAPEPAEEPLLGELTVTGSSPDSLSLSWTVPQGRFDSFTVQYKDRDGRPQVVRVGGEESEVTVGGLEPGRKYKMHLYGLHEGRRVGPVSAVGVTAPEEESPDAPLAKLRLGQMTVRDITSDSLSLSWTVPEGQFDHFLVQFKNGDGQPKAVRVPGHEDGVTISGLEPDHKYKMNLYGFHGGQRVGPVSAVGLTAPGKDEEMAPASTEPPTPEPPIKPRLEELTVTDATPDSLSLSWTVPEGQFDHFLVQYKNGDGQPKATRVPGHEDRVTISGLEPDNKYKMNLYGFHGGQRVGPVSAIGVTAAEEETPSPTEPSMEAPEPPEEPLLGELTVTGSSPDSLSLSWTVPQGRFDSFTVQYKDRDGRPQVVRVGGEESEVTVGGLEPGRKYKMHLYGLHEGRRVGPVSTVGVTAPQEDVDETPSPTEPGTEAPEPPEEPLLGELTVTGSSPDSLSLSWTVPQGRFDSFTVQYKDRDGRPQAVRVGGQESKVTVRGLEPGRKYKMHLYGLHEGRRLGPVSAVGVTEDEAETTQAVPTMTPEPPIKPRLGELTMTDATPDSLSLSWTVPEGQFDHFLVQYRNGDGQPKAVRVPGHEDGVTISGLEPDHKYKMNLYGFHGGQRVGPISVIGVTAAEEETPSPTELSTEAPEPPEEPLLGELTVTGSSPDSLSLSWTIPQGHFDSFTVQYKDRDGRPQVMRVRGEESEVTVGGLEPGRKYKMHLYGLHEGRRVGPVSTVGVTVPTTTPEPPNKPRLGELTVTDATPDSLSLSWMVPEGQFDHFLVQYRNGDGQPKVVRVPGHEDGVTISGLEPDHKYKMNLYGFHGGQRVGPISVIGVTAAEEETPAPTEPSTEAPEPPEEPLLGELTVTGSSPDSLSLSWTIPQGRFDSFTVQYKDRDGRPQVVRVRGEESEVTVGGLEPGCKYKMHLYGLHEGQRVGPVSAVGVTVPTMTPEPPIKPRLGELTVTDATPDSLSLSWMVPEGQFDHFLVQYRNGDGQPKAVRVPGHEDGVTISGLEPDHKYKMNLYGFHGGQRVGPVSAIGVTEEETPSPTEPSTEAPEAPEEPLLGELTVTGSSPDSLSLSWTVPQGRFDSFTVQYKDRDGQPQVVRVRGEESEVTVGGLEPGRKYKMHLYGLHEGQRVGPVSTVGITAPLPTPLPVEPRLGELAVAAVTSDSVGLSWTVAQGPFDSFLVQYRDAQGQPQAVPVSGDLRAVAVSGLDPARKYKFLLFGLQNGKRHGPVPVEARTAPDTKPSPRLGELTVTDATPDSVGLSWTVPEGEFDSFVVQYKDKDGRLQVVPVAANQREVTVQGLEPSRKYRFLLYGLSGRKRLGPISADSTTAPLEKELPPHLGELTVAEETSSSLRLSWTVAQGPFDSFVVQYRDTDGQPRAVPVAADQRTVTVEDLEPGKKYKFLLYGLLGGKRLGPVSALGMTAPEEDTPAPELAPEAPEPPEEPRLGVLTVTDTTPDSMRLSWSVAQGPFDSFVVQYEDTNGQPQALLVDGDQSKILISGLEPSTPYRFLLYGLHEGKRLGPLSAEGTTGLAPAGQTSEESRPRLSQLSVTDVTTSSLRLNWEAPPGAFDSFLLRFGVPSPSTLEPHPRPLLQRELMVPGTRHSAVLRDLRSGTLYSLTLYGLRGPHKADSIQGTARTLSPVLESPRDLQFSEIRETSAKVNWMPPPSRADSFKVSYQLADGGEPQSVQVDGQARTQKLQGLIPGARYEVTVVSVRGFEESEPLTGFLTTVPDGPTQLRALNLTEGFAVLHWKPPQNPVDTYDVQVTAPGAPPLQAETPGSAVDYPLHDLVLHTNYTATVRGLRGPNLTSPASITFTTGLEAPRDLEAKEVTPRTALLTWTEPPVRPAGYLLSFHTPGGQNQEILLPGGITSHQLLGLFPSTSYNARLQAMWGQSLLPPVSTSFTTGGLRIPFPRDCGEEMQNGAGASRTSTIFLNGNRERPLNVFCDMETDGGGWLVFQRRMDGQTDFWRDWEDYAHGFGNISGEFWLGNEALHSLTQAGDYSMRVDLRAGDEAVFAQYDSFHVDSAAEYYRLHLEGYHGTAGDSMSYHSGSVFSARDRDPNSLLISCAVSYRGAWWYRNCHYANLNGLYGSTVDHQGVSWYHWKGFEFSVPFTEMKLRPRNFRSPAGGG

SEQ ID NO: 56595 - protein, 198 aa, Homo sapiens
  MOD_RES (1)..(1): Any amino acid
XEVGFLAEDRRINVAVTRARRHVAVICDSRTVNNHAFLKTLVEYFTQHGEVRTAFEYLDDIVPENYSHENSQGSSHAATKPQGPATSTRTGSQRQEGGQEAAAPARQGRKKPAGKSLASEAPSQPSLNGGSPEGVESQDGVDHFRAMIVEFMASKKMQLEFPPSLNSHDRLRVHQIAEEHGLRQSSLPGSSVAQTSLI

SEQ ID NO: 56596 - protein, 278 aa, Homo sapiens
MGTALLQRGGCFLLCLSLLLLGCWAELGSGLEFPGAEGQWTRFPKWNACCESEMSFQLKTRSARGLVLYFDDEGFCDFLELILTRGGRLQLSFSIFCAEPATLLADTPVNDGAWHSVRIRRQFRNTTLFIDQVEAKWVEVKSKRRDMTVFSGLFVGGLPPELRAAALKLTLASVREREPFKGWIRDVRVNSSQVLPVDSGEVKLDDEPPNSGGGSPCEAGEEGEGGVCLNGGVCSVVDDQAVCDCSRTGFRGKDCSQEDNNVEGLAHLMMGDQGKSKD

SEQ ID NO: 56597 - protein, 130 aa, Homo sapiens
  MOD_RES (1)..(1): Any amino acid
XTALTEEAAVTVTPPITAQQADNIEGPIALKFSHLCLEDHNSYCINGACAFHHELEKAICRCFTGYTGERCEHLTLTSYAVDSYEKYIAIGIGVGLLLSGFLVIFYCYIRKRCLKLKSPYNVCSGERRPL

SEQ ID NO: 56598 - protein, 381 aa, Homo sapiens
MDSQKYCFKENENVTVDKACFLISNITIGPESINLQQEALQRIISTLANKNDEIQNFIDTLHHTLKGVQENSSNILSELDEEFDSLYSILDEVKESMINCIKQEQARKSQELQSQISQCNNALENSEELLEFATRSLDIKEPEEFSKAARQIKDRVTMASAFRLSLKPKVSDNMTHLMVDFSQERQMLQTLKFLPVPKAPEIDPVECLVADNSVTVAWRMPEEDNKIDHFILEHRKTNFDGLPRVKDERCWEIIDNIKGTEYTLSGLKFDSKYMNFRVRACNKAVAGEYSDPVTLETKALNFNLDNSSSHLNLKVEDTCVEWDPTGGKGQESKIKGKENKGSYKFLKIVFLLSKELLIHFEAVLSEIFLFICMTFTFYLLP

SEQ ID NO: 56599 - protein, 187 aa, Homo sapiens
  MOD_RES (1)..(1): Any amino acid
XTSGSHPQAIVSSSTPQYPSAEQPTPQALYATVHQSYPHHATQLHAHQPQPATTPTGSQPQSQHAAPSPVQAGQAPHLGSGQPQQNLYHPGALTGTPPSLPPGPSAQSPQSSFPQPAAVYAIHHQQLPHGFTNMAHVTQAHVQTGITAAPPPHPGAPHPPQVMLLHPPQSHGGPPQGAVPQSGVPAL

SEQ ID NO: 56600 - protein, 915 aa, Homo sapiens
MVKLANPLYTEWILEAIQKIKKQKQRPSEERICHAVSTSHGLDKKTVSEQLELSVQDGSVLKVTNKGLASYKDPDNPGRFSSVKPGTFPKSAKGSRGSCNDLRNVDWNKLLRRAIEGLEEPNGSSLKNIEKYLRSQSDLTSTTNNPAFQQRLRLGAKRAVNNGRLLKDGPQYRVNYGSLDGKGAPQYPSAFPSSLPPVSLLPHEKDQPRADPIPICSFCLGTKESNREKKPEELLSCADCGSSGHPSCLKFCPELTTNVKALRWQCIECKTCSACRVQGRNADNMLFCDSCDRGFHMECCDPPLSRMPKGMWICQVCRPKKKGRKLLHEKAAQIKRRYAKPIGRPKNKLKQRLLSVTSDEGSMNAFTGRGSPGRGQKTKVCTTPSSGHAASGKDSSSRLAVTDPTRPGATTKITTTSTYISASTLKVNKKTKGLIDGLTKFFTPSPDGRRSRGEIIDFSKHYRPRKKVSQKQSCTSHVLATGTTQKLKPPPSSLPPPTPISGQSPSSQKSSTATSSPSPQSSSSQCSVPSLSSLTTNSQLKALFDGLSHIYTTQGQSRKKGHPSYAPPKRMRRKTELSSTAKSKAHFFGKRDIRSRFISHSSSSSWGMARGSIFKAIAHFKRTTFLKKHRMLGRLKYKVTPQMGTPSPGKGSLTDGRIKPDQDDDTEIKINIKQESADVNVIGNKDVVTEEDLDVFKQAQELSWEKIECESGVEDCGRYPSVIEFGKYEIQTWYSSPYPQEYARLPKLYLCEFCLKYMKSKNILLRHSKKCGWFHPPANEIYRRKDLSVFEVDGNMSKIYCQNLCLLAKLFLDHKTLYYDVEPFLFYVLTKNDEKGCHLVGYFSKAICFLEEKAKQGLLKSLSPIWAVSPTWHIGRASSWSISTTTMRGTSASRQLAERRACAHMTLPPLCSTST

SEQ ID NO: 56601 - protein, 96 aa, Homo sapiens
  MOD_RES (1)..(1): Any amino acid
XLVSICVVFAMSFVPASFTLVLIEERVTRAKHLQLMGGLSPTLYWLGNFLWDMCNYLVPACIVVLIFLAFQQRAYVAPANLPALLLLLLLYGSCRR

SEQ ID NO: 56602 - protein, 114 aa, Homo sapiens
MSPESKKLFNIIILGVAFMFMFTAFQTCGNVAQTVIRSLNRTDFHGSGYTSMAIIYGVFSASNLITPSVVAIVGPQLSMFASGLFYSLSRGPSTQPLFSLELLLLCFGQHKETA

SEQ ID NO: 56603 - protein, 163 aa, Homo sapiens
MLQFVRAGARAWLRPTGSQGSSLTFAQPLQGLSSLAEEAARATENPEQVASEGLPEPVLRKVELPVPTHRRPVQAWVESLRGFEQERVGLADLHPDVFATAPRLDILHQVAMWQKNFKRISYAKTKTRAEVRGGGRKPWPQKGTGRARHGSIRSPLWRGGGVA

SEQ ID NO: 56604 - protein, 106 aa, Homo sapiens
MSSTPHDPFYSSPFGPFYRRHTPYMVQPEYRIYEMNKRLQSRTEDSDNLWWDAFATEFFEDDATLTLSFCLEDGPKRYRTKNLRPIGEKMNINGKCYRQDPHPPLL

SEQ ID NO: 56605 - protein, 68 aa, Homo sapiens
  MOD_RES (1)..(1): Any amino acid
XDIESAISDSKGGKQKRRPDALRMISNADPSIPPPPRAPAPAPPGTVTQVDVRSRVAAWSAWAADQGD

SEQ ID NO: 56606 - protein, 725 aa, Homo sapiens
  MOD_RES (1)..(1): Any amino acid
XTDMILFSLIVGLLTYWFLFRKKKEEVPEFTKIQTLTSSVRESSFVEKMKKTGRNIIVFYGSQTGTAEEFANRLSKDAHRYGMRGMSADPEEYDLADLSSLPEIDNALVVFCMATYGEGDPTDNAQDFYDWLQETDVDLSGVKFAVSHPETAMGSRWPAVPPWGLQIHVSERQPSRPPPCPQQPGQATCETLSSAPDPSTTRMSPPCPQPQSAPGGIGCWRLKVFGLGNKTYEHFNAMGKYVDKRLEQLGAQRIFELGLGDDDGNLEEDFITWREQFWPAVCEHFGVEATGEESSIRQYELVVHTDIDAAKVYMGEMGRLKSYENQKPPFDAKNPFLAAVTTNRKLNQGTERHLMHLELDISDSKIRYESGDHVAVYPANDSALVNQLGKILGADLDVVMSLNNLDEESNKKHPFPCPTSYRTALTYYLDITNPPRTNVLYELAQYASEPSEQELLRKMASSSGEGKELYLSWVVEARRHILAILQDCPSLRPPIDHLCELLPRLQARYYSIASSSKVHPNSVHICAVVVEYETKAGRINKGVATNWLRAKEPAGENGGRALVPMFVRKSQFRLPFKATTPVIMVGPGTGVAPFIGFIQERAWLRQQGKEVGETLLYYGCRRSDEDYLYREELAQFHRDGALTQLNVAFSREQSHKVYVQHLLKQDREHLWKLIEGGAHIYVCGTPSSCPGMHGTWPGMCRTPSTTSWLSSGPWSTRRRWTTSRN

SEQ ID NO: 56607 - protein, 118 aa, Homo sapiens
  MOD_RES (1)..(1): Any amino acid
XEKEMEVYRVTESLQREKAGLLKQLDFLRERNKHLRDERDICFQKNKAAKANTAASRASWKKRSGSVIGKYVDSRGILRRWPQRDRGIPTLQYQTQRDLEDCKHEMKKICKAEVTLEM

SEQ ID NO: 56608 - protein, 889 aa, Homo sapiens
MWGLGARGPDRGLLLALALGGLARAGGVEVEPGGAHGESGGFQVVTFEWAHVQDPYVIALWILVASLAKIGFHLSHKVTSVVPESALLIVLGLVLGGIVWAADHIASFTLTPTVFFFYLLPPIVLDAGYFMPNRLFFGNLGTILLYAVVGTVWNAATTGLSLYGVFLSGLMGDLQIGLLDFLLFGSLMAAVDPVAVLAVFEEVHVNEVLFIIVFGESLLNDAVTVVLYNVFESFVALGGDNVTGVDCVKGIVSFFVVSLGGTLVGVVFAFLLSLVTRFTKHVRIIEPGFVFIISYLSYLTSEMLSLSAILAITFCGICCQKYVKANISEQSATTVRYTMKMLASSAETIIFMFLGISAVNPFIWTWNTAFVLLTLVFISVYRAIGVVLQTWLLNRYRMVQLEPIDQVVLSYGGLRGAVAFALVVLLDGDKVKEKNLFVSTTIIVVFFTVIFQGLTIKPLVQWLKVKRSEHREPRLNEKLHGRAFDHILSAIEDISGQIGHNYLRDKWSHFDRKFLSRVLMRRSAQKSRDRILNVFHELNLKDAISYVAEGERRGSLAFIRSPSTDNVVNVDFTPRSSTVEASVSYLLRENVSAVCLDMQSLEQRRRSIRDAEDMVTHHTLQQYLYKPRQEYKHLYSRHELTPTEDEKQDREIFHRTMRKRLESFKSTKLGLNQNKKAAKLYKRERAQKRRNSSIPNGKLPMESPAQNFTIKEKDLELSDTEEPPNYDEEMSGGIEFLASVTKDTASDSPAGDTGSDTPLTGRSSPRHGPPTAAAAVPEKPQIPARLQRPRAPSPASPTPAPAQNSESAAPAPAEPPEGEPGAGPAPGAGPERRGLPSAHARSAAARRVHSRRSFQRPRARRRPALLKLASLPPSCHAPPHALEQEETPL

SEQ ID NO: 56609 - protein, 328 aa, Homo sapiens
MLRVTKTFVKRNVEFEPTYEEFPSLESDSLLDYSCMQRLGAKLGFVSGLINQGKVEAFEKMLWRVCKGYTIVSYAELDESLEDPETGEVIKWYVFLISFWGEQIGHKVKKICDCYHCHVYPYPNTAEERREIQEGLNTRIQDLYTVLHKTEDYLRQVLCKAAESVYSRVIQVKKMKAIYHMLNMCSFDVTNKCLIAEVWCPEADLQDLRRALEEGSRESGATIPSFMNIIPTKETPPTRIRTNKFTEGFQNIVDAYGVGSYREVNPALFTIITFPFLFAVMFGDFGHGFVMFLFALLLVLNENHPRLNQSQEIMRMFFNGRYILLLMG

SEQ ID NO: 56610 - protein, 108 aa, Homo sapiens
  MOD_RES (1)..(1): Any amino acid
XPKSKWRSKILLGLNFYGMDYATSKDAREPVVGARYIQTLKDHRPRMVWDSQASEHFFEYKKSRSGRHVVFYPTLKSLQVRLELARELGVGVSIWELGQGLDYFYDLL

SEQ ID NO: 56611 - protein, 136 aa, Homo sapiens
KDQERLMRHRYLDMISRKLEQLERTAEEQRLFLMDREERRQREHTRRKLTLRRKIEEEWKTKEMLLLTRMAEDVKREERIEEQQHRNREESDRKKQDLLEKKMAYHLQKMQDTGFNGEDIGKNTFKYRGQDGTHGE

SEQ ID NO: 56612 - protein, 300 aa, Homo sapiens
  MOD_RES (1)..(1): Any amino acid
XCVFIWHLGPEITNCMKQHLLEIDHRQQQQHTNDKKRSGHPRQDTYVSTPSEIHSLSPGEQTEDDLEEECEPEEMLKTPSKDSLDPDPRCLLTNGKLPLWAKRLLGDDDVADGLAFHAKRSYQPHGRWAERAGQEPLKTILDAQDLDCYFTPMKPESLENSILDSLEPQSLASLLSESESPQEAGRGHPSFLPQQKESSEASELILYSLEAEVTVTGTDSQYCRKEVEAGPGDQQGDSYLRVSSDSPKDQSPPEGCAGPTEDELSLPEGPSVPSSSLPQTPEQEKFLRHHFETLTESPCR

SEQ ID NO: 56613 - protein, 73 aa, Homo sapiens
MDFLRNLFSQTLSLGSQKERLLDELTLEGVARYMQSERCRRVICLVGAGISTSAGIPDFRSPSTGLYDNLEKY

SEQ ID NO: 56614 - protein, 147 aa, Homo sapiens
MLVEIETAWSLSGYLLVCFSAGYFIHDTVDIVASGQTRASWEYLVHHVMAMGAFFSGIFWSSFVGGGVLTLLVEVSNIFLTIRMMMKISNAQDHLLYRVNKYVNLVMYFLFRLAPQAYLTHFFLRYVNQRTLGTFLLGILLMLDVMI

SEQ ID NO: 56615 - protein, 84 aa, Homo sapiens
MMDVSGVGFPSKVPWKKMSAEELENQYCPSRWVVRLGAEEALRTYSQIGIEDYLENNLPVVLTILGAWSTCIPPWEASPKSFRS

SEQ ID NO: 56616 - protein, 4234 aa, Homo sapiens
MSEPGGGGGEDGSAGLEVSAVQNVADVSVLQKHLRKLVPLLLEDGGEAPAALEAALEEKSALEQMRKFLSDPQVHTVLVERSTLKEDVGDEGEEEKEFISYNINIDIHYGVKSNSLAFIKRTPVIDADKPVSSQLRVLTLSEDSPYETLHSFISNAVAPFFKSYIRESGKADRDGDKMAPSVEKKIAELEMGLLHLQQNIEIPEISLPIHPMITNVAKQCYERGEKPKVTDFGDKVEDPTFLNQLQSGVNRWIREIQKVTKLDRDPASGTALQEISFWLNLERALYRIQEKRESPEVLLTLDILKHGKRFHATVSFDTDTGLKQALETVNDYNPLMKDFPLNDLLSATELDKIRQALVAIFTHLRKIRNTKYPIQRALRLVEAISRDLSSQLLKVLGTRKLMHVAYEEFEKVMVACFEVFQTWDDEYEKLQVLLRDIVKRKREENLKMVWRINPAHRKLQARLDQMRKFRRQHEQLRAVIVRVLRPQVTAVAQQNQGEVPEPQDMKVAEVLFDAADANAIEEVNLAYENVKEVDGLDVSKEGTEAWEAAMKRYDERIDRVETRITARLRDQLGTAKNANEMFRIFSRFNALFVRPHIRGAIREYQTQLIQRVKDDIESLHDKFKVQYPQSQACKMSHVRDLPPVSGSIIWAKQIDRQLTAYMKRVEDVLGKGWENHVEGQKLKQDGDSFRMKLNTQEIFDDWARKVQQRNLGVSGRIFTIESTRVRGRTGNVLKLKVNFLPEIITLSKEVRNLKWLGFRVPLAIVNKAHQANQLYPFAISLIESVRTYERTCEKVEERNTISLLVAGLKKEVQALIAEGIALVWESYKLDPYVQRLAETVFNFQEKVDDLLIIEEKIDLEVRSLETCMYDHKTFSEILNRVQKAVDDLNLHSYSNLPIWVNKLDMEIERILGVRLQAGLRAWTQVLLGQAEDKAEVDMDTDAPQVSHKPGGEPKIKNVVHELRITNQVIYLNPPIEECRYKLYQEMFAWKMVVLSLPRIQSQRYQVGVHYELTEEEKFYRNALTRMPDGPVALEESYSAVMGIVSEVEQYVKVWLQYQCLWDMQAENIYNRLGEDLNKWQALLVQIRKARGTFDNAETKKEFGPVVIDYGKVQSKVNLKYDSWHKEVLSKFGQMLGSNMTEFHSQISKSRQELEQHSVDTASTSDAVTFITYVQSLKRKIKQFEKQVELYRNGQRLLEKQRFQFPPSWLYIDNIEGEWGAFNDIMRRKDSAIQQQVANLQMKIVQEDRAVESRTTDLLTDWEKTKPVTGNLRPEEALQALTIYEGKFGRLKDDREKCAKAKEALELTDTGLLSGSEERVQVALEELQDLKGVWSELSKVWEQIDQMKEQPWVSVQPRKLRQNLDALLNQLKSFPARLRQYASYEFVQRLLKGYMKINMLVIELKSEALKDRHWKQLMKRLHVNWVVSELTLGQIWDVDLQKNEAIVKDVLLVAQGEMALEEFLKQIREVWNTYELDLVNYQNKCRLIRGWDDLFNKVKEHINSVSAMKLSPYYKVFEEDALSWEDKLNRIMALFDVWIDVQRRWVYLEGIFTGSADIKHLLPVETQRFQSISTEFLALMKKVSKSPLVMDVLNIQGVQRSLERLADLLGKIQKALGEYLERERSSFPRFYFVGDEDLLEIIGNSKNVAKLQKHFKKMFAGVSSIILNEDNSVVLGISSREGEEVMFKTPVSITEHPKINEWLTLVEKEMRVTLAKLLAESVTEVEIFGKATSIDPNTYITWIDKYQAQLVVLSAQIAWSENVETALSSMGGGGDAAPLHSVLSNVEVTLNVLADSVLMEQPPLRRRKLEHLITELVHQRDVTRSLIKSKIDNAKSFEWLSQMRFYFDPKQTDVLQQLSIQMANAKFNYGFEYLGVQDKLVQTPLTDRCYLTMTQALEARLGGSPFGPAGTGKTESVKALGHQLGRFVLVFNCDETFDFQAMGRIFVGLCQVGAWGCFDEFNRLEERMLSAVSQQVQCIQEALREHSNPNYDKTSAPITCELLNKQVKVSPDMAIFITMNPGYAGRSNLPDNLKKLFRSLAMTKPDRQLIAQVMLYSQGFRTAEVLANKIVPFFKLCDEQLSSQSHYDFGLRALKSVLVSAGNVKRERIQKIKREKEERGEAVDEGEIAENLPEQEILIQSVCETMVPKLVAEDIPLLFSLLSDVFPGVQYHRGEMTALREELKKVCQEMYLTYGDGEEVGGMWVEKVLQLYQITQINHGLMMVGPSGSGKSMAWRVLLKALERLEGVEGVAHIIDPKAISKDHLYGTLDPNTREWTDGLFTHVLRKIIDSVRGELQKRQWIVFDGDVDPEWVENLNSVLDDNKLLTLPNGERLSLPPNVRIMFEVQDLKYATLATVSRCGMVWFSEDVLSTDMIFNNFLARLRSIPLDEGEDEAQRRRKGKEDEGEEAASPMLQIQRDAATIMQPYFTSNGLVTKALEHAFQLEHIMDLTRLRCLGSLFSMLHQACRNVAQYNANHPDFPMQIEQLERYIQRYLVYAILWSLSGDSRLKMRAELGEYIRRITTVPLPTAPNIPIIDYEVSISGEWSPWQAKVPQIEVETHKVAAPDVVVPTLDTVRHEALLYTWLAEHKPLVLCGPPGSGKTMTLFSALRALPDMEVVGLNFSSATTPELLLKTFDHYCEYRRTPNGVVLAPVQLGKWLVLFCDEINLPDMDKYGTQRVISFIRQMVEHGGFYRTSDQTWVKLERIQFVGACNPPTDPGRKPLSHRFLRHVPVVYVDYPGPASLTQIYGTFNRAMLRLIPSLRTYAEPLTAAMVEFYTMSQERFTQDTQPHYIYSPREMTRWVRGIFEALRPLETLPVEGLIRIWAHEALRLFQDRLVEDEERRWTDENIDTVALKHFPNIDREKAMSRPILYSNWLSKDYIPVDQEELRDYVKARLKVFYEEELDVPLVLFNEVLDHVLRIDRIFRQPQGHLLLIGVSGAGKTTLSRFVAWMNGLSVYQIKVHRKYTGEDFDEDLRTVLRRSGCKNEKIAFIMDESNVLDSGFLERMNTLLANGEVPGLFEGDEYATLMTQCKEGAQKEGLMLDSHEELYKWFTSQVIRNLHVVFTMNPSSEGLKDRAATSPALFNRCVLNWFGDWSTEALYQVGKEFTSKMDLEKPNYIVPDYMPVVYDKLPQPPSHREAIVNSCVFVHQTLHQANARLAKRGGRTMAITPRHYLDFINHYANLFHEKRSELEEQQMHLNVGLRKIKETVDQVEELRRDLRIKSQELEVKNAAANDKLKKMVKDQQEAEKKKVMSQEIQEQLHKQQEVIADKQMSVKEDLDKVEPAVIEAQNAVKSIKKQHLVEVRSMANPPAAVKLALESICLLLGESTTDWKQIRSIIMRENFIPTIVNFSAEEISDAIREKMKKNYMSNPSYNYEIVNRASLACGPMVKWAIAQLNYADMLKRVEPLRNELQKLEDDAKDNQQKANEVEQMIRDLEASIARYKEEYAVLISEAQAIKADLAAVEAKVNRSTALLKSLSAERERWEKTSETFKNQMSTIAGDCLLSAAFIAYAGYFDQQMRQNLFTTWSHHLQQANIQFRTDIARTEYLSNADERLRWQASSLPADDLCTENAIMLKRFNRYPLIIDPSGQATEFIMNEYKDRKITRTSFLDDAFRKNLESALRFGNPLLVQDVESYDPVLNPVLNREVRRTGGRVLITLGDQDIDLSPSFVIFLSTRDPTVEFPPDLCSRVTFVNFTVTRSSLQSQCLNEVLKAERPDVDEKRSDLLKLQGEFQLRLRQLEKSLLQALNEVKGRILDDDTIITTLENLKREAAEVTRKVEETDIVMQEVETVSQQYLPLSTACSSIYFTMESLKQIHFLYQYSLQFFLDIYHNVLYENPNLKGVTDHTQRLSIITKDLFQVAFNRVARGMLHQDHITFAMLLARIKLKGTVGEPTYDAEFQHFLRGNEIVLSAGSTPRIQGLTVEQAEAVVRLSCLPAFKDLIAKVQADEQFGIWLDSSSPEQTVPYLWSEETPATPIGQAIHRLLLIQAFRPDRLLAMAHMFVSTNLGESFMSIMEQPLDLTHIVGTEVKPNTPVLMCSVPGYDASGHVEDLAAEQNTQITSIAIGSAEGFNQADKAINTAVKSGRWVMLKNVHLAPGWLMQLEKKLHSLQPHACFRLFLTMEINPKVPVNLLRAGRIFVFEPPPGVKANMLRTFSSIPVSRICKSPNERARLYFLLAWFHAIIQERLRYAPLGWSKKYEFGESDLRSACDTVDTWLDDTAKAEHLTG

SEQ ID NO: 56617 - protein, 79 aa, Homo sapiens
MEAPLVSLDEEFEDLRPSCSEDPEEKPQCFYGSSPHHLEDPSLSELENFSSEIISFKSMEDLVNEFDEKLNVCFRNYNA

SEQ ID NO: 56618 - protein, 337 aa, Homo sapiens
TASGRGSASEHQDCNGKSASGRLARALRPDDPPLDGDDADDEGNLSKGERVRAWIRARLPACCLERDSWSAYIFPPQSRFRLLCHRIITHKMFDHVVLVIIFLNCITIAMERPKIDPHSAERIFLTLSNYIFTAVFLAEMTVKVVALGWCFGEQAYLRSSWNVLDGLLVLISVIDILVSMVSDSGTKILGMLRVLRLLRTLRPLRVISRAQGLKLVVETLMSSLKPIGNIVVICCAFFIIFGILGVQLFKGKFFVCQGEDTRNITNKSDCAEASYRWVRHKYNFDNLGQALMSLFVLASKDGWVDIMYDGLDAVGVDQQVGLRWAGSICGLRSLSMG

SEQ ID NO: 56619 - protein, 420 aa, Homo sapiens [sequence omitted]

SEQ ID NO: 56620 - protein, 74 aa, Homo sapiens
MASFPPRVNEKEIVRLRTIGELLAPAAPFDKKCGRENWTVAFAPDGSYFAWSQGHRTVKLVPWSQCLQNLKTPP

SEQ ID NO: 56621 - protein, 577 aa, Homo sapiens
MTTSSIRRQMKNIVNNYSEAEIKVREATSNDPWGPSSSLMTEIADLTYNVVAFSEIMSMVWKRLNDHGKNWRHVYKALTLLDYLIKTGSERVAQQCRENIFAIQTLKDFQYIDRDGKDQGINVREKSKQLVALLKDEERLKAERAQALKTKERMAQVATGMGSNQITFGRGSSQPNLSTSHSEQEYGKAGGSPASYHGSTSPRVSSELEQARPQTSGEEELQLQLALAMSREVAEQEERLRRGDDLRLQMALEESRRDTVKIPKKKETTLLDLMDALPSSGPAAQKAEPWGPSASTNQTNPWGGPAAPASTSDPWPSFGTKPAASIDPWGVPTGATVQSVPKNSDPWAASQQPASSAGKRASDAWGAVSTTKPVSVSGSFELFSNLNGTIKDDFSEFDNLRTSKKTAESVTSLPSQNNGTTSPDPFESQPLTVASSKPSSARKTPESFLGPNAALVNLDSLVTRPAPPAQSLNPFLAPGAPATSAPVNPFQVNQPQPLTLNQLRGSPVLGTSTSFGPGPGVESMAVASMTSAAPQPALGATGSSLTPLGPAMMNMVGSVGIPPSAAQATGTTNPFLL

SEQ ID NO: 56622 - protein, 174 aa, Homo sapiens
MAKYNTGGNPTEDVSVNSRPFRVTGPNSSSGIQARKNLFNNQGNASPPAGPSNVPKFGSPKPPVAVKPSSEEKPDKEPKPPFLKPTGAGQRFGTPASLTTRDPEAKVGFLKPVGPKPINLPKEDSKPTFPWPPGNKPSLHSVNQDHDLKPLGPKSGPTPPTSENEQKQAFPKLT

SEQ ID NO: 56623 - protein, 606 aa, Homo sapiens
MTSKRKPCQTQLRRSISEQLRDSTARAWDLLWKNVRERRLAEIEAKEACDWLRAAGFPQYAQLYEDSQFPINIVAVKNDHDFLEKDLVEPLCRRLNTLNKCASMKLDVNFQRKKGDDSDEEDLCISNKWTFQRTSRRWSRVDDLYTLLPRGDRNGSPGGTGMRNTTSSESVLTDLSEPEVCSIHSESSGGSDSRSQPGQCCTDNPVMLDAPLVSSSLPQPPRDVLNHPFHPKNEKPTRARAKSFLKRMETLRGKGAHGRHKGSGRTGGLVISGPMLQQEPESFKAMQCIQIPNGDLQNSPPPACRKGLPCSGKSSGESSPSEHSSSGVSTPCLKERKCHEANKRGGMYLEDLDVLAGTALPDAGDQSRMHEFHSQENLVVHIPKDHKPGTFPKALSIESLSPTDSSNGVNWRTGSISLGREQVPGAREPRLMASCHRASRVSIYDNVPGSHLYASTGDLLDLEKDDLFPHLDDILQHVNGLQEVVDDWSKDVLPELQTHDTLVGEPGLSTFPSPNQITLDFEGNSVSEGRTTPSDVERDVTSLNESEPPGVRDRRDSGVGASLTRPNRRLRWNSFQLSHQPRPAPASPHISSQTASQLSLLQRFSL

SEQ ID NO: 56624 - protein, 1899 aa, Homo sapiens
MASGLGSPSPCSAGSEEEDMDALLNNSLPPPHPENEEDPEEDLSETETPKLKKKKKPKKPRDPKIPKSKRQKKERMLLCRQLGDSSGEGPEFVEEEEEVALRSDSEGSDYTPGKKKKKKLGPKKEKKSKSKRKEEEEEEDDDDDSKEPKSSAQLLEDWGMEDIDHVFSEEDYRTLTNYKAFSQFVRPLIAAKNPKIAVSKMMMVLGAKWREFSTNNPFKGSSGASVAAAAAAAVAVVESMVTATEVAPPPPPVEVPIRKAKTKEGKGPNARRKPKGSPRVPDAKKPKPKKVAPLKIKLGGFGSKRKRSSSEDDDLDVESDFDDASINSYSVSDGSTSRSSRSRKKLRTTKKKKKDHQDYCEVCQQGGEIILCDTCPRAYHMVCLDPDMEKAPEGKWSCPHCEKEGIQWEAKEDNSEGEEILEEVGGDLEEEDDHHMEFCRVCKDGGELLCCDTCPSSYHIHCLNPPLPEIPNGEWLCPRCTCPALKGKVQKILIWKWGQPPSPTPVPRPPDADPNTPSPKPLEGRPERQFFVKWQGMSYWHCSWVSELQLELHCQVMFRNYQRKNDMDEPPSGDFGGDEEKSRKRKNKDPKFAEMEERFYRYGIKPEWMMIHRILNHSVDKKGHVHYLIKWRDLPYDQASWESEDVEIQDYDLFKQSYWNHRELMRGEEGRPGKKLKKVKLRKLERPPETPTVDPTVKYERQPEYLDATGGTLHPYQMEGLNWLRFSWAQGTDTILADEMGLGKTVQTAVFLYSLYKEGHSKGPFLVSAPLSTIINWEREFEMWAPDMYVVTYVGDKDSRAIIRENEFSFEDNAIRGGKKASRMKKEASVKFHVLLTSYELITIDMAILGSIDWACLIVDEAHRLKNNQSKFFRVLNGYSLQHKLLLTGTPLQNNLEELFHLLNFLTPERFHNLEGFLEEFADIAKEDQIKKLHDMLGPHMLRRLKADVFKNMPSKTELIVRVELSPMQKKYYKYILTRNFEALNARGGGNQVSLLNVVMDLKKCCNHPYLFPVAAMEAPKMPNGMYDGSALIRASGKLLLLQKMLKNLKEGGHRVLIFSQMTKMLDLLEDFLEHEGYKYERIDGGITGNMRQEAIDRFNAPGAQQFCFLLSTRAGGLGINLATADTVIIYDSDWNPHNDIQAFSRAHRIGQNKKVMIYRFVTRASVEERITQVAKKKMMLTHLVVRPGLGSKTGSMSKQELDDILKFGTEELFKDEATDGGGDNKEGEDSSVIHYDDKAIERLLDRNQDETEDTELQGMNEYLSSFKVAQYVVREEEMGEEEEVEREIIKQEESVDPDYWEKLLRHHYEQQQEDLARNLGKGKRIRKQVNYNDGSQEDRDWQDDQSDNQSDYSVASEEGDEDFDERSEAPRRPSRKGLRNDKDKPLPPLLARVGGNIEVLGFNARQRKAFLNAIMRYGMPPQDAFTTQWLVRDLRGKSEKEFKAYVSLFMRHLCEPGADGAETFADGVPREGLSRQHVLTRIGVMSLIRKKVQEFEHVNGRWSMPELAEVEENKKMSQPGSPSPKTPTPSTPGDTQPNTPAPVPPAEDGIKIEENSLKEEESIEGEKEVKSTAPETAIECTQAPAPASEDEKVVVEPPEGEEKVEKAEVKERTEEPMETEPKGAADVEKVEEKSAIDLTPIVVEDKEEKKEEEEKKEVMLQNGETPKDLNDEKQKKNIKQRFMFNIADGGFTELHSLWQNEERAATVTKKTYEIWHRRHDYWLLAGIINHGYARWQDIQNDPRYAILNEPFKGEMNRGNFLEIKNKFLARRFKLLEQALVIEEQLRRAAYLNMSEDPSHPSMALNTRFAEVECLAESHQHLSKESMAGNKPANAVLHKVLKQLEELLSDMKADVTRLPATIARIPPVAVRLQMSERNILSRLANRAPEPTPQQVAQQQ

SEQ ID NO: 56625 - protein, 1279 aa, Homo sapiens
MVTPRLERMAENSRFKKKVHFGETRADRSKKLFRHYTVGSYDSFDTSSDCIIEEKTVVLQKKDNEGFGFVLRGAKADTPIEEFTPTPAFPALQYLESVDEGGVAWQAGLRTGDFLIEVNNENVVKVGHRQVVNMIRQGGNHLVLKVVTVTRNLDPDDTARKKAPPPPKRAPTTALTLRSKSMTSELEELVDKASVRKKKDKPEEIVPASKPSRAAENMAVEPRVATIKQRPSSRCFPAGSDMNSVYERQGIAVMTPTVPGSPKAPFLGIPRGTMRRQKSIDSRIFLSGITEEERQFLAPPMLKFTRSLSMPDTSEDIPPPPQSVPPSPPPPSPTTYNCPKSPTPRVYGTIKPAFNQNSAAKVSPATRSDTVATMMREKGMYFRRELDRYSLDSEDLYSRNAGPQANFRNKRGQMPENPYSEVGKIASKAVYVPAKPARRKGMLVKQSNVEDSPEKTCSIPIPTIIVKEPSTSSSGKSSQGSSMEIDPQAPEPPSQLRPDESLTVSSPFAAAIAGAVRDREKRLEARRNSPAFLSTDLGDEDVGLGPPAPRTRPSMFPEEGDFADEDSAEQLSSPMPSATPREPENHFVGGAEASAPGEAGRPLNSTSKAQGPESSPAVPSASSGTAGPGNYVHPLTGRLLDPSSPLALALSARDRAMKESQQGPKGEAPKADLNKPLYIDTKMRPSLDAGFPTVTRQNTRGPLRRQETENKYETDLGRDRKGDDKKNMLIDIMDTSQQKSAGLLMVHTVDATKLDNALQEEDEKAEVEMKPDSSPSEVPEGVSETEGALQISAAPEPTTVPGRTIVAVGSMEEAVILPFRIPPPPLASVDLDEDFIFTEPLPPPLEFANSFDIPDDRAASVPALSDLVKQKKSDTPQSPSLNSSQPTNSADSKKPASLSNCLPASFLPPPESFDAVADSGIEEVDSRSSSDHHLETTSTISTVSSISTLSSEGGENVDTCTVYADGQAFMVDKPPVPPKPKMKPIIHKSNALYQDALVEEDVDSFVIPPPAPPPPPGSAQPGMAKVLQPRTSKLWGDVTEIKSPILSGPKANVISELNSILQQMNREKLAKPGEGLDSPMGAKSASLAPRSPEIMSTISGTRSTTVTFTVRPGTSQPITLQSRPPDYESRTSGTRRAPSPVVSPTEMNKETLPAPLSAATASPSPALSDVFSLPSQPPSGDLFGLNPAGRSRSPSPSILQQPISNKPFTTKPVHLWTKPDVADWLESLNLGEHKEAFMDNEIDGSHLPNLQKEDLIDLGVTRVGHRMNIERALKQLLDR

SEQ ID NO: 56626 - protein, 162 aa, Homo sapiens
  MOD_RES (1)..(1): Any amino acid
XNAAPTPPPAVSEDQPTPSPQQLASSKPMNRPSAANPCSPVQFSSTPLAGLAPKRRAGDPGEMPQSPTGLGQPKRRGRPPKMCSGWWWIRDPEMLDAMLKALHPRGIREKALHKHLNKHRDFLQEVCLRPSADPIFEPRQLPAFQEGIMSWSPKEKTYETDL

SEQ ID NO: 56627 - protein, 922 aa, Homo sapiens
MSTMRLLTLALLFSCSVARAACDPKIVNIGAVLSTRKHEQMFREAVNQANKRHGSWKIQLNATSVTHKPNAIQMALSVCEDLISSQVYAILVSHPPTPNDHFTPTPVSYTAGFYRIPVLGLTTRMSIYSDKSIHLSFLRTVPPYSHQSSVWFEMMRVYSWNHIILLVSDDHEGRAAQKRLETLLEERESKSKKRNYENLDQLSYDNKRGPKAEKVLQFDPGTKNVTALLMEAKELEARVIILSASEDDAATVYRAAAMLNMTGSGYVWLVGEREISGNALRYAPDGILGLQLINGKNESAHISDAVGVVAQAVHELLEKENITDPPRGCVGNTNIWKTGPLFKRVLMSSKYADGVTGRVEFNEDGDRKFANYSIMNLQNRKLVQVGIYNGTHVIPNDRKIIWPGGETEKPRGYQMSTRLKIVTIHQEPFVYVKPTLSDGTCKEEFTVNGDPVKKVICTGPNDTSPGSPRHTVPQCCYGFCIDLLIKLARTMNFTYEVHLVADGKFGTQERVNNSNKKEWNGMMGELLSGQADMIVAPLTINNERAQYIEFSKPFKYQGLTILVKKEIPRSTLDSFMQPFQSTLWLLVGLSVHVVAVMLYLLDRFSPFGRFKVNSEEEEEDALTLSSAMWFSWGVLLNSGIGEGAPRSFSARILGMVWAGFAMIIVASYTANLAAFLVLDRPEERITGINDPRLRNPSDKFIYATVKQSSVDIYFRRQVELSTMYRHMEKHNYESAAEAIQAVRDNKLHAFIWDSAVLEFEASQKCDLVTTGELFFRSGFGIGMRKDSPWKQNVSLSILKSHENGFMEDLDKTWVRYQECDSRSNAPATLTFENMAGVFMLVAGGIVAGIFLIFIEIAYKRHKDARRKQMQLAFAAVNVWRKNLQSTGGGRGALQNQKDTVLPRRAIEREEGQLQLCSRHRES

SEQ ID NO: 56628 - protein, 208 aa, Homo sapiens
MMPQLQFKDAFWCRDFTAHTGYEVLLQRLLDGRKMCKDMEELLRQRAQAEERYGKELVQIARKAGGQTEINSLRASFDSLKQQMENVGSSHIQLALTLREELRSLEEFRERQKEQRKKYEAVMDRVQKSKLSLYKKAMESKKTYEQKCRDADDAEQAFERISANGHQKQSQNKARQCKDSATEAERVYRQSIAQLEKVRAEWEQEHRT

SEQ ID NO: 56629 - protein, 349 aa, Homo sapiens
MKVLSEGQLKLCVVQPVHLTSWLLIFFILKSISCLKPARLPIYQRKPFIAAWNAPTDQCLIKYNLRLNLKMFPVIGSPLAKARGQNVTIFYVNRLGYYPWYTSQGVPINGGLPQNISLQVHLEKADQDINYYIPAEDFSGLAVIDWEYWRPQWARNWNSKDVYRQKSRKLISDMGKNVSATDIEYLAKVTFEESAKAFMKETIKLGIKSRPKGLWGYYLYPDCHNYNVYAPNYSGSCPEDEVLRNNELSWLWNSSAALYPSIGVWKSLGDSENILRFSKFRVHESMRISTMTSHDYALPVFVYTRLGYRDEPLFFLSKQDLVSTIGESAALGAAGIVIWGDMNLTASKV

SEQ ID NO: 56630 - protein, 71 aa, Homo sapiens
MNPNCARCGKIVYPTEKVNCLDKFWHKACFHCETCKMTLNMKNYKGYEKKPYCNACATRRSLRRTRAKVSA

SEQ ID NO: 56631 - protein, 83 aa, Homo sapiens
MEENLISMREDHSFHVRYRMEASCLELALEGERLCKSGDCRAGVSFFEAAVQVGTEDLKTLSAIYSQLGNAYFYLHDYAKALE

SEQ ID NO: 56632 - protein, 339 aa, Homo sapiens
MVTELLGGDMVNQSFICDPDDETFIKNIIIQDCMWSGFSAAAKLVSEKLASYQAARKDSGSPNPARGHSVCSTSSLYLQDLSAAASECIDPSVVFPYPLNDSSSPKSCASQDSSAFSPSSDSLLSSTESSPQGSPEPLVLHEETPPTTSSDSEEEQEDEEEIDVVSVEKRQAPGKRSESGSPSAGGHSKPPHSPLVLKRCHVSTHQHNYAAPPSTRKDYPAAKRVKLDSVRVLRQISNNRKCTSPRSSDTEENVKRRTHNVLERQRRNELKRSFFALRDQIPELENNEKAPKVVILKKATAYILSVQAEEQKLISEEDLLRKRREQLKHKLEQLRNSCA

SEQ ID NO: 56633 - protein, 207 aa, Homo sapiens
LRRPRHLTSSRASGASRLQHVGHDQELAVRKRRDVALAGPKQRGQEVAYEERACEGGKFATVEVTDKPVDEALREAMPKVAKYAGGTNDKGIGMGMTVPISFAVFPNEDGSLQKKLKVWFRIPNQFQSDPPAPSDKSVKIEEREGITVYSMQFGGYAKEADYVAQATRLRAALEGTATYRGDIYFCTGYDPPMKPYGRRNEIWLLKT

SEQ ID NO: 56634 - protein, 52 aa, Homo sapiens
MAGTVLGVGAGVFILALLWVAVLLLCVLLSRASGAARFSVIFLFFGAVIITS

SEQ ID NO: 56635 - protein, 60 aa, Homo sapiens
  MOD_RES (1)..(1): Any amino acid
XRSGSGNFGGGRGGGGSYNDFGNYNNQSSNFGPMKGGNFGGRSSGPYGGGGQYFAKPRNQ

SEQ ID NO: 56636 - protein, 883 aa, Homo sapiens
MHKDEFHLKFFMCVIQSRQLVRTPQRTAGEASTSSMLIPKPPPKTDILKSLDTMDDPDTVGSIPVFKTECAEVEIQVSKRKRAVVKARGDPTVETMKQREEWIMTHEEHHAAKTLGIGKAIAVLTSGGDAQGMNAAVRAVVRVGIFTGARVFFVHEGYQGLVDGGDHIKEATWESVSMMLQLGGTVIGSARCKDFREREGRLRAAYNLVKRGITNLCVIGGDGSLTGADTFRSEWSDLLSDLQKAGKITDEEATKSSYLNIVGLVGSIDNDFCGTDMTIGTDSALHRIMEIVDAITTTAQSHQRTFVLEVMGRHCGYLALVTSLSCGADWVFIPECPPDDDWEEHLCRRLSETRTRGSRLNIIIVAEGAIDKNGKPITSEDIKNLVVKRLGYDTRVTVLGHVQRGGTPSAFDRILGSRMGVEAVMALLEGTPDTPACVVSLSGNQAVRLPLMECVQVTKDVTKAMDEKKFDEALKLRGRSFMNNWEVYKLLAHVRPPVSKSGSHTVAVMNVGAPAAGMNAAVRSTVRIGLIQGNRVLVVHDGFEGLAKGQIEEAGWSYVGGWTGQGGSKLGTKRTLPKKSFEQISANITKFNIQGLVIIGGFEAYTGGLELMEGRKQFDELCIPFVVIPATVSNNVPGSDFSVGADTALNTICTTCDRIKQSAAGTKRRVFIIETMGGYCGYLATMAGLAAGADAAYIFEEPFTIRDLQANVEHLVQKMKTTVKRGLVLRNEKCNENYTTDFIFNLYSEEGKGIFDSRKNVLGHMQQGGSPTPFDRNFATKMGAKAMNWMSGKIKESYRNGRIFANTPDSGCVLGMRKRALVFQPVAELKDQTDFEHRIPKEQWWLKLRPILKILAKYEIDLDTSDHAHLEHITRKRSGEAAV

SEQ ID NO: 56637 - protein, 238 aa, Homo sapiens
MARLCRRVPCTLLLGLAVVLLKARLVPAAARAELSRSDLSLIQQQQQQQQQQQQQQKQLEEAEEERTEVPGATSTLTVPVSVFMLKVQVNDIISRQYLSQAVVEVFVNYTKTNSTVTKSNGAVLIKVPYKLGLSLTIIAYKDGYVLTPLPWKTRRMPIYSSVTLSLFPQSQANIWLFEDTVLITGKLADAKSQPSVQFSKALIKLPDNHHISNVTGYLTVLQQFLKVDNFLHTTGITQ

SEQ ID NO: 56638 - protein, 181 aa, Homo sapiens
  MOD_RES (1)..(1): Any amino acid
XHLLAEKIYKIQKELEEKRRSRLHKQGILGNQPALPAPGAQPPVIPQAQPVRPPNGPLSLPVNRMQVSQGMNSFNPMSLGNVQLPQAPMGPRAASPMNHSVQMNSMGSVPGMAISPSRMPQPPNMMGAHTNNMMAQAPAQSQFLPQNQFPSSSGAMSVGMGQPPAQTGVSQVLCPTGTVAP

SEQ ID NO: 56639 - protein, 84 aa, Homo sapiens
MLKKKQSNGYYHCESSIVIGEKNGGEPDDAELVRLSKRLVENAVLKAVQQYLEETQNKNKPGEGSSVKTEAADQNGNDNENNRK

SEQ ID NO: 56640 - protein, 178 aa, Homo sapiens
MPTEVALLHVSQSPTKAATRRPAHPECGAPIPTQPAAPTEERRGDPAPPSPQPARSPPLRQCLRQGLRVLLATPKERLVPRRVAAALPPLCAGKRQSLPEPRPEATRGSPGRGAGPGVRFPRRSRAVPRGCGTVGRAAAARSAHLQFFTLLAGPPPLAGREPGTSAGTKGIFAYMNYR

SEQ ID NO: 56641 - protein, 263 aa, Homo sapiens
MAALKALVSGCGRLLRGLLAGPAATSWSRLPARGFREVVETQEGKTTIIEGRITATPKESPNPPNPSGQCPICRWNLKHKYNYDDVLLLSQFIRPHGGMLPRKITGLCQEEHRKIEECVKMAHRAGRRPWGPRGAEGCRHSLPTQLPHVSAPPGRKVDIRSVNYTHHPMPTFPLPWAFPLAPSELQRELQRLSPLPRHSGLLPNHRPRLPEGVVPKSKPQLNRYLTRWAPGSVKPIYKKGPRWNRVRMPVGSPLLRDNVCYSR

SEQ ID NO: 56642 - protein, 565 aa, Homo sapiens
MFYFRGCGRWVAVSFTKQQFPLARLSSDSAAPRTPHFDVIVIGGGHAGTEAATAAARCGSRTLLLTHRVDTIGQMSCNPSFGGIGKGHLMREVDALDGLCSRICDQSGVHYKVLNRRKGPAVWGLRAQIDRKLYKQNMQKEILNTPLLTVQEGAVEDLILTEPEPEHTGKCRVSGVVLVDGSTVYAESVILTTGTFLRGMIVIGLETHPAGRLGDQPSIGLAQTLEKLGFVVGRLKTGTPPRIAKESINFSILNKHIPDNPSIPFSFTNETVWIKPEDQLPCYLTHTNPRVDEIVLKNLHLNSHVKETTRGPRYCPSIESKVLRFPNRLHQVWLEPEGMDSDLIYPQGLSMTLPAELQEKMITCIRGLEKAKVIQPGYGVQYDYLDPRQITPSLETHLVQRLFFAGQINGTTGYEEAAAQGVIAGINASLRVSRKPPFVVSRTEGYIGVLIDDLTTLGTSEPYRMFTSRVEFRLSLRPDNADSRLTLRGYKDAGCVSQQRYERACWMKSSLEEGISVLKSIEFLSSKWKKLIPEASISTSRSLPVRRGGRHLNPSYLGGRGRRIV

SEQ ID NO: 56643 - protein, 177 aa, Homo sapiens
  MOD_RES (1)..(1): Any amino acid
XNNVKYGWVVKSRTSFSKISSIHLCGRRYRFEGEGDIQRFQRDFVSRLWLTYRRDFPPLPGGCLTSDCGWGCMLRSGQMMLAQGLLLHFLPRVYKADVARLVARPDPTAEWKSVVILVPVRLGGETLNPVYVPCVKELLRCELCLGIMGGKPRHSLYFIGYQGRPTPSSLLPPPTAP

SEQ ID NO: 56644 - protein, 170 aa, Homo sapiens
MKMFESADSTATRSGQDLWAEICSCLPNPEQEDGANNAFSDSFVDSCPEGEGQREVADFAVQPAVKPWAPLQDSEVYLASLEKKLRRIKGLNQEVTSKDMLRTLAQAKKECWDRFLQEKLASEFFVDGLDSDESTLEHFKRWLQPDKVAVSTEEVQYLIPPESQVEKPVA

SEQ ID NO: 56645 - protein, 77 aa, Homo sapiens
MTSALENYINRILKLAAAGLSGTVAVITSDGRMIVGTLKGFDQTINLILDESHERVFSSSQGVEQVVLGLYIVRGDN

SEQ ID NO: 56646 - protein, 50 aa, Homo sapiens
  MOD_RES (1)..(1): Any amino acid
XMTYEKMSRALRHYYKLNIIRKEPGQRLLFRFLFFLPRGSGLFLLLLGLG

SEQ ID NO: 56647 - protein, 150 aa, Homo sapiens
DMDMADYSAALDPAYTTLEFENVQVLTMGNDTSPSEGTNLNAPNSLGVSALCAICGDRATGKHYGASSCDGCKGFFRRSVRKNHMYSCRFSRQCVVDKDKRNQCRYCRLKKCFRAGMKKEGEPRPSPPHHHCPTCTHSSPTVIYNCSHTL

SEQ ID NO: 56648 - protein, 745 aa, Homo sapiens
MASVAWAVLKVLLLLPTQTWSPVGAGNPPDCDAPLASALPRSSFSSSSELSSSHGPGFSRLNRRDGAGGWTPLVSNKYQWLQIDLGERMEVTAVATQGGYGSSDWVTSYLLMFSDGGRNWKQYRREESIWGFPGNTNADSVVHYRLQPPFEARFLRFLPLAWNPRGRIGMRIEVYGCAYKSEVVYFDGQSALLYRLDKKPLKPIRDVISLKFKAMQSNGILLHREGQHGNHITLELIKGKLVFFLNSGNAKLPSTIAPVTLTLGSLLDDQHWHSVLIELLDTQVNFTVDKHTHHFQAKGDSSYLDLNFEISFGGIPTPGRSRAFRRKSFHGCLENLYYNGVDVTELAKKHKPQILMMGNVSFSCPQPQTVPVTFLSSRSYLALPGNSGEDKVSVTFQFRTWNRAGHLLFGELRRGSGSFVLFLKDGKLKLSLFQPGQSPRNVTAGAGLNDGQWHSVSFSAKWSHMNVVVDDDTAVQPLVAVLIDSGDTYYFGGCLDNSSGSGCKSPLGGFQGCLRLITIGDKAVDPILVQQGALGSFRDLQIDSCGITDRCLPSYCEHGGECSQSWDTFSCDCLGTGYTGETCHSSLYEQSCEAHKHRGNPSGLYYIDADGSGPLGPFLVYCNMTDAAWTVVQHGGPDAVTLRGAPSGHPRSAVSFAYAAGAGQLRSAVNLAERCEQRLALRCGTARRPDSRDGTPLSWWVGRTNETHTSWGGSLPDAQKCTCGLEGNCIDSQYYCNCDAGRNEW

SEQ ID NO: 56649 - protein, 56 aa, Homo sapiens
MLASAPRLNSADRPMKTSVLRQRKGSVRKQHLLSWAWQQGRGQVVEILQSEKQTER

SEQ ID NO: 56650 - protein, 224 aa, Homo sapiens
QLKQQRDKLRQYQKRIAQQLERERALARQLLRDGRKERAKLLLKKKRYQEQLLDRTENQISSLEAMVQSIEFTQIEMKVMEGLQFGNECLNKMHQVMSIEEVERILDETQEAVEYQRQIDELLAGSFTQEDEDAILEELSAITQEQIELPEVPSEPLPEKIPGISMFDSFEWLEFAGEKWILEGNKTECSQAFLGRGQALLPGCLAWGRACLALGLGLGFPGVR

SEQ ID NO: 56651 - protein, 169 aa, Homo sapiens
RLKKMPQSMPEYALTRNYLELMVELPWNKSTTDRLDIRAARILLDNDHYAMEKLKKRVLEYLAVRQLKNNLKGPILCFVGPPGVGKTSVGRSVAKTLGREFHRIALGGVCDQSDIRGHRRTYVGSMPGRIINGLKTVGVNNPVFLLDEVDKLGKSLQGDPAAALLEFFL

SEQ ID NO: 56652 - protein, 3837 aa, Homo sapiens
MARYQAAVSRGDCRSFSANMMEESEMCAVPGGLAKVKKQFEDEITSSRNTFAQYQYQHQNRSEQEAIHSSQVGTSRSSQEMARNEQEGSKVQKIDVHGTEMVSHLEKHTEEVNQASQFHQYVQETVIDTPEDEEIPKVSTKLLKEQFEKSAQEKILYSDKEMTTPAKQIKTESEYEETFKPSSVVSTSSTSCVSTSQRKETSTTRYSDHSVTSSTLAQINATSSGMTEEFPPPPPDVLQTSVDVTAFSQSPELPSPPRRLPVPKDVYSKQRNLYELNRLYKHIHPELRKNLEKDYISEVSEIVSSQMNSGSSVSADVQQARYVFENTNDSSQKDLNSEREYLEWDEILKGEVQSIRWIFENQPLDSINNGSPDEGDISRGIADQEIIAGGDVKYTTWMFETQPIDTLGAYSSDTVENAEKIPELARGDVCTARWMFETRPLDSMNKMHQSQEESAVTISKDITGGDVKTVRYMFETQHLDQLGQLHSVDEVHLLQLRSELKEIKGNVKRSIKCFETQPLYVIRDGSGQMLEIKTVHREDVEKGDVRTARWMFETQPLDTINKDITEIKVVRGISMEENVKGGVSKAKWLFETQPLEKIKESEEVIIEKEKIIGTDVSRKCWMFETQPLDILKEVPDADSLQREEIIGGDVQTTKHLFETLPIEALKDSPDIGKLQKITASEEEKGDVRHQKWIFETQPLEDIRKDKKEYTRTVKLEEVDRGDVKNYTHIFESNNLIKFDASHKIEVEGVTRGAVELNKSLFETTPLYAIQDPLGKYHQVKTVQQEEIVRGDVRSCRWLFETRPIDQFDESIHKFQIIRGISAQEIQTGNVKSAKWLFETQPLDSIKYFSDVEETESKTEQTRDIVKGDVKTCKWLFETQPMESLYEKVSLMTSSEEIHKGDVKTCTWLFETQPLDTIKDDSETAVKLQTVKQEEIQGGDVRTACFLFETENLDSIQGEEVKEIKPVEMDIQAGDVSSMRYKFENQSLDSISSSSEEVLKKIKTLKTEDIQKGNVLNCRWLFENQPIDKIKESQEGDECVKTVTDIQGGDVRKGCFIFETFSLDEIKEESDYISTKKTITEEVIQGDVKSYRMLFETQPLYAIQDREGSYHEVTTVKKEEVIHGDVRGTRWLFETKPLDSINKSETVYVIKSVTQEDIQKGDVSSVRYRFETQPLDQISEESHNIMPSIDHIQGGNVKTSRQFFESENFDKNNYIRTVSVNEIQKGNVKTSTWLFETHTMDELRGEGLEYENIKTVTQEDVQKGDVKQAVWLFENRTFDSIMEAHKGITKMTKEEIPPSDVKTTTWLFETTPLHEFNETRVEKIEIIGKSIKETLEDLYSQKVIQAPGIIIEADEIGDVRMAKYKLMNQASPEIQKEEIIRADLRNIMVNLLSKRDCTEREILISEEEKGNVNLTKTQLLNRSTEFHAEKEEIVKGDVQQAIKNLFSEERSVKKGILIQEDEKGDINMTIYCLLHENDGDTIEREEVIGGDVKRTIHNLLSSTSNNKISERAKIDASERGNVQFFTTCIEAGALDYLKQLHTESNETLTAKKQEGEKEIIGGDVEGTKLLLKKRQSLVERTVSETDIIPGDVHNTVKVFMTEPQSTFGKIPKEEIIKGDLTSTLNSLSQAVNQKTVTKTEEIIKGNMLATLKSLKESSHRWKESKQPDAIPGDIEKAIECLEKATNTKTEILKKELLKDDLETSLRSLKEAQRSFKEVHKEGVIKKDAKAVMAGSSGEQKTDIHQVAVQRNKNSLLQPKPGPFEPAAKWQGGADTLSQTMGKSCHGNLVEERTEVNLPKAPKGTVKIVIDREQNNDALEKSLRRLSNSHHKSNVLESGDKTGVWTDTTGEQHLRDEYMSRQLTSTVSVKNNLTTKESDRAVRELKKDDVFNSIQSAGKTVGKQQTYELRNDHQKMEGFHIKSPKKTKNIKILTDTQSSKPSPTQHPVSMPVGGTYDLSGDFQKQTLLKQETKYSNKDIKKKNINLQPMWQLLPVEQDTSNVTEMKVSEKSHNTFKATNKKRETDVHLKSQDFLMKTNTSTGLKMAMERSLNPINFNPENNVKESECPLPPPSPPPPPPSNASSEIEFPLPPPPPLMMFPEKNGFLPSLSTEKIKAEFESFPGLPLPPPPVDEKSERESSSMFLPPPPPPTPSQKPAHLLSSSAPEKHSGDFMQQYSQKEASNSQNSQAKIITGKTGVLPPPTLPKPKLPKHIKDNKNDFSPKVELATSLSDMECKITTSKDQKKVMVMTSSEHTETKQNVISKSLDERKQLSIDSANCLSHTVPGTSAPRKKQIAPLIKSHSFPESSGQQNPKPYMRKFKTPLMIAEEKYRQQKEEIEKQKQESSYYNIVKTQSQNQHITEVEKEMPLQKTNEEVSLSGIDSECTVVQPSPGSQSNARILGVCSDNQLSTTSPETVAAKRLHHVLAASEDKDKMKKEVLQSSRDIMQSKSACEIKQSHQECSTQQTQQKKYLEQLHLPQSKPISPNFKVKTIKLPTLDHTLNETDHSYESHKQQSEIDVQTFTKKQYLKTKKTEASTECSHKQSLAERHYQLPKKEKRVTVQLPTESIQKNQEDKLKMVPRKQREFSGSDRGKLPGSEEKNQGPSMIGRKEERLITERKHEHLKNKSAPKVVKQKVIDAHLDSQTQNFQQTQIQTAESKAEHKKLPQPYNSLQEEKCLEVKGIQEKQVFSNTKDSKQEITQNKSFFSSVKESQRDDGKGALNIVEFLRKREELQQILSRVKQFEAEPNKSGLKTFQTLLNTIPGWLISEDKREYAVHIAMENNLEKVKEEITHIKTQAEDMLVSYENIIQTAMMSSKTGKPGNKPTSLDETSSKVSNVHVSNNKNSEQKENKIAKEKTVQHQVAAHHEATVRSHVKTHQEIKLDDSNIPPPSLKTRPPSPTFITIESTARRTENPTKNELSQSPKKDSYVEPPPRRPMSQKSEIHRANTSPSPPRSRSEQLVRLKDTTAKLSKGAIPCPAATPVPIVEKRSEIIMSPATLRRQIKIETRGRDSPPTITIPVNINHAASGSFRESVDAQEEIRKVEKRATYVHKDGLNSTDHMVPDTESYDAVEIIRKVAVPPRLSEHTQRYEAANRTVQMAENFVNDPENEINRWFREFEHGPVSEAKSNRRVYAKGETNHNIQQESRTFCKEEFGLTSLGNTSFTDFSCKHPRELREKIPVKQPRICSETRSLSEHFSGMDAFESQIVESKMKTSSSHSSEAGKSGCDFKHAPPTYEDVIAGHILDISDSPKEVRKNFQKTWQESGRVFKGLGYATADASATEMRTTFQEESAFISDKEICILCQKTVYPMECLVADKQNFHKSCFRCHHCNSKLSLGNYASLHGQIYCKPHFKQLFKSKGNYDEGFGHKQHKDRWNCKNQSRSVDFIPNEEPNMCKNIAENTLVPGDRNEHLDAGNSEGQRNDLRKLGERGKLKVIWPPSKEIPKKTLPFEEELKMSKPKWPPEMTTLLSPEFKSESLLEDVRTPENKGQRQDHFPFLQPYLQSTHVCQKEDVIGIKEMKMPEGRKDEKKEGRKNVQDRPSEAEDTKSNRKSAMDLNDNNNVIVQSAEKEKNEKTNQTNGAEVLQVTNTDDEMMPENHKENLNKNNNNNYVAVSYLNNCRQKTSILEFLDLLPLSSEANDTANEYEIEKLENTSRISELLGIFESEKTYSRNVLAMALKKQTDRAAAGSPVQPAPKPSLSRGLMVKGGSSIISPDTNLLNIKGSHSKSKNLHFFFSNTVKITAFSKKNENIFNCDLIDSVDQIKNMPCLDLREFGKDVKPWHVETTEAARNNENTGFDALSHECTAKPLFPRVEVQSEQLTVEEQIKRNRCYSDTE

SEQ ID NO: 56653 - protein, 77 aa, Homo sapiens
  MOD_RES (1)..(1): Any amino acid
XPTAGPTTPNGNLVDECDDDQANCHSGTGDDFQLTGGTTVLATEKPTVIDSTIQSARLEVSTLNLSLHNPPQQKALI

SEQ ID NO: 56654 - protein, 128 aa, Homo sapiens
MVVALRYVWPLLLCSPCLLIQIPEELMEPPVITEQSPRRLVVFPTDDISLKCEASGKPEVQFRWTRDGVHFKPKEELGVTVYQSPHSGSFTITGNNSNFAQRFQGIYRCFASNKLGTAMSHEIRLMAE

SEQ ID NO: 56655 - protein, 122 aa, Homo sapiens
MRPVVLVGPSLKGYEVTDMMQKALFDFLKHRFDGRISITRVTADLSLAKRSVLNNPGKRTIIERSSARSSIAEVQSEIERIFELAKSLQLVVLDADTINHPAQLAKTSLAPIIVFVKVSSPK

SEQ ID NO: 56656 - protein, 46 aa, Homo sapiens
MSKNPSGKNRETVPIKDNFELEVLQAQYKELKEKLCKKADTSYHHL

SEQ ID NO: 56657 - protein, 149 aa, Homo sapiens
MEQTVLVPPGPDSFNFFTRESLAAIERRIAEEKAKNPKPDKKDDDENGPKPNSDLEAGKNLPFIYGDIPPEMVSEPLEDLDPYYINKKTFIVLNKGKAIFRFSATSALYILTPFNPLRKIAIKILVHSYIIQHANYVHYFDKLCVYDNE

SEQ ID NO: 56658 - protein, 1222 aa, Homo sapiens
MLSSLGCLLLCGSITLALGNAQKLPKGKRPNLKVHINTTSDSILLKFLRPSPNVKLEGLLLGYGSNVSPNQYFPLPAEGKFTEAIVDAEPKYLIVVRPAPPPSQKKSCSGKTRSRKPLQLVVGTLTPSSVFLSWGFLINPHHDWTLPSHCPNDRFYTIRYREKDKEKKWIFQICPATETIVENLKPNTVYEFGVKDNVEGGIWSKIFNHKTVVGSKKVNGKIQSTYDQDHTVPAYVPRKLIPITIIKQVIQNVTHKDSAKSPEKAPLGGVILVHLIIPGLNETTVKLPASLMFEISDALKTQLAKNETLALPAESKTPEVEKISARPTTVTPETVPRSTKPTTSSALDVSETTLASSEKPWIVPTAKISEDSKVLQPQTATYDVFSSPTTSDEPEISDSYTATSDRILDSIPPKTSRTLEQPRATLAPSETPFVPQKLEIFTSPEMQPTTPAPQQTTSIPSTPKRRPRPKPPRTKPERTTSAGTITPKISKSPEPTWTTPAPGKTQFISLKPKIPLSPEVTHTKPAPEPQTLLPSQSTIGPETPGTKPSTTLAPRKTKRPGRRPRPRPRPKTTPSPEVPKSKPALEPATIQPEPLVPTTVSEPVPFETEAPSMTIVPTTDIEPVTVRTEATVTTLAPKTSQRTRTRRPRPKHKTTPRPETLQTKLDFGPITPGTSSAPTTTTKRTRRPHPKPKTTPHPEVPQTKLAPKQTPRAPPKPKTSPRPRIPQTQPVPKVPQRVTAKPKTSPSPEVSYTTPAPKDVLLPHKPYPEVSQSEPAPLETRGIPFIPMISPSPSQEELQTTLAPHRFYTTVRPRTSDKPHIRPGVKQAPRPSGADRNVSVDSTHPTKKPGTRRPPLPPRPTHPRRKPLPPNNVTGKPGSAGIISSGPITTPPLRSTPRPTGTPLERIETDIKQPTVPASGEELENITDFSSSPTRETDPLGKPRFKGPHVRYIQKPDNSPCSITDSVKRFPKEEATEGNATSPPQNPPTNLTVVTVEGCPSFVILDWEKPLNDTVTEYEVISRENGSFSGKNKSIQMTNQTFSTVENLKPNTSYEFQVKPKNPLGEGPVSNTVAFSTESADPRVSEPVSAGRDAIWTERPFNSDSYSECKGKQYVKRTWYKKFVGVQLCNSLRYKIYLSDSLTGKFYNIGDQRGHGEDHCQFVDSFLDGRTGQQLTSDQLPIKEGYFRAVRQEPVQFGEIGGHTQINYVQWYECGTTIPGKW

SEQ ID NO: 56659 - protein, 711 aa, Homo sapiens
MNKGWLELESDPGLFTLLVEDFGVKGVQVEEIYDLQSKCQGPVYGFIFLFKWIEERRSRRKVSTLVDDTSVIDDDIVNNMFFAHQLIPNSCATHALLSVLLNCSSVDLGPTLSRMKDFTKGFSPESKGYAIGNAPELAKAHNSHARPEPRHLPEKQNGLSAVRTMEAFHFVSYVPITGRLFELDGLKVYPIDHGPWGEDEEWTDKARRVIMERIGLATAGIKYEARLHVLKVNRQTVLEALQQLIRVTQPELIQTHKSQESQLPEESKSASNKSPLVLEANRAPAASEGNHTDGAEEAAGSCAQAPSHSPPNKPKLVVKPPGSSLNGVHPNPTPIVQRLPAFLDNHNYAKSPMQEEEDLAAGVGRSRVPVRPPQQYSDDEDDYEDDEEDDVQNTNSALRYKGKGTGKPGALSGSADGQLSVLQPNTINVLAEKLKESQKDLSIPLSIKTSSGAGSPAVAVPTHSQPSPTPSNESTDTASEIGSAFNSPLRSPIRSANPTRPSSPVTSHISKVLFGEDDSLLRVDCIRYNRAVRDLGPVISTGLLHLAEDGVLSPLALTEGGKGSSPSIRPIQGSQGSSSPVEKEVVEATDSREKTGMVRPGEPLSGEKYSPKELLALLKCVEAEIANYEACLKEEVEKRKKFKIDDQRRTHNYDEFICTFISMLAQEGMLANLVEQNISVRRRQGVSIGRLHKQRKPDRRKRSRPYKAKRQ

SEQ ID NO: 56660 - protein, 73 aa, Homo sapiens
GHMEGEVWGLAAHPLLPICATVSDDKTLRIWELSAQHRMLAVRKLKKGSPSVIQSGVPWHDHCSLHPPPPKLK

SEQ ID NO: 56661 - protein, 212 aa, Homo sapiens
MEVEAALGCSGQGRGCGGVAPAGRGRERASERGTRVRISKGLSGAGGSVRKADFQLNSHLSTLANIHKIYHTLNKLNLTEDIGQDDHQTGSLRSCSSSDCFNKVMPPRKKRRPASGDDLSAKKSRHDSMYRKYDSTRIKTEEEAFSSKRCLEWFYEYAGTDDVVGPEGMEKFCEDIGVEPENVVMLVLAWKLDAQNMGYFTLQEWLKGMTSL

SEQ ID NO: 56662 - protein, 142 aa, Homo sapiens
MSHGPKQPGAAAAPAGGKAPGQHGGFVVTVKQERGEGPRAGEKGSHEEEPVKKRGWPKGKKRKKILPNGPKAPVTGYVRFLNERREQIRTRHPDLPFPEITKMLGAEWSKLQPTEKQRYLDEAEREKQQYMKELRAYQQSEA

SEQ ID NO: 56663 - protein, 74 aa, Homo sapiens
MCPKNASYYGNRAATLMMLGRFREALGDAQQSVRLDDSFVRGHLREGKCHLSLGNAMAACRSFQRALELDHKNA

SEQ ID NO: 56664 - protein, 166 aa, Homo sapiens
MAPAGCCCCCCFWGGAVAAAGAARRVLLLLLLGVLSAGLRPGALATEHYSPLSLLKQELQHRQQQEAPAGGGGCSPQSGDWGDQYSAECGAIAYVLIGSGLYDEAIRHFSTMLQILSPLGRINEAVNDLTKAIQLQPSARLYRHRGTLYFISEDYATAHEDFQQSL

SEQ ID NO: 56665 - protein, 611 aa, Homo sapiens
MEELDGEPTVTLIPGVNSKKNQMYFDWGPGEMLVCETSFNKKEKSEMVPSCPFIYIIRKDVDVYSQILRKLFNESHGIFLGLQRIDEELTGKSRKSQLVRVSKNYRSVIRACMEEMHQVAIAAKDPANGRQFSSQVSILSAMELIWNLCEILFIEVAPAGPLLLHLLDWVRLHVCEVDSLSADVLGSENPSKHDSFWNLPGNTQTLTELELKWQHWHEECERYLQDSTFATSPHLESLLKIMLGDEAALLEQKELLSNWYHFLVTRLLYSNPTVKPIDLHYYAQSSLDLFLGGESSPEPLDNILLAAFEFDIHQVIKECSIALSNWWFVAHLTDLLDHCKLLQSHNLYFGSNMREFLLLEYASGLFAHPSLWQLGVDYFDYCPELGRVSLELHIERIPLNTEQKALKVLRICEQRQMTEQVRSICKILAMKAVRNNRLGSALSWSIRAKDAAFATLVSDRFLRDYCERGCFSDLDLIDNLGPAMMLSDRLTFLGKYREFHRMYGEKRFADAASLLLSLMTSRIAPRSFWMTLLTDALPLLEQKQVIFSAEQTYELMRCLEDLTSRRPVHGESDTEQLQDDDIETTKVEMLRLSLARNLARAIIREGSLEGS

SEQ ID NO: 56666 - protein, 643 aa, Homo sapiens
MMEEEELEFVEELEAVLQLTPEVQLAIEQVFPSQDPLDRADFNAVEYINTLFPTEQSLANIDEVVNKIRLKIRRLDDNIRTVVRGQTNVGQDGRQALEEAQKAIQQLFGKIKDIKDKAEKSEQMVKEITRDIKQLDHAKRHLTTSITTLNHLHMLAGGVDSLEAMTRRRQYGEVANLLQGVMNVLEHFHKYMGIPQIRQLSERVKAAQTELGQQILADFEEAFPSQGTKRPGGPSNVLRDACLVANILDPRIKQEIIKKFIKQHLSEYLVLFQENQDVAWLDKIDRRYAWIKRQLVDYEEKYGRMFPREWCMAERIAVEFCHVTRAELAKIMRTRAKEIEVKLLLFAIQRTTNFEGFLAKRFSGCTLTDGTLKKLESPPPSTNPFLEDEPTPEMEELATEKGDLDQPKKPKAPDNPFHGIVSKCFEPHLYVYIESQDKNLGELIDRFVADFKAQGPPKPNTDEGGAVLPSCADLFVYYKKCMVQCSQLSTGEPMIALTTIFQKYLREYAWKILSGNLPKTTTSSGGLTISSLLKEKEGSEVAKFTLEELCLICNILSTAEYCLATTQQLEEKLKEKVDVSLIERINLTGEMDTFSTVISSSIQLLVQDLDAACDPALTAMSKLLQAHRSVKDQLRRMERPRSS

SEQ ID NO: 56667 - protein, 27 aa, Homo sapiens
MSWIPFKIGQPKKQIVPKTVSNSIVLL

SEQ ID NO: 56668 - protein, 133 aa, Homo sapiens
MNEENIDGTNGCSKVRTGIQNEAALLALMEKTGYNMVQENGQRKFGGPPPGWEGPPPPRGCEVFVGKIPRDMYEDELVPVFERAGKIYEFRLMMEFSGENRGYAFVMYTTKEEAQLAIRILNNYEIRPGKFIG

SEQ ID NO: 56669 - protein, 189 aa, Homo sapiens
MAEAAAAAGGTGLGAGASYGSAADRDRDPDPDRAGRRLRVLSGHLLGRPREALSTNECKARRAASAATAAPTATPAAQESGTIPKKRQEVMKWNGWGYNDSKFIFNKKGQIELTGKRGISDPLTVFEQTEAAAREEILANGGSLSHHHGVGKLRKQWLKESISDVGFGMLKSVKEYVDPNNIFGNRNLL

SEQ ID NO: 56670 - protein, 182 aa, Homo sapiens
MLFEGLDLVSALATLAACLVSVTLLLAVSQQLWQLRWAATRDKSCKLPIPKGSMGFPLIGETGHWLLQVFSKIFSHEALESYLPKIQLVIQDTLRAWSSHPEAINVYQEAQKLTFRMAIRVLLGFSIPEEDLGHLFEVYQQFVDNVFSLPVDLPFSGYRRGIQARQILQKGLEKAIREKLQC

SEQ ID NO: 56671 - protein, 27 aa, Homo sapiens
MEGCLGVAELRSTTLQASPPTLGWIKR

SEQ ID NO: 56672 - protein, 573 aa, Homo sapiens
MPPYFAMENAENHKIKAYTQLKLSGLLPSAYWIGQAVVDIPLFFIILILMLGSLLAFHYGLYFYTVKFLAVVFCLIGYVPSVILFTYIASFTFKKILNTKEFWSFIYSVAALACIAITEITFFMGYTIATILHYAFCIIIPIYPLLGCLISFIKISWKNVRKNVDTYNPWDRLSVAVISPYLQCVLWIFLLQYYEKKYGGRSIRKDPFFRNLSTKSKNRKLPEPPDNEDEDEDVKAERLKVKELMGCQCCEEKPSIMVSNLHKEYDDKKDFLLSRKVKKVATKYISFCVKKGEILGLLGPNGAGKSTIINILVGDIEPTSGQVFLGDYSSETSEDDDSLKCMGYCPQINPLWPDTTLQEHFEIYGAVKGMSASDMKEVISRITHALDLKEHLQKTVKKLPAGIKRKLCFALSMLGNPQITLLDEPSTGMDPKAKQHMWRAIRTAFKNRKRAAILTTHYMEEAEAVCDRVAIMVSGQLRCIGTVQHLKSKFGKGYFLEIKLKDWIENLEVDRLQREIQYIFPNASRQESFSSILAYKIPKEDVQSLSQSFFKLEEAKHAFAIEEYSFSQATLEQ

SEQ ID NO: 56673 - protein, 126 aa, Homo sapiens
MERRSESPCLRDSPDRRSGSPDVKGPPPVKVARLEQNGSPMGARGRPNGAVAKAVGGLMIPVFCVVEQLDGSLEYDNREEHAEFVLVRKDVLFSQLVETALLALGYSHSSAAQAQGWRAANPASWI

SEQ ID NO: 56674 - protein, 78 aa, Homo sapiens
MEYDLQALNIKYAMDAFGGPIWSMAASPSGSQLLVGCEDGSVKLFQITPDKIQFERNFDRQKSRILSLSWHPSGTHIA

SEQ ID NO: 56675 - protein, 188 aa, Homo sapiens
  MOD_RES (1)..(1): Any amino acid
XQAEKDRRLKKNTSGHELLEEARRKGLPFAQWDGPTVVAWLELWLGMPAWYVAACRANVKSGAIMSALSDTEIQREIGISNPLHRLKLRLAIQEMVSLTSPSAPPTSRTCPVFLQTLAYGDMNHEWIGNEWLPSLGLPQYRSYFMECLVDARMLDHLTKKDLRVHLKMVDSFHRTSLQYGIMCLKRLN

SEQ ID NO: 56676 - protein, 68 aa, Homo sapiens
GCLARVQKLCTPENINCRDTQGRNSTPLHLAAGYNNLEVAEYLLEHGADVNAQDKGGLIPLHNAASYG

SEQ ID NO: 56677 - protein, 69 aa, Homo sapiens
MNNLNDPPNWNIRPNSRADGGDGSRWNYALLVPMLGLAAFRWIWSRESQKEVEKEREAYRRRTAAFQQD

SEQ ID NO: 56678 - protein, 106 aa, Homo sapiens
  MOD_RES (1)..(1): Any amino acid
XGTGEVPSAPRENRTTPDCERAFPEERPEVLGQRSTDVVDLENEEPDSDNEWQHLLETTEPVPIQLKAPLTLLCNPDFCQRIQSQLHEAGGQVKGWRREGADGNGT

SEQ ID NO: 56679 - protein, 509 aa, Homo sapiens
MEEKRRKYSISSDNSDTTDSHATSTSASRCSKLPSSTKSGWPRQNEKKPSEVFRTDLITAMKIPDSYQLSPDDYYILADPWRQEWEKGVQVPAGAEAIPEPVVRILPPLEGPPAQASPSSTMLGEGSQPDWPGGSRYDLDEIDAYWLELINSELKEMERPELDELTLERVLEELETLCHQNMARAIETQEGLGIEYDEDVVCDVCRSPEGEDGNEMVFCDKCNVCVHQACYGILKVPTGSWLCRTCALGVQPKCLLCPKRGGALKPTRSGTKWVHVSCALWIPEVSIGCPEKMEPITKISHIPASRWALSCSLCKECTGTCIQCSMPSCVTAFHVTCAFDHGLEMRTILADNDEVKFKSFCQEHSDGGPRNEPTSEPTEPSQAGEDLEKVTLRKQRLQQLEEDFYELVEPAEVAERLDLAEALVDFIYQYWKLKRKANANQPLLTPKTDEVDNLAQQEQDVLYRRLKLFTHLRQDLERSGLGGEQRARRVTRRGRAARAPRAALRRKRK

SEQ ID NO: 56680 - protein, 29 aa, Homo sapiens
TGKGHGADTCTSWKAQRNDRRINMAVTKH

SEQ ID NO: 56681 - protein, 161 aa, Homo sapiens
  MOD_RES (1)..(1): Any amino acid
XGAGDGARLDFVVRYETPEGTFWANNHGRNYTVLLRIAPAPTPTDAEGLPQQQQLPQLEPQPECQGPVEAEARQLKSCMKPVRRRPAEEELKTKNMDDNTFAMAEHPDVQESVGPLVAPTPLRPWPQMTLQVKSNHGVKRRQAEMMQAAPMLEICSLKFSQ

SEQ ID NO: 56682 - protein, 89 aa, Homo sapiens
MTKSRTMTSRLGYAKKSVATTLRLFGQIVTKLAAQFNFALKFLALTLFPMEHILYATTDQEGITQLGHIREEPPAVPAPIMTSVWTISV

SEQ ID NO: 56683 - protein, 1249 aa, Homo sapiens
MGLRPPTPSPSGGSCSGSLPPPSRCQPLRRRCSSCCFPGEYHLGRSRRKSVPGGKQYSMEGAPAAPFRPSQGFLSRRLKSSIKRTKSQPKLDRTSSFRQILPRFRSADHDRARLMQSFKESHSHESLLSPSSAAEALELNLDEDSIIKPVHSSILGQEFCFEVTTSSGTKCFACRSAAERDKWIENLQRAVKPNKDNSRRVDNVLKLWIIEARELPPKKRYYCELCLDDMLYARTTSKPRSASGDTVFWGEHFEFNNLPAVRALRLHLYRDSDKKRKKDKAGYVGLVTVPVATLAGRHFTEQWYPVTLPTGSGGSGGMGSGGGGGSGGGSGGKGKGGCPAVRLKARYQTMSILPMELYKEFAEYVTNHYRMLCAVLEPALNVKGKEEVASALVHILQSTGKAKDFLSDMAMSEVDRFMEREHLIFRENTLATKAIEEYMRLIGQKYLKDAIGEFIRALYESEENCEVDPIKCTASSLAEHQANLRMCCELALCKVVNSHCVFPRELKEVFASWRLRCAERGREDIADRLISASLFLRFLCPAIMSPSLFGLMQEYPDEQTSRTLTLIAKVIQNLANFSKFTSKEDFLGFMNEFLELEWGSMQQFLYEISNLDTLTNSSSFEGYIDLGRELSTLHALLWEVLPQLSKEALLKLGPLPRLLNDISTALRNPNIQRQPSRQSERPRPQPVVLRGPSAEMQGYMMRDLNSSIDLQSFMARGLNSSMDMARLPSPTKEKPPPPPPGGGKDLFYVSRPPLARSSPAYCTSSSDITEPEQKMLSVNKSVSMLDLQGDGPGGRLNSSSVSNLAAVGDLLHSSQASLTAALGLRPAPAGRLSQGSGSSITAAGMRLSQMGVTTDGVPAQQLRIPLSFQNPLFHMAADGPGPPGGHGGGGGHGPPSSHHHHHHHHHHRGGEPPGDTFAPFHGYSKSEDLSSGVPKPPAASILHSHSYSDEFGPSGTDFTRRQLSLQDNLQHMLSPPQITIGPQRPAPSGPGGGSGGGSGGGGGGQPPPLQRGKSQQLTVSAAQKPRPSSGNLLQSPEPSYGPARPRQQSLSKEGSIGGSGGSGGGGGGGLKPSITKQHSQTPSTLNPTMPASERTVAWVSNMPHLSADIESAHIEREEYKLKEYSKSMDESRLDRVKEYEEEIHSLKERLHMSNRKLEEYERRLLSQEEQTSKILMQYQARLEQSEKRLRQQQAEKDSQIKSIIGRLMLVEEELRRDHPAMAEPLPEPKKRLLDAQRGSFPPWVQQTRV

SEQ ID NO: 56684 - protein, 229 aa, Homo sapiens
MAHVGSRKRSRSRSRSRGRGSEKRKKKSRKDTSRNCSASTSQGRKASTAPGAEERSKQKARRRTRSSSSSSSSSSSSSSSSSSSSSSSSSDGRKKRGKYKDKRRKKKKKRKKLKKKGKEKAEAQQVEALPGPSLDQWHRSAGEEEDGPVLTDEQKSRIQAMKPMTKEEWDARQSIIRKVVDPETGRTRLIKGDGEVLEEIVTKERHREINKQATRGDCLAFQMRAGLLP

SEQ ID NO: 56685 - protein, 187 aa, Homo sapiens
MLLISETLQDGRPCPIILWDASLSSASNDTHSSVKLTWGTYQQLLKQKCWQNGRVPKPESGCTEIHHHEWSKMALFDFLLQIYNRLDTNCCGFRPRKEDACVQNGLRPKCDDQGSAALAHIIQRKHDPRHLVFIDNKGFFDRSEDNLNFKLLEGIKEFPASAVSVLKSQHLRQKLLQSLFLDKVYWE

SEQ ID NO: 56686 - protein, 89 aa, Homo sapiens
MARTAGDTLDVFTMIDIFKYVIYGIAAAFFVYGILLMVEGFFTTGAIKDLYGDFKITTCGRCVSAWFIMLTYLFMLAWLGVTAFTSLPV

SEQ ID NO: 56687 - protein, 45 aa, Homo sapiens
MAAVGAEARGGYGILSCKMERMARFYKYLGTFAKSEVPVTASAIL

SEQ ID NO: 56688 - protein, 301 aa, Homo sapiens
MAVTEASLLRQCPLLLPQNRSKTVYEGFISAQEVALKNRQELYALPPPPQFYSSLIEEIGTLGWDKLVYADTCFSTIKLKAEDASGREHLITLKLKAKYPAESPDYFVDFPVPFCASWTPQSSLISIYSQFLAAIESLKAFWDVMDEIDEKTWVLEPEKPPRSATARRIALGNNVSINIEVDPRHPTMLPECFFLGADHVVKPLGIKLSRNIHLWDPENSVLQNLKDVLEIDFPARAILEKSDFTMDCGICYAYQLDGTIPDQVCDNSQCGQPFHQICLYEWLRGLLTSRQSFNIIFGECP

SEQ ID NO: 56689 - protein, 277 aa, Homo sapiens
  MOD_RES (1)..(1): Any amino acid
XTCERGFAAMEETHQKKIEDLQRQHQRELEKLREEKDRLLAEETAATISAIEAMKNAHREEMERELEKSQRSQISSVNSDVEALRRQYLEELQSVQRELEVLSEQYSQKCLENAHLAQALEAERQALRQCQRENQELNAHNQVLLRVKESEIQYLKQEISSLKDELQTALRDKKYASDKYKDIYTELSIAKAKADCDISRLKEQLKAATEALGEKSPDSATVSGYDIMKSKSNPDFLKKDRSCVTRQLRNIRSKSLKEGLTVQERLKLFESRDLKKD

SEQ ID NO: 56690 - protein, 121 aa, Homo sapiens
MGLLDRLSVLLGLKKKEVHVLCLGLDNSGKTTIINKLKPSNAQSQNILPTIGFSIEKFKSSSLSFTVFDMSGQGRYRNLWEHYYKEGQAIIFVIDSSDRLRMVVAKEELDTLLNHPDIKHR

SEQ ID NO: 56691 - protein, 355 aa, Homo sapiens
MGASVRGDRGAEGGAGPEPVRVPGAAEPARWPGNGGPRAEDVLERAFSLRKAHSIKDMENTLQLVRNIIPPLSSTKHKGQDGRIGVVGGCQEYTGAPYFAAISALKVGADLSHVFCASAAAPVIKAYSPELIVHPVLDSPNAVHEVEKWLPRLHALVVGPGLGRDDALLRNVQGILEVSKARDIPVVIDADGLWLVAQQPALIHGYRKAVLTPNHVEFSRLYDAVLRGPMDSDDSHGSVLRLSQALGNVTVVQKGERDILSNGQQVLVCSQEGSSRRCGGQGDLLSGSLGVLVHWALLAGPQKTNGSSPLLVAAFGACSLTRQCNHQAFQKHGRSTTTSDMIAEVGAAFSKLFET

SEQ ID NO: 56692 - protein, 285 aa, Homo sapiens
MRKSPGLSDCLWAWILLLSTLTGRSYGQPSLQDELKDNTTVFTRILDRLLDGYDNRLRPGLGERVTEVKTDIFVTSFGPVSDHDMEYTIDVFFRQSWKDERLKFKGPMTVLRLNNLMASKIWTPDTFFHNGKKSVAHNMTMPNKLLRITEDGTLLYTMRLTVRAECPMHLEDFPMDAHACPLKFGSYAYTRAEVVYEWTREPARSVVVAEDGSRLNQYDLLGQTVDSGIVQSSTGEYVVMTTHFHLKRKIGYFVIQTYLPCIMTVILSQVSFWLNRESVPARTVF

SEQ ID NO: 56693 - protein, 131 aa, Homo sapiens
MEPGSVENLSIVYRSRDFLVVNKHWDVRIDSKAWRETLTLQKQLRYRFPELADPDTCYGFRFCHQLDFSTSGALCVALNKAAAGSAYRCFKERRVTKAYLALVVRTQSQASQISWFWNTGCTQAILSPKCC

SEQ ID NO: 56694 - protein, 42 aa, Homo sapiens
MPLFATNPFDQDVEKATSEMNTAEDWGLILDICDKVGQSRTG

SEQ ID NO: 56695 - protein, 28 aa, Homo sapiens
MEAREPGRPTPTYHLVPNTSQSQVEEDV

SEQ ID NO: 56696 - protein, 122 aa, Homo sapiens
MAHEAMEYDVQVQLNHAEQQPAPAGMASSQGGPALLQPVPADVVSSQGVPSILQPAPAEVISSQATPPLLQPAPQLSVDLTEVEVLGEDTVENINPRTSEQHRQGSDGNHTIPASSLHSMTN

SEQ ID NO: 56697 - protein, 123 aa, Homo sapiens
MLRLSERNMKVLLAAALIAGSVFFLLLPGPSAADEKKKGPKVTVKVYFDLRIGDEDVGRVIFGLFGKTVPKTVDNFVALATGEKGFGYKNSKFHRVIKDFMIQGGDFTRGDGTGGQKDPRTPA

SEQ ID NO: 56698 - protein, 86 aa, Homo sapiens
MAALCRTRAVAAESHFLRVFLFFRPFRGVGTESGSESGSSNAKEPKTRAGGFASALERHSELLQKVEPLQKEIPERNQGPVAAIRS

SEQ ID NO: 56699 - protein, 196 aa, Homo sapiens
  MOD_RES (1)..(1): Any amino acid
XQTSPQPPEGPGLPRRSPLIRNRKAGSMEVLSETSSSRPGGYRLFSSSRPPTEMKQSGLGSQCTGLFSTTVLGGSSSAPNLQDYARSHGKKLPPASLKHRDELLDDQHPVVRLLRSFSSDCTGGRPVSLDATLAHHLHQCSYHLRLFRNWLRSGQDDPECLYGFEGCSMVPTIYPLETLHNALSLRQVSEFLSRVC

SEQ ID NO: 56700 - protein, 963 aa, Homo sapiens [sequence omitted]

SEQ ID NO: 56701 - protein, 154 aa, Homo sapiens
MRSRRAFKDLRKEERGEGREVKNPSVPLRPGGKVVKLGVAVTTDNAPLPPVPVPPITCVQNGLRYHDRDVWKPEPCRICVCDNGKVLCDDVICDETKNCPGAEVPEGECCPVCPDGSESPTDQETTGVEGPKGDTGPRGPRGPAGPPGRDGIPG

SEQ ID NO: 56702 - protein, 1756 aa, Homo sapiens
MRRSKAYGERYVASVQGSAPSPGKKLRGFYFAKLYYEAKEYDLAKKYVCTYLSVQERDPRAHRFLGLLYELEENTEKAVECYRRSLELNPPQKDLVLKIAELLCKNDVTDGRAKYWVERAAKLFPGSPAIYKLKEHLLDCEGEDGWNKLFDWIQSELYVRPDDVHMNIRLVELYRSNKRLKDAVARCHEAERNIALRSSLEWNSCVVQTLKEYLESLQCLESDKSDWRATNTDLLLAYANLMLLTLSTRDVQESRELLESFDSALQSAKSSLGGNDELSATFLEMKGHFYMHAGSLLLKMGQHGNNVQWQALSELAALCYVIAFQVPRPKIKLIKGEAGQNLLEMMACDRLSQSGHMLLNLSRGKQDFLKEVVETFANKSGQSVLYNALFSSQSSKDTSFLGSDDIGNIDVQEPELEDLARYDVGAIQAHNGSLQHLTWLGLQWNSLPALPGIRKWLKQLFHHLPQETSRLETNAPESICILDLEVFLLGVVYTSHLQLKEKCNSHHSSYQPLCLPLPVCKRLCTERQKSWWDAVCTLIHRKAVPGNSAELRLVVQHEINTLRAQEKHGLQPALLVHWAKCLQKMGRGLNSSYDQQEYIGRSVHYWKKVLPLLKIIKKNSIPEPIDPLFKHFHSVDIQASEIVEYEEDAHITFAILDAVHGNIEDAVTAFESIKSVVSYWNLALIFHRKAEDIENDAVFPEEQEECKNYLRKTRDYLIKIIDDSDSNLSVVKKLPVPLESVKEMLKSVMQELEDYSEGGPLYKNGSLRNADSEIKHSTPSPTKYSLSPSKSYKYSPKTPPRWAEDQNSLRKMICQEVKAITKLNSSKSASRHRWPTENYGPDSVPDGYQGSQTFHGAPLTVATTGPSVYYSQSPAYNSQYLLRPAANVTPTKGSSNTEFKSTKEGFSIAVSADGFKFGISEPGNQEKKSEKPLENDTGFQAQDISGQKNGRGVIFGQTSSTFTFADVAKSTSGEGFQFGKKDPNFKGFSGAGEKLFSSQCGKMANKANTSGDFEKDDDACKTEDSDDIHFEPVVQMPEKVELVTGEEGEKVLYSQGVKLFRFDAEISQWKERGLGNLKILKNEVNGKPRMLMRRDQVLKVCANHWITTTMNLKPLSGSDRAWMWLASDFSDGDAKLERLAAQFKTPELAEEFKQKFEECQRLLLDIPLQTPHKLVDTGRAAKLIQRAEEMKSGLKDFKTFLTNDQTKVTEEENKGSGTGAAGASDTTIKPNPENTGPTLEWDNYDLREDALDDNVSSSSVHDSPLASSPVRKNIFRFDESTTGFNFSFKSALSLSKSPAKLNQSGTSVGTDEESDVTQEEERDGQYFEPVVPLPDLVEVSSGEENEQVVFSHRAELYRYDKDVGQWKERGIGDIKILQNYDNKQVRIVMRRDQVLKLCANHRITPDMSLQNMKGTERVWVWTACDFADGERKVEHLAVRFKLQDVADSFKKIFDEAKTAQEKDSLITPHVSRSSTPRESPCGKIAVAVLEETTRERTDVIQGDDVADAASEVEVSSTSETTTKAVVSPPKFVFGSESVKRIFSSEKSNPFAFGNSSATGSLFGFSFNAPLKSNDSETSSVAQSGSESKVEPKKCELSKNSDIEQSSDSKVKNLSASFPMEESSINYTFKTPEKEPPLWHAEFTKEELVQKLSSTTKSADQLNGLLRETEATSAVLMEQIKLLKSEIRRLERNQEESAANVEHLKNVLLQFIFLKPGSERESLLPVINTMLQLSPEEKGKLAAVAQGLQETSIPKKK

SEQ ID NO: 56703 - protein, 1319 aa, Homo sapiens
MWTLGRRAVAGLLASPSPAQAQTLTRVPRPAELAPLCGRRGLRTDIDATCTPRRAVNVAPVAVPSLRKSEDHALQTGHVLDYLCFCLLGFQSASEQRSNPDSVVHRMAGVRSTTLLSSPCEWDWHPGCSSRSKYSRKHRAVPVHGPRCQAPGMEELIWEQYTVTLQKDSKRGFGIAVSGGRDNPHFENGETSIVISDVLPGGPADGLLQENDRVVMVNGTPMEDVLHSFAVQQLRKSGKVAAIVVKRPRKVQVAALQASPPLDQDDRAFEVMDEFDGRSFRSGYSERSRLNSHGGRSRSWEDSPERGRPHERARSRERDLSRDRSRGRSLERGLDQDHARTRDRSRGRSLERGLDHDFGPSRDRDRDRSRGRSIDQDYERAYHRAYDPDYERAYSPEYRRGARHDARSRGPRSRSREHPHSRSPSPEPRGRPGPIGVLLMKSRANEEYGLRLGSQIFVKEMTRTGLATKDGNLHEGDIILKINGTVTENMSLTDARKLIEKSRGKLQLVVLRDSQQTLINIPSLNDSDSEIEDISEIESNRSFSPEERRHQYSDYDYHSSSEKLKERPSSREDTPSRLSRMGATPTPFKSTGDIAGTVVPETNKEPRYQEDPPAPQPKAAPRTFLRPSPEDEAIYGPNTKMVRFKKGDSVGLRLAGGNDVGIFVAGIQEGTSAEQEGLQEGDQILKVNTQDFRGLVREDAVLYLLEIPKGEMVTILAQSRADVYRDILACGRGDSFFIRSHFECEKETPQSLAFTRGEVFRVVDTLYDGKLGNWLAVRIGNELEKGLIPNKSRAEQMASVQNAQRDNAGDRADFWRMRGQRSGVKKNLRKSREDLTAVVSVSTKFPAYERVLLREAGFKRPVVLFGPIADIAMEKLANELPDWFQTAKTEPKDAGSEKSTGVVRLNTVRQIIEQDKHALLDVTPKAVDLLNYTQWFPIVIFFNPDSRQGVKTMRQRLNPTSNKSSRKLFDQANKLKKTCAHLFTATINLNSANDSWFGSLKDTIQHQQGEAVWVSEGKMEGMDDDPEDRMSYLTAMGADYLSCDSRLISDFEDTDGEGGAYTDNELDEPAEEPLVSSITRSSEPVQHEESIRKPSPEPRAQMRRAASSDQLRDNSPPPAFKPEPPKAKTQNKEESYDFSKSYEYKSNPSAVAGNETPGASTKGYPPPVAAKPTFGRSILKPSTPIPPQEGEEVGESSEEQDNAPKSVLGKVKIFEKMDHKARLQRMQELQEAQNARIEIAQKHPDIYAVPIKTHKPDPGTPQHTSSRPPEPQKAPSRPYQDTRGSYGSDAEEEEYRQQLSEHSKRGYYGQSARYRDTEL

SEQ ID NO: 56704 - protein, 856 aa, Homo sapiens
MIQAHISVSTQPNEVGPVAVLEFWVQALISQHLWYREQPILFLMDHLCKAAFQLMQEDCIQKLLYQQHKNALGYHCDRSLLSSLVSWIVAGNITPSFVEGLATPTQVWFAWTVLNMESIFEEDSQLRRVIEGELVINSAFTPDQALKKAQTQLKLPIVPSLQRLLIYRWAHQALVTPSDHPLLPLIWQKFFLLYLHRPGPQYGLPIDGCIGRRFFQSPAHINLLKEMKRRLTEVADFHHAASKALRVPAEGSEGLPESHSGTPGYLTSPELHKELVRLFNVYILWLEDENFQKGDTYIPSLPKHYDIHRLAKVMQNQQDLWMEYLNMERIYHEFQETVGLWTQAKLESHSTPCSLSVQLDFTDPLLAKERVLSNLRKHEAPQPPLALHPTKPPVPVISSAVLLSQKDATQLVCTDLNLLQQQARTAALRESQQVALDGELLDTMPKQYVNREEQTTLHLECRGSSGKKCQGAAVVTVQFEGMHKNEAISQQLHVLRKEVKQLQAEAAKPPSLNIVEAAVHAENLITALVNAYKLQPTPGIQKVGISLFFTIVDYVSDETQRHPPTRQFFTSCIEILGQVFISGIKSECRKVLETILKNSRLCSLLSPFFTPNAAPAEFIQLYEQVVKFLSEDNSDMIFMLLTKFDLKQWLSATKPPLSDRTRLLESIHLALTAWGLEPDEDILMPFNLFCKHWTYLLLYQFPDQYSDILRLLMQSSAEQLLSPECWKATLRALGCCAPSCQQGAASTEGAVLPSSSDALLSDKQVMETIQWLSDFFYKLRLSKMDFKSFGLFSKWSPYMADVKTFLGYLVKRLIDLEMTCLAQDPTASRKTVLKSLHSVIIQLFKPWILVLEDNER

SEQ ID NO: 56705 - protein, 458 aa, Homo sapiens
MTLLITGDSIVSAEAVWDHVTMANRELAFKAGDVIKVLDASNKDWWWGQIDDEEGWFPASFVRLWVNQEDEVEEGPSDVQNGHLDPNSDCLCLGRPLQNRDQMRANVINEIMSTERHYIKHLKDICEGYLKQCRKRRDMFSDEQLKVIFGNIEDIYRFQMGFVRDLEKQYNNDDPHLSEIGPCFLEHQDGFWIYSEYCNNHLDACMELSKLMKDSRYQHFFEACRLLQQMIDIAIDGFLLTPVQKICKYPLQLAELLKYTAQDHSDYRYVAAALAVMRNVTQQINERKRRLENIDKIAQWQASVLDWEGEDILDRSSELIYTGEMAWIYQPYGRNQQRVFFLFDHQMVLCKKDLIRRDILYYKGRIDMDKYEVVDIEDGRDDDFNVSMKNAFKLHNKETEEIHLFFAKKLEEKIRWLRAFREERKMVQEDEKIGFEISENQKRQAAMTVRKVPKQKGS

SEQ ID NO: 56706 - protein, 77 aa, Homo sapiens
MEDSHKSTTSETAPQPGSAVQGAHISHIAQQGLTLSPRLVCSSVNIAHCSLDLLCSSNPPASAPQVAGTTGIIFIRK

SEQ ID NO: 56707 - protein, 93 aa, Homo sapiens
MAEGEITTFTALTEKFNLPPGNYKKPKLLYCSNGGHFLRILPDGTVDGTRDRSDQHTAAQCGKRGGGVYKEYRDWPVLGHGHRRAFIRLTDTK

SEQ ID NO: 56708 - protein, 126 aa, Homo sapiens
MVLPPQASRKTKKKEGGALRAQRASSNVFSNFEQTQIQEFKEAFTLMDQNRDGFIDKEDLKDTYASLGKTNVKDDELDAMLKEASGPINFTMFLNLFGEKLSGTDAEETILNAFKMLDPDGKGKIN

SEQ ID NO: 56709 - protein, 687 aa, Homo sapiens
GEVGADGVPGFPGLPGREGIAGPQGPKGDRGSRGEKGDPGKDGVGQPGLPGPPGPPGPVVYVSEQDGSVLSVPGPEGRPGFAGFPGPAGPKGNLGSKGERGSPGPKGEKGEPGSIFSPDGGALGPAQKGAKGEPGFRGPPGPYGRPGYKGEIGFPGRPGRPGMNGLKGEKGEPGDASLGFGMRGMPGPPGPPGPPGPPGTPVYDSNVFAESSRPGPPGLPGNQGPPGPKGAKGEVGPPGPPGQFPFDFLQLEAEMKGEKGDRGDAGQKGERGEPGGGGFFGSSLPGPPGPPGPPGPRGYPGIPGPKGESIRGQPGPPGPQGPPGIGYEGRQGPPGPPGPPGPPSFPGPHRQTISVPGPPGPPGPPGPPGTMGASSGQVRLWATRQAMLGQVHEVPEGWLIFVAEQEELYVRVQNGFRKVQLEARTPLPRGTDNEVAALQPPVVQLHDSNPYPRREHPHPTARPWRADDILASPPRLPEPQPYPGAPHHSSYVHLRPARPTSPPAHSHRDFQPVLHLVALNSPLSGGMRGIRGADFQCFQQARAVGLAGTFRAFLSSRLQDLYSIVRRADRAAVPIVNLKDELLFPSWEALFSGSEGPLKPGARIFSFDGKDVLRHPTWPQKSVWHGSDPNGRRLTESYCETWRTEAPSATGQASSLLGGRLLGQSAASCHHAYIVLCIENSFMTASK

SEQ ID NO: 56710 - protein, 82 aa, Homo sapiens
MNPTETKAIPVSQQMEGPHLPNKKKHKKQAVKTEPEKKSQSTKLSVVHEKKSQEGKPKEHTEAPVCVLSAKKPTQAGIRYRK

SEQ ID NO: 56711 - protein, 122 aa, Homo sapiens
MSEEIITPVYCTGVSAQVQKQRARELGLGRHENAIKYLGQDYEQLRVRCLQSGTLFRDEAFPPVPQSLGYKDLGPNSSKTYGIKWKRPTELLSNPQFIVDGATRTDICQGALGDCWLLAAIA

SEQ ID NO: 56712 - protein, 3966 aa, Homo sapiens
MSEPGGGGGEDGSAGLEVSAVQNVADVSVLQKHLRKLVPLLLEDGGEAPAALEAALEEKSALEQMRKFLSDPQVHTVLVERSTLKEDVGDEGEEEKEFISYNINIDIHYGVKSNSLAFIKRTPVIDADKPVSSQLRVLTLSEDSPYETLHSFISNAVAPFFKSYIRESGKADRDGDKMAPSVEKKIAELEMGLLHLQQNIEIPEISLPIHPMITNVAKQCYERGEKPKVTDFGDKVEDPTFLNQLQSGVNRWIREIQKVTKLDRDPASGTALQEISFWLNLERALYRIQEKRESPEVLLTLDILKHGKRFHATVSFDTDTGLKQALETVNDYNPLMKDFPLNDLLSATELDKIRQALVAIFTHLRKIRNTKYPIQRALRLVEAISRDLSSQLLKVLGTRKLMHVAYEEFEKVMVACFEVFQTWDDEYEKLQVLLRDIVKRKREENLKMVWRINPAHRKLQARLDQMRKFRRQHEQLRAVIVRVLRPQVTAVAQQNQGEVPEPQDMKVAEVLFDAADANAIEEVNLAYENVKEVDGLDVSKEGTEAWEAAMKRYDERIDRVETRITARLRDQLGTAKNANEMFRIFSRFNALFVRPHIRGAIREYQTQLIQRVKDDIESLHDKFKVQYPQSQACKMSHVRDLPPVSGSIIWAKQIDRQLTAYMKRVEDVLGKGWENHVEGQKLKQDGDSFRMKLNTQEIFDDWARKVQQRNLGVSGRIFTIESTRVRGRTGNVLKLKVNFLPEIITLSKEVRNLKWLGFRVPLAIVNKAHQANQLYPFAISLIESVRTYERTCEKVEERNTISLLVAGLKKEVQALIAEGIALVWESYKLDPYVQRLAETVFNFQEKVDDLLIIEEKIDLEVRSLETCMYDHKTFSEILNRVQKAVDDLNLHSYSNLPIWVNKLDMEIERILGVRLQAGLRAWTQVLLGQAEDKAEVDMDTDAPQVSHKPGGEPKIKNVVHELRITNQVIYLNPPIEECRYKLYQEMFAWKMVVLSLPRIQSQRYQVGVHYELTEEEKFYRNALTRMPDGPVALEESYSAVMGIVSEVEQYVKVWLQYQCLWDMQAENIYNRLGEDLNKWQALLVQIRKARGTFDNAETKKEFGPVVIDYGKVQSKVNLKYDSWHKEVLSKFGQMLGSNMTEFHSQISKSRQELEQHSVDTASTSDAVTFITYVQSLKRKIKQFEKQVELYRNGQRLLEKQRFQFPPSWLYIDNIEGEWGAFNDIMRRKDSAIQQQVANLQMKIVQEDRAVESRTTDLLTDWEKTKPVTGNLRPEEALQALTIYEGKFGRLKDDREKCAKAKEALELTDTGLLSGSEERVQVALEELQDLKGVWSELSKVWEQIDQMKEQPWVSVQPRKLRQNLDALLNQLKSFPARLRQYASYEFVQRLLKGYMKINMLVIELKSEALKDRHWKQLMKRLHVNWVVSELTLGQIWDVDLQKNEAIVKDVLLVAQGEMALEEFLKQIREVWNTYELDLVNYQNKCRLIRGWDDLFNKVKEHINSVSAMKLSPYYKVFEEDALSWEDKLNRIMALFDVWIDVQRRWVYLEGIFTGSADIKHLLPVETQRFQSISTEFLALMKKVSKSPLVMDVLNIQGVQRSLERLADLLGKIQKALGEYLERERSSFPRFYFVGDEDLLEIIGNSKNVAKLQKHFKKMFAGVSSIILNEDNSVVLGISSREGEEVMFKTPVSITEHPKINEWLTLVEKEMRVTLAKLLAESVTEVEIFGKATSIDPNTYITWIDKYQAQLVVLSAQIAWSENVETALSSMGGGGDAAPLHSVLSNVEVTLNVLADSVLMEQPPLRRRKLEHLITELVHQRDVTRSLIKSKIDNAKSFEWLSQMRFYFDPKQTDVLQQLSIQMANAKFNYGFEYLGVQDKLVQTPLTDRCYLTMTQALEARLGGSPFGPAGTGKTESVKALGHQLGRFVLVFNCDETFDFQAMGRIFVGLCQVGAWGCFDEFNRLEERMLSAVSQQVQCIQEALREHSNPNYDKTSAPITCELLNKQVKVSPDMAIFITMNPGYAGRSNLPDNLKKLFRSLAMTKPDRQLIAQVMLYSQGFRTAEVLANKIVPFFKLCDEQLSSQSHYDFGLRALKSVLVSAGNVKRERIQKIKREKEERGEAVDEGEIAENLPEQEILIQSVCETMVPKLVAEDIPLLFSLLSDVFPGVQYHRGEMTALREELKKVCQEMYLTYGDGEEVGGMWVEKVLQLYQITQINHGLMMVGPSGSGKSMAWRVLLKALERLEGVEGVAHIIDPKAISKDHLYGTLDPNTREWTDGLFTHVLRKIIDSVRGELQKRQWIVFDGDVDPEWVENLNSVLDDNKLLTLPNGERLSLPPNVRIMFEVQDLKYATLATVSRCGMVWFSEDVLSTDMIFNNFLARLRSIPLDEGEDEAQRRRKGKEDEGEEAASPMLQIQRDAATIMQPYFTSNGLVTKALEHAFQLEHIMDLTRLRCLGSLFSMLHQACRNVAQYNANHPDFPMQIEQLERYIQRYLVYAILWSLSGDSRLKMRAELGEYIRRITTVPLPTAPNIPIIDYEVSISGEWSPWQAKVPQIEVETHKVAAPDVVVPTLDTVRHEALLYTWLAEHKPLVLCGPPGSGKTMTLFSALRALPDMEVVGLNFSSATTPELLLKTFDHYCEYRRTPNGVVLAPVQLGKWLVLFCDEINLPDMDKYGTQRVISFIRQMVEHGGFYRTSDQTWVKLERIQFVGACNPPTDPGRKPLSHRFLRHVPVVYVDYPGPASLTQIYGTFNRAMLRLIPSLRTYAEPLTAAMVEFYTMSQERFTQDTQPHYIYSPREMTRWVRGIFEALRPLETLPVEGLIRIWAHEALRLFQDRLVEDEERRWTDENIDTVALKHFPNIDREKAMSRPILYSNWLSKDYIPVDQEELRDYVKARLKVFYEEELDVPLVLFNEVLDHVLRIDRIFRQPQGHLLLIGVSGAGKTTLSRFVAWMNGLSVYQIKVHRKYTGEDFDEDLRTVLRRSGCKNEKIAFIMDESNVLDSGFLERMNTLLANGEVPGLFEGDEYATLMTQCKEGAQKEGLMLDSHEELYKWFTSQVIRNLHVVFTMNPSSEGLKDRAATSPALFNRCVLNWFGDWSTEALYQVGKEFTSKMDLEKPNYIVPDYMPVVYDKLPQPPSHREAIVNSCVFVHQTLHQANARLAKRGGRTMAITPRHYLDFINHYANLFHEKRSELEEQQMHLNVGLRKIKETVDQVEELRRDLRIKSQELEVKNAAANDKLKKMVKDQQEAEKKKVMSQEIQEQLHKQQEVIADKQMSVKEDLDKVEPAVIEAQNAVKSIKKQHLVEVRSMANPPAAVKLALESICLLLGESTTDWKQIRSIIMRENFIPTIVNFSAEEISDAIREKMKKNYMSNPSYNYEIVNRASLACGPMVKWAIAQLNYADMLKRVEPLRNELQKLEDDAKDNQQKANEVEQMIRDLEASIARYKEEYAVLISEAQAIKADLAAVEAKVNRSTALLKSLSAERERWEKTSETFKNQMSTIAGDCLLSAAFIAYAGYFDQQMRQNLFTTWSHHLQQANIQFRTDIARTEYLSNADERLRWQASSLPADDLCTENAIMLKRFNRYPLIIDPSGQATEFIMNEYKDRKITRTSFLDDAFRKNLESALRFGNPLLVQDVESYDPVLNPVLNREVRRTGGRVLITLGDQDIDLSPSFVIFLSTRDPTVEFPPDLCSRVTFVNFTVTRSSLQSQCLNEVLKAERPDVDEKRSDLLKLQGEFQLRLRQLEKSLLQALNEVKGRILDDDTIITTLENLKREAAEVTRKVEETDIVMQEVETVSQQYLPLSTACSSIYFTMESLKQIHFLYQYSLQFFLDIYHNVLYENPNLKGVTDHTQRLSIITKDLFQVAFNRVARGMLHQDHITFAMLLARIKLKGTVGEPTYDAEFQHFLRGNEIVLSAGSTPRIQGLTVEQAEAVVRLSCLPAFKDLIAKVQADEHPLARPSTACS

SEQ ID NO: 56713 - protein, 579 aa, Homo sapiens
MPAPRAREQPRVPGERQPLLPRGARGPRRWRRAAGAAVLLVEMLERAAFFGVTANLVLYLNSTNFNWTGEQATRAALVFLGASYLLAPVGGWLADVYLGRYRAVALSLLLYLAASGLLPATAFPDGRSSFCGEMPASPLGPACPSAGCPRSSPSPYCAPVLYAGLLLLGLAASSVRSNLTSFGADQVMDLGRDATRRFFNWFYWSINLGAVLSLLVVAFIQQNISFLLGYSIPVGCVGLAFFIFLFATPVFITKPPMGSQVSSMLKLALQNCCPQLWQRHSARDRQCARVLADERSPQPGASPQEDIANFQVLVKILPVMVTLVPYWMVYFQSTYVLQGLHLHIPNIFPANPANISVALRAQGSSYTIPEAWLLLANVVVVLILVPLKDRLIDPLLLRCKLLPSALQKMALGMFFGFTSVIVAGVLEMERLHYIHHNETVSQQIGEVLYNAAPLSIWWQIPQYLLIGISEIFASIPGLEFAYSEAPRSMQGAIMGIFFCLSGVGSLLGSSLVALLSLPGGWLHCPKDFGNINNCRMDLYFFLLAGIQAVTALLFVWIAGRYERASQGPASHSRFSRDRG

SEQ ID NO: 56714 - protein, 172 aa, Homo sapiens
QQLDLFTDAAETEKMAKSLEDSEGVCFVPSFSGLQAPLNDPWACASFMGLKPSTSKYHLVRAILESIAFRNKQLYEMMKKEIHIPVRKIRADGGVCKNGFVMQMTSDLINENIDRPADIDMSCLGAASLAGLAVGMCEIYKNESFLANSSLQIAFLLSNYKILESLESLGVH

SEQ ID NO: 56715 - protein, 56 aa, Homo sapiens
MEPRAGVSKQDIREQIWGYMESQNLADFPRPVHHRIPNFKAGESGREKATPIWNMP

SEQ ID NO: 56716 - protein, 426 aa, Homo sapiens
MEEEDEEARALLAGGPDEADRGAPAAPGALPALCDPSRLAHRLLVLLLMCFLGFAIFAMIILLPFRLKLNEWGTIIFSCFVCIGQVVFALGGIFNAFWLMEFGRFVFGIGGESLAVAQNTYAVSWFKGKELNLVFGLQLSMARIGSTVNMNLMGWLYSKIEALLGSAGHTTLGITLMIGGITCILSLICALALAYLDQRAERILHKEQGKTGEVIKLTDVKDFSLPLWLIFIICVCYYVAVFPFIGLGKVFFTEKFGFSSQAASAINSVVYVISAPMSPVFGLLVDKTGKNIIWVLCAVAATLVSHMMLAFTMWNPWIAMCLLGLSYSLLACALWPMVAFVVPEHQLGTAYGFMQSIQNLGLAIISIIAGMILDSRGYLFLEVFFIACVSLSLLSVVLLYLVNRAQGGNLNYSARQREEIKFSHTE

SEQ ID NO: 56717 - protein, 166 aa, Homo sapiens
MQAQQYQQQRRKFAAAFLAFIFILAAVDTAEAGKKEKPEKKVKKSDCGEWQWSVCVPTSGDCGLGTREGTRTGAECKQTMKTQRCKIPCNWKKQFGAECKYQFQAWGECDLNTALKTRTGSLKRALHNAECQKTVTISKPCGKLTKPKPQEKGKWRHRSGESLRRW

SEQ ID NO: 56718 - protein, 386 aa, Homo sapiens
MKEEEGFPEDEATESEKTLSLVKELDAFPKVPESYVETSASGGTVSLIAFTTMALLTIMEFSVYQDTWMKYEYEVDKDFSSKLRINIDITVAMKCQYVGADVLDLAETMVASADGLVYEPTVFDLSPQQKEWQRMLQLIQSRLQEEHSLQDVIFKSAFKSTSTALPPREDDSSQSPNACRIHGHLYVNKVAGNFHITVGKAIPHPRGHAHLAALVNHESYNFSHRIDHLSFGELVPAIINPLDGTEKIAIDHNQMFQYFITVVPTKLHTYKISADTHQFSVTERERIINHAAGSHGVSGIFMKYDLSSLMVTVTEEHMPFWQFFVRLCGIVGGIFSTTGMLHGIGKFIVEIICCRFRLGSYKPVNSVPFEDGHTDNHLPLLENNTH

SEQ ID NO: 56719 - protein, 767 aa, Homo sapiens
MNTGLTRLLWPSWLPDGDMSHPQPELFLFPKAQPNSMVVEHPEFLKAGKEPGLQIWRVEKFDLVPVPTNLYGDFFTGDAYVILKTVQLRNGNLQYDLHYWLGNECSQDESGAAAIFTVQLDDYLNGRAVQHREVQGFESATFLGYFKSGLKYKKGGVASGFKHVVPNEVVVQRLFQVKGRRVVRATEVPVSWESFNNGDCFILDLGNNIHQWCGSNSNRYERLKATQVSKGIRDNERSGRARVHVSEEGTEPEAMLQVLGPKPALPAGTEDTAKEDAANRKLAKLYKVSNGAGTMSVSLVADENPFAQGALKSEDCFILDHGKDGKIFVWKGKQANTEERKAALKTASDFITKMDYPKQTQVSVLPEGGETPLFKQFFKNWRDPDQTDGLGLSYLSSHIANVERVPFDAATLHTSTAMAAQHGMDDDGTGQKQIWRIEGSNKVPVDPATYGQFYGGDSYIILYNYRHGGRQGQIIYNWQGAQSTQDEVAASAILTAQLDEELGGTPVQSRVVQGKEPAHLMSLFGGKPMIIYKGGTSREGGQTAPASTRLFQVRANSAGATRAVEVLPKAGALNSNDAFVLKTPSAAYLWVGTGASEAEKTGAQELLRVLRAQPVQVAEGSEPDGFWEALGGKAAYRTSPRLKDKKMDAHPPRLFACSNKIGRFVIEEVPGELMQEDLATDDVMLLDTWDQVFVWVGKDSQEEEKTEALTSAKRYIETDPANRDRRTPITVVKQGFEPPSFVGWFLGWDDDYWSVDPLDRAMAELAA

SEQ ID NO: 56720 - protein, 129 aa, Homo sapiens
MGVQVETISPGDGRTFPKRGQTCVVHYTGMLEDGKKFDSSRDRNKPFKFMLGKQEVIRGWEEGVAQVCSLICFVLLSSIYLLYFFIGGIFIRFKNKKSEKSHPHAIPSDQYPHKKLLLLMFLVLWFKHI

SEQ ID NO: 56721 - protein, 75 aa, Homo sapiens
MDPVSQLASAGTFRVLKEPLAFLRALELLFAIFAFATCGGYSGGLRLSVDCVNKTESNLSIDIAFAYPFRTSLSL

SEQ ID NO: 56722 - protein, 10 aa, Homo sapiens
MSAFDMSHGF

SEQ ID NO: 56723 - protein, 1296 aa, Homo sapiens
  MOD_RES (1)..(1): Any amino acid
XLERRKRLEQQRKDYAAPIPTVPLEFLPEVIELSSGEEDTLHIVDSSESVSEDDEEEEKGGTHVNDVLNQRDALGRVLVNLNHPPEEENVFLAPQLARAVKPHQIGGIRFLYDNLVESLERFKTSSGFGCILAHSMGLGKTLQVISFIDVLFRHTPAKTVLAIVPVNTLQNWLAEFNMWLPPPEALPADNKPEEVQPRFFKVHILNDEHKTMASRAKVMADWVSEGGVLLMGYEMYRLLTLKKSFATGRPKKTKKRSHPVIIDLDEEDRQQEFRREFEKALCRPGPDVVICDEGHRIKNCQASTSQALKNIRSRRRVVLTGYPLQNNLIEYWCMVDFVRPDFLGTRQEFSNMFERPILNGQCIDSTPQDVRLMRYRSHVLHSLLEGFVQRRGHTVLKIHLPAKEENVILVRLSKIQRDLYTQFMDRFRDCGSSGWLGLNPLKAFCVCCKIWNHPDVLYEALQKESLANEQDLDVEELGSAGTSARCPPQGTKGKGEDSTLASSMGEATNSKFLQGVGFNPFQERGNNIVTYEWAKDLLTNYQTGVLENSPKMVLLFHLIEESVKLGDKILVFSQSLSTLALIEEFLGKREVPCPPGTEGQGAQKWVRNISYFRLDGSTPAFERERLINQFNDPSNLTTWLFLLSTRAGCLGVNLIGANRVVVFDASWNPCHDAQAVCRVYRYGQKKPCYIYRLVADYTLEKKIYDRQISKQGMSDRVVDDLNPMLNFTRKEVENLLHFVEKEPAPQVSLNVKGIKESVLQLACLKYPHLITKEPFEHESLLLNRKDHKLTKAEKKAAKKSYEEDKRTSVPYTRPSYAQYYPASDQSLTSIPAFSQRNWQPTLKGDEKPVASVRPVQSTPIPMMPRHVPLGGSVSSASSTNPSMNFPINYLQRAGVLVQKVVTTTDIVIPGLNSSTDVQARINAGESIHIIRGTKGTYIRTSDGRIFAVRATGKPKVPEDGRMAASGSQGPSCESTSNGRHSASSPKAPDPEGLARPVSPDSPEIISELQQYADVAAARESRQSSPSTNAALPGPPAQLMDSSAVPGTALGTEPRLGGHCLNSSLLVTGQPCGDRHPVLDLRGHKRKLATPPAAQESSRRRSRKGHLPAPVQPYEHGYPVSGGFAMPPVSLNHNLTTPFTSQAGENSLFMGSTPSYYQLSNLLADARLVFPVTTDPLVPAGPVSSSSTATSVTASNPSFMLNPSVPGILPSYSLPFSQPLLSEPRMFAPFPSPVLPSNLSRGMSIYPGYMSPHAGYPAGGLLRSQVPPFDSHEVAEVGFSSNDDEDKDDDVIEVTGK

SEQ ID NO: 56724 - protein, 136 aa, Homo sapiens
MGKQNSKLRPEVMQDLLESTDFTEHEIQEWYKGFLRDCPSGHLSMEEFKKIYGNFFPYGDASKFAEHVFRTFDANGDGTIDFREFIIALSVTSRGKLEQKLKWAFSMYDLDGNGYISKAEMLEIVQAIYKMVSSVM

SEQ ID NO: 56725 - protein, 140 aa, Homo sapiens
METCDSPPISRQENGQSTSKLCGTTQLDNEVPEKVAGMEPDRENSSTDDNLKTDERKSEALLGFSVENAAATQVTSAKEIPCNECATSFPSLQKYMEHHCPNARLPVLKDDNESEISELEDSDVENLTGEIVYQPDGSAY

SEQ ID NO: 56726 - protein, 214 aa, Homo sapiens
MTVFFKTLRNHWKKTTAGLCLLTWGGHWLYGKHCDNLLRRAACQEAQVFGNQLIPPNAQVKKATVFLNPAACKGKARTLFEKNAAPILHLSGMDVTIVKTDYEGQAKKLLELMENTDVIIVAGGDGTLQEVVTGVLRRTDEATFSKIPIGFIPLGETSSLSHTLFAESGNKVQHITDATLAIVKGETVPLDVLQIKVLVSWASKNQSSPLFQHS

SEQ ID NO: 56727 - protein, 454 aa, Homo sapiens
MALIPDLAMETWLLLAVSLVLLYLFYDGQQPVLAITDPDMIKTVLVKECYSVFTNRRPFGPVGFMKSAISIAEDEEWKRLRSLLSPTFTSGKLKEMVPIIAQYGDVLVRNLRREAETGKPVTLKDVFGAYSMDVITSTSFGVNIDSLNNPQDPFVENTKKLLRFDFLDPFFLSITVFPFLIPILEVLNICVFPREVTNFLRKSVKRMKESRLEDTQKHRVDFLQLMIDSQNSKETESHKALSDLELVAQSIIFIFAGYETTSSVLSFIMYELATHPDVQQKLQEEIDAVLPNKAPPTYDTVLQMEYLDMVVNETLRLFPIAMRLERVCKKDVEINGMFIPKGVVVMIPSYALHRDPKYWTEPEKFLPERFSKKNKDNIDPYIYTPFGSGPRNCIGMRFALMNMKLALIRVLQNFSFKPCKETQIPLKLSLGGLLQPEKPVVLKVESRDGTVSGA

SEQ ID NO: 56728 - protein, 38 aa, Homo sapiens
GYEINKVRAKRSSKMYLKTRSQMPYKGLKFPQIRPTPS

SEQ ID NO: 56729 - protein, 85 aa, Homo sapiens
MGPEALSSLLLLLLVASGDADMKGHFDPAKCRYALGMQDRTIPDSDISASSSWSDSTAARHSRLESSDGDGAWCPAGSVFPKEEE

SEQ ID NO: 56730 - protein, 140 aa, Homo sapiens
MPTVDDILEQVGESGWFQKQAFLILCLLSAAFAPICVGIVFLGFTPDHHCQSPGVAELSQRCGWSPAEELNYTVPGLGPAGEAFLGQCRRYEVDWNQSALSCVDPLASLATNRSHLPLGPCQDGWVYDTPGSSIVTEVWP

SEQ ID NO: 56731 - protein, 73 aa, Homo sapiens
MNPREEKVKIITEEFIENDEDADMGRQNKNSKVRRQPRKKQAEANSFLPSLLADPPPPLRRSSPPRLGASRAG

SEQ ID NO: 56732 - protein, 256 aa, Homo sapiens
GLLSTLEDARMQTMLAIAFGANNLTFTGTISGDVCVWKDHILCRIVARAHNGPVFAMYTTLRDGLIVTGGKERPSKEGGAVKLWDQELRRCRAFRLETGQATDCVRSVCRGKGKILVGTRNAEIIEVGEKNAACNILVNGHVDGPIWGLATHPSRDFFLSAAEDGTVRLWDIADKMLNKVNLGHAARTVCYSPEGDMVAIGMKNGEFIILLVSSLKIWGKKRDRRCAIHDIRISYCKDIPSFVIQMDFSADSSYLQ

SEQ ID NO: 56733 - protein, 224 aa, Homo sapiens
  MOD_RES (1)..(1): Any amino acid
XAAAPDDLALLKNLRSEEQKKKNRKKLSEKPKPNGRTVEVAEGEAVRTPQSVTAKQPPEIDKKNEKSKKNKKKSKSDAKAVQNSSRHDGKEVDEGAWETKISHREKRQQRKRDKVLTDSGSLDSTIPGIENTITVTTEQLTTASFPVGSKKNKVSSGLNENLTVNGGGWNEKSVKLSSQISAGEEKWNSVSPASAGKRKTEPSAWSQDTGDANTNGKDWGRSWS

SEQ ID NO: 56734 - protein, 716 aa, Homo sapiens
MSHVAVENALGLDQQFAGLDLNSSDNQSGGSTASRRYIPPHLRNREATKGFYDKDSSGWSSSKDKDAYSSFGSRSDSRGKSSFFSDRGSGSRGRFDDRGRSDYDGIGSRGDRSGFGKFERGGNSRWCDKSDEDDWSKPLPPSERLEQELFSGGNTGINFEKYDDIPVEATGNNCPPHIESFSDVEMGEIIMGNIELTRYTRPTPVQKHAIPIIKEKRDLMACAQTGSGKTAAFLLPILSQIYSDGPGEALRAMKENGRYGRRKQYPISLVLAPTRELAVQIYEEARKFSYRSRVRPCVVYGGADIGQQIRDLERGCHLLVATPGRLVDMMERGKIGLDFCKYVLFCFCFFVLFCFVLLFLAELRSCCPGWSAMARSRLTTTSASRVQAILLPQPPRYLVLDEADRMLDMGFEPQIRRIVEQDTMPPKGVRHTMMFSATFPKEIQMLARDFLDEYIFLAVGRVGSTSENITQKVVWVEESDKRSFLLDLLNATGKDSLTLVFVETKKGADSLEDFLYHEGYACTSIHGDRSQRDREEALHQFRSGKSPILVATAVAARGLDISNVKHVINFDLPSDIEEYVHRIGRTGRVGNLGLATSFFNERNINITKDLLDLLVEAKQEVPSWLENMAYEHHYKGSSRGRSKSSRFSGGFGARDYRQSSGASSSSFSSSRASSSRSGGGGHGSSRGFGGGGYGGFYNSDGYGGNYNSQGVDWWGN

SEQ ID NO: 56735 - protein, 63 aa, Homo sapiens
MTRGFAPILPVEFHKMGSFRRPRPRFMSSPVLSDLPRFQAARQALQLSSSSAWNSVQTAVINV

SEQ ID NO: 56736 - protein, 21 aa, Homo sapiens
  MOD_RES (1)..(1): Any amino acid
XIFCALDPQDRKWIKDGPSSK

SEQ ID NO: 56737 - protein, 50 aa, Homo sapiens
MSASPDDLSTGGRLQNMTVDECFQSRNTVLQGQPFGGVPTVLCLNIALWV

SEQ ID NO: 56738 - protein, 177 aa, Homo sapiens
  MOD_RES (1)..(1): Any amino acid
XDDELTYKTLFVPVNEGFVDNMTLSGPDLELHASNATLLSANASQGKLLPAHSGLSLIISDAGPDNSSWAPVQAVLAPEAPPVAAGVGAVLAAGALLGLVAGALYLRARGKPMGFGFSAFQAEDDADDDFSPWQEGTNPTLVSVPNPVFGSDTFCEPFDDSLLEEDFPDTQRILTVK

SEQ ID NO: 56739 - protein, 176 aa, Homo sapiens
MDSLEEPQKKVFKARKTMRVSDRQQLEAVYKVKEELLKTDVKLLNGNHENGDLDPTSPLENMDYIKDKEEVNGIEEICFDPEGSKAEWKETPCILSVNVKNKQDDDLNCEPLSPHNITPEPVSKLPAEPVSGDPAPGDLDAGDPASGVLASGDSTSGDPTSSEPSSSDAASGDATS

SEQ ID NO: 56740 - protein, 47 aa, Homo sapiens
MATGLGEPVYGLSEDERDRLHKLTYESPNYPENLKNGTLWRIFCFLC

SEQ ID NO: 56741 - protein, 868 aa, Homo sapiens
MESGHLLWALLFMQSLWPQLTDGATRVYYLGIRDVQWNYAPKGRNVITNQPLDSDIVASSFLKSDKNRIGGTYKKTIYKEYKDDSYTDEVAQPAWLGFLGPVLQAEVGDVILIHLKNFATRPYTIHPHGVFYEKDSEGSLYPDGSSGPLKADDSVPPGGSHIYNWTIPEGHAPTDADPACLTWIYHSHVDAPRDIATGLIGPLITCKRGALDGNSPPQRQDVDHDFFLLFSVVDENLSWHLNENIATYCSDPASVDKEDETFQESNRMHAINGFVFGNLPELNMCAQKRVAWHLFGMGNEIDVHTAFFHGQMLTTRGHHTDVANIFPATFVTAEMVPWEPGTWLISCQVNSHFRDGMQALYKVKSCSMAPPVDLLTGKVRQYFIEAHEIQWDYGPMGHDGSTGKNLREPGSISDKFFQKSSSRIGGTYWKVRYEAFQDETFQEKMHLEEDRHLGILGPVIRAEVGDTIQVVFYNRASQPFSMQPHGVFYEKDYEGTVYNDGSSYPGLVAKPFEKVTYRWTVPPHAGPTAQDPACLTWMYFSAADPIRDTNSGLVGPLLVCRAGALGADGKQKGVDKEFFLLFTVLDENKSWYSNANQAAAMLDFRLLSEDIEGFQDSNRMHAINGFLFSNLPRLDMCKGDTVAWHLLGLGTETDVHGVMFQGNTVQLQGMRKGAAMLFPHTFVMAIMQPDNLGTFEIYCQAGSHREAGMRAIYNVSQCPGHQATPRQRYQAARIYYIMAEEVEWDYCPDRSWEREWHNQSEKDSYGYIFLSNKDGLLGSRYKKAVFREYTDGTFRIPRPRTGPEEHLGILGPLIKGEVGDILTVVFKNNASRPYSVHAHGVLESTTVWPLAAEPECLNHFTFPSAKCE

SEQ ID NO: 56742 - protein, 50 aa, Homo sapiens
MEEIPAQEAAGSPRVQFQSLETQSECLSPEPQFVQDTDMEQGLTGVGSWD

SEQ ID NO: 56743 - protein, 653 aa, Homo sapiens
MPLFFRKRKPSEEARKRLEYQMCLAKEAGADDILDISKCELSEIPFGAFATCKVLQKKVLIVHTNHLTSLLPKSCSLLSLATIKVLDLHDNQLTALPDDLGQLTALQVLNVERNQLMQLPRSIGNLTQLQTLNVKDNKLKELPDTVGELRSLRTLNISGNEIQRLPQMLAHVRTLEMLSLDASAMVYPPREVCGAGTAAILQFLCKESGLEYYPPSQYLLPILEQDGIENSRDSPDGPTDRFSREELEWQNRFSDYEKRKEQKMLEKLEFERRLELGQREHTQLLQQSSSQKDEILQTVKEEQSRLEQGLSEHQRHLNAERQRLQEQLKQTEQNISSRIQKLLQDNQRQKKSSEILKSLENERIRMEQLMSITQEETESLRRRDVASAMQQMLTESCKNRLIQMAYESQRQNLVQQACSSMAEMDERFQQILSWQQMDQNKAISQILQESAMQKAAFEALQVKKDLMHRQIRSQIKLIETELLQLTQLELKRKSLDTESLQEMISEQRWALSSLLQQLLKEKQQREEELREILTELEAKSETRQENYWLIQYQRLLNQKPLSLKLQEEGMERQLVALLEELSAEHYLPIFAHHRLSLDLLSQMSPGDLAKVGVSEAGLQHEILRRVQELLDAARIQPGTSTAPASSRAETTNG

SEQ ID NO: 56744 - protein, 194 aa, Homo sapiens
  MOD_RES (1)..(1): Any amino acid
XDDPGEEPRWLPVGSGDAPFQALHGHVRLLPGRWHLLGVHPLQEHINYYFINSQGHPIEGLAVMYYIAHLLKGALLFITIALIGSGWAFIKYVLSDKEKKVFGIVIPMQVLANVAYIIIESREEGASDYVLWKEILFLVDLICCGAILFPVVWSIRHLQDASGTDGKVAVNLAKLKLFRHYYVMVICYVYFTRI

SEQ ID NO: 56745 - protein, 264 aa, Homo sapiens
MLDNNTGSGNETGILSEDALLRISIPLDSNLRPEKCRRFVHPQWQLLHLNGTIHSTSEADTEPCVDGWVYDQSYFPSTIVTKWDLVCDYQSLKSVVQFLLLTGMLVGGIIGGHVSDRWLVESARWLIITNKLDEGLKALRKVARTNGIKNAEETLNIEVVRSTMQEELDAAQTKTTVCDLFRNPSMRKRICILVFLRFANTIPFYGTMVNLQHVGSNIFLLQKCRPCVWLWHVWESAVLLLLFPVLLFTSLNSSPLFSGQELQE

SEQ ID NO: 56746 - protein, 89 aa, Homo sapiens
MKQQTRVIKKNAFSPRWNETFTFIIHVPELALIRFVVEGQGLIAGNEFLGQYTLPLLCMNKGYRRIPLFSRMGESLEPASLFVYVWYVR

SEQ ID NO: 56747 - protein, 575 aa, Homo sapiens
MRTPQLALLQVFFLVFPDGVRPQPSSSPSGAVPTSLELQRGTDGGTLQSPSEATATRPAVPGLPTVVPTLVTPSAPGNRTVDLFPVLPICVCDLTPGACDINCCCDRDCYLLHPRTVFSFCLPGSVRSSSWVCVDNSVIFRSNSPFPSRVFMDSNGIRQFCVHVNNSNLNYFQKLQKVNATNFQALAAEFGGESFTSTFQTQSPPSFYRAGDPILTYFPKWSVISLLRQPAGVGAGGLCAESNPAGFLESKSTTCTRFFKNLASSCTLDSALNAASYYNFTVLKVPRSMTDPQNMEVTYEIETNGTFGIQKVSVSLGQTNLTVEPGASLQQHFILRFRAFQQSTAASLTSPRSGNPGYIVGKPLLALTDDISYSSQGNGSCSVKRHEVQFGVNAISGCKLRLKKADCSHLQQEIYQTLHGRPRPEYVAIFGNADPAQKGGWTRILNRHCSISAINCTSCCLIPVSLEIQVLWAYVGLLSNPQAHVSGVRFLYQCQSIQDSQQVTEVSLTTLVNFVDITQKPQPPRGQPKMDWKWPFDFFPFKVAFSRGVFSQKCSVSPILILCLLLLGVLNLETM

SEQ ID NO: 56748 - protein, 1009 aa, Homo sapiens
MRSAAKPWNPAIRAGGHGPDRVRPLPAASSGMKSSKSSTSLAFESRLSRLKRASSEDTLNKPGSTAASGVVRLKKTATAGAISELTESRLRSGTGAFTTTKRTGIPAPREFSVTVSRERSVPRGPSNPRKSVSSPTSSNTPTPTKHLRTPSTKPKQENEGGEKAALESQVRELLAEAKAKDSEINRLRSELKKYKEKRTLNAEGTDALGPNVDGTSVSPGDTEPMIRALEEKNKNFQKELSDLEEENRVLKEKLIYLEHSPNSEGAASHTGDSSCPTSITQESSFGSPTGNQMSSDIDEYKKNIHGNALRTSGSSSSDVTKASLSPDASDFEHITAETPSRPLSSTSNPFKSSKCSTAGSSPNSVSELSLASLTEKIQKMEENHHSTAEELQATLQELSDQQQMVQELTAENEKLVDEKTILETSFHQHRERAEQLSQENEKLMNLLQERVKNEEPTTQEGKIIELEQKCTGILEQGRFEREKLLNIQQQLTCSLRKVEEENQGALEMIKRLKEENEKLNEFLELERHNNNMMAKTLEECRVTLEGLKMENGSLKSHLQGEKQKATEASAVEQTAESCEVQEMLKVARAEKDLLELSCNELRQELLKANGEIKHVSSLLAKVEKDYSYLKEICDHQAEQLSRTSLKLQEKASESDAEIKDMKETIFELEDQVEQHRAVKLHNNQLISELESSVIKLEEQKSDLERQLKTLTKQMKEETEEWRRFQADLQTAVVVANDIKCEAQQELRTVKRKLLEEEEKNARLQKELGDVQGHGRVVTSRAAPPPVDEEPESSEVDAAGRWPGVCVSRTSPTPPESATTVKSLIKSFDLGRPGGAGQNISVHKTPRSPLSGIPVRTAPAAAVSPMQRHSTYSSVRPASRGVTQRLDLPDLPLSDILKGRTETLKPDPHLRKSPSLESLSRPPSLGFGDTRLLSASTRAWKPQSKLSVERKDPLAALAREYGGSKRNALLKWCQKKTQGYAELSEMLYTDRPDWQSVMQYVAQIYKYFET

SEQ ID NO: 56749 - protein, 196 aa, Homo sapiens
MSLGRLCRLLKPALLCGALAAPGLAGTMCASRDDWRCARSMHEFSAKDIDGHMVNLDKYRGFVCIVTNVASQGKTEVNYTQLVDLHARYAECGLRILAFPCNQFGKQEPGSNEEIKEFAAGYNVKFDMFSKICVNGDDAHPLWKWMKIQPKGKGILGNAIKWNFTKFLIDKNGCVVKRYGPMEEPLVIEKDLPHYF

SEQ ID NO: 56750 - protein, 144 aa, Homo sapiens
TLNIYQNLNRRQHEHVIHLMDIAIIATDLALYFKKRAMFQKIVDESKNYQDKKSWVEYLSLETTRKEIVMAMMMTACDLSAITKPWEVQSKVALLVAAEFWEQGDLERTVLDQQPIPMMDRNKAAELPKLQVGFIDFVCTFVYK

SEQ ID NO: 56751 - protein, 148 aa, Homo sapiens
MAVGLLKAMYQELVTFRDVAVDFSQEEWDCLDSSQRHLYSNVMLENYRILVSLGLCFSKPSVILLLEQGKAPWMVKRELTKGLCSGWEPICETEELTPKQDFYEEHQSQKIIETLTSYNLEYSSLREEWKCEGYFERQPGNQKACFKE

SEQ ID NO: 56752 - protein, 109 aa, Homo sapiens
MTLHATRGAALLSWVNSLHVADPVEAVLQLQDCSIFIKIIDRIHGTEEGQQILKQPVSERLDFVCSFLQKNRKHPSSPECLVSAQKVLEGSELELAKMTMLLLYHSTMS

SEQ ID NO: 56753 - protein, 159 aa, Homo sapiens
MMMQNLLLEEGGLVQVESVNLQVATYSKFQPQSPDFLDITNPKAVLENALRNFACLTTGDVIAINYNEKIYELRVMETKPDKAVSIIECDMNVDFDAPLGYKEPERQVQHEESTEGEADHSGYAGELGFRAFSGSGNRLDGKKKGVEPSPSPIKPGDIK

SEQ ID NO: 56754 - protein, 223 aa, Homo sapiens
MSRLGLPEEPVRNSLLDDAKARLRKYDIGGKYSHLPYNKYSVLLPLVAKEGKLHLLFTVRSEKPCEVLAPPLPSAMIVSFLRSPQKPSRRQHHAPCTACETTDTLITPFVGLIDHNFQAQPNPAEVKDVFLVPLAYFLHPQVHDQHYVTRLGHRFINHIFEYTNPEDGVTYQIKGMTANLAVLVAFIILEKKPTFEVQFNLNDVLASSEELFLKVHKKATSRL

SEQ ID NO: 56755 - protein, 106 aa, Homo sapiens
MWLKVGGLLRGTGGQLGQTVGWPCGALGPGPHRWGPCGGSWAQKFYQDGPGRGLGEEDIRRAREARPRKTPRPQSLTLSPRLECSGAITAASNFWAQAILSPQPPE

SEQ ID NO: 56756 - protein, 265 aa, Homo sapiens
  MOD_RES (1)..(1): Any amino acid
XPRAAARVRAAGEALERRRRWLGRLSPSAPRPRRARPSLRRASAWVRDRVAGRPGALPGFQASGVAGEAQKAPGHPAAPAPAASCLTEADGRVFLHAFRLALIQLQISSIKSDNVTRACSFIREAATQGAKIVSLPECFNSPYGAKYFPEYAEKIPGESTQKLSEVAKECSIYLIGGSIPEEDAGKLYNTCAVFGPDGTLLAKYRKIHLFDIDVPGKITFQESKTLSPGDSFSTFDTPYCRVGLGICYDMRFAELAQIYAQRGEA

SEQ ID NO: 56757 - protein, 296 aa, Homo sapiens
MQHPSGGRPCGARKSADPKRPCDHPAWAHKKTHVRRERAREGSSFRKGFRLDTDDGQLPRAAPERTDAKPTAFPCQVLTQRCGRRPGRRERRKQRAVELSFICGTCGKALSCHSRLLAHQTVHTGTKAFECPECGQTFRWASNLQRHQKNHTREKPFCCEACGQAFSLKDRLAQHRKVHTEHRPYSCGDCGKAFKQKSNLLRHQLVHTGERPFYCADCGKAFRTKENLSHHQRVHSGEKPYTCAECGKSFRWPKGFSIHRRLHLTKRFYECGHCGKGFRHLGFFTRHQRTHRHGEV

SEQ ID NO: 56758 - protein, 221 aa, Homo sapiens
MWLKLFFLLLYFLVLFVLARFFEAIVWYETGIFATQLVDPVALSFKKLKTILECRGLGYSGLPEKKDVRELVEKSGDLMEGELYSALKEEEASESVSSTNFSGEMHFYELVEDTKDGIWLVQVNEWSLKIRKEMRVVDRQIRDIQREEEKVKRSVKDAAKKGQKDVCIVLAKEMIRSRKAVSKLYASKAHMNSVLMGMKNQLAVLRVAGSLQKSTEVMKAM

SEQ ID NO: 56759 - protein, 134 aa, Homo sapiens
MWGYLSLMPVFLAVWAISGVWIVFAIAVTNRTVDLSKGFPYISICGSFPPQSCIFSQVLNMGAALAAWICIVRYHQLRDWGVRRWPNQLILWTGLLCALGTSVVGNFQEKNQRPTHLAGAFLAFILGNVYFWLQ

SEQ ID NO: 56760 - protein, 110 aa, Homo sapiens
  MOD_RES (1)..(1): Any amino acid
XLERAEERAEVSELKCGDLEEELKNVTNNLKSLEAASEKYSEKEDKYEEEIKLLSDKLKEAETRAEFAERTVAKLEKTIDDLEEKLAQAKEENVGLHQTLDQTLNELNCI

SEQ ID NO: 56761 - protein, 59 aa, Homo sapiens
MPSSTSPDQGDDLENCILRFSDLDLKDMSLINPSSSLKAELDGSTKKKYSFAKKKVEFL

SEQ ID NO: 56762 - protein, 142 aa, Homo sapiens
MAEERVATRTQFPVSTESQKPRQKKAPEFPILEKQNWLIHLHYIRKDYEACKAVIKEQLQETQGLCEYAIYVQALIFRLEGNIQESLELFQTCAVLSPQSADNLKQVARSLFLLGKHKAAIEVYNEAAKLNQKDWPRRSAIT

SEQ ID NO: 56763 - protein, 226 aa, Homo sapiens
MCIIFFKFDPRPVSKNAYRLILAANRDEFYSRPSKLADFWGNNNEILSGLDMEEGKEGGTWLGISTRGKLAALTNYLQPQLDWQARGRGELVTHFLTTDVDSLSYLKKVSMEGHLYNGFNLIAADLSTAKGDVICYYGNRGEPDPIVLTPGTYGLSNALLETPWRKLCFGKQLFLEAVERSQALPKDVLIASLLDVLNNEEAQLPDPAIEDQGGEYVQPMLSKYAA

SEQ ID NO: 56764 - protein, 517 aa, Homo sapiens
MRYCERYNQYCKPTHEEGNFALKRCITLSEVTKNSLEKILPQLKCHFTWNLFKEDSVSRDLEDRVCNQIEFLNTEFKATMYNLLAYIKHLDGNNEAALECLRQAEELIQQEHADQAEIRSLVTWGNYAWVYYHLGRLSDAQIYVDKVKQTCKKFSNPYSIEYSELDCEEGWTQLKCGRNERAKVCFEKALEEKPNNPEFSSGLAIAMYHLDNHPEKQFSTDVLKQAIELSPDNQYVKVLLGLKLQKMNKEAEGEQFVEEALEKSPCQTDVLRSAAKFYRRKGDLDKAIELFQRVLESTPNNGYLYHQIGCCYKAKVRQMQNTGESEASGNKEMIEALKQYAMDYSNKALEKGLNPLNAYSDLAEFLETECYQTPFNKEVPDAEKQQSHQRYCNLQKYNGKSEDTAVQHGLEGLSISKKSTDKEEIKDQPQNVSENLLPQNAPNYWYLQGLIHKQNGDLLQAAKCYEKELGRLLRDAPSGIGSIFLSASELEDGSEEMGQGAVSSSPRELLSNSEQLN

SEQ ID NO: 56765 - protein, 197 aa, Homo sapiens
  MOD_RES (1)..(1): Any amino acid
XCDKKFRTQFYIDWCKISLVDKTKQVSTYQEVIRGEGILPDGGEYKPPSDSLKSRDYYTDFLITLAVPSAVALVLFLILAYIMCCRREGVEKRNMQTPDIQLVHHSAIQKSTKELRDMSKNREIAWPLSTLPVFHPVTGEIIPPLHTDNYDSTNMPLMQTQQNLPHQTQIPQQQTTGTFRNVLDVFIQKLSSLLLLS

SEQ ID NO: 56766 - protein, 898 aa, Homo sapiens
MGDPDLLEVLAEEGEKVNKHIDYSFQMSESLSSRETSFLINEETMFQKNQQSKDSIFFRDGIRQIDFVLSYVDDVKKDAELKAERRKEFETNLRKTGLELEIEDKRDSEDGRTYFVKIHAPWEVLVTYAEVLGIKMPIKESDIPRPKHTPISYVLGPVRLPLSVKYPHPEYFTAQFSRHRQELFLIEDQATFFPSSSRNRIVYYILSRCPFGIEDGKKRFGIERLLNSNTYSSAYPLHDGQYWKPSEPPNPTNERYTLHQNWARFSYFYKEQPLDLIKNYYGEKIGIYFVFLGFYTEMLFFAAVVGLACFIYGLLSMEHNTSSTEICDPEIGGQMIMCPLCDQVCDYWRLNSTCLASKFSHLFDNESTVFFAIFMGIWVTLFLEFWKQRQARLEYEWDLVDFEEEQQQLQLRPEFEAMCKHRKLNAVTKEMEPYMPLYTRIPWYFLSGATVTLWMSLVVTSMVAVIVYRLSVFATFASFMESDASLKQVKSFLTPQITTSLTGSCLNFIVILILNFFYEKISAWITKMEIPRTYQEYESSLTLKMFLFQFVNFYSSCFYVAFFKGKFVGYPGKYTYLFNEWRSEECDPGGCLIELTTQLTIIMTGKQIFGNIKEAIYPLALNWWRRRKARTNSEKLYSRWEQDHDLESFGPLGLFYEYLETVTQFGFVTLFVASFPLAPLLALINNIVEIRVDAWKLTTQYRRTVASKAHSIGVWQDILYGMAVLSVATNAFIVAFTSDIIPRLVYYYAYSTNATQPMTGYVNNSLSVFLIADFPNHTAPSEKRDFITCRYRDYRYPPDDENKYFHNMQFWHVLAAKMTFIIVMEHVVFLVKFLLAWMIPDVPKDVVERIKREKLMTIKILHDFELNKLKENLGINSNEFAKHVMIEENKAQLAKSTL

SEQ ID NO: 56767 - protein, 760 aa, Homo sapiens
MGDPGSEIIESVPPAGPEASESTTDENEDDIQFVSILFPKMPKRQGDFLHFLNVKKVKTDTENNEVSKNHCRLSKAKEPHFEYIEQPIIEEKPSLSSKKEIDNLVLPDCWNEKQAFMFTEQYKWLEIKEGKLGCKDCSAVRHLGSKAEKHVHVSKEWIAYLVTPNGSNKTTRQASLRKKIREHDVSKAHGKIQDLLKESTNDSICNLVHKQNNKNIDATVKVFNTVYSLVKHNRPLSDIEGARELQEKNGEVNCLNTRYSATRIAEHIAKEMKMKIFKNIIEENAKICIIIDEASTVSKKTTLVIYLQCTIQSAPAPVMLFVALKELVSTIAECIVNTLLTTLNDCGFTNEYLKANLIAFCSDGANTILGRKSGVATKLLENFPEIIIWNCLNHRLQLSLDDSISEIKQINHLKIFIDKIYSIYHQPNKNQTKLLGTVAKELETEIIKIGRVMGPRWAACSLQAATAVWHAYPILYMHFSHSYSGLAKRLANINFLQDLALMIDILEEFSVLSTALQSRSTNIKKAQKLIKRTIRALENLKIGTGKYESQIEDLIKSDKFKDIPFNKNNKFNALPRSILLDNIIQHMNLRLLSDRNHEDIFNYFDLLEPSTWPYEEITSPWIAGEKTLFHLCKILKYEVDLNDFREFVNNNIKSNNVSIPTTIYKAKKIVSTIAINSAEAERGFNLMNIICTRVRNSLTIDHVSDLMTINLLGKELADWDATPFVKSWSNCNHRLATDTRVRQKSTKVFHENQLAIWNLK

SEQ ID NO: 56768 - protein, 130 aa, Homo sapiens
MDTPSPDPLPSPLPGEEEKPLALSPPVPRGRRGRRPGGATSSNRTLKASLPRKRGRPPKSGQEPPLVQVQGVTAPVGSSGGSDLLLIDDQGVPYTVSEGSAAGPEGSGPRKAPHFCPVCLRAFPYLSDLE

SEQ ID NO: 56769 - protein, 1822 aa, Homo sapiens
MTTMLQKSDSNASFLRAARAGNLDKVVEYLKGGIDINTCNQNGLNALHLAAKEGHVGLVQELLGRGSSVDSATKKGNTALHIASLAGQAEVVKVLVKEGANINAQSQNGFTPLYMAAQENHIDVVKYLLENGANQSTATEDGFTPLAVALQQGHNQAVAILLENDTKGKVRLPALHIAARKDDTKSAALLLQNDHNADVQSKSGFTPLHIAAHYGNVNVATLLLNRGAAVDFTARNGITPLHVASKRGNTNMVKLLLDRGGQIDAKTRDGLTPLHCAARSGHDQVVELLLERGAPLLARTKNGLSPLHMAAQGDHVECVKHLLQHKAPVDDVTLDYLTALHVAAHCGHYRVTKLLLDKRANPNARALNGFTPLHIACKKNRIKVMELLVKYGASIQAITESGLTPIHVAAFMGHLNIVLLLLQNGASPDVTNIRGETALHMAARAGQVEVVRCLLRNGALVDARAREEQTPLHIASRLGKTEIVQLLLQHMAHPDAATTNGYTPLHISAREGQVDVASVLLEAGAAHSLATKKGFTPLHVAAKYGSLDVAKLLLQRRAAADSAGKNGLTPLHVAAHYDNQKVALLLLEKGASPHATAKNGYTPLHIAAKKNQMQIASTLLNYGAETNIVTKQGVTPLHLASQEGHTDMVTLLLDKGANIHMSTKSGLTSLHLAAQEDKVNVADILTKHGADQDAHTKLGYTPLIVACHYGNVKMVNFLLKQGANVNAKTKNGYTPLHQAAQQGHTHIINVLLQHGAKPNATTANGNTALAIAKRLGYISVVDTLKVVTEEVTTTTTTITEKHKLNVPETMTEVLDVSDEEGDDTMTGDGGEYLRPEDLKELGDDSLPSSQFLDGMNYLRYSLEGGRSDSLRSFSSDRSHTLSHASYLRDSAVMDDSVVIPSHQVSTLAKEAERNSYRLSWGTENLDNVALSSSPIHSGRASPCLERDNSSFLVSFMVDARGGAMRGCRHNGLRIIIPPRKCTAPTRVTCRLVKRHRLATMPPMVEGEGLASRLIEVGPSGAQFLGPVIVEIPHFAALRGKERELVVLRSENGDSWKEHFCDYTEDELNEILNGMDEVLDSPEDLEKKRICRIITRDFPQYFAVVSRIKQDSNLIGPEGGVLSSTVVPQVQAVFPEGALTKRIRVGLQAQPMHSELVKKILGNKATFSPIVTLEPRRRKFHKPITMTIPVPKASSDVMLNGFGGDAPTLRLLCSITGGTTPAQWEDITGTTPLTFVNECVSFTTNVSARFWLIDCRQIQESVTFASQVYREIICVPYMAKFVVFAKSHDPIEARLRCFCMTDDKVDKTLEQQENFAEVARSRDVEVLEGKPIYVDCFGNLVPLTKSGQHHIFSFFAFKENRLPLFVKVRDTTQEPCGRLSFMKEPKSTRGLVHQAICNLNITLPIYTKESESDQEQEEEIDMTSEKNPQDEQERIEERLAYIADHLGFSWTELARELDFTEEQIHQIRIENPNSLQDQSHALLKYWLERDGKHATDTNLVECLTKINRMDIVHLMETNTEPLQERISHSYAEIEQTITLDHSEGFSVLQEELCTAQHKQKEEQAVSKESETCDHPPIVSEEDISVGYSTFQDGVPKTEGDSSATALFPQTHKEQVQQDFSGKMQDLPEESSLEYQQEYFVTTPGTETSETQKAMIVPSSPSKTPEEVSTPAEEEKLYLQTPTSSERGGSPIIQEPEEPSEHREESSPRKTSLVIVESADNQPETCERLDEDAAFEKGDDMPEIPPETVTEEEYIDEHGHTVVKKVTRKIIRRYVSSEGTEKEEIMVQGMPQEPVNIEEGDGYSKVIKRVVLKSDTEQSEDNNE

SEQ ID NO: 56770 - protein, 128 aa, Homo sapiens
MAARDSDSEEDLVSYGTGLEPLEEGERPKKPIPLQDQTVRDEKGRYKRFHGAFSGGFSAGYFNTVGSKEGWTPSTFVSSRQNRADKSVLGPEDFMDEEILESKSMAVHYPLEARKDLRVKMMTTCLIM

SEQ ID NO: 56771 - protein, 1035 aa, Homo sapiens
MFPYDSRLDDKKFLYSAPRNKSHIDTCLHAYIFRPEVYQLPICKLKELFEENRKLQQFSPLSDYEGQEEEMNGTKMKFGKRNNSRGEAIISGKQRSSHSLDYDKDRVKELINLIQCRKKSVGGDSDTEDMRSKTVLKRKLEDLPENMRKLAKTSNLSENCHLYEESPQPIGSLGHDADLRRQQQDTCNSGIADIHRLFNWLSETLANARHSDASLTDTVNKALGLSTDDAYEELRQKHEYELNSTPDKKDYEQPTCAKVENAQFKGTQSLLLEVDATSKYSVAISTSEVGTDHKLHLKEDPNLISVNNFEDCSLCPSVPIEHGFRRQQSKSNNVEETEIHWKLIPITDTLKGTTEDDVLTGQVEEQCVPAAEAEPPAVSETTERTVLGEYNLFSRKIEEILKQKNVSYVSTVSTPIFSTQEKMKRLSEFIYSKTSKAGVQEFVDGLHEKLNTIIIKASAKGGNLPPVSPNDSGAKIASNPLERHVIPVSSSDFNNKHLLEPLCSDPLKDTNSDEQHSTSALTEVEMNQPQHATELMVTSDHIVPGDMAREPVEETTKSPSDVNISAQPALSNFISQLEPEVFNSLVKIMKDVQKNTVKFYIHEEEESVLCKEIKEYLIKLGNTECHPEQFLERRSKLDKLLIIIQNEDIAGFIHKIPGLVTLKKLPCVSFAGVDSLDDVKNHTYNELFVSGGFIVSDESILNPEVVTVENLKNFLTFLEELSTPEGKWQWKVHCKFQKKLKELGRLNAKALSLLTLLNVYQKKHLVEILSYHNCDSQTRNAPELDCLIRLQAQNIQQRHIVFLTEKNIKMLSSYTDNGIVVATAEDFMQNFKNLVGYHNSITEENLPQLGANENLESQSALLENDEKDEEDMSLDSGDEISHIEVCSNFHSEIWEKETKGSRGTDQKKNTQIELQSSPDVQNSLLEDKTYLDSEERTSIDIVCSEGENSNSTEQDSYSNFQVYHSQLNMSHQFSHFNVLTHQTFLGTPYALSSSQSQENENYFLSAYTESLDRDKSPPPLSWGKSDSSRPYSQEK

SEQ ID NO: 56772 - protein, 32 aa, Homo sapiens
MAWTFECSRTTSPEPLSTSPCRTTSSRNSPTM

SEQ ID NO: 56773 - protein, 78 aa, Homo sapiens
MVNSNYYAMDLLYILPTHIQAARAGNAIHAILLYRRKLDREEIKPIRLLGSTIPLCSAQWERMFNTSRIPGEETDDLP

SEQ ID NO: 56774 - protein, 130 aa, Homo sapiens
  MOD_RES (1)..(1): Any amino acid
XFQYYQLHKVNISNYSLVMESDAGTFLPTGLQFTGSEKARAIMEEVMSLLQPLNITQVLSHGEGTDINFWIQAGVPGASLLDDLYKYFFFHHSHGDTMTVMDPKQMNVAAAVWAVVSYVVADMEEMLPRS

SEQ ID NO: 56775 - protein, 639 aa, Homo sapiens
MKTNGGRCRIRALCWSRREWRGAGMAQKKYLQAKLTQFLREDRIQLWKPPYTDENKKVGLALKDLAKQYSDRLECCENEVEKVIEEIRCKAIERGTGNDNYRTTGIATIEVFLPPRLKKDRKNLLETRLHITGRELRSKIAETFGLQENYIKIVINKKQLQLGKTLEEQGVAHNVKAMVLELKQSEEDARKNFQLEEEEQNEAKLKEKQIQRTKRGLEILAKRAAETVVDPEMTPYLDIANQTGRSIRIPPSERKALMLAMGYHEKGRAFLKRKEYGIALPCLLDADKYFCECCRELLDTVDNYAVLQLDIVWCYFRLEQLECLDDAEKKLNLAQKCFKNCYGENHQRLVHIKGNCGKEKVLFLRLYLLQGIRNYHSGNDVEAYEYLNKARQLFKELYIDPSKVDNLLQLGFTAQEARLGLRACDGNVDHAATHITNRREELAQIRKEEKEKKRRRLENIRFLKGMGYSTHAAQQVLHAASGNLDEALKILLSNPQMWWLNDSNPETDNRQESPSQENIDRLVYMGFDALVAEAALRVFRGNVQLAAQTLAHNGGSLPPELPLSPEDSLSPPATSPSDSAGTSSASTDEDMETEAVNEILEDIPEHEEDYLDSTLEDEEIIIAEYLSYVENRKSATKKN

SEQ ID NO: 56776 - protein, 146 aa, Homo sapiens
MKLWVSALLMAWFGVLSCVQAEFFTSIGHMTDLIYAEKELVQSLKEYILVEEAKLSKIKSWANKMEALTSKSAADAEGYLAHPVNAYKLVKRLNTDWPALEDLVLQDSAAGFIANLSVQRQFFPTDEDEIGAAKALMRLQDTYRLD

SEQ ID NO: 56777 - protein, 185 aa, Homo sapiens
  MOD_RES (1)..(1): Any amino acid
XANAPTGWKNSVRHNLSLNKCFKKVDKERSQSIGKGSLWCIDPEYRQNLIQALKKTPYHPHPHVFNTPPTCPQAYQSTSGPPIWPGSTFFKRNGALLQDPDIDAASAMMLLNTPPEIQAVPPGVIQNGARVLSRGLFPGVRPLPITPIGVTAAMRNGITSCRMRTESEPSCGSPVVSGDPKEDHN

SEQ ID NO: 56778 - protein, 62 aa, Homo sapiens
MFRGIYRGVQKHQDDLQDVIGRAVEIGVKKFMITGGNLQDSKDALHLAQTNGILIFLLPKKK

SEQ ID NO: 56779 - protein, 84 aa, Homo sapiens
  MOD_RES (1)..(1): Any amino acid
XILTRLGLGPRCRDWRPEASKPAPPALRASPSRDPTRQRPRRLCLRMSCSPRPSWAPRSLLEPSLRGISLGPTQCPTMSLSTRQ

SEQ ID NO: 56780 - protein, 590 aa, Homo sapiens
MATANFGKIQIGIYVEIKRSDGRIHQAMVTSLNEDNESVTVEWIENGDTKGKEIDLESIFSLNPDLVPDEEIEPSPETPPPPASSAKVNKIVKNRRTVASIKNDPPSRDNRVVGSARARPSQFPEQSSSAQQNGSVSDISPVQAAKKEFGPPSRRKSNCVKEVEKLQEKREKRRLQQQELREKRAQDVDATNPNYEIMCMIRDFRGSLDYRPLTTADPIDEHRICVCVRKRPLNKKETQMKDLDVITIPSKDVVMVHEPKQKVDLTRYLENQTFRFDYAFDDSAPNEMVYRFTARPLVETIFERGMATCFAYGQTGSGKTHTMGGDFSGKNQDCSKGIYALAARDVFLMLKKPNYKKLELQVYATFFEIYSGKECIRALGRNKPHTPFRASKLTQVLRDSFIGENSRTCMIATISPGMASCENTLNTLRYANRVKELTVDPTAAGDVRPIMHHPPNQIDDLETQWGVGSSPQRDDLKLLCEQNEEEVSPQLFTFHEAVSQMVEMEEQVVEDHRAVFQESIRWLEDEKALLEMTEEVDYDVDSYATQLEAILEQKIDILTELRDKVKSFRAALQEEEQASKQINPKRPRAL

SEQ ID NO: 56781 - protein, 932 aa, Homo sapiens
EVPPSFKQFFSSSLALMHINLSGTKLSPEPLKALLLGLACNHNLKGVSLDLSNCELGHCLRSGGAQVLEGCIAEIHNITSLDISDNGLESDLSTLIVWLSKNRSIQHLALGKNFNNMKSKNLTPVLDNLVQMIQDEESPLQSLSLADSKLKTEVTIIINALGSNTSLTKVDISGNGMGDMGAKMLAKALQINTKLRTVIWDKNNITAQGFQDIAVAMEKNYTLRFMPIPMYDASQALKTNPEKTEDALQKIENYLLRNHETRKYLQEQAYRLQQGIVTSTTQQMIDRICVKVQDHLNSLRNCGGDAIQEDLKSAERLMRDAKNSKTLLPNLYHVGGASWAGASGLLSSPIQETLESMAGEVTRVVDEQLKALLESMVDAAENLCPNVMKKAHIRQDLIHASTEKISIPRTFVKNVLLEQSGIDILNKISEVKLTVASFLSDRIVDEILDALSHCHHKLADHFSRRGKTLPQQESLEIELAEEKPVKRSIITVEELTEIERLEDLDTCMTLCCTSMTPKSKRKSIHSRMLRPVSRAFEMEFDLDKALEEVPIHIEDPPFPSLRQEKRSSGFISELPSEEGKKLEHFTKLRPKRNKKQQPTQAAVCAANIVSQDGEQNGLMGRVDEGVDEFFTKKVTKMDSKKWSTRGSESHELNEGGDEKKKRDSRKSSGFLNLIKSRSKSERPPTILMTEEPSSPKGAVRSPPVDCPRKDTKAAEHNGNSERIEEIKTPDSFEESQGEEIGKVERSDSKSSPQAGRRYGVQVMGSGLLAEMKAKQEKRAACAQKKLGNDAVSQDSSSPALSGVERSDGGGAVPKLHPGLPENRFGLGTPEKNTKAEPKAEAGSRSRSSSSTPTSPKPLLQSPKPSLAARPVIPQKPRTASRPDDIPDSPSSPKVALLPPVLKKVPSDKERDGQSSPQPSPRTFSQEACPTNF

SEQ ID NO: 56782 - protein, 149 aa, Homo sapiens
LSQAEVASVWVERIQEHPAIYDSICFIMSSSTNVDLLVKVGEVVDKLFDLDEKLMLEWVRNGAAQPLDQPQEESEEQPVFRLVPCILEAAKQVRSENPEWLDVYMHILQLLTTVDDGIQAIGDGGSGSKGRPVEQTEVFLCISKPSSFL

SEQ ID NO: 56783 - protein, 144 aa, Homo sapiens
MATATEQWVLVEMVQALYEAPAYHLILEGILILWIIRLLFSKTYKLQERSDLTVKEKEELIEEWQPEPLVPPVPKDHPALNYNIVSGPPSHKTVVNGKECINFASFNFLGLLDNPRVKAAALASLKKYGVGTCGPRGFYGTFEN

SEQ ID NO: 56784 - protein, 21 aa, Homo sapiens
MDSVSSSGVCAAFIASDSSTK

SEQ ID NO: 56785 - protein, 76 aa, Homo sapiens
  MOD_RES (1)..(1): Any amino acid
XYLIFSQKPEFQDLSGSFMVKPEYLQRGGAKARAGHHDCHVRGIPSILRSREGKKIHSQKQLFTVTLIVTRIKMAK

SEQ ID NO: 56786 - protein, 434 aa, Homo sapiens
MIGGLFIYNHKGEVLISRVYRDDIGRNAVDAFRVNVIHARQQVRSPVTNIARTSFFHVKRSNIWLAAVTKQNVNAAMVFEFLYKMCDVMAAYFGKISEENIKNNFVLIYELLDEILDFGYPQNSETGALKTFITQQGIKSQHTKEEQSQITSQVTGQIGWRREGIKYRRNELFLDVLESVNLLMSPQGQVLSAHVSGRVVMKSYLSGMPECKFGMNDKIVIEKQGKGTADETSKSGKQSIAIDDCTFHQCVRLSKFDSERSISFIPPDGEFELMRYRTTKDIILPFRVIPLVREVGRTKLEVKVVIKSNFKPSLLAQKIEVRIPTPLNTSGVQVICMKGKAKYKASENAIVWKIKRMAGMKESQISAEIELLPTNDKKKWARPPISMNFEVPFAPSGLKVRYLKVFEPKLNYSDHDVIKWVRYIGRSGIYETRC

SEQ ID NO: 56787 - protein, 50 aa, Homo sapiens
MSTNENANTPAARLHRFKNKGKDSTVKRHVIFSQGNEASQNRGQCGAEES

SEQ ID NO: 56788 - protein, 104 aa, Homo sapiens
MDSQELKTLINYYCQERYFHHVLLVASEGIKRYGSDPVFRFYHAYGTLMEGKTQEALREFEAIKNKQDVSLCSLLALIYAHKMSPNPDGVSPCWPGWSRTLDLR

SEQ ID NO: 56789 - protein, 155 aa, Homo sapiens
MQCKLFVFDKTSQSWVERGRGLLRLNDMASTDDGTLQSRLVMRTQGSLRLILNTKLWAQMQIDKASEKSIRITAMDTEDQGVKVFLISASSKDTGQLYAALHHRILALRSRVEQEQEAKMPAPEPGAAPSNEEDDSDDDDVLAPSGATAAGAGDE

SEQ ID NO: 56790 - protein, 767 aa, Homo sapiens
MVQNLQPETVSCSTAVKQACHYHVSSLRKKLAFLRANTASNSNRSTPACSPILRKRSRSPTPQNQDGDTMVEKGSDHSSDKSPSTPEQGVQRSCSSQSGRSGGKNSKKSQSWYNVLSPTYKQRNEDFRKLFKQLPDTERLIVDYSCALQRDILLQGRLYLSENWICFYSNIFRWETLLTVRLKDICSMTKEKTARLIPNAIQVCTDSEKHFFTSFGARDRTYMMMFRLWQNALLEKPLCPKELWHFVHQCYGNELGLTSDDEDYVPPDDDFNTMGYCEEIPVEENEVNDSSSKSSIETKPDASPQLPKKSITNSTLTSTGSSEAPVSFDGLPLEEEALEGDGSLEKELAIDNIMGEKIEMIAPVNSPSLDFNDNEDIPTELSDSSDTHDEGEVQAFYEDLSGRQYVNEVFNFSVDKLYDLLFTNSPFQRDFMEQRRFSDIIFHPWKKEENGNQSRVILYTITLTNPLAPKTATVRETQTMYKASQESECYVIDAEVLTHDVPYHDYFYTINRYTLTRVARNKSRLRVSTELRYRKQPWGLVKTFIEKNFWSGLEDYFRHLESELAKTESTYLAEMHRQSPKEKASKTTTVRRRKRPHAHLRVPHLEEVMSPVTTPTDEDVGHRIKHVAGSTQTRHIPEDTPNGFHLQSVSKLLLVISCVICFSLVLLVILNMMLFYKLWMLEYTTQTLTAWQGLRLQERLPQSQTEWAQLLESQQKYHDTELQKWREIIKSSVMLLDQMKDSLINLQNGIRSRDYTSESEEKRNRYH

SEQ ID NO: 56791 - protein, 109 aa, Homo sapiens
MEEIPAQEAAGSPRVQFQSLETQSECLSPEPQFVQDTDMEQGLTGGFPISKPDGISQLEQDLQVFDLETKTREVLRDDCSDGETREENKLLIPKQKISEEVHSYKVRVG

SEQ ID NO: 56792 - protein, 255 aa, Homo sapiens
  MOD_RES (1)..(1): Any amino acid
XEMALSLTRAVAGGDEQVAMKCAIWLAEQRVPLSVQLKPEVSPTQDIRSRGEKTEEVGEVREVPDHGGPRVLPRVDSKSSVEPLEGPNWLWVSVEDAQMHTVTIWLTVRPDMTVASLKDMVFLDYGFPPVLQQWVIGQRLARDQETLHSHGVRQNGDSAYLYLLSARNTSLNPQELQRERQLRMLEDLGFKDLTLQPRGPLEPGPPKPGVPQEPGRGQPDAVPEPPPVGWQCPGCTFINKPTRPGCEMCCRARPE

SEQ ID NO: 56793 - protein, 1381 aa, Homo sapiens
  MOD_RES (1)..(1): Any amino acid
XPSYSRSKSISASGRPPLKRMERASSRVGETEELPEIRVDAASPGPRVTFNIQDTLKNTVWGSTPQSSCPGEGYFQFPEETELDLLSVTIEGPSHYSSNSEGSCSVFSSPKTPGGFSPGIPFQTEEGRRDDSLSSTSEDSEKDEKDEDHERERFYIYRKPSHTSRKKATGFAAVHQLFTERWPTTPVNRSLSGTATERNIDFELDIRVEIDSGKCVLHPTTLLQEHDDISLRRSYDRSSRSLDQDSPSKKKKFQTNYASTTHLMTGKKVPSSLQTKPSDLETTVFYIPGVDVKLHYNSKTLKTESPNASRGSSLPRTLSKESKLYAKGKGSGGVKTAKLYAWVALQSLPEEMVISPCLLDFLEKALETIPITPVERNYTAVSSQDEDMGHFEIPDPMEESTTSLVSSSTSAYSSFPVDVVVYVRVQPSQIKFSCLPVSRVECMLKLPSLDLVFSSNRGELETLGTTYPAETLSPGGNATQSGTKTSASKTGIPGSSGLGSPLGRSRHSSSQSDLTSSSSSSSGLSFTACMSDFSLYVFHPYGAGKQKTAVSGLTPGSGGLGNVDEEPTSVTGRKDSLSINLEFVKVSLSRIRRSGGASFFESQSVSKSASKMDTTLINISAVCDIGSASFKYDMRRLSEILAFPRAWYRRSIARRLFLGDQTINLPTSGPGTPDSIEGVSQHLSPESSRKAYCKTWEQPSQSASFTHMPQSPNVFNEHMTNSTMSPGTVGQSLKSPASIRSRSVSDSSVPRRDSLSKTSTPFNKSNKAASQQGTPWETLVVFAINLKQLNVQMNMSNVMGNTTWTTSGLKSQGRLSVGSNRDREISMSVGLGRSQLDSKGGVVGGTIDVNALEMVAHISEHPNQQPSHKIQITMGSTEARVDYMGSSILMGIFSNADLKLQDEWKVNLYNTLDSSITDKSEIFVHGDLKWDIFQVMISRSTTPDLIKIGMKLQEFFTQQFDTSKRALSTWGPVPYLPPKTMTSNLEKSSQEQLLDAAHHRHWPGVLKVVSGCHISLFQIPLPEDGMQFGGSMSLHGNHMTLACFHGPNFRSKSWALFHLEEPNIAFWTEAQKIWEDGSSDHSTYIVQTLDFHLGHNTMVTKPCGALESPMATITKITRRRHENPPHGVASVKEWFNYVTATRNEELNLLRNVDANNTENSTTVKNSSLLSGFRGGSSYNHETETIFALPRMQLDFKSIHVQEPQEPSLQDASLKPKVECSVVTEFTDHICVTMDAELIMFLHDLVSAYLKEKEKAIFPPRILSTRPGQKSPIIIHDDNSSDKDREDSITYTTVDWRDFMCNTWHLEPTLRLISWTGRKIDPVGVDYILQKLGFHHARTTIPKWLQRGVMDPLDKVLSVLIKKLGTALQDEKEKKGKDKEEH

SEQ ID NO: 56794 - protein, 104 aa, Homo sapiens
MPFTLHLRSRLPSAIRSLILQKKPNIRNTSSMAGELRPASLVVLPRSLAPAFERFCQVNTGPLPLLGQSEPEKWMLPPQGAISETRQQCLVLPMLASAALWWSR

SEQ ID NO: 56795 - protein, 38 aa, Homo sapiens
MGKKGKKEKKGRGAEKTAAKMEKKVSKRSRKEETWKRS

SEQ ID NO: 56796 - protein, 157 aa, Homo sapiens
MQLFLLLCLVLLSPQGASLHRHHPREMKKRVEDLHVGATVAPSSRRDFTFDLYRALASAAPSQSIFFSPVSISMSLAMLSLGAGSSTKMQILEGLGLNLQKSSEKELHRGFQQLLQELNQPRDGFQLSLGNALFTDLVVDLQDTFVSAMKTLYLADT

SEQ ID NO: 56797 - protein, 961 aa, Homo sapiens
MITVVYGPDLVNISHLNLVAFQEEVAKEWTNEVFSLATNLLAQNMSRDAFLEKAYTKLKLQVTPEGRIPLKNIYRLFSADRKRVETALEACSLPSSRNDSIPQEDFTPEVYRVFLNNLCPRPEIDNIFSEFGAKSKPYLTVDQMMDFINLKQRDPRLNEILYPPLKQEQVQVLIEKYEPNNSLARKGQISVDGFMRYLSGEENGVVSPEKLDLNEDMSQPLSHYFINSSHNTYLTAGQLAGNSSVEMYRQVLLSGCRCVELDCWKGRTAEEEPVITHGFTMTTEISFKEVIEAIAECAFKTSPFPILLSFENHVDSPKQQAKMAEYCRLIFGDALLMEPLEKYPLESGVPLPSPMDLMYKILVKNKKKSHKSSEGSGKKKLSEQASNTYSDSSSMFEPSSPGAGEADTESDDDDDDDDCKKSSMDEGTAGSEAMATEEMSNLVNYIQPVKFESFEISKKRNKSFEMSSFVETKGLEQLTKSPVEFVEYNKMQLSRIYPKGTRVDSSNYMPQLFWNAGCQMVALNFQTMDLAMQINMGMYEYNGKSGYRLKPEFMRRPDKHFDPFTEGIVDGIVANTLSVKIISGQFLSDKKVGTYVEVDMFGLPVDTRRKAFKTKTSQGNAVNPVWEEEPIVFKKVVLPTLACLRIAVYEEGGKFIGHRILPVQAIRPGYHYICLRNERNQPLTLPAVFVYIEVKDYVPDTYADVIEALSNPIRYVNLMEQRAKQLAALTLEDEEEVKKEADPGETPSEAPSEARTTPAENGVNHTTTLTPKPPSQALHSQPAPGSVKAPAKTEDLIQSVLTEVEAQTIEELKQQKSFVKLQKKHYKEMKDLVKRHHKKTTDLIKEHTTKYNEIQNDYLRRRAALEKSAKKDSKKKSEPSSPDHGSSTIEQDLAALDAEMTQKLIDLKDKQQQQLLNLRQEQYYSEKYQKREHIKLLIQKLTDVAEECQNNQLKKLKEICE

SEQ ID NO: 56798 - protein, 131 aa, Homo sapiens
MNLEFSIRETTCRKDSGEDPATCAFQRDYYVSTAVCRSTVKVSAQQVQGVHARCSWSSSTSESYSSEEMIFGDMLGSHKWRNNYLFGLISDESISEQFYDRSLGIMRRVLPPGNRRYPNHRHRARINTDFE

SEQ ID NO: 56799 - protein, 231 aa, Homo sapiens
MGNGGRSGLQQGKGNVDGVAATPTAASASCQYRCIECNQEAKELYRDYNHGVLKITICIHGKLCIFCLLCEAYLRWWQLQDSNQNTAPDDLIRYAKEWDFYRMFAIAALEQTAYFIGIFTFLWVERPMTAKKKPNFILLLKALLLSSYGKLLLIPAVIWEHDYTSVCLKLIKVFVLTSNFQAIRVTLNINRKLSFLAVLSGLLLESIMVYFFQSMEWDVGSDYAIFKSQDF

SEQ ID NO: 56800 - protein, 80 aa, Homo sapiens
MRESPTQVKLRSKTVYRVNLSVIMKKWQSSKKVVVMGRWRSTSPFVLWVTGCPPLLWGAHQQLRGEGQPCCTSTDIRSRQ

SEQ ID NO: 56801 - protein, 134 aa, Homo sapiens
  MOD_RES (1)..(1): Any amino acid
XVLTPVDCLAFGGNFLHSLNIEMQLKAYEIEKRLSTADLFRFPNFETICWYVGKHILDIFRGLRENRRHPASYLVHGGKALNLAFRAWTRKEALPDHEDEIPETVRTVQLIKDLAREIRLVEFNITGACLNDSD

SEQ ID NO: 56802 - protein, 63 aa, Homo sapiens
ILNLYAEENAIEDTIFYLGEALRRGVIDLDVFLKHVRLLSRKQFQLRALMQKARKTAGLSDLY

SEQ ID NO: 56803 - protein, 114 aa, Homo sapiens
MKDEPRSTNLFMKLDSVFIWKEPFGLVLIIAPWNYPLNLTLVLLVGALAAGSCVVLKPSEISQGTEKVLAEVLPQYLDQSCFAVVLGGPQETGQLLEHKLDYIFFTGSPRVGKI

SEQ ID NO: 56804 - protein, 57 aa, Homo sapiens
MLPLTMTVLILLLLPTGQAAPKDGVTRPDSEVQHQLLPNPFQPGQEQLGSPLPLCPP

SEQ ID NO: 56805 - protein, 216 aa, Homo sapiens
MSREMQDVDLAEVKPLVEKGETITGLLQEFDVQEQDIETLHGSVHVTLCGTPKGNRPVILTYHDIGMNHKTCYNPLFNYEDMQEITQHFAVCHVDAPGQQDGAASFPAGYMYPSMDQLAEMLPGVLQQFGLKSIIGMGTGAGAYILTRFALNNPEMVEGLVLINVNPCAEGWMDWAASKPFDYQALVLDTVMCAVTSCSPSLDLVALKFLALPVPD

SEQ ID NO: 56806 - protein, 136 aa, Homo sapiens
  MOD_RES (1)..(1): Any amino acid
XTALVPYGLPCIRELFRFLISLTNPHDRHNSEVMIHMGLHLLTVALESAPVAQCQTLLGLIKDEMCRHLFQMYIKKLMEIITVENPKMPYEMKEMALEAIVQLWRIPSFVTELYINYDCDYYCSNLFEELTKLLSK

SEQ ID NO: 56807 - protein, 138 aa, Homo sapiens
MADPVAGIAGSAAKSVRPFRSSEAYVEAMKEDLAEWLNALYGLGLPGGGDGFLTGLATGTTLCQHANAVTEAARALAAARPARGVAFQAHSVVPGSFMARDNVATFIGWCRVELGVPEVLMFETEDLVLRKNEKSVVL

SEQ ID NO: 56808 - protein, 37 aa, Homo sapiens
IVIPDVTVSDSGLYRCYLQASAGENETFVMRLTVAEG

SEQ ID NO: 56809 - protein, 24 aa, Homo sapiens
AQPGGSSWRRIALLILAITIHNVP

SEQ ID NO: 56810 - protein, 54 aa, Homo sapiens
  MOD_RES (1)..(1): Any amino acid
XSKSEGSTQTYASQSSSEGSTQTYASQTRSESSSQADTSKSKSQDSTQTQSSSN

SEQ ID NO: 56811 - protein, 103 aa, Homo sapiens
EYLEVQRQLAIQRLQEQEKERQMRLEQQKQTVQMRAQMPAFPLPYAQAMPAAGGVLYQPSGPASFPSTFSPAGSVEGSPMHGVYMSQPAPAAGPYPSMPSTAA

SEQ ID NO: 56812 - protein, 295 aa, Homo sapiens
  MOD_RES (1)..(1): Any amino acid
XFLLVFSCLVLSVFSTIKEYEKSSEGALYILEIVTIVVFGVEYFVRIWAAGCCCRYRGWRGRLKFARKPFCVIDIMVLIASIAVLAAGSQGNVFATSALRSLRFLQILRMIRMDRRGGTWKLLGSVVYAHSKELVTAWYIGFLCLILASFLVYLAEKGENDHFDTYADALWWGLITLTTIGYGDKYPQTWNGRLLAATFTLIGVSFFALPAGILGSGFALKVQEQHRQKHFEKRRNPAAGLIQSAWRFYATNLSRTDLHSTWQYYERTVTVPMYRYRRRAPATKQLFHFLFSICS

SEQ ID NO: 56813 - protein, 66 aa, Homo sapiens
  MOD_RES (1)..(1): Any amino acid
XCKSQEKRGKSHKYDSKGNRFKKKSKEGSMLRRPRTSSQHASRGGQSDDDEDEGVPASYHTVSLQT

SEQ ID NO: 56814 - protein, 186 aa, Homo sapiens
MGLSRKSSDASACSSSEISVKEFLAKAKEDFLKKWENPTQNNAGLEDFERKKTLGTGSFGRVMLVKHKATEQYYAMKILDKQKVVKLKQIEHTLNEKRILQAVNFPFLVRLEYAFKDNSNLYMVMEYVPGGEMFSHLRRIGRFSEPHARFYAAQIVLTFEYLHSLDLIYRDLKPENLLIDHQGYIQ

SEQ ID NO: 56815 - protein, 86 aa, Homo sapiens
MALRAGLVLGFHTLMTLLSPQEAGATKGRAGRHRRNQSPSGHPGGALQPQQSHQRASTGDRAPQVSGGAGPAQHPHLHRGQHLPPC

SEQ ID NO: 56816 - protein, 185 aa, Homo sapiens
MESLLENPVRAVLYLKELTAIVQNQQSLIHTQRERIDELERRLDELSAENRSLWEHQQLLQAQPPPGLVPPSSAPLPAAPATAPAAAARAQEPLQDQGQRSAAAPHPAPDRPPRQHHGQLLEQPQRGPGSRAHTPQSPHKHLGTQGAVTDKEKERPPSCCAAAGALLQHKSPSALGKGVLSRRPE

SEQ ID NO: 56817 - protein, 51 aa, Homo sapiens
  MOD_RES (1)..(1): Any amino acid
XKHEEKQQEGGIVSKNFTKKIQQNRYWSRRLWTSEEIPQRKPILPSFSHFF

SEQ ID NO: 56818 - protein, 47 aa, Homo sapiens
MATKQLVMMMTGMKTGMGPNPLPTLRIQSQLMQAALSEETVVLVPHP

SEQ ID NO: 56819 - protein, 377 aa, Homo sapiens
MSQWYELQQLDSKFLEQVHQLYDDSFPMEIRQYLAQWLEKQDWEHAANDVSFATIRFHDLLSQLDDQYSRFSLENNFLLQHNIRKSKRNLQDNFQEDPIQMSMIIYSCLKEERKILENAQRFNQCIEHEIKSLEDLQDEYDFKCKTLQNREHETNGVAKSDQKQEQLLLKKMYLMLDNKRKEVVHKIIELLNVTELTQNALINDELVEWKRRQQSACIGGPPNACLDQLQNWFTIVAESLQQVRQQLKKLEELEQKYTYEHDPITKNKQVLWDRTFSLFQQLIQSSFVVERQPCMPTHPQRPLVLKTGVQFTVKLRLLVKLQELNYNLKVKVLFDKDVNERNTVKGFRKFNILGTHTKVMNMEESTNGSLAAEFRHL

SEQ ID NO: 56820 - protein, 580 aa, Homo sapiens
MLLILLSVALLALSSAQNLNEDVSQEESPSLIAGKPQGPPPQGGNQPQGPPPPPGKPQGPPPQGGNKPQGPPPPGKPQGPPPQGDKSRSPRSPPGKPQGPPPQGGNQPQGPPPPPGKPQGPPPQGGNKPQGPPPPGKPQGPPPQGDNKSRSSRSPPGKPQGPPPQGGNQPQGPPPPPGKPQGPPPQGGNKPQGPPPPGKPQGPPPQGDNKSRSARSPPGKPQGPPPQGGNQPQGPPPPPGKPQGPPPQGGNKPQGPPPPGKPQGPPPQGDKSRSPRSPPGKPQGPPPQGGNQPQGPPPPPGKPQGPPPQGGNKPQGPPPPGKPQGPPPQGDNKSRSSRSPPGKPQGPPPQGGNQPQGPPPPPGKPQGPPPQGGNKPQGPPPPGKPQGPPPQGDNKSRSARSPPGKPQGPPPQGGNQPQGPPPPPGKPQGPPPQGGNKPQGPPPPGKPQGPPPQGGSKSRSSRSPPGKPQGPPPQGGNQPQGPPPPPGKPQGPPPQGGNKPQGPPPPGKPQGPPPQGGSKSRSARSPPGKPQGPPQQEGNNPQGPPPPAGGNPQQPQAPPAGQPQGPPRPPQGGRPSRPPQ

SEQ ID NO: 56821 - protein, 409 aa, Homo sapiens
EPYSEEEEGQESSEEGSEEDVEAVDETADGAEVKQRTDPHWSAVQKAISEIRSRPSRISLILTLWSCKMIPLPGMSIQVLSRHVRLCLFDGNKVLSNIHTVRATWQPKKPKTWTFSPQVTRILPCLLDGDCFIRSNSASPDLGILFELGISYIRNSTGERGELSCGWVFLKLFDASGVPIPAKTYELFLNGGTPYEKGIEVDPSISRRAHGSVFYQIMTMRRQPQLLVKLRSLNRRSRNVLSLLPETLIGNMCSIHLLIFYRQILGDVLLKDRMSLQSTDLISHPMLATFPMLLEQPDVMDALRSSWAGKESTLKRSEKRDKEFLKSTFLLVYHDCVLPLLHSTRLPPFRWAEEETETARWKVITDFLKQNQENQGALQALLSPDGVHEPFDLSEQTYDFLGEMRKNAV

SEQ ID NO: 56822 - protein, 252 aa, Homo sapiens
MRRMLVVEVANGRSLVWGAEAVQALRERLGVGGRTVGALPRGPRQNSRLGLPLLLMPEEARLLAEIGAVTLVSAPRPDSRHHSLALTSFKRQQEESFQEQSALAAEARETRRQELLEKITEGQAAKKQKLEQASGASSSQEAGSSQAAKEDETSDGQASGEQEEAGPSSSQAGPSNGVAPLPRSALLVQLATARPRPVKARPLDWRVQSKDWPHAGRPAHELRYSIYRDLWERGFFLSAAGKFGGDFLVYPG

SEQ ID NO: 56823 - protein, 103 aa, Homo sapiens
MRQRLLPSVTSLLLVALLFPGSSQARHVNHSATEALGELRERAPGQGTNGFQLLRHAVKRDLLQPRTPPYQVHISHREARGPSFRICVDFLGPRWARGCSTGN

SEQ ID NO: 56824 - protein, 332 aa, Homo sapiens
MVGMGQKDSYVGDEAQSKRGILTLKYPIEHGIVTNWDDMEKIWHHTFYNELRVAPEEHPVLLTEAPLNPKANREKMTQIMFETFNTPAMYVAIQAVLSLYASGRTTGIVMDSGDGVTHTVPIYEGYALPHAILRLDLAGRDLTDYLMKILTERGYSFTTTAEREIVRDIKEKLCYVALDFEQEMATAASSSSLEKSYELPDGQVITIGNERFRCPEALFQPSFLGMESCGIHETTFNSIMKCDVDIRKDLYANTVLSGGTTMYPGIADRMQKEITALAPSTMKIKIIAPPERKYSVWIGGSILASLSTFQQMWISKQEYDESGPSIVHRKCF

SEQ ID NO: 56825 - protein, 46 aa, Homo sapiens
  MOD_RES (1)..(1): Any amino acid
XQLTLETYQEWCNDSAATHEMGDGEQACGGRNNGPQRCPRPHPQSP

SEQ ID NO: 56826 - protein, 211 aa, Homo sapiens
MGNILTCRVHPSVSLEFDQQQGSVCPSESETYEAGARDRMAGAPMAAAVQPAEVTVEVGEDLHMHHVRDREMPEALEFNLSANPESSTIFQRNSQTEALEFNPSANPEASTIFQRNSQTDVVEIRRSNCTNHVSAVRFSQQYSLCSTIFLDDSTAIQHYLTMTIISVTLEIPHHITQRDADRTLSIPDEQLHSFATGFHHVGQDGLELLTS

SEQ ID NO: 56827 - protein, 199 aa, Homo sapiens
MAANVGDQRSTDWSSQYSMVAGAGRENGMETPMHENPEWEKARQALASISKSGAAGGSAKSSSNGPVASAQYVSQAEASALQQQQYYQWYQQYNYAYPYSYYYPMSMYQSYGSPSQYGMAGSYGSATPQQPSAPQHQGTLNQPPVPGMDESMSYQAPPQQLPSAQPPQPSNPPHGAHTLNSGPQPGTAPATQHSQAGPA

SEQ ID NO: 56828 - protein, 106 aa, Homo sapiens
MAAPTPARPVLTHLLVALFGMGSWAAVNGIWVELPVVVKELPEGWSLPSYVSVLVALGNLGLLVVTLWRRLAPGKDEQVPIRVVQLLPSRVFCCCCRHHHLYPQGS

SEQ ID NO: 56829 - protein, 283 aa, Homo sapiens
  MOD_RES (1)..(1): Any amino acid
XLALAFHDGSVHIVHRLSLQTMAVFYSSAAPRPVDEPAMKRPRTAGPAVHLKAMQLSWTSLALVGIDSHGKLSVLRLSPSMGHPLEVGLALRHLLFLLEYCMVTGYDWWDILLHVQPSMVQSLVEKLHEEYTRQTAALQQVLSTRILAMKASLCKLSPCTVTRVCDYHTKLFLIAISSTLKSLLRPHFLNTPDKSPGDRLTEICTKITDVDIDKVMINLKTEEFVLDMNTLQALQQLLQWVGDFVLYLLASLPNQPSPTSEPSPTSEPSPPSEPSPTSEPSSP

SEQ ID NO: 56830 - protein, 1090 aa, Homo sapiens
  MOD_RES (1)..(1): Any amino acid
XEEVASILMEQEQTIYRRVLPVDYLCFLTRDLGTPECQSSLPCLKASISASILTTQNGEHNALEDLVMRFNEVSSWVTWLILTAGSMEEKREVFSYLVHVAKCCWNMGNYNAVMEFLAGLRSRKVLKMWQFMDQSDIETMRSLKDAMAQHESSCEYRKVVTRALHIPGCKVVPFCGVFLKELCEVLDGASGLMKLCPRYNSQEETLEFVADYSGQDNFLQRVGQNGLKNSEKESTVNSIFQVIRSCNRSLETDEEDSPSEGNSSRKSSLKDKSRWQFIIGDLLDSDNDIFEQSKEYDSHGSEDSQKAFDHGTELIPWYVLSIQADVHQFLLQGATVIHYDQDTHLSARCFLQLQPDNSTLTWVKPTTASPASSKAKLGVLNNTAEPGKFPLLGNAGLSSLTEGVLDLFAVKAVYMGHPGIDIHTVCVQNKLGSMFLSETGVTLLYGLQTTDNRLLHFVAPKHTAKMLFSGLLELTRAVRKMRKFPDQRQQWLRKQYVSLYQEDGRYEGPTLAHAVELFGGRRWSARNPSPGTSAKNAEKPNMQRNNTLGISTTKKKKKILMRGESGEVTDDEMATRKAKMHKECRSRSGSDPQDINEQEESEVNAIANPPNPLPSRRAHSLTTAGSPNLAAGTSSPIRPVSSPVLSSSNKSPSSAWSSSSWHGRIKGGMKGFQSFMVSDSNMSFVEFVELFKSFSVRSRKDLKDLFDVYAVPCNRSGSESAPLYTNLTIDENTSDLQPDLDLLTRNVSDLGLFIKSKQQLSDNQRQISDAIAAASIVTNGTGIESTSLGIFGVGILQLNDFLVNCQGEHCTYDEILSIIQKFEPSISMCHQGLMSFEGFARFLMDKENFASKNDESQENIKELQLPLSYYYIESSHNTYLTGHQLKGESSVELYSQVLLQGCRSVELDCWDGDDGMPIIYHGHTLTTKIPFKEVVEAIDRSAFINSDLPIIISIENHCSLPQQRKMAEIFKTVFGEKLVTKFLFETDFSDDPMLPSPDQLRKKVLLKNKKLKAHQTPVDILKQKAHQLASMQVQAYNGGNANPRPANNEEEEDEEDEYDYDYESLSDADVLTASPAPNGQEGKCHLNGAF

SEQ ID NO: 56831 - protein, 40 aa, Homo sapiens
  MOD_RES (1)..(1): Any amino acid
XSLPKVHPRYDLDGDASMAKNCQYLTALSGINAKGDTMAD

SEQ ID NO: 56832 - protein, 37 aa, Homo sapiens
MPCSSKRNFCRQTMPSFIHEDDKNGRLTQFQIWPRMG

SEQ ID NO: 56833 - protein, 455 aa, Homo sapiens
MSLTVVSMACVGFFLLQGAWPLMGGQDKPFLSARPSTVVPRGGHVALQCHYRRGFNNFMLYKEDRSHVPIFHGRIFQESFIMGPVTPAHAGTYRCRGSRPHSLTGWSAPSNPLVIMVTGNHRKPSLLAHPGPLLKSGETVILQCWSDVMFEHFFLHREGISEDPSRLVGQIHDGVSKANFSIGPLMPVLAGTYRCYGSVPHSPYQLSAPSDPLDIVITGLYEKPSLSAQPGPTVQAGENVTLSCSSWSSYDIYHLSREGEAHERRLRAVPKVNRTFQADFPLGPATHGGTYRCFGSFHALPCVWSNSSDPLLVSVTGNPSSSWPSPTEPSSKSGICRHLHVLIGTSVVIFLFILLLFFLLYRWCSNKKNAAVMDQEPAGDRTVNRQDSDEQDPQEVTYAQLDHCVFIQRKISRPSQRPKTPLTDTSVYTELPNAEPRSKVVSCPRAPQSGLEGVF

SEQ ID NO: 56834 - protein, 1908 aa, Homo sapiens
MRILKRFLACIQLLCVCRLDWANGYYRQQRKLVEEIGWSYTGALNQKNWGKKYPTCNSPKQSPINIDEDLTQVNVNLKKLKFQGWDKTSLENTFIHNTGKTVEINLTNDYRVSGGVSEMVFKASKITFHWGKCNMSSDGSEHSLEGQKFPLEMQIYCFDADRFSSFEEAVKGKGKLRALSILFEVGTEENLDFKAIIDGVESVSRFGKQAALDPFILLNLLPNSTDKYYIYNGSLTSPPCTDTVDWIVFKDTVSISESQLAVFCEVLTMQQSGYVMLMDYLQNNFREQQYKFSRQVFSSYTGKEEIHEAVCSSEPENVQADPENYTSLLVTWERPRVVYDTMIEKFAVLYQQLDGEDQTKHEFLTDGYQDLGAILNNLLPNMSYVLQIVAICTNGLYGKYSDQLIVDMPTDNPELDLFPELIGTEEIIKEEEEGKDIEEGAIVNPGRDSATNQIRKKEPQISTTTHYNRIGTKYNEAKTNRSPTRGSEFSGKGDVPNTSLNSTSQPVTKLATEKDISLTSQTVTELPPHTVEGTSASLNDGSKTVLRSPHMNLSGTAESLNTVSITEYEEESLLTSFKLDTGAEDSSGSSPATSAIPFISENISQGYIFSSENPETITYDVLIPESARNASEDSTSSGSEESLKDPSMEGNVWFPSSTDITAQPDVGSGRESFLQTNYTEIRVDESEKTTKSFSAGPVMSQGPSVTDLEMPHYSTFAYFPTEVTPHAFTPSSRQQDLVSTVNVVYSQTTQPVYNAVPSDPILVETPKVDKISSTMLHLIVSNSASSENMLHSTSVPVFDVSPTSHMHSASLQGLTISYASEKYEPVLLKSESSHQVVPSLYSNDELFQTANLEINQAHPPKGRHVFATPVLSIDEPLNTLINKLIHSDEILTSTKSSVTGKVFAGIPTVASDTFVSTDHSVPIGNGHVAITAVSPHRDGSVTSTKLLFPSKATSELSHSAKSDAGLVGGGEDGDTDDDGDDDDDDRGSDGLSIHKCMSCSSYRESQEKVMNDSDTHENSLMDQNNPISYSLSENSEEDNRVTSVSSDSQTGMDRSPGKSPSANGLSQKHNDGKEENDIQTGSALLPLSPESKAWAVLTSDEESGSGQGTSDSLNENETSTDFSFADTNEKDADGILAAGDSEITPGFPQSPTSSVTSENSEVFHVSEAEASNSSHESRIGLAEGLESEKKAVIPLVIVSALTFICLVVLVGILIYWRKCFQTAHFYLEDSTSPRVISTPPTPIFPISDDVGAIPIKHFPKHVADLHASSGFTEEFETLKEFYQEVQSCTVDLGITADSSNHPDNKHKNRYINIVAYDHSRVKLAQLAEKDGKLTDYINANYVDGYNRPKAYIAAQGPLKSTAEDFWRMIWEHNVEVIVMITNLVEKGRRKCDQYWPADGSEEYGNFLVTQKSVQVLAYYTVRNFTLRNTKIKKGSQKGRPSGRVVTQYHYTQWPDMGVPEYSLPVLTFVRKAAYAKRHAVGPVVVHCSAGVGRTGTYIVLDSMLQQIQHEGTVNIFGFLKHIRSQRNYLVQTEEQYVFIHDTLVEAILSKETEVLDSHIHAYVNALLIPGPAGKTKLEKQFQGLTLSPRLECRGTISAHCNLPLPGLTDPPTSASRVARTILLSQSNIQQSDYSAALKQCNREKNRTSSIIPVERSRVGISSLSGEGTDYINASYIMGYYQSNEFIITQHPLLHTIKDFWRMIWDHNAQLVVMIPDGQNMAEDEFVYWPNKDEPINCESFKVTLMAEEHKCLSNEEKLIIQDFILEATQDDYVLEVRHFQCPKWPNPDSPISKTFELISVIKEEAANRDGPMIVHDEHGGVTAGTFCALTTLMHQLEKENSVDVYQVAKMINLMRPGVFADIEQYQFLYKVILSLVSTRQEENPSTSLDSNGAALPDGNIAESLESLV

SEQ ID NO: 56835 - protein, 192 aa, Homo sapiens
MFFTCGPNEAMVVSGFCRSPPVMVAGGRVFVLPCIQQIQRISLNTLTLNVKSEKVKIQGQNKEMLAAACQMFLGKTEAEIAHIALETLEGHQRAIMAHMTVEEIYKDRQKFSEQVFKVASSDLVNMGISVVSYTLKDIHDDQDYLHSLGKARTAQVQKDARIGEAEAKRDAGIREAKAKQEKVSAQYLSEIE

SEQ ID NO: 56836 - protein, 184 aa, Homo sapiens
MWVTKLLPALLLQHVLLHLLLLPIAIPYAEGQRKRRNTIHEFKKSAKTTLIKIDPALKIKTKKVNTADQCANRCTRNKGLPFTCKAFVFDKARKQCLWFPFNSMSSGVKKEFGHEFDLYENKDYIRNCIIGKGRSYKGTVSITKSGIKCQPWSSMIPHEHSGGDDCLVESTFYSIPFWGHNSAR

SEQ ID NO: 56837 - protein, 135 aa, Homo sapiens
MTVLEQDTQGLDGWWLCSLHGRQGIVPGNRLKILVGMYDKKPAGPGPGPPATPAQPQPGLHAPAPPASQYTPMLPNTYQPQPDSVYLVPTPSKAQQGLYQVPGPSPQFQSPPAKQTSTFSKQTPHHPFPSPATDL

SEQ ID NO: 56838 - protein, 139 aa, Homo sapiens
MASEGTNIPSPVVRQIDKQFLICSICLERYKNPKVLPCLHTFCERCLQNYIPAHSLTLSCPVCRQTSILPEKGVAALQNNFFITNLMDVLQRTPGSNAEESSILETVTAVAAGKPLSCPNHDGNVPKEEIKESLQIFRG

SEQ ID NO: 56839 - protein, 131 aa, Homo sapiens
MSVPGPSSPDGALTRPPYCLEAGEPTPAFFKIFRQNQVVLLDTLEQEISKFKECHSMLDINALFAEAKHYHAKLVNIRKEMLMLHEKTSKLKKRALKLQQKRQKEELEREQQREKEFEREKQLTARPAKRM

SEQ ID NO: 56840 - protein, 149 aa, Homo sapiens
MARTVVLITGCSSGIGLHLAVRLASDPSQSFKVYATLRDLKTQGRLWEAARALACPPGSLETLQLDVRDSKSVAAARERVTEGRVDVLVCNAGLGLLGPLEALGEDAVASVLDVNVVGTVRMLQAFLPDMKRRGSGRVLVTGSVGGLMA

SEQ ID NO: 56841 - protein, 56 aa, Homo sapiens
MAYSNLLRANMDGLKKRDKKNKTKKTKAAAAAAAAAPAAAATAPTTAATTAATAAQ

SEQ ID NO: 56842 - protein, 579 aa, Homo sapiens
MDPAEAVLQEKALKFMCSMPRSLWLGCSSLADSMPSLRCLYNPGTGALTAFQTYNSCARLCLNQETVCLASTAMKTENCVAKTKLANGTSSMIVPKQRKLSASYEKEKELCVKYFEQWSESDQVEFVEHLISQMCHYQHGHINSYLKPMLQRDFITALPARGLDHIAENILSYLDAKSLCAAELVCKEWYRVTSDGMLWKKLIERMVRTDSLWRGLAERRGWGQYLFKNKPPDGNAPPNSFYRALYPKIIQDIETIESNWRCGRHSLQRIHCRSETSKGVYCLQYDDQKIVSGLRDNTIKIWDKNTLECKRILTGHTGSVLCLQYDERVIITGSSDSTVRVWDVNTGEMLNTLIHHCEAVLHLRFNNGMMVTCSKDRSIAVWDMASPTDITLRRVLVGHRAAVNVVDFDDKYIVSASGDRTIKVWNTSTCEFVRTLNGHKRGIACLQYRDRLVVSGSSDNTIRLWDIECGACLRVLEGHEELVRCIRFDNKRIVSGAYDGKIKVWDLVAALDPRAPAGTLCLRTLVEHSGRVFRLQFDEFQIVSSSHDDTILIWDFLNDPAAQAEPPRSPSRTYTYISR

SEQ ID NO: 56843 - protein, 281 aa, Homo sapiens
MVLAPLPDPGPPSLAVAPEPCPQPLRSPSLDNPTPFPNLGPSENPLKRLLVPGEEWEFEVTAFYRGRQVFQQTISCPEGLRLVGSEVGDRTLPGWPVTLPDPGMSLTDRGVMSYVRHVLSCLGGGLALWRAGQWLWAQRLGHCHTYWAVSEELLPNSGHGPDGEVPKDKEGGVFDLGPFIVDLITFTEGSGRSPRYALWFCVGESWPQDQPWTKRLVMVKVVPTCLRALVEMARVGGASSLENTVDLHISNSHPLSLTSDQYKAYLQDLVEGMDFQGPGES

SEQ ID NO: 56844 - protein, 360 aa, Homo sapiens
MKRIPQNPRYQHIKSRLDTGNSMTKYTEKLEEIKKNYRYKKDELFKRLKVTTFAQLIIQVASLSDQTLEVTAEEIQRLEDNDSAASDPDAETTARTNGKGNPGEQSPSPEQFINNAGAGDSSRSTLQSVISGVGELDLDKGPVKKAEPHTKDKPYPDCPFLLLDVRDRDSYQQCHIVGAYSYPIATLSRTMNPYSNDILEYKNAHGKIIILYDDDERLASQAATTMCERGFENLFMLSGGLKVLAQKFPEGLITGSLPASCQQALPPGSARKRSSPKGPPLPAENKWRFTPEDLKKIEYYLEEEQGPADHPSRLNQANSSGRESKVPGARSAQNLPGGGPASHSNPRSLSSGHLQGKPWK

SEQ ID NO: 56845 - protein, 57 aa, Homo sapiens
MGTWCRAPSGAEMEPWWARRARTSSCGSLTPEQSRGPLRARRPMRTAGIAGWHGWAP

SEQ ID NO: 56846 - protein, 4417 aa, Homo sapiens
  MOD_RES (1)..(1): Any amino acid
XTTEDTLITGSKTAAPVTSTGSTTATLEGQSTAASSRTSNQDISASSQNHQTKSTETTSKAQTDTLTQMMTSTLFSSPSVHNVMETAPPDEMTTSFPSSVTNTLMMTSKTITMTTSTDSTLGNTEETSTAGTESSTPVTSAVSITAGQEGQSRTTSWRTSIQDTSASSQNHWTRSTQTTRESQTSTLTHRTTSTPSFSPSVHNVTGTVSQKTSPSGETATSSLCSVTNTSMMTSEKITVTTSTGSTLGNPGETSSVPVTGSLMPVTSAALVTFDPEGQSPATFSRTSTQDTTAFSKNHQTQSVETTRVSQINTLNTLTPVTTSTVLSSPSGFNPSGTVSQETFPSGETTTSSPSSVSNTFLVTSKVFRMPTSRDSTLGNTEETSLSVSGTISAITSKVSTIWWSDTLSTALSPSSLPPKISTAFHTQQSEGAETTGRPHERSSFSPGVSQEIFTLHETTTWPSSFSSKGHTTWSQTELPSTSTGAATRLVTGNPSTGTAGTIPRVPSKVSAIGEPGEPTTYSSHSTTLPKTTGAGAQTQWTQETGTTGEALLSSPSYSVTQMIKTATSPSSSPMLDRHTSQQITTAPSTNHSTIHSTSTSPQESPAVSQRGHTQAPQTTQESQTTRSVSPMTDTKTVTTPGSSFTASGHSPSEIVPQDAPTISAATTFAPAPTGDGHTTQAPTTALQAAPSSHDATLGPSGGTSLSKTGALTLANSVVSTPGGPEGQWTSASASTSPDTAAAMTHTHQAESTEASGQTQTSEPASSGSRTTSAGTATPSSSGASGTTPSGSEGISTSGETTRFSSNPSRDSHTTQSTTELLSASASHGAIPVSTGMASSIVPGTFHPTLSEASTAGRPTGQSSPTSPSASPQETAAISRMAQTQRTRTSRGSDTISLASQATDTFSTVPPTPPSITSTGLTSPQTETHTLSPSGSGKTFTTALISNATPLPVTYASSASTGHTTPLHVTDASSVSTGHATPLPVTSPSSVSTGHTTPLPVTDTSSESTGHVTPLPVTSFSSASTGDSTPLPVTDTSSASTGHVTPLPVTSLSSASTGDTTPLPVTDTSSASTGHATSLPVTDTSSVSTGHTTPLPVTDTSSASTGHATSLPVTDTSSVSTGHTTPLHVTDASSASTGQATPLPVTSLSSVSTGDTTPLPVTSPSSASTGHATPLLVTDTSSASTGHATPLPVTDASSVSTDHATSLPVTIPSAASTGHTTPLPVTDTSSASTGQATSLLVTDTSSVSTGDTTPLPVTSTSSASTGHVTPLHVTSPSSASTGHATPLPVTSLSSASTGDTMPLPVTSPSSASTGDTTPLPVTDASSVSTGHTTPLHVTDASSASTGQATPLPVTSLSSVSTGDTTPLPVTSPSSASTGHATPLLVTDTSSASTGHATPLPVTDASSVSTDHATSLPVTIPSAASTGHTTPLPVTDTSSASTGQATSLLVTDTSSVSTGDTTPLPVTSTSSASTGHVTPLHVTSPSSASTGHATPLPVTSLSSASTGDTMPLPVTSPSSASTGDTTPLPVTDASSVSTGHTTPLPVTSPSSASTGHTTPLPVTDTSSASKGDTTPLPVTSPSSASTGHTTPLPVTDTSSASTGDTTPLPVTNASSLSTGHATPLHVTSPSSASTGHATPLPVTSTSSASTGHATPLPVTGLSSATTDDTTRLPVTDVSSASTGQATPLPVTSLSSVSTGDTTPLPVTSPSSASTGHASPLLVTDASSASTGQATPLPVTDTSSVSTAHATPLPVTGLSSASTDDTTRLPVTDVSSASTGQAIPLPVTSPSSASTGDTTPLPVTDASSASTGDTTSLPVTIPSSASSGHTTSLPVTDASSVSTGHATSLLVTDASSVSTGDTTPLPVTDTNSASTGDTTPLHVTDASSVSTGHATSLPVTSLSSASTGDTTPLPVTSPSSASSGHTTPLPVTDASSVPTGHATSLPVTDASSVSTGHATPLPVTDASSVSTGHATPLPVTDTSSVSTGQATPLPVTSLSSASTGDTTPLPVTDTSSASTGQDTPLPVTSLSSVSTGDTTPLPVTNPSSASTGHATPLLVTDASSISTGHATSLLVTDASSVSTGHATALHDTDASSLSTGDTTPLPVTSPSSTSTGDTTPLPVTETSSVSTGHATSLPVTDTSSASTGHATSLPVTDTSSASTGHATPLPVTDTSSASTGQATPLPVTSPSSASTGHAIPLLVTDTSSASTGQATPLPVTSLSSASTGDTTPLPVTDASSVSTGHATSLPVTSLSSVSTGDTTPLPVTSPSSASTGHATPLHVTDASSASTGHATPLPVTSLSSASTGDTTPLPVTSPSSASTGHATPLHVTDASSVSTGDTTPLPVTSSSSASSGHTTPLPVTDASSASTGDTTPLPVTDTSSASTGHATHLPVTGLSSASTGDTTRLPVTNVSSASTGHATPLPVTSTSSASTGDTTPLPGTDTSSVSTGHTTPLLVTDASSVSTGDTTRLPVTSPSSASTGHTTPLPVTDTPSASTGDTTPLPVTNASSLSTRHATSLHVTSPSSASTGHATSLPVTDTSAASTGHATPLPVTSTSSASTGDTTPLPVTDTYSASTGQATPLPVTSLSSVSTGDTTPLPVTSPSSASTGHATPLLVTDASSASTGQATPLPVTSLSSVSTGDTTPLPVTSPSSASTGHATSLPVTDTSSASTGDTTSLPVTDTSSAYTGDTTSLPVTDTSSSSTGDTTPLLVTETSSVSTGDTTPLPVTDTSSASTGHATPLPVTNTSSVSTGHATPLHVTSPSSASTGHTTPLPVTDASSVSTGHATSLPVTDASSVFTGHATSLPVTIPSSASSGHTTPLPVTDASSVSTGHATSLPVTDASSVSTGHATPLPVTDASSVSTGHATPLPLTSLSSVSTGDTTPLPVTDTSSASTGQATPLPVTSLSSVSTGDTTPLPVTDTSSASTGHATSLPVTDTSSASTGHATPLPDTDTSSASTGHATLLPVTDTSSASIGHATSLPVTDTSSISTGHATPLHVTSPSSASTGHATPLPVTDTSSASTGHANPLHVTSPSSASTGHATPLPVTDTSSASTGHATPLPVTSLSSVSTGDTTPLPVTSPSSASTGHTTPLPVTDTSSASTGQATALPVTSTSSASTGDTTPLPVTDTSSASTGQATPLPVTSLSSVSTGDTTPLPVTSPSSASTGHATPLLVTDASSASTGQATPLPVTSLSSVSTGDTTPLPVTSPSSASTGHATSLPVTDTSSASTGDTTSLPVTDTSSAYTGDTTSLPVTDTSSSSTGDTTPLLVTETSSVSTGHATPLLVTDASSASTGHATPLHVTSPSSASTGDTTPVPVTDTSSVSTGHATPLPVTGLSSASTGDTTRLPVTDISSASTGQATPLPVTNTSSVSTGDTMPLPVTSPSSASTGHATPLPVTSTSSASTGHATPVPVTSTSSASTGHTTPLPVTDTSSASTGDTTPLPVTSPSSASTGHTTPLHVTIPSSASTGDTSTLPVTGASSASTGHATPLPVTDTSSVSTGHATPLPVTSLSSVSTGDTTPLPVTDASSASTGQATPLPVTSLSSVSTGDTTPLLVTDASSVSTGHATPLPVTDTSSASTGDTTRLPVTDTSSASTGQATPLPVTSLSSVSTGDTTPLLVTDASSVSTGHATPLPVTDTSSASTGDTTRLPVTDTSSASTGQATPLPVTIPSSSSSGHTTPLPVTSTSSVSTGHVTPLHVTSPSSASTGHVTPLPVTSTSSASTGHATPLLVTDASSVSTGHATPLPVTDASSASTGDTTPLPVTDTSSASTGQATPLPVTSLSSVSTGDTTPLPVTDASSASTGHATPLPVTIPSSVSTGDTMPLPVTSPSSASTGHATPLPVTGLSSASTGDTTPLPVTDTSSASTRHATPLPVTDTSSASTDDTTRLPVTDVSSASTGHATPLPVTSTSSASTGDTTPLPVTDTSSVSTGHATSLPVTSRSSASTGHATPLPVTDTSSVSTGHATPLPVTSTSSVSTGHATPLPVTSPSSASTGHATPVPVTSTSSASTGDTTPLPVTNASSLSTGHATPLHVTSPSSASRGDTSTLPVTDASSASTGHATPLPLTSLSSVSTGDTTPLPVTDTSSASTGQATPLPVTSLSSVSTGDTTPLPVTIPSSASSGHTTSLPVTDASSVSTGHGTPLPVTSTSSASTGDTTPLPVTDTSSASTGHATPLPVTDTSSASTGHATPLPVTSLSSVSTGHATPLAVSSATSASTVSSDSPLKMETPGMTTPSLKTDGGRRTATSPPPTTSQTIISTIPSTAMHTRSTAAPIPILPERGVSLFPYGAGAGDLEFVRRTVDFTSPLFKPATGFPLGSSLRDSLYASQAGTLWPWWLRSGTMLTSPLVGGPHFIRATPTKPSSPRTGAGPMPCFSTRAVGCSGTWPSAQWRWLFRKQPTDVPASVGEVSP

SEQ ID NO: 56847 - protein, 45 aa, Homo sapiens
MGSKMNLIEHSHLPTTDEFSFSENLFGLLRLPWSPSMCSHLRTRP

SEQ ID NO: 56848 - protein, 366 aa, Homo sapiens
MPRYGASLRQSCPRSGREQGQDGTAGAPGLLWMGLVLALALALALALALSDSRVLWAPAEAHPLSPQGHPARLHRIVPRLRDVFGWGNLTCPICKGLFTAINLGLKKEPNVARVGSVAIKLCNLLKIAPPAVCQSIVHLFEDDMVEVWRRSVLSPSEACGLLLGSTCGHWDIFSSWNISLPTVPKPPPKPPSPPAPGAPVSRILFLTDLHWDHDYLEGTDPDCADPLCCRRGSGLPPASRPGAGYWGEYSKCDLPLRTLESLLSGLGPAGPFDMVYWTGDIPAHDVWHQTRQDQLRALTTVTALVRKFLGPVPVYPAVGNHESTPVNSFPPPFIEGNHSSRWLYEAMAKAWEPWLPAEALRTLRCI

SEQ ID NO: 56849 - protein, 1220 aa, Homo sapiens
MGDQQLYKTNHVAHGSENLFYQQPPLGVHSGLNHNYGNAVTGGGMDAPQASPISPHFPQDTRDGLGLPVGSKNLGQMDTSRQGGWGSHAGPGNHVQLRGNLANSNMMWGAPAQAEPTDGYQYTYSQASEIRTQKLTSGVLHKLDSFTQVFANQNLRIQVNNMAQVLHTQSAVMDGAPDSALRQLLSQKPMEPPAPAIPSRYQQVPQQPHPGFTGGLSKPALQVGQHPTQGHLYYDYQQPLAQVPVQGGQPLQAPQMLSQHMQQMQQHQYYPPQQQQQAGQQRISMQEIQTQPQQIRPSQPQPPPQQQQPQQLQLQQRQGSMQIPQYYQPQPMMQHLQEQQQQQMHLQPPSYHRDPHQYTPEQAHTVQLIPLGSMSQYYYQEPQQPYSHPLYQQSHLSQHQQREDSQLKTYSSDRQAQAMLSSHGDLGPPDTGMGDPASSDLTRVSSTLPHRPLLSPSGIHLNNMGPQHQQLSPSAMWPQMHLPDGRAQPGSPESSGQPKGAFGEQFDAKNKLTCSICLKEFKNLPALNGHMRSHGGMRASPNLKQEEGEKVLPPQPQPPLPPPPPPPPPPQLPPEAESLTPMVMPVSVPVKLLPPKPSSQGFTNSTVAAPSARDKPASSMSDDEMPVLVRMTLSPPHSPQGAAPRTPAEIPRKHQPSVPKAEEPLKTVQEKKKFRHRPEPLFIPPPPSYNPNPAASYSGATLYQSQLRSPRVLGDHLLLDPTHELPPYTPPPMLSPVRQGSGLFSNVLISGHGPGAHPQLPLTPLTPTPRVLLCRSNSIDGSNVTVTPGPGEQTVDVEPRINIGLRFQAEIPELQDISALAQDTHKATLVWKPWPELENHDLQQRVENLLNLCCSSALPGGGTNSEFALHSLFEAKGDVMVALEMLLLRKPVRLKCHPLANYHYAGSDKWTSLERKLFNKALATYSKDFIFVQKMVKSKTVAQCVEYYYTWKKIMRLGRKHRTRLAEIIDDCVTSEEEEELEEEEEEDPEEDRKSTKEEESEVPKSPEPPPVPVLAPTEGPPLQALGQPSGSFICEMPNCGAVFSSRQALNGHARIHGGTNQVTKARGAIPSGKQKPGGTQSGYCSVKSSPSHSTTSGETDPTTIFPCKECGKVFFKIKSRNAHMKTHRQQEEQQRQKAQKAAFAAEMAATIERTTGPVGAPGLLPLDQLSLIKPIKDVDILDDDVVQQLGGVMEEAEVVDTDLLLDDQDSVLLQGDAEL

SEQ ID NO: 56850 - protein, 46 aa, Homo sapiens
MPVINIEDLTEKDKLKMEVDQLKKEVTLERMLIPARHLQNQSLMDY

SEQ ID NO: 56851 - protein, 685 aa, Homo sapiens
MPAYTHASPIHNTHKPYECKECGKYFSCGSNLIQHQSIHTGEKPYKCKECGKAFQLHIQLTRHQKFHTGEKTFECKECGKAFNLPTQLNRHKNIHTVKKLFECKECGKSFNRSSNLTQHQSIHAGVKPYQCKECGKAFNRGSNLIQHQKIHSNEKPFVCRECEMAFRYHYQLIEHCRIHTGEKPFECKECRKAFTLLTKLVRHQKIHMGEKPFECRECGKAFSLLNQLNRHKNIHTGEKPFECKECGKSFNRSSNLIQHQSIHADVKPYECKECGKGFNRGANLIQHQKIHSNEKPFVCRECEMAFRYHYQLIQHCQIHTGGKPFECKECGKAFSLLTQLARHKNIHTGEKPFECKDCGKAFNRGSNLVQHQSIHTGEKPYECKECGKAFRLHLQLSQHEKTHTGEKPFECKECGKFFRRGSNLNQHRSIHTGKKPFECKECGKAFRLHMHLIRHQKFHTGEKPFECKECGKAFSLHTQLNHHKNIHTGEKPFKCKECGKSFNRVSNLVQHQSIHAGVKPYECKECGKGFSRVSNLIQHQKTHSSAKPFVCKECRKTFRYHYQLTEHYRIHTGEKPFECKECGKAFGLLTQLAQHQIIHTGEKPFKCKECGKAFNRGSNLVQPQSIHTGEKPYECKECGKAFRLHLQLSLHQKLVQVRNPLNVRNVGQPSDISSNLLNIRKFILG

SEQ ID NO: 56852 - protein, 96 aa, Homo sapiens
MAAHLKKRVYEEFTKVVQPQEEIATKKLRLTKPSKSAALHIDLCKATSPADALQYLLQFARKPVEAESVEGVVRILLEHYYKRWSLSVLPRLVANS

SEQ ID NO: 56853 - protein, 59 aa, Homo sapiens
MASQKRPSQRHGSKYLATASTMDHARHGFLPRTHTTRQELLTTAPCPRSHTAGPKMKTP

SEQ ID NO: 56854 - protein, 76 aa, Homo sapiens
MELGLGGLSTLSHCPWPRQQAPLGLSAQPALWPTLAALALLSSVAEASLGSAPRSPAPREGPPPVLASPAGHLPGR

SEQ ID NO: 56855 - protein, 858 aa, Homo sapiens
MGDMKTPDFDDLLAAFDIPDPTSLDAKEAIQTPSEENESPLKPPGICMDESVSLSHSGSAPDVPAVSVIVKNTSRQESFEAEKDHITPSLLHNGFRGSDLPPDPHNCGKFDSTFMNGDSARSFPGKLEPPKSEPLPTFNQFSPISSPEPEDPIKDNGFGIKPKHSDSYFPPPLGCGAVGGPVLEALAKFPVPELHMFDHFCKKEPKPEPLPLGSQQEHEQSGQNTVEPHKDPDATRFFGEALEFNSHPSNSIGESKGLARELGTCSSVPPRQRLKPAHSKLSSCVAALVALQAKRVASVTKEDQPGHTKDLSGPTKESSKGSPKMPKSPKSPRSPLEATRKSIKPSDSPRSICSDSSSKGSPSVAASSPPAIPKVRIKTIKTSSGEIKRTVTRILPDPDDPSKSPVGSPLGSAIAEAPSEMPGDEVPVEEHFPEAGTNSGSPQGARKGDESMTKASDSSSPSCSSGPRVPKGAAPGSQTGKKQQSTALQASTLAPANLLPKAVHLANLNLVPHSVAASVTAKSSVQRRSQPQLTQMSVPLVHQVKKAAPLIVEVFNKVLHSSNPVPLYAPNLSPPADSRIHVPASGYCCLECGDAFALEKSLSQHYGRRSVHIEVLCTLCSKTLLFFNKCSLLRHARDHKSKGLVMQCSQLLVKPISADQMFVSAPVNSTAPAAPAPSSSPKHGLTSGSASPPPPALPLYPDPVRLIRYSIKCLECHKQMRDYMVLAAHFQRTTEETEGLTCQVCQMLLPNQCSFCAHQRIHAHKSPYCCPECGVLCRSAYFQTHVKENCLHYARKVHPLWCRPPDLGLAEKPHPGATLPGFPQMCILPHGLQDCQQHCRPQCHPAPHPAPQTLPAHL

SEQ ID NO: 56856 - protein, 118 aa, Homo sapiens
MAGWWPALSRAARRHPWPTNVLLYGSLVSAGDALQQRLQGREANWRQTRRVATLVVTFHANFNYVWLRLLERALPGRAPHALLAKLLCDQVVGAPIAVSAFYVDQLDIISMAETTMMP

SEQ ID NO: 56857 - protein, 501 aa, Homo sapiens
MIPMFTVTLEDSGTLWKSLHSSSESEMTTLPPLPMTRPKLTALARQKLPCSSRKIPRSQLIKEKDDIDHYLEVNFKGLSKEEVAAYRNSYKKNICVDMLRDGYHKSFTELFALMERWDALREAARVRSLFWLQKPLEEQPDKLDYLYHYLTRAEDAERKESFEDVHNNLYALACYFNNSEDKWVRNHFYERCFKIAQLIKIDCGKKEAEAHMHMGLLYEEDGQLLEAAEHYEAFHQLTQGRIWKDETGRSLNLLACESLLRTYRLLSDKMLENKEYKQAIKILIKASEIAKEGSDKKMEAEASYYLGLAHLAAEEYETALTVLDTYCKISTDLDDDLSLGRGYEAIAKVLQSQGEMTEAIKYLKKFVKIARNNFQSLDLVRASTMLGDIYNEKGYYNKASECFQQAFDTTVELMSMPLMDETKVHYGIAKAHQMMLTVNNYIESADLTSLNYLLSWKESRGNIEPDPVTEEFRGSTVEAVSQNSERLEELSRFPGDQKNET

SEQ ID NO: 56858 - protein, 18 aa, Homo sapiens
  MOD_RES (1)..(1): Any amino acid
XGYGGSSSSSSYGSGRRF

SEQ ID NO: 56859 - protein, 89 aa, Homo sapiens
MEEPQKSYVNTMDLERDEPLKSTGPQISVSEFSCHCCYDILVNPTTLNCGHSFCRHCLALWWASSKKTECPECREKWEGFPKVSILLRL

SEQ ID NO: 56860 - protein, 254 aa, Homo sapiens
MVWPWVAMASRWGPLIGLAPCCLWLLGAVLLMDASARPANHSSTRERVANREENEILPPDHLNGVKLEMDGHLNRGFHQEVFLGKDLGGFDEDAEPRRSRRKLMVIFSKVDVNTDRKISAKEMQRWIMEKTAEHFQEAMEESKTHFRAVDPDGDGHVSWDEYKVKFLASKGHSEKEVADAIRLNEELKVDEESCAPLSTGSPGEPEGPLVPGGQPPCRPAADGGGVPVVPPPRAQPGNAQVHGEGDRPGPGPGR

SEQ ID NO: 56861 - protein, 185 aa, Homo sapiens
MAVYWCTEALPLSVTALLPIVLFPFMGILPSNKVCPQYFLDTNFLFLSGLIMASAIEEWNLHRRIALKILMLVGVQPARLILGMMVTTSFLSMWLSNTASTAMMLPIANAILKSLFGQKEVRKDPSQESEENTGIEPNTFLSEERLKLQAPLVIRLGQITESGQWNMSGNDVCNFRVLSFLPGGM

SEQ ID NO: 56862 - protein, 521 aa, Homo sapiens
MTSAFKLDFLPDMMVEGRLLVPDRINGTANKMNGALDHSDQPDPDAIKMFVGQIPRSWSEKELKELFEPYGAVYQINVLRDRSQNPPQSKGCCFVTFYTRKAALEAQNALHNIKTLPGMHHPIQMKPADSEKSNAVEDRKLFIGMVSKKCNENDIRVMFSPFGQIEECRILRGPDGLSRGCAFVTFSTRAMAQNAIKAMHQSQTMEGCSSPIVVKFADTQKDKEQRRLQQQLAQQMQQLNTATWGNLTGLGGLTPQYLALLQQATSSSNLGAFSGIQQMAGMNALQLQNLATLAAAAAAAQTSATSTNANPLSTTSSALGALTSPVAASTPNSTAGAAMNSLTSLGTLQGLAGATVGLNNINALAVAQMLSGMAALNGGLGATGLTNGTAGTMDALTQAYSGIQQYAAAALPTLYSQSLLQQQSAAGSQKEGPEGANLFIYHLPQEFGDQDILQMFMPFGNVISAKVFIDKQTNLSKCFGFVSYDNPVSAQAAIQAMNGFQIGMKRLKVQLKRSKNDSKPY

SEQ ID NO: 56863 - protein, 104 aa, Homo sapiens
MFPVLEPHQVGLIRSYNSKTMTCFQELVTFRDVAIDFSRQEWEYLDPNQRDLYRDVMLENYRNLVSLEMRSRSVARVGLKLLVSSDPPTSAFQNAGIIGVSHHA

SEQ ID NO: 56864 - protein, 193 aa, Homo sapiens
MAGKKVLIVYAHQEPKSFNGSLKNVAVDELSRQGCTVTVSDLYAMNLEPRATDKDITGTLSNPEVFNYGVETHEAYKQRSLASDITDEQKKVREADLVIFQGKLALLSVTTGGTAEMYTKTGVNGDSRYFLWPLQHGTLHFCGFKVLAPQISFAPEIASEEERKGMVAAWSQRLQTIWKEEPIPCTAHWHFGQ

SEQ ID NO: 56865 - protein, 58 aa, Homo sapiens
MVLADLGRKITSALRSLSNATIINEEVLNAMLKEVCTALLEADVNIKLVKQLRENVNL

SEQ ID NO: 56866 - protein, 353 aa, Homo sapiens
MEPGLEHALRRTPSWSSLGGSEHQEMSFLEQENSSSWPSPAVTSSSERIRGKRRAKALRWTRQKSVEEGEPPGQGEGPRSRPAAESTGLEATFPKTTPLAQADPAGVGTPPTGWDCLPSDCTASAAGSSTDDVELATEFPATEAWECELEGLLEERPALCLSPQAPFPKLGWDDELRKPGAQIYMRFMQEHTCYDAMATSSKLVIFDTMLEIKKAFFALVANGVRAAPLWDSKKQSFVGMLTITDFILVLHRYYRSPLRSTCKAASSLWSPSLLMIACLKLSTPSSRTGSIACLFLTRCQATYSTSSHTNACSSSCTSLVPCCPGPPSSTALSKIWASAHSETWLWCWRQHPS

SEQ ID NO: 56867 - protein, 41 aa, Homo sapiens
MAIPGRQNIVLRSHRKRVWAYFAKENTAVAPCFAKTISVWE

SEQ ID NO: 56868 - protein, 105 aa, Homo sapiens
MGAQDRPQCHFDIEINREPVGRIMFQLFSDICPKTCKNFLCLCSGEKGLGKTTGKKLCYKGSTFHRVVKNFMIQGGDFSEGNGKGGESIYGGYFKENVVFCKMKR

SEQ ID NO: 56869 - protein, 546 aa, Homo sapiens
MNSHSYNGSVGRPLGSGPGALGRDPPDPEAGHPPQPPHSPGLQVVVAKSEPARPSPGSPRGQPQDQDDDEDDEEDEAGRQRASGKPSNVGHRLGHRRALFEKRKRLSDYALIFGMFGIVVMVTETELSWGVYTKESLYSFALKCLISLSTAILLGLVVLYHAREIQLFMVDNGADDWRIAMTCERVFLISLELAVCAIHPVPGHYRFTWTARLAFTYAPSVAEADVDVLLSIPMFLRLYLLGRVMLLHSKIFTDASSRSIGALNKITFNTRFVMKTLMTICPGTVLLVFSISSWIIAAWTVRVCERENMYHDKQEVTSNFLGAMWLISITFLSIGYGDMVPHTYCGKGVCLLTGIMGAGCTALVVAVVARKLELTKAEKHVHNFMMDTQLTKRVKNAAANVLRETWLIYKHTRLVKKPDQARVRKHQRKFLQAIHQAQKLRSVKIEQGKLNDQANTLTDLAKTQTVMYDLVSELHAQHEELEARLATLESRLDALGASLQALPGLIAQAIRPPPPPLPPRPGPGPQDQAARSSPCRWTPVAPSDCG

SEQ ID NO: 56870 - protein, 138 aa, Homo sapiens
MCHSRSCHPTMTILQAPTPAPSTIPGPRRGSGPEIFTFDPLPEPAAAPAGRPSASRGHRKRSRRVLYPRVVSIAEVGIRGVRCPGVTGERPDSRGLDLTCLLFCLPLGPAPAASRGTEPSQKASLSAAHHRLLPDPDG

SEQ ID NO: 56871 - protein, 119 aa, Homo sapiens
MDSFGQPRPEDNQSVVRRMQKKYWKTKQVFIKATGKKEDEHLVASDAELDAKLEVFHSVQETCTELLKIIEKYQLRLNVISEEENELGLFLKFQAERDATQAGKMMDATGKALCSSAKQ

SEQ ID NO: 56872 - protein, 76 aa, Homo sapiens
MCVRRSLVGLTFCTCYLASYLTNKYVLSVLKFTYPTLFQGWQTLIGGLLLHVSWKLGWVEINSSSRPFLCFSLCIM

SEQ ID NO: 56873 - protein, 59 aa, Homo sapiens
MEEQGHSEMEIIPSESHPHIQLLKSNRELLVTHIRNTQCLVDNLLKNDYFSAEDAEIVC

SEQ ID NO: 56874 - protein, 53 aa, Homo sapiens
MPAPEQASLVEEGQPQTRQEAASTGPGMEPETTATTILASVKEQVFTSLSTLG

SEQ ID NO: 56875 - protein, 320 aa, Homo sapiens
MGSILSRRIAGVEDIDIQANSAYRYPPKSGNYFASHFFMGGEKFDTPHPEGYLFGENMDLNFLGSRPVQFPYVTPAPHEPVKTLRSLVNIRKDSLRLVRYKDDADSPTEDGDKPRVLYSLEFTFDADARVAITIYCQASEEFLNGRAVYSPKSPSLQSETVHYKRGVSQQFSLPSFKIDFSEWKDDELNFDLDRGVFPVVIQAVVDEGDVVEVTGHAHVLLAAFEKHMDGSFSVKPLKQKQIVDRVSYLLQEIYGIENKNNQETKPSDDENSDNSNECVVCLSDLRDTLILPCRHLCLCTSCADTLRYQANNCPICRLQL

SEQ ID NO: 56876 - protein, 443 aa, Homo sapiens
MDRLGSFSNDPSDKPPCRGCSSYLMEPYIKCAECGPPPFFLCLQCFTRGFEYKKHQSDHTYEIMTSDFPVLDPSWTAQEEMALLEAVMDCGFGNWQDVANQMCTKTKEECEKHYMKHFINNPLFASTLLNLKQAEEAKTADTAIPFHSTDDPPRPTFDSLLSRDMAGYMPARADFIEEFDNYAEWDLRDIDFVEDDSDILHALKMAVVDIYHSRLKERQRRKKIIRDHGLINLRKFQLMERRYPKEVQDLYETMRRFARIVGPVEHDKFIESHALEFELRREIKRLQEYRTAGITNFCSARTYDHLKKTREEERLKRTMLSEVLQYIQDSSACQQWLRRQADIDSGLSPSIPMASNSGRRSAPPLNLTGLPGTEKLNEKEKELCQMVRLVPGAYLEYKSALLNECNKQGGLRLAQARALIKIDVNKTRKIYDFLIREGYITKG

SEQ ID NO: 56877 - protein, 133 aa, Homo sapiens
MAPSVPAAEPEYPKGIRAVLLGPPGAGKGTQAPRLAENFCVCHLATGDMLRAMVASGSELGKKLKATMDAGKLVSDEMVVELIEKNLETPLCKNGFLLDGFPRTVRQAEMADSPQEWPFLPRGVQPSKRAHER

SEQ ID NO: 56878 - protein, 238 aa, Homo sapiens
MATNFLAHEKIWFDKFKYDDAERRFYEQMNGPVAGASRQSSGPGASSGTSGDHVVQELQQAISKLEARLNVLEKSSPGHRATAPQTQHVSPMRQVEPPAKKPATPAEDDEDDDIDLFGSDNEEEDKEAAQLREERLRQYAEKKAKKPALVAKSSILLDVKPWDDETDMAQLEACVRSIQLDGLVWGASKLVPVGYGIRKLQIQCVVEDDKVGTDLLEEEITKFEEHVQSVDIAAFNKI

SEQ ID NO: 56879 - protein, 175 aa, Homo sapiens
MEVPPPAPRSFLCRALCLFPRVFAAEAVTADSEVLEERQKRLPYVPEPYYPESGWDRLRELFGKDEQQRISKDLANICKTAATAGIIGWVYGGIPAFIHAKQQYIEQSQAEIYHNRFDAVQSAHRAATRGFIRYGWRWGWRTAVFVTIFNTVNTSLNVYRNKDALSHFVIAGALL

SEQ ID NO: 56880 - protein, 60 aa, Homo sapiens
MEASALTSSAVTSVAKVVRVASGSAVVLPLARIATVVIGGVVAMAAVPMVLSAMGFTAAG

SEQ ID NO: 56881 - protein, 40 aa, Homo sapiens
MSRFKFIDIGINLTDPMFRGIYRGVQKHQVYDYRWKSTRQ

SEQ ID NO: 56882 - protein, 119 aa, Homo sapiens
MKRLDVNAAGIWEPKKGDVLCSRHFKKTDFDRSAPNIKLKPGVIPSIFDSPYHLQGKREKLHCRKNFTLKTVPATNYNHHLVGASSCIEEFQSQFIFKHRKRKQEQEEEQKPRREKCIS

SEQ ID NO: 56883 - protein, 535 aa, Homo sapiens
MNRFRVSKFRHTEARPPRRESWISDIRAGTAPSCRNHIKSSCSLIAFNSDRPGVLGIVPLQGQGEDKRRVAHLGCHSDLVTDLDFSPFDDFLLATGSADRTVKLWRLPGPGQALPSAPGVVLGPEDLPVEVLQFHPTSDGILVSAAGTTVKVWDAAKQQPLTELAAHGDLVQSAVWSRDGALVGTACKDKQLRIFDPRTKPRASQSTQAHENSRDSRLAWMGTWEHLVSTGFNQMREREVKLWDTRFFSSALASLTLDTSLGCLVPLLDPDSGLLVLAGKGERQLYCYEVVPQQPALSPVTQCVLESVLRGAALVPRQALAVMSCEVLRVLQLSDTAIVPIGYHVPRKAVEFHEDLFPDTAGCVPATDPHSWWAGDNQQVQKVSLNPACRPHPSFTSCLVPPAEPLPDTAQPAVMETPVGDADASEGFSSPPSSLTSPSTPSSLGPSLSSTSGIGTSPSLRSLQSLLGPSSKFRHAQGTVLHRDSHITNLKGLNLTTPGESDGFCANKLRVAVPLLSSGGQVAVLEMREKRHREV

SEQ ID NO: 56884 - protein, 117 aa, Homo sapiens
MAEFSQKRGKRRSDEGLGSMVDFLLANARLVLGVGGAAVLGIATLAVKRFIDRATSPRDEDDTKADSWKELSLLKATPHLQPRPPPAALSQPVLPLAPSSSAPGGSVVMVGSFRWGN

SEQ ID NO: 56885 - protein, 340 aa, Homo sapiens
MAPIPKTVGRIKLDCSLRPSCPLEVAAAPKLCKEFGPEDYGEEDIVDFLRRLVESDPQGLHRIHVDGSSGRLQLWHHDYLLGHLDDEGKSTGQSDRGKGAEGLGTYCGLRKSFLYPPQESEPCPQSPSASATFPSVSDSLLQVAMPQKLLVTEEEANRLAEELVAEEERMKQKAEKKRLKKKRQKERKRQERLEQYCGEPKASTTSDGDESPPSSPGNPVQGQCGEEEDSLDLSSTFVSLALRKVGDWPLSARREKGLNQEPQGRGLALQKMGQEEESPPREERPQQSPKVQASPGLLAAALQQSQELAKLGTSFAQNGFYHEAVVLFTQALKLNPQDHR

SEQ ID NO: 56886 - protein, 138 aa, Homo sapiens
MGWRPRRARGTPLLLLLLLLLLWPVPGAGVLQGHIPGQPVTPHWVLDGQPWRTVSLEEPVSKPDMGLVALEAEGQELLLELEKNHRLLAPGYIETHYGPDGQPVVLAPNHTVRCFHGLWDAPPEVPPHHSYPYSSLHS

SEQ ID NO: 56887 - protein, 133 aa, Homo sapiens
  MOD_RES (1)..(1): Any amino acid
XDTKGKNKKKKKKSKILKCDEHIQKLGSCITDPGNRETSGNTMHTVFHRDKTKDTHPESCCSSEKGGQPLPWFEHRKNVPQFAEPTETLFGPDSGKGAKSLVELLVSIPCGLTVHNCLGTGWMWEGIVFEGLR

SEQ ID NO: 56888 - protein, 473 aa, Homo sapiens
MSQTSSIGSAESLISLERKKEKNINRDITSRKDLPSRTSNVERKASQQQWGRGNFTEGKVPHIRIENGAAIEEIYTFGRILGKGSFGIVIEATDKETETKWAIKKVNKEKAGSSAVKLLEREVNILKSVKHEHIIHLEQVFETPKKMYLVMELCEDGELKEILDRKGHFSENETRWIIQSLASAIAYLHNNDIVHRDLKLENIMVKSSLIDDNNEINLNIKVTDFGLAVKKQSRSEAMLQATCGTPIYMAPEVISAHDYSQQCDIWSIGVVMYMLLRGEPPFLASSEEKLFELIRKGELHFENAVWNSISDCAKSVLKQLMKVDPAHRITAKELLDNQWLTGNKLSSVRPTNVLEMMKEWKNNPESVEENTTEEKNKPSTEEKLKSYQPWGNVPDANYTSDEEEEKQSTAYEKQFPATSKDNFDMCSSSFTSSKLLPAEIKGEMEKTPVTPSQGTATKYPAKSGALSRTKKKL

SEQ ID NO: 56889 - protein, 41 aa, Homo sapiens
MMTSVSSDHCRGAREKPQISAAQSTQPQKQVVQLYRPLDTS

SEQ ID NO: 56890 - protein, 270 aa, Homo sapiens
MSAQESCLSLIKYFLFVFNLFFFVLGSLIFCFGIWILIDKTSFVSFVGLAFVPLQIWSKVLAISGIFTMGIALLGCVGALKELRCLLGLYFGMLLLLFATQITLGILISTQRAQLERSLRDVVEKTIQKYGTNPEETAAEESWDYVQFQLRCCGWHYPQDWFQVLILRGNGSEAHRVPCSCYNLSATNDSTILDKVILPQLSRLGHLARSRHSADICAVPAESHIYREGCAQGLQKWLHNNLISIVGICLGVGLLEVIWPRPHPRSALNP

SEQ ID NO: 56891 - protein, 935 aa, Homo sapiens
MTTEVGSVSEVKKDSSQLGTDATKEKPKEVAENQQNQSSDPEEEKGSQPPPAAESQSSLRRQKREKETSESRGISRFIPPWLKKQKSYTLVVAKDGGDKKEPTQAVVEEQVLDKEEPLPEEQRQAKGDAEEMAQKKQEIKVEVKEEKPSVSKEEKPSVSKVEMQPTELVSKEREEKVKETQEDKLEGGAAKRETKEVQTNELKAEKASQKVTKKTKTVQCKVTLLDGTEYSCDLEKHAKGQVLFDKVCEHLNLLEKDYFGLLFQESPEQKNWLDPAKEIKRQLRNLPWLFTFNVKFYPPDPSQLTEDITRYFLCLQLRQDIASGRLPCSFVTHALLGSYTLQAELGDYDPEEHGSIDLSEFQFAPTQTKELEEKVAELHKTHRGLSPAQADSQFLENAKRLSMYGVDLHHAKDSEGVDIKLGVCANGLLIYKDRLRINRFAWPKILKISYKRSNFYIKVRPAELEQFESTIGFKLPNHRAAKRLWKVCVEHHTFYRLVSPEQPPKAKFLTLGSKFRYSGRTQAQTRQASTLIDRPAPHFERTSSKRVSRSLDGAPIGVMDQSLMKDFPGAAGEISAYGPGLVSIAVVQDGDGRREVRSPTKAPHLQLIEGKSSHETLNIVEEKKRAEVGKDERVITEEMNGKEISPGSGPGEIRKVEPVTQKDSTSLSSESSSSSSESEEEDVGEYRPHHRVTEGTIREEQEYEEEVEEEPRPAAKVVEREEAVPEASPVTQAGASVITVETVIQENVGAQKIPGEKSVHEGALKQDMGEEAEEEPQKVNGEVSHVDIDVLPQIICCSEPPVVKTEMVTISDASQRTEISTKEVPIVQTETKTITYESPQIDGGAGGDSGTLLTAQTITSESVSTTTTTHITKTVKGGISETRIEKRIVITGDGDIDHDQALAQAIREAREQHPDMSVTRVVVHKETELAEEGED

SEQ ID NO: 56892 - protein, 127 aa, Homo sapiens
MASEGTNIPSPVVRQIDKQFLICSICLERYKNPKVLPCLHTFCERCLQNYIPAHSLTLSCPVCRQTSILPEKGVAALQNNFFITNLMDVLQRTPGSNAEESSILETVTAVAAGKPLSCPNHDGNVSR

SEQ ID NO: 56893 - protein, 223 aa, Homo sapiens
MPLLVEGRRVRLPQSAGDLVRAHPPLEERARLLRGSISILGSDDATTCHIVVLRHTGNGATCLTHCDGTDTKAEVPLIMNSIKSFSDHAQCGRLEVHLVGGFSDDRQLSQKLTHQLLSEFDRQEDDIHLVTLCVTELNDREENENHFPVIYGIAVNIKTAEIYRASFQDRGPEEQLRAARTLAGGPMISIYDAETEQLRIGPYSWTPFPHVDFWLHQDDKQIL

SEQ ID NO: 56894 - protein, 139 aa, Homo sapiens
MLRDLRDAFSRVKTFFQMKDQLDNLLLKESLLEDFKGYLGCQALSEMIQFYLEEVMPQAENQDPDIKAHVNSLGENLKTLRLRLRRCHRFLPCENKSKAVEQVKNAFNKLQEKGIYKAMSEFDIFINYIEAYMTMKIRN

SEQ ID NO: 56895 - protein, 156 aa, Homo sapiens
MNRFRVSKFRHTEARPPRRESWISDIRAGTAPSCRNHIKSSCSLIAFNSDRPGVLGIVPLQGQGEDKRRVAHLGCHSDLVTDLDFSPFDDFLLATGSADRTVKLWRLPGPGQAHENSRDSRLAWMGTWEHLVSTGFNQMREREVKLWDTRFFSSAL

SEQ ID NO: 56896 - protein, 395 aa, Homo sapiens
MWTLRATGREVGSSSCEDTVAPVPYETLNKRFRAAQKNIDRETSHVTMVVAELEKTLSGCPAVDSVVSLLDGVVEKLSVLKRKAVESIQAEDESAKLCKRRIEHLKEHSSDQPAAASVWKRKRMDRMMVEHLLRCGYYNTAVKLARQSGIEDLVNIEMFLTAKEVEESLERRETATCLAWCHDNKSRLRKMKSCLEFSLRIQEFIELIRQNKRLDAVRHARKHFSQAEGSQLDEVRQAMGMLAFPPDTHISPYKDLLDPARWRMLIQQFRYDNYRLHQLGNNSVFTLTLQAGLSAIKTPQCYKEDGSSKSPDCPVCSRSLNKLAQPLPMAHCANSRLVCKISGDVMNENNPPMMLPNGYVYGYNSLLSIRQDDKVVCPRTKEVFHFSQAEKVYIM

SEQ ID NO: 56897 - protein, 99 aa, Homo sapiens
MQALRHVVCALSGGVDSAVAALLLRRRGYQVTGVFMKNWDSLDEHGVCTADKDCEDAYRVCQILDIPFHQVSYVKEYWNDVFRGRCHCHRSLCKNFPGR

SEQ ID NO: 56898 - protein, 158 aa, Homo sapiens
TVYSALGLRDACRSLPQSIQLFRDIAQEFSDDLHHIASLIGKVYLSPQVDFEGSLAENRFTVLPNIDPEIDEKKRRLMGLPSFLTEVARKELENLDSRIPSCSVIYIPLIGFLLSIPRLPSMVEASDFEINGLDFMFLSEEKLHYRSARTKELDALLG

SEQ ID NO: 56899 - protein, 701 aa, Homo sapiens
MFVTEMGVSLYCPGKSQTPGLKQSSCLSLQSSRNYRMEASCLELALEGERLCKSGDCRAGVSFFEAAVQVGTEDLKTLSAIYSQLGNAYFYLHDYAKALEYHHHDLTLARTIGDQLGEAKASGNLGNTLKVLGNFDEAIVCCQRHLDISRELNDKVGEARALYNLGNVYHAKGKSFGCPGPQDVGEFPEEVRDALQAAVDFYEENLSLVTALGDRAAQGRAFGNLGNTHYLLGNFRDAVIAHEQRLLIAKEFGDKAAERRAYSNLGNAYIFLGEFETASEYYKKTLLLARQLKDRAVEAQSCYSLGNTYTLLQDYEKAIDYHLKHLAIAQELNDRIGEGRACWSLGNAYTALGNHDQAMHFAEKHLEISREVGDKSGELTARLNLSDLQMVLGLSYSTNNSIMSENTEIDSSLNGVRPKLGRRHSMENMELMKLTPEKVQNWNSEILAKQKPLIAKPSAKLLFVNRLKGKKYKTNSSTKVLQDASNSIDHRIPNSQRKISADTIGDEGFFDLLSRFQSNRMDDQRCCLQEKNCHTASTTTSSTPPKMMLKTSSVPVVSPNTDEFLDLLASSQSRRLDDQRASFSNLPGLRLTQNSQSVLSHLMTNDNKEADEDFFDILVKCQGSRLDDQRCAPPPATTKGPTVPDEDFFSLILRSQGKRMDEQRVLLQRDQNRDTDFGLKDFLQNNALLEFKNSGKKSADH

SEQ ID NO: 56900 - protein, 254 aa, Homo sapiens
MGPPSAAPRGGHRPWQGLLITASLLTFWHPPTTVQFTIEALPSSAAEGKDVLLLACNISETIQAYYWHKGKTAEGSPLIAGYITDIQANIPGAAYSGRETVYPNGSLLFQNITLEDAGSYTLRTINASYDSDQATGQLHVHQNNVPGLPVGAVAGIVTGVLVGVALVAALVCFLLLSRTGSIQRDLREQPPPASTPGHGPSHRSTFSAPLPSPRTATPIYEVSVGHGCSGPAGSRGPRICPHQHLAELRFRKMQ

SEQ ID NO: 56901 - protein, 1400 aa, Homo sapiens
MAGIIKKQILKHLSRFTKNLSPDKINLSTLKGEGQLTNLELDEEVLQNVLELPTWLAITRVYCNRASIRIQWTKLKTHPICLCLDKVEVEMKTCEDPRPPNGQSPIALASGQSEYGFAEKVVEGMFIIVNSITIKIHSKAFHASFELWQLQGYSVNPNWQQSDLRLTRITDPCRGEVLTFKEITWQTLRIEADATDNGDQDPVTTPLRLITNQGRIQIALKRRTKDCNVISSKLMFLLDDLLWVLTDSQLKAMMKYAESLSEAMEKSAHQRKSLAPEPVQITPPAPSAQQSWAQAFGGSQGNSNSSSSRLSQYFEKFDVKESSYHLLISRLDLHICDDSQSREPGVSANRLMGGAMQLTFRKMAFDYYPFHWAGDSCKHWVRHCEAMETRGQWAQKLVMEFQSKMEKWHEETGLKPPWHLGVDSLFRRKADSLSSPRKNPLERSPSQGRQPAFQPPAWNRLRSSCMVVRVDDLDIHQVSTAGQPSKKPSTLLSCSRKLHNLPTQVSAIHIEFTEYYFPDNQELPVPCPNLYIQLNGLTFTMDPVSLLWGNLFCLDLYRSLEQFKAIYKLEDSSQKDEHLDIRLDAFWLKVSFPLEKRERAELHRPQALVFSASGMIATNTRHAPHCSCSDLQSLFRGFAAAEFFHSNYDHFPKVPGGFSLLHMLFLHHAFQMDSCLPQPNTLPPQRPKASWDLWSVHFTQISLDFEGTENFKGHTLNFVAPFPLSIWACLPLRWQQAQARKLLLASEGRLKPSASFGSPVQSEALAPDSMSHPRSKTEHDLKSLSGLTEVMEILKEGSSGMDNKGPLTELEDVADVHMLVHSPAHVRVRLDHYQYLALLRLKEVLQRLQEQLTKDTESMTGSPLQNQTACIGVLFPSAEVALLMHPAPGAVDADSAGSDSTSLVDSELSPSEDRELKSDASSDQGPASPEKVLEESSIENQDVSQERPHSNGELQDSGPLAQQLAGKGHEAVESLQAKKLSRTQASSSPAALKPPAGRETAVNGQGELIPLKNIEGELSSAIHMTKDATKEALHATMDLTKEAVSLTKDAFSLGRDRMTSTMHKMLSLPPAKEPMAKTDEGVAAPVSGGAARLRFFSMKRTVSQQSFDGVSLDSSGPEDRISVDSDGSDSFVMLLESESGPESVPPGSLSNVSDNAGVQGSPLVNNYGQGSPAANSSVSPSGEDLIFHPVSVLVLKVNEVSFGIEVRGEDLTVALQAEELTLQQLGTVGLWQFLHGQCPGTCFQESSTLKTGHIRPAVGLRFEVGPGAAVHSPLASQNGFLHLLLHGCDLELLTSVLSGLGPFLEDEEIPVVVPMQIELLNSSITLKDDIPPIYPTSPGPIPITLAMEHVVLKRSDDGVFHIGAAAQDKPSAEVLKSEKRQPPKEQVFLVPTGEVFEQQT

SEQ ID NO: 56902 - protein, 99 aa, Homo sapiens
MFTNQGTVIHFNNPKVQASLAANTFTITGHAETKQLTEMLPSILNQLGADSLTSLRRLAEALPKQSVDGKAPLATGEDDDDEVPDLVENFDEASKNEAN

SEQ ID NO: 56903 - protein, 658 aa, Homo sapiens
MDVLQRTPGSNAEESSILETVTAVAAGKPLSCPNHDGNVMEFYCQSCETAMCRECTEGEHAEHPTVPLKDVVEQHKASLQVQLDAVNKRLPEIDSALQFISEIIHQLTNQKASIVDDIHSTFDELQKTLNVRKSVLLMELEVNYGLKHKVLQSQLDTLLQGQESIKSCSNFTAQALNHGTETEVLLVKKQMSEKLNELADQDFPLHPRENDQLDFIVETEGLKKSIHNLGTILTTNAVASETVATGEGLRQTIIGQPMSVTITTKDKDGELCKTGNAYLTAELSTPDGSVADGEILDNKNGTYEFLYTVQKEGDFTLSLRLYDQHIRGSPFKLKVIRSADVSPTTEGVKRRVKSPGSGHVKQKAVKRPASMYSTGKRKENPIEDDLIFRVGTKGRNKGEFTNLQGVAASTNGKILIADSNNQCVQIFSNDGQFKSRFGIRGRSPGQLQRPTGVAVHPSGDIIIADYDNKWVSIFSSDGKFKTKIGSGKLMGPKGVSVDRNGHIIVVDNKACCVFIFQPNGKIVTRFGSRGNGDRQFAGPHFAAVNSNNEIIITDFHNHSVKVFNQEGEFMLKFGSNGEGNGQFNAPTGVAVDSNGNIIVADWGNSRIQVFDGSGSFLSYINTSADPLYGPQGLALTSDGHVVVADSGNHCFKVYRYLQ

SEQ ID NO: 56904 - protein, 228 aa, Homo sapiens
MGCCGCSGGCGSGCGGCGSGCGGCGSGCGGCGSGCGGCGSGCGGCGSSCCVPICCCKPVCCCVPACSCSSCGSCGGSKGGYGSCGGSKGGCVSCGGSKGGCGSCGGSKGGCGSCGGSKGGCGSCGGSKGGCGSCGCSQCSCCKPCCFSSGCGSSCCQSSCCKPCCSSSGCGSSCCQSSCCKPYCCQSSCCKPCCSSSGCGSSCCQSSCCNPCCSQSSCCVPVCCQCKI

SEQ ID NO: 56905 - protein, 157 aa, Homo sapiens
MPKRSCPFADVAPLQLKVRVSQRELSRGVCAERYSQEVFEKTKRLLFLGAQAYLDHVWDEGCAVVHLPESPKPGPTGAPRAARGQMLIGPDGRLIRSLGQASEADPSGVASIACSSCVRAVDGKAVCGQCERALCGQCVRTCWGCGSVACTLCGLVE

SEQ ID NO: 56906 - protein, 139 aa, Homo sapiens
MAGHPKEKVIPDEVHQNQILRELYLKELRTQKLYTQYHVNPLRKIHTVTRKPMSWHDNLEEPADARFLNLIHHAAQGPRKKYPETQTENQEVGWDLEPLVSVAPSSGNTRKHSSNINPERHDRRLNHFRVCSDITLYKA

SEQ ID NO: 56907 - protein, 83 aa, Homo sapiens
  MOD_RES (1)..(1): Any amino acid
XMLRHSPLTQMGPAKDKLVIGRIFHIVENDLYIDFGGKFHCVCRRPEVDGESPISWYAVWRRFSQVMITCFSSNSDFGKHRKR

SEQ ID NO: 56908 - protein, 80 aa, Homo sapiens
MKFPGPLENQRLSFLLEKAITREAQMWKVNVRKMPSNQNVSPSQRDEVIQWLAKLKYQFNLYPETFALASSLLDRFLATV

SEQ ID NO: 56909 - protein, 784 aa, Homo sapiens
MSDANKAAIAAEKEALNLKLPPIVHLPENIGVDTPTQSKLLKYRRSKEQQQKINQLVIDGAKRNLDRTLGKRTPLLPPPDYPQTMTSEMKKKGFNYIYMKQCVESSPLVPIQQEWLDHMLRLIPESLKEGKEREELLESLINEVSSDFENSMKRYLVQSVLVKPPVKSLEDEGGPLPESPVGLDYSNPWHSSYVQARNQIFSNLHIIHPTMKMLLDLGYTTFADTVLLDFTGIRAKGPIDCESLKTDLSIQTRNAEEKIMNTWYPKVINLFTKKEALEGVKPEKLDAFYSCVSTLMSNQLKDLLRRTVEGFVKLFDPKDQQRLPIFKIELTFDDDKMEFYPTFQDLEDNVLSLVERIAEALQNVQTIPSWLSGTSTPVNLDTELPEHVLHWAVDTLKAAVHRNLEGARKHYETYVEKYNWLLDGTAVENIETFQTEDHTFDEYTEFIEKFLSLASEIMLLPQWIHYTMVRLDCEDLKTGLTNKAKAFANILLNDIASKYRKENECICSEFEAIKEHALKVPETTEEMMDLISYVEKARTVGIEELILRIQESKRQMSYFLDVFLFPQEDLALNATVLMWPRKINPIFDENDELIENAKHKKENELMAKREKLILEIEKESRRMEEFTEFAELERMQQYVTDVRQLQKRIQESEEAVQFINKEEELFKWELTKYPELDKLKVNIEPYQKFFNFVLKWQRSEKRWMDGGFLDLNGESMEADVEEFSREIFKTLKFFQTKLKKELQEKRKAARKRSLEEEKIEEEPKDNATITMCSTVMEQIKAFKV

SEQ ID NO: 56910 - protein, 185 aa, Homo sapiens
MAGPAEEAGAHCPESLWPLPPQVSPRVTYTRVSPGQAEDVTFLYHPCAHPWLKLQLALLAYACMANPSLTPDFSLTQDRPLVLTAWGLALEMAWVEPAWAAHWLMRRRRRKQRKKKAWIYCESLSGPAPSEPTPGRGRLCRRGCVQALALAFALRSWRPPGTEVTSQGPRQPSSSGAKRRRLRAA

SEQ ID NO: 56911 - protein, 162 aa, Homo sapiens
MQPLSKLMAISKPRNLSLREQREVLRADMSWQQETNPVVETHDSEASRQKFRHFQYLKVSGPHEALSQLWELCLQWLRPEIHTKKQIIELLVLEQFLAILPEEVRTWVNLQHPNNSKDMVTLIEDVIEMLEDEDMPCKDSALQMGSIKEKMKAGSRTGKPQT

SEQ ID NO: 56912 - protein, 1046 aa, Homo sapiens
MNPRQGYSLSGYYTHPFQGYEHRQLRYQQPGPGSSPSSFLLKQIEFLKGQLPEAPVIGKQTPSLPPSLPGLRPRFPVLLASSTRGRQVDIRGVPRGVHLRSQGLQRGFQHPSPRGRSLPQRGVDCLSSHFQELSIYQDQEQRILKFLEELGEGKATTAHDLSGKLGTPKKEINRVLYSLAKKGKLQKEAGTPPLWKIAVSTQAWNQHSGVVRPDGHSQGAPNSDPSLEPEDRNSTSVSEDLLEPFIAVSAQAWNQHSGVVRPDSHSQGSPNSDPGLEPEDSNSTSALEDPLEFLDMAEIKEKICDYLFNVSDSSALNLAKNIGLTKARDINAVLIDMERQGDVYRQGTTPPIWHLTDKKRERMQIKRNTNSVPETAPAAIPETKRNAEFLTCNIPTSNASNNMVTTEKVENGQEPVIKLENRQEARPEPARLKPPVHYNGPSKAGYVDFENGQWATDDIPDDLNSIRAAPGEFRAIMEMPSFYSHGLPRCSPYKKLTECQLKNPISGLLEYAQFASQTCEFNMIEQSGPPHEPRFKFQVVINGREFPPAEAGSKKVAKQDAAMKAMTILLEEAKAKDSGKSEESSHYSTEKESEKTAESQTPTPSATSFFSGKSPVTTLLECMHKLGNSCEFRLLSKEGPAHEPKFQYCVAVGAQTFPSVSAPSKKVAKQMAAEEAMKALHGEATNSMASDNQPEGMISESLDNLESMMPNKVRKIGELVRYLNTNPVGGLLEYARSHGFAAEFKLVDQSGPPHEPKFVYQAKVGGRWFPAVCAHSKKQGKQEAADAALRVLIGENEKAERMGFTEVTPVTGASLRRTMLLLSRSPEAQPKTLPLTGSTFHDQIAMLSHRCFNTLTNSFQPSLLGRKILAAIIMKKDSEDMGVVVSLGTGNRCVKGDSLSLKGETVNDCHAEIISRRGFIRFLYSELMKYNSQTAKDSIFEPAKGGEKLQIKKTVSFHLYISTAPCGDGALFDKSCSDRAMESTESRHYPVFENPKQGKLRTKVENVVSHCTAYTSKTCCDHPASSHATFPIPRICSVHTGSLSGA

SEQ ID NO: 56913 - protein, 132 aa, Homo sapiens
MAAAEPMGPAQVPMNSEVIVDPIQGQVNFEDVFVYFSQEEWVLLDEAQRLLYRDVMLENFALMASLGIPQTMAAFGLKYLLNDTGYTSSKSNTITATDSPADLPRKPEPHTPSWSWKKQAMSIRTVLWHPTG

SEQ ID NO: 56914 - protein, 59 aa, Homo sapiens
MKLKDSLFDLDGPKVASPLSPTSLTHTSRPPAALTPVPLSQGDLSHPPRKKDRKNRKLG

SEQ ID NO: 56915 - protein, 508 aa, Homo sapiens
  MOD_RES (1)..(1): Any amino acid
XERSSCTSSSTHQRDGKFCDCCYCEFFGHNAPPAAPTSRNYTEIREKLRSRLTRRKEELPMKGGTLGGIPGEPAVDHRDVDELLEFINSTEPKVPNSARAAKRARHKLKKKEKEKAQLAAEALKQANRVSGSREPRPARERLLEWPDRELDRVNSFLSSRLQEIKNTVKDSIRASFSVCELSMDSNGFSKEGAAEPEPQSLPPSNLSGSSEQQPDINLDLSPLTLGSPQNHTLQAPGEPAPPWAEMRGPHPPWTEVRGPPPGIVPENGLVRRLNTVPNLSRVIWVKTPKPGYPSSEEPSSKEVPSCKQELPEPVSSGGKPQKGKRQGSQAKKSEASPAPRPPASLEVPSAKGQVAGPKQPGRVLELPKVGSCAEAGEGSRGSRPGPGWAGSPKTEKEKGSSWRNWPGEAKARPQEQESVQPSGPARPQSLPQGKGRSRRSRNKQEKPASSLDDVFLPKDMDGVEMDETDREVEYFKRFCLDSAKQTRQKVAVNWTNFSLKKTTPSTAQ

SEQ ID NO: 56916 - protein, 427 aa, Homo sapiens
MSKSKVDNQFYSVEVGDSTFTVLKRYQNLKPIGSGAQGIVCAAYDAVLDRNVAIKKLSRPFQNQTHAKRAYRELVLMKCVNHKNIISLLNVFTPQKTLEEFQDVYLVMELMDANLCQVIQMELDHERMSYLLYQMLCGIKHLHSAGIIHRDLKPSNIVVKSDCTLKILDFGLARTAGTSFMMTPYVVTRYYRAPEVILGMGYKENVDMWSVGCIMGEMIKGAVLFPGTDHIDQWNKVIEQLGTPCPEFMKKLQPTVRNYVENRPKYAGLTFPKLFPDSLFPADSEHNKLKASQARDLLSKMLVIDPAKRISVDDALQHPYINVWYDPAEVEAPPPQIYDKQLDEREHTIEEWKELIYKEVMNSEEKTKNGVVKGQPSPSGAAVNSSESLPPSSSVNDISSMSTDQTLASDTDSSLEASAGPLGCCRC

SEQ ID NO: 56917 - protein, 1057 aa, Homo sapiens
  MOD_RES (1)..(1): Any amino acid
XSELLFDLYLSPESDHDTVFQYLEKNADQVLLIFDGLDEALQPMGPDGPGPVLTLFSHLCNGTLLPGCRVMATSRPGKLPACLPAEAAMVHMLGFDGPRVEEYVNHFFSAQPSREGALVELQTNGRLRSLCAVPALCQVACLCLHHLLPDHAPGQSVALLPNMTQLYMQMVLALSPPGHLPTSSLLDLGEVALRGLETGKVIFYAKDIAPPLIAFGATHSLLTSFCVCTGPGHQQTGYAFTHLSLQEFLAALHLMASPKVNKDTLTQYVTLHSRWVQRTKARLGLSDHLPTFLAGLASCTCRPFLSHLAQGNEDCVGAKQAAVVQVLKKLATRKLTGPKVVELCHCVDETQEPELASLTAQSLPYQLPFHNFPLTCTDLATLTNILEHREAPIHLDFDGCPLEPHCPEALVGCGQIENLSFKSRKCGDAFAEALSRSLPTMGRLQMLGLAGSKITARGISHLVKALPLCPQLKEVSFRDNQLSDQVVLNIVEVLPHLPRLRKLDLSSNSICVSTLLCLARVAVTCPTVRMLQAREADLIFLLSPPTETTAELQRAPDLQESDGQRKGAQSRSLTLRLQKCQLQVHDAEALIALLQEGPHLEEVDLSGNQLEDEGCRLMAEAASQLHIARKLDLSNNGLSVAGVHCVLRAVSACWTLAELHISLQHKTVIFMFAQEPEEQKGPQERAAFLDSLMLQMPSELPLSSRRMRLTHCGLQEKHLEQLCKALGGSCHLGHLHLDFSGNALGDEGAARLAQLLPGLGALQSLNLSENGLSLDAVLGLVRCFSTLQWLFRLDISFESQHILLRGDKTSRDMWATGSLPDFPAAAKFLGFRQRCIPRSLCLSECPLEPPSLTRLCATLKDCPGPLELQLSCEFLSDQSLETLLDCLPQLPQLSLLQLSQTGLSPKSPFLLANTLSLCPRVKKVDLRSLHHATLHFRSNEEEEGVCCGRFTGCSLSQEHVESLCWLLSKCKDLSQVDLSANLLGDSGLRCLLECLPQVPISGLLDLSHNSISQESALYLLETLPSCPRVREASVKCLGSWHVWAPCFPRPFSLQPGL

SEQ ID NO: 56918 - protein, 169 aa, Homo sapiens
MGLADASGPRDTQALLSATQAMDLRRRDYHMERPLLNQEHLEELGRWGSAPRTHQWRTWLQCSRARAYALLLQHLPVLVWLPRYPVRDWLLGDLLSGLSVAIMQLPQGLAYALLAGLPPVFGLYSSFYPVFIYFLFGTSRHISVATPGPLPLLTAPGRPTGGAGPDPLR

SEQ ID NO: 56919 - protein, 158 aa, Homo sapiens
MSKSKVDNQFYSVEVGDSTFTVLKRYQNLKPIGSGAQGIVCAAYDAVLDRNVAIKKLSRPFQNQTHAKRAYRELVLMKCVNHKNIISLLNVFTPQKTLEEFQDVYLVMELMDANLCQVIQMELDHERMSYLLYQMLCGIKHLHSAGIIHRDLKPSNIV

SEQ ID NO: 56920 - protein, 175 aa, Homo sapiens
  MOD_RES (1)..(1): Any amino acid
XAVSCAGEKGGVAEACPNIRKVDLSKNLLSSWDEVIHIADQLRHLEVLNVSENKLKFPSGSVLTGTLSVLKVLVLNQTGITWAEAHAQCGGSRHGLDMQKDASKFVDLCVLQKCSTSNCIISAKDHTSMRMNVAKASEVTGRFNSQFKTCAICRTVCRMGAAVCRGVPRPGGTLP

SEQ ID NO: 56921 - protein, 21 aa, Homo sapiens
  MOD_RES (1)..(1): Any amino acid
XQNPPQKKKSPVGNFVGSNVV

SEQ ID NO: 56922 - protein, 49 aa, Homo sapiens
MLLENLTDNESENTNLKKKVFEKEAHIQELSCLFQSEKANTLKANRFSQ

SEQ ID NO: 56923 - protein, 289 aa, Homo sapiens
  MOD_RES (1)..(1): Any amino acid
XLLSNKRSQAVGILMSSLHLDMKDIQHAVVNLDNSVVDLETLQALYENRAQSDELEKIEKHGRSSKDKENAKSLDKPEQFLYELSLIPNFSERVFCILFQSTFSESICSIRRKLELLQKLCETLKNGPGVMQVLGLVLAFGNYMNGGNKTRGQADGFGLDILPKLKDVKSSDNSRSLLSYIVSYYLRNFDEDAGKEQCLFPLPEPQDLFQASQMKFEDFQKDLRKLKKDLKACEVEAGKVYQVSSKEHMQPFKENMEQFIIQDGVSHCYRADVQWCDLSWLQPPPPSQN

SEQ ID NO: 56924 - protein, 89 aa, Homo sapiens
  MOD_RES (1)..(1): Any amino acid
XVPAAPPPPQGFKQEYHDPLYEHGVPGMPGPPAHGFQSPMGIKQEPRDYCVDSEVPNCQSSYMRGGYFSSSHEGCSALGHPEEPASHEL

SEQ ID NO: 56925 - protein, 255 aa, Homo sapiens
MHHISTPLVSKALSNRGQHSISYTLSRSHSVIVEYTHDSDTDMFQIGRSTENMIDFVVTDTSPGGGAAEGPSAQSTISRYACRILCDRRPPYTARIYAAGFDASSNIFLGERAAKWRTPDGLMDGLTTNGVLVMHPAGGFSEDSAPGVWREISVCGNVYTLRDSRSAQQRGKLVENESNVLQDGSLIDLCGATLLWRTPAGLLRAPTLKQLEAQRQEANAARPQCPVGLSTLAFPSPARGRTAPDKQQPWVYVRC

SEQ ID NO: 56926 - protein, 85 aa, Homo sapiens
MFLDLLNFAAETLVLGGRLVYWLPVYTPEYTEEMVPWHPCLELVSNCEQKLSSHTSRRLITMEKVKKFENRDQYSHLLSDHFLPY

SEQ ID NO: 56927 - protein, 23 aa, Homo sapiens
  MOD_RES (1)..(1): Any amino acid
XSRLSFLLLQSIKLLSSTKKKTR

SEQ ID NO: 56928 - protein, 92 aa, Homo sapiens
MLGFLSARQTGLEDPLRLRRAESTRRVLGLELNKDRDVERIHGGGINTLDIEPVEGRYHSLGINQRMKSFNQNDKRDSNLRIDACYQVVQMV

SEQ ID NO: 56929 - protein, 158 aa, Homo sapiens
MSDSGSQLGSMGSLTMKSQLQITVISAKLKENKKNWFGPSPYVEVTVDGQSKKTEKCNNTNSPKWKQPLTVIVTPVSKLHFRVWSHQTLKSDVLLGTAALDIYETLKSNNMKLEEVVVTLQLGGDKEPTETIGDLSICLDGLQLESEVVTNGETTCSE

SEQ ID NO: 56930 - protein, 157 aa, Homo sapiens
ESCKLRGLHHRNLLPITHVCIEEGEKPMVILPYMNWGNLKLFLRQCKLVEANNPQAISQQDLVHMAIQIACGMSYLARREVIHKDLAARNCVIDDTLQVKITDNALSRDLFPMDYHCLGDNENRPVRWMALESLVNNEFSSASDVAPPCGAALFGVS

SEQ ID NO: 56931 - protein, 105 aa, Homo sapiens
ANSKLKQIEKEYTQKLAKSSQIIAELQTTISSLKEENSQQQLAAERRLQDVRQKFEDEKKQLIRDNDQAIKVLQDELENRSNQVNFLQKRASILQEELTTYQGRR

SEQ ID NO: 56932 - protein, 71 aa, Homo sapiens
VDDSVSVNDIDLSLYIPRDVDETGITVASLERFSTYTSDKDEGRHGHGKGFLGYGKPKCICSSEEEDLKTN

SEQ ID NO: 56933 - protein, 71 aa, Homo sapiens
MSLLFSRCNSIVTVKKNKRHMAEVNASPLKHFVTAKKKINGIFEQLGAYIQESATFLEDTYRNAELDPVTT

SEQ ID NO: 56934 - protein, 139 aa, Homo sapiens
MAAAVAAALARLLAAFLLLAAQVACEYGMVHVVSQAGGPEGKDYCILYNPQWAHLPHDLSKASFLQLRNWTASLLCSAADLPARGFSNQIPLVARGNCTFYEKVRLAQGSGARGLLIVSRERLLQRHAGHLHGSVSAAR

SEQ ID NO: 56935 - protein, 823 aa, Homo sapiens
MELWRQCTHWLIQCRVLPPSHRVTWDGAQVCELAQALRDGVLLCQLLNNLLPHAINLREVNLRPQMSQFLCLKNIRTFLSTCCEKFGLKRSELFEAFDLFDVQDFGKVIYTLSALSWTPIAQNRGIMPFPTEEESVGDEDIYSGLSDQIDDTVEEDEDLYDCVENEEAEGDEIYEDLMRSEPVSMPPKMTEYDKRCCCLREIQQTEEKYTDTLGSIQQHFLKPLQRFLKPQDIEIIFINIEDLLRVHTHFLKEMKEALGTPGAANLYQVFIKYKERFLVYGRYCSQVESASKHLDRVAAAREDVQMKLEECSQRANNGRFTLRDLLMVPMQRVLKYHLLLQELVKHTQEAMEKENLRLALDAMRDLAQCVNEVKRDNETLRQITNFQLSIENLDQSLAHYGRPKIDGELKITSVERRSKMDRYAFLLDKALLICKRRGDSYDLKDFVNLHSFQVRDDSSGDRDNKKWSHMFLLIEDQGAQGYELFFKTRELKKKWMEQFEMAISNIYPENATANGHDFQMFSFEETTSCKACQMLLRGTFYQGYRCHRCRASAHKECLGRVPPCGRHGQDFPGTMKKDKLHRRAQDKKRNELGLPKMEVFQEYYGLPPPPGAIGPFLRLNPGDIVELTKAEAEQNWWEGPPQDLSVHLWYAGPMERAGAESILANRSDGTFLVRQRVKDAAEFAISIKYNVEVKHIKIMTAEGLYRITEKKAFRGLTELVEFYQQNSLKDCFKSLDTTLQFPFKEPEKRTISRPAVGSTKYFGTAKARYDFCARDRSELSLKEGDIIKILNKKGQQGWWRGEIYGRVGWFPANYVEEDYSEYC

SEQ ID NO: 56936 - protein, 117 aa, Homo sapiens
MAEIGEDLDKSDVSSLIFLMKDYMGRGKISKEKSFLDLVVELEKLNLVAPDQLDLLEKCLKNIHRIDLKTKIQKYKQSVQGAGTSYRNVLQAAIQKSLKDPSNNFRMITPYAHCPDL

SEQ ID NO: 56937 - protein, 124 aa, Homo sapiens
MATDTSQGELVHPKALPLIVGAQLIHADKLGEKVEDSTMPIRRTVNSTRETPPKSKLAEGEEEKPEPDISSEESVSTVEEQENETPPATSSEAEQPKGEPENEEKEENKSSEETKKDEKDQSKE

SEQ ID NO: 56938 - protein, 145 aa, Homo sapiens
MGQIEWAMWANEQALASGLILITGGIVATAGRFTQWYFGAYSIVAGVFVCLLEYPRGKRKKGSTMERWGQKYMTAVVKLFGPFTRNYYVRAVLHLLACVCCLVCRICKDPLQIRGAPIRRQGLGLSVPAGFLLATILGTACLAIA

SEQ ID NO: 56939 - protein, 75 aa, Homo sapiens
MVALRGLGSGLQPWCPLDLRLEWVDTVWELDFTETEPLDPSIEAEIIETGLAAFTKLYESLLPFATGEHGSMEAV

SEQ ID NO: 56940 - protein, 143 aa, Homo sapiens
MCRMSFKKETPLANAAFWAARRGNLALLKLLLNSGRVDVDCRDSHGTTLLMVAAYAGHIDCVRELVLQGADINLQREDGGTALLAASQYGHMQVVETLLKHGANIHDQLYDGATALFLAAQGGYLDVIRLLLASGAKVNQPRQ

SEQ ID NO: 56941 - protein, 189 aa, Homo sapiens
MNERRSARSTRLQLGDAPASAPPRKHPPRTRPRVGAHEDPSLLLTITVTGVTVLVLVLKSMNSRRREPITLQDPEAKYPLPLIEKEKISHNTRRFRFGLPSPDHVLGLPVGNYVQLLAKIDNELVVRAYTPVSSDDDRGFVDLIIKIYFKNVHPQYPEGGKMTQYLENMKIGETIFFRGPRGRLFYHGP

SEQ ID NO: 56942 - protein, 225 aa, Homo sapiens
MEPNDSTSTAVEEPDSLEVLVKTLDSQTRTFIVGAQMNVKEFKEHIAASVSIPSEKQRLIYQGRVLQDDKKLQEYNVGGKVIHLVERAPPQTHLPSGASSGTGSASATHGGGSPPGTRGPGASVHDRNANSYVMVGTFNLPSDGSAVDVHINMEQAPIQSEPRVRLVMAQHMIRDIQTLLSRMEPSFPCGVCRGAPGATAAGESPPALLAALLRGSGCCCHHGLQ

SEQ ID NO: 56943 - protein, 176 aa, Homo sapiens
MTSGSKCPSTDSGKEEYIATFKGSEYFCYDLSQNPIQSSSDEITLSFKTLQRNGLMLHTGKSADYVNLALKNGAVSLVINLGSGAFEALVEPVNGKFNDNAWHDVKVTRNLRQVTISVDGILTTTGYTQEDYTMLGSDDFFYVGGSPSTADLPGSPIQHESTFAEDPMFQSQTAQL

SEQ ID NO: 56944 - protein, 41 aa, Homo sapiens
MGCVYSCCLEVCCGEDEIVYPRMPGESTVCHREREKPITYH

SEQ ID NO: 56945 - protein, 195 aa, Homo sapiens
MSSPGLTENSQRDPSELDAEHAQKVLEMEHTQQMKLKERQKFFEEAFQQDMEQYLSTGYLQIAERREPIGSMSSMEVNVDMLEQMDLMDISDQEALDVFLNSGGEENTVLSPALGPESSTCQNEITLQVPNPSELRAKPPSSSSTCTDSATRDISEGGESPVVQSDEEEVQVDTALATSHTDREATPDGGEDSDS

SEQ ID NO: 56946 - protein, 505 aa, Homo sapiens
MSSMVVTANGNDSKKFKGEDKMDGAPSRVLHIRKLPGEVTETEVIALGLPFGKVTNILMLKGKNQAFLELATEEAAITMVNYYSAVTPHLRNQPIYIQYSNHKELKTDNTLNQRAQAVLQAVTAVQTANTPLSGTTVSESAVTPAQSPVLRIIIDNMYYPVTLDVLHQIFSKFGAVLKIITFTKNNQFQALLQYGDPVNAQQAKLALDGQNIYNACCTLRIDFSKLVNLNVKYNNDKSRDYTRPDLPSGDGQPALDPAIAAAFAKETSLLGLPVAAVPGALSPLAIPNAAAAAAAAAAGRVGMPGVSAGGNTVLLVSNLNEEMVTPQSLFTLFGVYGDVQRVKILYNKKDSALIQMADGNQSQLAMNHLNGQKMYGKIIRVTLSKHQTVQLPREGLDDQGLTKDFGNSPLHRFKKPGSKNFQNIFPPSATLHLSNIPPSVAEEDLRTLFANTGGTVKAFKFFQDHKMALLQMATVEEAIQALIDLHNYNLGENHHLRVSFSKSTI

SEQ ID NO: 56947 - protein, 58 aa, Homo sapiens
  MOD_RES (1)..(1): Any amino acid
XPFPSSLFFPDQLMKRLAARCFAGLLILSPLTVISDSRPADSGHRRRQFGGNGRGSTA

SEQ ID NO: 56948 - protein, 424 aa, Homo sapiens
MMHARLQQLGSLDNSLTFNHSYGHSDADVLHQSLLEANIATEVCLTALDTLSLFTLAFKNQLLADHGHNPLMKKVFDVYLCFLQKHQSETALKNVFTALRSLIYKFPSTFYEGRADMCAALCYEILKCCNSKLSSIRTEASQLLYFLMRNNFDYTGKKSFVRTHLQVIISVSQLIADVVGIGGTRFQQSLSIINNCANSDRLIKHTSFSSDVKDLTKRIRTVLMATAQMKEHENDPEMLVDLQYSLAKSYASTPELRKTWLDSMARIHVKNGDLSEAAMCYVHVTALVAEYLTRKGVFRQGCTAFRVITPNIDEEASMMEDVGMQDVHFNEDVLMELLEQCADGLWKAERYELIADIYKLIIPIYEKRRDFERLAHLYDTLHRAYSKVTEVMHSGRRLLGTYFRVAFFGQVSLLSILQTVLSPL

SEQ ID NO: 56949 - protein, 1452 aa, Homo sapiens
  MOD_RES (1)..(1): Any amino acid
XIFGSVTNIPAKDAAPVEKIDTMLVLEGSGNLVLYTGVVRVGKVFIPGLPAPSLTMSNTMPRPSTPLDGVSTPKPLSKLLGSLDEVVLLSPVPELRDSSKLHDSLYNEDCTFQQLGTYIHSIRDPVHNRVTLELSNGSMVRITIPEIATSELVQTCLQAIKFILPKEIAVQMLVKWYNVHSAPGGPSYHSEWNLFVTCLMNMMGYNTDRLAWTRNFDFEGSLSPVIAPKKARPSETGSDDDWEYLLNSDYHQNVESHLLNRSLCLSPSEASQMKDEDFSQNLSLDSSTLLFTHIPAIFFVLHLVYEELKLNTLMGEGICSLVELLVQLARDLKLGPYVDHYYRDYPTLVRTTGQVCTIDPGQTGFMHHPSFFTSEPPSIYQWVSSCLKGEGMPPYPYLPGICERSRLVVLSIALYILGDESLVSDESSQYLTRITIAPQKLQVEQEENRFSFRHSTSVSSLAERLVVWMTNVGFTLRDLETLPFGIALPIRDAIYHCREQPASDWPEAVCLLIGRQDLSKQACEGNLPKGKSVLSSDVPSGTETEEEDDGMNDMNHEVMSLIWSEDLRVQDVRRLLQSAHPVRVNVVQYPELSDHEFIEEKENRLLQLCQRTMALPVGRGMFTLFSYHPVPTEPLPIPKLNLTGRAPPRNTTVDLNSGNIDVPPNMTSWASFHNGVAAGLKIAPASQIDSAWIVYNKPKHAELANEYAGFLMALGLNGHLTKLATLNIHDYLTKGHEMTSIGLLLGVSAAKLGTMDMSITRLLSIHIPALLPPTSTELDVPHNVQVAAVVGIGLVYQGTAHRHTAEVLLAEIGRPPGPEMEYCTDRESYSLAAGLALGMVCLGHGSNLIGMSDLNVPEQLYQYMVGGHRRFQTGMHREKHKSPSYQIKEGDTINVDVTCPGATLALAMIYLKTNNRSIADWLRAPDTMYLLDFVKPEFLLLRTLARCLILWDDILPNSKWVDSNVPQIIRENSISLSEIELPCSEDLNLETLSQAHVYIIAGACLSLGFRFAGSENLSAFNCLHKFAKDFMTYLSAPNASVTGPHNLETCLSVVLLSLAMVMAGSGNLKVLQLCRFLHMKTGGEMNYGFHLAHHMALGLLFLGGGRYSLSTSNSSIAALLCALYPHFPAHSTDNRYHLQALRHLYVLAAEPRLLVPVDVDTNTPCYALLEVTYKGTQWYEQTKEELMAPTLLPELHLLKQIKVKGPRYWELLIDLSKGTQHLKSILSKDGVLYVKLRAGQLSYKEDPMGWQSLLAQTVANRNSEARAFKPETISAFTSDPALLSFAEYFCKPTVNMGQKQEILDLFSSVLYECVTQETPEMLPAYIAMDQAIRRLGRREMSETSELWQIKLVLEFFSSRSHQERLQNHPKRGLFMNSEFLPVVKCTIDNTLDQWLQVGGDMCVHAYLSGQPLEESQLSMLACFLVYHSVPAPQHLPPIGLEGLLKDLAGDSG

SEQ ID NO: 56950 - protein, 66 aa, Homo sapiens
MITETAAEPTVPAVPAAEEATEARGREEPAWPWKDAPIRTLVQRIHQLQAERAQGFRRLEEWPCCS

SEQ ID NO: 56951 - protein, 155 aa, Homo sapiens
  MOD_RES (1)..(1): Any amino acid
XGGAAGAEGPAPAGTLSPAPLFSPGTYERLALLLGSIGLLGVGNNLLVLVLYYKFQRLRTPTHLLLVNISLSDLLVSLFGVTFTFVSCLRNGWVWDTVGCVWDGFSGSLFGWISQLQAATREARASMGPVQQGTICMQTESHSVAQAGVHWHDLG

SEQ ID NO: 56952 - protein, 205 aa, Homo sapiens
  MOD_RES (1)..(1): Any amino acid
XIYDSVMLKHQCSCGDNSRHPEHAGRIQSIWSRLQERGLRSQCECLRGRKASLEELQSVHSERHVLLYGTNPLSRLKLDNGKLAGLLAQRMFVMLPCGGVGVDTDTIWNELHSSNAARWAAGSVTDLAFKVASRELKNGFAVVRPPGHHADHSTAMGFCFFNSVAIACRQLQQQSKASKILIVDWVVMIRIIADNISTPLITSRH

SEQ ID NO: 56953 - protein, 187 aa, Homo sapiens
MGCRDVHAATVLSFLCGIASVAGLFAGTLLPNWRKLRLITFNRNEKNLTVYTGLWVKCARYDGSSDCLMYDTTWYSSVDQLDLRVLQFALPLSMLIAMGALLLCLIGMCNTAFRSSVPNIKLAKCLVNSAGCHLVAGLLFFLAGTVSLSPSIWVIFYNIHLNKKFEPVFSFDYAVYVTIASAGGLFM

SEQ ID NO: 56954 - protein, 275 aa, Homo sapiens
PSDDMDSIIFPKPEEEHLACDITGSSSSTDDTASLDRHSSHGSDVSLSQILKPNRSRDRQSLDGFYSHGMGAEGRESESEPADPGDVEEEEMDSITEVPANCSVLRSSMRSLSPFRRHSWGPGKNAASDAEMNHRSSMRVLGDVVRRPPIHRRSMSWCPSGVQYSAGLSADFNYRSFSLEGLTGGAGVGNKPSSSLEVSSANAEELRHPFSGEERVDSLVSLSEEDLESDQREHRMFDQQICHRSKQQGFNYCTSAISSPLTKSISLMTISHPGL

SEQ ID NO: 56955 - protein, 81 aa, Homo sapiens
MPSDKTIGGGDDSFNTFFSETGAGKHVPRAVFVDLEPTVIDEVRTGTYRQLFHPEQLITGKEDAANNYARGHYTIGKEIID

SEQ ID NO: 56956 - protein, 186 aa, Homo sapiens
MADDLDFETGDAGASATFPMQCSALRKNGFVVLKGRPCKIVEMSTSKTGKHGHAKVHLVGIDIFTGKKYEDICPSTHNMDVPNIKRNDFQLIGIQDGYLSLLQDSGEVREDLRLPEGDLGKEIEQKYDCGEEILVWCLPPCFCAQLCSVRFFLSSDISWLSLLLLQITVLSAMTEEAAVAIKAMAK

SEQ ID NO: 56957 - protein, 101 aa, Homo sapiens
MQQQQQLASARNRRLAQQMENRPSVQAALKLKQKSLKQRLGKSNIQARLGRPIGALARGAIGGRGLPIIQRGLPRGGLRGGRATRTLLRGGMSLRGQCCVP

SEQ ID NO: 56958 - protein, 200 aa, Homo sapiens
MLSSSPASCTSPSPDGENPCKKVHWASGRRRTSSTDSESKSHPDSSKIPRSRRPSRLTVKYDRGQLQRWLEMEQWVDAQVQELFQSLALSPRLECSGVIHSLQLLPPGFNRFSCLSSWSSWDYGIKQPLLSLRLTWKLSWIYPQRSRRLSWRPFLGTAPAPQRLLSLSCSVNSRNSGDSAGLRNKPERPSLAASALPGLP

SEQ ID NO: 56959 - protein, 52 aa, Homo sapiens
MWGLKVLLLPVVSFALYPEEILDTHWELWKKTHRKQYNNKALNSMVSSPTKL

SEQ ID NO: 56960 - protein, 101 aa, Homo sapiens
LFAGIKDGESLQLFEQSSRSAHKQETHTMEAVKLVEFDLKQTLTRLMAHLFGDELEIRWVDCYFPFTHPSFEMEINFHGEWLEVLGCGVMEQQLVNSGGAT

SEQ ID NO: 56961 - protein, 161 aa, Homo sapiens
MTMYLWLKLLAFGFAFLDTEVFVTGQSPTPSPTGVSSVQTPHLPTHADSQTPSAGTDTQTFSGSAANAKLNPTPGSNAISDAYLNASETTTLSPSGSAVISTTTIATTPSKPTCDEKYANITVDYLYNKETKLFTAKLNVNENVECGNNTCTNNEVHNLTE

SEQ ID NO: 56962 - protein, 160 aa, Homo sapiens
MKRGHSRWLPALSDEYLSLVARLIIHFRDIHNKKSQASVSDPMNALQSLTGGPAAGAAGIGMPPRGPGQSLGGMGSLGAMGQPMSLSGQPPPGTSGMAPHSMAVVSTATPQTQLQLQQVALQQQQQQQQFQQQQQAALQQQQQQQQQQQFQAQQSAMQQQ

SEQ ID NO: 56963 - protein, 81 aa, Homo sapiens
MKMLTRLQVLTLALFSKGFLLSLGDHNFLRREIKIEGDLVLGGLFPINEKGTGTEECGRINEDRGIQRLEAMLFAIDEINK

SEQ ID NO: 56964 - protein, 2103 aa, Homo sapiens
QMRQKSKQQAKIEATQKLEQVKNEQQQQQQQQFGSQHLLVQSGSDTPSSGIQSPLTPQPGNGNMSPAQSFHKELFTKQPPSTPTSTSSDDVFVKPQAPPPPPAPSRIPIQDSLSQAQTSQPPSPQVFSPGSSNSRPPSPMDPYAKMVGTPRPPPVGHSFSRRNSAAPVENCTPLSSVSRPLQMNETTANRPSPVRDLCSSSTTNNDPYAKPPDTPRPVMTDQFPKSLGLSRSPVVSEQTAKGPIAAGTSDHFTKPSPRADVFQRQRIPDSYARPLLTPAPLDSGPGPFKTPMQPPPSSQDPYGSVSQASRRLSVDPYERPALTPRPIDNFSHNQSNDPYSQPPLTPHPAVNESFAHPSRAFSQPGTISRPTSQDPYSQPPGTPRPVVDSYSQSSGTARSNTDPYSQPPGTPRPTTVDPYSQQPQTPRPSTQTDLFVTPVTNQRHSDPYAHPPGTPRPGISVPYSQPPATPRPRISEGFTRSSMTRPVLMPNQDPFLQAAQNRGPALPGPLVRPPDTCSQTPRPPGPGLSDTFSRVSPSAARDPYDQSPMTPRSQSDSFGTSQTAHDVADQPRPGSEGSFCASSNSPMHSQGQQFSGVSQLPGPVPTSGVTDTQNTVNMAQADTEKLRQRQKLREIILQQQQQKKIAGRQEKGSQDSPAVPHPGPLQHWQPENVNQAFTRPPPPYPGNIRSPVAPPLGPRYAVFPKDQRGPYPPDVASMGMRPHGFRFGFPGGSHGTMPSQERFLVPPQQIQGSGVSPQLRRSVSVDMPRPLNNSQMNNPVGLPQHFSPQSLPVQQHNILGQAYIELRHRAPDGRQRLPFSAPPGSVVEASSNLRHGNFIPRPDFPGPRHTDPMRRPPQGLPNQLPVHPDLEQVPPSQQEQGHSVHSSSMVMRTLNHPLGGEFSEAPLSTSVPSETTSDNLQITTQPSDGLEEKLDSDDPSVKELDVKDLEGVEVKDLDDEDLENLNLDTEDGKVVELDTLDNLETNDPNLDDLLRSGEFDIIAYTDPELDMGDKKSMFNEELDLPIDDKLDNQCVSVEPKKKEQENKTLVLSDKHSPQKKSTVTNEVKTEVLSPNSKVESKCETEKNDENKDNVDTPCSQASAHSDLNDGEKTSLHPCDPDLFEKRTNRETAGPSANVIQASTQLPAQDVINSCGITGSTPVLSSLLANEKSDNSDIRPSGSPPPPTLPASPSNHVSSLPPFIAPPGRVLDNAMNSNVTVVSRVNHVFSQGVQVNPGLIPGQSTVNHSLGTGKPATQTGPQTSQSGTSSMSGPQQLMIPQTLAQQNRERPLLLEEQPLLLQDLLDQERQEQQQQRQMQAMIRQRSEPFFPNIDFDAITDPIMKAKMVALKGINKVMAQNNLGMPPMVMSRFPFMGQVVTGTQNSEGQNLGPQAIPQDGSITHQISRPNPPNFGPGFVNDSQRKQYEEWLQETQQLLQMQQKYLEEQIGAHRKSKKALSAKQRTAKKAGREFPEEDAEQLKHVTEQQSMVQKQLEQIRKQQKEHAELIEDYRIKQQQQCAMAPPTMMPSVQPQPPLIPGATPPTMSQPTFPMVPQQLQHQQHTTVISGHTSPVRMPSLPGWQPNSAPAHLPLNPPRIQPPIAQLPIKTCTPAPGTVSNANPQSGPPPRVEFDDNNPFSESFQERERKERLREQQERQRIQLMQEVDRQRALQQRMEMEQHGPLQQSPQHQQQMGQVLQQQNIQQGSINSPSTQTFMQTNERRQVGPPSFVPDSPSIPVGSPNFSSVKQGHGNLSGTSFQQSPVRPSFTPALPAAPPVANSSLPCGQDSTITHGHSYPGSTQSLIQLYSDIIPEEKGKKKRTRKKKRDDDAESTKAPSTPHSDITAPPTPGISETTSTPAVSTPSELPQQADQESVEPVGPSTPNMAAGQLCTELENKLPNSDFSQATPNQQTYANSEVDKLSMETPAKTEEIKLEKAETESCPGQEEPKLEEQNGSKVEGNAVACPVSSAQSPPHSAGAPAAKGDSGNELLKHLLKNKKSSSLLNQKPEGSICSEDDCTKDNKLVEKQNPAEGLQTLGAQMQGGFGCGNQLPKTDGGSETKKQRSKRTQRTGEKAAPRSKKRKKDEEEKQAMYSSTDTFTHLKQ

SEQ ID NO: 56965 - protein, 219 aa, Homo sapiens
MVRYHGQERWQKDYNHLPTGPLDKYKIQAIDATDSCIMSIGFDHMEGLEHVEKIRLCKCHYIEDDCLLRLSQLENLQKTILEMEIISCGNITDKGIIALRHLRNLKYLLLSDLPGAGNPGPCVASGSSRTRAPLGFRERGLQETDVPGALVDRSYDLSPSAGMRMLELKATTAILKSRFQLSVPGGSLLFKQSPVGHSSISFWPYKAILRQSRAGDNQE

SEQ ID NO: 56966 - protein, 137 aa, Homo sapiens
  MOD_RES (1)..(1): Any amino acid
XTWESVKRTTRKEQTADGVAVIPVLQRTLHYECIVLVKQFRPPMGGYCIEFPAGLIDDGETPEAAALRELEEETGYKGDIAECSPAVCMDPGLSNCTIHIVTVTINGDDAENARPKPKPGDGGMFCNSWWPSVYDLV

SEQ ID NO: 56967 - protein, 304 aa, Homo sapiens
MNIVFSRDSQVRVMENTVANTEKYFGQFCSLLAAYTRKTARLRDKADQLVKQLIDFANSENPELRATMRGFAEDLAKVQDYRQAQVERLETKVVNPLKLYGAQIKQTRAEIKKFKHVQNHEIKQLEKLEKLRQKSPSDQQMISQAETRVQRAAVDSSRTTLQLEETVDGFQRQKLKDLQKFFCDFVTIEMVFHAKAVEVYSSAFQTLEKYDLERDLLDFRAKMQGVYGHYDTRLLANTSPPPSVLQSLASQGTLQVQLSRANEDPEHPHANHGRFSLCEWVVKGQPAHCVCGQGGHLMLPGHSL

SEQ ID NO: 56968 - protein, 75 aa, Homo sapiens
MVQKKKFCPRLLDYLVIVGARHPSSDSVAQTPELLRRYPLEDHTEFPLPPDVVFFCQPEGCLSVRQRRMSLRDDT

SEQ ID NO: 56969 - protein, 157 aa, Homo sapiens
MDLKDTGAKKCTQGLRRPFGVAVMDITDIIKGKAESDEEKQHFIPFHPVTAENDFLHSLLGKVIASKGDSGGQGLWVTMKMLVGDIIQIRKDYPHLVDRTTVVARKLGFPEIIMPGDVRNDIYITLLQGDFDKYNKTTQRNVEVIMCVCAEDGKTLP

SEQ ID NO: 56970 - protein, 642 aa, Homo sapiens
MPRLTQRVAVSPEYLLLPPRHGGCDKISWLPEGKVFSNVHREKISSKFFKESILKKVFCSQQMRWEGSDDQKGTSSYTFPGTRKKAAAEGAPSKPSATHAEALGPRGGAPGEHAGEDTWAFARILRKQSNSYNKMGRRNENCANSLRVSNISQENLSHWNLDSEVPVSENKNLPAGRDGAAGGKINKNYLEIPVEQLMLEPNLSVHSQKSTQNSKQGIFQLWNCPLNEGSTIEKREFKKSSVETGFNVINHPIRVFTLNHPLTIASVDKQVGPYPGLPMPLGLCWPYADGDFFKNRNEIHVSSCSTIENNDGETLPAPNWNLKHGNSSVEENFTDESDLSENEKTNDTLLSYFKKVDLNLKPETIKNVEEPFTEEPNEVFPYPDFLPPPFSALDLHNLALSKSDNWKVTVDPAETSVEHLITRLLELERLQHMTIQKERPRLQTTFCTPAVTERPSSSKATPKVRQPKLCDSLSLQIPCVDKSQEKSKNNSGSCKLEQNALKRNWSNAGKYRWNSRPLSLKSSSTPKQLIETYDKNPKSSILSPCQELSFKPTIGHTNQSMVKMVSTRCLPWRSPMPVSPIPLTFPENQKEEIKAPKRNFGTKKKLYRQNIVLNRPFSIQKLNCLSPSLIAKDKCCSPIEQK

SEQ ID NO: 56971 - protein, 250 aa, Homo sapiens
MEERTITIEIPEVLKKQLEDDCYYINRRKRLVKLPCQTNIITILESYVKHFAINAAFSANERPRHHHVMPHANMNVHYIPAEKNVDLCKEMVDGLRITFDYTLPLVLLYPYEQAQYKKVTSSKFFLPIKESATSTNRSQEELSPSPPLLNPSTPQSTESQPTTGEPATPKRRKAEPEALQSLRRSTRHSANCDRLSESSASPQPKRRQQDTSASMPKLFLHLEKSRFILGCPRPGRASVYFVFSQCQAWC

SEQ ID NO: 56972 - protein, 1343 aa, Homo sapiens
MRTTKVYKLVIHKKGFGGSDDELVVNPKVFPHIKLGDIVEIAHPNDEYSPLLLQVKSLKEDLQKETISVDQTVTQVFRLRPYQDVYVNVVDPKDVTLDLVELTFKDQYIGRGDMWRLKKSLVSTCAYITQKVEFAGIRAQAGELWVKNEKVMCGYISEDTRVVFRSTSAMVYIFIQMSCEMWDFDIYGDLYFEKAVNGFLADLFTKWKEKNCSHEVTVVLFSRTFYDAKSVDEFPEINRASIRQDHKGRFYEDFYKVVVQNERREEWTSLLVTIKKLFIQYPVLVRLEQAEGFPQGDNSTSAQGNYLEAINLSFNVFDKHYINRNFDRTGQMSVVITPGVGVFEVDRLLMILTKQRMIDNGIGVDLVCMGEQPLHAVPLFKLHNRSAPRDSRLGDDYNIPHWINHSFYTSKSQLFCNSFTPRIKLAGKKPASEKAKNGRDTSLGSPKESENALPIQVDYDAYDAQVFRLPGPSRAQCLTTCRSVRERESHSRKSASSCDVSSSPSLPSRTLPTEEVRSQASDDSSLGKSANILMIPHPHLHQYEVSSSLGYTSTRDVLENMMEPPQRDSSAPGRFHVGSAESMLHVRPGGYTPQRALINPFAPSRMPMKLTSNRRRWMHTFPVGMNPRTQNKDSLEDSVSTSPDPILTLSAPPVVPGFCCTVGVDWKSLTTPACLPLTTDYFPDRQGLQNDYTEGCYDLLPEADIDRRDEDGVQMTAQQVFEEFICQRLMQGYQIIVQPKTQKPNPAVPPPLSSSPLYSRGLVSRNRPEEEDQYWLSMGRTFHKVTLKDKMITVTRYLPKYPYESAQIHYTYSLCPSHSDSEFVSCWVEFSHERLEEYKWNYLDQYICSAGSEDFSLIESLKFWRTRFLLLPACVTATKRITEGEAHCDIYGDRPRADEDEWQLLDGFVRFVEGLNRIRRRHRSDRMMRKGTAMKGLQMTGPISTHSLESTAPPVGKKGTSALSALLEMEASQKCLGEQQAAVHGGKSSAQSAESSSVAMTPTYMDSPRKVSVDQTATPMLDGTSLGICTGQSMDRGNSQTFGNSQNIGEQGYSSTNSSDSSSQQLVASSLTSSSTLTEILEAMKHPSTGVQLLSEQKGLSPYCFISAEVVHWLVNHVEGIQTQAMAIDIMQKMLEEQLITHASGEAWRTFIYGFYFYKIVTDKEPDRVAMQQPATTWHTAGVDDFASFQRKWFEVAFVAEELVHSEIPAFLLPWLPSRPASYASRHSSFSRSFGGRSQAAALLAATVPEQRTVTLDVDVNNRTDRLEWCSCYYHGNFSLNAAFEIKLHWMAVTAAVLFEMFILACICNQAIHCSYTKKPYLTIPHRSAHSLAKLSVSSRTAP

SEQ ID NO: 56973 - protein, 35 aa, Homo sapiens
YQEVKPNPLQDANLCSRVFFWSPPPLSWKDTCHWI

SEQ ID NO: 56974 - protein, 180 aa, Homo sapiens
MEENESQKCEPCLPYSADRRQMQEQGKGNLHVTSPEDAECRRTKERLSNGNSRGSVSKSSRNIPRRHTLGGPRSSKEILGMQTSEMDRKREAFLEHLKQKYPHHASAIMGHQERLRDQALKGMLISLQAELDIQRQGAPNCLTVLNHPVWVTRSSIYQRRPLILWKPCLRGMLQPLFPEA

SEQ ID NO: 56975 - protein, 124 aa, Homo sapiens
  MOD_RES (1)..(1): Any amino acid
XLSTPLCWDSKLIGYGSAAQHLPYLTSLLALKLLQYCLADAWVAEIGLAFNILGMVVFAFATITPLMFTGCWKRLILTSSSSSFPRAPDLPGPEDRGQEEQSEHQATGGLQLEAQPTAGQATLV

SEQ ID NO: 56976 - protein, 8925 aa, Homo sapiens
MDQPQFSGAPRFLTRPKAFVVSVGKDATLSCQIVGNPTPQVSWEKDQQPVAAGARFRLAQDGDLYRLTILDLALGDSGQYVCRARNAIGEAFAAVGLQVDAEAACAEQAPHFLLRPTSIRVREGSEATFRCRVGGSPRPAVSWSKDGRRLGEPDGPRVRVEELGEASALRIRAARPRDGGTYEVRAENPLGAASAAAALVVDSDAADTASRPGTSTAALLAHLQRRREAMRAEGAPASPPSTGTRTCTVTEGKHARLSCYVTGEPKPETVWKKDGQLVTEGRRHVVYEDAQENFVLKILFCKQSDRGLYTCTASNLVGQTYSSVLVVVREPAVPFKKRLQDLEVREKESATFLCEVPQPSTEAAWFKEETRLWASAKYGIEEEGTERRLTVRNVSADDDAVYICETPEGSRTVAELAVQGNLLRKLPRKTAVRVGDTAMFCVELAVPVGPVHWLRNQEEVVAGGRVAISAEGTRHTLTISQCCLEDVGQVAFMAGDCQTSTQFCVSAPRKPPLQPPVDPVVKARMESSVILSWSPPPHGERPVTIDGYLVEKKKLGTYTWIRCHEAEWVATPELTVADVAEEGNFQFRVSALNSFGQSPYLEFPGTVHLAPKLAVRTPLKAVQAVEGGEVTFSVDLTVASAGEWFLDGQALKASSVYEIHCDRTRHTLTIREVPASLHGAQLKFVANGIESSIRMEVRAAPGLTANKPPAAAAREVLARLHEEAQLLAELSDQAAAVTWLKDGRTLSPGPKYEVQASAGRRVLLVRDVARDDAGLYECVSRGGRIAYQLSVQGLARFLHKDMAGSCVDAVAGGPAQFECETSEAHVHVHWYKDGMELGHSGERFLQEDVGTRHRLVAATVTRQDEGTYSCRVGEDSVDFRLRVSEPKAVFAKEQPACREVQAEVGASATLSCEVAQDQMEVTWYKDGKKLSSSSKVHVEAVGCMRRLVVQQVGQADSGEYSCEARGQRVSFRLDVAEPKVVFAKEQLARRKLQAEAGASATLSCEVAQAQTEVTWYKDGKKLSSSSKVCMEATGCTRRLVVQQAGQADAGEYSCEAGGQRLSFHLDVKEPKVVFAKDQVAHSEVQAEAGASATLSCEVAQAQTEVMWYKDGKKLSSSLKVHVEAKGCRRRLVVQQAGKTDAGDYSCEARGQRVSFRLHITEPKMMFAKEQSVHNEVQAEAGASAMLSCEVAQAQTEVTWYKDGKKLSSSSKVGMEVKGCTRRLVLPQAGKADAGEYSCEAGGQRVSFHLHITEPKGVFAKEQSVHNEVQAEAGTTAMLSCEVAQPQTEVTWYKDGKKLSSSSKVRMEVKGCTRRLVVQQVGKADAGEYSCEAGGQRVSFQLHITEPKAVFAKEQLVHNEVRTEAGASATLSCEVAQAQTEVTWYKDGKKLSSSSKVRIEAAGCMRQLVVQQAGQADAGEYTCEAGGQRLSFHLDVSEPKAVFAKEQLAHRKVQAEAGAIATLSCEVAQAQTEVTWYKDGKKLSSSSKVRMEAVGCTRRLVVQQACQADTGEYSCEAGGQRLSFSLDVAEPKVVFAKEQPVHREVQAQAGASTTLSCEVAQAQTEVMWYKDGKKLSFSSKVRMEAVGCTRRLVVQQAGQAVAGEYSCEAGSQRLSFHLHVAEPKAVFAKEQPAHREVQAEAGASATLSCEVAQAQTEVTWYKDGKKLSSSLKVHVEAAGCTRRLVVQQAGQADTGEYSCEAGGQQLSFRLQVAEPKAVFAKEQPASREVQAEAGTSATLSCEVAQAQTEVTWYKDGKKLSSSSKVRMEAVGCTRRLVVQEAGQADAGEYSCKAGDQRLSFHLHVAEPKVVFAKEQPAHREVQAEAGASATLSCEVAQAQTEVTWYKDGKKLSSSSKVRVEAVGCTRRLVVQQAGQAEAGEYSCEAGGQQLSFRLQVAEPKAVFAKEQVVFAKDQPVHREVQAEAGTSTMLSCEVAQAQTEVMWYKDGKKLSSSSKMRVEAVGCTRRLVVQEAGQADAGEYSCEAGGQRLSFHLHVAEPKVVFAKEQPACREVQAEAGASATLSCEVAQGQMEVTWYKDGKKLSSSSKVHMEASGYTRRLVVQQAGQADAGEYSCEAGGQRLSFRLHVAELEPQISERPCRREPLVVKEHEDIILTATLATPSAATVTWLKDGVEIRRSKRHETASQGDTHTLTVHGAQVLDSAIYSCRVGAEGQDFPVQVEEVAAKFCRLLEPVCGELGGTVTLACELSPACAEVVWRCGNTQLRVGKRFQMVAEGPVRSLTVLGLRAEDAGEYVCESRDDHTSAQLTVSVPRVVKFMSGLSTVVAEEGGEATFQCVVSPSDVAVVWFRDGALLQPSEKFAISQSGASHSLTISDLVLEDAGQITVEAEGASSSAALRVREAPVLFKKKLEPQTVEERSSVTLEVELTRPWPELRWTRNATALAPGKNVEIHAEGARHRLVLHNVGFADRGFFGCETPDDKTQAKLTVEMRQVRLVRGLQAVEAREQGTATMEVQLSHADVDGSWTRDGLRFQQGPTCHLAVRGPMHTLTLSGLRPEDSGLMVFKAEGVHTSARLVVTELPVSFSRPLQDVVTTEKEKVTLECELSRPNVDVRWLKDGVELRAGKTMAIAAQGACRSLTIYRCEFADQGVYVCDAHDAQSSASVKVQGRNIQIVRPLEDVEVMEKDGATFSCEVSHDEVPGQWFWEGSKLRPTDNVRIRQEGRTYTLIYRRVLAEDAGEIQFVAENAESRAQLRVKELPVTLVRPLRDKIAMEKHRGVLECQVSRASAQVRWFKGSQELQPGPKYELVSDGLYRKLIISDVHAEDEDTYTCDAGDVKTSAQFFVEEQSITIVRGLQDVTVMEPAPAWFECETSIPSVRPPKWLLGKTVLQAGGNVGLEQEGTVHRLMLRRTCSTMTGPVHFTVGKSRSSARLVVSDIPVVLTRPLEPKTGRELQSVVLSCDFRPAPKAVQWYKDDTPLSPSEKFKMSLEGQMAELRILRLMPADAGVYRCQAGSAHSSTEVTVEAREVTVTGPLQDAEATEEGWASFSCELSHEDEEVEWSLNGMPLYNDSFHEISHKGRRHTLVLKSIQRADAGIVRASSLKVSTSARLEVRVKPVVFLKALDDLSAEERGTLALQCEVSDPEAHVVWRKDGVQLGPSDKYDFLHTAGTRGLVVHDVSPEDAGLYTCHVGSEETRARVRVHDLHVGITKRLKTMEVLEGESCSFECVLSHESASDPAMWTVGGKTVGSSSRFQATRQGRKYILVVREAAPSDAGEVVFSVRGLTSKASLIVRERPAAIIKPLEDQWVAPGEDVELRCELSRAGTPVHWLKDRKAIRKSQKYDVVCEGTMAMLVIRGASLKDAGEYTCEVEASKSTASLHVEEKANCFTEELTNLQVEEKGTAVFTCKTEHPAATVTWRKGLLELRASGKHQPSQEGLTLRLTISALEKADSDTYTCDIGQAQSRAQLLVQGRRVHIIEDLEDVDVQEGSSATFRCRISPANYEPVHWFLDKTPLHANELNEIDAQPGGYHVLTLRQLALKDSGTIYFEAGDQRASAALRVTEKPSVFSRELTDATITEGEDLTLVCETSTCDIPVCWTKDGKTLRGSARCQLSHEGHRAQLLITGATLQDSGRYKCEAGGACSSSIVRVHARPVRFQEALKDLEVLEGGAATLRCVLSSVAAPVKWCYGNNVLRPGDKYSLRQEGAMLELVVRNLRPQDSGRYSCSFGDQTTSATLTVTALPAQFIGKLRNKEATEGATATLRCELSKAAPVEWRKGSETLRDGDRYCLRQDGAMCELQIRGLAMVDAAEYSCVCGEERTSASLTIRPMPAHFIGRLRHQESIEGATATLRCELSKAAPVEWRKGRESLRDGDRHSLRQDGAVCELQICGLAVADAGEYSCVCGEERTSATLTVKALPAKFTEGLRNEEAVEGATAMLWCELSKVAPVEWRKGPENLRDGDRYILRQEGTRCELQICGLAMADAGEYLCVCGQERTSATLTIRALPARFIEDVKNQEAREGATAVLQCELNSAAPVEWRKGSETLRDGDRYSLRQDGTKCELQIRGLAMADTGEYSCVCGQERTSAMLTVRALPIKFTEGLRNEEATEGATAVLRCELSKMAPVEWWKGHETLRDGDRHSLRQDGARCELQIRGLVAEDAGEYLCMCGKERTSAMLTVRAMPSKFIEGLRNEEATEGDTATLWCELSKAAPVEWRKGHETLRDGDRHSLRQDGSRCELQIRGLAVVDAGEYSCVCGQERTSATLTVRALPARFIEDVKNQEAREGATAVLQCELSKAAPVEWRKGSETLRGGDRYSLRQDGTRCELQIHGLSVADTGEYSCVCGQERTSATLTVRALPARFTQDLKTKEASEGATATLQCELSKVAPVEWKKGPETLRDGGRYSLKQDGTRCELQIHDLSVADAGEYSCMCGQERTSATLTVRALPARFTEGLRNEEAMEGATATLQCELSKAAPVEWRKGLEALRDGDKYSLRQDGAVCELQIHGLAMADNGVYSCVCGQERTSATLTVRALPARFIEDMRNQKATEGATVTLQCKLRKAAPVEWRKGPNTLKDGDRYSLKQDGTSCELQIRGLVIADAGEYSCICEQERTSATLTVRALPARFIEDVRNHEATEGATAVLQCELSKAAPVEWRKGSETLRDGDRYSLRQDGTRCELQIRGLAVEDTGEYLCVCGQERTSATLTVRALPARFIDNMTNQEAREGATATLHCELSKVAPVEWRKGPETLRDGDRHSLRQDGTRCELQIRGLSVADAGEYSCVCGQERTSATLTIRALPAKFTKGLRNEEATEGATAMLQCELSKVAPVEWRKGPETLRDGDRYNLRQDGTRCELQIHGLSVADTGEYSCVCGQEKTSATLTVKAPQPVFREPLQSLQAEEGSTATLQCELSEPTATVVWSKGGLQLQANGRREPRLQGCTAELVLQDLQREDTGEYTCTCGSQATSATLTVTAAPVRFLRELQHQEVDEGGTAHLCCELSRAGASVEWRKGSLQLFPCAKYQMVQDGAAAELLVRGVEQEDAGDYTCDTGHTQSMASLSVRVPRPKFKTRLQSLEQETGDIARLCCQLSDAESGAVVQWLKEGVELHAGPKYEMRSQGATRELLIHQLEAKDTGEYACVTGGQKTAASLRVTEPEVTIVRGLVDAEVTADEDVEFSCEVSRAGATGVQWCLQGLPLQSNEVTEVAVRDGRIHTLRLKGVTPEDAGTVSFHLGNHASSAQLTVRAPEVTILEPLQDVQLSEGQDASFQCRLSRASGQEARWALGGVPLQANEMNDITVEQGTLHLLTLHKVTLEDAGTVSFHVGTCSSEAQLKVTAKNTVVRGLENVEALEGGEALFECQLSQPEVAAHTWLLDDEPVHTSENAEVVFFENGLRHLLLLKNLRPQDSCRVTFLAGDMVTSAFLTVRGWRLEILEPLKNAAVRAGAQACFTCTLSEAVPVGEASWYINGAAVQPDDSDWTVTADGSHHALLLRSAQPHHAGEVTFACRDAVASARLTVLGLPDPPEDAEVVARSSHTVTLSWAAPMSDGGGGLCGYRVEVKEGATGQWRLCHELVPGPECVVDGLAPGETYRFRVAAVGPVGAGEPVHLPQTVRLAEPPKPVPPQPSAPESRQVAAGEDVSLELEVVAEAGEVIWHKGMERIQPGGRFEVVSQGRQQMLVIKGFTAEDQGEYHCGLAQGSICPAAATFQVALSPASVDEAPQPSLPPEAAQEGDLHLLWEALARKRRMSREPTLDSISELPEEDGRSQRLPQEAEEVAPDLSEGYSTADELARTGDADLSHTSSDDESRAGTPSLVTYLKKAGRPGTSPLASKVGAPAAPSVKPQQQQEPLAAVRPPLGDLSTKDLGDPSMDKAAVKIQAAFKGYKVRKEMKQQEGPMFSHTFGDTEAQVGDALRLECVVASKADVRARWLKDGVELTDGRHHHIDQLGDGTCSLLITGLDRADAGCYTCQVSNKFGQVTHSACVVVSGSESEAESSSGGELDDAFRRAARRLHRLFRTKSPAEVSDEELFLSADEGPAEPEEPADWQTYREDEHFICIRFEALTEARQAVTRFQEMFATLGIGVEIKLVEQGPRRVEMCISKETPAPVVPPEPLPSLLTSDAAPVFLTELQNQEVQDGYPVSFDCVVTGQPMPSVRWFKDGKLLEEDDHYMINEDQQGGHQLIITAVVPADMGVYRCLAENSMGVSSTKAELRVDLTSTDYDTAADATESSSYFSAQGYLSSREQEGTESTTDEGQLPQVVEELRDLQVAPGTRLAKFQLKVKGYPAPRLYWFKDGQPLTASAHIRMTDKKILHTLEIISVTREDSGQYAAYISNAMGAAYSSARLLVRGPDEPEEKPASDVHEQLVPPRMLERFTPKKVKKGSSITFSVKVEGRPVPTVHWLREEAERGVLWIGPDTPGYTVASSAQQHSLVLLDVGRQHQGTYTCIASNAAGQALCSASLHVSGLPKVEEQEKVKEALISTFLQGTTQAISAQGLETASFADLGGQRKEEPLAAKEALGHLSLAEVGTEEFLQKLTSQITEMVSAKITQAKLQVPGGDSDEDSKTPSASPRHGRSRPSSSIQESSSESEDGDARGEIFDIYVVTADYLPLGAEQDAITLREGQYVEVLDAAHPLRWLVRTKPTKSSPSRQGWVSPAYLDRRLKLSPEWGAAEAPEFPGEAVSEDEYKARLSSVIQELLSSEQAFVEELQFLQSHHLQHLERCPHVPIAVAGQKAVIFRNVRDIGRFHSSFLQELQQCDTDDDVAMCFIKNQAAFEQYLEFLVGRVQAESVVVSTAIQEFYKKYAEEALLAGDPSQPPPPPLQHYLEQPVERVQRYQALLKELIRNKARNRQNCALLEQAYAVVSALPQRAENKLHVSLMENYPGTLQALGEPIRQGHFIVWEGAPGARMPWKGHNRHVFLFRNHLVICKPRRDSRTDTVSYVFRNMMKLSSIDLNDQVEGDDRAFEVWQEREDSVRKYLLQARTAIIKSSWVKEICGIQQRLALPVWRPPDFEEELADCTAELGETVKLACRVTGTPKPVISWYKDGKAVQVDPHHILIEDPDGSCALILDSLTGVDSGQYMCFAASAAGNCSTLGKILVQVPPRFVNKVRASPFVEGEDAQFTCTIEGAPYPQIRWYKDGALLTTGNKFQTLSEPRSGLLVLVIRAASKEDLGLYECELVNRLGSARASAELRIQSPMLQAQEQCHREQLVAAVEDTTLERADQEVTSVLKRLLGPKAPGPSTGDLTGPGPCPRGAPALQETGSQPPVTGTSEAPAVPPRVPQPLLHEGPEQEPEAIARAQEWTVPIRMEGAAWPGAGTGELLWDVHSHVVRETTQRTYTYQAIDTHTARPPSMQVTIEDVQAQTGGTAQFEAIIEGDPQPSVTWYKDSVQLVDSTRLSQQQEGTTYSLVLRHVASKDAGVYTCLAQNTGGQVLCKAELLVLGGDNEPDSEKQSHRRKLHSFYEVKEEIGRGVFGFVKRVQHKGNKILCAAKFIPLRSRTRAQAYRERDILAALSHPLVTGLLDQFETRKTLILILELCSSEELLDRLYRKGVVTEAEVKVYIQQLVEGLHYLHSHGVLHLDIKPSNILMVHPAREDIKICDFGFAQNITPAELQFSQYGSPEFVSPEIIQQNPVSEASDIWAMGVISYLSLTCSSPFAGESDRATLLNVLEGRVSWSSPMAAHLSEDAKDFIKATLQRAPQARPSAAQCLSHPWFLKSMPAEEAHFINTKQLKFLLARSRWQRSLMSYKSILVMRSIPELLRGPPDSPSLGVARHLCRDTGGSSSSSSSSDNELAPFARAKSLPPSPVTHSPLLHPRGFLRPSASLPEEAEASERSTEAPAPPASPEGAGPPAAQGCVPRHSVIRSLFYHQAGESPEHGALAPGSRRHPARRRHLLKGGYIAGALPGLREPLMEHRVLEEEAAREEQATLLAKAPSFETALRLPASGTHLAPGHSHSLEHDSPSTPRPSSEACGEAQRLPSAPSGGAPIRDMGHPQGSKQLPSTGGHPGTAQPERPSPDSPWGQPAPFCHPKQGSAPQEGCSPHPAVAPCPPGSFPPGSCKEAPLVPSSPFLGQPQAPPAPAKASPPLDSKMGPGDISLPGRPKPGPCSSPGSASQASSSQVSSLRVGSSQVGTEPGPSLDAEGWTQEAEDLSDSTPTLQRPQEQATMRKFSLGGRGGYAGVAGYGTFAFGGDAGGMLGQGPMWARIAWAVSQSEEEEQEEARAESQSEEQQEARAESPLPQVSARPVPEVGRAPTRSSPEPTPWEDIGQVSLVQIRDLSGDAEAADTISLDISEVDPAYLNLSDLYDIKYLPFEFMIFRKVPKSAQPEPPSPMAEEELAEFPEPTWPWPGELGPHAGLEITEESEDVDALLAEAAVGRKRKWSSPSRSLFHFPGRHLPLDEPAELGLRERVKASVEHISRILKGRPEGLEKEGPPRKKPGLASFRLSGLKSWDRAPTFLRELSDETVVLGQSVTLACQVSAQPAAQATWSKDGAPLESSSRVLISATLKNFQLLTILVVVAEDLGVYTCSVSNALGTVTTTGVLRKAERPSSSPCPDIGEVYADGVLLVWKPVESYGPVTYIVQCSLEGGSWTTLASDIFDCCYLTSKLSRGGTYTFRTACVSKAGMGPYSSPSEQVLLGGPSHLASEEESQGRSAQPLPSTKTFAFQTQIQRGRFSVVRQCWEKASGRALAAKIIPYHPKDKTAVLREYEALKGLRHPHLAQLHAAYLSPRHLVLILELCSGPELLPCLAERASYSESEVKDYLWQMLSATQYLHNQHILHLDLRSENMIITEYNLLKVVDLGNAQSLSQEKVLPSDKFKDYLETMAPELLEGQGAVPQTDIWAIGVTAFIMLSAEYPVSSEGARDLQRGLRKGLVRLSRCYAGLSGGAVAFLRSTLCAQPWGRPCASSCLQCPWLTEEGPACSRPAPVTFPTARLRVFVRNREKRRALLYKRHNLAQVR

SEQ ID NO: 56977 - protein, 316 aa, Homo sapiens
  MOD_RES (1)..(1): Any amino acid
XPAREVGDRVRVSVGLILAQLISLNEKDEEMSTKVYLDLEWTDYRLSWDPAEHDGIDSLRITAESVWLPDVVLLNNNDGNFDVALDISVVVSSDGSVRWQPPGIYRSSCSIQVTYFPFDWQNCTMVFSSYSYDSSEVSLQTGLGPDGQGHQEIHIHEGTFIGEKMGLSIFALLTLTVFLLLLADKVPETSLSVPIIIKYLMFTMVLVTFSVILSVVVLNLHHRSPHTHQMPLWVRQIFIHKLPLYLRLKRPKPERDLMPEPPHCSSPGSGWGRGTDEYFIRKPPSDFLFPKPNRFQPELSAPDLRRFIDGPNRAVA

SEQ ID NO: 56978 - protein, 45 aa, Homo sapiens
MAVYVGMLRLGRLCAGSSGVLGARAALSRSWQEARLQGVRFLRCL

SEQ ID NO: 56979 - protein, 118 aa, Homo sapiens
MTPQSLLQTTLFLLSLLFLVQAPATGSHLQPLPPQVPTAGATGKTFASAASGTRHTGAASTTNPHQTCASPSRTPKRPSQSMPLSLQPTLLPDPSLTPGASTTSASTGTDMLGDYIFS

SEQ ID NO: 56980 - protein, 50 aa, Homo sapiens
MGLLLPDYRWFTTVDILADNCEKEPWIILFYFCGTPQSQIQRTHQASSSL

SEQ ID NO: 56981 - protein, 353 aa, Homo sapiens
MAPWPPKGLVPAMLWGLSLFLNLPGPIWLQPSPPPQSSPPPQPHPCHTCRGLVDSFNKGLERTIRDNFGGGNTAWEEENLSKYKDSETRLVEVLEGVCSKSDFECHRLLELSEELVESWWFHKQQEAPDLFQWLCSDSLKLCCPAGTFGPSCLPCPGGTERPCGGYGQCEGEGTRGGSGHCDCQAGYGGEACGQCGLGYFEAERNASHLVCSACFGPCARCSGPEESNCLQCKKGWALHHLKCVDIDECGTEGANCGADQFCVNTEGSYECRDCAKACLGCMGAGPGRCKKCSPGYQQVGSKCLDVDECETEVCPGENKQCENTEGGYRCICAEGYKQMEGICVKEQIPDAER

SEQ ID NO: 56982 - protein, 1599 aa, Homo sapiens
  MOD_RES (1)..(1): Any amino acid
XGEKAQLAAVKDICQAIWKLKKVMDAVMSDGNLETRLGSTDVAASQHMLVCALQELGNLIHNLGTTAAPLLQDSSTGLLDSILSVILHPSISVRLAAAWCLHCIAVALPSYLTPLLDRCLERLTGHKSSPEAVTGFSFAVAALLGAVKHCPLGIPHGKGKIIMTLAEDLLCSAAQNSRLSAQRTQAGWLLISALMTLGPAVVSHHLARVLLLWKCVFPASPKDLETEKSRGDSFTWQVTLEGRAGALCAIKSFVSHCGDLLTEEVTQRLLPPLPCAVDLLTQLSSILKMYGSPLKTPSVVYRQRLYELLILLPPETYEGNLCAILRELAADLTAPDIQVAASTFLLPPLCHQDDLLILSPFLQETDHRFIEEQLLLGNGVACGSLEYDPYSIYEKDVEGDSVPKPLPPALSVISSASKLFGVVCAHVGETQRLLILEQLLDSIKHTKGARQQVVQLHVVSSVSSFLKYVAGSKGCLGPEEMKRFALTLVMGALESPNPLLRCAAAESWARLAQVVDDGAFTAGLAQVSFDKLKSARDVVTRTGHSLALGSLHRYLGGISSSQHLNSCIGILYTLAQDSTSPDVQTWALHSLSLIIDSAGPLYYVHVEPTLSLIIMLLLNVPPTHAEVHQSLGRCLNALITTLGPELQGNSTSISTLRTSCLLGCAVMQDNPDCLVQAQAISCLQQLHMFAPRHVNLSSLVSCLCVNLCSPYLLLRRAVLACLRQLVQREAAEVSEHAVMLAKDSREELTPDANIREVGLEGALLILLDKETDERLCHDIKETLNYMLTSMAVEKLSLWLKLCKDVLAASADFTAVTCVDTMQEEEGDKGDDASVLTTRRDEKSHPFTNPRWATRVFAAECVCRIINQCENANSAHFDIALAQEMKKRDSRNDFLVLHLADLIRMAFMAATDHSDQLRLSGLEMLLVVIRRFATVPEPEFPGHVILEQYQANVGAALRPAFTSETPPDVTAKACQVCSAWIASGVVSDLNDLRRVHQLLVSSLTKIQAGKEALSHLYNESASTMEILAVLKAWAEVYIIAVQRHKNHRQPLKTTTCLEDGIRNGSCSSDGLLDLVYADLGTLSRLWLAALQDFALLTLPSEFASQLPAEGGAFYTAETSENAKLHYYNSWALILHATALWLTSTGFVVADPDEGASNLSRPVTPTSMCQGSSSGATIKSPEDVYTDRFHLILGISVEFLCSLRSDATMESITACLHALQALLDVPWPRSKIGSDQDLGIELLNVLHRVILTRESPSIQLASLEVVRQIICAAQEHVKEKRRSAEVDDGAAEKETLPEFGEGKDTGGLVPGKSLVFATLELCVCILVRQLPELNPKLTGSPGVKATKPQILLEDGSRLVSAALVILSELPAVCSPEVDETHQELDEVSLLTAITVFILSTSPEVTTIPCLQKRCIDKFKATLEIKDPVVQIKTYQLLHSIFQYPNPAVSYPYIYSLASCIMEKLQEIDKRKPENTAELEIFQEGIKVLETLVTVAEEHHRAQLVACLLPILISFLLDENSLGSATSIMRNLHDFALQNLMQIGPQYSSVFKSLVASSPALKARLEAAIKGNQESVKVKIPTSKYTKSPGKNSSIQLKTSFL

SEQ ID NO: 56983 - protein, 276 aa, Homo sapiens
  MOD_RES (1)..(1): Any amino acid
XIGSAREADPALNVETEIEILKKLNHPCIIKIKNFFDAEDYYIVLELMEGGELFDKVVGNKRLKEATCKLYFYQMLLAVQYLHENGIIHRDLKPENVLLSSQEEDCLIKITDFGHSKILGETSLMRTLCGTPTYLAPEVLVSVGTAGYNRAVDCWSLGVILFIWTQVSLKDQITSGKYNFIPEVWAEVSEKALDLVKKLLVVDPKARFTTEEALRHPWLQDEDMKRKFQDLLSEENESTALPQVLAQPSTSRKRPREGEAEGAETTKRPAVCAAVL

SEQ ID NO: 56984 - protein, 57 aa, Homo sapiens
MSGGSADYNREHGGPEGMDPDGVIESNWNEIVDNFDDMNLKESLLRGIYAYGFEKPS

SEQ ID NO: 56985 - protein, 248 aa, Homo sapiens
MTQGKLSVANKAPGTEGQQQVHGEKKEAPAVPSAPPSYEEATSGEGMKAGAFPPAPTAVPLHPSWAYVDPSSSSSYDNGFPTGDHELFTTFSWDDQKVRRVFVRKVYTILLIQLLVTLAVVALFTFCDPVKDYVQANPGWYWASYAVFFATYLTLACCSGPRRHFPWNLILLTVFTLSMAYLTGMLSSYYNTTSVLLCLGITALVCLSVTVFSFQTKFDFTSCQGVLFVLLMTLFFSGLILAILLPFQ

SEQ ID NO: 56986 - protein, 253 aa, Homo sapiens
MGNHAGKRELNAEKASTNSETNRGESEKKRNLGELSRTTSEDNEVFGEADANQNNGTSSQDTAVTDSKRTADPKNAWQDAHPADPGSRPHLIRLFSRDAPGREDNTFKDRPSESDELQTIQEDSAATSESLDVMASQKRPSQRHGSKYLATASTMDHARHGFLPRHRDTGILDSIGRFFGGDRGAPKRGSGKDSHHPARTAHYGSLPQKSHGRTQDENPVVHFFKNIVTPRTPPPSQGKGGRDSRSGSPMARR

SEQ ID NO: 56987 - protein, 76 aa, Homo sapiens
MCDQCCVCQDLVDRTRSWLYAACSISYLGAMVSSNSALQFVNYPTQVLGKSCKPIPVMLLGVTLLKKKYPLAKYLC

SEQ ID NO: 56988 - protein, 1656 aa, Homo sapiens
MDSKKRSSTEAEGSKERGLVHIWQAGSFPITPERLPGWGGKTVLQAALGVKHGVLLTEDGEVYSFGTLPWRSGPVEICPSSPILENALVGQYVITVATGSFHSGAVTDNGVAYMWGENSAGQCAVANQQYVPEPNPVSIADSEASPLLAVRILQLACGEEHTLALSISREIWAWGTGCQLGLITTAFPVTKPQKVEHLAGRVVLQVACGAFHSLALVQCLPSQDLKPVPERCNQCSQLLITMTDKEDHVIISDSHCCPLGVTLTESQAENHASTALSPSTETLDRQEEVFENTLVANDQSVATELNAVSAQITSSDAMSSQQNVMGTTEISSARNIPSYPDTQAVNEYLRKLSDHSVREDSEHGEKPVPSQPLLEEAIPNLHSPPTTSTSALNSLVVSCASAVGVRVAATYEAGALSLKKVMNFYSTTPCETGAQAGSSAIGPEGLKDSREEQVKQESMQGKKSSSLVDIREEETEGGSRRLSLPGLLSQVSPRLLRKAARVKTRTVVLTPTYSGEADALLPSLRTEVWTWGKGKEGQLGHGDVLPRLQPLCVKCLDGKEVIHLEAGGYHSLALTAKSQVYSWGSNTFGQLGHSDFPTTVPRLAKISSENGVWSIAAGRDYSLFLVDTEDFQPGLYYSGRQDPTEGDNLPENHSGSKTPVLLSCSKLGYISRVTAGKDSYLALVDKNIMGYIASLHELATTERRFYSKLSDIKSQILRPLLSLENLGTTTTVQLLQEVASRFSKLCYLIGQHGASLSSFLHGVKEARSLVILKHSSLFLDSYTEYCTSITNFLVMGGFQLLAKPAIDFLNKNQELLQDLSEVNDENTQLMEILNTLFFLPIRRLHNYAKVLLKLATCFEVASPEYQKLQDSSSCYECLALHLGRKRKEAEYTLGFWKTFPGKMTDSLRKPERRLLCESSNRALSLQHAGRFSVNWFILFNDALVHAQFSTHHVFPLATLWAEPLSEEAGGVNGLKITTPEEQFTLISSTPQEKTKWLRAISQAVDQALRGMSDLPPYGSGSSVQRQEPPISRSAKYTFYKDPRLKDATYDGRWLSGKPHGRGVLKWPDGKMYSGMFRNGLEDGYGEYRIPNKAMNKEDHYVGHWKEGKMCGQGVYSYASGEVFEGCFQDNMRHGHGLLRSGKLTSSSPSMFIGQWVMDKKAGYGVFDDITRGEKYMGMWQDDVCQGNGVVVTQFGLYYEGNFHLNKMMGNGVLLSEDDTIYEGEFSDDWTLSGKGTLTMPNGDYIEGYFSGEWGSGIKITGTYFKPSLYESDKDRPKVLKLGNLAVPADEKWKAVFDECWRQLGCEGPGQGEVWKAWDNIAVALTTSRRQHRDSPEILSRSQTQTLESLEFIPQHVGAFSVEKYDDIRKYLIKACDTPLHPLGRLVETLVAVYRMTYVGVGANRRLLQEAVKEIKSYLKRIFQLVRFLFPELPEEGSTIPLSAPLPTERKSFCTGKSDSRSESPEPGYVVTSSGLLLPVLLPRLYPPLFMLYALDNDREEDIYWECVLRLNKQPDIALLGFLGVQRKFWPATLSILGESKKVLPTTKDACFASAVECLQQISTTFTPSDKLKVIQQTFEEISQSVLASLHEDFLWSMDDLFPVFLYVVLRARIRNLGSEVHLIEDLMDPYLQHGEQGIMFTTLKACYYQIQREKLN

SEQ ID NO: 56989 - protein, 273 aa, Homo sapiens
MMAAMATARVRMGPRCAQALWRMPWLPVFLSLAAAAAAAAAEQQVPLVLWSSDRDLWAPAADTHEGHITSDLQLSTYLDPALELGPRNVLLFLQDKLSIEDFTAYGGVFGNKQDSAFSNLENALDLAPSSLVLPAVDWYAVSTLTTYLQEKLGASPLHVARDVAVVAGGLGRQLLQKQPVSPVIHPPVSYNDTAPRILFWAQNFSVAYKDQWEDLTPLTFGVQELNLTGSFWNDSFARFILANRLYPVSARHWFTMERLEVHSNGSVAYFNAS

SEQ ID NO: 56990 - protein, 199 aa, Homo sapiens
MAGPTEAETGLAEPRALCAQRGHRTYARRWVFLLAISLLNCSNATLWLSFAPVADVIAEDLVLSMEQINWLSLVYLVVSTPFGVAAIWILDSVGLRAAGFSGLCGALFITFGILGALALGPYVDRTKHFTEATKIGLCLFSLACVPFALVSQLQGQTLALAATCSLLGLFGFSVGPVAMELAVECSFPVGEGAATGMIF

SEQ ID NO: 56991 - protein, 122 aa, Homo sapiens
MFSSVAHLARANPFNTPHLQLVHDGLGDLRSSSPGPTGQPRRPRNLAAAAVEGEIRPCPIQSCGLLVGRPAFEAWTRLGGQGRTSPARCTVGRRPVACPGVSAFSTIGGCQILGLPSRAWKR

SEQ ID NO: 56992 - protein, 212 aa, Homo sapiens
MATITCTRFTEEYQLFEELGKGAFSVVRRCVKVLAGQEYAAKIINTKKLSARDHQKLEREARICRLLKHPNIVRLHDSISEEGHHYLIFDLVTGGELFEDIVAREYYSEADASHCIQQILEAVLHCHQMGVVHRDLKGLQGLLDISPQKCCGRTRTGSLWTCGLVGSSCTSCWLGTPRSGMRTSTACTSRSKPAPMISHRRNGTLSPRKPRI

SEQ ID NO: 56993 - protein, 142 aa, Homo sapiens
MTVTYSSKVANATFFGFHRLLLKWRGSIYKLLYREFIVFAVLYTAISLVYRLLLTGVQKRYFEKLSIYCDRYAEQIPVTFVLGFMTTDERKLFNHLKSPHLKYWVPFIWFGNLATKARNEGRIRDSVDLQSLMTEMNRYRSW

SEQ ID NO: 56994 - protein, 115 aa, Homo sapiens
MASSTPSSSATSSNAGADPNTTNLRPTTYDTWCGVAHGCTRKLGLKICGFLQRTNSLEEKSRLVSAFKERQSSKNLLSCENSDRDARFRRTETDFSNLFARDLLPAKNGEEQTVQ

SEQ ID NO: 56995 - protein, 149 aa, Homo sapiens
MLPPQKKPWESMAKGLVLGALFTSFLLLVYSYAVPPLHAGLASTTPEAAASCSPPALEPEAVIRANGSAGECQPRRNIVFLKTHKTASSTLLNILFRFGQKHRLKFAFPNGRNDFDYPTFFARSLVQDYRPGACFNIICNHMRFHYDEV

SEQ ID NO: 56996 - protein, 446 aa, Homo sapiens
MGLEALVPLAMIVAIFLLLVDLMHRHQRWAARYPPGPLPLPGLGNLLHVDFQNTPYCFDQLRRRFGDVFSLQLAWTPVVVLNGLAAVREAMVTRGEDTADRPPAPIYQVLGFGPRSQGRPFRPNGLLDKAVSNVIASLTCGRRFEYDDPRFLRLLDLAQEGLKEESGFLREVLNAVPVLPHIPALAGKVLRFQKAFLTQLDELLTEHRMTWDPAQPPRDLTEAFLAKKEKAKGSPESSFNDENLRIVVGNLFLAGMVTTSTTLAWGLLLMILHLDVQLRVQQEIDDVIGQVRRPEMGDQAHMPYTTAVIHEVQRFGDIVPLGVTHMTSRDIEVQGFRIPKGTTLITNLSSVLKDEAVWKKPFRFHPEHFLDAQGHFVKPEAFLPFSAGRRACLGEPLARMELFLFFTSLLQHFSFSVAAGQPRPSHSRVVSFLVTPSPYELCAVPR

SEQ ID NO: 56997 - protein, 1698 aa, Homo sapiens
MRLLWGLIWASSFFTLSLQKPRLLLFSPSVVHLGVPLSVGVQLQDVPRGQVVKGSVFLRNPSRNNVPCSPKVDFTLSSERDFALLSLQVPLKDAKSCGLHQLLRGPEVQLVAHSPWLKDSLSRTTNIQGINLLFSSRRGHLFLQTDQPIYNPGQRVRYRVFALDQKMRPSTDTITVMVENSHGLRVRKKEVYMPSSIFQDDFVIPDISEPGTWKISARFSDGLESNSSTQFEVKKYVLPNFEVKITPGKPYILTVPGHLDEMQLDIQARYIYGKPVQGVAYVRFGLLDEDGKKTFFRGLESQTKLVNGQSHISLSKAEFQDALEKLNMGITDLQGLRLYVAAAIIESPGGEMEEAELTSWYFVSSPFSLDLSKTKRHLVPGAPFLLQALVREMSGSPASGIPVKVSATVSSPGSVPEVQDIQQNTDGSGQVSIPIIIPQTISELQLSVSAGSPHPAIARLTVAAPPSGGPGFLSIERPDSRPPRVGDTLNLNLRAVGSGATFSHYYYMILSRGQIVFMNREPKRTLTSVSVFVDHHLAPSFYFVAFYYHGDHPVANSLRVDVQAGACEGKLELSVDGAKQYRNGESVKLHLETDSLALVALGALDTALYAAGSKSHKPLNMGKVFEAMNSYDLGCGPGGGDSALQVFQAAGLAFSDGDQWTLSRKRLSCPKEKTTRKKRNVNFQKAINEKLGQYASPTAKRCCQDGVTRLPMMRSCEQRAARVQQPDCREPFLSCCQFAESLRKKSRDKGQAGLQRALEILQEEDLIDEDDIPVRSFFPENWLWRVETVDRFQILTLWLPDSLTTWEIHGLSLSKTKGLCVATPVQLRVFREFHLHLRLPMSVRRFEQLELRPVLYNYLDKNLTVSVHVSPVEGLCLAGGGGLAQQVLVPAGSARPVAFSVVPTAAAAVSLKVVARGSFEFPVGDAVSKVLQIEKEGAIHREELVYELNPLDHRGRTLEIPGNSDPNMIPDGDFNSYVRVTASDPLDTLGSEGALSPGGVASLLRLPRGCGEQTMIYLAPTLAASRYLDKTEQWSTLPPETKDHAVDLIQKGYMRIQQFRKADGSYAAWLSRDSSTWLTAFVLKVLSLAQEQVGGSPEKLQETSNWLLSQQQADGSFQDPCPVLDRSMQGGLVGNDETVALTAFVTIALHHGLAVFQDEGAEPLKQRVEASISKASSFLGEKASAGLLGAHAAAITAYALTLTKAPVDLLGVAHNNLMAMAQETGDNLYWGSVTGSQSNAVSPTPAPRNPSDPMPQAPALWIETTAYALLHLLLHEGKAEMADQAAAWLTRQGSFQGGFRSTQDTVIALDALSAYWIASHTTEERGLNVTLSSTGRNGFKSHALQLNNRQIRGLEEELQFSLGSKINVKVGGNSKGTLKVLRTYNVLDMKNTTCQDLQIEVTVKGHVEYTMEANEDYEDYEYDELPAKDDPDAPLQPVTPLQLFEGRRNRRRREAPKLTSLSDRYVSHFETEGPHVLLYFDSVPTSRECVGFEAVQEVPVGLVQPASATLYDYYNPERRCSVFYGAPSKSRLLATLCSAEVCQCAEGKCPRQRRALERGLQDEDGYRMKFACYYPRVEYGFQVKVLREDSRAAFRLFETKITQVLHFTKDVKAAANQMRNFLVRASCRLRLEPGKEYLIMGLDGATYDLEGHPQYLLDSNSWIEEMPSERLCRSTRQRAACAQLNDFLQEYGTQGCQV

SEQ ID NO: 56998 - protein, 51 aa, Homo sapiens
  MOD_RES (1)..(1): Any amino acid
XGVLADFEGGFLRKFRARFPDQPFIALEDRRGFWVSEQYGRLRPGLSSWPC

SEQ ID NO: 56999 - protein, 18 aa, Homo sapiens
MTNSSFFCPVYKDLEPFT

SEQ ID NO: 57000 - protein, 356 aa, Homo sapiens
  MOD_RES (1)..(1): Any amino acid
XALGGYWSGLVELENLKAVTTEDREMRKKKEEYLTFSPLTVVIFVVICCVMMVLLYFFYKWLVYVMIAIFCIASAMSLYNCLAALIHKIPYGQCTIACRGKNMEVRLIFLSGLCIAVAVVWAVFRNEDRWAWILQDILGIAFCLNLIKTLKLPNFKSCVILLGLLLLYDVFFVFITPFITKNGESIMVELAAGPFGNNEKNDGNLVEATGQPSAPHEKLPVVIRVPKLIYFSVMSVCLMPVSILGFGDIIVPGLLIAYCRRFDVQTGSSYIYYVSSTVAYAIGMILTFVVLVLMKKGQPALLYLVPCTLITASVVAWRRKEMKKFWKGNSYQMMDHLDCATNEENPVISGEQIVQQ

SEQ ID NO: 57001 - protein, 49 aa, Homo sapiens
MAAVSMSVVLRQTLWRRRAVAVAALSVSRVPTRDRALLCHPGWSAVVQS

SEQ ID NO: 57002 - protein, 200 aa, Homo sapiens
MFVAAAGAYVHMVTHFIQAGLLSALGSLILMIWLMATPHSHETEQKRLGLLAGFAFLTGVGLGPALEFCIAVNPSILPTAFMGTAMIFTCFTLSALYARRRSYLFLGGILMSALSLLLLSSLGNVFFGSIWLFQANLYVGLVVMCGFVLFDTQLIIEKAEHGDQDYIWHCIDLFLDFITVFRKLMMILAMNEKDKKKEKK

SEQ ID NO: 57003 - protein, 21 aa, Homo sapiens
  MOD_RES (1)..(1): Any amino acid
XALKVPDGTSAACRVFVTCVL

SEQ ID NO: 57004 - protein, 146 aa, Homo sapiens
MDLIDILWRQDIDLGVSREVFDFSQRRKEYELEKQKKLEKERQEQLQKEQEKAFFAQLQLDEETGEFLPIQPAQHIQSETSGSANYSQVAHIPKSDALYFDDCMQLLAQTFPFVDDNEVSSATFQSLVPDIPGHIESPVFIATNQA

SEQ ID NO: 57005 - protein, 106 aa, Homo sapiens
MAQVAMSTLPVEDEESSESRMVVTFLMSALESMCKELAKSKAEVACIAVYETDVFVVGTERGRAFVNTRKDFQKDFVKYCVEEEEKAAEMHKMKSTTQANRMSVDA

SEQ ID NO: 57006 - protein, 202 aa, Homo sapiens
  MOD_RES (1)..(1): Any amino acid
XAAAAAAVMAPPGCPGSCPNFAVVCSFLERYGPLLDLPELPFPELERVLQAPPPDVGNGEVPKELVELHLKLMRKIGKSVTADRWEKYLIKYLCECQFDDNLKFKNIINEEDADTMRLQPIGRDKDGLMYWYQLDQDHNVRMYIEEQDDQDGSSWKCIVRNRNELAETLALLKAQIDPVLLKNSSQQDNSSRESPSLEDEET

SEQ ID NO: 57007 - protein, 525 aa, Homo sapiens
LGGRSSCEDPGCPRDEERAPRMGCMKSKFLQVGGNTFSKTETSASPHCPVYVPDPTSTIKPGPNSHNSNTPGIREGSEDIIVVALYDYEAIHHEDLSFQKGDQMVVLEESGEWWKARSLATRKEGYIPSNYVARVDSLETEEWFFKGISRKDAERQLLAPGNMLGSFMIRDSETTKGSYSLSVRDYDPRQGDTVKHYKIRTLDNGGFYISPRSTFSTLQELVDHYKKGNDGLCQKLSVPCMSSKPQKPWEKDAWEIPRESLKLEKKLGAGQFGEVWMATYNKHTKVAVKTMKPGSMSVEAFLAEANVMKTLQHDKLVKLHAVVTKEPIYIITEFMAKGSLLDFLKSDEGSKQPLPKLIDFSAQIAEGMAFIEQRNYIHRDLRAANILVSASLVCKIADFGLARVIEDNEYTAREGAKFPIKWTAPEAINFGSFTIKSDVWSFGILLMEIVTYGRIPYPGMSNPEVIRALERGYRMPRPENCPEELYNIMMRCWKNRPEERPTFEYIQSVLDDFYTATESQYQQQP

SEQ ID NO: 57008 - protein, 71 aa, Homo sapiens
MREEFDKIGMRRTVEGVLIVHEHRLPHVLLLQLGTTFFKLPGGELNPGEDEVEGLKRLMTEILGRQDGVLQ

SEQ ID NO: 57009 - protein, 2328 aa, Homo sapiens
MTPCTTAARGTPSALQDTRPPRLSICFEGPPLRRRGGVVDHRDVILAHQAHKIHSTPQARRKEWEMARFGDEMPARYGGGGSGAAAGVVVGSGGGRGAGGSRQGGQPGAQRMYKQSMAQRARTMALYNPIPVRQNCLTVNRSLFLFSEDNVVRKYAKKITEWPPFEYMILATIIANCIVLALEQHLPDDDKTPMSERLDDTEPYFIGIFCFEAGIKIIALGFAFHKGSYLRNGWNVMDFVVVLTGILATVGTEFDLRTLRAVRVLRPLKLVSGIPSLQVVLKSIMKAMIPLLQIGLLLFFAILIFAIIGLEFYMGKFHTTCFEEGTDDIQGESPAPCGTEEPARTCPNGTKCQPYWEGPNNGITQFDNILFAVLTVFQCITMEGWTDLLYNSNDASGNTWNWLYFIPLIIIGSFFMLNLVLGVLSGEFAKERERVENRRAFLKLRRQQQIERELNGYMEWISKAEEVILAEDETDGEQRHPFDGALRRTTIKKSKTDLLNPEEAEDQLADIASVGSPFARASIKSAKLENSTFFHKKERRMRFYIRRMVKTQAFYWTVLSLVALNTLCVAIVHYNQPEWLSDFLYYAEFIFLGLFMSEMFIKMYGLGTRPYFHSSFNCFDCGVIIGSIFEVIWAVIKPGTSFGISVLRALRLLRIFKVTKYWASLRNLVVSLLNSMKSIISLLFLLFLFIVVFALLGMQLFGGQFNFDEGTPPTNFDTFPAAIMTVFQILTGEDWNEVMYDGIKSQGGVQGGMVFSIYFIVLTLFGNYTLLNVFLAIAVDNLANAQELTKDEQEEEEAANQKLALQKAKEVAEVSPLSAANMSIAVKEQQKNQKPAKSVWEQRTSEMRKQNLLASREALYNEMDPDERWKAAYTRHLRPDMKTHLDRPLVVDPQENRNNNTNKSRAAEPTVDQRLGQQRAEDFLRKQARYHDRARDPSGSAGLDARRPWAGSQEAELSREGPYGRESDHHAREGSLEQPGFWEGEAERGKAGDPHRRHVHRQGGSRESRSGSPRTGADGEHRRHRAHRRPGEEGPEDKAERRARHREGSRPARGGEGEGEGPDGGERRRRHRHGAPATYEGDARREDKERRHRRRKENQGSGVPVSGPNLSTTRPIQQDLGRQDPPLAEDIDNMKNNKLATAESAAPHGSLGHAGLPQSPAKMGNSTDPGPMLAIPAMATNPQNAASRRTPNNPGNPSNPGPPKTPENSLIVTNPSGTQTNSAKTARKPDHTTVDIPPACPPPLNHTVVQVNKNANPDPLPKKEEEKKEEEEDDRGEDGPKPMPPYSSMFILSTTNPLRRLCHYILNLRYFEMCILMVIAMSSIALAAEDPVQPNAPRNNVLRYFDYVFTGVFTFEMVIKMIDLGLVLHQGAYFRDLWNILDFIVVSGALVAFAFTGNSKGKDINTIKSLRVLRVLRPLKTIKRLPKLKAVFDCVVNSLKNVFNILIVYMLFMFIFAVVAVQLFKGKFFHCTDESKEFEKDCRGKYLLYEKNEVKARDREWKKYEFHYDNVLWALLTLFTVSTGEGWPQVLKHSVDATFENQGPSPGYRMEMSIFYVVYFVVFPFFFVNIFVALIIITFQEQGDKMMEEYSLEKNERACIDFAISAKPLTRHMPQNKQSFQYRMWQFVVSPPFEYTIMAMIALNTIVLMMKFYGASVAYENALRVFNIVFTSLFSLECVLKVMAFGILNYFRDAWNIFDFVTVLGSITDILVTEFGNPNNFINLSFLRLFRAARLIKLLRQGYTIRILLWTFVQSFKALPYVCLLIAMLFFIYAIIGMQVFGNIGIDVEDEDSDEDEFQITEHNNFRTFFQALMLLFRSATGEAWHNIMLSCLSGKPCDKNSGILTRECGNEFAYFYFVSFIFLCSFLMLNLFVAVIMDNFEYLTRDSSILGPHHLDEYVRVWAEYDPAAWGRMPYLDMYQMLRHMSPPLGLGKKCPARVAYKRLLRMDLPVADDNTVHFNSTLMALIRTALDIKIAKGGADKQQMDAELRKEMMAIWPNLSQKTLDLLVTPHKSTDLTVGKIYAAMMIMEYYRQSKAKKLQAMREEQDRTPLMFQRMEPPSPTQEGGPGQNALPSTQLDPGGALMAHESGLKESPSWVTQRAQEMFQKTGTWSPEQGPPTDMPNSQPNSQSVEMREMGRDGYSDSEHYLPMEGQGRAASMPRLPAENQRRRGRPRGNNLSTISDTSPMKRSASVLGPKARRLDDYSLERVPPEENQRHHQRRRDRSHRASERSLGRYTDVDTGLGTDLSMTTQSGDLPSKERDQERGRPKDRKHRQHHHHHHHHHHPPPPDKDRYAQERPDHGRARARDQRWSRSPSEGREHMAHRQ

SEQ ID NO: 57010 - protein, 301 aa, Homo sapiens
MPNQGEDCYFFFYSTCTKGDSCPFRHCEAAIGNETVCTLWQEGRCFRQVCRFRHMEIDKKRSEIPCYWENQPTGCQKLNCAFHHNRGRYVDGLFLPPSKTVLPTVPESPEEEVKASQLSVQQNKLSVQSNPSPQLRSVMKVESSENVPSPTHPPVVINAADDDEDDDDQFSEEGDETKTPTLQPTPEVHNGLRVTSVRKPAVNIKQGECLNFGIKTLEEIKSKKMKEKSKKQGEGSSGVSSLLLHPEPVPGPEKENVRTVVRTVTLSTKQGEEPLVRLSLTERLGKRKFSADLCYWCPCIG

SEQ ID NO: 57011 - protein, 361 aa, Homo sapiens
MALRLLKLAATSASARVVAAGAQRVRGIHSSVQCKLRYGMWHFLLGDKASKRLTERSRVITVDGNICTGKGKLAKEIAEKLGFKHFPEAGIHYPDSTTGDGKPLATDYNGNCSLEKFYDDPRSNDGNSYRLQSWLYSSRLLQYSDALEHLLTTGQGVVLERSIFSDFVFLEAMYNQGFIRKQCVDHYNEVKSVTICDYLPPHLVIYIDVPVPEVQRRIQKKGDPHEMKITSAYLQDIENAYKKTFLPEMSEKCEVLQYSAREAQDSKKVVEDIEYLKFDKGPWLKQDNRTLYHLRLLVQDKFEVLNYTSIPIFLPEVTIGAHQTDRVLHQFREKPQEEVRRCPDFLISEQYMRSSHESSYN

SEQ ID NO: 57012 - protein, 59 aa, Homo sapiens
MDVNIAPLRAWDDFFPGSDRFARPDFRDISKWNNRVVSNLLYYQTNYLVVAAMMISIVG

SEQ ID NO: 57013 - protein, 169 aa, Homo sapiens
MTTSHQPQDRYKAVWLIFFMLGLGTLLPWNFFMTATQYFTNRLDMSQNVSLVTAELSKDAQASAAPAAPLPERNSLSAIFNNVMTLCAMLPLLLFTYLNSFLHQRIPQSVRILGSLVAILLVFLITAILVKVQLDALPFFVITMIKIVLINSFGAILQGSLFGLAGLLP

SEQ ID NO: 57014 - protein, 145 aa, Homo sapiens
METLSFPRYNVAEIVIHIRNKILTGADGKNLTKNDLYPNPKPEVLHMIYMRALQIVYGIRLEHFYMMPVNSEVMYPHLMEGFLPFSNLVTHLDSFLPICRVNDFETADILCPKAKRTSRFLSGIINFIHFREACRETYMEFLWQY

SEQ ID NO: 57015 - protein, 183 aa, Homo sapiens
  MOD_RES (1)..(1): Any amino acid
XRTEAADLCKAFNSTLPTMAQMEKALSIGFETCRYGFIEGHVVIPRIHPNSICAANNTGVYILTSNTSQYDTYCFNASAPPEEDCTSVTDLPNAFDGPITITIVNRDGTRYVQKGEYRTNPEDIYPSNPTDDDVSSGSSSERSSTSGDMDSSHSITLQPTANPNTGLVEDLDRTGPLSMTTQQ

SEQ ID NO: 57016 - protein, 214 aa, Homo sapiens
MVLGMQLSQVSDLLTQEQANLTHQKKKLEGQISARQQAEEASQESENELKEMIETLARKLNEKSKEQMELHHQNLNLQETLKRVANCSAPCPQDWIWHGENCYLFSSGSFNWEKSQEKCLSLDAKLLKINSTADLDFIQQAISYSSFPFWMGLSRRNPSYPWLWEDGSPLMPHLFRVRGAVSQTYPSGTCAYIQRGAVYAENCILAAFSICQKK

SEQ ID NO: 57017 - protein, 131 aa, Homo sapiens
MFQVEAKLIDKLDSLMSEGKGDETYRELFNSIIPLFGPYPSLLKKIERETWRESGVSLIATVTRLMERLLDYRDCMKMGEVDGKKIGCTVSLLNFYKTELNKEEMYIRYIHKLYDLHLKAQNFTEAAYTLL

SEQ ID NO: 57018 - protein, 190 aa, Homo sapiens
  MOD_RES (1)..(1): Any amino acid
XLQPNGLLFYYASGSDVFSISLDNGTVIMDVKGIKVQSVDKQYNDGLSHFVISSVSPTRYELIVDKSRVGSKNPTKGKIEQTQASEKKFYFGGSPISAQYANFTGCISNAYFTRVDRDVEVEDFQRYTEKVHTSLYECPIESSPLFLLHKKGKNLSKPKASQNKKISVFHSSENSFLPWHDLLCLRSRRE

SEQ ID NO: 57019 - protein, 10 aa, Homo sapiens
MHSFRLARLS

SEQ ID NO: 57020 - protein, 280 aa, Homo sapiens
MSRSGTDPQQRQQASEADAAAATFRANDHQHIRYNPLQDEWVLVSAHRMKRPWQGQVEPQLLKTVPRHDPLNPLCPGAIRANGEIFENKGAMMGCSNPHPHCQVWASSFLPDIAQREERSQQAYKSQHGEPLLMEYSRQELLRKMSSSCSGLSRVLVAVATALVSASSPCPQAWGPPGVQYGQPGRSVKLCCPGVTAGDPVSWFRDGEPKLLQGPDSGLGHELVLAQADSTDEGTYICQTLDGALGGTVTLQLGYPPARPVVSCQAADYENFSCTWSPSQ

SEQ ID NO: 57021 - protein, 131 aa, Homo sapiens
MPHIDNDVKLDFKDVLLRPKRSTLKSRSEVDLTRSFSFRNSKQTYSGVPIIAANMDTVGTFEMAKVLCKFSLFTAVHKHYSLVQWQEFAGQNPDCLEHLAASSGTGSSDFEQLEQILEAIPQAGNVVTGEM

SEQ ID NO: 57022 - protein, 435 aa, Homo sapiens
  MOD_RES (1)..(1): Any amino acid
XSILNSNEHLLKEKELLIDKQRKHISQLEQKVRESELQVHSALLGRPAPFGDVCLLRLQELQRENTFLRAQFAQKTEALSREKIDLEKKLSASEVEVQLIRESLKVALQKHSEEVKKQEERVKGRDKHINNLKKKCQKESEQNREKQQRIETLERYLADLPTLEDHQKQSQQLKDSELKSTELQEKVTELESLLEETQAICREKEIQLESLRQREAEFSSAGHSLQDKQSVEETSGEGPEVEMESWQKRYDSLQKIVEKQQQKMDQLRSQVQSLEQEVAQEEGTSQALREEAQRRDSALQQLRTAVKELSVQNQDLIEKNLTLQEHLRQAQPGSPPSPDTAQLALELHQELASCLQDLQAVCSIVTQRAQGHDPNLSLLLGIHSQHPETQLDLQKPDVIKRKLEEVQQLRRDIEDLRTTMSDRYAQDMGENCVTQ

SEQ ID NO: 57023 - protein, 153 aa, Homo sapiens
MSGLLTDPEQRAQEPRYPGFVLGLDVGSSVIRCHVYDRAARVCGSSVQKVENLYPQIGWVEIDPDVLWIQFVAVIKEAVKAAGIQMNQIVGLGISTQRATFITWNKKTGNHFHNFISWQDLRAVELVKSWNNSLLMKVIFFLCDLDIVGFFFL

SEQ ID NO: 57024 - protein, 189 aa, Homo sapiens
MEATGTDEVDKLKTKFISAWNNMKYSWVLKTKTYFSRNSPVLLLGKCYHFKYEDEDKTLPAESGCTIEDHVIAGNVEEFRKDFISRIWLTYREEFPQIEGSALTTDCGWGCTLRTGQMLLAQGLILHFLGRAWTWPDALNIENSDSESWTSHTVKKFTASFEASLSGEREFKTPTISLKETIGKYSDDH

SEQ ID NO: 57025 - protein, 77 aa, Homo sapiens
MLTQLKAKSEGKLAKQICKVVLDHFEKQYSKELGDAWNTVSVGSGIKGWGEGSGSLCCSWREINSSAAVCLSRLSSL

SEQ ID NO: 57026 - protein, 84 aa, Homo sapiens
GVSKHKSESPCESPYPNEKDKEKNKSKSSGKEKGSDSFKSEKMDKISSGGKKESRHDKEKIEKKEKRDSSGGKEEKKQSSDKHR

SEQ ID NO: 57027 - protein, 32 aa, Homo sapiens
PSPVMENNFVDLTEDTEEPKKTDVAECGPGGS

SEQ ID NO: 57028 - protein, 97 aa, Homo sapiens
MLFWSSKGKARADQVLCSWGIHFSSSLMEDASKRKFRALEKARSSAQLQTNYPSSDNSLYTNAKGSTISAFDGGSDSSSESEPEEPQSRKKLRMEAS

SEQ ID NO: 57029 - protein, 260 aa, Homo sapiens
MKTVRSFANEEEEAEVYLRKLQQVYKLNRKEAAAYMYYVWGSGLTLLVVQVSILYYGGHLVISGQMTSGNLIAFIIYEFVLGDCMESVGSVYSGLMQGVGAAEKVFEFIDRQPTMVHDGSLAPDHLEGRVDFENVTFTYRTRPHTQVLQNVSFSLSPGKVTALVGPSGSGKSSCVNILENFYPLEGGRVLLDGKPISAYDHKYLHRVISLVSQEPVLFARSITDNISYGLPTVPFEMVVEAAQKANAHGFIMELQDGYST

SEQ ID NO: 57030 - protein, 156 aa, Homo sapiens
PQRVAEAGGGQLGSTAQGKCDKDNTEKDITQATNSHFTHGEMQDQSIWGNPSDGELIRTQPQRLPQLQTSAQVPSGEEIGKIKNGHTGLSNGNGIHHGAKHGSADNRKLSAPVSQKMHRKIQSSLSVNSDISKKSKVNAVFSQKTGSSPEDKQEFW

SEQ ID NO: 57031 - protein, 453 aa, Homo sapiens
MYPSNKKKKVWREEKERLLKMTLEERRKEYLRDYIPLNSILSWKEEMKGKGQNDEENTQETSQVKKSLTEKVSLYRGDITLLEVDAIVNAANASLLGGGGVDGCIHRAAGPCLLAECRNLNGCDTGHAKITCGYDLPAKYVIHTVGPIARGHINGSHKEDLANCYKSSLKLVKENNIRSVAFPCISTGIYGFPNEPAAVIALNTIKEWLAKNHHEVDRIIFCVFLEVDFKIYKKKMNEFFSVDDNNEEEEDVEMKEDSEGLEPKGLSPPYKKSKAKKPECSKDSSEDENGPEEKQSVEEMEEQSQDADGVNTVTVPGPASEEAVEDCKDEDFAKDENITKGGEVTDHSVRDQDHPDGQENDSTKNEIKIETESQSSYMETEELSSNQEDAVIVEQPEVIPLTEDQEEKEGEKAPGEDTPRMPGKSEGSSDLENTPGPDAGAQDEAKEQRNGTK

SEQ ID NO: 57032 - protein, 24 aa, Homo sapiens
  MOD_RES (1)..(1): Any amino acid
XTIFVTAPHEATAGIIGVNRKGQN

SEQ ID NO: 57033 - protein, 176 aa, Homo sapiens
MSLPSRQTAIIVNPPPPEYINTKKNGRLTNQLQYLQKVVLKDLWKHSFSWPFQRPVDAVKLQLPDYYTIIKNPMDLNTIKKRLENKYYAKASECIEDFNTMFSNCYLYNKPGDDIVLMAQALEKLFMQKLSQMPQEEQVVGVKERIKKGTQQNIAVSSAKEKSSPSATEKVFKQQE

SEQ ID NO: 57034 - protein, 125 aa, Homo sapiens
MEDGGLTAFEEDQRCLSQSLPLPVSAEGPAAQTTAEPSRSFSSAHRHLSRRNGLSRLCQSRTALSEDRWSSYCLSSLAAQNICTSKLHCPAAPEHTDPSEPRGSVSCCSLLRGLSSGWSSPLLPA

SEQ ID NO: 57035 - protein, 220 aa, Homo sapiens
MVISFYYGGKLVGQATTTCPEGCRLSLSQPGLPGTKLYGPEGLELVRFPPADAIPSERQRQVTRKLFGHLERGVLLHSSRQGVFVKRLCQGRVFCSGNAVVCKGRPNKLERDEVVQVFDTSQFFRELQQFYNSQGRLPDGRVVLCFGEEFPDMAPLRSKLILVQIEQLYVRQLAEEAGKSCGAGSVMQAPEEPPPDQVFRMFPDICASHQRSFFRENQQI

SEQ ID NO: 57036 - protein, 45 aa, Homo sapiens
MSYTGFVQGSETTLQSTYSDTSAQPTCDYGYGTWNSGTNRELTSA

SEQ ID NO: 57037 - protein, 150 aa, Homo sapiens
MYDNMSTMVYIKEDKLEKLTQDEIISKTKQVIQGLEALKNEHNSILQSLLETLKCLKKDDESNLVEEKSNMIRKSLEMLELGLSEAQVMMALSNHLNAVESEKQKLRAQVRRLCQENQWLRDELANTQQKLQKSEQSVAQLEEEKKHLEF

SEQ ID NO: 57038 - protein, 119 aa, Homo sapiens
MIAGKSSSLLTLQKGNGLSTPGKLTGSDGVCFFCSDRKLVDKEDIDTSSKGGCVQQATGWRKGTGLGYGHPGLASSEEAEGRMRGPSVGASGRTSKRQSNETYRDAVRRVMFARYKELD

SEQ ID NO: 57039 - protein, 50 aa, Homo sapiens
KKSKRSALENSEEHSAKYSNSNNSGSGASSPLTSPSSPTPPSTSVEHAPF

SEQ ID NO: 57040 - protein, 184 aa, Homo sapiens
MKLWVSALLMAWFGVLSCVQAEFFTSIGHMTDLIYAEKELVQSLKEYILVEEAKLSKIKSWANKMEALTSKSAADAEGYLAHPVNAYKLVKRLNTDWPALEDLVLQDSAAGFIANLSVQRQFFPTDEDEIGAAKALMRLQDTYRLDPGTISRGELPGTKYQAMLSVDDCFGMGRSAYNEGDYYH

SEQ ID NO: 57041 - protein, 121 aa, Homo sapiens
MMLSLNNLQNIIYNPVIPFVGTIPDQLDPGTLIVIRGHVPSDADRFQVDLQNGSSMKPRADVAFHFNPRFKRAGCIVCNTLINEKWGREEITYDTPFKREKSFEIVIMVLKDKFQDLQSTQ

SEQ ID NO: 57042 - protein, 98 aa, Homo sapiens
MASFPPRVNEKEIGKLLLNLVDHTEVVRDLTFAPDGSLILVSASRDKTLRVWDLKDDGNMMKVLRGHQNWVYSCAFSPDSSMLCSVGASKAVVAAILV

SEQ ID NO: 57043 - protein, 233 aa, Homo sapiens
MKKHEMVANPSVTCSHFARDLWPEQSIKDSFQKVTLRRYENYGHDNLQFKKGCESVDECKVHKRGYNGLNQYLTTTQSKIFQCDKYVKVIHKFSNSNRHKIRHTGKKPFKCIECGKAFNQSSTLTTHKKIHTGEKPFKCEECGKAFNWSSHLTTHKRIHTGEKRYKCEDCGKAFSRFSYLTAHKIIHSGEKPYKCEECGKAFKRSSNLTTHKIIHTGEKPYKCEECGKAFKRS

SEQ ID NO: 57044 - protein, 167 aa, Homo sapiens
MPHSAGGTAGVGLEAAEPTALLTRAEPPSEPTGVLSEEQIRLKKLKRQEEEQAHATSLPPRASSPPQILPQLSPEQLGMIEKLVAAQQQCNRRSFSDRLRVTVMLLETSRRYNPGSESITFLKDFSYNREDFAKAGLQVEFINPIFEFSRAMNELQLNDAEFALLIA

SEQ ID NO: 57045 - protein, 59 aa, Homo sapiens
MALTAHPSCLLALLVAGLAQGIRGPLRAQSMLTAWTSLPTTWPRLRGCRRRTWAQLSLG

SEQ ID NO: 57046 - protein, 161 aa, Homo sapiens
MPRAPKRQRCMPEEDLQSQSETQGLEGAQAPLAVEEDASSSTSTSSSFPSSFPSSSSSSSSSCYPLIPSTPEEVSADDETPNPPQSAQIACSSPSVVASLPLDQSDEGSSSQKEESPSTLQVLPDSESLPRSEIDEKVTDLVQFLLFKYQMKEPITKAEIL

SEQ ID NO: 57047 - protein, 209 aa, Homo sapiens
  MOD_RES (1)..(1): Any amino acid
XLQGGAIAILTAAERPGHFAGMVLISPLVLANPESATTFKDYSRILKHLMEKASRMLKFWIPRPFWVLAAKVLNLVLPNLSLGPIDSSVLSRNKTEVDIYNSDPLICRAGLKVCFGIQLLNAVSRVERALPKLTVPFLLLQGSADRLCDSKGAYLLMELAKSQDKTLKIYEGAYHVLHKELPEVTNSVFHEINMWVSQRTATAGTASPP

SEQ ID NO: 57048 - protein, 183 aa, Homo sapiens
VRTWILTVGYTTAFGAMFAKTWRVHAIFKNVKMKKKIIKDQKLLVIVGGMLLIDLCILICWQAVDPLRRTVEKYSMELFGCFLAWETRNVSIPALNDSKYIGMSVYNVGIMCIIGAAVSFLTRDQPNVQFCIVALVIIFCSTITLCLVFVPKLITLRTNPDAATQNRRFQFTQNQKKEDSKTS

SEQ ID NO: 57049 - protein, 752 aa, Homo sapiens
MSSTRSQNPHGLKQIGLDQIWDDLRAGIQQVYTRQSMAKSRYMELYTHVYNYCTSVHQFVGLELYKRLKEFLKNYLTNLLKDGEDLMDESVLKFYTQQWEDYRFSSKVLNGICAYLNRHWVRRECDEGRKGIYEIYSLALVTWRDCLFRPLNKQVTNAVLKLIEKERNGETINTRLISGVVQSYVELGLNEDDAFAKGPTLTVYKESFESQFLADTERFYTRESTEFLQQNPVTEYMKKAEARLLEEQRRVQVYLHESTQDELARKCEQVLIEKHLEIFHTEFQNLLDADKNEDLGRMYNLVSRIQDGLGELKKLLETHIHNQGLAAIEKCGEAALNDPKMYVQTVLDVHKKYNALVMSAFNNDAGFVAALDKACGRFINNNAVTKMAQSSSKSPELLARYCDSLLKKSSKNPEEAELEDTLNQVMVVFKYIEDKDVFQKFYAKMLAKRLVHQNSASDDAEASMISKLKQACGFEYTSKLQRMFQDIGVSKDLNEQFKKHLTNSEPLDLDFSIQVLSSGSWPFQQSCTFALPSELERSYQRFTAFYASRHSGRKLTWLYQLSKGELVTNCFKNRYTLQASTFQMAILLQYNTEDAYTVQQLTDSTQIKMDILAQVLQILLKSKLLVLEDENANVDEVELKPDTLIKLYLGYKNKKLRVNINVPMKTEQKQEQETTHKNIEEDRKLLIQAAIVRIMKMRKVLKHQQLLGEVLTQLSSRFKPRVPVIKKCIDILIEKEYLERVDGEKDTYSYLA

SEQ ID NO: 57050 - protein, 157 aa, Homo sapiens
MKNHLLFWGVLAVFIKAVHVKENGIHSEFRAQEDERIVLVDNKCKCARITSRIIRSSEDPNEDIVERNIRIIVPLNNRENISDPTSPLRTRFVYHLSDLCKKCDPTEVELDNQIVTATQSNICDEDSATETCYTYDRNKCYTAVVPLVYGGETKMVE

SEQ ID NO: 57051 - protein, 55 aa, Homo sapiens
MGPEALSSLLLLLLVASGDADMKGHFDPAKCRYALGMQDRTIPDSDISASSSWSD

SEQ ID NO: 57052 - protein, 81 aa, Homo sapiens
MALNGAEVDDFSWEPPTEAETKVLQARRERQDRISRLMGDYLLRGYRMLGETRSSSKTNSGKSTAWLVRNSTQTWIKIIPL

SEQ ID NO: 57053 - protein, 230 aa, Homo sapiens
MEALLEGIQNRGHGGGFLTSCEAELQELMKQIDIMVAHKKSEWEGRTHALETCLKIREQELKSLRSQLDVTHKEVGMLHQQVEEHEKIKQEMTMEYKQELKKLHEELCILKRSYEKLQKKQMREFRGNTKNHREDRSEIERLTAKIEEFRQKSLDWEKQRLIYQQQAQLVNRKQKLESVELSSQSEIQHLSSKLERANDTICANELEIERLTMRVNDLVGTSMTVLQEQQ

SEQ ID NO: 57054 - protein, 49 aa, Homo sapiens
MEQAPPDPERQLQPAPLEPLGSPDAGLGAAVGKEAEGAGEESSGVDTVS

SEQ ID NO: 57055 - protein, 122 aa, Homo sapiens
MQFDDDEKQKLIEEVHAVVTVRDAKHTNFVEFRNFKIIYRRYAGLYFCICVDVNDNNLAYLEAIHNFVEVLNEYFHNVCELDLVFNFYKVYTVVDEMFLAGEIRETSQTKVLKQLLMLQSLE

SEQ ID NO: 57056 - protein, 495 aa, Homo sapiens
DSVDRVLSEGSEVSSEVLSERRNSLRRMSSSFPTAVETFHLMGELSSLYVGLKESMKDLDEEQAGQTDLEKIQFLLAQMVKRTIPPELQEQLKTVKTLAKEVWQEKAKVERLQRILEGEGNQEAGKELKAGELRLQLGVLRVTVADIEKELAELRESQDRGKAAMENSVSEASLYLQDQLDKLRMIIESMLTSSSTLLSMSMAPHKAHTLAPGQIDPEATCPACSLDVSHQVSTLVRRYEQLQDMVNSLAVSRPSKKAKLQRQDEELLGRVQSAILQVQGDCEKLNITTSNLIEDHRQKQKDIAMLYQGLEKLEKEKANREHLEMEIDVKADKSALATKVSRVQFDATTEQLNHMMQELVAKMSGQEQDWQKMLDRLLTEMDNKAARHPPKRQLRDLKAQVPAAQAPRAQAAIPQQQWPAALSATERPDFGWQHLRKIDLPPRAVSPSRTQPTRPAPPRWQTGGWRGTWTCLLGRGSRSPRGGRGPAPLSERRCK

SEQ ID NO: 57057 - protein, 152 aa, Homo sapiens
MSEPPVYCNLVDLRRCPRSPPPGPACPLLQRLDAWEQHLDPNSGRCFYINSLTGCKSWKPPRRSRSETNPGSMEGTQTLKRNNDVLQPQAKGFRSDTGTPEPLDPQEVEKSGLLNMTKIAQGGRKLRKNWGPSWVVLTGNSLVFYREPPPTA

SEQ ID NO: 57058 - protein, 78 aa, Homo sapiens
MASTEEQYDLKIVKVEEDPIWDQETHLRGNNFSGQEASRQLFRQFCYQETPGPREALSRLRELCHQWLRPEIHTKEQI

SEQ ID NO: 57059 - protein, 101 aa, Homo sapiens
MATDWLGSIVSINCGDSLGVYQGRVSAVDQVSQTISLTRPFHNGVKCLVPEVTFRAGDITELKILEIPGPGDNQHFGDLHQTELGPSGAGCQVGINQNGTG

SEQ ID NO: 57060 - protein, 44 aa, Homo sapiens
MDPLGAAKPQWPWRRCLAALLFQLLVAVCFFSYLRVSRDDATGS

SEQ ID NO: 57061 - protein, 59 aa, Homo sapiens
MQKIKSLMTRQGLKSPQESLSDLGAIESLRVPGKAFEYTGCASLDQQFKASPYTSVSAP

SEQ ID NO: 57062 - protein, 169 aa, Homo sapiens
MSEYGRMTDTERDQIDQDAQIFMRTCSEAIQQLRTEAHKEIHSQQVKEHRTAVLDFIEDYLKRVCKLYSEQRAIRVKRVVDKKRLSKLEPEPNTKTRESTSSEKVSQSPSKDSEENPATEERPEKILAETQPELGTWGDGKGEDELSPEEIQMFEQENQRLIGEMNSLF

SEQ ID NO: 57063 - protein, 182 aa, Homo sapiens
MLPAVGSADEEEDPAEEDCPELVPMETTQSEEEEKSGLGAKIPVTIITGYLGAGKTTLLNYILTEQHSKRVAVILNEFGEGSALEKSLAVSQGGELYEEWLELRNGCLCCSVKDNGLRAIENLMQKKGKFDYILLETTGLADPGAVASMFWVDAELGSDIYLDGIITIVDSKYGLKAKNWTT

SEQ ID NO: 57064 - protein, 172 aa, Homo sapiens
MDLYSTPAAALDRFVARRLQPRKEFVEKARRALGALAAALRERGGRLGAAAPRVLKTVKGGSSGRGTALKGGCDSELVIFLDCFKSYVDQRARRAEILSEMRASLESWWQNPVPGLRLTFPEQSVPGALQFRLTSVDLEDWMDVSLVPAFNVLVAAKGASMRPASQSCGGTL

SEQ ID NO: 57065 - protein, 38 aa, Homo sapiens
MLGKGVVGGGGGTKAPKPSFVSYVRPEVNSCFVKPAQY

SEQ ID NO: 57066 - protein, 57 aa, Homo sapiens
MSGRLWSKAIFAGYKRGLRNQREHTALLKIEGVYARDETEFYLGKRCAYVYKAKNWD

SEQ ID NO: 57067 - protein, 155 aa, Homo sapiens
  MOD_RES (1)..(1): Any amino acid
XLFVWEILHSTIRKMNKHVLKIQKELEEAKEKLARQHKRRSDDDDRSSDRKDGVLEEQIERLQEKVESAQSEQKNLFLVIFQRFIMILTEHLVRCETDGTSVLTPWYKNCIERLQQIFLQVCGELRLGNNTILSHKDFSLKKILVKFVRRLYSTC

SEQ ID NO: 57068 - protein, 704 aa, Homo sapiens
MKKFGGPGRMKQSCIMRQCIAPVLPHTAVCLVCGEAGKEDTVEEEEGKFNLMLMECSICNEIIHPGCLKIKESEGVVNDELPNCWECPKCNHAGKTGKQKRGPGFKYASNLPGSLLKEQKMNRDNKEGQEPAKRRSECEEAPRRRSDEHSKKVPPDGLLRRKSDDVHLRKKRKYEKPQELSGRKRASSLQTSPGSSSHLSPRPPLGSSLSPWWRSSLTYFQQQLKPGKEDKLFRKKRRSWKNAEDRMALANKPLRRFKQEPEDELPEAPPKTRESDHSRSSSPTAGPSTEGAEGPEEKKKVKMRRKRRLPNKELSRELSKELNHEIQRTENSLANENQQPIKSEPESEGEEPKRPPGICERPHRFSKGLNGTPRELRHQLGPSLRSPPRVISRPPPSVSPPKCIQMERHVIRPPPISPPPDSLPLDDGAAHVMHREVWMAVFSYLSHQDLCVCMRVCRTWNRWCCDKRLWTRIDLNHCKSITPLMLSGIIRRQPVSLDLSWTNISKKQLSWLINRLPGLRDLVLSGCSWIAVSALCSSSCPLLRTLDVQWVEGLKDAQMRDLLSPPTDNRPGQMDNRSKLRNIVELRLAGLDITDASLRLIIRHMPLLSKLHLSYCNHVTDQSINLLTAVGTTTRDSLTEINLSDCNKVTDQCLSFFKRCGNICHIDLRYCKQVTKEGCEQFIAEMSVSVQFGQVEEKLLQKLS

SEQ ID NO: 57069 - protein, 108 aa, Homo sapiens
MNIFDRKINFDALLKFSHITPSTQQHLKKVYASFALCMFVAAAGAYVHMVTHFIQAGLLSALGSLILMIWLMATPHSHETEQKRLGLLAGFAFLTGVGLGPALEFCIA

SEQ ID NO: 57070 - protein, 157 aa, Homo sapiens
MAEPLKEEDGEDGSAEPPGPVKAEPAHTAASVAAKNLALLKARSFDVTFDVGDEYEIIETIGNGAYGVVSSARRRLTGQQVAIKKIPNAFDVVTNAKRTLRELKILKHFKHDNIIAIKDILRPTVPYGEFKSVYVVLDLMESDLHQIIHSSQPLTLE

SEQ ID NO: 57071 - protein, 196 aa, Homo sapiens
  MOD_RES (1)..(1): Any amino acid
XIDIGHYVRDISAYEELVSKLNLLVEDELKQIAENIESINQNKAPLKYIGNYAILDHLGSGAFGCVYKLYHPNIVRYYKTFLENDRLYIVMELIEGAPLGEHFSSLKEKHHHFTEERLWKIFIQLCLALRYLHKEKRIVHRDLTPNNIMLGDKDKVTVTDFGLAKQKQENSKLTSVVGTILYSCGFMRRCKETVAG

SEQ ID NO: 57072 - protein, 167 aa, Homo sapiens
MGKKYKNIVLLKGLEVINDYHFRMVKSLLSNDLKLNLKMREEYDKIQIADLMEEKFRGDAGLGKLIKIFEDIPTLEDLAETLKKEKLKVKGPALSRKRKKEVDATSPAPSTSSTVKTEGAEATPGAQKRKKSTKEKAGPKGSKVSEEQTQPPSPAGAGMSTAMGRSP

SEQ ID NO: 57073 - protein, 253 aa, Homo sapiens
MATDWLGSIVSINCGDSLGVYQGRVSAVDQVSQTISLTRPFHNGVKCLVPEVTFRAGDITELKILEIPGPGDNQHFGDLHQTELGPSGAGCQVGINQNGTGKFVKKPASSSSAPQNIPKRTDVKSQDVAVSPQQQQCSKSYVDRHMESLSQSKSFRRRHNSWSSSSRHPNQATPKKSGLKNGQMKNKDDECFGDDIEEIPDTDFDFEGNLALFDKAAVFEEIDTYERRSGTRSRGIPNERPTRYRHDENILES

SEQ ID NO: 57074 - protein, 121 aa, Homo sapiens
MGKQNSKLRPEVMQDLLESTDFTEHEIQEWYKGFLRDCPSGHLSMEEFKKIYGNFFPYGDASKFAEHVFRTFDANGDGTIDFREFIIALSVTSRGKLEQKLKWAFSMYDLDGNGYISKAEM

SEQ ID NO: 57075 - protein, 195 aa, Homo sapiens
QCYSGYALAEDGKRCVAVDYCASENHGCEHECVNADGSYLCQCHEGFALNPDKKTCTKIDYCASSNHGCQHECVNTDDSYSCHCLKGFTLNPDKKTCRSLPFFPSGINYCALNKPGCEHECVNMEESYYCRCHRGYTLDPNGKTCSRVDHCAQQDHGCEQLCLNTEDSFVCQCSEGFLINEDLKTCSRVDYCLLS

SEQ ID NO: 57076 - protein, 125 aa, Homo sapiens
MTPQSLLQTTLFLLSLLFLVQASASSGAHGRGHREDFRFCSQRNQTHRSSLHYKPTPDLRISIENSEEALTVHAPFPAAHPASRSFPDPRGLYHFCLYWNRHAGRLHLLYGKRDFLLSDKASSLL

SEQ ID NO: 57077 - protein, 185 aa, Homo sapiens
  MOD_RES (1)..(1): Any amino acid
XTSISVSNCQIQENVDISTVYQIFADEVLGSGQFGIVYGGKHRKTGRDVAIKVIDKMRFPTKQESQLRNEVAILQILVALRNLHFKNIVHCDLKPENVLLASAEPFPQVKLCDFGFARIIGEKSFRRSVVGTPAYLAPEVLRSKGYNRSLDMWSVGVIIYVSLSGTFPFNEDEDINDQIQNAAFM

SEQ ID NO: 57078 - protein, 71 aa, Homo sapiens
  MOD_RES (1)..(1): Any amino acid
XCLRHVSVRRFESFNLFSVTEGKERETEEEVGAWVQYTSIFCPEYSISLRHNSGSLNVEDVLTSFDNTGNV

SEQ ID NO: 57079 - protein, 122 aa, Homo sapiens
  MOD_RES (1)..(1): Any amino acid
XKAHAEERELWKTEHAKDQEKVSQEIQKAIQEQRKISQETVKAAIIEEQKRSEKAVEEAVKRTRDELIEYIKEQKRLDQVIRQRSLSSLELFLSCAQKQDTEGLLVRWQKRDMATRISLSRP

SEQ ID NO: 57080 - protein, 83 aa, Homo sapiens
MPPMPSAPPVHPPPDGGWGWIVVGAAFISIGFSYAFPKAVTVFFKEIQQIFHTTYSEIAWISSIMLAVMYAGGPKLPSHLQEE

SEQ ID NO: 57081 - protein, 132 aa, Homo sapiens
MVTIILLLSCDFWAVKNVTGRLMVGLRWWNHIDEDGKSHWVFESRKESSQENKTVSEAESRIFWLGLIACPVLWVIFAFSALFSFRVKWLAVVIMGVVLQGANLYGYIRCKVRSRKHLTSMATSYFGKQFLR

SEQ ID NO: 57082 - protein, 134 aa, Homo sapiens
MQKAGAGGRRASDCGLAPHRPRCITKFAQYVGSFPVDDLDTQESVWLVQQQLWALKVGGLGGHFPSGSHSLEDQVLLMAHALRRILYSTWCPADCQFAFMARNPRSPASKLFCHLFVGSQPGEVQILHLLLCRS

SEQ ID NO: 57083 - protein, 35 aa, Homo sapiens
MRKSPGLSDCLWAWILLLSTLTGRSYGQPSLQDEL

SEQ ID NO: 57084 - protein, 201 aa, Homo sapiens
  MOD_RES (1)..(1): Any amino acid
XEDAMTGDTDKYLGPQDLKELGDDSLPAEGYMGFSLGARSASPKISLRSFSSDRSYTLNRSSYARDSMMIEELLVPSKEQHLTFTREFDSDSLRHYSWAADTLDNVNLVSSPIHSGYSSPLPQYDSRFLVSFMVDARGGSMRGSRHHGMRIIIPPRKCTAPTRITCRLVKRHKLANPPPMVEGEGLASRLVEMGPAGAQFL

SEQ ID NO: 57085 - protein, 141 aa, Homo sapiens
  MOD_RES (1)..(1): Any amino acid
XPARRRLMRDFKRLQEDPPVGVSGAPSENNIMQWNAVIFGPEGTPFEDGTFKLVIEFSEEYPNKPPTVRFLSKMFHPNDILQNRWSPTYDVSSILTSIQSLLDEPNPNSPANSQAAQLYQENKREYEKRVSAIVEQSWNDS

SEQ ID NO: 57086 - protein, 153 aa, Homo sapiens
MSRRVVRQSKFRHVFGQAAKADQAYEDIRVSKVTWDSSFCAVNPKFLAIIVEAGGGGAFIVLPLAKGEWIRTTHWSLGTLPLCWILTGVHTMTTLSPVPQTTPPSWCGRFQTIPPCATLRNLSSHLRATPSVWASSPGTLLPGMSCSVQVVTM

SEQ ID NO: 57087 - protein, 215 aa, Homo sapiens
VTVTLALGVMRMVKKRAIVKKLPIVETLGCCNVICSDKTGTLTKNEMTVTHIFTSDGLHAEVTGVGYNQFGEVIVDGDVVHGFYNPAVSRIVEAGCVCNDAVIRNNTLMGKPTEGALIALAMKMGLDGLQQDYIRKAEYPFSSEQKWMAVKCVHRTQQDRPEICFMKGAYEQVIKYCTTYQSKGQTLTLTQQQRDVYQQEKARMGSAGLRVYLVF

SEQ ID NO: 57088 - protein, 99 aa, Homo sapiens
MSHHARPNCMGLSVSPEPCLSLGAPSLLPHPSCQRLQPQTPGRCWSHSAEVVPNSEDQGPGAAFQLSEASPPQSSGLRFSGCPELWQEDLEGARLGIFY

SEQ ID NO: 57089 - protein, 271 aa, Homo sapiens
MATELEYESVLCVKPDVSVYRIPPRASNRGYRASDWKLDQPDWTGRLRITSKGKTAYIKLEDKVSGELFAQAPVEQYPGIAVETVTDSSRYFVIRIQDGTGRSAFIGIGFTDRGDAFDFNVSLQDHFKWVKQESEISKESQEMDARPKLDLGFKEGQTIKLCIGNITNKKGGASKPRTARGGGLSLLPPPPGGKVTIPPPSSSVAISNHVTPPPIPKSNHGDILLDLDSPAPVTTPAPTPVSVSNDLWGDFSTASSSVPNQAPQPSNWVQF

SEQ ID NO: 57090 - protein, 131 aa, Homo sapiens
PKLTPQEKLKLRMQKALNRQFKADKKAAQEKMIQQEHERQEREDELRAMARKIRMKVLEAPALPEFSVSSVPGQMLMPCLRRERERREKEREEWERQYSRQSRSPSPRYSREYSSSRRRSRSRSRSPHYRH

SEQ ID NO: 57091 - protein, 46 aa, Homo sapiens
MVILLYLRHIKSYKIINFAPSLLRIIVSDHVEFPVRQAAAIYLKNM

SEQ ID NO: 57092 - protein, 223 aa, Homo sapiens
FFMMNIFVGFVIVTFQEQGEKEYKNCELDKNQRQCVEYALKARPLRRYIPKNPYQYKFWYVVNSSPFEYMMFVLIMLNTLCLAMQHYEQSKMFNDAMDILNMVFTGVFTVEMVLKVIAFKPKALPYVALLIAMLFFIYAVIGMQMFGKVAMRDNNQINRNNNFQTFPQAVLLLFRCATGEAWQEIMLACLPGKLCDPESDYNPGEEYTCGSNFAIVYFISFYM

SEQ ID NO: 57093 - protein, 168 aa, Homo sapiens
MEALIPVINKLQDVFNTVGADIIQLPQIVVVGTQSSGKSSVLESLVGRDLLPRGTGIVTRRPLILQLVHVSQEDKRKTTGEENGVEAEEWGKFLHTKNKGVSPEPIHLKIFSPNVVNLTLVDLPGMTKVPVGDQPKDIELQIRELILRFISNPNSIILAVTAANTDMA

SEQ ID NO: 57094 - protein, 1035 aa, Homo sapiens
MVRKKNPPLRNVASEGEGQILEPIGTESKVSGKNKEFSADQMSENTDQSDAAELNHKEEHSLHVQDPSSSTAGGVCEPLKSPQRAEADDPQDMACTPSGDSLETKEDQKMSPKATEETGQAQSGQANCQGLSPVSVASKNPQVPSDGGVRLNKSKTDLLVNDNPDPAPLSPELQDFKCNICGYGYYGNDPTDLIKHFRKYHLGLHNRTRQDAELDSKILALHNMVQFSHSKDFQKVNRSVFSGVLQDINSSRPVLLNGTYDVQVTSGGTFIGIGRKTPDCQGNTKYFRCKFCNFTYMGNSSTELEQHFLQTHPNKIKASLPSSEVAKPSEKNSNKSIPALQSSDSGDLGKWQDKITVKAGDDTPVGYSVPIKPLDSSRQNDVLLFHYESVHESQASDVKQEANHLQGSDGQQSVKESKEHSCTKCDFITQVEEEISRHYRRAHSCYKCRQCSFTAADTQSLLEHFNTVHCQEQDITTANGEEDGHAISTIKEEPKIDFRVYNLLTPDSKMGEPVSESVVKREKLEEKDGLKEKVWTESSSDDLRNVTWRGADILRGSPSYTQASLGLLTPVSGTQEQTKTLRDSPNVEAAHLARPIYGLAVETKGFLQGAPAGGEKSGALPQQYPASGENKSKDESQSLLRRRRGSGVFCANCLTTKTSLWRKNANGGYVCNACGLYQKLHSTPRPLNIIKQNNGEQIIRRRTRKRLNPEALQAEQLNKQQRGSNEEQVNGSPLERRSEDHLTESHQREIPLPSLSKYEAQGSLTKSHSAQQPVLVSQTLDIHKRMQPLHIQIKSPQESTGDPGNSSSVSEGKGSSERGSPIEKYMRPAKHPNYSPPGSPIEKYQYPLFGLPFVHNDFQSEADWLRFWSKYKLSVPGNPHYLSHVPGLPNPCQNYVPYPTFNLPPHFSAVGSDNDIPLDLAIKHSRPGPTANGASKEKTKAPPNVKNEGPLNVVKTEKVDRSTQDELSTKCVHCGIVFLDEVMYALHMSCHGDSGPFQCSICQHLCTDKYDFTTHIQRGLHRNNAQVEKNGKPKE

SEQ ID NO: 57095 - protein, 565 aa, Homo sapiens
MLSRLRVVSTTCTLACRHLHIKEKGKPLMLNPRTNKGMAFTLQERQMLGLQGLLPPKIETQDIQALRFHRNLKKMTSPLEKYIYIMGIQERNEKLFYRILQDDIESLMPIVYTPTVGLACSQYGHIFRRPKGLFISISDRGHVRSIVDNWPENHVKAVVVTDGERILGLGDLGVYGMGIPVGKLCLYTACAGIRPDRCLPVCIDVGTDNIALLKDPFYMGLYQKRDRTQQYDDLIDEFMKAITDRYGRNTLIQFEDFGNHNAFRFLRKYREKYCTFNDDIQGTAAVALAGLLAAQKVISKPISEHKILFLGAGEAALGIANLIVMSMVENGLSEQEAQKKIWMFDKYGLLVKGRKAKIDSYQEPFTHSAPESIPDTFEDAVNILKPSTIIGVAGAGRLFTPDVIRAMASINERPVIFALSNPTAQAECTAEEAYTLTEGRCLFASGSPFGPVKLTDGRVFTPGQGNNVYIFPGVALAVILCNTRHISDSVFLEAAKALTSQLTDEELAQGRLYPPLANIQEVSINIAIKMESQLCRPGWSEVVQSQFNTTSASQVQVILLPQPPE

SEQ ID NO: 57096 - protein, 114 aa, Homo sapiens
MPNLYPPETIADGVKSSIGLNTWPIIRDLVDDIFTVTEDEIKCATQLVWERMKLLIEPTAGVGVAAVLSQHFQTVSPEVKNICIVLSGGNVDLTSSITWVKQAERPASYQSVSV

SEQ ID NO: 57097 - protein, 372 aa, Homo sapiens
  MOD_RES (1)..(1): Any amino acid
XFTVTCLEVMRRFLLLYATQQGQAKAIAEEICEQAVVHGFSADLHCISESDKYDLKTETAPLVVVVSTTGTGDPPDTARKFVKEIQNQTLPVDFFAHLRYGLLGLGDSEYTYFCNGGKIIDKRLQELGARHFYDTGHADDCVGLELVVEPWIAGLWPALRKHFRSSRGQEEISGALPVASPASSRTDLVKSELLHIESQVELLRFDDSGRKDSEVLKQNAVNSNQSNVVIEDFESSLTRSVPPLSQASLNIPGLPPEYLQVHLQESLGQEESQVSVTSADPVFQVPISKAVQLTTNDAIKTTLLVELDISNTDFSYQPGDAFSVICPNSDSEVQSLLQRLQLEDKREHCVLLKIKADTKKKGIFASPCGLYQ

SEQ ID NO: 57098 - protein, 2986 aa, Homo sapiens
MNPPEGAAEEGGAADSDVDAFFRTGSFRNDGLKASDVLPILKEKVAFVSGGRDKRGGPILTFPARSNHDRIRQEDLRKLVTYLASVPSEDVCKRGFTVIIDMRGSKWDLIKPLLKTLQEAFPAEIHVALIIKPDNFWQKQKTNFGSSKFIFETSMVSVEGLTKLVDPSQLTEEFDGSLDYNHEEWIELRLSLEEFFNSAVHLLSRLEDLQEMLARKEFPVDVEGSRRLIDEHTQLKKKVLKAPVEELDREGQRLLQCIRCSDGFSGRNCIPGSADFQSLVPKITSLLDKLHSTRQHLHQMWHVRKLKLDQCFQLRLFEQDAEKMFDWISHNKELFLQSHTEIGVSYQYALDLQTQHNHFAMNSMNAYVNINRIMSVASRLSEAGHYASQQIKQISTQLDQEWKSFAAALDERSTILAMSAVFHQKAEQFLSGVDAWCKMCSEGGLPSEMQDLELAIHHHQTLYEQVTQAYTEVSQDGKALLDVLQRPLSPGNSESLTATANYSKAVHQVLDVVHEVLHHQRRLESIWQHRKVRLHQRLQLCVFQQDVQQVLDWIENHGEAFLSKHTGVGKSLHRARALQKRHDDFEEVAQNTYTNADKLLEAAEQLAQTGECDPEEIYKAARHLEVRIQDFVRRVEQRKLLLDMSVSFHTHTKELWTWMEDLQKEMLEDVCADSVDAVQELIKQFQQQQTATLDATLNVIKEGEDLIQQLRSAPPSLGEPSEARDSAVSNNKTPHSSSISHIESVLQQLDDAQVQMEELFHERKIKLDIFLQLRIFEQYTIEVTAELDAWNEDLLRQMNDFNTEDLTLAEQRLQRHTERKLAMNNMTFEVIQQGQDLHQYITEVQASGIELICEKDIDLAAQVQELLEFLHEKQHELELNAEQTHKRLEQCLQLRHLQAEVKQVLGWIRNGESMLNASLVNASSLSEAEQLQREHEQFQLAIESLFHATSLQKTHQSALQVQQKAEVLLQAGHYDADAIRECAEKVALHWQQLMLKMEDRLKLVNASVAFYKTSEQVCSVLESLEQEYRRDEDWCGGRDKLGPAAEIDHVIPLISKHLEQKEAFLKACTLARRNAEVFLKYIHRNNVSMPSVASHTRGPEQQVKAILSELLQRENRVLHFWTLKKRRLDQCQQYVVFERSAKQALDWIQETGEFYLSTHTSTGETTEETQELLKEYGEFRVPAKQTKEKVKLLIQLADSFVEKGHIHATEIRKWVTTVDKHYRDFSLRMGKYRYSLEKALGVNTEDNKDLELDIIPASLSDREVKLRDANHEVNEEKRKSARKKEFIMAELLQTEKAYVRDLHECLETYLWEMTSGVEEIPPGILNKEHIIFGNIQEIYDFHNNIFLKELEKYEQLPEDVGHCFVTWADKFQMYVTYCKNKPDSNQLILEHAGTFFDEIQQRHGLANSISSYLIKPVQRITKYQLLLKELLTCCEEGKGELKDGLEVMLSVPKKANDAMHVSMLEGFDENLDVQGELILQDAFQVWDPKSLIRKGRERHLFLFEISLVFSKEIKDSSGHTKYVYKNKLLTSELGVTEHVEGDPCKFALWSGRTPSSDNKTVLKASNIETKQEWIKNIREVIQERIIHLKGALKEPLQLPKTPAKQRNNSKRDGVEDIDSQGDGSSQPDTISIASRTSQNTVDSDKLSGGCELTVVLQDFSAGHSSELTIQVGQTVELLERPSERPGWCLVRTTERSPPLEGLVPSSALCISHSRSSVEMDCFFPLVKDAYSHSSSENGGKSESVANLQAQPSLNSIHSSPGPKRSTNTLKKWLTSPVRRLNSGKADGNIKKQKKVRDGRKSFDLGSPKPGDETTPQGDSADESKKGWGEDEPDEESHTPLPPPMKIFDNDPTQDEMSSSLLAARQASTEVPTAADLVNAIEKLVKNKLSLEGSSYRGSLKDPAGCLNEGMAPPTPPKNPEEEQKAKALRGRMFVLNELVQTEKDYVKDLGIVVEGFMKRIEEKGVPEDMRGKDKIVFGNIHQIYDWHKDFFLAELEKCIQEQDRLAQLFIKHERKLHIYVWYCQNKPRSEYIVAEYDAYFEEVKQEINQRLTLSDFLIKPIQRITKYQLLLKDFLRYSEKAGLECSDIEKAVELMCLVPKRCNDMMNLGRLQGFEGTLTAQGKLLQQDTFYVIELDAGMQSRTKERRVFLFEQIVIFSELLRKGSLTPGYMFKRSIKMNYLVLEENVDNDPCKFALMNRETSERVVLQAANADIQQAWVQDINQVLETQRDFLNALQSPIEYQRKERSTAVMRSQPARLPQASPRPYSSVPAGSEKPPKGSSYNPPLPPLKISTSNGSPGFEYHQPGDKFEASKNDLGGCNGTSSMAVIKDYYALKENEICVSQGEVVQVLAVNQQNMCLVYQPASDHSPAAEGWVPGSILAPLTKATAAESSDGSIKKSCSWHTLRMRKRAEVENTGKNEATGPRKPKDILGNKVSVKETNSSEESECDDLDPNTSMEILNPNFIQEVAPEFLVPLVDVTCLLGDTVILQCKVCGRPKPTITWKGPDQNILDTDNSSATYTVSSCDSGEITLKICNLMPQDSGIYTCIATNDHGTTSTSATVKVQGVPAAPNRPIAQERSCTSVILRWLPPSSTGNCTISGYTVEYREEGSQIWQQSVASTLDTYLVIEDLSPGCPYQFRVSASNPWGISLPSEPSEFVRLPEYDAAADGATISWKENFDSAYTELNEIGRGRFSIVKKCIHKATRKDVAVKFVSKKMKKKEQAAHEAALLQHLQHPQYITLHDTYESPTSYILILELMDDGRLLDYLMNHDELMEEKVAFYIRDIMEALQYLHNCRVAHLDIKPENLLIDLRIPVPRVKLIDLEDAVQISGHFHIHHLLGNPEFAAPEVIQGIPVSLGTDIWSIGVLTYVMLSGVSPFLDESKEETCINVCRVDFSFPHEYFCGVSNAARDFINVILQEDFRRRPTAATCLQHPWLQPHNGSYSKIPLDTSRLACFIERRKHQNDVRPIPNVKSYIVNRVNQGT

SEQ ID NO: 57099 - protein, 327 aa, Homo sapiens
MMQNPQILAALQERLDGLVETPTGYIESLPRVVKRRVNALKNLQVKCAQIEAKFYEEVHDLERKYAVLYQPLFDKRFEIINAIYEPTEEECEWKPDEEDEISEELKEKAKIEDEKKDEEKEDPKGIPEFWLTVFKNVDLLSDMVQEHDEPILKHLKDIKVKFSDAGQPMSFVLEFHFEPNEYFTNEVLTKTYRMRSEPDDSDPFSFDGPEIMGCTGCQIDWKKGKNVTLKTIKKKQKHKGRGTVRTVTKTVSNDSFFNFFAPPEVPESGDLDDDAEAILAADFEIGHFLRERIIPRSVLYFTGEAIEDDDDDYDEEGEEADEVMFTK

SEQ ID NO: 57100 - protein, 1640 aa, Homo sapiens
  MOD_RES (1)..(1): Any amino acid
XPFVPTLKSDDDTSNFDEPEKNSWVSSSPCQLSPSGFSGEELPFVGFSYSKALGILGRSESVVSGLDSPAKTSSMEKKLLIKSKELQDSQDKCHKMEQEMTRLHRRVSEVEAVLSQKEVELKASETQRSLLEQDLATYITECSSLKRSLEQARMEVSQEDDKALQLLHDIREQSRKLQEIKEQEYQAQVEEMRLMMNQLEEDLVSARRRSDLYESELRESRLAAEEFKRKATECQHKLLKAKDQGKPEVGEYAKLEKINAEQQLKIQELQEKLEKAVKASTEATELLQNIRQAKERAERELEKLQNREDSSEGIRKKLVEAEELEEKHREAQVSAQHLEVHLKQKEQHYEEKIKVLDNQIKKDLADKETLENMMQRHEEEAHEKGKILSEQKAMINAMDSKIRSLEQRIVELSEANKLAANSSLFTQRNMKAQEEMISELRQQKFYLETQAGKLEAQNRKLEEQLEKISHQDHSDKNRLLELETRLREVSLEHEEQKLELKRQLTELQLSLQERESQLTALQAARAALESQLRQAKTELEETTAEAEEEIQALTAHRDEIQRKFDALRNSCTVITDLEEQLNQLTEDNAELNNQNFYLSKQLDEASGANDEIVQLRSEVDHLRREITEREMQLTSQKQTMEALKTTCTMLEEQVMDLEALNDELLEKERQWEAWRSVLGDEKSQFECRVRELQRMLDTEKQSRARADQRITESRQVVELAVKEHKAEILALQQALKEQKLKAESLSDKLNDLEKKHAMLEMNARSLQQKLETERELKQRLLEEQAKLQQQMDLQKNHIFRLTQGLQEALDRADLLKTERSDLEYQLENIQVLYSHEKVKMEGTISQQTKLIDFLQAKMDQPAKKKKVPLQYNELKLALEKEKARCAELEEALQKTRIELRSAREEAAHRKATDHPHPSTPATARQQIAMSAIVRSPEHQPSAMSLLAPPSSRRKESSTPEEFSRRLKERMHHNIPHRFNVGLNMRATKCAVCLDTVHFGRQASKCLECQVMCHPKCSTCLPATCGLPAEYATHFTEAFCRDKMNSPGLQTKEPSSSLHLEGWMKVPRNNKRGQQGWDRKYIVLEGSKVLIYDNEAREAGQRPVEEFELCLPDGDVSIHGAVGASELANTAKADVPYILKMESHPHTTCWPGRTLYLLAPSFPDKQRWVTALESVVAGGRVSREKAEADAKLLGNSLLKLEGDDRLDMNCTLPFSDQVVLVGTEEGLYALNVLKNSLTHVPGIGAVFQIYIIKDLEKLLMIAGEERALCLVDVKKVKQSLAQSHLPAQPDISPNIFEAVKGCHLFGAGKIENGLCICAAMPSKVVILRYNENLSKYCIRKEIETSEPCSCIHFTNYSILIGTNKFYEIDMKQYTLEEFLDKNDHSLAPAVFAASSNSFPVSIVQVNSAGQREEYLLCFHEFGVFVDSYGRRSRTDDLKWSRLPLAFAYREPYLFVTHFNSLEVIEIQARSSAGTPARAYLDIPNPRYLGPAISSGAIYLASSYQDKLRVICCKGNLVKESGTEHHRGPSTSRSSPNKRGPPTYNEHITKRVASSPAPPEGPSHPREPSTPHRYREGRTELRRDKSPGRPLEREKSPGRMLSTRRERSPGRLFEDSSRGRLPAGAVRTPLSQVNKVWDQSSV

SEQ ID NO: 57101 - protein, 175 aa, Homo sapiens
MTILTYPFKNLPTASKWALRFSIRPLSCSSQLRAAPAVQTKTKKTLAKPNIRNVVVVDGVRTPFLLSGTSYKDLMPHDLARAALTGLLHRTSVPKEVVDYIIFGTVIQEVKTSNVAREAALGAGFSDKTPAHTVTMACISANQAMTTGVGLIASGQCDVIVAGGVELMSDVPIRH

SEQ ID NO: 57102 - protein, 57 aa, Homo sapiens
MRLHYRYKEASGYFHTLRAVMRNPEEDGKDTLQCIAEMLQITKQAMGSDLPIIEKKL

SEQ ID NO: 57103 - protein, 111 aa, Homo sapiens
MSTEKVDQKEEAGEKEVCGDQIKGPDKEEVLMYGQPYRVTLELELPESPVNQDLGMFLVTISCYTRGGRIISTSSRSVMLHYRSDLLQMLDTLVFSSLLLFGFAEQKQLLE

SEQ ID NO: 57104 - protein, 90 aa, Homo sapiens
  MOD_RES (1)..(1): Any amino acid
XVVLDMDEGTLSFIVDGQYLGVAFRGLKGKKLYPVVSAVWGHCEVTMRYINGLDHGVSLGCPGQSAVARSRLTATSASRVQAILLPQLPE

SEQ ID NO: 57105 - protein, 208 aa, Homo sapiens
MTQGKLSVANKAPGTEGQQQVHGEKKEAPAVPSAPPSYEEATSGEGMKAGAFPPAPTAVPLHPSWAYVDPSSSSSYDNGFPTGDHELFTTFSWDDQKVRRVFVRKNPSHPQVYTILLIQLLVTLAVVALFTFCDPVKDYVQANPGWYWASYAVFFATYLTLACCSGPRRHFPWNLILLTVFTLSMAYLTGMLSSSTSPPARACSSCFS

SEQ ID NO: 57106 - protein, 12 aa, Homo sapiens
MTSPHFSSYDEG

SEQ ID NO: 57107 - protein, 41 aa, Homo sapiens
MGGRSSCEDPGCPRDEERAPRGNRCHELQSFQDVPLKMDCI

SEQ ID NO: 57108 - protein, 90 aa, Homo sapiens
  MOD_RES (1)..(1): Any amino acid
XRRRPTPATLVLTSDQSSPEIDEDRIPNPHLKSTLAMSPRQRKKMTRITPTMKETAECIPKTHERGSKEPSTKEPSTHIPPLDSKGANSV

SEQ ID NO: 57109 - protein, 165 aa, Homo sapiens
MLDLEVVPERSLGNEQWEFTLGMPLAQAVAILQKHCRIIKNVQVLYSEQVIEVCDLTKVKLKYCGVHFNSQAIAPTIEQIDQSFGATHPGVYNSAEQLFHLNFRGLSFSFQLDSWTEAPKYEPNFAHGLASLQIPHGATVKRMYIYSGNSLQDTKAPMMPLSCFL

SEQ ID NO: 57110 - protein, 186 aa, Homo sapiens
  MOD_RES (1)..(1): Any amino acid
XQSLAGRGQQTRWRTGQGVKKFNVKKSTEPVQPRALLKFPDIYGPRPAVTAPEVINYADYSLRSTEEPTAPASPQPPNDSRLKRQVTEELFILPQNGVVEDVCVMETWNPEKAASWNQAPKLHYCLDYDCQKAELFVTRLEAVTSNHDGGCDCYVQGSVANRTGSVEAQTALKKRQLHTTWEEGLV

SEQ ID NO: 57111 - protein, 116 aa, Homo sapiens
MLHHHCRRNPELQEELQIQAAVAAGDVHTVRKMLEQGYSPNGRDANGWTLLHFSAARGKERCVRVFLEHGGQPRNLQDLCRIKIRQCIGLQNLKLLDELPIAKVMKDYLKHKFDDI

SEQ ID NO: 57112 - protein, 161 aa, Homo sapiens
MFCVTPPELETKMNITKGGLVLFSANSNSSCMELSKKIAERLGVEMGKVQVYQEPNRETRVQIQESVRGKDVFIIQTVSKDVNTTIMELLIMVYACKTSCAKSIIGVIPYFPYSKQCKMRKRGSIVSKLLASMMCKADPRLQECSNRGQVSSLGEEGTVFC

SEQ ID NO: 57113 - protein, 330 aa, Homo sapiens
MANVLCNRARLVSYLPGFCSLVKRVVNPKAFSTAGSSGSDESHVAAAPPDICSRTVWPDETMGPFGPQDQRFQLPGNIGFDCHLNGTASQKKSLVHKTLPDVLAEPLSSERHEFVMAQYVNEFQGNDAPVEQEINSAETYFESARVECAIQTCPELLRKDFESLFPEVANGKLMILTVTQKTKNDMTVWSEEVEIEREVLLEKTESLSPRPECCGMISAHCNLCLPGSSNSSASASRFINGAKEICYALRAEGYWADFIDPSSGLAFFGPYTNNTLFETDERYRHLGFSVDDLGCCKVIRHSLWGTHVVVGSIFTNATPDSHIMKKLSGN

SEQ ID NO: 57114 - protein, 57 aa, Homo sapiens
  MOD_RES (1)..(1): Any amino acid
XLLEQAMIGPSPNPLILSYLKYAISSQMVSYSSVLTAINSTGFGEVEEVLSWRQGLH

SEQ ID NO: 57115 - protein, 520 aa, Homo sapiens
MAAVAVAVREDSGSGMKAESPWAWVGREMTKEEKLQLRKEKKQQKKKRKEEKGAEPETGSAVSAAQCQGPTRELPESGIQLGTPREKVPAGRSKAELRAERRAKQEAERALKQARKGEQGGPPPKASPSTAGETPSGVKRLPEYPQVDDLLLRRLVKKPERQQVPTRKDYGSKVSLFSHLPQYSRQNSLTQFMSIPSSVIHPAMVRLGLQYSQGLVSGSNARCIALLRALQQVIQDYTTPPNEELSRDLVNKLKPYMSFLTQCRPLSASMHNAIKFLNKEITSVGSSKREEEAKSELRAAIDRYVQEKIVLAAQAISRFAYQKISNGDVILVYGCSSLVSRILQEAWTEGRRFRVVVVDSRPWLEGRHTLRSLVHAGVPASYLLIPAASYVLPEVSKVLLGAHALLANGSVMSRVGTAQLALVARAHNVPVLVCCETYKFCERVQTDAFVSNELDDPDDLQCKRGEHVALANWQNHASLRLLNLVYDVTPPELVDLVITELGMIPCSSVPVVLRVKSSDQ

SEQ ID NO: 57116 - protein, 218 aa, Homo sapiens
MPLHKYPVWLWKRLQLREGICSRLPGHYLRSLEEERTPTPVHYRPHGAKFKINPKNGQRERVEDVPIPIYFPPESQRGLWGGEGWILGQIYANNDKLSKRLKKVWKPQLFEREFYSEILDKKFTVTVTMRTLDLIDEAYGLDFYILKTPKEDLCSKFGMDLKRGMLLRLARQDPQLHPEDPERRAAIYDKYKEFAIPEEEAEWVGLTLEEAIEKQRLL

SEQ ID NO: 57117 - protein, 602 aa, Homo sapiens
MVKLAKAGKNQGDPKKMAPPPKEVEEDSEDEEMSEDEEDDSSGEEVVIPQKKGKKAAATSAKKVVVSPTKKVAVATPAKKAAVTPGKKAAATPAKKTVTPAKAVTTPGKKGATPGKALVATPGKKGAAIPAKGAKNGKNAKKEDSDEEEDDDSEEDEEDDEDEDEDEDEIEPAAMKAAAAAPASEDEDDEDDEDDEDDDDDEEDDSEEEAMETTPAKGKKAAKVVPVKAKNVAEDEDEEEDDEDEDDDDDEDDEDDDDEDDEEEEEEEEEEPVKEAPGKRKKEMAKQKAAPEAKKQKVEGTEPTTAFNLFVGNLNFNKSAPELKTGISDVFAKNDLAVVDVRIGMTRKFGYVDFESAEDLEKALELTGLKVFGNEIKLEKPKGKDSKKERDARTLLAKNLPYKVTQDELKEVFEDAAEIRLVSKDGKSKGIAYIEFKTEADAEKTFEEKQGTEIDGRSISLYYTGEKGQNQDYRGGKNSTWSGESKTLVLSNLSYSATEETLQEVFEKATFIKVPQNQNGKSKGYAFIEFASFEDAKEALNSCNKREIEGRAIRLELQGPRGSPNARSLAVYGFAREEERIHRTSIILPSVFTEVWFCRLQQ

SEQ ID NO: 57118 - protein, 38 aa, Homo sapiens
MHLLGPWLLLLVNGFLSTLKPSTPGRGPASGSPAPTEP

SEQ ID NO: 57119 - protein, 331 aa, Homo sapiens
  MOD_RES (1)..(1): Any amino acid
XYQRLGLGTISGSSSRSRPEYFRITASNRMYSLCRSYPGLLVVPQAVQDSSLPRVARCYRHNRLPVVCWKNSRSGTLLLRSGGFHGKGVVGLFKSQNSPQAAPTSSLESSSSIEQEKYLQALLNAVSVHQKLRGNSTLTVRPAFALSPGTERRTSRMSTVLKQVVPGHLDVNPSNSFAQGGVWASLRSSTRLISSPTSFIDVGARLAGKDHSASFSNSSYLQNQLLKRQAALYIFGEKSQLRNFKVEFALNCEFVPVEFHEIRQVKASFKKLMRACIPSTIPTDSEVTFLKALGDSEWFPQLHRIMQLAVVVSEVLENGSSVLVCLEEGWD

SEQ ID NO: 57120 - protein, 250 aa, Homo sapiens
MRVRWMLFWLLFGLLLEFISHQCISVINTLADHHHRGTDFGGSPWLHVIIAFPTSYKVVITLWIVYLWVSLLKTIFWSRNGHDGSTDVQQRAWRSNRRRQEGNKIVLKDVITLRRHVETKVRAKIRKRKVTTKINHHDKINGKRKTARKQKMFQRAQELRRRAEDYHKCKIPPSARKALCNWVSLLVFLAFGHSLPGQDMDTFFSLQLCAQALQREMAERKAAYKHHSPIPVGNRVAQKHLHPHPVGPLI

SEQ ID NO: 57121 - protein, 60 aa, Homo sapiens
MMLDNYVRDFKALIDWIQLQEKLEKTDAQSRPTSLAWEVKKMSPGRHVIPSPSTDRINVT

SEQ ID NO: 57122 - protein, 452 aa, Homo sapiens
MYDNLYLHGIEDSEAGSADSYTSRPSDSDVSLEEDREAIRQEREQQAAIQLERAKKYNNDWWIGRLVKEGCEIGFIPSPLRLENIRIQQEQKRGRFHGGKSSGNSSSSLGEMVSGTFRATPTSTAKQKQKVTEHIPPYDVVPSMRPVVLVGPSLKGYEVTDMMQKALFDFLKHRFDGRISITRVTADISLAKRSVLNNPSKRAIIERSNTRSSLAEVQSEIERIFELARSLQLVVLDADTINHPAQLIKTSLAPIIVHVKVSSPKVHVFFYQVLQRLIKSRGKSQSKHLNVQLVAADKLAQCPPEMFDVILDENQLEDACEHLGEYLEAYWRATHTTSSTPMTPLLGRNLGSTALSPYPTAISGLQSQRMRHSNHSTENSPIERRSLMTSDENYHNERARKSRNRLSSSSQHSRDHYPLVEEDYPDSYQDTYKPHRNRGSPGGYSHDSRHRL

SEQ ID NO: 57123 - protein, 319 aa, Homo sapiens
MVKAIQVLRIHLLELEKVNELCKDFCSRYIACLKTKMNSETLLSGEPGSPYSPVQSQQIQSAITGTISPQGIVVPASALQQGNVAMATVAGGTVYQPVTVVTPQGQVVTQTLSPGTIRIQNSQLQLQLNQDLSILHQDDGSSKNKRGVLPKHATNVMRSWLFQHIGHPYPTEDEKKQIAAQTNLTLLQVNNWFINARRRILQPMLDSSCSETPKTKKKTAQNRPVQRFWPDSIASGVAQPPPSELTMSEGAVVTITTPVNMNVDSLQSLSSDGATLAVQQVMMAGQSEDESVDSTEEDAGALAPAHISGLVLENSDSLQ

SEQ ID NO: 57124 - protein, 59 aa, Homo sapiens
MADQRMDISSTISDFMSPGPTDLLSSSLGTSGVDCNRKRKGSSTDYQESMDTDKDDPHG

SEQ ID NO: 57125 - protein, 69 aa, Homo sapiens
MTVMSLSRDLKDDFHSDTVLSILNEQRIRGILCDVTIIVEDTKFKAHSNVLAASSLYFKNIFWSHTICI

SEQ ID NO: 57126 - protein, 187 aa, Homo sapiens
MAVVSAVRWLGLRSRLGQPLTGRRAGLCEQARSCRFYSGSATLSKVEGTDVTGIEEVVIPKKKTWDKVAVLQALASTVNRDTTAVPYVFQDDPYLMPASSLESRSFLLAKKSGENVAKFIINSYPKYFQKDIAEPHIPEPLCLLKQQIVSWIYCVTMVTRSPQLITIFNKLDSQKHWKRKMMRHLGG

SEQ ID NO: 57127 - protein, 109 aa, Homo sapiens
MADEIAKAQVARPGGDTIFGKIIRKEIPAKIIFEDDRCLAFHDISPQAPTHFLVIPKKHISQISVAEDDDESLTRCRKDSTEEIEMFDGMSLSLQMTASGSICHTPDPH

SEQ ID NO: 57128 - protein, 701 aa, Homo sapiens
MDPSAPQPRAETSGKDIWHPGERCLAPSPDNGKLCEASIKSITVDENGKSFAVVLYADFQERKIPLKQLQEVKFVKDCPRNLIFDDEDLEKPYFPNRKFPSSSVAFKLSDNGDSIPYTINRYLRDYQREGTRFLYGHYIHGGGCILGDDMGLGKTVQVISFLAAVLHKKGTREDIENNMPEFLLRSMKKEPLSSTAKKMFLIVAPLSVLYNWKDELDTWGYFRVTVLHGNRKDNELIRVKQRKCEIALTTYETLRLCLDELNSLEWSAVIVDEAHRIKNPKARVTEVMKALKCNVRIGLTGTILQNNMKELWCVMDWAVPGLLGSGTYFKKQFSDPVEHGQRHTATKRELATGRKAMQRLAKKMSGWFLRRTKTLIKDQLPKKEDRMVYCSLTDFQKAVYQTVLETEDVTLILQSSEPCTCRSGQKRRNCCYKTNSHGETVKTLYLSYLTVLQKVANHVALLQAASTSKQQETLIKRICDQVFSRFPDFVQKSKDAAFETLSDPKYSGKMKVLQQLLNHCRKNRDKVLLFSFSTKLLDVLQQYCMASGLDYRRLDGSTKSEERLKIVKEFNSTQDVNICLVSTMAGGLGLNFVGANVVVLFDPTWNPANDLQAIDRAYRIGQCRDVKVLRLISLGTVEEIMYLRQIYKQQLHCVVVGSENAKRYFEAVQGSKEHQGELFGIHNLFKFRSQGSCLTKDILEV

SEQ ID NO: 57129 - protein, 101 aa, Homo sapiens
  MOD_RES (1)..(1): Any amino acid
XLTIPSPDADLATSGTHTVTMVSADGTQTQPVTIITSGAVVAEDSSVASLRHQQVALLATANGTHIAVQVSRDLGGKGIPRPEKSTRNKGELDEDLEEKGI

SEQ ID NO: 57130 - protein, 48 aa, Homo sapiens
VNPMDLETIRKNISKHKYQSRESFLDDVNLILANSVKYNGYMCTTCRT

SEQ ID NO: 57131 - protein, 125 aa, Homo sapiens
MDQKILSLAAEKTADKLQEFLQTLREGDLTNLLQNQAVKGKVAGALLRAIFKGSPCSEEAGTLRRRKIYTCCIQLVESGDLQKEIASEIIGLLMLEAHHFPGPLLVELANEFISAVREGSLVNGK

SEQ ID NO: 57132 - protein, 221 aa, Homo sapiens
MLRLPTVFRQMRPVSRVLAPHLTRAYAKDVKFGADARALMLQGVDLLADAVAVTMGPKGRTVIIEQSWGSPKVTKDGVTVAKSIDLKDKYKNIGAKLVQDVANNTNEEAGDGTTTATVLARSIAKEGFEKISKGANPVEIRRGVMLAVDAVIAELKKQSKPVTTPEEIAQVATISANGDKEIGNIISDAMKKVGRKGVITVKDGKTLNDELEIIEGMKFDR

SEQ ID NO: 57133 - protein, 22 aa, Homo sapiens
MDNRQNVTPALIFAITVATIGS

SEQ ID NO: 57134 - protein, 712 aa, Homo sapiens
MIFHCEVDKIVDQLQQLMQVYDLAALRDYWSYLERRLFSRLEDIYRPTIHKLKTSLFRFYLVYTIQTNRNDKAQEFFAKQATELQNQAEWKDWFVLPFLPSPDTNPTFATYFSRQWADTFIVSLHNFLSVLFQCMPVPVILNFDAECQRTNQVQEENEVLRQKLFALQAEIHRLKKEEQQPEEEEALVQHKLPPYVSNMDRLGDSELAMVCSQRNASLSQSPRVGFLSSLLPQSKKSPSRLSPAQGPPQPQSSAKKESFGGQGTKGKDPTSGAKDGKSLLSGLATGESGWSQHRQRRLQDHGKERKELFSTTTSQCAEKKPEASGPEAEPCPELHTEPVEPLTRASSAGPEGGGVRPEQPFIVLGQEEYGEHHSSIMHCRVDCSGRRVASLDVDGVIKVWSFNPIMQTKASSISKSPLLSLEWATKRDRLLLLGSGVGTVRLYDTEAKKNLCEININDNMPRILSLACSPNGASFVCSAAAPSLTSQVDFSAPDIGSKGMNQVPGRLLLWDTKTMKQQLQFSLDPEPIAINCTAFNHNGNLLVTGAADGVIRLFDMQQHECAMSWRAHYGEVYSVEFSYDENTVYSIGEDGKFIQWNIHKSGLKVSEYSLPSDATGPFVLSGYSGYKQVQVPRGRLFAFDSEGNYMLTCSATGGVIYKLGGDEKVLESCLSLGGHRAPVVTVDWSTAMDCGTCLTASMDGKIKLTTLLAHKA

SEQ ID NO: 57135 - protein, 229 aa, Homo sapiens
MGSAVMDTKKKKDVSSPGGSGGKKNASQKRRSLRVHIPDLSSFAMPLLDGDLEGSGKHSSRKVDSPFGPGSPSKGFFSRGPQPRPSSPMSAPVRPKTSPGSPKTVFPFSYQESPPRSPRRMSFSGIFRSSSKESSPNSNPATSPGGIRFFSRSRKTSGLSSSPSTPTQVTKQHTFPLESYKHEPERLENRIYASSSPPDTGQRFCPSSFQSPTRPPLASPTHYAPSKAQ

SEQ ID NO: 57136 - protein, 492 aa, Homo sapiens
MLCDEKAQKRRKRKAKESGMALPQGHLTFRDVAIEFSQAEWKCLDPAQRALYKDVMLENYRNLVSLGSSYALGSNAEDKPIKKQLGVSFHLHLSELELFPDERVINGCNQVENFINHSSSVSCLQEMSSSVKTPIFNRNDFDDSSFLPQEQKVHLREKPYECNEHSKVFRVSSSLTKHQVIHTVEKPYKCNSCGKVFSRNSHLAEHCRIHTGEKPYKCNVCGKVFSYNSNFARHQRIHTREKPYECNECGKVFSNNSYLARHQRIHAEEKPYKCNECGKGFSHKSSLANHWRIYTGEKPYKCDECGKAFYRIALLVRHQKIHTGEKPYKCNECGKVFIQNSHLAQHWRIHTGEKPYKCNECGKVFNQLSNLARHRRIHTGEKPYKCNECGKAFSEYSGLSAHLVIHTGEKPYKCSECGKAFRHKLSLTNHQRIHTGERPYKCNECGKVFNRIAHLARHRKIHTGEKPYKCNECGKAFSRISYLAQHWTIHMG

SEQ ID NO: 57137 - protein, 160 aa, Homo sapiens
MAGPPRLLLLPLLLALARGLPGALAAQGRTFSVLLARLMVTAQVLPRGAAVSPLHDCPRGSLRQHHLLHQRGPAWDLPEAARATAPRHHLLRGRGGAHYGQTVPGPHRLLRVPGQPDYHHAPPAAVGHWHLHLPGHHGGQCLRLRHPGPGDRGTVPRMAQ

SEQ ID NO: 57138 - protein, 93 aa, Homo sapiens
MLKNHSGCREWRLSPRESAVGAGGGVHIEPRYRQFPQLTRSQVFQSEFFSGLMWFWILWRFWHDSEEVLGHFPYPDPSQWTDEELGIPPDDED

SEQ ID NO: 57139 - protein, 82 aa, Homo sapiens
MMLKLFIQLMESHSVAQTGVKWHDLGSLQPLPLEVKRFSCLGLRSSWDYRHTQPCPANFFCIFSRDGVSPCWPGWSRTPDLK

SEQ ID NO: 57140 - protein, 532 aa, Homo sapiens
MPERLAEMLLDLWTPLIILWITLPPCIYMAPMNQSQVLMSGSPLELNSLGEEQRILNRSKRGWVWNQMFVLEEFSGPEPILVGRLHTDLDPGSKKIKYILSGDGAGTIFQINDVTGDIHAIKRLDREEKAEYTLTAQAVDWETSKPLEPPSEFIIKVQDINDNAPEFLNGPYHATVPEMSILGTSVTNVTATDADDPVYGNSAKLVYSILEGQPYFSIEPETAIIKTALPNMDREAKEEYLVVIQAKDMGGHSGGLSGTTTLTVTLTDVNDNPPKFAQSLYHFSVPEDVVLGTAIGRVKANDQDIGENAQSSYDIIDGDGTALFEITSDAQAQDGIIRLRKPLDFETKKSYTLKVEAANVHIDPRFSGRGPFKDTATVKIVVEDADEPPVFSSPTYLLEVHENAALNSVIGQVTARDPDITSSPIRFSIDRHTDLERQFNINADDGKITLATPLDRELSVWHNITIIATEIRNHSQISRVPVAIKVLDVNDNAPEFASEYEAFLCENGKPGQVNISMLLMLNMFVYNCLIFD

SEQ ID NO: 57141 - protein, 935 aa, Homo sapiens
  MOD_RES (1)..(1): Any amino acid
XYVGHREPPPGAEAYIPQRYPDNRIVSSKYTFWNFIPKNLFEQFRRVANFYFLIIFLVQLIIDTPTSPVTSGLPLFFVITVTAIKQGYEDWLRHKADNAMNQCPVHFIQHGKLVRKQSRKLRVGDIVMVKEDETFPCDLIFLSSNRGDGTCHVTTASLDGESSHKTHYAVQDTKGFHTEEDIGGLHATIECEQPQPDLYKFVGRINVYSDLNDPVVRPLGSENLLLRGATLKNTEKIFGVAIYTGMETKMALNYQSKSQKRSAVEKSMNAFLIVYLCILISKALINTVLKYMWQSEPFRDEPWYNQKTESERQRNLFLKAFTDFLAFMVLFNYIIPVSMYVTVEMQKFLGSYFITWDEDMFDEETGEGPLVNTSDLNEELGQVEYIFTDKTGTLTENNMEFKECCIEGHVYVPHVICNGQVLPESSGIDMIDSSPSVNGREREELFFRALCLCHTVQVKDDDSVDGPRKSPDGGKSCVYISSSPDEVALVEGVQRLGFTYLRLKDNYMEILNRENHIERFELLEILSFDSVRRRMSVIVKSATGEIYLFCKGADSSIFPRVIEGKVDQIRARVERNAVEGLRTLCVAYKRLIQEEYEGICKLLQAAKVALQDREKKLAEAYEQIEKDLTLLGATAVEDRLQEKAADTIEALQKAGIKVWVLTGDKMETAAATCYACKLFRRNTQLLELTTKRIEEQSLHDVLFELSKTVLRHSGSLTRDNLSGLSADMQDYGLIIDGAALSLIMKPREDGSSGNYRELFLEICRSCSAVLCCRMAPLQKAQIVKLIKFSKEHPITLAIGDGANDVSMILEAHVGIGVIGKEGRQAARNSDYAIPKFKHLKKMLLVHGHFYYIRISELVQYFFYKNVCFIFPQFLYQFFCGFSQQTLYDTAYLTLYNISFTSLPILLYSLMEQHVGIDVLKRDPTLYRYHPPNSLS

SEQ ID NO: 57142 - protein, 1063 aa, Homo sapiens
MKAVRNLLIYIFSTYLLVMFGFNAAQDFWCSTLVKGVIYGSYSVSEMFPKNFTNCTWTLENPDPTKYSIYLKFSKKDLSCSNFSLLAYQFDHFSHEKIKDLLRKNHSIMQLCNSKNAFVFLQYDKNFIQIRRVFPTNFPGLQKKGEEDQKSFFEFLVLNKVSPSQFGCHVLCTWLESCLKSENGRTESCGIMYTKCTCPQHLGEWGIDDQSLILLNNVVLPLNEQTEGCLTQELQTTQVCNLTREAKRPPKEEFGMMGDHTIKSQRPRSVHEKRVPQEQADAAKFMAQTGESGVEEWSQWSTCSVTCGQGSQVRTRTCVSPYGTHCSGPLRESRVCNNTALCPVHGVWEEWSPWSLCSFTCGRGQRTRTRSCTPPQYGGRPCEGPETHHKPCNIALCPVDGQWQEWSSWSQCSVTCSNGTQQRSRQCTAAAHGGSECRGPWAESRECYNPECTANGQWNQWGHWSGCSKSCDGGWERRIRTCQGAVITGQQCEGTGEEVRRCNEQRCPAPYEICPEDYLMSMVWKRTPAGDLAFNQCPLNATGTTSRRCSLSLHGVAFWEQPSFARCISNEYRHLQHSIKEHLAKGQRMLAGDGMSQVTKTLLDLTQRKNFYAGDLLMSVEILRNVTDTFKRASYIPASDGVQNFFQIVSNLLDEENKEKWEDAQQIYPGSIELMQVIEDFIHIVGMGMMDFQNSYLMTGNVVASIQKLPAASVLTDINFPMKGRKGMVDWARNSEDRVVIPKSIFTPVSSKELDESSVFVLGAVLYKNLDLILPTLRNYTVINSKIIVVTIRPEPKTTDSFLEIELAHLANGTLNPYCVLWDDSKTNESLGTWSTQGCKTVLTDASHTKCLCDRLSTFAILAQQPREIIMESSGTPSVTLIVGSGLSCLALITLAVVYAALWRYIRSERSIILINFCLSIISSNILILVGQTQTHNKSICTTTTAFLHFFFLASFCWVLTEAWQSYMAVTGKIRTRLIRKRFLCLGWGLPALVVATSVGFTRTKGYGTDHYCWLSLEGGLLYAFVGPAAAVVLVNMVIGILVFNKLVSRDGILDKKLKHRAG

SEQ ID NO: 57143 - protein, 134 aa, Homo sapiens
MNLSESLLRGIYAYGFEKPSAIQQRAILPCIKGYDVIAQAQSGTGKTATFAISILQQIELDLKATQALVLAPTRELAQQIQKVVMALGDYMGASCHACIGGTNVRAEVQKLQMEAPHIIVGTPGRVFDMLNRRY

SEQ ID NO: 57144 - protein, 166 aa, Homo sapiens
MVTSSFPISVAVFALITLQVGTQDSFIAAVYEHAVILPNKTETPVSQEDALNLMNENIDILETAIKQAAEQGARIIVTPEDALYGWKFTRETVFPYLEDIPDPQVNWIPCQDPHRFGHTPVQARLSCLAKDNSIYVLANLGDKKPCNSRDSTCPPNGYFQYNTNVV

SEQ ID NO: 57145 - protein, 37 aa, Homo sapiens
MYWYNYEILKKWLCEKSGLYEPTFMINFTSGALSGSE

SEQ ID NO: 57146 - protein, 110 aa, Homo sapiens
MAAEPNKTEIQTLFKRLRAVPTNKACFDCGAKNPSWASITYGVFLCIDCSGVHRSLGVHLSFIRRLFFANMDAQPMMPTPNIIAELPRCTGRRSGSWGVRPWLGMALIFG

SEQ ID NO: 57147 - protein, 100 aa, Homo sapiens
  MOD_RES (1)..(1): Any amino acid
XFLEKNRDTLHGDIIQLVHSSRNKFIKQIFQADVAMFLCGYSSGTLRHSAAAAKGAETRKRSPTLSSQFKRSLELLMRTLGACQPFFVRCIKPNEFKKPM

SEQ ID NO: 57148 - protein, 1088 aa, Homo sapiens
MPCGFSPSPVAHHLVPGPPDTPAQQLRCGWTVGGWLLSLVRGLLPCLPPGARTAEGPIMVLAGPLAVSLLLPSLTLLVSHLSSSQDVSSEPSSEQQLCALSKHPTVAFEDLQPWVSNFTYPGARDFSQLALDPSGNQLIVGARNYLFRLSLANVSLLQATEWASSEDTRRSCQSKGKTEEECQNYVRVLIVAGRKVFMCGTNAFSPMCTSRQVGNLSRTIEKINGVARCPYDPRHNSTAVISSQGELYAATVIDFSGRDPAIYRSLGSGPPLRTAQYNSKWLNEPNFVAAYDIGLFAYFFLRENAVEHDCGRTVYSRVARVCKNDVGGRFLLEDTWTTFMKARLNCSRPGEVPFYYNELQSAFHLPEQDLIYGVFTTNVNSIAASAVCAFNLSAISQAFNGPFRYQENPRAAWLPIANPIPNFQCGTLPETGPNENLTERSLQDAQRLFLMSEAVQPVTPEPCVTQDSVRFSHLVVDLVQAKDTLYHVLYIGTESGTILKALSTASRSLHGCYLEELHVLPPGRREPLRSLRILHSARALFVGLRDGVLRVPLERCAAYRSQGACLGARDPYCGWDGKQQRCSTLEDSSNMSLWTQNITACPVRNVTRDGGFGPWSPWQPCEHLDGDNSGSCLCRARSCDSPRPRCGGLDCLGPAIHIANCSRNGAWTPWSSWALCSTSCGIGFQVRQRSCSNPAPRHGGRICVGKSREERFCNENTPCPVPIFWASWGSWSKCSSNCGGGMQSRRRACENGNSCLGCGVEFKTCNPEGCPEVRRNTPWTPWLPVNVTQGGARQEQRFRFTCRAPLADPHGLQFGRRRTETRTCPADGSGSCDTDALVEVLLRSGSTSPHTVSGGWAAWGPWSSCSRDCELGFRVRKRTCTNPEPRNGGLPCVGDAAEYQDCNPQACPVRGAWSCWTSWSPCSASCGGGHYQRTRSCTSPAPSPGEDICLGLHTEEALCATQACPEGWSPWSEWSKCTDDGAQSRSRHCEELLPGSSACAGNSSQSRPCPYSEIPVILPASSMEEATDCAGFNLIHLVATGISCFLGSGLLTLAVYLSCQHCQRQSQESTLVHPATPNHLHYKGGGTP

SEQ ID NO: 57149 - protein, 313 aa, Homo sapiens
MSTEGGFGGTSSSDAQQSLQSFWPRVMEEIRNLTVKDFRVQELPLARIKKIMKLDEDVKMISAEAPVLFAKAAQIFITELTLRAWIHTEDNKRRTLQRNDIAMAITKFDQFDFLIDIVPRDELKPPKRQEEVRQSVTPAEPVQYYFTLAQQPTAVQVQGQQQGQQTTSSTTTIQPGQIIIAQPQQGQTTPVTMQVGEGQQVQIVQAQPQGQAQQAQSGTGQTMQVMQQIITNTGEIQQIPETGLAVSLRLMKCSGLISAHCSFRLPGSSDSPASASRVAGIIGAAECRPAAVYPLSPACIRHSSCAGTDPDTC

SEQ ID NO: 57150 - protein, 316 aa, Homo sapiens
  MOD_RES (1)..(1): Any amino acid
XAVQRRSRLQRRQSFAVLRGAVLGLQDGGDNDDAAEASSEPTEKAPSEEELHGDQTDFGQGSQSPQKQEEQRQHLHLMVQLLRPQDDIRLAAQLEAPRPPRLRYLLVVSTREGEGLSQDETVLLGVDFPDSSSPSCTLGLVLPLWSDTQVYLDGDGGFSVTSGGQSRIFKPISIQTMWSSEQEQMEQAIRAELWKVLDVSDLESVTSKEIRQALELRLGLPLQQYRDFIDNQMLLLVAQRDRASRIFPHLYLGSEWNAANLEELQRNRVTHILNMAREIDNFYPERFTYHNVRLWDEESAQLLPHWKETHRFIEAA

SEQ ID NO: 57151 - protein, 1528 aa, Homo sapiens
NAVMEFLAGLRSRKVLKMWQFMDQSDIETMRSLKDAMAQHESSCEYRKVVTRALHIPGCKVVPFCGVFLKELCEVLDGASGLMKLCPRYNSQEETLEFVADYSGQDNFLQRVGQNGLKNSEKESTVNSIFQVIRSCNRSLETDEEDSPSEGNSSRKSSLKDKSRWQFIIGDLLDSDNDIFEQSKEYDSHGSEDSQKAFDHGTELIPWYVLSIQADVHQFLLQGATVIHYDQDTHLSARCFLQLQPDNSTLTWVKPTTASPASSKAKLGVLNNTAEPGKFPLLGNAGLSSLTEGVLDLFAVKAVYMGHPGIDIHTVCVQNKLGSMFLSETGVTLLYGLQTTDNRLLHFVAPKHTAKMLFSGLLELTRAVRKMRKFPDQRQQWLRKQYVSLYQEDGRYEGPTLAHAVELFGGRRWSARNPSPGTSAKNAEKPNMQRNNTLGISTTKKKKKILMRGESGEVTDDEMATRKAKMHKECRSRSGSDPQDINEQEESEVNAIANPPNPLPSRRAHSLTTAGSPNLAAGTSSPIRPVSSPVLSSSNKSPSSAWSSSSWHGRIKGGMKGFQSFMVSDSNMSFVEFVELFKSFSVRSRKDLKDLFDVYAVPCNRSGSESAPLYTNLTIDENTSDLQPDLDLLTRNVSDLGLFIKSKQQLSDNQRQISDAIAAASIVTNGTGIESTSLGIFGVGILQLNDFLVNCQGEHCTYDEILSIIQKFEPSISMCHQGLMSFEGFARFLMDKENFASKNDESQENIKELQLPLSYYYIESSHNTYLTGHQLKGESSVELYSQVLLQGCRSVELDCWDGDDGMPIIYHGHTLTTKIPFKEVVEAIDRSAFINSDLPIIISIENHCSLPQQRKMAEIFKTVFGEKLVTKFLFETDFSDDPMLPSPDQLRKKVLLKNKKLKAHQTPVDILKQKAHQLASMQVQAYNGGNANPRPANNEEEEDEEDEYDYDYESLSDDVLTASPAPNGQEDNILEDRPENKSCNDKLQFEYNEEIPKRIKKADNSACNKGKVYDMELGEEFYLDQNKKESRQIAPELSDLVIYCQAVKFPGLSTLNASGSSRGKERKSRKSIFGNNPGRMSPGETASFNKTSGKSSCEGIRQTWEESSSPLNPTTSLSAIIRTPKCYHISSLNENAAKRLCRRYSQKLTQHTACQLLRTYPAATRIDSSNPNPLMFWLHGIQLVALNYQTDDLPLHLNAAMFEANGGCGYVLKPPVLWDKNCPMYQKFSPLERDLDSMDPAVYSLTIVSGQNVCPSNSMGSPCIEVDVLGMPLDSCHFRTKPIHRNTLNPMWNEQFLFHVHFEDLVFLRFAVVENNSSAVTAQRIIPLKALKRGYRHLQLRNLHNEVLEISSLFINSRRMEENSSGNTMSASSMFNTEERKCLQTHRVTVHGVPGPEPFTVFTINGGTKAKQLLQQILTNEQDIKPVTTDYFLMEEKYFISKEKNECRKQPFQRAIGPEEEIMQILSSWFPEEGYMGRIVLKTQQENLEEKNIVQDDKEVILSSEEESFFVQVHDVSPEQPRTVIKAP

SEQ ID NO: 57152 - protein, 244 aa, Homo sapiens
MTRAIYADPTKRLELYFRPKDPYCHPVCANRFSTSSLLLRIRKRTRRQKGVLGTEAHSEVTFDMEILGIISTIYKFQGMSDFQYLAVHTEAGGKHTSMYDKVLMLRPEKEAFFHQELPLYIPPPIFSRLDAPVDYFYRPETQHREGYNNPPISGENLIGLSRARRPHNAIFVNFEDEEVPKQPLEAAAQTWRRVCTNPVDRKVEEELRKLFDIRPIWSRNAVKANISVHPDKLKVLLPFIAYYM

SEQ ID NO: 57153 - protein, 164 aa, Homo sapiens
MSSVAVLTQESFAEHRSGLVPQQIKVATLNSEEESDPPTYKDAFPPLPEKAACLESAQEPAGAWGNKIRPIKASVITQVFHVPLEERKYKDMNQFGEGEQAKICLEIMQRTGAHLELSLAKDQGLSIMVSGKLDAVMKARKDIVARLQTQASATVAIPKEHHRF

SEQ ID NO: 57154 - protein, 209 aa, Homo sapiens
MVSKSRWKLLAMLALVLVVMVWYSISREDRYIELFYFPIPEKKEPCLQGEAESKASKLFGNYSRDQPIFLRLEDYFWVKTPSAYELPYGTKGSEDLLLRVLAITSSSIPKNIQSLRCRRCVVVGNGHRLRNSSLGDAINKYDVVIRLNNAPVAGYEGDVGSKTTMRLFYPESAHFDPKVENNPDTLLVLVAFKAMDFHWIETILSDKKR

SEQ ID NO: 57155 - protein, 223 aa, Homo sapiens
MALLCLDGVFLSSAENDFVHRIQEELDRFLLQKQLSKVLLFPPLSSRLRYLIHRTAENFDLLSSFSVGEGWKRRTVICHQDIRVPSSDGLSGPCRAPASCPSRYHGPRPISNQGAAAVPRGARAGRWYRGRKPDQPLYVPRVLRRQEEWGLTSTSVLKREAPAGRDPEEPGDVGAGDPNSDQGLPVLMTQGTEDLKGPGQRCENEPLLDPVGPEPLGPESQSG

SEQ ID NO: 57156 - protein, 130 aa, Homo sapiens
  MOD_RES (1)..(1): Any amino acid
XMGLESRVRGLAAENQELRAENRELGKRVQALQEESRYLRAVLANETGLARLLSRLSGVGLRLTTSLFRDSPAGDHDYALPVGKQKQDLLEEDDSAGGVCLHVDKDKVSVEFCSACARKASSSLKIFFFR

SEQ ID NO: 57157 - protein, 182 aa, Homo sapiens
MQAWRKGPDGPQKTSSDSMSRLMDSDMDYERPNVETIKCVVVGDNAVGKTRLICARACNATLTQYQLLATHVPTVWAIDQYRVCQEVLERSRDVVDDVSVSLRLWDTFGDHHKDRRFAYGRSDVVVLCFSIANPNSLHHVKTMWYPEIKHFCPRAPVILVGCQLDLRYADLEAVNRARRPLA

SEQ ID NO: 57158 - protein, 309 aa, Homo sapiens
  MOD_RES (1)..(1): Any amino acid
XPGQLFVGSTQRFFQGGLPSFLRCNHSIQYNAARGPQPQLVQHLRASAISSAFDPEAEALRFQLATALQAEENEVGCPEGFELDSQGAFCVDVDECAWDAHLCREGQRCVNLLGSYRCLPDCGPGFRVADGAGCEDVDECLEGLDDCHYNQLCENTPGGHRCSCPRGYRMQGPSLPCLDVNECLQLPKACAYQCHNLQGSYRCLCPPGQTLLRDGKACTSLERNGQNVTTVSHRGPLLPWLRPWASIPGTSYHAWVSLRPGPMALSSVGRAWCPPGFIRQNGVCTDLDECRVRNLCQHACRNTEGSYQC

SEQ ID NO: 57159 - protein, 123 aa, Homo sapiens
MCGRAALQPAWRTSWRTWSGACWACRRGGACSPTAAAPSPTPTSPSRCCCAAAPPPTCATCCCPACSSRCLRRSPSTCLPTQARRCRWASPCCWRSPSSSCCWPRACHRPRACRSSGSTTWPL

SEQ ID NO: 57160 - protein, 94 aa, Homo sapiens
MEEGARHRNNTEKKHPGGGESDASPEAGSGGGGVALKKEIGLVSACGIIVGNIIGSGIFVSPKGVLENAGSVGLALIVWIVTGFITVVGALCYA

SEQ ID NO: 57161 - protein, 72 aa, Homo sapiens
MASVSALTEELDSITSELHAVEIQIQELTERQQELIQKKKVLTKKIKQCLEDSDAGASNEYDSSPAAWNKED

SEQ ID NO: 57162 - protein, 20 aa, Homo sapiens
  MOD_RES (1)..(1): Any amino acid
XMTTCSTGTCSNLLLSRLKI

SEQ ID NO: 57163 - protein, 77 aa, Homo sapiens
MTEEACRTRSQKRALERDPTEDDVESKKIKMERGLLASDLNTDGDMRVTPEPGAGPTQGLLRATEATAMAMGRGEGL

SEQ ID NO: 57164 - protein, 219 aa, Homo sapiens
MAELQEVQITEEKPLLPGQTPEAAKEAELAARILLDQGQTHSVETPYGSVTFTVYGTPKPKRPAILTYHDVGLNYKSCFQPLFQFEDMQEIIQNFVRVHVDAPGMEEGAPVFPLGYQYPSLDQLADMIPCVLQYLNFSTIIGVGVGAGAYILARYALNHPDTVEGLVLINIDPNAKGWMDWAAHKLTGLTSSIPEMILGHLFSQEELSGNSELIQKYRN

SEQ ID NO: 57165 - protein, 164 aa, Homo sapiens
MNNYLFGERLLECHFMPPEKVHKELFKDWNIPFKQPSYPSVKRYNRNRTLTQKLRMEERFKKKERLLRKKLAKKGIDYDFPSLILQKTESISKTNRQTSTKGQVLRKKKKKVSGTLDTPEKTVDSQGPTPVCTPTFLERRKSQVAELNDDDKDDEIVFKQPISC

SEQ ID NO: 57166 - protein, 64 aa, Homo sapiens
MQPLEVGLVPAPAGEPRLTRWLRRGSGILAHLVALGFTIFLTALSRPGTSLFSWHPVFMALADV

SEQ ID NO: 57167 - protein, 532 aa, Homo sapiens
MAFANLRKVLISDSLDPCCRKILQDGGLQVVEKQNLSKEELIAELQDCEGLIVRSATKVTADVINAAEKLQVVGRAGTGVDNVDLEAATRKGILVMNTPNGNSLSAAELTCGMIMCLARQIPQATASMKDGKWERKKFMGTELNGKTLGILGLGRIGREVATRMQSFGMKTIGYDPIISPEVSASFGVQQLPLEEIWPLCDFITVHTPLLPSTTGLLNDNTFAQCKKGVRVVNCARGGIVDEGALLRALQSGQCAGAALDVFTEEPPRDRALVDHENVISCPHLGASTKEAQSRCGEEIAVQFVDMVKGKSLTGVVNAQALTSAFSPHTKPWIGLAEALGTLMRAWAGSPKGTIQVITQGTSLKNAGNCLSPAVIVGLLKEASKQADVNLVNAKLLVKEAGLNVTTSHSPAAPGEQGFGECLLAVALAGAPYQAVGLVQGTTPVLQGLNGAVFRPEVPLRRDLPLLLFRTQTSDPAMLPTMIGVSSISRPPGRGRRAAAVLPDFTGVRWGDLARHGHLLLAAQPGSVEAACD

SEQ ID NO: 57168 - protein, 191 aa, Homo sapiens
GKKERSQVDQLLNISLREEELSKSLQCMDNNLLQARAALQTAYVEVQRLLMLKQQITMEMSALRTHRIQILQGLQETYEPSEHPDQVPCSLTRERRNSRSQTSIDAALLPTPFFPLFLEPPSSHVSPSPTGASLQITTSPTFQTHGSVPAPDSSVQIKQEPMSPEQDENVNAVPPSSACNVSKELLEANSM

SEQ ID NO: 57169 - protein, 49 aa, Homo sapiens
MLRVLCLLRPWRPLRARGCASDGAAGGSEIQVRALAGPDQGCRFHEDRP

SEQ ID NO: 57170 - protein, 68 aa, Homo sapiens
MGHSKQIRILLLNEMEKLEKTLFRLEQETGSHYVAQVDIELLDSSNPPSLASESTGITSISHRAWPQF

SEQ ID NO: 57171 - protein, 95 aa, Homo sapiens
MIPVAEFKQFTEQQPAFKVLKPWWDVLAEYLTVAMLMIGVFGCTLQVTQDKIICLPNHELQENLSEAPCQQLLPRGIPEQIGALQEVKGLKNNLD

SEQ ID NO: 57172 - protein, 297 aa, Homo sapiens
  MOD_RES (1)..(1): Any amino acid
XQASRPTRSPSGSGSRSRSSSSDSISSSSSTSSDSDSSSSSSDDSPARSVQSAAVPAPTSQLLSSLEKDEPRKSFGIKVQNLPVRSTDTSLKDGLFHEFKKFGKVTSVQIHGTSEERYGLVFFRQQEDQEKALTASKGKLFFGMQIEVTAWIGPETESENEFRPLDERIDEFHPKATRTLFIGNLEKTTTYHDLRNIFQRFGEIVDIDIKKVNGVPQYAFLQYCDIASVCKAIKKMDGEYLGNNRLKLGFGKSMPTNCVWLDGLSSNVSDQYLTRHFCRYGPVVKVVFDRLKGMALV

SEQ ID NO: 57173 - protein, 151 aa, Homo sapiens
MLIKEYHILLPMSLDEYQVAQLYMIQKKSREESSGEGSGVEILANRPYTDGPGGSGQYTHKVYHVGSHIPGWFRALLPKAALQVEEESWNAYPYTRTRYTCPFVEKFSIEIETYYLPDGGQQPNVFNLSGAERRQRILDTIDIVRDAVAPG

SEQ ID NO: 57174 - protein, 206 aa, Homo sapiens
  MOD_RES (1)..(1): Any amino acid
XAKPGWKNSIRHNLSLHDMFVRETSANGKVSFWTIHPSANRYLTLDQVFKPLDPGSPQLPEHLESQQQKRPNPELRRNMTIKTELPLGARRKMKPLLPRVSSYLVPIQFPVNQSLVLQPSVKVPLPLAASLMSSELARHSKRVRIAPKVLLAEEGIAPLSSAGPGKEEKLLFGEGFSPLLPVQTIKEEEIQPGEEMPHLARPIKVE

SEQ ID NO: 57175 - protein, 64 aa, Homo sapiens
MKVDLSPKDKKVELFHYQDGAFHTEYNRAVTFKSIVAFLKDPKGPPLWEEDPGAKDVVHLDSEK

SEQ ID NO: 57176 - protein, 52 aa, Homo sapiens
  MOD_RES (1)..(1): Any amino acid
XYMFLVKWQDLSEKVVYRRFTEIYEFHLPSGLTGSGPPRTARAHLPSTAARS

SEQ ID NO: 57177 - protein, 676 aa, Homo sapiens
MMQESGTETKSNGSAIQNGSGGSNHLLECGGLREGRSNGETPAVDIGAADLAHAQQQQQQALQVARQLLLQQQQQQQVSGLKSPKRNDKQPALQVPVSVAMMTPQVITPQQMQQILQQQVLSPQQLQVLLQQQQALMLQQQLQEFYKKQQEQLQLQLLQQQHAGKQPKEQQQVATQQLAFQQQLLQMQQLQQQHLLSLQRQGLLTIQPGQPALPLQPLAQGMIPTELQQLWKEVTSAHTAEETTGNNHSSLDLTTTCVSSSAPSKTSLIMNPHASTNGQLSVHTPKRESLSHEEHPHSHPLYGHGVCKWPGCEAVCEDFQSFLKHLNSEHALDDRSTAQCRVQMQVVQQLELQLAKDKERLQAMMTHLHVKSTEPKAAPQPLNLVSSVTLSKSASEASPQSLPHTPTTPTAPLTPVTQGPSVITTTSMHTVGPIRRRYSDKYNVPISSADIAQNQEFYKNAEVRPPFTYASLIRQAILESPEKQLTLNEIYNWFTRMFAYFRRNAATWKNAVRHNLSLHKCFVRVENVKGAVWTVDEVEFQKRRPQKISGNPSLIKNMQSSHAYCTPLNAALQASMAENSIPLYTTASMGNPTLGNLASAIREELNGAMEHTNSNESDSSPGRSPMQAVHPVHVKEEPLDPEEAEGPLSLVTTANHSPDFDHDRDYEDEPVNEDME

SEQ ID NO: 57178 - protein, 205 aa, Homo sapiens
MHRNFRKWIFYVFLCFGVLYVKLGALSSVVALGANIICNKIPGLAPRQRAICQSRPDAIIVIGEGAQMGINECQYQFRFGRWNCSALGEKTVFGQELRVGSREAAFTYAITAAGVAHAVTAACSQGNLSNCGCDREKQGYYNQAEGWKWGGCSADVRYGIDFSRRFVDAREIKKNARRLMNLHNNEAGRKGLLGQPRVTSSPLFP

SEQ ID NO: 57179 - protein, 78 aa, Homo sapiens
MTTGDCCHLPGSLCDCSGSPAFSKVVEATGLGPPQYVAQVTSRDGRLLSTVIRALDTPSDGPFCRICHEGANGECLLS

SEQ ID NO: 57180 - protein, 53 aa, Homo sapiens
MQRNASVPNLRGSEERLLALKKPALPALSRTTELQDELSHLRSQIAKIVAADA

SEQ ID NO: 57181 - protein, 938 aa, Homo sapiens
VGEQISKVIITKTDVDSDSWSEIREDDEAFEARVKEEEQKIFGLMVDRQSQGTTPDTTPARTPTEEGTPTSEQNPFLFQEGKLFEMTRSGAIDMTKRSYADESFHFFQIGQESREETLSEDVKEGATGADPLPLETSAESLALSESKETVDDEADLLPDDVSEEVEEIPASDAQLNSQMGISASTETPTKEAVSVGTKDLPTVQTGDIPPLSGVKQISCPDSSEPAVQVQLDFSTLTRSVYSDRGDDSPDSSPEEQKSVIEIPTAPMENVPFTESKSKIPVRTMPTSTPAPPSAEYESSVSEDFLSSVDEENKADEAKPKSKLPVKVPLQRVEQQLSDLDTSVQKTVAPQGQDMASIAPDNRSKSESDASSLDSKTKCPVKTRSYTETETESRERAEELELESEEGATRPKILTSRLPVKSRSTTSSCRGGTSPTKESKEHFFDLYRNSIEFFEEISDEASKLVDRLTQSEREQEIVSDDESSSALEVSVIENLPPVETEHSVPEDIFDTRPIWDESIETLIERIPDENGHDHAEDPQDEQERIEERLAYIADHLGFSWTELARELDFTEEQIHQIRIENPNSLQDQSHALLKYWLERDGKHATDTNLVECLTKINRMDIVHLMETNTEPLQERISHSYAEIEQTITLDHSEGFSVLQEELCTAQHKQKEEQAVSKESETCDHPPIVSEEDISVGYSTFQDGVPKTEGDSSATALFPQTHKEQVQQDFSGKMQDLPEESSLEYQQEYFVTTPGTETSETQKAMIVPSSPSKTPEEVSTPAEEEKLYLQTPTSSERGGSPIIQEPEEPSEHREESSPRKTSLVIVESADNQPETCERLDEDAAFEKGDDMPEIPPETVTEEEYIDEHGHTVVKKVTRKIIRRYVSSEGTEKEEIMVQGMPQEPVNIEEGDGYSKVIKRVVLKSDTEQSEVRQPDSLKPI

SEQ ID NO: 57182 - protein, 213 aa, Homo sapiens
  MOD_RES (1)..(1): Any amino acid
XLSAKTLGTVTPRKPVLSVSARKIKDNAADWHNLILKWETLNDAGFTTANNIANLKISLLNKDKIELDSSSPASKENEEKVCLEYNEELEKLCEELQATLDGLTKIQVKMEKLSSTTKGICELENYHYGEESKRPPLFHTWPTTHFYEVSHKLLEMYRKELLLKRTVAKELAHTGDPDLTLSYLSMWLHQPYVESDSRLHLESMLLETGHRAL

SEQ ID NO: 57183 - protein, 100 aa, Homo sapiens
MPQTRSQAQATISFPKRKLSRALNKAKNSSDAKLEPTNVQTVTCSPRVKALPLSPRKRLGDDNLCNTPHLPPCSPPKQGKKENGPPHSHTLKGRRLVFDN

SEQ ID NO: 57184 - protein, 202 aa, Homo sapiens
MFEAIFPSTPQARLKRDPREKPGLSSFRSTFRQQSSLGLCIPRLMLPKEASPSQRHSSMSSSMARALVLLQSMASRDARCPEWKPHQKPRTLSKSVQTISRYYRKTSEPKDAASLTGFMSKMELRRVFPTHPDCPQFSTRATSMSHCGSPTEADLSGEIDNSSETWRGTQDLFLARRGSDTNVDVRASASSITCGRGENPRL

SEQ ID NO: 57185 - protein, 578 aa, Homo sapiens
MSQEGDYGRWTISSSDESEEEKPKPDKPSTSSLLCARQGAANEPRYTCSEAQKAAHKRKISPVKFSNTDSVLPPKRQKSGSQEDLGWCLSSSDDELQPEMPQKQAEKVVIKKEKDISAPNDGTAQRTENHGAPACHRLKEEEDEYETSGEGQDIWDMLDKGNPFQFYLTRVSGVKPKYNSGALHIKDILSPLFGTLVSSAQFNYCFDVDWLVKQYPPEFRKKPILLVHGDKREAKAHLHAQAKPYENISLCQAKLDIAFGTHHTKMMLLLYEEGLRVVIHTSNLIHADWHQKTQGIWLSPLYPRIADGTHKSGESPTHFKADLISYLMAYNAPSLKEWIDVIHKHDLSETNVYLIGSTPGRFQGSQKDNWGHFRLKKLLKDHASSMPNAESWPVVGQFSSVGSLGADESKWLCSEFKESMLTLGKESKTPGKSSVPLYLIYPSVENVRTSLEGYPAGGSLPYSIQTAEKQNWLHSYFHKWSAETSGRSNAMPHIKTYMRPSPDFSKIAWFLVTSANLSKAAWGALEKNGTQLMIRSYELGVLFLPSAFIGHGYGTFLMSKHRIRMGTCGCPPENLEAL

SEQ ID NO: 57186 - protein, 632 aa, Homo sapiens
MTPALTALLCLGLSLGPRTRMQAGPFPKPTLWAEPGSVISWGSPVTIWCQGSLEAQEYQLDKEGSPEPWDRNNPLEPKNKARFSIPSMTQHHAGRYRCHYYSSAGWSEPSDPLELVMTGFYNKPTLSALPSPVVASGGNMTLRCGSQKGYHHFVLMKEGEHQLPRTLDSQQLHSGGFQALFPVGPVTPSHRWRFTCYYYYTNTPWVWSHPSDPLEILPSGVSRKPSLLTLQGPVLAPGQSLTLQCGSDVGYDRFVLYKEGERDFLQRPGQQPQAGLSQANFTLGPVSRSYGGQYRCYGAHNLSSEWSAPSDPLDILITGQIYDTVSLSAQPGPTVASGENVTLLCQSRGYFDTFLLTKEGAAHPPLRLRSMYGAHKYQAEFPMSPVTSAHAGTYRCYGSRSSNPHLLSFPSEPLELMVSGHSGGSSLPPTGPPSTPGLGRYLEVLIGVSVAFVLLLFLLLFLLLRRQRHSKHRTSDQRKTDFQRPAGAAETEPKDRGLLRRSSPAADVQEENLYAAVKDTQSEDRVELDSQQSPHDEDPQAVTYAPVKHSSPRREMASPPSSLSGEFLDTKDRQVEEDRQMDTEAAASEASQDVTYAQLHSLTLRRKATEPPPSQEGEPPAEPSIYATLAIH

SEQ ID NO: 57187 - protein, 347 aa, Homo sapiens
VLQARVRQLQAESVSEVVVNRVDVARLPECGSGDGSLQPPRKVQMGAKDATPVPCGRWAKILEKDKRTQQMRMQRLKAKLQMPFQSGEFKALTRRLQVEPRLLSKQMAGCLEDCTRQAPESPWEEQLARLLQEAPGKLSLDVEQAPSGQHSQAQLSGQQQRLLAFFKCCLLTDQLPLAHHLLVVHHGQRQKRKLLTLDMYNAVMLGWARQDAGLTPDLLSYAAALQCMGRQDQDAGTIERCLEQMSQEGLKLQALFTAVLLSEEDRATVLKAVHKVKPTFSLPPQLPPPVNTSKLLRDVYAKDGRVSYPKLHLPLKTLQCLFEKQLHMELASRVCVVSVEKPTLPSK

SEQ ID NO: 57188 - protein, 892 aa, Homo sapiens
MATCIGEKIEDFKVGNLLGKGSFAGVYRAESIHTGLEVAIKMIDKKAMYKAGMVQRVQNEVKIHCQLKHPSILELYNYFEDSNYVYLVLEMCHNGEMNRYLKNRVKPFSENEARHFMHQIITGMLYLHSHGILHRDLTLSNLLLTRNMNIKIADFGLATQLKMPHEKHYTLCGTPNYISPEIATRSAHGLESDVWSLGCMFYTLLIGRPPFDTDTVKNTLNKVVLADYEMPSFLSIEAKDLIHQLLRRNPADRLSLSSVLDHPFMSRNSSTKSKDLGTVEDSIDSGHATISTAITASSSTSISGSLFDKRRLLIGQPLPNKMTVFPKNKSSTDFSSSGDGNSFYTQWGNQETSNSGRGRVIQDAEERPHSRYLRRAYSSDRSGTSNSQSQAKTYTMERCHSAEMLSVSKRSGGGENEERYSPTDNNANIFNFFKEKTSSSSGSFERPDNNQALSNHLCPGKTPFPFADPTPQTETVQQWFGNLQINDPLSEQSKTRGMEPPWGYQNRTLRSITSPLVAHRLKPIRQKTKKAVVSILDSEEVCVELVKEYASQEYVKEVLQISSDGNTITIYYPNGGRGFPLADRPPSPTDNISRYSFDNLPEKYWRKYQYASRFVQLVRSKSPKITYFTRYAKCILMENSPGADFEVWFYDGVKIHKTEDFIQVIEKTGKSYTLKSESEVNSLKEEIKMYMDHANEGHRICLALESIISEEERKTRSAPFFPIIIGRKPGSTSSPKALSPPPSVDSNYPTRERASFNRMVMHSAASPTQAPILNPSMVTNEGLGLTTTASGTDISSNSLKDCLPKSAQLLKSVFVKNVGWATQLTSGAVWVQFNDGSQLVVQAGVSSISYTSPNGQTTRYGENEKLPDYIKQKLQCLSSILLMFSNPTPNFH

SEQ ID NO: 57189 - protein, 549 aa, Homo sapiens
MAHTFRGCSLAFMFIITWLLIKAKIDACKRGDVTVKPSHVILLGSTVNITCSLKPRQGCFHYSRRNKLILYKFDRRINFHHGHSLNSQVTGLPLGTTLFVCKLACINSDEIQICGAEIFVGVAPEQPQNLSCIQKGEQGTVACTWERGRDTHLYTEYTLQLSGPKNLTWQKQCKDIYCDYLDFGINLTPESPESNFTAKVTAVNSLGSSSSLPSTFTFLDIVRPLPPWDIRIKFQKASVSRCTLYWRDEGLVLLNRLRYRPSNSRLWNMVNVTKAKGRHDLLDLKPFTEYEFQISSKLHLYKGSWSDWSESLRAQTPEEEPTGMLDVWYMKRHIDYSRQQISLFWKNLSVSEARGKILHYQVTLQELTGGKAMTQNITGHTSWTTVIPRTGNWAVAVSAANSKGSSLPTRINIMNLCEAGLLAPRQVSANSEGMDNILVTWQPPRKDPSAVQEYVVEWRELHPGGDTQVPLNWLRSRPYNVSALISEIPYRVSQNSHPINSLQPRVTYVLWMTALTAAGESSHGNEREFCLQGEDTAALGQAPDRLAHA

SEQ ID NO: 57190 - protein, 276 aa, Homo sapiens
MVLCLAQTIHTQEDLPRPSISAEPGTVIPLGSHVTFVCRGPVGVQTFRLERESRSTYNDTEDVSQASPSESEARFRIDSVSEGNAGPYRCIYYKPPKWSEQSDYLELLVKETSGGPDSPDTEPGSSAGPTQRPSDNSHNEHAPASQGLKAEHLYILIGVSVVFLFCLLLLVLFCLHRQNQIKQGPPRSKDEEQKPQQRPDLAVDVLERTADKATVNGLPEKDRETDTSALAAGSSQEVTYAQLDHWALTQRTARAVSPQSTKPMAESITYAAVARH

SEQ ID NO: 57191 - protein, 100 aa, Homo sapiens
MSVTLTSVKRVQSSPNLLAAGRDSQSPDSAKGFRSVRPNLQDKRSPTQSQITVNGNSGGAVSPMSYYQRPFSPSAYSLPASLNSSIVMQHGTSLDSTDTY

SEQ ID NO: 57192 - protein, 63 aa, Homo sapiens
MARLLQASCLLSLLLAGFVSQSRGQEKSKAPRQMGNPQVRETSCTPFAAPSAAGTPPPTVVVS

SEQ ID NO: 57193 - protein, 84 aa, Homo sapiens
MLIKVKTLTGKEIEIDIEPTDKVERIKERVEEKEGIPPQQQRLIYSGKQMNDEKTAADYKILVMELYEIGGAKTSDCTQRCLRS

SEQ ID NO: 57194 - protein, 162 aa, Homo sapiens
MGIKFLEVIKPFCAVLPEIQKPERKIQFREKVLWTAITLFIFLVCCQIPLFGIMSSDSADPFYWMRVILASNRGTLMELGISPIVTSGLIMQLLAGAKIIEVGDTPKDRALFNGAQKLFGMIITIGQAIVYVMTGMYGDPAEMGAGICLLIIIQVLSLRVQS

SEQ ID NO: 57195 - protein, 961 aa, Homo sapiens
MSGPGNKRAAGDGGSGPPEKKLSREEKTTTTLIEPIRLGGISSTEEMDLKVLQFKNKKLAERLEQRQACEDELRERIEKLEKRQATDDATLLIVNRYWAQLDETVEALLRCHESQGELSSAPEAPGTQEGPTCDGTPLPEPGTSELRDPLLMQLRPPLSEPALAFVVALGASSSEEVELELQGRMEFSKAAVSRVVEASDRLQRRVEELCQRVYSRGDSEPLSEAAQAHTRELGRENRRLQDLATQLQEKHHRISLEYSELQDKVTSAETKVLEMETTVEDLQWDIEKLRKREQKLNKHLAEALEQLNSGYYVSGSSSGFQGGQITLSMQKVALRSLPEEVVRETGEYRMLQAQFSLLYNESLQVKTQLDEARGLLLATKNSHLRHIEHMESDELGLQKKLRTEVIQLEDTLAQVRKEYEMLRIEFEQNLAANEQAGPINREMRHLISSLQNHNHQLKGDAQRYKRKLREVQAEIGKLRAQASGSAHSTPNLGHPEDSGVSAPAPGKEEGGPGPVSTPDNRKEMAPVPGTTTTTTSVKKEELVPSEEDFQGITPGAQGPSSRGREPEARPKRELREREGPSLGPPPVASALSRADREKAKVEETKRKESELLKGLRAELKKAQESQKEMKLLLDMYKSAPKEQRDKVQLMAAERKAKAEVDELRSRIRELEERDRRESKKIADEDALRRIRQAEEQIEHLQRKLGATKQEEEALLSEMDVTGQAFEDMQEQNGRLLQQLREKDDANFKLMSERIKANQIHKLLREEKDELGEQVLGLKSQVDAQLLTVQKLEEKERALQGSLGGVEKELTLRSQALELNKRKAVEAAQLAEDLKVQLEHVQTRLREIQPCLAESRAAREKESFNLKRAQEDISRLRRKLEKQRKVEVYADADEILQEEIKEYKARLTCPCCNTRKKDAVLTKCFHVFCFECVRGRYEARQRKCPKCNAAFGAHDFHRIYIS

SEQ ID NO: 57196 - protein, 90 aa, Homo sapiens
MTPQSLLQTTLFLLSLLFLVQASASSGAHGRGHREDFRFCSQRNQTHRSSLHYKPTPDLRISIENSEEALTVHAPFPAAHPASRSFPDPR

SEQ ID NO: 57197 - protein, 82 aa, Homo sapiens
MFQAAERPQEWAMEGPRDGLKKERLLDDRHDSGLDSMKDEEYEQMVKELQEIRLEPQEVPRGSEPWKQQLTEDGDSLHSTWL

SEQ ID NO: 57198 - protein, 257 aa, Homo sapiens
MSSDGEPLSRMDSEDSISSTIMDVDSTISSGRSTPAMMNGQGSTTSSSKNIAYNCCWDQCQACFNSSPDLADHIRSIHVDGQRGGVFVCLWKGCKVYNTPSTSQSWLQRHMLTHSGDKPFKCVVGGCNASFASQGGLARHVPTHFSQQNSSKVSSQPKAKEESPSKAGMNKRRKLKNKRRRSLPRPHDFFDAQTLDAIRHRAICFNLSAHIESLGKGHSVVFHSTVIAKRKEDSGKIKLLLHWMPEDITMPQKRLKR

SEQ ID NO: 57199 - protein, 167 aa, Homo sapiens
MIRTFPGENKKYFKRSELAKKEEEAYFERCGYKIQPKEEDQKPLTSSNPVLELELAEEKLPMTLSRQEVIRRLRERGEPIRLFGETDYDAFQRLRKIEILTPEVNKGLRNDLKAALDKIDQQYLNEIVGGQEPGEEDTQNDLKVHEENTTIEELEALGESLGKGDDH

SEQ ID NO: 57200 - protein, 1130 aa, Homo sapiens
MATSERALLRTRAASLLRGLGRSRTGARSLQFRAEKERQPCWSFPMGQKTKGSSNIASSYLLQQLMHRYQELDSDGDEDQGEGEAGSEESSESEMLNLEEEFDGVLREEAVAKALHHLGRSGSGTEQVYLNLTLSGCNLIDVSILCGYVHLQKLDLSANKIEDLSCVSCMPYLLELNASQNNLTTFFNFKPPKNLKKADFSHNQISEICDLSAYHALTKLILDGNEIEEISGLEMCNNLIHLSLANNKITTINGLNKLPIKILCLSNNQIEMITGLEDLKALQNLDLSHNQISSLQGLENHDLLEVINLEDNKIAELREIEYIKNLPILRVLNLLENPIQEKSEYWFFVIFMLLRLTELDQKKIKVEEKVSAVNKYDPPPEVVAAQDHLTHVVNSVMQPQRIFDSTLPSLDAPYPMLILAGPEACGKRELAHRLCRQFSTYFRYGACHTTRPPYFGEGDRVDYHFISQDVFDEMVNMGKFILTFSYGNHKYGLNRDTVEGIARDGLASCIHMEIEGVRSLKYSYFEPRYILVVPMNKEKYEGYLRRKGLFSRAEIEFAVSRVDLYIKINQNFPGYFDEVINADDLDVAYQKLSQLIREYLGLTEEPAKSLATTAGAPASKKTVSGVPAHLVPSPRCLAKLQADGQMTEHLSGMQIHAKDLENQSVTPAQNQELAQDGETHQKELSPDSHLNPELPQHLSSSALGLPQQAQDLSLNPTEEDVQQSDLPLKQIATETDVPEVEASEVGQSPITPTLVPPVHPSPPSSRSPQPGQDKESGEAQVTPTGPPLSEPLQGPGPTPLSPQRIQDEEIESDKLPPSSSHHDPPKDSSHTDLVQKLAGDSQQALKEETSKPEAIRVSIPHPELPHPQDLATDTKQPQARGAPGTLLPRSRLAPTRLPQPQVLAPLQSRRPTPKLLSPSREEALGTTSHQTMTVSPRLPPTREADTSKLPPISPPHSKPPPNLSPQAAHSLQQVQEEKVSEVKLPLISPPSQEQAEPRILSPAQEEAAQKVRLPRIPAPLPEPGLPQNSGTQPDPRPAKERKAPQAGSSSRRKIPDMRASPHNQGPLQQTGAREKKLPNQKGTARGLAPLEEAPPGNHQPALQLEPHDQPAPTMVPDDPNPSPPLVSCLS

SEQ ID NO: 57201 - protein, 243 aa, Homo sapiens
ELDMSPGDPKWLDVIERDLHRQFPFHEMFVSRGGHGQQDLFRVLKAYTLYRPEEGYCQAQAPIAAVLLMHMPAEQAFWCLVQICEKYLPGYYSEKLEAIQLDGEILFSLLQKVSPVAHKHLSRQKIDPLLYMTEWFMCAFSRTLPWSSVLRVWDMFFCEGVKIIFRVGLVLLKHALGSPEKVKACQGQYETIERLRSLSPKIMQEAFLVQEVVELPVTERQIEREHLIQLRRWQETRGASSSA

SEQ ID NO: 57202 - protein, 521 aa, Homo sapiens
MPATLLRAVARSHHILSKAHQCRRIGHLMLKPLKEFENTTCSTLTIRQSLDLFLPDKTASGLNKSQILEMNQKKSDTSMLSPLNAARCQDEKAHLPTMKSFGTHRRVTHKPNLLGSKWFIKILKRHFSSVSTETFVPKQDFPQVKRPLKASRTRQPSRTNLPVLSVNEDLMHCTAFATADEYHLGNLSQDLASHGYVEVTSLPRDAANILVMGVENSAKEGDPGTIFFFREGAAVFWNVKDKTMKHVMKVLEKHEIQPYEIALVHWENEELNYIKIEGQSKLHRGEIKLNSELDLDDAILEKFAFSNALCLSVKLAIWEASLDKFIESIQSIPEALKAGKKVKLSHEEVMQKIGELFALRHRINLSSDFLITPDFYWDRENLEGLYDKTCQFLSIGRRVKVMNEKLQHCMELTDLMRNHLNEKRALRLEWMIVILITIETQSQSVTQAAVHWHNLGSLQALPPGFKRFSCLSLPSSWDYRRASPCQAIIRDGVSPFWPGCSQTPDLVICPLQPSKVLGLQE

SEQ ID NO: 57203 - protein, 44 aa, Homo sapiens
SASAGCPGPGIGPQTKSSTEGEPGWRRASPAWKLEFRKKSHCMM

SEQ ID NO: 57204 - protein, 618 aa, Homo sapiens
SMGAPEIRMSKPLEAEKQGLDSPSEHTDTERNGPDTNHQNPQNKTSPFSVSPTGPSTKVGILSGLHLTFWGPGPCLSPPQIKAEDPSGDSAPAAPLPPQPAQPHLPQAQLMLTGSQLAGDIQQLLQLQQLVLVPGHHLQPPAQFLLPQAQQSQPGLLPTPNLFQLPQQTQGALLTSQPRAGLPTQPPKCLEPPSHPEEPSDLEELEQFARTFKQRRIKLGFTQGDVGLAMGKLYGNDFSQTTISRFEALNLSFKNMCKLKPLLEKWLNDAETMSVDSSLPSPNQLSSPSLGFDGLPGRRRKKRTSIETNVRFALEKSFLANQKPTSEEILLIAEQLHMEKEVIRVWFCNRRQKEKRINPCSAAPMLPSPGKPASYSPHMVTPQGGAGTLPLSQASSSLSTTVTTLSSAVGTLHPSRTAGGGGGGGGAAPPLNSIPSVTPPPPATTNSTNPSPQGSHSAIGLSGLNPSTGSTMVGLSSGLSPALMSNNPLATIQGACCLMSHPSSPALSSGASSPAIAAPAMPSCPCSLHCLPLHTHLTFGEGVRGADGGQWDRWGDGGHSGQDAGRQRSPLARHALSPASLSPRQPWPLVEPCPLPALMAAGIWCWGQPVQPRGALAW

SEQ ID NO: 57205 - protein, 28 aa, Homo sapiens
  MOD_RES (1)..(1): Any amino acid
XYSTPVFSQKMTVWILLLLSLYPGWLST

SEQ ID NO: 57206 - protein, 134 aa, Homo sapiens
METFDCLPLAALLNQQFLCVHGGMSPEITSLDDIRKLDRFTEPPAFGPVCDLLWSDPSEDYGNEKTLEHYTHNTVRGCSYFYSYPAVCEFLQNNNLLSIIRAHEAQDAGYRMYRKSQATGFPSLITIFSAPNYL

SEQ ID NO: 57207 - protein, 72 aa, Homo sapiens
MVRNPALPDLAVSLVRRKPGHFTAMVWKNTKKMGVGKASASDGSSFVVARYFPAGNVVNEGFFEENVLPPKK

SEQ ID NO: 57208 - protein, 753 aa, Homo sapiens
MAGPRGALLAWCRRQCEGYRGVEIRDLSSSFRDGLAFCAILHRHRPDLLDFDSLSKDNVFENNRLAFEVAEKELGIPALLDPNDMVSMSVPDCLSIMTYVSQYYNHFCSPGQAGVSPPRKGLAPCSPPSVAPTPVEPEDVAQGEELSSGSLSEQGTGQTPSSTCAACQQHVHLVQRYLADGRLYHRHCFRCRRCSSTLLPGAYENGPEEGTFVCAEHCARLGPGTRSGTRPGPFSQPKQQHQQQLAEDAKDVPGGGPSSSAPAGAEADGPKASPEARPQIPTKPRVPGKLQELASPPAGRPTPAPRKASESTTPAPPTPRPRSSLQQENLVEQAGSSSLVNGRLHELPVPKPRGTPKPSEGTPAPRKDPPWITLVQAEPKKKPAPLPPSSSPGPPSQDSRQVENGGTEEVAQPSPTASLESKPYNPFEEEEEDKEEEAPAAPSLATSPALGHPESTPKSLHPWYGITPTSSPKTKKRPAPRAPSASPLALHASRLSHSEPPSATPSPALSVESLSSESASQTAGAELLEPPAVPKSSSEPAVHAPGTPGNPVSLSTNSSLASSGELVEPRVEQMPQASPGLAPRTRGSSGPQPAKPCSGATPTPLLLVGDRSPVPSPGSSSPQLQVKSSCKENPFNRKPSPAASPATKKATKGSKPVRPPAPGHGFPLIKRKVQADQYIPEEDIHGEMDTIERRLDALEHRGVLLEEKLRGGLNASSSRTWSSARLMSSMSSGASSISQKRTGRRRTGPGRRC

SEQ ID NO: 57209 - protein, 228 aa, Homo sapiens
MSDIEEVVEEYEEEEQEEAAVEEQEEAAEEDAEAEAETEETRAEEDEEEEEAKEAEDGPMEESKPKPRSFMPNLVPPKIPDGERVDFDDIHRKRMEKDLNELQALIEAHFENRKKEEEELVSLKDRIERRRAERAEQQRIRNEREKERQNRLAEERARREEEENRRKAEDEARKKKALSNMMHFGGYIQKQAQTERKSGKRQTEREKKKKILAERRKGEGQGAVAEHL

SEQ ID NO: 57210 - protein, 70 aa, Homo sapiens
MGEPGQSPSPRSSHGSPPTLSTLTLLLLLCGHAHSQCKILRCNADSPSYLRTCRNALIRRCIRLRWIIFL

SEQ ID NO: 57211 - protein, 266 aa, Homo sapiens
MMPRSHQPPPPPHEKEQQEAIEHIDEVQNEIDRLNEQASEEILKVEQKYNKLRQPFFQKRSELIAKIPNFWVTTFVNHPQVSALLGEEDEEALHYLTRVEVTEFEDIKSGYRIDFYFDENPYFENKVLSKEFHLNESGDPSSKSTEIKWKSGKDLTKRSSQTQNKASRKRQHEEPESFFTWFTDHSDAGADELGEVIKDDIWPNPLQYYLVPDMDDEEGEGEEDDDDDEEEEGLEDIDEEGDEDEGEEDEDDDEGEEGEEDEGEDD

SEQ ID NO: 57212 - protein, 111 aa, Homo sapiens
  MOD_RES (1)..(1): Any amino acid
XYNWILEHFPYFANAPTGWKNSVRHNLSLNKCFKKVDKERSQSIGKGSLWCIDPEYRQNLIQALKKTPYHPHPHVFNTPPTCPQAYQSTSGPPIWPGSTFFKRNGALLQEK

SEQ ID NO: 57213 - protein, 40 aa, Homo sapiens
MISLTDTQKIGMGLTGFGVFFLFFGMILFFDKALLAIGNE

SEQ ID NO: 57214 - protein, 362 aa, Homo sapiens
VCTFTYLLVGAAVFDALESDHEMREEEKLKAEEIRIKGKYNISSEDYRQLELVILQSEPHRAGVQWKFAGSFYFAITVITTIGYGHAAPGTDAGKAFCMFYAVLGIPLTLVMFQSLGERMNTFVRYLLKRIKKCCGMRNTDVSMENMVTVGFFSCMGTLCIGAAAFSQCEEWSFFHAYYYCFITLTTIGFGDYVALQTKGALQKKPLYVAFSFMYILVGLTVIGAFLNLVVLRFLTMNSEDERRDAEERASLAGNRNSMVIHIPEEPRPSRPRYKADVPDLQSVCSCTCYRSQDYGGRSVAPQNSFSAKLAPHYFHSISYKIEEISPSTLKNSLFPSPISSISPGLHSFTDHQRLMKRRKSV

SEQ ID NO: 57215 - protein, 119 aa, Homo sapiens
MDLTLGHEVGYSIPQEDCTGPNTLLRFCWDRLLLQEVASTRGTGAWGVLVLDEAQERSVASDSLQGLLQDARLEKLPGDLRVVVVTDPALEPKLRAFWGNPPIVHIPREPGERPSPIYW

SEQ ID NO: 57216 - protein, 482 aa, Homo sapiens
  MOD_RES (1)..(1): Any amino acid
XQLPRWWELGDPCAWTGQGRGTRRMSPATTGTFLLTAFLLSCADGINGTVNWKTRQANNFIISRKMAAGMKDVYSIFSKVHSDRNVYPSAGVLFVHVLEREYFKGEFPPYPKPGEISNDPITFNTNLMGYPDRPGWLRYIQRTPYSDGVLYGSPTAENVGKPTIIEITAYNRRTFETARHNLIINIMSAEDFPLPYQAEFFIKNMNVEEMLASEVLGDFLGAVKNVWQPERLNAINITSALDRGGRVPLPINDLKEGVYVMVGADVPFSSCLREVENPQNQLRCSQEMEPVITCDKKFRTQFYIDWCKISLVDKTKQVSTYQEVIRGEGILPDGGEYKPPSDSLKSRDYYTDFLITLAVPSAVALVLFLILAYIMCCRREGVIQLVHHSAIQKSTKELRDMSKNREIAWPLSTLPVFHPVTGEIIPPLHTDNYDSTNMPLMQTQQNLPHQTQIPQQQTTEIIFSITAFVNLRRFSFDNFSKI

SEQ ID NO: 57217 - protein, 184 aa, Homo sapiens
MPRRPSGYFLSSGGAGSGSGRALGEGSGSQSRNSWSSVLTVSGHSSITMWLPSSMSFRNARSRICRRRRAQGLERLWAPESPAAGTAGPTADMAVLAGSLLGPTSRSAALLGGRWLQPRAWLGFPDAWGLPTPQQARGKARGNEYQPSNIKRKNKHGWVRRLSTPAGVQVILRRMLKGRKSLSH

SEQ ID NO: 57218 - protein, 91 aa, Homo sapiens
  MOD_RES (1)..(1): Any amino acid
XAEPEGRHHPGPLLPRAHFLPPAGLLTGADVSGLCPAPGSSQGLYCGLLSASTSSKRNSCWPWKTTWSTLTSATSSSINTSSHPRCGWICL

SEQ ID NO: 57219 - protein, 57 aa, Homo sapiens
MANLLKTVVTGCSCPLLSNLGSCKGLRVKKDFLRTFYTHQELWCKAPVKPDVPDFQR

SEQ ID NO: 57220 - protein, 75 aa, Homo sapiens
EGAGAGSGFRKELVSRLLHLHFKDDKTKVSGDALQLMVELLKVFVVEAAVRGVRQAQAEDALRVDVDQLEKLLDF

SEQ ID NO: 57221 - protein, 37 aa, Homo sapiens
MASSTPSSSATSSNAGADPNTTNLRPTTYDTWCGVAH

SEQ ID NO: 57222 - protein, 228 aa, Homo sapiens
MKTLFLGVTLGLAAALSFTLEEEDITGTWYVKAMVVDKDFPEDRRPRKVSPVKVTALGGGNLEATFTFMREDRCIQKKILMRKTEEPGKFSAYGGRKLIYLQELPGTDDYVFYCKDQRRGGLRYMGKLVASAPCRAVPLSPPWLTWPPHLQVGILIPTWRPWKNLRNWCSTRDSRRRTFSCPCRREAAFSNTRQPPGLHLQSPPYHQTQSPDHLDLPSSHDPSLLPPT

SEQ ID NO: 57223 - protein, 116 aa, Homo sapiens
MWQLTSLLLFVATWGISGTPAPLDSVFSSSERAHQVLRIRKRANSFLEELRHSSLERECIEEICDFEEAKEIFQNVDDTLAFWSKHVDGDQCLVLPLEHPCASLCCGHGTCIDGIG

SEQ ID NO: 57224 - protein, 60 aa, Homo sapiens
MVRWFHRDLSGLDAETLLKGRGVHGSFLARPSRKNQGDFSLSVRTQGISMTCMEGRSLRL

SEQ ID NO: 57225 - protein, 90 aa, Homo sapiens
MTKIKADPDGPEAQAEACSGERTYQELLVNQNPIAQPLASRRLTRKLYKCIKKAVKQKQIRRGVKEVQKFVNKGEKGTWVQPQAPSAPPV

SEQ ID NO: 57226 - protein, 548 aa, Homo sapiens
SVSLYLSEDEVRRLIGLDAELYYVRNDLISHYALSFSLLVPSETNFLHFTWHAKSKVEYKLGFQVDNVLAMDMPQVNISVQGEVPRTLSVFRVELSCTGKVDSEVMILMQLNLTVNSSKNFTVLNFKRRKMCYKKLEEVKTSALDKNTSRTIYDPVHAAPTTSTRVFYISVGVCCAVIFLVAIILAVLHLHSMKRIELDDSISASSSSQGLSQPSTQTTQYLRADTPNNATPITSSLGYPTLRIEKNDLRSVTLLEAKGKVKDIAISRERITLKDVLQEGTFGRIFHGILIDEKDPNKEKQAFVKTVKDQASEIQVTMMLTESCKLRGLHHRNLLPITHVCIEEGEKPMVILPYMNWGNLKLFLRQCKLVEANNPQAISQQDLVHMAIQIACGMSYLARREVIHKDLAARNCVIDDTLQVKITDNALSRDLFPMDYHCLGDNENRPVRWMALESLVNNEFSSASDVWAFGVTLWELMTLGQTPYVDIDPFEMAAYLKDGYRIAQPINCPDELFAVMACCWALDPEERPKFQQLVQCLTEFHAALGAYV

SEQ ID NO: 57227 - protein, 50 aa, Homo sapiens
MFLFATRRSEPAGRPHSWHTTKSGEKQPDASMMQISQGMIGPPWHQSYHS

SEQ ID NO: 57228 - protein, 227 aa, Homo sapiens
MLCWGYWSLGQPGISTNLQGIVAEPQVCGFISDRSVKEVACGGNHSVFLLEDGEVYTCGLNTKGQLGHEREGNKPEQIGALADQHIIHVACGESHSLALSDRGQLFSWGAGSDGQLGLMTTEDSVAVPRLIQKLNQQTILQVSCGNWHCLALAADGQFFTWGKNSHGQLGLGKEFPSQASPQRVRSLEGIPLAQVAAGGAHSFALSLSGAVFGWGMNNAGQLGLSDE

SEQ ID NO: 57229 - protein, 303 aa, Homo sapiens
MAKMEVKTSLLDNMIGVGDMVLLEPLNEETFINNLKKRFDHSEIYTYIGSVVISVNPYRSLPIYSPEKVEEYRNRNFYELSPHIFALSDEAYRSLRDQDKDQCILITGESGAGKTEASKLVMSYVAAVCGKGAEVNQVKEQLLQSNPVLEAFGNAKTVRNDNSSRFGKYMDIEFDFKGDPLGGVISNYLLEKSRVVKQPRGERNFHVFYQLLSGASEELLNKLKLERDFSRYNYLSLDSAKVNGVDDAANFRTVRNAMQIVGFMDHEAESVLAVVAAVLKLGNIEFKPESRVNGLDESKIKDK

SEQ ID NO: 57230 - protein, 125 aa, Homo sapiens
  MOD_RES (1)..(1): Any amino acid
XSDTGLWLHNKLGATDELWAPPSIASLLTAAVIDNIRLCFHGLSSAVKLKLLLGTLHLPRRTVDETPAVRSALCPFYSFLHAVLRHSNKWVCEGLALSTRLECSGTIVTHCSLDLLTSDLPISAS

SEQ ID NO: 57231 - protein, 296 aa, Homo sapiens
MKPRPAGFVDNKLKQRVIQYLTSNKCGKYVDIGVLASDLQRVYSIDYGRRKRNAFRIQVEKVFSIISSEKELKNLTELEDEHLAKRARQGEEDNEYTESYSDDDSSMEDYPDPQSANHMNSSLLSLYRKGNPDSVSNTPEMEQRETTSSTPRISSKTGSIPLKTPAKDSEGGWFIDKTPSVKKDSFFLDLSCEKSNPKKPITEIQDSKDSSLLESDMKRKGKLKNKGSKRKKEDLQEVDGEIEAVLQKKGGLQDAHTHASPGGVPPPGRRAPSWSSPSWTTRLWEDITCTCNCWGT

SEQ ID NO: 57232 - protein, 218 aa, Homo sapiens
MPGCPCPGCGMAGPRLLFLTALALELLERAGGSQPALRSRGTATACRLDNKESESWGALLSGERLDTWICSLLGSLMVGLSGVFPLLVIPLEMGTMLRSEAGAWRLKQLLSFALGGLLGNVFLHLLPEAWAYTCSASPGGEGQSLQQQQQLGLWVIAGILTFLALEKMFLDSKEEGTSQVSGYLNLLANTIDNFTHGLAVAASFLVSKKVRGLGPVGL

SEQ ID NO: 57233 - protein, 183 aa, Homo sapiens
MEKLRLLGLRYQEYVTRHPAATAQLETAVRGFSYLLAGRFADSHELSELDGDHSPGNHEQSYVGKRSNRVVRTLQNTPSLHSRHWGAPQQREGRQQQHHEELSATPTPLGLQETIAEFLYIARPLLHLLSLGLWGQRSWKPWLLAGVVDVTSLSLLSDRKGLTRRERRELRRRTILLLYYLLR

SEQ ID NO: 57234 - protein, 557 aa, Homo sapiens
MLRRALLCLAVAALVRADAPEEEDHVLVLRKSNFAEALAAHKYLLVEFYAPWCGHCKALAPEYAKAAGKLKAEGSEIRLAKVDATEESDLAQQYGVRGYPTIKFFRNGDTASPKEYTAGREADDIVNWLKKRTGPAATTLPDGAAAESLVESSEVAVIGFFKDVESDSAKQFLQAAEAIDDIPFGITSNSDVFSKYQLDKDGVVLFKKFDEGRNNFEGEVTKENLLDFIKHNQLPLVIEFTEQTAPKIFGGEIKTHILLFLPKSVSDYDGKLSNFKTAAESFKGKILFIFIDSDHTDNQRILEFFGLKKEECPAVRLITLEEEMTKYKPESEELTAERITEFCHRFLEGKIKPHLMSQELPEDWDKQPVKVLVGKNFEDVAFDEKKNVFVEFYAPWCGHCKQLAPIWDKLGETYKDHENIVIAKMDSTANEVEAVKVHSFPTLKFFPASADRTVIDYNGERTLDGFKKFLESGGQDGAGDDDVSGVTALGWSLGFSPLAPRDMPTWARLVMGMVPLEARLCVQGSGAPHLRPAGQGMCSQCSAETALPGQHFFRGRR

SEQ ID NO: 57235 - protein, 284 aa, Homo sapiens
MDLLKAITSPLAAGSKPSKKTGEKSSGSSSHSESKKEHHRKKVSGSSGELPLEDGGSHKSKKMKPLYVNTETLTLREPDGLKMKLILSPKEKGSSSVDEESFQYPSQQATVKKSSKKSARDEQGALLLGHELQSFLKTARKKHKSSSDAHSSPGPEGCGSDASQFAESHSANLDLSGLEPILVESDSSSGGELEAGELVIDDSYREIKKKKKSKKSKKKKDKEKHKEKRHSKSKRSLGLSAVPVGEVTVTSGPPPSIPYAGAAAPPLPLPGLHTDGHSEKKKKK

SEQ ID NO: 57236 - protein, 491 aa, Homo sapiens
MWAVLRLALRPCARASPAGPRAYHGDSVASLGTQPDLGSALYQENYKQMKALVNQLHERVEHIKLGGGEKARALHISRGKLLPRERIDNLIDPGVECMIIANDATVKGGAYYPVTVKKQLRAQEIAMQNRLPCIYLVDSGGAYLPRQADVFPDRDHFGRTFYNQAIMSSKNIAQVKAATGEEVSAEDLGGADLHCRKSGVSDHWALDDHHALHLTRKVVRNLNYQKKLDVTIEPSEEPLFPADELYGIVGANLKRSFDVREVIARIVDGSRFTEFKAFYGDTLVTGFARIFGYPVGIVGNNGVLFSESAKKGTHFVQLCCQRNIPLLFLQNITGFMVGREYEAEGIAKDGAKMVAAVACAQVPKITLIIGGSYGAGNYGMCGRAYSPRFLYIWPNARISVMGGEQAANVLATITKDQRAREGKQFSSADEAALKEPIIKKFEEEGNPYYSSARVWDDGIIDPADTRLVLGLSFSAALNAPIEKTDFGIFRM

SEQ ID NO: 57237 - protein, 123 aa, Homo sapiens
  MOD_RES (1)..(1): Any amino acid
XGQSPFQATASCHIVSVFSLQLFWVCAYCTSICRQSSARVDEPMTMFLWTLCTSPSVLRPIVLSFELERKPSKIVPLEPPRLQRFQCGELPFLTHVNPRLRLSCLSIRESEYSSSLGILASSC

SEQ ID NO: 57238 - protein, 81 aa, Homo sapiens
MPRVKAAQAGRQSSAKRHLAEQFAVGEIITDMAKKEWKVGLPIGQGGFGCIYLADMNSSESVGSDAPCVVKVFRNGFVPVS

SEQ ID NO: 57239 - protein, 51 aa, Homo sapiens
MAAAVRQDLAQLMNSSGSHKDLAGKTLFSFGIVVGIVRSWKKPFSYLEQNN

SEQ ID NO: 57240 - protein, 369 aa, Homo sapiens
  MOD_RES (1)..(1): Any amino acid
XIPFEKNCGEDKKCEANLRVSFSPARSRALRLTAFASLSVELSLSNLEEDAYWVQLDLHFPPGLSFRKVEMLKPHSQIPVSCEELPEESRLLSRALSCNVSSPIFKAGHSVALQMMFNTLVNSSWGDSVELHANVTCNNEDSDLLEDNSATTIIPILYPINILIQDQEDSTLYVSFTPKGPKIHQVKHMYQEPPVPCHYEDLERLPDAAEPCLPGALFRCPVVFRQEILVQVIGTLELVGEIEASSMFSLCSSLSISFNSSKHFHLYGSNASLAQVVMKVDVVYEKQMLYLYVLSGIGGLLLLLLIFIVLYKVGFFKRNLKEKMEAGRGVPNGIPAEDSEQLASGQEAGDPGCLKPLHEKDSESGGGKD

SEQ ID NO: 57241 - protein, 782 aa, Homo sapiens
SILRVEAVDADCSPQFSQICSYEIITPDVPFTVDKDGYIKNTEKLNYGKEHQYKLTVTAYDCGKKRATEDVLVKISIKPTCTPGWQGWNNRIEYEPGTGALAVFPNIHLETCDEPVASVQATVELETSHIGKGCDRDTYSEKSLHRLCGAAAGTAELLPSPSGSLNWTMGLPTDNGHDSDQVFEFNGTQAVRIPDGVVSVSPKEPFTISVWMRHGPFGRKKETILCSSDKTDMNRHHYSLYVHGCRLIFLFRQDPSEEKKYRPAEFHWKLNQVCDEEWHHYVLNVEFPSVTLYVDGTSHEPFSVTEDYPLHPSKIETQLVVGACWQGGDLHMTQFFRGNLAGLTLRSGKLADKKVIDCLYTCKEGLDLQVLEDSGRGVQIQAHPSQLVLTLEGEDLGELDKAMQHISYLNSRQFPTPGIRRLKITSTIKCFNEATCISVPPVDGYVMVLQPEEPKISLSGVHHFARAASEFESSEGVFLFPELRIISTITREVEPEGDGAEDPTVQESLVSEEIVHDLDTCEVTVEGEELNHEQESLEVDMARLQQKGIEVSSSELGMTFTGVDTMASYEEVLHLLRYRNWHARSLLDRKFKLICSELNGRYISNEFKVEVNVIHTANPMEHANHMAAQPQFVHPEHRSFVDLSGHNLANPHPFAVVPSTATVVIVVCVSFLVFMIILGVFRIRAAHRRTMRDQDTGKENEMDWDDSALTITVNPMETYEDQHSSEEEEEEEEEEESEDGEEEDDITSAESESSEEEEGEQGDPQNATRQQQLEWDDSTLSY

SEQ ID NO: 57242 - protein, 58 aa, Homo sapiens
HRDCVDPWLMLQQTCPLCKFNVLGEHQGWGPSAYSACSSPDASLPVLLPLPCREPLLR

SEQ ID NO: 57243 - protein, 971 aa, Homo sapiens
MLQQVPENINFPAEEEKILEFWTEFNCFQECLKQSKHKPKFTFYDGPPFATGLPHYGHILAGTIKDIVTRYAHQSGFHVDRRFGWDCHGLPVEYEIDKTLGIRGPEDVAKMGITEYNNQCRAIVMRYSAEWKSTVSRLGRWIDFDNDYKTLYPQFMESVWWVFKQLYDKGLVYRGVKVMPFSTACNTPLSNFESHQNYKDVQDPSVFVTFPLEEDETVSLVAWTTTPWTLPSNLAVCVNPEMQYVKIKDVARGRLLILMEARLSALYKLESDYEILERFPGAYLKGKKYRPLFDYFLKCKENGAFTVLVDNYVKEEEGTGVVHQAPYFGAEDYRVCMDFNIIRKDSLPVCPVDASGCFTTEVTDFAGQYVKDADKSIIRTLKEQGRLLVATTFTHSYPFCWRSDTPLIYKAVPSWFVRVENMVDQLLRNNDLCYWVPELVREKRFGNWLKDARDWTISRNRYWGTPIPLWVSDDFEEVVCIGSVAELEELSGAKISDLHRESVDHLTIPSRCGKGSLHRISEVFDCWFESGSMPYAQVHYPFENKREFEDAFPADFIAEGIDQTRGWFYTLLVLATALFGQPPFKNVIVNGLVLASDGQKMSKRKKNYPDPVSIIQKYGADALRLYLINSPVVRAENLRFKEEGVRDVLKDVLLPWYNAYRFLIQNVLRLQKEEEIEFLYNENTVRESPNITDRWILSFMQSLIGFFETEMAAYRLYTVVPRLVKFVDILTNWYVRMNRRRLKGENGMEDCVMALETLFSVLLSLCRLMAPYTPFLTELMYQNLKVLIDPVSVQDKDTLSIHYLMLPRVREELIDKKTESAVSQMQSVIELGRVIRDRKTIPIKYPLKEIVVIHQDPEALKDIKSLEKYIIEELNVRKVTLSTDKNKYGIRLRAEPDHMVLGKRLKGAFKAVMTSIKQLSSEELEQFQKTGTIVVEGHELHDEDIRLMYTFDQATGGTAQFEAHSDAQNLS

SEQ ID NO: 57244 - protein, 432 aa, Homo sapiens
MASRLTLLTLLLLLLAGDRASSNPNATSSSSQDPESLQDRGEGKVATTVISKMLFVEPILEVSSLPTTNSTTNSATKITANTTDEPTTQPTTEPTTQPTIQPTQPTTQLPTDSPTQPTTGSFCPGPVTLCSDLESHSTEAVLGDALVDFSLKLYHAFSAMKKVETNMAFSPFSIASLLTQVLLGAGENTKTNLESILSYPKDFTCVHQALKGFTTKGVTSVSQIFHSPAKWKTTFDPKKTRMEPFHFKNSVIKVPMMNSKKYPVAHFIDQTLKAKVGQLQLSHNLSLVILVPQNLKHRLEDMEQALSPSVFKAIMEKLEMSKFQPTLLTLPRIKVTTSQDMLSIMEKLEFFDFSYDLNLCGLTEDPDLQVSAMQHQTVLELTETGVEAAAASAISVARTLLVFEVQQPFLFVLWDQQHKFPVFMGRVYDPRA

SEQ ID NO: 57245 - protein, 54 aa, Homo sapiens
MACAGLLTVCLLRPPAPQPQPQTPRHPQLAPDPGPAGHTLFQDVFRRADKNALI

SEQ ID NO: 57246 - protein, 68 aa, Homo sapiens
MNGFGRLEHFSGAVYEGQFKDNMFHGLGTYTFPNGAKYTGNFNENRGSQASLLLLFITFKLIQNPDKP

SEQ ID NO: 57247 - protein, 627 aa, Homo sapiens
MSKGPAVGIDLGTTYSCVGVFQHGKVEIIANDQGNRTTPSYVAFTDTERLIGDAAKNQVAMNPTNTVFDAKRLIGRRFDDAVVQSDMKHWPFMVVNDAGRPKVQVEYKGETKSFYPEEVSSMVLTKMKEIAEAYLGKATKDAGTIAGLNVLRIINEPTAAAIAYGLDKKVGAERNVLIFDLGGGTFDVSILTIEDGIFEVKSTAGDTHLGGEDFDNRMVNHFIAEFKRKHKKDISENKRAVRRLRTACERAKRTLSSSTQASIEIDSLYEGIDFYTSITRARFEELNADLFRGTLDPVEKALRDAKLDKSQIHDIVLVGGSTRIPKIQKLLQDFFNGKELNKSINPDEAVAYGAAVQAAILSGDKSENVQDLLLLDVTPLSLGIETAGGVMTVLIKRNTTIPTKQTQTFTTYSDNQPGVLIQVYEGERAMTKDNNLLGKFELTGIPPAPRGVPQIEVTFDIDANGILNVSAVDKSTGKENKITITNDKGRLSKEDIERMVQEAEKYKAEDEKQRDKVSSKNSLESYAFNMKATVEDEKLQGKINDEDKQKILDKCNEIINWLDKNQTAEKEEFEHQQKELEKVCNPIITKLYQSAGGMPGGMPGGFPGGGAPPSGGASSGPTIEEVD

SEQ ID NO: 57248 - protein, 66 aa, Homo sapiens
  MOD_RES (1)..(1): Any amino acid
XATSELDNKTHSENLKQMGDRSATLKRQSLDQVTNRTDTVKIQSIKFCHQLTHHQGETEERSGENL

SEQ ID NO: 57249 - protein, 254 aa, Homo sapiens
MAHQTGIHATEELKEFFAKARAGSVRLIKVVIEDEQLVLGASQEPVGRWDQDYDRAVLPLLDAQQPCYLLYRLDSQNAQGFEWLFLAWSPDNSPVRLKMLYAATRATVKKEFGGGHIKDELFGTVKDDLSFAGYQKHLSSCAAPAPLTSAERELQQIRINEVKTEISVESKHQTLQGLAFPLQPEAQRALQQLKQKMVNYIQMKLDLERETIELVHTEPTDVAQLPSRVPRDAARYHFFLYKHTHEGDPLESVD

SEQ ID NO: 57250 - protein, 64 aa, Homo sapiens
INSLVTTVFMLIVSVLALIPETTTLTVGGGDLTNSIITAVFLSVVAILAMQEKKRRHLLYVGGR

SEQ ID NO: 57251 - protein, 155 aa, Homo sapiens
MKLERSLKRNFSLRRQQARCPRARSLSTPGAWCGASTMMTSVKASCCSRSCCPKGARRNSGITSSTWPWGTTGSRWTRGHGHRGRHGPGCGGTGRTHRTCCVQVQILKETREPTENAPGGPVHPRCPFPVLPLPPVSILCGLQLISAPLRFVLQP

SEQ ID NO: 57252 - protein, 180 aa, Homo sapiens
  MOD_RES (1)..(1): Any amino acid
XLHQLLCAGHLSTAQYYQGLYEILELAEDMEIDIPHVWLYLAELVTPILQEGGVPMGELFREITKPLRPLGKAASLLLEILGLLCKSMGPKKVGTLWREAGLSWKEFLPEGQDIGAFVAEQKVEYTLGEESEAPGQRALPSEELNRQLEKLLKEGSSNQRVFDWIENLGIICFSHTGQPE

SEQ ID NO: 57253 - protein, 42 aa, Homo sapiens
  MOD_RES (1)..(1): Any amino acid
XMLESPESLRSKVDEAVAVLQAHQAKEAAQKAVNSATGVPTV

SEQ ID NO: 57254 - protein, 460 aa, Homo sapiens
MFRCGGLAAGALKQKLVPLVRTVCVRSPRQRNRLPGNLFQRWHVPLELQMTRQMASSGASGGKIDNSVLVLIVGLSTVGAGAYAYKTMKEDEKRYNERISGLGLTPEQKQKKAALSASEGEEVPQDKAPSHVPFLLIGGGTAAFAAARSIRARDPGARVLIVSEDPELPYMRPPLSKELWFSDDPNVTKTLRFKQWNGKERSIYFQPPSFYVSAQDLPHIENGGVAVLTGKKVVQLDVRDNMVKLNDGSQITYEKCLIATGGTPRSLSAIDRAGAEVKSRTTLFRKIGDFRSLEKISREVKSITIIGGGFLGSELACALGRKARALGTEVIQLFPEKGNMGKILPEYLSNWTMEKVRREGVKVMPNAIVQSVGVSSGKLLIKLKDGRKVETDHIVAAVGLEPNVELAKTGGLEIDSDFGGFRVNAELQARSNIWVAGDAACFYDIKLGRRRVEHHDHAVE

SEQ ID NO: 57255 - protein, 36 aa, Homo sapiens
MNGYISNANYSVKKCIFLLFINHFATRTCWPLWGDG

SEQ ID NO: 57256 - protein, 145 aa, Homo sapiens
MGCVQCKDKEATKLTEERDGSLNQSSGYRYGTDPTPQHYPSFGVTSIPNYNNFHAAGGQGLTVFGGVNSSSHTGTLRTRGGTGVTLFVALYDYEARTEDDLSFHKGEKFQILNSSEGDWWEARSLTTGETGYIPSNYVAPVDSIQ

SEQ ID NO: 57257 - protein, 1492 aa, Homo sapiens
MAAEEGVASAASAGGSWGTAAMGRVLPMLLVPVPAEAMGQLGSRAQLRTQPEALGSLTAAGSLQVLSLTPGSRGGGRCCLEGPFWHFLWEDSRNSSTPTEKPKLLALGENYELLIYEFNLKDGRCDATILYSCSREALQKLIDDQDISISLLSLRILSFHNNTSLLFINKCVILHIIFPERDAAIRVLNCFTLPLPAQAVDMIIDTQLCRGILFVLSSLGWIYIFDVVDGTYVAHVDLALHKEDMCNEQQQEPAKISSFTSLKVSQDLDVAVIVSSSNSAVALNLNLYFRQHPGHLLCERILEDLPIQGPKGVDEDDPVNSAYNMKLAKFSFQIDRSWKAQLSSLNETIKNSKLEVSCCAPWFQDILHLESPESGNHSTSVQSWAFIPQDIMHGQYNVLQKDHAKTSDPGRSWKIMHISEQEEPIELKCVSVTGFTALFTWEVERMGYTITLWDLETQGMQCFSLGTKCIPVDSSGDQQLCFVLTENGLSLILFGLTQEEFLNRLMIHGSASTVDTLCHLNGWGRCSIPIHALEAGIENRQLDTVNFFLKSKENLFNPSSKSSVSDQFDHLSSHLYLRNVEELIPALDLLCSAIRESYSEPQSKHFSEQLLNLTLSFLNNQIKELFIHTEELDEHLQKGVNILTSYINELRTFMIKFPWKLTDAIDEYDVHENVPKVKESNIWKKLSFEEVIASAILNNKIPEAQTFFRIDSHSAQKLEELIGIGLNLVFDNLKKNNIKEASELLKNMGFDVKGQLLKICFYTTNKNIRDFLVEILKEKNYFSEKEKRTIDFVHQVEKLYLGHFQENMQIQSFPRYWIKEQDFFKHKSVLDSFLKYDCKDEFNKQDHRIVLNWALWWDQLTQESILLPRISPEEYKSYSPEALWRYLTARHDWLNIILWIGEFQTQHSYASLQQNKWPLLTVDVINQNTSCNNYMRNEILDKLARNGVFLASELEDFECFLLRLSRIGGVIQDTLPVQNYKTKEGWDFHSQFILYCLEHSLQHLLYVYLDCYKLSPENCPFLEKKELHEAHPWFEFLVQCRQVASNLTDPKLIFQASLANAQILIPTNQASVSSMLLEGHTLLALATTMYSPGGVSQVVQNEENENCLKKVDPQLLKMALTPYPKLKTALFPQCTPPSVLPSDITIYHLIQSLSPFDPSRLFGWQSANTLAIGDAWSHLPHFSSPDLVNKYAIVERLNFAYYLHNGRPSFAFGTFLVQELIKSKTPKQLIQQVGNEAYVIGLSSFHIPSIGAACVCFLELLGLDSLKLRVDMKVANIILSYKCRNEDAQYSFIRESVAEKLSKLADGEKTTTEELLVLLEEGTWNSIQQQEIKRLSSESSSQWALVVQFCRLHNMKLSISYLRECAKANDWLQFIIHSQLHNYHPAEVKSLIQYFSPVIQDHLRLAFENLPSVPTSKMDSDQVCNKCPQELQGSKQEMTDLFEILLQCSEEPDSWHWLLVEAVKQQAPILSVLASCLQVRIMRSLKIPRYYW

SEQ ID NO: 57258 - protein, 219 aa, Homo sapiens
MAGQPGHMPHGGSSNNLCHTLGPVHPPDPQRHPNTLSFRCSLADFQIEKKIGRGQFSEVYKATCLLDRKTVALKKVQIFEMMDAKARQDCVKEIGLLKQLNHPNIIKYLDSFIEDNELNIVLELADAGDLSQMIKYFKKQKRLIPERTVWKYFVQLCSAVEHMHSRRVMHRDIKPANVFITATGVVKLGDLGLGRFFSSETTAAHSLVGTPYYMSPERI

SEQ ID NO: 57259 - protein, 747 aa, Homo sapiens
MWERWVPVTVLPGCVGCRTVAALASWTVRDVKERIFAETGFPVSEQRLWRGGRELSDWIKIGDLTSKNCHLFVNLQSKGLKGGGRFGQTTPPLVDFLKDILRRYPEGGQILKELIQNAEDAGATEVKFLYDETQYGTETLWSKDMAPYQGPALYVYNNAVFTPEDWHGIQEIARSRKKDDPLKVGRFGIGFNSVYHITDVPCIFSGDQIGMLDPHQTLFGPHESGQCWNLKDDSKEISELSDQFAPFVGIFGSTKETFINGNFPGTFFRFPLRLQPSQLSSNLYNKQKVLELFESFRADADTVLLFLKSVQDVSLYVREADGTEKLVFRVTSSESKALKHERPNSIKILGTAISNYCKKTPSNNITCVTYHVNIVLEEESTKDAQKTSWLVCNSVGGRGISSKLDSLADELKFVPIIGIAMPLSSRDDEAKGATSDFSGKAFCFLPLPPGEESSTGLPVHISGFFGLTDNRRSIKWRELDQWRDPAALWNEFLVMNVVPKAYATLILDSIKRLEMEKSSDFPLSVDVIYKLWPEASKVKVHWQPVLEPLFSELLQNAVIYSISCDWVRLEQVYFSELDENLEYTKTVLNYLQSSGKQIAKVPGNVDAAVQLTAASGTTPVRKVTPAWVRQVLRKCAHLGCAEEKLHLLEFVLSDQAYSELLGLELLPLQNGNFVPFSSSVSDQDVIYITSAEYPRSLFPSLEGRFILDNLKPHLVAALKEAAQTRGFLFDEDSNGKLKMVAVLITSC

SEQ ID NO: 57260 - protein, 46 aa, Homo sapiens
MKNCGRRFHNEVGKFRFLNELIKVVSPKYLGDRVSEKVKTKVIELL

SEQ ID NO: 57261 - protein, 48 aa, Homo sapiens
  MOD_RES (1)..(1): Any amino acid
XYTDESCTFKISLRNFRSILSWELKNHSIVPTHYTLLYTIMRDGVSPC

SEQ ID NO: 57262 - protein, 114 aa, Homo sapiens
MESIFHEKQEGSLCAQHCLNNLLQGEYFSPVELSSIAHQLDEEERMRMAEGGVTSEDYRTFLQQPSGNMDDSGFFSIQLLFFLTGYKQCLESLGFRTNPVQQSRVSEAQDRSYK

SEQ ID NO: 57263 - protein, 136 aa, Homo sapiens
MQFTSISNSLTSTAAIGLSFTTSTTTTATFTTNTTTTITSGFTVNQNQLLSRGFENLVPYTSTVSVVATPVMTYGHLEGLINEWNLELEDQEKYFLLQATQVNAWDHTLIENGEMIRILHGEVNKVKLDQKRLEQE

SEQ ID NO: 57264 - protein, 1253 aa, Homo sapiens
MQFETLRQVCNSVLSHFHGVFSSPPNILQNELFGQTLNNARKRSPSVSRDQNRRYDQREEREEYSQYATSDTAMPRSPSDYADRRSQHEPQFYEDSDHLSYRDSNRRSHRHSKEYIVDDEDVESRDEYERQRREEEYQSRYRSDPNLARYPVKPQPYEEQMRIHAEVSRARHERRHSDVSLANADLEDSRISMLRMDRPSRQRSISERRAAMENQRSYSMERTREAQGPSSYAQRTTNHSPPTPRRSPLPIDRPDLRRTDSLRKQHHLDPSSAVRKTKREKMETMLRNDSLSSDQSESVRPPPPKPHKSKKGGKMRQISLSSSEEELASTPEYTSCDDVEIESESVSEKGDMDYNWLDHTSWHSSEASPMSLHPVTWQPSKDGDRLIGRILLNKRLKDGSVPRDSGAMLGLKVVGGKMTESGRLCAFITKVKKGSLADTVGHLRPGDEVLEWNGRLLQGATFEEVYNIILESKPEPQVELVVSRPIGDIPRIPDSTHAQLESSSSSFESQKMDRPSISVTSPMSPGMLRDVPQFLSGQLSIKLWFDKVGHQLIVTILGAKDLPSREDGRPRNPYVKIYFLPDRSDKNKRRTKTVKKTLEPKWNQTFIYSPVHRREFRERMLEITLWDQARVREEESEFLGEILIELETALLDDEPHWYKLQTHDVSSLPLPHPSPYMPRRQLHGESPTRRLQRSKRISDSEVSDYDCDDGIGVVSDYRHDGRDLQSSTLSVPEQVMSSNHCSPSGSPHRVDVIGRTRSWSPSVPPPQSRNVEQGLRGTRTMTGHYNTISRMDRHRVMDDHYSPDRDSHFLTLPRSRYSQTIDHHHRDGRDCEAADRQPYHRSRSTEQRPLLERTTTRSRSTERPDTNLMRSMPSLMTGRSAPPSPALSRSHPRTGSVQTSPSSTPVAGRRGRQLPQLPPKGTLDRNNGVKEIEPYEELDSTRRRYAGTMDIEERNRQMKINKYKQVAGSDPRLEQDYHSKYRSGWDPHRGADNVSTKSSDSDVSDISAVSRTSSASRFSSTSYMSVQSERPGGNKKISVFTSKMQSRQMGISGKNMTKSTSISGDMCSLEKNDGSQSDTAVGTLGTSGKKRRSSLGAKMVAIVGLSRKSRSASQLSQTEAGGKKLRSTVQRSTETGLAVEMRNWMTRQASRESTDGSMNSYSSEGNLIFPGVRLASDSQFSDFLDGLGPAQLVGRQTLATPAMGDIQVGMMDKKGQLEVEIIRARGLVVKPGSKTLPAPYVKVYLLDNGVCIA

SEQ ID NO: 57265 - protein, 144 aa, Homo sapiens
MPAVDKLLLEEALQDSPQNEMCLATQQLSKQLLAYEKQNFALGKGDEEVISTLHYFSKVVDELNLLHTELAKQLADTMVLPIIQFREKDLTEVSTLKDLFGLASNEHDLSMAKYSRLPKKKENEKVKTEVGKEVAAARRKQHLS

SEQ ID NO: 57266 - protein, 184 aa, Homo sapiens
MKQPIMADGPRCKRRKQANPRRKNVVNYDNVVDTGSETDEEDKLHIAEDDGIANPLDQETSPASVPNHESSPHVSQALLPREEEEDEIREGGVEHPWHNNEILQASVDGPVKNANCTSDFEEYFAKRKLEERDGHAVSIEEYLQRSDTAIIYPEAPEELSRLGTPEANGQEENDLPPGTPDAFA

SEQ ID NO: 57267 - protein, 528 aa, Homo sapiens
MMENSKEEGTSSSEKSKSSGSSRSKRKPSIVTKYVESDDEKPLDDETVNEDASNENSENDITMQSLPKGTVIVQPEPVLNEDKDDFKGPEFRSRSKMKTENLKKRGEDGLHGIVSCTACGQQVNHFQKDSIYRHPSLQVLICKNCFKYYMSDDISRDSDGMDEQCRWCAEGGNLICCDFCHNAFCKKCILRNLGRKELSTIMDENNQWYCYICHPEPLLDLVTACNSVFENLEQLLQQNKKKIKVDSEKSNKVYEHTSRFSPKKTSSNCNGEEKKLDDSCSGSVTYSYSALIVPKEMIKKAKKLIETTANMNSSYVKFLKQATDNSEISSATKLRQLKAFKSVLADIKKAHLALEEDLNSEFRAMDAVNKEKNTKEHKVIDAKFETKARKGEKPCALEKKDISKSEAKLSRKQVDSEHMHQNVPTEEQRTNKSTGGEHKKSDRKEEPQYEPANTSEDLDMDIVSVPSSVPEDIFENLETAMEVQSSVDHQGDGSSGTEQEVESSSVKLNISSKDNRGGIKSKTTAKVT

SEQ ID NO: 57268 - protein, 366 aa, Homo sapiens [sequence omitted]

SEQ ID NO: 57269 - protein, 130 aa, Homo sapiens
MEEEASSPGLGCSKPHLEKLTLGITRILESSPGVTEVTIIEKPPAERHMISSWEQKNNCVMPEDVKNFYLMTNGFHMTWSVKLDEHIIPLGSMAINSISKLTQLTQSSMYSLPNAPTLADLEDDTHEDNL

SEQ ID NO: 57270 - protein, 328 aa, Homo sapiens
MAVQESAAQLSMTLKVQEYPTLKVPYETLNKRFRAAQKNIDRETSHVTMVVAELEKTLSGCPAVDSVVSLLDGVVEKLSVLKRKAVESIQAEDESAKLCKRRIEHLKEHSSDQPAAASVWKRKRMDRMMVEHLLRCGYYNTAVKLARQSGIETCKKALQPSRREPAGRGAPGHGHAGLPARHAHLPVQGPSGPCTVADADPAVPVRQLPTTPAGKQFCVHPHPAGWPLSHQDTCYKEDGSSKSPDCPVCSRSLNKLAQPLPMAHCANSRLVCKISGDVMNENNPPMMLPNGYVYGYNSLLSIRQDDKVVCPRTKEVFHFSQAEKVYIM

SEQ ID NO: 57271 - protein, 264 aa, Homo sapiens
MGKRLDQPQMYPQYTYYYPHYLQTKQSYAPAPHPMAPPSPSTNSSSNNSSNNSSGEQLSKTNLYIRGLPPGTTDQDLIKLCQPYGKIVSTKAILDKNTNQCKGYGFVDFDSPAAAQKAVASLKANGVQAQMAKQQEQDPTNLYISNLPISMDEQELENMLKPFGHVISTRILRDANGVSRGVGFARMESTEKCEVVIQHFNGKYLKTPPGIPAPSEPLLCKFADGGQKKRQNQSKYTQNGRPWPREGEAGMALTYDPTAAIQNG

SEQ ID NO: 57272 - protein, 46 aa, Homo sapiens
MAGPGWTLLLLLLLLLLLGSMAGYGPQKKLNLSHKKLLRKPKFEGW

SEQ ID NO: 57273 - protein, 81 aa, Homo sapiens
MRHLEGQLEEKNQELQRARQREKMNEEHNKRLSDTVDRLLTESNERLQLHLKERMAALEEKLAATRPARVMRAGYQFQSIN

SEQ ID NO: 57274 - protein, 127 aa, Homo sapiens
MNPFWSMSTSSVRKRSEGEEKTLTGDVKTSPPRTAPKKQLPSIPKNALPITKPTSPAPAAQSTNGTHASYGPFYLEYSLLAEFTLVVKQKLPGVYVQPSYRSALMWFGVIFIRHGLYQDGVFKFTVY

SEQ ID NO: 57275 - protein, 164 aa, Homo sapiens
MLAMDTCKHVGQLQLAQDHSSLNPQKWHCVDCNTTESIWACLSCSHVACGRYIEEHALKHFQESSHPVALEVNEMYVFCYLCDDYVLNDNTTGDLKLLRRTLSAIKSQNYHCTTRSGRFLRSMGTGDDSYFLHDGAQSLLQSEDQLYTALWHRRRILMGKIFRT

SEQ ID NO: 57276 - protein, 183 aa, Homo sapiens
PGPPYPPQLMTPSKLRGRALGASGGLRPGPSGGLRDPVTPTSPTVSVTGAGTDGLLALRACSGPPTAGVAGGPVAVEPEVPPVPLPTASSLPRKLLPWEEGPGPPPPPLPGPLAQPQASALATVKASIISELSSKLQQFGGSSAAGGALPWARGGSGGGGDSHHGGASYVPERTSSLQRQSIE

SEQ ID NO: 57277 - protein, 270 aa, Homo sapiens
MSPTTSSQILARKRRRGIIEKRRRDRINNSLSELRRLVPSAFEKQVMEQGSAKLEKAEILQMTVDHLKMLHTAGGKGYFDAHALAMDYRSLGFRECLAEVARYLSIIEGLDASDPLRVRLVSHLNNYASQREAASGAHAGLGHIPWGTVFGHHPHIAHPLLLPQNGHGNAGTTASPTEPHHQGRLGSAHPEAPALRAPPSGSLGPVLPVVTSASKLSPPLLSSVASLSAFPFSFGSFHLLSPNALSPSAPTQAANLGKPYRPWGTEIGAF

SEQ ID NO: 57278 - protein, 434 aa, Homo sapiens
MRPPQCLLHTPSLASPLLLLLLWLLGGGVGAEGREDAELLVTVRGGRLRGIRLKTPGGPVSAFLGIPFAEPPMGPRRFLPPEPKQPWSGVVDATTFQSVCYQYVDTLYPGFEGTEMWNPNRELSEDCLYLNVWTPYPRPTSPTPVLVWIYGGGFYSGASSLDVYDGRFLVQAERTVLVSMNYRVGAFGFLALPGSREAPGNVGLLDQRLALQWVQENVAAFGGDPTSVTLFGESAGAASVGMHLLSPPSRGLFHRAVLQSGAPNGPWATVGMGEARRRATQLAHLVGCPPGGTGGNDTELVACLRTRPAQVLVNHEWHVLPQESVFRFSFVPVVDGDFLSDTPEALINAGDFHGLQVLVGVVKDEGSYFLVYGAPGFSKDNESLISRAEFLAGTRSTRRSASGRPSSTAGAPTWCTGRTSSTTTASRIAAQTCD

SEQ ID NO: 57279 - protein, 161 aa, Homo sapiens
KVCYYYDGDIGNYYYGQGHPMKPHRIRMTHNLLLNYGLYRKMEIYRPHKATAEEMTKYHSDEYIKFLRSIRPDNMSEYSKQMQRFNVGEDCPVFDGLFEFCQLSTGGSVAGAVKLNRQQTDMAVNWAGGLHHAKKSEASGFCYVNDIVLAILELLKYVNLY

SEQ ID NO: 57280 - protein, 86 aa, Homo sapiens
MRTLACLLLLGCGYLAHVLAEEAEIPREVIERLARSQIHSIRDLQRLLEIDSVGSEDSLDTSLRAHGVHATKHVPEKRPLPIRRKR

SEQ ID NO: 57281 - protein, 12 aa, Homo sapiens
MPKSGFTKPIQS

SEQ ID NO: 57282 - protein, 518 aa, Homo sapiens
MADTRSVHETRFEAAVKVIQSLPKNGSFQPTNEMMLKFYSFYKQATEGPCKLSRPGFWDPIGRYKWDAWSSLGDMTKEEAMIAYVEEMKKIIETMPMTEKVEELLRVIGPFYEIVEDKKSGRSSDITSVRLEKISKCLEEPGFCHVGQADLELLTSDLGNVLTSTPNAKTVNGKAESSDSGAESEEEEAQEEVKGAEQSDNDKKMMKKSADHKNLEVIVTNGYDKDGFVQDIQNDIHASSSLNGRSTEEVKPIDENLGQTGKSAVCIHQDINDDHVEDVTGIQHLTSDSDSEVYCDSMEQFGQEESLDSFTSNNGPFQYYLGGHSSQPMENSGFREDIQVPPGNGNIGNMQVVAVEGKGEVKHGGEDGRNNSGAPHREKRGGETDEFSNVRRGRGHRMQHLSEGTKGRQVGSGGDGERWGSDRGSRGSLNEQIALVLMRLQEDMQNVLQRLQKLETLTALQAKSSTSTLQTAPQPTSQRPSWWPFEMSPGVLTFAIIWPFIAQWLVYLYYQRRRRKLN

SEQ ID NO: 57283 - protein, 56 aa, Homo sapiens
MAALGDIQESPSVPSPVSLSSPGTPGTQHHEPQLHLHGHQHALRCSPSRPTWISKT

SEQ ID NO: 57284 - protein, 59 aa, Homo sapiens
  MOD_RES (1)..(1): Any amino acid
XTEVRVRALYDYEGQEHDELSFKAETGFHHIIQSGLELLSSSDPPASASQSAGITGMSP

SEQ ID NO: 57285 - protein, 87 aa, Homo sapiens
MGESFDVVTKCVSFTLTEQFMEKFVDPGNHNSGIDLLRTYLWRCQFLLPFVSLGLMCFGALIGLCACICRSLYPTIATGILHLLAEN

SEQ ID NO: 57286 - protein, 729 aa, Homo sapiens
MESTLSASNMQDPSSSPLEKCLGSANGNGDLDSEEGSSLEETGFNWGEYLEETGASAAPHTSFKHVEISIQSNFQPGMKLEVANKNNPDTYWVATIITTCGQLLLLRYCGYGEDRRADFWCDVVIADLHPVGWCTQNNKVLMPPDAIKEKYTDWTEFLIRDLTGSRTAPANLLEGPLRGKGPIDLITVGSLIELQDSQNPFQYWIVSVIENVGGRLRLRYVGLEDTESYDQWLFYLDYRLRPVGWCQENKYRMDPPSEIYPLKMASEWKCTLEKSLIDAAKFPLPMEVFKDHADLRSHFFTVGMKLETVNMCEPFYISPASVTKVFNNHFFQVTIDDLRPEPSKLSMLCHADSLGILPVQWCLKNGVSLTPPKGYSGQDFDWADYHKQHGAQEAPPFCFRNVLSMIINAAYKPGRVLRELQLVEDPHWNFQEETLKAKYRGKTYRAVVKIVRTSDQVANFCRRVCAKLECCPNLFSPVLISENCPENCSIHTKTKYTYYYGKRKKISKPPIGESNPDSGHPKPARRRKRRKSIFVQKKRRSSAVDFTAGSGEESEEEDADAMDDDTASEETGSELRDDQTDTSSAEVPSARPRRAVTLRSGSEPVRRPPPERTRRGRGAPAASSAEEGEKCPPTKPEGTEDTKQEEEERLVLESNPLEWTVTDVVRFIKLTDCAPLAKIFQEQDIDGQALLLLTLPTVQECMELKLGPAIKLCHQIERVKVAFYAQYAN

SEQ ID NO: 57287 - protein, 269 aa, Homo sapiens
MTTLTHRARRTEISKNSEKKMESEEDSNWEKSPDNEDSGDSKDIRLTLMEEVLLLGLKDKEANINSWITRWLTPVIPALWGAEGYTSFWNDCISSGLRGGILIELAMRGRIYLEPPTMRKKRLLDRKVLLKSDSPTGDVLLDETLKHIKATEPTETVQTWIELLTGETWNPFKLQYQLRNVRERIAKNLVEKGILTTEKQNFLLFDMTTHPVTNTTEKQRLVKKLQDSVLERWVNDPQRMDKRTLALLVLAHSSDVLENVFSSLTDDKY

SEQ ID NO: 57288 - protein, 216 aa, Homo sapiens
MSRLLGGTLERVCKAVLLLCLLHFLVAVILYFDVYAQHLAFFSRFSARGPAHALHPAASSSSSSSNCSRPNATASSSGLPEVPSALPGPTAPTLPPCPDSPPGLVGRLLIEFTSPMPLERVQRENPGVLMGGRYTPPDCTPAQTVAVIIPFRHREHHLRYWLHYLHPILRRQRLRYGVYVINQKGHSGCIWSMDGEGRLETAWPVWKRGRCPGKRR

SEQ ID NO: 57289 - protein, 97 aa, Homo sapiens
MNSRQAWRLFLSQGRGDRWVSRPRGHFSPALRREFFTTTTKEGYDRRPVDITPLEQRKLTFDTHALVQDLETHGNNSTTANGSFGCYQERHGHPREK

SEQ ID NO: 57290 - protein, 725 aa, Homo sapiens
MGVRNCLYGNNMSGQRDIPPEIGEQPEQPPLEAPGAAAPGAGPSPAEEMETEPPHNEPIPVENDGEACGPPEVSRPNFQVLNPAFREAGAHGSYSPPPEEAMPFEAEQPSLGGFWPTLEQPGFPSGVHAGLEAFGPALMEPGAFSGARPGLGGYSPPPEEAMPFEFDQPAQRGCSQLLLQVPDLAPGGPGAAGVPGAPPEEPQALRPAKAGSRGGYSPPPEETMPFELDGEGFGDDSPPPGLSRVIAQVDGSSQFAAVAASSAVRLTPAANAPPLWVPGAIGSPSQEAVRPPSNFTGSSPWMEISGPPFEIGSAPAGVDDTPVNMDSPPIALDGPPIKVSGAPDKRERAERPPVEEEAAEMEGAADAAEGGKVPSPGYGSPAAGAASADTAARAAPAAPADPDSGATPEDPDSGTAPADPDSGAFAADPDSGAAPAAPADPDSGAAPDAPADPDSGAAPDAPADPDAGAAPEAPAAPAAAETRAAHVAPAAPDAGAPTAPAASATRAAQVRRAASAAPASGARRKIHLRPPSPEIQAADPPTPRPTRASAWRGKSESSRGRRVYYDEGVASSDDDSSGDESDDGTSGCLRWFQHRRNRRRRKPQRNLLRNFLVQAFGGCFGRSESPQPKASRSLKVKKVPLAEKRRQMRKEALEKRAQKRAEKKRSKLIDKQLQDEKMGYMCTHRLLLLGRKVVPSDTEGRFRLDRPAPATVSWTGRGFRCWRIW

SEQ ID NO: 57291 - protein, 171 aa, Homo sapiens
MMQESATETISNSSMNQNGMSTLSSQLDAGSRDGRSSGDTSSEVSTVELLHLQQQQQQQQQQQLAAQQLVFQQQLLQMQQLQQQQHLLSLQRQGLISIPPGQAALPVQSLPQAGLSPAEIQQLWKEVTGVHSMEDNGIKHGGLDLTTNNSSSTTSSNTSKASPPITHHSIV

SEQ ID NO: 57292 - protein, 554 aa, Homo sapiens
  MOD_RES (1)..(1): Any amino acid
XARSLDDIDLSALRDPAGIFELVEVVGNGTYGQVYKGRHVKTGQLAAIKVMDVTEDEEEEIKQEINMLKKYSHHRNIATYYGAFIKKSPPGNDDQLWLVMEFCGAGSVTDLVKNTKGNALKEDCIAYICREILRGLAHLHAHKVIHRDIKGQNVLLTENAEVKLVDFGVSAQLDRTVGRRNTFIGTPYWMAPEVIACDENPDATYDYRSDIWSLGITAIEMAEGAPPLCDMHPMRALFLIPRNPPPRLKSKKWSKKFIDFIDTCLIKTYLSRPPTEQLLKFPFIRDQPTERQVRIQLKDHIDRSRKKRGEKEETEYEYSGSEEEDDSHGEEGEPSSIMNVPGESTLRREFLRLQQENKSNSEALKQQQQLQQQQQRDPEAHIKHLLHQRQRRIEEQKEERRRVEEQQRREREQRKLQEKEQQRRLEDMQALRREEERRQAEREQEYIRHRLEEEQRQLEILQQQLLQEQALLLEYKRKQLEEQRQSERLQRQLQQEHAYLKSLQQQQQQQQLQKQQQQQLLPGDRKPLYHYGRGMNPADKPAWAREVEERTRMN

SEQ ID NO: 57293 - protein, 74 aa, Homo sapiens
  MOD_RES (1)..(1): Any amino acid
XALLLLLLGLAWTQGSHGWGADASSLQKRAGRDDQNYNYNQHAYPTAYGGKYSVKTPAKASRVQPGLLQWVKFW

SEQ ID NO: 57294 - protein, 688 aa, Homo sapiens
MPAIMTMLADHAARQLLDFSQKLDINLLDNVVNCLYHGEGAQQRMAQEVLTHLKEHPDAWTRVDTILEFSQNMNTKYYGLQILENVIKTRWKILPRNQCEGIKKYVVGLIIKTSSDPTCVEKEKVYIGKLNMILVQILKQEWPKHWPTFISDIVGASRTSESLCQNNMVILKLLSEEVFDFSSGQITQVKSKHLKDSMCNEFSQIFQLCQFVMENSQNAPLVHATLETLLRFLNWIPLGYIFETKLISTLIYKFLNVPMFRNVSLKCLTEIAGVSVSQYEEQFVTLFTLTMMQLKQMLPLNTNIRLAYSNGKDDEQNFIQNLSLFLCTFLKEHDQLIEKRLNLRETLMEALHYMLLVSEVEETEIFKICLEYWNHLAAELYRESPFSTSASPLLSGSQHFDVPPRRQLYLPMLFKVRLLMVSRMAKPEEVLVVENDQGEVVREFMKDTDSINLYKNMRETLVYLTHLDYVDTERIMTEKLHNQVNGTEWSWKNLNTLCWAIGSISGAMHEEDEKRFLVTVIKDLLGLCEQKRGKDNKAIIASNIMYIVGQYPRFLRAHWKFLKTVVNKLFEFMHETHDGVQDMACDTFIKIAQKCRRHFVQVQVGEVMPFIDEILNNINTIICDLQPQQVHTFYEAVGYMIGAQTDQTVQEHLIEKYMLLPNQVWDSIIQQATKRRGFTVLSRMVPIS

SEQ ID NO: 57295 - protein, 382 aa, Homo sapiens
MQNSHSGVNQLGGVFVNGRPLPDSTRQKIVELAHSGARPCDISRILQTHADAKVQVLDNQNVSNGCVSKILGRYYETGSIRPRAIGGSKPRVATPEVVSKIAQYKRECPSIFAWEIRDRLLSEGVCTNDNIPSVSSINRVLRNLASEKQQMGADGMYDKLRMLNGQTGSWGTRPGWYPGTSVPGQPTQDGCQQQEGGGENTNSISSNGEDSDEAQMRLQLKRKLQRNRTSFTQEQIEALEKEFERTHYPDVFARERLAAKIDLPEARIQVWFSNRRAKWRREEKLRNQRRQASNTPSHIPISSSFSTSVYQPIPQPTTPVSSFTSGSMLGRTDTALTNTYSALPPMPSFTMANNLPMQDSFPLVCQFQFKFPEVNLICLNTG

SEQ ID NO: 57296 - protein, 1606 aa, Homo sapiens [sequence omitted]

SEQ ID NO: 57297 - protein, 95 aa, Homo sapiens
MDALVEDDICILNHEKAHKRDTVTPVSIYSGDESVASHFALVTAYEDIKKRLKDSEKENSLLKKRIRFLEEKLIARFEEETSSVGREQVNKAYHA

SEQ ID NO: 57298 - protein, 989 aa, Homo sapiens
MGRKTSRVQQGPPRSPACSAHGERSWGLEFPPFRWLLGIAGRTHLAALPPFQWVLAFEIFIPLVLFFILLGLRQKKPTISVKEAFYTAAPLTSAGILPVMQSLCPDGQRDEFGFLQYANSTVTQLLERLDRVVEEGNLFDPARPSLGSELEALRQHLEALSAGPGTSGSHLDRSTVSSFSLDSVARNPQELWRFLTQNLSLPNSTAQALLAARVDPPEVYHLLFGPSSALDSQSGLHKGQEPWSRLGGNPLFRMEELLLAPALLEQLTCTPGSGELGRILTVPESQKGALQGYRDAVCSGQAAARARRFSGLSAELRNQLDVAKVSQQLGLDAPNGSDSSPQAPPPRRLQALLGDLLDAQKVLQDVDVLSALALLLPQGACTGRTPGPPASGAGGAANGTGAGAVMGPNATAEEGAPSAAALATPDTLQGQCSAFVQLWAGLQPILCGNNRTIEPEALRRGNMSSLGFTSKEQRNLGLLVHLMTSNPKILYAPAGSEVDRVILKANETFAFVGNVTHYAQVWLNISAEIRSFLEQGRLQQHLRWLQQYVAELRLHPEALNLSLDELPPALRQDNFSLPSGMALLQQLDTIDNAACGWIQFMSKVSVDIFKGFPDEESIVNYTLNQAYQDNVTVFASVIFQTRKDGSLPPHVHYKIRQNSSFTEKTNEIRRAYWRPGPNTGGRFYFLYGFVWIQDMMERAIIDTFVGHDVVEPGSYVQMFPYPCYTRDDFLFVIEHMMPLCMVISWVYSVAMTIQHIVAEKEHRLKEVMKTMGLNNAVHWVAWFITGFVQLSISVTALTAILKYGQVLMHSHVVIIWLFLAVYAVATIMFCFLVSVLYSKAKLASACGGIIYFLSYVPYMYVAIREEVAHDKITAFEKCIASLMSTTAFGLGSKYFALYEVAGVGIQWHTFSQSPVEGDDFNLLLAVTMLMVDAVVYGILTWYIEAVHPEVLLAGQWADRSLGVELAVGTHPPPQCHGGGPGLCHGEPAL

SEQ ID NO: 57299 - protein, 185 aa, Homo sapiens
MATPLGWSKAGSGSVCLALDQLRDVIESQEELIHQLRNVMVLQDENFVSKEEFQAVEKKLVEEKAAHAKTKVLLAKEEEKLQFALGEVEVLSKQLEKEKLAFEKAVKSKVLQESSKKDQLITKCNGRREARALHHGYINGLFPNHPVPVSKAGFHSNTCPQLRIQAGPGGPHLRKGLKGPGRPRK

SEQ ID NO: 57300 - protein, 208 aa, Homo sapiens
MKLLTGLVFCSLVLSVSSRSFFSFLGEAFDGARDMWRAYSDMREANYIGSDKYFHARGNYDAAKRGPGGAWAAEVISTMRLFTGIVFCSLVMGVTSESWRSFFKEALQGVGDMGRAYWDIMISNHQNSNRYLYARGNYDAAQRGPGGVWAAKLISRSRVYLQGLIDCYLFGNSSTVLEDSKSNEKAEEWGRSGKDPDRFRPDGLPKKY

SEQ ID NO: 57301 - protein, 30 aa, Homo sapiens
  MOD_RES (1)..(1): Any amino acid
XSKSENSLNSIGSHYVAQAGVQQRLGLPKC

SEQ ID NO: 57302 - protein, 331 aa, Homo sapiens
MSLSSGASGGKGVDANPVETYDSGDEWDIGVGNLIIDLDADLEKDQQKLEMSGSKEVGIPAPNAVATLPDNIKFVTPVPGPQGKEGKSKSKRSKSGKDTSKPTPGTSLFTPSEGAASKKEVQGRSGDGANAGGLVAAIAPKGSEKAAKASRSVAGSKKEKENSSSKSKKERSEGVGTCSEKDPGVLQPVPLGGRGGQYDGSAGVDTGAVEPLGSIAIEPGAALNPLGTKPEPEEGENECRLLKKVKSEKVRGGQIWLPTDCQSELPWTNCQILCVLCGRLISVWVMTNYKVRAAGNDNVVFFQIRGFPYRLIYSRPGHCGTGYLLLGAATL

SEQ ID NO: 57303 - protein, 583 aa, Homo sapiens
MAHVRGLQLPGCLALAALCSLVHSQHVFLAPQQARSLLQRVRRANTFLEEVRKGNLERECVEETCSYEEAFEALESSTATDVFWAKYTACETARTPRDKLAACLEGNCAEGLGTNYRGHVNITRSGIECQLWRSRYPHKPEINSTTHPGADLQENFCRNPDSSTTGPWCYTTDPTVRRQECSIPVCGQDQVTVAMTPRSEGSSVNLSPPLEQCVPDRGQQYQGRLAVTTHGLPCLAWASAQAKALSKHQDFNSAVQLVENFCRNPDGDEEGVWCYVAGKPGDFGYCDLNYCEEAVEEETGDGLDEDSDRAIEGRTATSEYQTFFNPRTFGSGEADCGLRPLFEKKSLEDKTERELLESYIDGRIVEGSDAEIGMSPWQVMLFRKSPQELLCGASLISDRWVLTAAHCLLYPPWDKNFTENDLLVRIGKHSRTRYERNIEKISMLEKIYIHPSLLQAGYKGRVTGWGNLKETWTANVGKGQPSVLQVVNLPIVERPVCKDSTRIRITDNMFCAGYKPDEGKRGDACEGDSGGPFVMKSPFNNRWYQMGIVSWGEGCDRDGKYGFYTHVFRLKKWIQKVIDQFGE

SEQ ID NO: 57304 - protein, 47 aa, Homo sapiens
MSQQKCIVIFALVCCFAILVALIFSAVDIMGEDEDGLSEKNCQNKCR

SEQ ID NO: 57305 - protein, 512 aa, Homo sapiens
DWKEQEWDPEKPNAYAGIFHFHFWRFGEWVDVVIDDRLPTVNNQLIYCHSNSRNEFWCALVEKAYAKLAGCYQALDGGNTADALVDFTGGVSEPIDLTEGDFANDETKRNQLFERMLKVHSRGGLISASIKAVTAADMEARLACGLVKGHAYAVTDVRKVRLGHGLLAFFKSEKLDMIRLRNPWGEREWNGPWSDTMTFEDVCRYFTDIIKCRVINTSHLSIHKTWEEARLHGAWTLHEDPRQNRGGGCINHKDTFFQNPQYIFEVKKPEDEVLICIQQRPKRSTRREGKGENLAIGFDIYKVEENRQYRMHSLQHKAASSIYINSRSVFLRTDQPEGRYVIIPTTFEPGHTGEFLLRVFTDVPSNCRELRLDEPPHTCWSSLCGYPQLVTQVHVLGAAGLKDSPTGANSYVIIKCEGDKVRSAVQKGTSTPEYNVKGIFYRKKLSQPITVQVWNHRVLKDEFLGQVHLKADPDNLQALHTLHLRDRNSRQPSNLPGTVAVHILSSTSLMAV

SEQ ID NO: 57306 - protein, 144 aa, Homo sapiens
MKTGFSPTCTAAMTGGSLSRGDWYKTKEILLKGPDWILGEIKTSGLRGRGGAGFPTGLKWSFMNKPSDGRPKYLVVNADEGEPGTCKDREILRHDPHKLLEGCLVGGRAMGARAAYIYIRGEFYNEASNLQVAIREAYEAGLIG

SEQ ID NO: 57307 - protein, 38 aa, Homo sapiens
GTLGLSLTSDAPFLSDYQDEVETGFHRVSQDGLDLLTS

SEQ ID NO: 57308 - protein, 497 aa, Homo sapiens
MADNEKLDNQRLKNFKNKGRDLETMRRQRNEVVVELRKNKRDEHLLKRRNVPHEDICEDSDIDGDYRVQNTSLEAIVQNASSDNQGIQLSAVQAARKLLSSDRNPPIDDLIKSGILPILVHCLERDDNPSLQFEAAWALTNIASGTSEQTQAVVQSNAVPLFLRLLHSPHQNVCEQAVWALGNIIGDGPQCRDYVISLGVVKPLLSFISPSIPITFLRNVTWVMVNLCRHKDPPPPMETIQEILPALCVLIHHTDVNILVDTVWALSYLTDAGNEQIQMVIDSGIVPHLVPLLSHQEVKVQTAALRAVGNIVTGTDEQTQVVLNCDALSHFPALLTHPKEKINKEAVWFLSNITAGNQQQVQAVIDANLVPMIIHLLDKVAYLIQQNVIPPFCNLLTVKDAQVVQVVLDGLSNILKMAEDEAETIGNLIEECGGLEKIEQLQNHENEDIYKLAYEIIDQFFSSDDIDEDPSLVPEAIQGGTFGFNSSANVPTEGFQF

SEQ ID NO: 57309 - protein, 142 aa, Homo sapiens
MQRGLDSETKKQLEEEEKKIISEEHWYLDLPELKEKESFIIEEQSFLLCEDLLYGRMSFRGFNPEVEKLMLQMNAKHKAEEVEDETVELDVSDEEMARRYETLVGTIGKKFARKRDHANYEEDENGDITPIKAKKMFLKPQD

SEQ ID NO: 57310 - protein, 797 aa, Homo sapiens
  MOD_RES (1)..(1): Any amino acid
XVVVPTLKQHSHPPPLALGSGLHAPHKGPLPQASDPAVARQHRPLPSTPDSSHHAQATPRWRYNKPLPPTPDLPQPHLPPISAPGSSRIYRPLPPLPIIDPPTEPPPLPPKSRGRSRSTRGGHMNSGGHAKTRPACQDWTVPLPASAGRTSWPPATARSTESFTSTSRSKSEVSPGMAFSNMTNFLCPSSPTTPWTPELQGPTSKDEAGVSEHPEAPAREPLRRTTPQQGASGPGRSPVGQARQPEKPSHLHLEKASSWPHRRDSGRPPGDSSGQAVAPSEGANKHKGWSRQGLRRPSILPEGSSDSRGPAVEKHPGPSDTVVFREKKPKEVMGGFSRRCSKLINSSQLLYQEYSDVVLNKEIQSQQRLESLSETPGPSSPRQPRKALVSSESYLQRLSMASSGSLWQEIPVVRNSTVLLSMTHEDQKLQEVKFELIVSEASYLRSLNIAVDHFQLSTSLRATLSNQEHQWLFSRLQDVRDVSATFLSDLEENFENNIFSFQVCDVVLNHAPDFRRVYLPYVTNQTYQERTFQSLMNSNSNFREVLEKLESDPVCQRLSLKSFLILPFQRITRLKLLLQNILKRTQPGSSEEAEATKAHHALEQLIRDCNNNVQSMRRTEELIYLSQKIEFECKIFPLISQSRWLVKSGELTALEFSASPGLRRKLNTRPVHLHLFNDCLLLSRPRESEKLRWISALAMPREELDLLECYNSPQVQCLRAYKPRENDELALEKADVVMVTQQSSDGWLEGVRLSDGERGWFPVQQVEFISNPEVRAQNLKEAHRVKTAKLQLVEQQA

SEQ ID NO: 57311 - protein, 170 aa, Homo sapiens
MAHVGSRKRSRSRSRSRGRGSEKRKKKSRKDTSRNCSASTSQERSKQKARRRTRSSSSSSSSSSSSSSSSSSSSSSSSSDGRKKRGKYKDKRRKKKKKRKKLKKKGKEKAEAQQSIIRKVVDPETGRTRLIKGDGEVLEEIVTKERHREINKQATRGDCLAFQMRAGLLP

SEQ ID NO: 57312 - protein, 135 aa, Homo sapiens
  MOD_RES (1)..(1): Any amino acid
XQLASMVWNNPSQQQFMQFGGSSGSQLPQIQTDVVLPSCKKKAPAETPVKERLFIVFNPHPLPLDVLEDIFCRFGNLIEVYLVSGKNVGYAKYADRISANDAIATLHGKILNGVRLKVMLADSPREESNKRQRTY

SEQ ID NO: 57313 - protein, 165 aa, Homo sapiens
MAALGDIQESPSVPSPVSLSSPGTPGTQHHEPQLHLHGHQHGSPGSSPKVLSQPSDLDLQDVEEVEIGRDTFWPVQLLMLPEAVTAAHSHLRQWPHVDSCRPQLDTVNQELLPPLHLPWAGASGSGHHCPPRSTSYPVSPPPPASPRWPPLSLVGAVSRSPAPPP

SEQ ID NO: 57314 - protein, 558 aa, Homo sapiens
MSSSSRGPGAGARRRRTRCRRCRACVRTECGDCHFCRDMKKFGGPGRMKQSCLLRQCTAPVLPHTAVCLLCGEAGKEDTVEGEEEKFGLSLMECTICNEIVHPGCLKMGKAEGVINAEIPNCWECPRCTQEGRTSKVKGGRERHLKKKPKPPLASAEGPAVPSPSPQREKLERFKRMCQLLERVPDTSSSSSDSDSDSDSSGTSLSEDEAPGEARNGRRPARGSSGEKENRGGRRAVRPGSGGPLLSWPLGPAPPPRPPQLERHVVRPPPRSPEPDTLPLAAGSDHPLPRAAWLRVFQHLGPRELCICMRVCRTWSRWCYDKRLWPRMDLSRRKSLTPPMLSGVVRRQPRALDLSWTGVSKKQLMWLLNRLQGLQELVLSGCSWLSVSALGSAPLPALRLLDLRWIEDVKDSQLRELLLPPPDTKPGQTESRGRLQGVAELRLAGLELTDASLRLLLRHAPQLSALDLSHCAHVGDPSVHLLTAPTSPLRETLVHLNLAGCHRLTDHCLPLFRRCPRLRRLDLRSCRQLSPEACARLAAAGPPGPFRCPEEKLLLKDS

SEQ ID NO: 57315 - protein, 135 aa, Homo sapiens
MRRSLAPSQLAKRKPEGRSCDDEDWQPGLVTPRKRKSSSETQIQECFLSPFRKPLSQLTNQPPCLDSSQHEAAGSGLICMAVLRVGERPRCLLSTRSIYSKHFVKAFQSPHSKLSRSSGLSSIGPEKGWGPPGPP

SEQ ID NO: 57316 - protein, 159 aa, Homo sapiens
MRRVVRQSKFRHVFGQAVKNDQCYDDIRVSRVTWDSSFCAVNPRFVAIIIEASGGGAFLVLPLHKTGRIDKSYPTVCGHTGPVLDIDWCPHNDQVIASGSEDCTVMVWQIPENGLTLSLTEPVVILEGHSKRVGIVAWHPTARNVLLSAEKYAGTNCSS

SEQ ID NO: 57317 - protein, 187 aa, Homo sapiens
MGPGRCLLTALLLLALAPPPEASQYCGRLEYWNPDNKCCSSCLQRFGPPPCPGALETGDTWKEASLLPLLSRELSSLASQPLSRLLDELEVLEELIVLLDPEPGPGGGMAHGTTRHLAARYGLPAAWSTFAYSLRPSRSPLRALIEMVVAREPSASLGQLGTHLAQLGRADALRVLSKLGSSGVCWA

SEQ ID NO: 57318 - protein, 176 aa, Homo sapiens
ILLEPGVIQDVLAAGSHLQLLELLNLCSHYLIQELNSFNYLDLYRLADLFNLTLLEKAVIDFLVKHLSELLKSRPEEVLTLPYCLLQEVLKSDRLTSLSEEQIWQKCGICAAFCALRGDWCPGLPQWDDKTASCEVVGTQLPLPVHGRAPAIHPLWPNGCGYSPYSCPVPPPCPSK

SEQ ID NO: 57319 - protein, 135 aa, Homo sapiens
MAQVSINNDYSEWDLSTDAGERARLLQSPCVDTAPKSEWEASPGGLDRGTTSTLGAIFIVVNACLGAGLLNFPAAFSTAGGVAAGIALQMVSALAGRAEVQFSWALCLKREASGQGWPVSDTRTALPSLTHGRHD

SEQ ID NO: 57320 - protein, 235 aa, Homo sapiens
  MOD_RES (1)..(1): Any amino acid
XGSSTTSAPSFGFGTNTSGNSIFGSKPAPGTLGTGLGAGFGTALGAGQASLFGNNQPKIGGPLGTGAFGAPGFNTTTATLGFGAPQAPVALTDPNASAAQQAVLQQHINSLTYSPFGDSPLFRNPMSDPKKKEERLKPTNPAAQKALTTPTHYKLTPRPATRVRPKALQTTGTAKSHLFDGLDDDEPSLANGAFMPKKSIKKLVLKNLNNSNLFSPVNRDSENLASPSEYPENGE

SEQ ID NO: 57321 - protein, 248 aa, Homo sapiens
MSDTLTADVIGRRVEVNGEHATVRFAGVVPPVAGPWLGVEWDNPERGKHDGSHEGTVYFKCRHPTGGSFIRPNKVNFGTDFLTAIKNRYVLEDGPEEDRKEQIVTIGNKPVETIGFDSIMKQQSENKLKFPSGSVLTGTLSVLKVLVLNQTGITWAEAHAQCGGSRHGLDMQKDASKFVDLCVLQKCSTSNCIISAKDHTSMRMNVAKASEVTGRFNSQFKTCAICRTVCRMGAAVCRGVPRPGGTLP

SEQ ID NO: 57322 - protein, 70 aa, Homo sapiens
MAKRLQAELSCPVCLDFFSCSISLSCTHVFCFDCIQRYILENHDFRAMCPLCRDVVKVPALEEWQVSVLT

SEQ ID NO: 57323 - protein, 153 aa, Homo sapiens
MKSLLLLVLISICWADHLSDNYTLDHDRAIHIQAENGPHLLVEAEQAKVFSHRGGNVTLPCKFYRDPTAFGSGIHKIRIKWTKLTSDYLKEVDVFVSMGYHKKTYGGYQGRVFLKGGSDSDASLVITDLTLEDYGRYKCEVIEGLEDDTVVVA

SEQ ID NO: 57324 - protein, 104 aa, Homo sapiens
MAGRTVRAETRSRAKDDIKKVMATIEKVRRWEKRWVTVGDTSLRIFKWVPVVDPQEEVPCKRAQSPVLGAPPSPAALCHLPDPQKGSLRRLSPHGWAKREIPGA

SEQ ID NO: 57325 - protein, 378 aa, Homo sapiens
  MOD_RES (1)..(1): Any amino acid
XAELLLRRLEASDGGLDSAELAAELGMEHQAVVGAVKSLQALGEVDSMEDEVQRRLQLVRGGQAEKLGEKERSELRKRKLLAEVTLKTYWVSKGSAFSTSISKQETELSPEMISSGSWRDRPFKPYNFLAHGVLPDSGHLHPLLKVRSQFRQIFLEMGFTEMPTDNFIESSFWNFDALFQPQQHPARDQHDTFFLRDPAEALQLPMDYVQRVKRTHSQGGYGSQGYKYNWKLDEARKNLLRTHTTSASARALYRLAQKKPFTPVKYFSIDRVFRNETLDATHLAEFHQIEGVVADHGLTLGHLMGVLREFFTKLGITQLRFKPAYNPYTEPSMEVFSYHQGLKKWVEVGNSGVFRPEMLLPMGLPENVSVIAWGLSLE

SEQ ID NO: 57326 - protein, 142 aa, Homo sapiens
MIEESIPSQSPTTVIPGQLLWTPGPKLFHGSLEELSQALPSRAQASSEQPPPLPRKMCRSVSTDNLSPSLLKPFQEGPSGRSLSQEDLPSEASASTAGPQPLMSEPPVYCNLVDLRRCPRSPPPGPACPLLQRLDAWEQHLD

SEQ ID NO: 57327 - protein, 339 aa, Homo sapiens
  MOD_RES (1)..(1): Any amino acid
XEVPMIPRPHYAQPGCVYFICLLRDDLLLRQGDCVYLMRDSRRTPDGHPVRQSYRLLSHINRDKLDIFRIEKLWKNEKYVLREERFAFGHHYFRPHETHHSPSRRFYHNELFRVPLYEIIPLEAVVGTCCVLDLYTYCKGRPKGVKEQDVYICDYRLDKSAHLFYKIHRNRYPVCTKPYAFDHFPKKLTPKKDFSPHYVPDNYKRNGGRSSWKSERSKPPLKDLGQEDDALPLIEEVLASQEQAANEIPSLEEPEREGATANVSEGEKKTEESSQEPQSTCTPEERRHNQRERLNQILLNLLEKIPGKNAIDVTYLLEEGSGRKLRRRTLFIPENSFRK

SEQ ID NO: 57328 - protein, 195 aa, Homo sapiens
ELYSVDQELLKDYIKRQIEYYFSVDNLERDFFLRRKMDADGFLPITLIASFHRVQALTTDISLIFAALKDSKVVEIVDEKVRRREEPEKWPLPPIVDYSQTDFSQLLNCPEFVPRQHYQKETVTPVPTKTEEVSNLKTLPKGLSASLPDLDSENWIEVKKRPRPSPARPKKSEESRFSHLTSLPQQLPSQQLMSK

SEQ ID NO: 57329 - protein, 165 aa, Homo sapiens
VKIQGQNKEMLAAACQMFLGKTEAEIAHIALETLEGHQRAIMAHMTVEEIYKDRQKFSEQVFKVASSDLVNMGISVVSYTLKDIHDDQDYLHSLGKARTAQVQKDARIGEAEAKRDAGIREAKAKQEKVSAQYLSEIEMAKAQRDYELKKAAYDIEVNTRRAQAD

SEQ ID NO: 57330 - protein, 79 aa, Homo sapiens
MPQLSLSSLGLWPMAASPWLLLLLVGASWLLARILAWTYTFYDNCCRLRCFPQPPKRNWFLGHLGLLPLYQRTRSSTAS

SEQ ID NO: 57331 - protein, 40 aa, Homo sapiens
MDDDIAALVVDNGSGMCKAGFAGDDAPRASGPSIVHRKCF

SEQ ID NO: 57332 - protein, 402 aa, Homo sapiens
MSFLVSKPERIRTNDASSESIASFSKQEVMSSFLPEGGCYELLTVIGKGFEDLMTVNLARYKPTGEYVTVRRINLEACSNEMVTFLQGELHVSKLFNHPNIVPYRATFIADNELWVVTSFMAYGSAKDLICTHFMDGMNELAIAYILQGVLKALDYIHHMGYVHRSVKASHILISVDGKVYLSGLRSNLSMISHGQRQRVVHDFPKYSVKVLPWLSPEVLQQNLQGYDAKSDIYSVGITACELANGHVPFKDMPATQMLLEKLNGTVPCLLDTSTIPAEELTMSPSRSVANSGLSDSLTTSTPRPSNGDSPSHPYHRTFSPHFHHFVEQCLQRNPDARPSASTLLNHSFFKQIKRRASEALPELLRPVTPITNFEGSQSQDHSGIFGLVTNLEELEVDDWEF

SEQ ID NO: 57333 - protein, 916 aa, Homo sapiens [sequence omitted]

SEQ ID NO: 57334 - protein, 493 aa, Homo sapiens
MSGSTQPVAQTWRATEPRYPPHSLSYPVQIARTHTDVGLLEYQHHSRDYASHLSPGSIIQPQRRRPSLLSEFQPGNERSQELHLRPESHSYLPELGKSEMEFIESKRPRLELLPDPLLRPSPLLATGQPAGSEDLTKDRSLTGKLEPVSPPSPPHTDPELELVPPRLSKEELIQNMDRVDREITMVEQQISKLKKKQQQLEEEAAKPPEPEKPVSPPPIESKHRSLVQIIYDENRKKAEAAHRILEGLGPQVELPLYNQPSDTRQYHENIKINQAMRKKLILYFKRRNHARKQWEQKFCQRYDQLMEAWEKKVERIENNPRRRAKESKVREYYEKQFPEIRKQRELQERMQSRVGQRGSGLSMSAARSEHEVSEIIDGLSEQENLEKQMRQLAVIPPMLYDADQQRIKFINMNGLMADPMKVYKDRQVMNMWSEQEKETFREKFMQHPKNFGLIASFLERKTVAECVLYYYLTKKNENYKSLVRRSYRRRGKS

SEQ ID NO: 57335 - protein, 56 aa, Homo sapiens
MWFLVLCLALSLGGTALVFWNPTPRILNAFSASASALASPKIASKRTPYPSSTLRP

SEQ ID NO: 57336 - protein, 274 aa, Homo sapiens
MEDGVYEPPDLTPEERMELENIRRRKQELLVEIQRLREELSEAMSEVEGLEANEGSKTLQRNRKMAMGRKKFNMDPKKGIQFLVENELLQNTPEEIARFLYKGEGLNKTAIGDYLGEREELNLAVLHAFVDLHEFTDLNLVQALRDSQHSRGQCPLVRLDHVTIPETTAEAGRSGFLVDQFLTQGLRVGTGSHQPWHPFLAPPQPRQFLWSFRLPGEAQKIDRMMEAFAQRYCLCNPGVFQSTDTCYVLSFAVIMLNTSLHNPNVRDKPGLERF

SEQ ID NO: 57337 - protein, 119 aa, Homo sapiens
MNMPVNKSPMINTCGGISSPYHEELWKLNFQHLSGERGHKSRPTFSITKEFILRFNQTQNSKEKEELLELARKIILRCKRKLGLKTLGSGRHVHLPAAWTEVIYLAQCKGEIQDGTYFK

SEQ ID NO: 57338 - protein, 116 aa, Homo sapiens
MSKGRAEAAAGAAGILLRYLQEQNRPYSSQDVFGNLQREHGLGKAVVVKTLEQLAQQGKIKEKMYGKQKIYFADQDQFDMVSDADLQVLDGKIVALTAKVQSLQQSCRYMEAGRTG

SEQ ID NO: 57339 - protein, 533 aa, Homo sapiens
MAHCVTLVQLSISCDHLIDKDIGSKSDPLCVLLQDVGGGSWAELGRTERVRNCSSPEFSKTLQLEYRFETVQKLRFGIYDIDNKTPELRDDDFLGGAECSLGQIVSSQVLTLPLMLKPGKPAGRGTITVSAQELKDNRVVTMEVEARNLDKKDFLGKSDPFLEFFRQGDGKWHLVYRSEVIKNNLNPTWKRFSVPVQHFCGGNPSTPIQVQCSDYDSDGSHDLIGTFHTSLAQLQAVPAEFECIHPEKQQKKKSYKNSGTIRVKICRVETEYSFLDYVMGGCQINFTVGVDFTGSNGDPSSPDSLHYLSPTGVNEYLMALWSVGSVVQDYDSDKLFPAFGFGAQVPPDWQVSHEFALNFNPSNPYCAGIQGIVDAYRQALPQVRLYGPTNFAPIINHVARFAAQAAHQGTASYFMLLLLTDGAVTDVEATREAVVRASNLPMSVIIVGVGGADFEAMEQLDADGGPLHTRSGQAAARDIVQFVPYRRFQNAPREALAQTVLAEVPTQLVSYFRAQGWAPLKPLPPSAKDPAQA

SEQ ID NO: 57340 - protein, 25 aa, Homo sapiens
MPSGSHWTANSSKIITWLLEQPGKE

SEQ ID NO: 57341 - protein, 345 aa, Homo sapiens
LRLLCLLPTGLPVRSVDFNRGTDNITVRQGDTAILRCVVEDKNSKVAWLNRSGIIFAGHDKWSLDPRVELEKRHSLEYSLRIQKVDVYDEGSYTCSVQTQHEPKTSQVYLIVQVPPKISNISSDVTVNEGSNVTLVCMANGRPEPVITWRHLTPTGREFEGEEEYLEILGITREQSGKYECKAANEVSSADVKQVKVTVNYPPTITESKSNEATTGRQASLKCEASAVPAPDFEWYRDDTRINSANGLEIKSTEGQSSLTVTNVTEEHYGNYTCVAANKLGVTNASLVLFKRVLPTIPHPIQEIGTTVHFKQKGPGSVRGINGSISLAVPLWLLAASLLCLLSKC

SEQ ID NO: 57342 - protein, 670 aa, Homo sapiens
MVPRLLLRAWPRGPAVGPGAPSRPLSAGSGPGQYLQRSIVPTMHYQDSLPRLPIPKLEDTIRRYLSAQKPLLNDGQFRKTEQFCKSFENGIGKELHEQLVALDKQNKHTSYISGPWFDMYLSARDSVVLNFNPFMAFNPDPKSEYNDQLTRATNMTVSAIRFLKTLRAGLLEPEVFHLNPAKSDTITFKRLIRFVPSSLSWYGAYLVNAYPLDMSQYFRLFNSTRLPKPSRDELFTDDKARHLLVLRKGNFYIFDVLDQDGNIVSPSEIQAHLKYILSDSSPAPEFPLAYLTSENRDIWAELRQKLMSSGNEESLRKVDSAVFCLCLDDFPIKDLVHLSHNMLHGDGTNRWFDKSFNLIIAKDGSTAVHFEHSWGDGVAVLRFFNEVFKDSTQTPAVTPQSQPATTDSTVTVQKLNFELTDALKTGITAAKEKFDATMKTLTIDCVQFQRGGKEFLKKQKLSPDAVAQLAFQMAFLRQYGQTVATYESCSTAAFKHGRTETIRPASVYTKRCSEAFVREPSRHSAGELQQMMVECSKYHGQLTKEAAMGRKPSHWPRYTASQGFDRHLFALRHLAAAKGIILPELYLDPAYGQINHNVLSTSTLSSPAVNLGGFAPVVSDGFGVGYAVHDNWIGCNVSSYPGRNAREFLQCVEKALEDMFDALEGKSIKS

SEQ ID NO: 57343 - protein, 231 aa, Homo sapiens
MSYSVTLTGPGPWGFRLQGGKDFNMPLTISRITPGSKAAQSQLSQGDLVVAIDGVNTDTMTHLEAQNKIKSASYNLSLTLQKSKRPIPISTTAPPVQTPLPVIPHQKDPALDTNGSLVAPSPSPEARASPGTPGTPELRPTFSPAFSRPSAFSSLAEASDPGPPRASLRAKTSPEGARDLLGPKALPGSSQPRQYNNPIGLYSAETLREMAQMYQMSLRGKASGVGLPGGW

SEQ ID NO: 57344 - protein, 283 aa, Homo sapiens
MAAHLVKRCTCLLREAARQAPAMAPVGRLRLAWVAHKTLTSSATSPISHLPGSLMEPVEKERASTPYIEKQVDHLIKKATRPEELLELLGGSHDLDSNQAAMIASVWHGTLSKLLGSLYALGIPKASKELQSVEQEVRWRMRKLKYKHLAFLAESCATLSQEQHSQELLAELLTHLERRWTEIEDSHTLVTVMMKVGHLSEPLMNRLEDKCLELVEHFGPNELRKVLVMLAAQSRRSVPLLRAISYHLVQKPFSLTKDVLLDVAYAYGKLSFHQTQVSQRLAT

SEQ ID NO: 57345 - protein, 107 aa, Homo sapiens
MAEDVSSAAPSPRGCADGRDADPTEEQMAETERNDEEQFECQELLECQVQVGAPEEEEEEEEDAGLVAEAEAVAAGWMLDFLCLSLCRAFRDGRSEDFRRTRNSAED

SEQ ID NO: 57346 - protein, 843 aa, Homo sapiens
MIFWSFVAGVVTFYCSLGPDSLLPNIFFTIKYKPKLGLQELFPQGHSCAVCGKVKCKRHRPSLLLENYQPWLDLKISSKVDASLSEVLELVLENFVYPWYRDVTDDESFVDELRITLRFFASVLIRRIHKVDIPSIITKKLLKAAMKHIEVIVKARQKVKNTEFLQQAALEEYGPELHVALRSRRDELHYLRKLTELLFPYILPPKATDCRSLTLLIREILSGSVFLPSLDFLADPDTVNHLLIIFIDDSPPEKATEPASPLVPFLQKFAEPRNKKPSVLKLELKQIREQQDLLFRFMNFLKQEGAVHVLQFCLTVEEFNDRILRPELSNDEMLSLHEELQKIYKTYCLDESIDKIRFDPFIVEEIQRIAEGPYIDVVKLQTMRCLFEAYEHVLSLLENVFTPMFCHSDEYFRQLLRGAESPTRNSKLNRGSLSLDDFRNTQKRGESFGISRIGSKIKGVFKSTTMEGAMLPNYGVAEGEDDFIEEGIVVMEDDSPVEAVSTPNTPRNLAAWKISIPYVDFFEDPSSERKEKKERIPVFCIDVERNDRRAVGHEPEHWSVYRRYLEFYVLESKLTEFHGAFPDAQLPSKRIIGPKNYEFLKSKREEFQEYLQKLLQHPELSNSQLLADFLSPNGGETQFLDKILPDVNLGKIIKSVPGKLMKEKGQHLEPFIMNFINSCESPKPKPSRPELTILSPTSENNKKLFNDLFKNNANRAENTERKQNQNYFMEVMTVEGVYDYLMYVGRVVFQVPDWLHHLLMGTRILFKNTLEMYTDYYLQCKLEQLFQEHRLVSLITLLRDAIFCENTEPRSLQDKQKGAKQTFEEMMNYIPAFLRVCIMPCAL

SEQ ID NO: 57347 - protein, 235 aa, Homo sapiens
TQDPAAEGPRQQDEVKGSRSYSHAGMEPCPESPHLPSNRYHKLIWGPYKMDSKGDVSGVLIAGGENGNIILYDPSKIIAGDKEVVIAQNDKHTGPVRALDVNIFQTNLVASGANESEIYIWDLNNFATPMTPGAKTQPPEDISCIAWNRQVQHILASASPSGRATVWDLRKNEPIIKVSDHSNRMHCSGLAWHPDVATQMVLASEDDRLPVIQMWDLRFASSPLRVLENHARYRA

SEQ ID NO: 57348 - protein, 745 aa, Homo sapiens
MPSPRPVLLRGARAALLLLLPPRLLARPSLLLRRSLSAASCPPISLPAAASRSSMDGAGAEEVLAPLRLAVRQQGDLVRKLKEDKAPQVDVDKAVAELKARKRVLEAKELALQPKDDIVDRAKMEDTLKRRFFYDQAFAIYGGVSGLYDFGPVGCALKNNIIQTWRQHFIQEEQILEIDCTMLTPEPVLKTSGHVDKFADFMVKDVKNGECFRADHLLKAHLQKLMSDKKCSVEKKSEMESVLAQLDNYGQQELADLFVNYNVKSPITGNDLSPPVSFNLMFKTFIGPGGNMPGYLRPETAQGIFLNFKRLLEFNQGKLPFAAAQIGNSFRNEISPRSGLIRVREFTMAEIEHFVDPSEKDHPKFQNVADLHLYLYSAKAQVSGQSARKMRLGDAVEQGVINNTVLGYFIGRIYLYLTKVGISPDKLRFRQHMENEMAHYACDCWDAESKTSYGWIEIVGCADRSCYDLSCHARATKVPLVAEKPLKEPKTVNVVQFEPSKGAIGKAYKKDAKLVMEYLAICDECYITEMEMLLNEKGEFTIETEGKTFQLTKDMINVKRFQKTLYVEEVVPNVIEPSFGLGRIMYTVFEHTFHVREGDEQRTFFSFPAVVAPFKCSVLPLSQNQEFMPFVKELCKQIQLAEALTRHGVSHKVDDSSGSIGRRYARTDEIGVAFGVTIDFDTVNKTPHTATLRDRDSMRQIRAEISELPSIVQDLANGNITWADVEARYPLFEGQETGKKETIEE

SEQ ID NO: 57349 - protein, 211 aa, Homo sapiens
MDPLFQQTHKQVHEIQSCMGRLETADKQSVHIENEIQASIDQIFSRLERLEILSSKEPPNKRQNARLRVDQLKYDVQHLQTALRNFQHRRHAREQQERQREELLSRTFTTNDSDTTIPMDESLQFNSSLQKVHNGMDDLILDGHNILDGLRTQRLTLKGTQKKILDIANMLGLSNTVMRLIEKRAFQDKYFMIGGMLLTCVVMFLVVQYLT

SEQ ID NO: 57350 - protein, 679 aa, Homo sapiens
MAAPVGPVKFWRPGTEGPGVSISEERQSLAENSGTTVVYNPYAALSIEQQRQKLPVFKLRNHILYLIENYQTVVIVGETGCGKSTQIPQYLAEAGWTAEGRVVGVTQPRRVAAVTVAGRVAEERGAVLGHEVGYCIRFDDCTDQLATRIKFLTDGMLVREMMVDPLLTKYSVIMLDEAHERTLYTDIAIGLLKKIQKKRGDLRLIVASATLDADKFRDFFNQNETSDPARDTCVILTVEGRTFPVDIFYLQSPVPDYIKSTVETVVKIHQTEGDGDVLAFLTGQEEVETVVSMLIEQARALARTGMKRHLRVLPMYAGLPSFEQMKVFERVSRSVRKVIVATNVAETSITISGIVYVIDCGFVKLRAYNPRTAIECLVVVPVSQASANQRAGRGGRSRSGKCYRLYTEEAFDKLPQSTVPEMQRSNLAPVILQLKALGIDNVLRFHFMSPPPAQSMVQALELLYALGGLDKDCRLTEPLGMRIAEFPLNPMFAKMLLESGNFGCSQEILSIAAMMQIQNIFVVPPNQKSHAIRVHRKFAVEEGDHLTMLNIYEAFIKHNKDSKWCQEHFLNYKGLVRAATVREQLKKLLVKFQVPRKSSEGDPDLVLRCIVSGFFANAARFHSTGAYRVIYNEVIQTSKYYMRDVTAIESAWLLELAPHFYQQGTHLSLKAKRAKVQDP

SEQ ID NO: 57351 - protein, 181 aa, Homo sapiens
  MOD_RES (1)..(1): Any amino acid
XIKLLDGKRSQTVGILISSLHLEMKDIQQAIFNVDDSVVDLETLAALYENRAQEDELVKIRKYYETSKEEELKLLDKPEQFLHELAQIPNFAERAQCIIFRSVFSEGITSLHRKVEIITRASKDLLHVKSVKDILALILAFGNYMNGGNRTRGQADGYSLEILPKLKDVKSRVFIFHNKFP

SEQ ID NO: 57352 - protein, 970 aa, Homo sapiens
MPGEAVEYHSIQLIRDEFLMNVQKFASNIQRTMQQLEGEIKLEMPIISVEGEVSDLAADPETVDILEQCVINWLNQISTAVEAQLKKTPQGKGPLAEIEFWRERNATLSALHEQTKLPIVRKVLDVIKESDSMLVANLQPVFTELFKFHTEASDNVRFLSTVERYFKNITHGSGFHVVLDTIPAMMSALRMVWIISRHYNKDERMIPLMERIAWEIAERVCRVVNLRTLFKENRASAQSKTLEARNTLRLWKKAYFDTRAKIEASGREDRWEFDRKRLFERTDYMATICQDLSDVLQILEEFYNIFGPELKAVTGDPKRIDDVLCRVDGLVTPMENLTFDPFSIKSSQFWKYVMDEFKIEVLVIEKEAKHFIDESFKTLRSAEAAFDMLLKFKHIRSREAVNRQMMMKFNDILAQYCKEIDIINKIFVQNLENPPLYKNHPPVAGAIYWERSLFFRIKHTILRFQEVQEILDSDRGQEVKQKYLEVGRTMKEYEDRKYEQWMEVTEQVLPALMKKSLLTKSSIATEEPSTLERGAVFAINFSPALREIINETKYLEQLGFTVPELARNVALQEDKFLRYTAGIQRMLDHYHMLIGTLNDAESVLLKDHSQELLRVFRSGYKRLNWNSLGIGDYITGCKQAIGKFESLVHQIHKNADDISSRLTLIEAINLFKYPAAKSEEELPGVKEFFEHIERERASDVDHMVRWYLAIGPLLTKVEGLVVHTNTGKAPKLASYYKYWEKKIYEVLTKLILKNLQSFNSLILGNVPLFHTETILTAPEIILHPNTNEIDKMCFHCVRNCVEITKHFVRWMNGSCIECPPQKGEEEEVVIINFYNDISLNPQIIEQAVMIPQNVHRILINLMKYLQKWKRYRPLWKLDKAIVMEKFAAKKPPCVAYDEKLQFYSKIAYEVMRHPLIKDEHCIRLQLRHLANTVQENAKSWVISLGKLLNESAKEELYNLHEEMEVLNRCV

SEQ ID NO: 57353 - protein, 212 aa, Homo sapiens
MATARTVAPSPRVAPRAPGMTAAGDPTRAPLALPAAGTSGTLSPRRRQSLSRWHRGGERRSLVVWRGGGCPPPGRRCPRSILSLSWPPLQVRAEPASEGGVRSAAAAAEPAPRSASDGGAVRLVAQEWFRVSSQRRSQAEPVARMLEGVRRLGPELLAHVVNLADGNGNTALHYSVSHGNLAIASLLLDTGQSQGRVGGHQEMGGGRGQGLT

SEQ ID NO: 57354 - protein, 128 aa, Homo sapiens
MSRRRISCKDLGHADCQGWLYKKKEKGSFLSNKWKKFWVILKGSSLYWYSNQMAEKADGFVNLPDFTVERASECKKKHAFKISHPQIKTFYFAAENVQEMNVWLNKLGSAVIHQESTTKDEECYSESE

SEQ ID NO: 57355 - protein, 323 aa, Homo sapiens
MSGSDGGLEEEPELSITLTLRMLMHGKEVGSIIGKKGETVKRIREQSSARITISEGSCPERITTITGSTAAVFHAVSMIAFKLDEDLCAAPANGGNVSRPPVTLRLVIPASQCGSLIGKAGTKIKEIRETTGAQVQVAGDLLPNSTERAVTVSGVPDAIILCVRQICAVILESPPKGATIPYHPSLSLGTVLLSANQGFSVQGQYGAVTPAEVTKLQQLSSHAVPFATPSVVPGLDPGTQTSSQEFLVPNDLIGCVIGRQGSKISEIRQMSGAHIKIGNQAEGAGERHVTITGSPVSIALAQYLITAWAAAGLGGLHCQDGSS

SEQ ID NO: 57356 - protein, 447 aa, Homo sapiens
MNVVFAVKQYPHLFSLNILGCCQGRNWDPAQLSRTTQGLTALLLSLKKCPMIRYQLSSEAAKRLAECVKQVITKEYELFEFRRTEVPPLLLILDRCDDAITPLLNQWTYQAMVHELLGINNNRIDLSRVPGISKDLREVVLSAENDEFYANNMYLNFAEIGSNIKNLMEDFQKKKPKEQQKLESIADMKAFVENYPQFKKMSGTVSKHVTVVGELSRLVSERNLLEVSEVEQELACQNDHSSALQNIKRLLQNPKVTEFDAARLVMLYALHYERHSSNSLPGLMMDLRNKGVSEKYRKLVSAVVEYGGKRVRGSDLFSPKDAVAITKQFLKGLKGVENVYTQHQPFLHETLDHLIKGRLKENLYPYLGPSTLRDRPQDIIVFVIGGATYEEALTVYNLNRTTPGVRIVLGGTTVHNTKSFLEEVLASGLHSRSKESSQVTSRSASRR

SEQ ID NO: 57357 - protein, 59 aa, Homo sapiens
YMLSSTVSSKILRAIALKEGFHFEETLTGFKWMGNRAKQLIDQGKTVLFAFEEAIGSSH

SEQ ID NO: 57358 - protein, 200 aa, Homo sapiens
MERAPPDGPLNASGALAGEAAAAGGARGFSAAWTAVLAALMALLIVATVLGNALVMLAFVADSSLRTQNNFFLLNLAISDFLVGAFCIPLYVPYVLTGRWTFGRGLCKLWLVVDYLLCTSSAFNIVLISYDRFLSVTRAVSYRAQQGDTRRAVRKMLLVWVLAFLLYGPAPAAPRGALRGRAHSRGAPSRRRPRPRWRSA

SEQ ID NO: 57359 - protein, 335 aa, Homo sapiens
MSGRSGKKKMSKLSRSARAGVIFPVGRLMRYLKKGTFKYRISVGAPVYMAAVIEYLAAEILELAGNAARDNKKARIAPRHILLAVANDEELNQLLKGVTIASGGVLPRIHPELLAKKRGTKGKSETILSPPPEKRGRKATSGKKGGKKSKAAKPRTSKKLSLTQSDISHIGSMRVEGIVHPTTAEIDLKEDIGKALEKAGGKEFLETVKELRKSQGPLEVAEAAVSQSSGLAAKFVIHCHIPQWGSDKCEEQLEETIKNCLSAAEDKKLKSVAFPPFPSGRNCFPKQTAAQVTLKAISAHFDDSSASSLKNVYFLLFDSESIGIYVQEMAKLDAK

SEQ ID NO: 57360 - protein, 56 aa, Homo sapiens
MASAEPLTALSRWYLYAIHGYFCEVMFTAAWEFVVNLNWKFPGVTSVWALFIYGTS

SEQ ID NO: 57361 - protein, 62 aa, Homo sapiens
MDMRWHCENLQTTDDILVASAECPSDDEDIDPCEPSSGTKQTMWKTSRDHRILPNARRERKD

SEQ ID NO: 57362 - protein, 129 aa, Homo sapiens
MSVVRSSVHARWIVGKVIGTKMQKTAKVRVTRLVLDPYLLKYFNKRKTYFAHDALQQCTVGDIVLLRALPVPRAKHVKHELAEIVFKVGKVIDPVTGKPCAGTTYLESPLSSETTQLSKNLEELNISSA

SEQ ID NO: 57363 - protein, 153 aa, Homo sapiens
MHSRGREIVVLLNPWSINEAVSSYCTYFIKQDSKSFGIMVSWKGIYFILTLFWGSFFGSIFMLSPFLPLMFVNPSWYRWINNRLVATWLTLPVALLETMFGVKVIITGDAFVPGERSVIIMNHRTRMDWMFLWNCLMRYSYLRLEKICLKASL

SEQ ID NO: 57364 - protein, 128 aa, Homo sapiens
  MOD_RES (1)..(1): Any amino acid
XMQVTGVEDDSRALNITIHKPASSPHSKPFPILQATFIFSDHIRCIIAKQRLAKGRIQARRMKMQRIAALLDLPIQPTTEVLGFGLGSSTSTQHLPFRFYDQGRRGSSDPTVQRSVFASVDKVPGFQG

SEQ ID NO: 57365 - protein, 345 aa, Homo sapiens
MALRLLKLAATSASARVVAAGAQRVRGIHSSVQCKLRYGMWHFLLGDKASKRLTERSRVITVDGNICTGKGKLAKEIAEKLGFKHFPEAGIHYPDSTTGDGKPLATDYNGNCSLEKFYDDPRSNDGNSYRLQSWLYSSRLLQYSDALEHLLTTGQGVVLERSIFSDFVFLEAMYNQGFIRKQCVDHYNEVKSVTICDYLPPHLVIYIDVPVPEVQRRIQKKGDPHEMKITSAYLQDIENAYKKTFLPEMSEKCEVLQYSAREAQDSKKVVEDIEYLKFDKGPWLKQDNRTLYHLRLLVQDKFEVLNYTSIPIFLPEVTIGAHQTDRVLHQFREVRLWKWRKLASG

SEQ ID NO: 57366 - protein, 1308 aa, Homo sapiens
GQRGGSEASKSRSRHSHSGEERAEVAKSGSSSSSGGRRKSASATSSSSSSRKDRDSKAHRSRTKSSKEPPSAYKEPPKAYREDKTEPKAYRRRRSLSPLGGRDDSPVSHRASQSLRSRKSPSPAGGGSSPYSRRLPRSPSPYSRRRSPSYSRHSSYERGGDVSPSPYSSSSWRRSRSPYSPVLRRSGKSRSRSPYSSRHSRSRSRHRLSRSRSRHSSISPSTLTLKSSLAAELNKNKKARAAEAARAAEAAKAAEATKAAEAAAKAAKASNTSTPTKGNTETSASASQTNHVKDVKKIKIEHAPSPSSGGTLKNDKAKTKPPLQVTKVENNLIVDKATKKAVIVGKESKSAATKEESVSLKEKTKPLTPSIGAKEKEQHVALVTSTLPPLPLPPMLPEDKEADSLRGNISVKAVKKEVEKKLRCLLADLPLPPELPGGDDLSKSPEEKKTATQLHSKRRPKICGPRYGETKEKDIDWGKRCVDKFDIIGIIGEGTYGQVYKARDKDTGEMVALKKVRLDNEKEGFPITAIREIKILRQLTHQSIINMKEIVTDKEDALDFKKDKGAFYLVFEYMDHDLMGLLESGLVHFNENHIKSFMRQLMEGLDYCHKKNFLHRDIKCSNILLNNRGQIKLADFGLARLYSSEESRPYTNKVITLWYRPPELLLGEERYTPAIDVWSCGCILGELFTKKPIFQANQELAQLELISRICGSPCPAVWPDVIKLPYFNTMKPKKQYRRKLREEFVFIPAAALDLFDYMLALDPSKRCTAEQALQCEFLRDVEPSKMPPPERFLHAEAMHHSKMAESLPLWQDCHELWSKKRRRQKQMGMTDDVSTIKAPRKDLSLGLDDSRTNTPQGVLPSSQLKSQGSSNVAPVKTGPGQHLNHSELAILLNLLQSKTSVNMADFVQVLNIKVNSETQQQLNKINLPAGILATGEKQTDPSTPQQESSKPLGGIQPSSQTIQPKVETDAAQAAVQSAFAVLLTQLIKAQQSKQKDVLLEERENGSGHEASLQLRPPPEPSTPVSGQDDLIQHQDMRILELTPEPDRPRILPPDQRPPEPPEPPPVTEEDLDYRTENQHVPTTSSSLTDPHAGVKAALLQLLAQHQPQDDPKREGGIDYQAGDTYVSTSDYKDNFGSSSFSSAPYVSNDGLGSSSAPPLERRSFIGNSDIQSLDNYSTASSHSGGPPQPSAFSESFPSSVAGYGDIYLNAGPMLFSGDKDHRFEYSHGPIAVLANSSDPSTGPESTHPLPAKMHNYNYGGNLQENPSGPSLMHGQTWTSPAQGPGYSQGYRGHISTSTGRGRGRGLPY

SEQ ID NO: 57367 - protein, 148 aa, Homo sapiens
MLVHLFRVGIRGGPFPGRLLPPLRFQTFSAVRRLLRLQPRVSQKEGTLGVSDHAQSALPTGGPLSWPWRYSDGYRSSSLLRAVAHLRSQLWAHLPRAPLAPRWSPSAWCWVGGALLGPMVLSKHPHLCLVALCEAEEAPPASSTPHVV

SEQ ID NO: 57368 - protein, 58 aa, Homo sapiens
MIFLTALPLFWIMISASRGGHWGAWMPSSISAFEGTCVSIPCRFDFPDELRPAVVHGV

SEQ ID NO: 57369 - protein, 177 aa, Homo sapiens
  MOD_RES (1)..(1): Any amino acid
XKSRAIAIPVDLDSQVNNLFLKSHSIVQKTAMNWRLSARNAARRDSVLAASRDYRNIIERLQDIVSALEDRLRPLVQAELSVLVDVLHRPELLFPENTDARRKCESGGFICKLIKHTKQLLEENEEKLCIKVLQTLREMMTKDRGYGEKMTEQRKQKQRIGLLGHPPHMNVNPQQPA

SEQ ID NO: 57370 - protein, 319 aa, Homo sapiens
MAASEGHASIVEVLLKHGADVNAKDMLKMTALHWATEHNHQEVVELLIKYGADVHTQSKFCKTAFDISIDNGNEDLAEILQIAMQNQINTNPESPDTVTIHAATPQFIIGPGGVVNLTGLVSSENSSKATDETGVSAVQFGNSSTSVLATLAALAEASAPLSNSSETPVVATEEVVTAESVDGAIQQVVSSGGQQVITIVTDGIQLGNLHSIPTSGIGQPIIVTMPDGQQVLTVPATDIAEETVISEEPPAKRQCIEIIENRVESAEIEEREALQKQLDEANREAQKYRQQLLKKEQEAEAYRQKLEAMTRLQTNKEAV

SEQ ID NO: 57371 - protein, 54 aa, Homo sapiens
MGDVKESKMQITPETPGRIPVLNPFESPSDYSNLHEQTLASPSVFKSTKLPALT

SEQ ID NO: 57372 - protein, 86 aa, Homo sapiens
MGPRRRSRKPEAPRRRSPSPTPTPGPSRRGPSLGASSHQHSRRRQGWLKEIRKLQKSTHLLIRKLPFSRLIPFPILGDCLSSPNYW

SEQ ID NO: 57373 - protein, 132 aa, Homo sapiens
MALVSADSRIAELLTELHQLIKQTQEERSRSEHNLVNIQKTHERMQTENKISPYYRTKLRGLYTTAKADAEAECKLECNDAISVHCNLCLPGSSDSLASASQHPSESSGQDRGNQVSVGREADCGQDCRSLQ

SEQ ID NO: 57374 - protein, 43 aa, Homo sapiens
MNPCVLGTVPACRLTWPTDAGPDGLKGEEGSCGRGRKWKRRPC

SEQ ID NO: 57375 - protein, 1699 aa, Homo sapiens
MEGSLAGSLAAPDRPQGPERLPGPAPRENIEGGAEAAEGEGGIFRSTRYLPVTKEGPRDILDGRGGISDGQPHPGLSEALPRVTSATHRISSCCWDGGSLDFRPGSPPPHLLGHFPGTPDGRGPWEHPLVQEAGEGILSERRFEDSVIVRTMKPHAELEGSRRFLHHRGEPRLLEKHAQGRPRFDWLQDEDEQGSPQDAGLHLDLPAQPPPLAPFRRVFVPVEDTPKTLDMAVVGGREDLEDLEGLAQPSEWGLPTSASEVATQTWTVNSEASVERLQPLLPPIRTGPYLCELLEEVAEGVASPDEDEDEEPAVFPCIECSIYFKQKEHLLEHMSQHRRAPGQEPPADLAPLACGECGWAFADPTALEQHRQLHQASREKIIEEIQKLKQVPGDEGREARLQCPKCVFGTNSSRAYVQHAKLHMREPPGQTTKEPFGGSSGAGSPSPEASALLYQPYGAAVGLSACVFCGFPAPSESLLREHVRLVHAHPHWEEDGEAYEEDPASQPGTSQDAHACFPDTAVDYFGKAEPSLAPMWRENPAGYDPSLAFGPGCQQLSIRDFPLSKPLLHGTGQRPLGRLAFPSTLASTPYSLQLGRNKSTVHPQGLGERRRPWSEEEEEEEEEEDVVLTSEMDFSPENGVFSPLATPSLIPQAALELKQAFREALQAVEATQGQQQQLRGMVPIVLVAKLGPQVMAAARVPPRLQPEELGLAGAHPLDFLLLDAPLGGPLGLDTLLDGDPAMALKHEERKCPYCPDRFHNGIGLANHVRGHLNRVGVSYNVRHFISAEEVKAIERRFSFQKKKKKVANFDPGTFSLMRCDFCGAGFDTRAGLSSHARAHLRDFGITNWELTVSPINILQELLATSAAEQPPSPLGREPGGPPGSFLTSRRPRLPLTVPFPPTWAEDPGPAYGDAQSLTTCEVCGACFETRKGLSSHARSHLRQLGVAESESSGAPIDLLYELVKQKGLPDAHLGLPPGLAKKSSSLKEVVAGAPRPGLLSLAKPLDAPAVNKAIKSPPGFSAKGLGHPPSSPLLKKTPLALAGSPTPKNPEDKSPQLSLSPRPASPKAQWPQSEDEGPLNLTSGPEPARDIRCEFCGEFFENRKGLSSHARSHLRQMGVTEWYVNGSPIDTLREILKRRTQSRPGGPPNPPGPSPKALAKMMGGAGPGSSLEARSPSDLHISPLAKKLPPPPGSPLGHSPTASPPPTARKMFPGLAAPSLPKKLKPEQIRVEIKREMLPGALHGELHPSEGPWGAPREDMTPLNLSSRAEPVRDIRCEFCGEFFENRKGLSSHARSHLRQMGVTEWSVNGSPIDTLREILKKKSKPCLIKKEPPAGDLAPALAEDGPPTVAPGPVQSPLPLSPLAGRPGKPGAGPAQVPRELSLTPITGAKPSATGYLGSVAAKRPLQEDRLLPAEVKAKTYIQTELPFKAKTLHEKTSHSSTEACCELCGLYFENRKALASHARAHLRQFGVTEWCVNGSPIETLSEWIKHRPQKVGAYRSYIQGGRPFTKKFRSAGHGRDSDKRPSLGLAPGGLAVVGRSAGGEPGPEAGRAADGGERPLAASPPGTVKAEEHQRQNINKFERRQARPPDASAARGGEDTNDLQQKLEEVRQPPPRVRPVPSLVPRPPQTSLVKFVGNIYTLKCRFCEVEFQGPLSIQEEWVRHLQRHILEMNFSKADPPPEESQAPQAQTAAAEAP

SEQ ID NO: 57376 - protein, 95 aa, Homo sapiens
MQSKVTGNMPTQSLLMYMDGPEVIGSSLGSPMEMEDALSMKGTAVVPFRATQEKNVIQIEGYMPLDCMFCSQTFTHSEDLNKHVLMQHRPTLCEP

SEQ ID NO: 57377 - protein, 450 aa, Homo sapiens
  MOD_RES (1)..(1): Any amino acid
XGQGRGTRRMSPATTGTFLLTVYSIFSKVHSDRNVYPSAGVLFVHVLEREYFKGEFPPYPKPGEISNDPITFNTNLMGYPDRPGWLRYIQRTPYSDGVLYGSPTAENVGKPTIIEITAYNRRTFETARHNLIINIMSAEDGVLLSSPRLECNGTISANCNLRLLGSGDSPASASRVDFPLPYQAEFFIKNMNVEEMLASEVLGDFLGAVKNVWQPERLNAINITSALDRGGRVPLPINDLKEGVYVMVGADVPFSSCLREVENPQNQLRCSQEMEPVITCDKKFRTQFYIDWCKISLVDKTKQVSTYQEVIRGEGILPDGGEYKPPSDSLKSRDYYTDFLITLAVPSAVALVLFLILAYIMCCRREGVIQLVHHSAIQKSTKELRDMSKNREIAWPLSTLPVFHPVTGEIIPPLHTDNYDSTNMPLMQTQQNLPHQTQIPQQQTTGKWYP

SEQ ID NO: 57378 - protein, 620 aa, Homo sapiens
MKVTSGRVQQPAKSRESKMQTRILKQDLTGDFESKKNELPDGLNKKRLQILLKGYGEYPTKYRMFIWRSLLQLPENHTAFSTLIDKGTHVAFLNLQKKYPIKSRKLLRVLQRTLSALAHWSVIFSDTPYLPLLAFPFVKLFQNNQLICFEVIATLIINWCQHWFEYFPNPPINILSMIENVLAFHDKELLQHFIDHDITSQLYAWPLLETVFSEVLTREEWLKLFDNIFSNHPSFLLMTVVAYNICSRTPLLSCNLKDDFETVEDMQAKVDQQRVEDEAWYQKQELLRKAEETRREMLLQEEEKMIQQRQRLAAVKRELKVKEMHLQDAARRRFLKLQQDQQEMELRRLDDEIGRKVYMRDREIAATARDLEMRQLELESQKRLYEKNLTENQEALAKEMRADADAYRRKVDLEEHMFHKLIEAGETQSQKTQKVIKENLAKAEQACLNTDWQIQSLHKQKCDDLQRNKCYQEVAKLLRENRRKEIEIINAMVEEEAKKWKEAEGKEFRLRSAKKASALSDASRKWFLKQEINAAVEHAENPCHKEEPRFQNEQDSSCLPRTSQLNDSSEMDPSTQISLNRRAVEWDTTGQNLIKKVRNLRQRLTARARHRCQTPHLLAA

SEQ ID NO: 57379 - protein, 103 aa, Homo sapiens
  MOD_RES (1)..(1): Any amino acid
XDDVAITELSFSREYTAAVEAKQPRGGLEQGSVVRTGPGIETCPCVYLNPPHLGEALSKNPGYIKLRKIRAAQNISKTIATSQNRIYLTADNLVLNLQDESFT

SEQ ID NO: 57380 - protein, 73 aa, Homo sapiens
MPVAATNSETAMQQVLDNLGSLPSATGAAELDLIFLRGIMESPIVRSLAKAHERLEETKLEAVRDNNLELVQE

SEQ ID NO: 57381 - protein, 91 aa, Homo sapiens
MAAIRKKLVIVGDGACGKTCLLIVFSKDQFPEVYVPTVFENYIADIEVDGKQVELALWDTAGQEDYDRLRPLSYPDTDVILMCFSIDSPDS

SEQ ID NO: 57382 - protein, 89 aa, Homo sapiens
MTSHYVIAIFALMSSCLATAGPEPGALCELSPVSASHPVQALMESFTVLSGCASRGTTGLPQEVHVLNLRTAGQGPGQLQREACSMNHY

SEQ ID NO: 57383 - protein, 253 aa, Homo sapiens
  MOD_RES (1)..(1): Any amino acid
XILQRGCSKFRLLGKIAWRSFLLICIGIIIVNPNYCLGPLSWDKVRIPGVLQRLGVTYFVVAVLELLFAKPVPEHCASERSCLSLRDITSSWPQWLLILVLEGLWLGLTFLLPVPGCPTGYLGPGGIGDFGKYPNCTGGAAGYIDRLLLGDDHLYQHPSSAVLYHTEVAYDPEGILGTINSIVMAFLGVQCCPDWVTKQACLTEPLSPLWRILFGPCLEVRATEPAQAGKILLYYKARTKDILIRFTAWCCIL

SEQ ID NO: 57384 - protein, 74 aa, Homo sapiens
MAAHHRQNTAGRRKVQVSYVIRDEVEKYNRNGVNALQLDPALNRLFTAGRDSIIRIWSVNQHKDFSFNFSKIHI

SEQ ID NO: 57385 - protein, 189 aa, Homo sapiens
MKVLLLTGLGALFFAYYWDDNFDPGKLCELRATDVAGAAQPDGQQGLPGGGVLAARPRAHVVLHSLLGGQVCAGRLLRLPAAGAGRAGRERGHHHVRPGPPRSRLRRRGSQGSHEGQGGPGAQGSPGRDPRRRHARGRRLLPVAFPPAVLAPALATAPAGLVYPPGAQRHGRGSLSTGGCPSSPRRQCS

SEQ ID NO: 57386 - protein, 72 aa, Homo sapiens
MMVDPNGNESSATYFILIGLPGLEEAQFWLAFPLCSLYLIAVLASGVTLRCPSSWPISICWFLLCSTQLSME

SEQ ID NO: 57387 - protein, 209 aa, Homo sapiens
  MOD_RES (1)..(1): Any amino acid
XTSPPLSPDPTTPDYINSLLASGDLQLSGSAHCTFSTAQKAIGKDNFTAIPEGTNGVEERMSVIWDKAVATGKMDENQFVAVTSTNAAKIFNLYPRKGRISVGSDSDLVIWDPDAVKIVSAKNHQSMADLHAVPRGMYDGPVFDLTTTPKGGTPAGSARGSPTRPNPPVRNLHQSGFSLSGTQVDEGVRSASKRIVAPPGGRSNITSLS

SEQ ID NO: 57388 - protein, 454 aa, Homo sapiens
MSLMVVSMACVGFFLLQGAWPHEGGQDKPFLSAWPSPVVSEGEHVALQCRSRLGFNEFSLSKEDGMPVPELYNRVFRNTVFIGPVTPAHAGTYRCRGSHPHFLTGWSAPSNPLVIMVTGVHRKPSLLAHPGPLVKSEETVILQCWSDVMFEHFLLHREGKFNDTLRLTGELHDGVSKANFSIGRMTQDLAGTYRCYGSVPHSPYQLSAPSDPLDIVITGLCGKPSLSAQPRPMVKAGESVTLSCSSRSSYDIYHLSREGEAHERRLPAVRSINGTFQADFPLGPATHGGTYRCFGSFRDAPYEWSNSSDPLLVSVTGNPSNSWPSPTEPSSKTGNPRHLHVLIGTSVVKIPFTILLFFLLHRWCSDKKNAAVMDQEPAGNRTVNSEDSDEQDHQEVSYALDHCVFTQRKITRPSERPKTPPTDTSMYIELPNAEPRSKVVFCPRAPQSGLEGIF

SEQ ID NO: 57389 - protein, 75 aa, Homo sapiens
MMQESGTETKSNGSAIQNGSGGSNHLLECGGLREGRSNGETPAVDIGAADLAHAQQQQQQALQVARQLLLQQQQQ

SEQ ID NO: 57390 - protein, 97 aa, Homo sapiens
  MOD_RES (1)..(1): Any amino acid
XRALAQKRLSENAFDLEAMSMLNRAQERIDAWAQLNSIPGQFTGSTGVQVLTQEQLANTGAQAWIKKGQILVAVFLPRSVPAVLFTTLLLPRPRISS

SEQ ID NO: 57391 - protein, 1086 aa, Homo sapiens
MVEKRCPLQRDGVYRWFSELPSPQRVEFLCGLLDLCIPLELRFLGSCLEDLARKDYHSLRDSEIKANNPADLGSLTNLTDEVVRSKLLVSLALLGSEQREAAGVLYRTLTHIDSIIHNYGLQLNEGRTGDEFLLLFTMASNHPAFSFHQKQVLRQELTQIQSSLNGGGGHGGKGAPGPGGALPTCPACHKITPRTEAPVSSVSNSLENALHTSAHSTEESLPKRPLGKHSKVSVEKIDLKGLSHTKNDRNVECSFEVLWSDSSITSVTKSSSEVTEFISKLCQLYPEENLEKLIPCLAGPDAFYVERNHVDLDSGLRYLASLPSHVLKNDHVRRFLSTSSPPQQLQSPSPGNPSLSKVGTVMGVSGRPVCGVAGIPSSQSGAQHHGQHPAGSAAPLPHCSHAGSAGSALAYRTQMDTSPAILMPSSLQTPQTQEQNGILDWLRKLRLHKYYPVFKQLSMEKFLSLTEEDLNKFESLTMGAKKKLKTQLELEKEKSERRCLNPSAPPLVTSSGVARVPPTSHVGPVQSGRGSHAAELRVEVEQPHHQLPREGSSSEYSSSSSSPMGVQAREESSDSAEENDRRVEIHLESSDKEKPVMLLNHFTSSSARPTAQVLPVQNEASSNPSGHHPLPPQMLSAASHITPIRMLNSVHKPERGSADMKLLSSSVHSLLSLEERNKGSGPRSSMKVDKSFGSAMMDVLPASAPHQPVQVLSGLSESSSMSPTVSFGPRTKVVHASTLDRVLKTAQQPALVVETSTAATGTPSTVLHAARPPIKLLLSSSVPADSAISGQTSCPNNVQISVPPAIINPRTALYTANTKVAFSAMSSMPVGPLQGGFCANSNTASPSSHPSTSFANMATLPSCPAPSSSPALSSVPESSFYSSSGGGGSTGNIPASNPNHHHHHHHQQPPAPPQPAPPPPGCIVCTSCGCSGSCGSSGLTVSYANYFQHPFSGPSVFTFPFLPFSPMCSSGYVSAQQYGGGSTFPVVHAPYSSSGTPDPVLSGQSTFAVPPMQNFMAGTAGVYQTQGLVGSSNGSSHKKSGNLSCYNCGATGHRAQDCKQPSMDFNRPGTFRLKYAPPAESLDSTD

SEQ ID NO: 57392 - protein, 279 aa, Homo sapiens
MAFRGPEPWVSASLLRQRLKAEEKTLDLEFEVLSVGFNEAGRYALRLSAENPLQVGSGAGVQLQVNDGDPFPACSAITDVIEQQEPGQSLTLTRSKFIFTLPKGFCKNDGQHDAQLHVEALRLDEPLGRAAQRVGEAIFPIYPRPDQPRMNPKAQDHEDLYRYCGNLALLRASTDPTARHCGSLAYSVAFHVHRGPQPPVSDSPPRAGQPELMSPCPEPQLPILQNTEDPEEPLIASQSTEPEIGHLSPSKKETIMVTLHGATNLPACKDGSEPWPYVV

SEQ ID NO: 57393 - protein, 63 aa, Homo sapiens
MAPSRNGMVLKPHFHKDWQRRVATWFNQPARKIRRRWPGPSAFLWIRGGGTSPRSPCRPTCSG

SEQ ID NO: 57394 - protein, 407 aa, Homo sapiens
MEPHRPNVKTAVPLSLESYHISEEYGFLLPDSLKELPDHYRPWMEIANKLPQLIDAHQLQAHVDKMPLLSCQFLKGHREQRLAHLVLSFLTMGYVWQEGEAQPAEVLPRNLALPFVEVSRNLGLPPILVHSDLVLTNWTKKDPDGFLEIGNLETIISFPGGESLHGFILVTALVEKEAVPGIKALVQATNAILQPNQEALLQALQRLRLSIQDITKTLGQMHDYVDPDIFYAGIRIFLSGWKDNPAMPAGLMYEGVSQEPLKYSGGSAAQSTVLHAFDEFLGIRHSKESGDFLYRMRDYMPPSHKAFIEDIHSAPSLRDYILSSGQDHLLTAYNQCVQALAELRSYHITMVTKYLITAAAKAKHGKPNHLPGPPQALKDRGTGGTAVMSFLKSVRDKTLESILHPRG

SEQ ID NO: 57395 - protein, 178 aa, Homo sapiens
MPNFTHIQTSPSKEVTICGDLHGKLDDLFLIFYKNGLPSERNPYVFNGDFVDRGKNSIEILMILCVSFLVYPNDLHLNRGNHEDFMMNLRYGFTKEILHKYKLHGKRILQILEEFYAWLPIGTIVDNEILVIHGGISETTDLNLLHRVERNKMKSVLIPPTETNRDHDTDSKHNKVGV

SEQ ID NO: 57396 - protein, 135 aa, Homo sapiens
MLPSGSRSPGELLPLLVQFPAMGNSYGAMTCLTRWLRRGQKGLDDVSRAANCTSSCQLCKRICPSALGVWRGWENPGHLISNPVPRWVPSTPMPWGPGQWAAGGCVLGTSPMVWFGDPFQEPRRGTHRSRARISM

SEQ ID NO: 57397 - protein, 513 aa, Homo sapiens
MWLRLGPPSLSLSPKPTVGRSLCLTLWFLSLALRASTQAPAPTVNTHFGKLRGARVPLPSEILGPVDQYLGVPYAAPPIGEKRFLPPEPPPSWSGIRNATHFPPVCPQNIHTAVPEVMLPVWFTANLDIVATYIQEPNEDCLYLNVYVPTEDDIRDSGAKPVMVYIHGGSYMEGTGNMIDGSILASYGNVIVITLNYRVGVLGFLSTGDQAAKGNYGLLDQIQALRWVSENIAFFGGDPRRITVFGSGIGASCVSLLTLSHHSEGLFQRAIIQSGSALSSWAVNYQPVKYTSLLADKVGCNVLDTVDMVDCLRQKSAKELVEQDIQPARYHVAFGPVIDGDVIPDDPEILMEQGEFLNYDIMLGVNQGEGLKFVEGVVDPEDGVSGTDFDYSVSNFVDNLYGYPEGKDTLRETIKFMYTDWADRDNPETRRKTLVALFTDHQWVEPSVVTADLHARYGSPTYFYAFYHHCQSLMKPAWSDAAHGDEVPYVFGVPMVGPTDLFPCNFSKNDVML

SEQ ID NO: 57398 - protein, 348 aa, Homo sapiens
MEVKPPPGRPQPDSGRRRRRRGEEGHDPKEPEQLRKLFIGGLSFETTDDSLREHFEKWGTLTDCVVMRDPQTKRSRGFGFVTYSCVEEVDAAMCARPHKVDGRVVEPKRAVSREDSVKPGAHLTVKKIFVGGIKEDTEEYNLRDYFEKYGKIETIEVMEDRQSGKKRGFAFVTFDDHDTVDKIVVQKYHTINGHNCEVKKALSKQEMQSAGSQRGRGGGSGNFMGRGGNFGGGGGNFGRGGNFGGNYGGGPGYSSRGGYGGGGPGYGNQGGGYGGGGGYDGYNEGGNFGGGNYGGGGNYNDFGNYSGQQQSNYGPMKGGSFGGRSSGSPYGGGYGSGGGSGGYGSRRF

SEQ ID NO: 57399 - protein, 913 aa, Homo sapiens
MTDSKYFTTNKKGEIFELKAELNNEKKEKRKEAVKKVIAAMTVGKDVSSLFPDVVNCMQTDNLELKKLVYLYLMNYAKSQPDMAIMAVNSFVKDEDPYVRKTAAVCVAKLHDINAQMVEDQGFLDSLRDLIADSNPMVVANAVAALSEISESHPNSNLLDLNPQNINKLLTALNECTEWGQIFILDCLSNYNPKDDREAQSICERVTPRLSHANSAVVLSAVKVLMKFLELLPKDSDYYNMLLKKLAPPLVTLLSGEPEVQYVALRNINLIVQKRPEILKQEIKVFFVKYNDPIYVKLEKLDIMIRLASQANIAQVLAELKEYATEVDVDFVRKAVRAIGRCAIKVEQSAERCVSTLLDLIQTKVNYVVQEAIVVIRDIFRKYPNKYESIIATLCENLDSLDEPDARAAMIWIVGEYAERIDNADELLESFLEGFHDESTQVQLTLLTAIVKLFLKKPSETQELVQQVLSLATQDSDNPDLRDRGYIYWRLLSTDPVTAKEVVLSEKPLISEETDLIEPTLLDELICHIGSLASVYHKPPNAFVEGSHGIHRKHLPIHHGSTDAGDSPVGTTTATNLEQPQVIPSQGDLLGDLLNLDLGPPVNVPQVSSMQMGAVDLLGGGLDSLLGSDLGGGIGGSPAVGQSFIPSSVPATFAPSPTPAVVSSGLNDLFELSTGIGMAPGGYVAPKAVWLPAVKAKGLEISGTFTHRQGHIYMEMNFTNKALQHMTDFAIQFNKNSFGVIPSTPLAIHTPLMPNQSIDVSLPLNTLGPVMKMEPLNNLQVAVKNNIDVFYFSCLIPLNVLFVEDGKMERQVFLATWKDIPNENELQFQIKECHLNADTVSSKLQNNNVYTIAKRNVEGQDMLYQSLKLTNGIWILAELRIQPGNPNYTLSLKCRAPEVSQYIYQVYDSILKN

SEQ ID NO: 57400 - protein, 115 aa, Homo sapiens
YFPEMQILAVSGNYCTDKKPAAINWIEGRGKSVVCEAVIPAKVVREMLGVQGACKDNPGENARQLARIVCGTVMAGELSLMAALAAGHLVKSHMIHNRSKINLQDLQGACTKKTA

SEQ ID NO: 57401 - protein, 198 aa, Homo sapiens
MQVIFSTAPWPNLPRAQASPGKVTEAVKEAIDAGYRHFDCAYFYHNEREVGAGIRCKIKEGAVRREDLFIATKLWCTCHKKSLVETACRKSLKALKLNYLDLYLIHWPMGFKPPHPEWIMSCSELSFCLSHPRVQDLPLDESNMVIPSDTDFLDTWEAMEDLVITGLVKNIGVSNFNHEQLERLLNKPGLRFKPLTNQ

SEQ ID NO: 57402 - protein, 94 aa, Homo sapiens
MQLFAFADCLSKRLPDDCLGACALWKLGFGADHNAEQEAAAAGPVTGSSVTSSPVTGSQVLTWVLSVKPGWPPQQTVLQSQLLTGSENIVHRAG

SEQ ID NO: 57403 - protein, 1000 aa, Homo sapiens
MKKFNFRKVLDGLTASSPGSGSSSGSNSGGGAGSGSVHPAGTAGVLREEIQETLTSEYFQICKTVRHGFPHQPTALAFDPVQKILAIGTRTGAIRILGRPGVDCYCQHESGAAVLQLQFLINEGALVSASSDDTLHLWNLRQKRPAILHSLKFNRERITYCHLPFQSKWLYVGTERGNTHIVNIESFILSGYVIMWNKAIELSTKTHPGPVVHLSDSPRDEGKLLIGYENGTVVFWDLKSKRAELRVYYDEAIHSIDWHHEGKQFMCSHSDGSLTLWNLKSPSRPFQTTIPHGKSQREGRKSESCKPILKVEYKTCKNSEPFIIFSGGLSYDKACRRPSLTIMHGKAITVLEMDHPIVEFLTLCETPYPNEFQEPYAVVVLLEKDLIVVDLTQSNFPIFENPYPMDIHESPVTCTAYFADCPPDLILVLYSIGVKHKKQGYSNKEWPISGGAWNLGAQTYPEIIITGHADGSIKFWDASAITLQMLYKLKTSKVFEKQKVGEGKQTCEIVEEDPFAIQMIYWCPESRIFCVSGVSAYVIIYKFSRHEITTEIVSLEVRLQYDVEDIITPEPETSPPFPDLSAQLPSSRSLSGSTNTVASEGVTKDSIPCLNVKTRPVRMPPGYQAELVIQLVWVDGEPPQQITSLAVSSAYGIVAFGNCNGLAVVDFIQKTVLLSMGTIDLYRSSDLYQRQPRSPRKNKQFIADNFCMRGLSNFYPDLTKRIRTSYQSLTELNDSPVPLELERCKSPTSGLATRTPESALGFYRNEISAMRQRNQVYHLPENRENSYNRSRSSSISSIDKDSKEAITALYFMDSFARKNDSTISPCLFVGTSLGMVLIISLNLPLADEQRFTEPVMVLPSGTFLSLKGAVLTFSCMDRMGGLMQPPYEVWRDPNNIDENEKSWRRKVVMNSSSASQEIGDHQYTIICSEKQAKVFSLPSQTCLYVHNITETSFILQANVVVMCSSACLACFCANGHIMIMRYLPSYKLSGNHNNTSKVQS

SEQ ID NO: 57404 - protein, 171 aa, Homo sapiens
MERLCSDGFAFPHYYIKPYHLKRIHRAVLRGNLEKLKYLLLTYYDANKRDRKERTALHLACATGQPEMVHLLVSRRCELNLCDREDRTPLIKAVQLRQEACATLLLQNGADPNITDVFGRTALHYAVYNEDTSMIEKLLSHGTNIEECSKCLLRNNELRRLQVTTKILFQI

SEQ ID NO: 57405 - protein, 295 aa, Homo sapiens
MEVMNLMEQPIKVTEWQQTYTYDSGIHSGANTCVPSVSSKGIMEEDEACGRQYTLKKTTTYTQGVPPSQGDLEYQMSTTARAKRVREAMCPGVSGEDSSLLLATQVEGQATNLQRLAEPSQLLKSAIVHLINYQDDAELATRALPELTKLLNDEDPVVVTKAAMIVNQLSKKEASRRALMGSPQLVAAVVRTMQNTSDLDTARCTTSILHNLSHHREGLLAIFKSGGIPALVRMLSSPVESVLFYAITTLHNLLLYQEGAKMAVRLADGLQKMVPLLNKNNPKFLAITTDCLQLL

SEQ ID NO: 57406 - protein, 448 aa, Homo sapiens
MDELFPLIFPAEPAQASGPYVEIIEQPKQRGMRFRYKCEGRSAGSIPGERSTDTTKTHPTIKINGYTGPGTVRISLVTKDPPHRPHPHELVGKDCRDGFYEAELCPDRCIHSFQNLGIQCVKKRDLEQAISQRIQTNNNPFQVPIEEQRGDYDLNAVRLCFQVTVRDPSGRPLRLPPVLSHPIFDNRAPNTAELKICRVNRNSGSCLGGDEIFLLCDKVQKEDIEVYFTGPGWEARGSFSQADVHRQVAIVFRTPPYADPSLQAPVRVSMQLRRPSDRELSEPMEFQYLPDTDDRHRIEEKRKRTYETFKSIMKKSPFSGPTDPRPPPRRIAVPSRSSASVPKPAPQPYPFTSSLSTINYDEFPTMVFPSGQISQASALAPAPPQVLPQAPAPAPAPAMVSALAQRPPDPAPAPLGAPGLPNGLLSGDEDFSSIADMDFSALLSQISS

SEQ ID NO: 57407 - protein, 46 aa, Homo sapiens
  MOD_RES (1)..(1): Any amino acid
XNGLGIRIVGGKEIPGHSGEIGAYIAKILPGGSAEQTGKLMEAWDC

SEQ ID NO: 57408 - protein, 59 aa, Homo sapiens
MSEVSCKKRDDYLEWPEYFMAVAFLSAQRSKDPNSQVGACIVNSENKIVGIGYNGMPNG

SEQ ID NO: 57409 - protein, 167 aa, Homo sapiens
MGCFKGVVAVGYINEAIDEGNPLRTLETLLLPTANISDVDPAHAQHYQDVLYHAKSQKLGDSESVSKVLWLDEIQQAVDDANVDKDRAKQWVTLVVDVNQCLEGKKSSDILSVLKSSTSNANDIIPECADKYYDALVKAKELKSERVTVHGSNSTCTKNMTTITTLI

SEQ ID NO: 57410 - protein, 883 aa, Homo sapiens
MRMAVGSVKMQPPCESPALAAAAAVVAADGPLRRSPSAREPEREQPPASLRPRLRDLPALLRSGLTLRRKRSAAGGRTLSRRISNPYLEHTPSQIYGENSSCAGRALRNIIIVQAADLIKDRVNLKGFYRRSCVGSELVDWLLEHCPFVQCRSMAIGVWQLLLDMGIMLSVDQHLYFQDTYVFYQFSSDECSYLYCEFEREEEWQNGVKLLLQLVPLIPARGGICELSHQKIEDSEESSDEILVRLTSAVQRELAAVIALKARKSAIEQDEENNDKHVAVTEAESVPDSQAGVMCKLQERDEIGRIELVQKLAKENYQFLQTDKKEQEKSEHQDDEVTTVQVKEQDQSVLVLKKVQCCGPAPTAGSAESHWRYVVVSGTPEKILEHLLNDLHLEEVQDKETETLLDDFLLTYTVFMTTDDLCQALLRHYSAKKYQGKEENSDVPRRKRKVLHLVSQWIALYKDWLPEDEHSKMFLKTIYRNVLDDVYEYPILEKELKEFQKILGMHRRHTVDEYSPQKKNKALFHQFSLKENWLQHRGTVTETEEIFCHVYITEHSYVSVKAKVSSIAQEILKVVAEKIQYAEEDLALVAITFSGEKHELQPNDLVISKSLEASGRIYVYRKDLADTLNPFAENEESQQRSMRILGMNTWDLALELMNFDWSLFNSIHEQELIYFTFSRQGSGEHTANLSLLLQRCNEVQLWVATEILLCSQLGKRVQLVKKFIKIAAHCKAQRNLNSFFAIVMGLNTASVSRLSQTWEKIPGKFKKLFSELESLTDPSLNHKAYRDAFKKMKPPKIPFMPLLLKDVTFIHEGNKTFLDNLVNFEKLHMIADTVRTLRHCRTNQFGDLSPKEHQELKSYVNHLYVIDSQQALFELSHRIEPRV

SEQ ID NO: 57411 - protein, 858 aa, Homo sapiens
MLSGKKAAAAAAAAAAAATGTEAGPGTAGGSENGSEVAAQPAGLSGPAEVGPGAVGERTPRKKEPPRASPPGGLAEPPGSAGPQAGPTVVPGSATPMETGIAETPEGRRTSRRKRAKVEYREMDESLANLSEDEYYSEEERNAKAEKEKKLPPPPPQAPPEEENESEPEEPSGVEGAAFQSRLPHDRMTSQEAACFPDIISGPQQTQKVFLFIRNRTLQLWLDNPKIQLTFEATLQQLEAPYNSDTVLVHRVHSYLERHGLINFGIYKRIKPLPTKKTGKVIIIGSGVSGLAAARQLQSFGMDVTLLEARDRVGGRVATFRKGNYVADLGAMVVTGLGGNPMAVVSKQVNMELAKIKQKCPLYEANGQAVPKEKDEMVEQEFNRLLEATSYLSHQLDFNVLNNKPVSLGQALEVVIQLQEKHVKDEQIEHWKKIVKTQEELKELLNKMVNLKEKIKELHQQYKEASEVKPPRDITAEFLVKSKHRDLTALCKEYDELAETQGKLEEKLQELEANPPSPLFFCSDVYLSSRDRQILDWHFANLEFANATPLSTLSLKHWDQDDDFEFTGSHLTVRNGYSCVPVALAEGLDIKLNTAVRQVRYTASGCEVIAVNTRSTSQTFIYKCDAVLCTLPLGVLKQQPPAVQFVPPLPEWKTSAVQRMGFGNLNKVVLCFDRVFWDPSVNLFGHVGSTTASRGELFLFWNLYKAPILLALVAGEAAGIMENISDDVIVGRCLAILKGIFGSSAVPQPKETVVSRWRADPWARGSYSYVAAGSSGNDYDLMAQPITPGPSIPGAPQPIPRLFFAGEHTIRNYPATVHGALLSGLREAGRIADQFLGAMYTLPRQATPGVPAQQSPSM

SEQ ID NO: 57412 - protein, 146 aa, Homo sapiens
MEAAAVTVTRSATRRRRRQLQGLAAPEAGTQEEQEDQEPRPRRRRPGRSIKDEEEETVFREVVSFSPDPLPVRYYDKDTTKPISFYLSSLEELLAWKPRLEDGFNVALEPLACRQPPLSSQRPRTLLCHDMMGGYLDDRDFHHGVE

SEQ ID NO: 57413 - protein, 275 aa, Homo sapiens
MAAGFGRCCRAYCVTEPGAGSDVAGIKTKAEKKGDEYIINGQKMWITNGGKANWYFLLARSDPDPKAPANKAFTGFIVEADTPGIQIGRKELNMGQRCSDTRGIVFEDVKVPKENVLIGDGAGFKVAMGAFDKTRPVVAAGAVGLAQRALDEATKYALERKTFGKLLVEHQAISFMLAEMAMKVELARMSYQRAAWEVDSGRRNTYYASIAKAFAGDIANQLATDAVQILGGNGFNTEYPVEKLMRDAKIYQIYEGTSQIQRLIVAREHIDKYKN

SEQ ID NO: 57414 - protein, 156 aa, Homo sapiens
MAGPAEEAGAHCPESLWPLPPQVSPRVTYTRVSPGQAEDVTFLYHPCAHPWLKLQLALLAYACMANPSLTPDFSLTQDRPLVLTAWGLALEMAWVEPAWAAHWLMRRRRRKQRKKKAWIYCESLSGPAPSEPTPGRGRLCRRGCVQALALAFALRS

SEQ ID NO: 57415 - protein, 955 aa, Homo sapiens
MVNPTLGVHEADLLKTSGTLISFIYPAQNPELLNKLSQRKTTVLAMDQVPRVTIAQGYDALSSMANIAGYKAVVLAANHFGRFFTGQITAAGKVPPAKILIVGGGVAGLASAGAAKSMGAIVRGFDTRAAALEQFKSLGAEPLEVDLKESGEGQGGYAKEMSKEFIEAEMKLFAQQCKEVDILISTALIPGKKAPVLFNKEMIESMKEGSVVVDLAAEAGGNFETTKPGELYIHKGITHIGYTDLPSRMATQASTLYSNNITKLLKAISPDKDNFYFDVKDDFDFGTMGHVIRGTVVMKDGKVIFPAPTPKNIPQGAPVKQKTVAELEAEKAATITPFRKTMSTASAYTAGLTGILGLGIAAPNLAFSQMVTTFGLAGIVGYHTVWGVTPALHSPLMSVTNAISGLTAVGGLALMGGHLYPSTTSQGLAALAAFISSVNIAGGFLVTQRMLDMFKRPTDPPEYNYLYLLPAGTFVGGYLAALYSGYNIEQIMYLGSGLCCVGALAGLSTQGTARLGNALGMIGVAGGLAATLGVLKPGPELLAQMSGAMALGGTIGLTIAKRIQISDLPQLVAAFHSLVGLAAVLTCIAEYIIEYPHFATDAAANLTKIVAYLGTYIGGVTFSGSLIAYGKLQGLLKSAPLLLPGRHLLNAGLLAASVGGIIPFMVDPSFTTGITCLGSVSALSAVMGVTLTAAIGGADMPVVITVLNSYSGWALCAEGFLLNNNLLTIVGALIGSSGAILSYIMCVAMNRSLANVILGGYGTTSTAGGKPMEISGTHTEINLDNAIDMIREANSIIITPGYGLCAAKAQYPIADLVKMLTEQGKKVRFGIHPVAGRMPGQLNVLLAEAGVPYDIVLEMDEINHDFPDTDLVLVIGANDTVNSAAQEDPNSIIAGMPVLEVWKSKQVIVMKRSLGVGYAAVDNPIFYKPNTAMLLGDAKKTCDALQAKVRESYQK

SEQ ID NO: 57416 - protein, 115 aa, Homo sapiens
MQSINAGFQSLKTLIPHTDGEKLSKAAILQQTAEYIFSLEQEKTRLLQQNTQLKRFIQELSGSSPKRRRAEDKDEGIGSPDIWEDEKAEDLRREMIELRQQLDKERSVRMMLEEQ

SEQ ID NO: 57417 - protein, 92 aa, Homo sapiens
MGNKQTIFTEEQLDNYQDCTFFNKKDILKRIPSKKGSWRRFPRMVRGTSLSTTLWTCFPCSASRLPESSRQTMPSRSMTSTLTTSSARRTWS

SEQ ID NO: 57418 - protein, 66 aa, Homo sapiens
RCYRLAVRTVIRAFVKCTKARYLKKKNMRTLWINRITAASQEHGLKYPALIGNLVKALPGWLKGLP

SEQ ID NO: 57419 - protein, 582 aa, Homo sapiens
MLSESKEGEEKEEVTMDTSENRPENDVPEPPMPIADQVSNDDRPEGSVEDEEKKESSLPKSFKRKISVVSTKGVPAGNSDTEGGQPGRKRRWGASTATTQKKPSISITTESLKSLIPDIKPLAGQEAVVDLHADDSRISEDETERNGDDGTHDKGLKICRTVTQVVPAEGQENGQREEEEEEKEPEAEPPVPPQVSVEVALPPPAEHEVKKVTLGDTLTRRSISQQKSGVSITIDDPVRTAQVPSPPRGKISNIVHISNLVRPFTLGQLKELLGRTGTLVEEAFWIDKIKSHCFVTYSTVEEAVATRTALHGVKWPQSNPKFLCADYAEQDELDYHRGLLVDRPSETKTEEQGIPRPLHPPPPPPVQPPQHPRAEQREQERAVREQWAEREREMERRERTRSEREWDRDKVREGPRSRSRSRDRRRKERAKSKEKKSEKKEKAQEEPPAKLLDDLFRKTKAAPCIYWLPLTDSQIVQKEAERAERAKEREKRRKEQEEEEQKEREKEAERERNRQLEREKRREHSRERDRERERERERDRGDRDRDRERDRERGRERDRRDTKRHSRSRSRSTPVRDRGGRR

SEQ ID NO: 57420 - protein, 873 aa, Homo sapiens
MLSRLFRMHGLFVASHPWEVIVGTVTLTICMMSMNMFTGNNKICGWNYECPKFEEDVLSSDIIILTITRCIAILYIYFQFQNLRQLGSKYILGIAGLFTIFSSFVFSTVVIHFLDKELTGLNEALPFFLLLIDLSRASTLAKFALSSNSQDEVRENIARGMAILGPTFTLDALVECLVIGVGTMSGVRQLEIMCCFGCMSVLANYFVFMTFFPACVSLVLELSRESREGRPIWQLSHFARVLEEEENKPNPVTQRVKMIMSLGLVLVHAHSRWIADPSPQNSTADTSKVSLGLDENVSKRIEPSVSLWQFYLSKMISMDIEQVITLSLALLLAVKYIFFEQTETESTLSLKNPITSPVVTQKKVPDNCCRREPMLVRNNQKCDSVEEETGINRERKVEVIKPLVAETDTPNRATFVVGNSSLLDTSSVLVTQEPEIELPREPRPNEECLQILGNAEKGAKFLSDAEIIQLVNAKHIPAYKLETLMETHERGVSIRRQLLSKKLSEPSSLQYLPYRDYNYSLVMGACCENVIGYMPIPVGVAGPLCLDEKEFQVPMATTEGCLVASTNRGCRAIGLGGGASSRVLADGMTRGPVVRLPRACDSAEVKAWLETSEGFAVIKEAFDSTSRFARLQKLHTSIAGRNLYIRFQSRSGDAMGMNMISKGTEKALSKLHEYFPEMQILAVSGNYCTDKKPAAINWIEGRGKSVVCEAVIPAKVVREVLKTTTEAMIEVNINKNLVGSAMAGSIGGYNAHAANIVTAIYIACGQDAAQNVGSSNCITLMEASGPTNEDLYISCTMPSIEIGTMLGVQGACKDNPGENARQLARIVCGTVMAGELSLMAALAAGHLVKSHMIHNRSKINLQDLQGACTKKTA

SEQ ID NO: 57421 - protein, 537 aa, Homo sapiens
MLRRALLCLAVAALVRADAPEEEDHVLVLRKSNFAEALAAHKYLLVEFYAPWCGHCKALAPEYAKAAGKLKAEGSEIRLAKVDATEESDLAQQYGVRGYPTIKFFRNGDTASPKEYTAGREADDIVNWLKKRTGPAATTLPDGAAAESLVESSEVAVIGFFKDVESDSAKQFLQAAEAIDDIPFGITSNSDVFSKYQLDKDGVVLFKKFDEGRNNFEGEVTKENLLDFIKHNQLPLVIEFTEQTAPKIFGGEIKTHILLFLPKSVSDYDGKLSNFKTAAESFKGKILFIFIDSDHTDNQRILEFFGLKKEECPAVRLITLEEEMTKYKPESEELTAERITEFCHRFLEGKIKPHLMSQELPEDWDKQPVKVLVGKNFEDVAFDEKKNVFVEFYAPWCGHCKQLAPIWDKLGETYKDHENIVIAKMDSTANEVEAVKVHSFPTLKFFPASADRTVRLPSRRGWGGLWEEQWSPRQPGCLSGRSLGLVRSLITTGNARWMVLRNSWRAVARMGQGMMTISRTWKKQRSQTWRKTMIRKL

SEQ ID NO: 57422 - protein, 124 aa, Homo sapiens
MKAETERSALDVKLKHARNQVDVEIKRRQRAEADCEKLERQIQLIREMLMCDTSGSIQLSEEQKSALAFLNRGQPSSSNAGNKRLSTIDESGSILSDISFDKTDESLDWDSSLVKTFKLKKREK

SEQ ID NO: 57423 - protein, 42 aa, Homo sapiens
  MOD_RES (1)..(1): Any amino acid
XHSRELSWRKGPSMLGKLPSVDSSPWKLRLLPQFRLLSTHPR

SEQ ID NO: 57424 - protein, 387 aa, Homo sapiens
  MOD_RES (1)..(1): Any amino acid
XFYIPTDFSSCSRLSYDKFFEDKLSNCLFNAPLPTDIISTPICGNQLVEMGEDCDCGTSEECTNICCDAKTCKIKATFQCALGECCEKCQFKKAGMVCRPAKDECDLPEMCNGKSGNCPDDRFQVNGFPCHHGKGHCLMGTCPTLQEQCTELWGPGTEVADKSCYNRNEGGSKYGYCRRVDDTLIPCKANDTMCGKLFCQGGSDNLPWKGRIVTFLTCKTFDPEDTSQEIGMVANGTKCGDNKVCINAECVDIEKAYKSTNCSSKCKGHAVCDHELQCQCEEGWIPPDCDDSSVVFHFSIVVGVLFPMAVIFVVVAMVIRHQSSREKQKKDQRPLSTTGTRPHKQKRKPQMVKAVQPQEMSQMKPHVYDLPVEGNEPPASFDSNPKA

SEQ ID NO: 57425 - protein, 261 aa, Homo sapiens
  MOD_RES (1)..(1): Any amino acid
XFTQSPKKSVADLLGSFEGKRRLLLITAPKAENNMYVQQRDEYLESFCKMATRKISVITIFGPVNNSTMKIDHFQLDNEKPMRVVDDEDLVDQRLISELRKEYGMTYNDFFMVLTDVDLRVKQYYEVPITMKSVFDLIDTFQSRIKDMEKQKKEGIVCKEDKKQSLENFLSRFRWRRRLLVISAPNDEDWAYSQQLSALSGQACNFGSSVVEREDVPAHLVKDIRNYFQVSPEYFSMLLVGKDGNVKSWYPSPMWSMVIVY

SEQ ID NO: 57426 - protein, 142 aa, Homo sapiens
  MOD_RES (1)..(1): Any amino acid
XDPFRPMLRKPGKWCAMHVHIAWQIYHHQQKVKKQMQSDPHKLDFGLKPEFLSRPPGPSLFGAIHHPHDLARPSTLFSAAGAAHPTGTPFGPPPHHSNFLNPAAHLEPFNRPSTFTGLAAVGGNAFGGLGNPSVTPNNMYSF

SEQ ID NO: 57427 - protein, 521 aa, Homo sapiens
MLRRALLCLAVAALVRADAPEEEDHVLVLRKSNFAEALAAHKYLLVEFYAPWCGHCKALAPEYAKAAGKLKAEGSEIRLAKVDATEESDLAQQYGVRGYPTIKFFRNGDTASPKEYTAGREADDIVNWLKKRTGPAATTLPDGAAAESLVESSEVAVIGFFKDVESDSAKQFLQAAEAIDDIPFGITSNSDVFSKYQLDKDGVVLFKKFDEGRNNFEGEVTKENLLDFIKHNQLPLVIEFTEQTAPKIFGGEIKTHILLFLPKSVSDYDGKLSNFKTAAESFKGKILFIFIDSDHTDNQRILEFFGLKKEECPAVRLITLEEEMTKYKPESEELTAERITEFCHRFLEGKIKPHLMSQELPEDWDKQPVKVLVGKNFEDVAFDEKKNVFVEFCKCCPFSSPGPCHQGTRKMPHGVVTANSWLPFGINWERRTRTMRTSSSPRWTRLPTRWRPSKCTASPHSSSFLPVPTGRSLITTGNARWMVLRNSWRAVARMGQGMMTISRTWKKQRSQTWRKTMIRKL

SEQ ID NO: 57428 - protein, 336 aa, Homo sapiens
  MOD_RES (1)..(1): Any amino acid
XAKFDGILGMAYPRISVNNVLPVFDNLMQQKLVDQNIFSFYLSRDPDAQPGGELMLGGTDSKYYKGSLSYLNVTRKAYWQVHLDQVEVASGLTLCKEGCEAIVDTGTSLMVGPVDEVRELQKAIGAVPLIQGEYMIPCEKVSTLPAITLKLGGKGYKLSPEDYTLKVSQAGKTLCLSGFMGMDIPPPSGPLWILGDVFIGRYYTVFDRDNNRAQGPGQCPAPLGDPASTTDGAQEARVPLDGAFWIPRPPAGSPKGCFACVSKPPALQAPAAPAPEPSASPPMAPTLFPMESKSSKTDSVRAAGAPPACKHLAEKKTMTNPTTVIEVYPDTTEVND

SEQ ID NO: 57429 - protein, 39 aa, Homo sapiens
MSKGPGPGGSAASSAPPAATAQVLQAQPEKPQHYTYVRY

SEQ ID NO: 57430 - protein, 395 aa, Homo sapiens
MDVVDPDIFNRDPRDHYDLLQRLGGGTYGEVFKARDKVSGDLVALKMVKMEPDDDVSTLQKEILILKTCRHANIVAYHGSYLWLQKLWICMEFCGAGSLQDIYQVTGSLSELQISYVCREVLQGLAYLHSQKKIHRDIKGANILINDAGEVRLADFGISAQIGATLARRLSFIGTPYWMAPEVAAVALKGGYNELCDIWSLGITAIELAELQPPLFDVHPLRVLFLMTKSGYQPPRLKEKGKWSAAFHNFIKVTLTKSPKKRPSATKMLSHQLVSQPGLNRGLILDLLDKLKNPGKGPSIGDIEDEEPELPPAIPRRIRSTHRSSSLGIPDADCCQLQAFWKHGVQVWALGSDQLLQELRDPTLTFRLLGSPRPVVVETRPVDDPTAPSNLYIQE

SEQ ID NO: 57431 - protein, 375 aa, Homo sapiens
MPGRSCVALVLLAAAVSCAVAQHAPPWTEDCRKSTYPPSGPTYRGAVPWYTINLDLPPYKRWHELMLDKAPVLKVIVNSLKNMINTFVPSGKIMQVVDEKLPGLLGNFPGPFEEEMKGIAAVTDIPLAEDKKGHLIHGRNMDFGVFLGWNINNDTWVITEQLKPLTVNLDFQRNNKTVFKASSFAGYVGMLTGFKPGLFSLTLNERFSINGGYLGILEWILGKKDVMWIGFLTRTVLENSTSYEEAKNLLTKTKILAPAYFILGGNQSGEGCVITRDRKESLDVYELDAKQGRWYVVQTNYDRWKHPFFLDDRRTPAKMCLNRTSQENISFETMYDVLSTKPVLNKLTVYTTLIDVTKGQFETYLRDCPDPCIGW

SEQ ID NO: 57432 - protein, 89 aa, Homo sapiens
  MOD_RES (1)..(1): Any amino acid
XRLRFPGQARHVWPAARMQAPHKEHLYKLLVIGDLGVGKTSIIKRYVHQNFSSHYRATIGVDFALKVLHWDPETVVRLQLWDIAGKYKH

SEQ ID NO: 57433 - protein, 332 aa, Homo sapiens
MQLQFRSWMLAALTLLVVFLIFADISEIEEEIGNSGGRGTIRSAVNSLHSKSNRKQILKFLDAEKDISVLKGTLKPGDIIHYIFDRDSTMNVSQNLYELLPRTSPLKNKHFGTCAIVGNSGVLLNSGCGQEIDAHSFVIRCNLAPVQEYARDVGLKTDLVTMNPSVIQRAFEDLVNATWREKLLQRLHSLNGSILWIPAFMARGGKERVEWVNELILKHHVNVRTAYPSLRLLHAVRGYWLTNKVHIKRPTTGLLMYTLATRFCKQIYLYGFWPFPLDQNQNPVKYHYYDSLKYGYTSQASPHTMPLEFKALKSLHEQGALKLTVGQCDGAT

SEQ ID NO: 57434 - protein, 1115 aa, Homo sapiens
MPSSLMLEVPALADFNRAWTELTDWLSLLDQVIKSQRVMVGDLEDINEMIIKQKATMQDLEQRRPQLEELITAAQNLKNKTSNQEARTIITDRIERIQNQWDEVQEHLQNRRQQLNEMLKDSTQWLEAKEEAEQVLGQARAKLESWKEGPYTVDAIQKKITETKQLAKDLRQWQTNVDVANDLALKLLRDYSADDTRKVHMITENINASWRSIHKRVSEREAALEETHRLLQQFPLDLEKFLAWLTEAETTANVLQDATRKERLLEDSKGVKELMKQWQDLQGEIEAHTDVYHNLDENSQKILRSLEGSDDAVLLQRRLDNMNFKWSELRKKSLNIRSHLEASSDQWKRLHLSLQELLVWLQLKDDELSRQAPIGGDFPAVQKQNDVHRAFKRELKTKEPVIMSTLETVRIFLTEQPLEGLEKLYQEPRELPPEERAQNVTRLLRKQAEEVNTEWEKLNLHSADWQRKIDETLERLRELQEATDELDLKLRQAEVIKGSWQPVGDLLIDSLQDHLEKVKALRGEIAPLKENVSHVNDLARQLTTLGIQLSPYNLSTLEDLNTRWKLLQVAVEDRVRQLHEAHRDFGPASQHFLSTSVQGPWERAISPNKVPYYINHETQTTCWDHPKMTELYQSLADLNNVRFSAYRTAMKLRRLQKALCLDLLSLSAACDALDQHNLKQNDQPMDILQIINCLTTIYDRLEQEHNNLVNVPLCVDMCLNWLLNVYDTGRTGRIRVLSFKTGIISLCKAHLEDKYRYLFKQVASSTGFCDQRRLGLLLHDSIQIPRQLGEVASFGGSNIEPSVRSCFQFANNKPEIEAALFLDWMRLEPQSMVWLPVLHRVAAAETAKHQAKCNICKECPIIGFRYRSLKHFNYDICQSCFFSGRVAKGHKMHYPMVEYCTPTTSGEDVRDFAKVLKNKFRTKRYFAKHPRMGYLPVQTVLEGDNMETNLQAEYDRLKQQHEHKGLSPLPSPPEMMPTSPQSPRDAELIAEAKLLRQHKGRLEARMQILEDHNKQLESQLHRLRQLLEQPQAEAKVNGTTVSSPSTSLQRSDSSQPMLLRVVGSQTSDSMGEEDLLSPPQDTSTGLEEVMEQLNNSFPSSRGRNTPGKPMREDTM

SEQ ID NO: 57435 - protein, 236 aa, Homo sapiens
MEIYSPDMSEVAAERSSSPSTQLSADPSLDGLPAAEDMPEPQTEDGRTPGLVGLAVPCCACLEAERLRGCLNSEKICIVPILACLVSLCLCIAGLKWVFVDKIFEYDSPTHLDPGGLGQDPIISLDATAASAVWVSSEAYTSPVSRAQSESEVQVTVQGDKAVVSFEPSAAPTPKNRIFAFSFLPSTAPSFPSPTRNPEVRTPKSATQPQTTETNLQTAPKLCAQMSLLVIAAKTT

SEQ ID NO: 57436 - protein, 79 aa, Homo sapiens
MDSEGWFAVHGWKYLVKWHHSGSYQLYPELTGADLKDCVSNNSLSSNASLPSVQSCRRLRERRVASWAVSFERLLQDPV

SEQ ID NO: 57437 - protein, 128 aa, Homo sapiens
MELVKAALAEALRLLRLQVPPSSLQGSGTPAPPGDSSLAAPPGLPPTCTPSLVSRGTQTETEVELKSSPGPPGLSNGPPAPQGASEEPSGTQSEGGGSSSSGAGSPGPPGILRPLQPPQRADTPRRNS

SEQ ID NO: 57438 - protein, 87 aa, Homo sapiens
MDQYVSTAPPRFPIAQLGTFKQDSAGMGRIFKGNLLQKKALTTFENEHHIRFFTLLVLFHVMVLLRNHSRIQGVSEDWKRANSIFRK

SEQ ID NO: 57439 - protein, 45 aa, Homo sapiens
MLKAAAKRPELSGKNTISNNSDMAEVKSMFREVLPKQEKGSQCVA

SEQ ID NO: 57440 - protein, 93 aa, Homo sapiens
MAEAATPGTTATTSGAGAAAATAAAASPTPIPTVTAPSLGAGGGGGGSDGSGGGWTKQVTCRRSLSGVILVHCNLWAPPNPLRVQAILPQPPK

SEQ ID NO: 57441 - protein, 180 aa, Homo sapiens
MAESPTEEAATAGAGAAGPGASSVAGVVGVSGSGGGFGPPFLPDVWAAAAAAGGAGGPGSGLAPLPGLPPSAAAHGAALLSHWDPTLSSDWDGERTAPQCLLRIKRTWTGPAWSPAQSISSVLISIQSLMTENPYHNEPGFEQERHPGDSKNYNECIRHETIRVAVCDMMEGKCPCPEPL

SEQ ID NO: 57442 - protein, 97 aa, Homo sapiens
MSAELNVPIDPSAPACPEPGHKGMDYRDWVRRSYLELVTSNHHSVQALSWRKLYLSRAKLKASSRTSALLSGFAMVAMVEVQLETQYQYPRPLLIAF

SEQ ID NO: 57443 - protein, 149 aa, Homo sapiens
MLYQISEEVSRSELRSFKFLLQEEISKCKLDDDMNLLDIFIEMEKRVILGEGKLDILKRVCAQINKSLLKIINDYEEFSKGEELCGVMTISDSPREQDSESQTLDKVYQMKSKPRGYCLIINNHNFAKAREKVPKLHSIRDRNGTHLDA

SEQ ID NO: 57444 - protein, 137 aa, Homo sapiens
MTHSWPPPLTAIHTPSTAEPSKFPFPTKDSQHVSSVTQNQKQYDTSSKTHSNSQQGTSSMLEDDLQLSDSEDSDSEQTPEKPPSSSAPPSAPQSLPEPVASAHSSSAESESTSDSDSSSDSESESSSSDSEENEPLE

SEQ ID NO: 57445 - protein, 1786 aa, Homo sapiens
MLSSLGCLLLCGSITLALGNAQKLPKGKRPNLKVHINTTSDSILLKFLRPSPNVKLEGLLLGYGSNVSPNQYFPLPAEGKFTEAIVDAEPKYLIVVRPAPPPSQKKSCSGKTRSRKPLQLVVGTLTPSSVFLSWGFLINPHHDWTLPSHCPNDRFYTIRYREKDKEKKWIFQICPATETIVENLKPNTVYEFGVKDNVEGGIWSKIFNHKTVVGSKKVNGKIQSTYDQDHTVPAYVPRKLIPITIIKQVIQNVTHKDSAKSPEKAPLGGVILVHLIIPGLNETTVKLPASLMFEISDALKTQLAKNETLALPAESKTPEVEKISARPTTVTPETVPRSTKPTTSSALDVSETTLVLSKRTPETLQTILIPQFELPLSTLAPKSLPEFPEAKTPFPFEKPRGTLASSEKPWIVPTAKISEDSKVLQPQTATYDVFSSPTTSDEPEISDSYTATSDRILDSIPPKTSRTLEQPRATLAPSETPFVPQKLEIFTSPEMQPTTPAPQQTTSIPSTPKRRPRPKPPRTKPERTTSAGTITPKISKSPEPTWTTPAPGKTQFISLKPKIPLSPEVTHTKPAPEPQTLLPSQSTIGPETPGTKPSTTLAPRKTKRPGRRPRPRPRPKTTPSPEVPKSKPALEPATIQPEPLVPTTASKPSERPKTTHRPDAPQIQPGSKPPKQLLPKPQTTAEPDMPPTKSVSEPVPFETEAPSMTIVPTTDIEPVTVRTEATVTTLAPKTSQRTRTRRPRPKHKTTPRPETLQTKLDFGPITPGTSSAPTTTTKRTRRPHPKPKTTPHPEVPQTKLVPATILEPVLRTEASGTTAAPKVPQRTHRPHPKPKTTLSPEELQTELVPATIFEPVSPIKEAPGTTFVPVTDLEPVTFRTEIPATTLATKTSKRTRPPRPRPKTTPSPQAPETKPVPATVLEPVTLRPEASTTLASKTSQRTRRPRLRTKTTPRPEAPESKPVPTAELKPVTLRTETWVTTQAPKTSQRTRRPRPKTKTTPSPEVPQTKLVPSTDLEPGTLRTEAPKTMVVTTVLEPDTFRTKFPETTLAPKTQRTRRPRPRPKTTSSPEVPQNKSVSVTGFEPVVHSTDAPGTTFALTELQTLILKPVTSPSLEMTESQPVSDVLESVTLSTESPKETIAPAKTDYVYPTAKAPLWPEEPKTEVVESITYVSEPPETTLETSPLPSQSITLPSPDEPQTEPAPKQTPRAPPKPKTSPRPRIPQTQPVPKVPQRVTAKPKTSPSPEVSYTTPAPKDVLLPHKPYPEVSQSEPVLQPVTFRFEPPKTTIAPLETRGIPFIPMISPSPSQEELQTTLEETDQSTQEPFTTKIPRTTELAKTTQAPHRFYTTVRPRTSDKPHIRPVLNRTTTRPTRPKPSGMPSGNGVGTGVKQAPRPSGADRNVSVDSTHPTKKPGTRRPPLPPRPTHPRRKPLPPNNVTGKPGSAGIISSGPITTPPLRSTPRPTGTPLERIETDIKQPTVPASGEELENITDFSSSPTRETDPLGKPRFKGPHVRYIQKPDNSPCSITDSVKRFPKEEATEGNATSPPQNPPTNLTVVTVEGCPSFVILDWEKPLNDTVTEYEVISRENGSFSGKNKSIQMTNQTFSTVENLKPNTSYEFQVKPKNPLGEGPVSNTVAFSTESADPRVSEPVSAGRDAIWTERPFNSDSYSECKGKQYVKRTWYKKFVGVQLCNSLRYKIYLSDSLTGKFYNIGDQRGHGEDHCQFVDSFLDGRTGQQLTSDQLPIKEGYFRAVRQEPVQFGEIGGHTQINYVQWYECGTTIPGKW

SEQ ID NO: 57446 - protein, 110 aa, Homo sapiens
MPLSDFILALKDNPYFGAGFGLVGVGTALALARKGVQLGLVAFRRHYMITLEVPARDRSYAWLLSWLTRHSTRTQHLSVETSYLQHESGRISTKFEFVPSPGNHFIWYRG

SEQ ID NO: 57447 - protein, 104 aa, Homo sapiens
MSDLLLLGLIGGLTLLLLLTLLAFAGYSGLLAGVEVSAGSPPIRNVTVAYKFHMGLYGETGRLFTESCSISPKLRSIAVYYDNPHMVPPDKCRCAVGSILSEGE

SEQ ID NO: 57448 - protein, 261 aa, Homo sapiens
MAFNDLLQQVGGVGRFQQIQVTLVVLPLLLMASHNTLQNFTAAIPTHHCRPPADANLSKNGGLEVWLPRDRQGQPESCLRFTSPQWGLPFLNGTEANGTGATEPCTDGWIYDNSTFPSTIVTEGPTPAGPVLVHGGGAARSHGVRLPCRQARPPEGTHLELPADSCVRDLRSLRTQLPHLLRLPAPLGHGSGWHLPQLHDTECGVDAHSHTGLRGHLDWLCLQPGPVPPGWCGLRCAPLAPPAATGLCAFFCLLHLLLVLH

SEQ ID NO: 57449 - protein, 136 aa, Homo sapiens
MTLLITGDSIVSAEAVWDHVTMANRELAFKAGDVIKVLDASNKDWWWGQIDDEEGWFPASFVRLWVNQEDEVEEGPSDVQNGHLDPNSDCLCLGRPLQNRDQMRANVINEIMSTERHYIKHLKDICEKVGGDMILL

SEQ ID NO: 57450 - protein, 166 aa, Homo sapiens
MAVWLAQWLGPLLLVSLWGLLAPASLLRRLGEHIQQFQESSAQGLGLSLGPGAAALPKVGWLEQLLDPFNVSDRRSFLQRYWVNDQHWVGQDGPIFLHLGGEGSLGPGSVMRGHPAALAPAWGALVISLEHRFYGLSIPAGGLEMAQLRFLSSRLALSCTAWARSV

SEQ ID NO: 57451 - protein, 302 aa, Homo sapiens
MSRLRALLGLGLLVAGSRVPRIKSQTIACRSGPTWWGPQRLNSGGRWDSEVMASTVVKYLSQEEAQAVDQELFNEYQFSVDQLMELAGLSCATAIAKAYPPTSMSRSPPTVLVICGPGNNGGDGLVCARHLKLFGYEPTIYYPKRPNKPLFTALVTQCQKMDIPFLGEMPAEPMTIDELYELVVDAIFGFSFKGDVREPFHSILSVLKGLTVPIASIDIPSGCRNHRDVRGNQNHGFSRRNHCGAQFAGMVAIETGTWSVPIFGGSEAVPLASSLQSLSSQGTSVLTGPLRMPRTAPRPTLS

SEQ ID NO: 57452 - protein, 1264 aa, Homo sapiens
MDSKKRSSTEAEGSKERGLVHIWQAGSFPITPERLPGWGGKTVLQAALGVKHGVLLTEDGEVYSFGTLPWRSGPVEICPSSPILENALVGQYVITVATGSFHSGAVTDNGVAYMWGENSAGQCAVANQQYVPEPNPVSIADSEASPLLAVRILQLACGEEHTLALSISREIWAWGTGCQLGLITTAFPVTKPQKVEHLAGRVVLQVACGAFHSLALVQCLPSQDLKPVPERCNQCSQLLITMTDKEDHVIISDSHCCPLGVTLTESQAENHASTALSPSTETLDRQEEVFENTLVANDQSVATELNAVSAQITSSDAMSSQQNVMGTTEISSARNIPSYPDTQAVNEYLRKLSDHSVREDSEHGEKPVPSQPLLEEAIPNLHSPPTTSTSALNSLVVSCASAVGVRVAATYEAGALSLKKVMNFYSTTPCETGAQAGSSAIGPEGLKDSREEQVKQESMQGKKSSSLVDIREEETEGGSRRLSLPGLLSQVSPRLLRKAARVKTRTVVLTPTYSGEADALLPSLRTEVWTWGKGKEGQLGHGDVLPRLQPLCVKCLDGKEVIHLEAGGYHSLALTAKSQVYSWGSNTFGQLGHSDFPTTVPRLAKISSENGVWSIAAGRDYSLFLVDTEDFQPGLYYSGRQDPTEGDNLPENHSGSKTPVLLSCSKLGYISRVTAGKDSYLALVDKNIMGYIASLHELATTERRFYSKLSDIKSQILRPLLSLENLGTTTTVQLLQEVASRFSKLCYLIGQHGASLSSFLHGVKEARSLVILKHSSLFLDSYTEYCTSITNFLVMGGFQLLAKPAIDFLNKNQELLQDLSEVNDENTQLMEILNTLFFLPIRRLHNYAKVLLKLATCFEVASPEYQKLQDSSSCYECLALHLGRKRKEAEYTLGFWKTFPGKMTDSLRKPERRLLCESSNRALSLQHAGRFSVNWFILFNDALVHAQFSTHHVFPLATLWAEPLSEEAGGVNGLKITTPEEQFTLISSTPQEKTKWLRAISQAVDQALRGMSDLPPYGSGSSVQRQEPPISRSAKYTFYKDPRLKDATYDGRWLSGKPHGRGVLKWPDGKMYSGMFRNGLEDGYGEYRIPNKAMNKEDHYVGHWKEGKMCGQGVYSYASGEVFEGCFQDNMRHGHGLLRSGKLTSSSPSMFIGQWVMDKKAGYGVFDDITRGEKYMGMWQDDVCQGNGVVVTQFGLYYEGNFHLNKMMGNGVLLSEDDTIYEGEFSDDWTLSGKDNSGLIEQVGKCSLLPYFLKVCEALVLFLL

SEQ ID NO: 57453 - protein, 113 aa, Homo sapiens
MAQRKNAKSSGNSSSSGSGSGSTSAGSSSPGARRETKHGGHKNGRKGGLSGTSFFTWFMVIALLGVWTSVAVVWFDLVDYEEVLGKLGIYDADGDGDFDVDDAKVLLGNLHCI

SEQ ID NO: 57454 - protein, 135 aa, Homo sapiens
MEADLSGFNIDAPRWDQRTFLGRVKHFLNITDPRTVFVSERELDWAKVMVEKSRMGVVPPGTQVEQLLYAKKLYDSAFHPDTGEKMNVIGRMSFQLPGGMIITGFMLQFYRTMPAVIFWQWVNQSFNALVNYTNR

SEQ ID NO: 57455 - protein, 278 aa, Homo sapiens
MGSALGRARRTLSGRPFQRAPCKTRRALSLSAALRNVTKAQGGCPKSLVLWGCRPKRPRKRRTSLKLAWRGTFCSSSLKISEDTHEDHDTSTENTDESNHDPQFEPIVSLPEQEIKTLEEDEEELFKMRAKLFRFASENDLPEWKERGTGDVKLLKHKEKGAIRLLMRRDKTLKICANHYITPMMELKPNAGSDRAWVWNTHADFADECPKPELLAIRFLNAENAQKFKTKFEECRKEIEEREKKAGSGKNDHAEKVAEKLEALSVKEETKEDAEEKQ

SEQ ID NO: 57456 - protein, 14 aa, Homo sapiens
MMMVRRGLLAWISR

SEQ ID NO: 57457 - protein, 283 aa, Homo sapiens
  MOD_RES (1)..(1): Any amino acid
XYELSEKMLSACNLLKNTINDPKALTSKDMRFCLNTLQHEWFRVSSQKSAIPAMVGDYIAAFEAISPDVLRYVINLADGNGNTALHYSVSHSNFEIVKLLLDADVCNVDHQNKAGYTPIMLAALAAVEAEKDMRIVEELFGCGDVNAKASQAGQTALMLAVSHGRIDMVKGLLACGADVNIQDDEGSTALMCASEHGHVEIVKLLLAQPGCNGHLEDNDGSTALSIALEAGHKDIAVLLYAHVNFAKAQSPVSVVHLAFVNRLKSTRLVDPLPPGIDGRQILC

SEQ ID NO: 57458 - protein, 331 aa, Homo sapiens
MAVFVVLLALVAGVLGNEFSILKSPGSVVFRNGNWPIPGERIPDVAALSMGFSVKEDLSWPGLAVGNLFHRPRATVMVMVKGVNKLALPPGSVISYPLENAVPFSLDSVANSIHSLFSEETPVVLQLAPSEERVYMVGKANSVFEDLSVTLRQLRNRLFQENSVLSSLPLNSLSRNNEVDLLFLSELQVLHDISSLLAGLDEIGKRYGEDSEQFRDASKILVDALQKFADDMYSLYGGNAVVELVTVKSFDTSLIRKTRTILEAKQAKNPASPYNLAYKYNFEYSVVFNMVLWIMIALALAVIITSYNIWNMDPGYDSIIYRMTNQKIRMD

SEQ ID NO: 57459 - protein, 212 aa, Homo sapiens
  MOD_RES (1)..(1): Any amino acid
XGKHQPRSAQVGSRLDALQGPKTQHSIHTVTCKSPRQKEDRSPKPPQAPQHPEEHGRQSHSSSSFASGTLQDMWRLLDLGSSPSGVTSQGDSTPGPHSFWNLQTNSIRPSSQCAERQVQKHAPTWGPLPPFWRGSALAPDANLAPCAVQLESNGGAETPWRVTSHTAGAPSSSSSRQEARQDAGRHCHPRDEDSSPGKGQDHRSLPVSSCKS

SEQ ID NO: 57460 - protein, 4204 aa, Homo sapiens
MGALWSWWILWAGATLLWGLTQEASVDLKNTGREEFLTAFLQNYQLAYSKAYPRLLISSLSESPASVSILSQADNTSKKVTVRPGESVMVNISAKAEMIGSKIFQHAVVIHSDYAISVQALNAKPDTAELTLLRPIQALGTEYFVLTPPGTSARNVKEFAVVAGAAGASVSVTLKGSVTFNGKFYPAGDVLRVTLQPYNVAQLQSSVDLSGSKVTASSPVAVLSGHSCAQKHTTCNHVVEQLLPTSAWGTHYVVPTLASQSRYDLAFVVASQATKLTYNHGGITGSRGLQAGDVVEFEVRPSWPLYLSANVGIQVLLFGTGAIRNEVTYDPYLVLIPDVAAYCPAYVVKSVPGCEGVALVVAQTKAISGLTIDGHAVGAKLTWEAVPGSEFSYAEVELGTADMIHTAEATTNLGLLTFGLAKAIGYATAADCGRTVLSPVEPSCEGMQCAAGQRCQVVGGKAGCVAESTAVCRAQGDPHYTTFDGRRYDMMGTCSYTMVELCSEDDTLPAFSVEAKNEHRGSRRVSYVGLVTVRAYSHSVSLTRGEVGFVLVDNQRSRLPVSLSEGRLRVYQSGPRAVVELVFGLVVTYDWDCQLALSLPARFQDQVCGLCGNYNGDPADDFLTPDGALAPDAVEFASSWKLDDGDYLCEDGCQNNCPACTPGQAQHYEGDRLCGMLTKLDGPFAVCHDTLDPRPFLEQCVYDLCVVGGERLSLCRGLSAYAQACLELGISVGDWRSPANCPLSCPANSRYELCGPACPTSCNGAAAPSNCSGRPCVEGCVCLPGFVASGGACVPASSCGCTFQGLQLAPGQEVWADELCQRRCTCNGATHQVTCRDKQSCPAGERCSVQNGLLGCYPDRFGTCQGSGDPHYVSFDGRRFDFMGTCTYLLVGSCGQNAALPAFRVLVENEHRGSQTVSYTRAVRVEARGVKVAVRREYPGQVLVDDVLQYLPFQAADGQVQVFRQGRDAVVRTDFGLTVTYDWNARVTAKVPSSYAEALCGLCGNFNGDPADDLALRGGGQAANALAFGNSWQEETRPGCGATEPGDCPKLDSLVAQQLQSKNECGILADPKGPFRECHSKLDPQGAVRDCVYDRCLLPGQSGPLCDALATYAAACQAAGATVHPWRSEELCPLSCPPHSHYEACSYGCPLSCGDLPVPEGCESACREGCVCDAGFVLSGDTCVPVGQCGCLHDDRYYPLGQTFYPGPGCDSLCRCREGGEVSCEPSSCGPHETCRPSGGSLGCVAVGSTTCQASGDPHYTTFDGHRFDFMGTCVYVLAQTCGTRPGLHRFAVLQENVAWGNGRVSVTRVITVQVANFTLRLEQRQWKVTVNGVDMKLPVVLANGQIRASQHGSDVVIETDFGLRVAYDLVYYVRVTVPGNYYQLMCGLCGNYNGDPKDDFQKPNGSQAGNANEFGNSWEEVVSDSPCLPPPTCPPGSEGCIPSEECPPELEKKYQKEEFCGLLSSPTGPLSSCHKLVDPQGPLKDCIFDLCLGGGNLSILCSNIHAYVSACQVAGGHVEPWRNETFCPMECPQNSHYELCADTCSLGCSALSAPLQCPDGCAEGCQCDSGFLYNGQACVPIQQCGCYHNGAYYEPEQTVLIDNCRQQCTCHAGKVVVCQEHSCKPGQVCQPSGGILSCVTKDPCHGVTCRPQETCKEQGGQGVCLPNYEATCWLWGDPHYHSFDGRKFDFQGTCNYVLATTGCPGVSTQGLTPFTVTTKNQNRGNPAVSYVRVVTVAALGTNISIHKDEIGKVRVNGVLTALPVSVADGRISVTQGASKALLVADFGLQVSYDWNWRVDVTLPSSYHGAVCGLCGNMDRNPNNDQVFPNGTLAPSIPIWGGSWRAPGWDPLCWDECRGSCPTCPEDRLEQYEGPGFCGPLAPGTGGPFTTCHAHVPPESFFKGCVLDVCMGGGDRDILCKALASYVAACQAAGVVIEDWRAQVGCEITCPENSHYEVCGPPCPASCPSPAPLTTPAVCEGPCVEGCQCDAGFVLSADRCVPLNNGCGCWANGTYHEAGSEFWADGTCSQWCRCGPGGGSLVCTPASCGLGEVCGLLPSGQHGCQPVSTAECQAWGDPHYVTLDGHRFDFQGTCEYLLSAPCHGPPLGAENFTVTVANEHRGSQAVSYTRSVTLQIYNHSLTLSARWPRKLQVDGVFVTLPFQLDSLLHAHLSGADVVVTTTSGLSLAFDGDSFVRLRVPAAYAGSLCGLCGNYNQDPADDLKAVGGKPAGWQVGGAQGCGECVSKPCPSPCTPEQQESFGGPDACGVISATDGPLAPCHGLVPPAQYFQGCLLDACQVQGHPGGLCPAVATYVAACQAAGAQLREWRRPDFCPFQCPAHSHYELCGDSCPGSCPSLSAPEGCESACREGCVCDAGFVLSGDTCVPVGQCGCLHDDRYYPLGQTFYPGPGCDSLCRCREGGEVSCEPSSCGPHETCRPSGGSLGCVAVGSTTCQASGDPHYTTFDGHRFDFMGTCVYVLAQTCGTRPGLHRFAVLQENVAWGNGRVSVTRVITVQVANFTLRLEQRQWKVTVNGVDMKLPVVLANGQIRASQHGSDVVIETDFGLRVAYDLVYYVRVTVPGNYYQLMCGLCGNYNGDPKDDFQKPNGSQAGNANEFGNSWEEVVPDSPCLPPPTCPPGSAGCIPSDKCPPELEKKYQKEEFCGLLSSPTGPLSSCHKLVDPQGPLKDCIFDLCLGGGNLSILCSNIHAYVSACQAAGGHVEPWRNETFCPMECPQNSHYELCADTCSLGCSALSAPLQCPDGCAEGCQCDSGFLYNGQACVPIQQCGCYHNGVYYEPEQTVLIDNCRQQCTCHVGKVVVCQEHSCKPGQVCQPSGGILSCVTKDPCHGVTCRPQETCKEQGGQGVCLPNYEATCWLWGDPHYHSFDGRKFDFQGTCNYVLATTGCPGVSTQGLTPFTVTTKNQNRGNPAVSYVRVVTVAALGTNISIHKDEIGKVRVNGVLTALPVSVADGRISVAQGASKALLVADFGLQVSYDWNWRVDVTLPSSYHGAVCGLCGNMDRNPNNDQVFPNGTLAPSIPIWGGSWRAPGWDPLCWDECRGSCPTCPEDRLEQYEGPGFCGPLSSGTGGPFTTCHAHVPPESFFKGCVLDVCMGGGDRDILCKALASYVAACQAAGVVIEDWRAQVGCEITCPENSHYEVCGPPCPASCPSPAPLTTPAVCEGPCVEGCQCDAGFVLSADRCVPLNNGCGCWANGTYHEAGSEFWADGTCSQWCRCGPGGGSLVCTPASCGLGEVCGLLPSGQHGCQPVSTAECQAWGDPHYVTLDGHRFDFQGTCEYLLSAPCHGPPLGAENFTVTVANEHRGSQAVSYTRSVTLQIYNHSLTLSARWPRKLQVDGVFVALPFQLDSLLHAHLSGADVVVTTTSGLSLAFDGDSFVRLRVPAAYAASLCGLCGNYNQDPADDLKAVGGKPAGWQVGGAQGCGECVSKPCPSPCTPEQQESFGGPDACGVISATDGPLAPCHGLVPPAQYFQGCLLDACQVQGHPGGLCPAVATYVAACQAAGAQLGEWRRPDFCPLQCPAHSHYELCGDSCPVSCPSLSAPEGCESACREGCVCDAGFVLSGDTCVPVGQCGCLHDGRYYPLGEVFYPGPECERRCECGPGGHVTCQEGAACGPHEECRLEDGVQACHATGCGRCLANGGIHYITLDGRVYDLHGSCSYVLAQVCHPKPGDEDFSIVLEKNAAGDLQRLLVTVAGQVVSLAQGQQVTVDGEAVALPVAVGRVRVTAEGRNMVLQTTKGLRLLFDGDAHLLMSIPSPFRGRLCGLCGNFNGNWSDDFVLPNGSAASSVETFGAAWRAPGSSKGCGEGCGPQGCPVCLAEETAPYESNEACGQLRNPQGPFATCQAVLSPSEYFRQCVYDLCAQKGDKAFLCRSLAAYTAACQAAGVAVKPWRTDSFCPLHCPAHSHYSICTRTCQGSCAALSGLTGCTTRCFEGCECDDRFLLSQGVCIPVQDCGCTHNGRYLPVNSSLLTSDCSERCSCSSSSGLTCQAAGCPPGRVCEVKAEARNCWATRGLCVLSVGANLTTFDGARGATTSPGVYELSSRCPGLQNTIPWYRVVAEVQICHGKTEAVGQVHIFFQDGMVTLTPNKGVWVNGLRVDLPAEKLASVSVSRTPDGSLLVRQKAGVQVWLGANGKVAVIVSNDHAGKLCGACGNFDGDQTNDWHDSQEKPAMEKWRAQDFSPCYG

SEQ ID NO: 57461 - protein, 86 aa, Homo sapiens
MSSGKSARYNRFSGGPSNLPTPDVTTGTRMETTFGPAFSAVTTITKADGTSTYKQHCRTPSSSSTLAYSPRDEEDSMVGPYPQEPV

SEQ ID NO: 57462 - protein, 396 aa, Homo sapiens
MAVRERAAAAMAALERRVPSLDDFAGQSWSSWVERADLPAADGAELEESSKNTKKLDAMTLIKEDMSIFGHCPAHDDFYLVVCNHCSQVVKPQAFQKHCERRHGPLSKLYGRAPPPPPAPASSQKCHVVNGQGPACRAPGSTKTSSREKGQGSRSRGHQPPEKTQKDNLCLFVPVVNLEKMSSLPKPDGHGIRVAPPSAFLSQPGGLTKDSPGKPPMAPPSKEPPGRENIEIIPSEGSSHWAEGSPPEKEPSGTRLPPKTHRKMARKECDLNRQCGVINPETKKICTRLLTCKIHSVHQRREVQGRAKDFDVLVAELKANSRKGESPKEKSPGRKEQVLERPSQELPSSVQVVAAVAAPSSTFSVRAKQTYPYCALPRHTTAPQPLGSVPDPTLRI

SEQ ID NO: 57463 - protein, 108 aa, Homo sapiens
  MOD_RES (1)..(1): Any amino acid
XAVEFLEQAQQVSGLLAQLWRAQPAAILPCLKELFAVISCAEEEPPSSALASVVQHLPLELMDGVVRNLSNDDSVTDSQMLTAISRFSLSCCTPSSGELPCLCSSTCS

SEQ ID NO: 57464 - protein, 43 aa, Homo sapiens
MEAPTVETPPDPSPPSAPAPALVPLRAPDVARLREEQEKEEGR

SEQ ID NO: 57465 - protein, 133 aa, Homo sapiens
MMPGQIPDPSVTTGSLPGLGPLTGLPSSALTVEELKYADIRNLGAMIAPLHFLEVKLGKRPQPVKSELDEEEERRKRRREKNKVAAARCRNKKKERTEFLQRESERLELMNAELKTQIEELKQERQQLILMLN

SEQ ID NO: 57466 - protein, 155 aa, Homo sapiens
MQQCDSPHVVKYYGSYFKNTDLWIVMEYCGAGSVSDIIRLRNKTLTEDEIATILQSTLKGLEYLHFMRKIHRDIKAGNILLNTEGHAKLADFGVAGQLTDTMAKRNTVIGTPFWMAPEVIQEIGYNCVADIWSLGITAIEMAEGKPPYADIHPMR

SEQ ID NO: 57467 - protein, 140 aa, Homo sapiens
MAMAPSPSLVQVYTSPAAVAVWEWQDGLGTWHPYSATVCSFIEQQFVQQKGQRFGLGSLAHSIPLGQADPSLAPYIIDLPSWTQFRQDTGTMRAVRRHLFPQHSAPGRGVVWEWLSDDGSWTAYEASVCDYLEQQVARGN

SEQ ID NO: 57468 - protein, 270 aa, Homo sapiens
MASRGVVGIFFLSAVPLVCLELRRGIPDIGIKDFLLLCGRILLLLALLTLTISVTTSWLNSFKSPQVYLKEEEEKNEKRQKLVRKKQQEAQGEKASRYIENVLKPHQEMKLRKLEERFYQMTGEAWKLSSGHKLGGDEGTSQTSFETSNREAAKSQNLPKPLTEFPSPAEQPTCKEIPDLPEEPSQTAEEVVTVALRCPSGNVLRRRFLKSYSSQVLFDWMTRIGYHISLYSLSTSFPRRPLAVEGGQSLEDIGITVDTVLILEEKEQTN

SEQ ID NO: 57469 - protein, 62 aa, Homo sapiens
MSFRKVNIIILVLAVALFLLVLHHNFLSLSSLLRNEVTDSGIVGPQPIDFVPNALRHAVDGR

SEQ ID NO: 57470 - protein, 17 aa, Homo sapiens
  MOD_RES (1)..(1): Any amino acid
XAGLCHQLTNALVERKQ

SEQ ID NO: 57471 - protein, 164 aa, Homo sapiens
MASPPRCSPTAHDRECKLPPPSAPASEYCPGKLSWGTMARALGRFKLSIPHTHLLATLDPLALDREPPPHLLPEKHQVPEKLIWGDQDPLSKIPFKILSGHEHAVSTCHFCVDDTKLLSGSYDCTVKLWDPVDGSVVRDFEHRPKAPVVECSITGDSSSHCRIL

SEQ ID NO: 57472 - protein, 37 aa, Homo sapiens
IVHCLIGIVPTSVIVTGVQVSSRIFMVWLITHSIKPI

SEQ ID NO: 57473 - protein, 1340 aa, Homo sapiens
MDTKLMCLLFFFSLPPLLVSNHTGRIKVVFTPSICKVTCTKGSCQNSCEKGNTTTLISENGHAADTLTATNFRVVICHLPCMNGGQCSSRDKCQCPPNFTGKLCQIPVHGASVPKLYQHSQQPGKALGTHVIHSTHTLPLTVTSQQGVKVKFPPNIVNIHVKHPPEASVQIHQVSRIDGPTGQKTKEAQPGQSQVSYQGLPVQKTQTIHSTYSHQQVIPHVYPVAAKTQLGRCFQETIGSQCGKALPGLSKQEDCCGTVGTSWGFNKCQKCPKKPSYHGYNQMMECLPGYKRVNNTFCQDINECQLQGVCPNGECLNTMGSYRCTCKIGFGPDPTFSSCVPDPPVISEEKGPCYRLVSSGRQCMHPLSVHLTKQLCCCSVGKAWGPHCEKCPLPGTAKEEPVEALTFSREHGPGVAEPEVATAPPEKEIPSLDQEKTKLEPGQPQLSPGISTIHLHPQFPVVIEKTSPPVPVEVAPEASTSSASQVIAPTQVTEINECTVNPDICGAGHCINLPVRYTCICYEGYRFSEQQRKCVDIDECTQVQHLCSQGRCENTEGSFLCICPAGFMASEEGTNCIDVDECLRPDVCGEGHCVNTVGAFRCEYCDSGYRMTQRGRCEDIDECLNPSTCPDEQCVNSPGSYQCVPCTEGFRGWNGQCLDVDECLEPNVCANGDCSNLEGSYMCSCHKGYTRTPDHKHCRDIDECQQGNLCVNGQCKNTEGSFRCTCGQGYQLSAAKDQCEDIDECQHRHLCAHGQCRNTEGSFQCVCDQGYRASGLGDHCEDINECLEDKSVCQRGDCINTAGSYDCTCPDGFQLDDNKTCQDINECEHPGLCGPQGECLNTEGSFHCVCQQGFSISADGRTCEDIDECVNNTVCDSHGFCDNTAGSFRCLCYQGFQAPQDGQGCVDVNECELLSGVCGEAFCENVEGSFLCVCADENQEYSPMTGQCRSRTSTDVDVDQPKEEKKECYYNLNDASLCDNVLAPNVTKQECCCTSGVGWGDNCEIFPCPVLGTAEFTEMCPKGKGFVPAGESSSEAGGENYKDADECLLFGQEICKNGFCLNTRPGYECYCKQGTYYDPVKLQCFDMDECQDPSSCIDGQCVNTEGSYNCFCTHPMVLDASEKRCIRPAESNEQIEETDVYQDLCWEHLSDEYVCSRPLVGKQTTYTECCCLYGEAWGMQCALCPLKDSDDYAQLCNIPVTGRRQPYGRDALVDFSEQYTPEADPYFIQDRFLNSFEELQAEECGILNGCENGRCVRVQEGYTCDCFDGYHLDTAKMTCVDVNECDELNNRMSLCKNAKCINTDGSYKCLCLPGYVPSDKPNYCTPLNTALNLEKDSDLE

SEQ ID NO: 57474 - protein, 422 aa, Homo sapiens
MAMESTATAAVAAELVSADKIEDVPAPSTSADKVESLDVDSEAKKLLGLGQKHLVMGDIPAAVNAFQEAASLLMENGVLGNALEGVHVEEEEGEKTEDESLVENNDNIDETEGSEEDDKENDKTEEMPNDSVLENKSLQENEEEEIGNLELAWDMLDLAKIIFKRQETKEAQLYAAQAHLKLGEVSVESENYVQAVEEFQSCLNLQEQYLEAHDRLLAETHYQLGLAYGYNSQYDEAVAQFSKSIEVIENRMAVLNEQVKEAEGSSAEYKKEIEELKELLPEIREKIEDAKESQRSGNVAELALKATLVESSTSGFTPGGGGSSVSMIASRKPTDGASSSNCVTDISHLVRKKRKPEEESPRKDDAKKAKQEPEVNGGSGDAVPSGNEVSENMEEEAENQAESRAAVEGTVEAGATVESTAC

SEQ ID NO: 57475 - protein, 73 aa, Homo sapiens
MPGGGPEMDDYMETLKDEEDALWENVECNRHMLSRYINPAKLTPYLRQCKVIDEQDEDEVLNAPMLPSKINRA

SEQ ID NO: 57476 - protein, 166 aa, Homo sapiens
MAADGVDERSPLLSASHSGNVTPTAPPYLQESSPRAELPPPYTAIASPDASGIPVINCRVCQSLINLDGKLHQHVVKCTVCNEATPIKNPPTGKKYVRCPCNCLLICKDTSRRIGCPRPNCRRIINLGPVMLISEEQPAQPALPIQPEGTRVVCGHCGNTFLLLSG

SEQ ID NO: 57477 - protein, 91 aa, Homo sapiens
ESPTGTGKSLSLICGALSWLRDFEQKKREEEARLLETGTGPLHDEKDESLCLSSSCEGAAGTPRPAGEPAWVTQFVQKKEERDLVDRLKSG

SEQ ID NO: 57478 - protein, 437 aa, Homo sapiens
MPRVKAAQAGRQSSAKRHLAEQFAVGEIITDMAKKEWKVGLPIGQGGFGCIYLADMNSSESVGSDAPCVVKVEPSDNGPLFTELKFYQRAAKPEQIQKWIRTRKLKYLGVPKYWGSGLHDKNGKSYRFMIMDRFGSDLQKIYEANAKRFSRKTVLQLSLRILDILEYIHEHEYVHGDIKASNLLLNYKNPDQVYLVDYGLAYRYCPEGVHKEYKEDPKRCHDGTIEFTSIDAHNGVAPSRRGDLEILGYCMIQWLTGHLPWEDNLKDPKYVRDSKIRYRENIASLMDKCFPEKNKPGEIAKYMETVKLLDYTEKPLYENLRDILLQGLKAIGSKDDGKLDLSVVENGGLKAKTITKISLSLSLILYVRSERKKLKKARNLVLKIRNGQTHRQRRPYRPVQEPERESRSNSDAVNQISFSLFSFDFFLLFYLNCFIFL

SEQ ID NO: 57479 - protein, 257 aa, Homo sapiens
MSEVPVARVWLVLLLLTVQVGVTAGAPWQCAPCSAEKLALCPPVSASCSEVTRSAGCGCCPMCALPLGAACGVATARCARGLSCRALPGEQQPLHALTRGQGACVQESDASAPHAAEAGSPESPESTEITEEELLDNFHLMAPSEEDHSILWDAISTYDGSKALHVTNIKKWKEPCRIELYRVVESLAKAQETSGEEISKFYLPNCNKNGFYHSRQTSMDGEAGLCWCVYPWNGKRIPGSPEIRGDPNCQIYFNVQN

SEQ ID NO: 57480 - protein, 217 aa, Homo sapiens
MAAHGKLRRERGLQAEYETQVKEMRWQLSEQLRCLELQGELRRELLQELAEFMRRRAEVELEYSRGLEKLAERFSSRGGRLGSSREHQSFRKEPSLLSPLHCWAVLLQHTRQQSRESAALSEVLAGPLAQRLSHIAEDVGRLVKKSRDLEQQLQDELLEVVSELQTHHLALGLPAGQEDVPGISHGERECRGQAPGGRAAGGEAGRPECPHHHRWCH

SEQ ID NO: 57481 - protein, 129 aa, Homo sapiens
MTQNKLKLCSKANVYTEVPDGGWGWAVAVSFFFVEVFTYGIIKTFGVFFNDLMDSFNESNSRISWIISICVFVLTFSGLGYCFSFLPTVTILSQYFGKRRSIVTAVASTGECFAVFAFAPAIMALKERI

SEQ ID NO: 57482 - protein, 143 aa, Homo sapiens
MGLSDGEWQLVLNVWGKVEADIPGHGQEVLIRLFKGHPETLEKFDKFKHLKSEDEMKASEDLKKHGATVLTALGGILKKKGHHEAEIKPLAQSHATKHKIPVKYLEFISECIIQVLQSKHPGDFGADAQGAMNKALELFRKDM

SEQ ID NO: 57483 - protein, 135 aa, Homo sapiens
MTEDKVTGTLVFTVITAVLGSFQFGYDIGVINAPQQVIISHYRHVLGVPLDDRKAINNYVINSTDELPTISYSMNPKPTPWAEEETVAAAQLITMLWSLSVSSFAVGGMTASFFGGWLGDTLGRANFRPGSYVYR

SEQ ID NO: 57484 - protein, 171 aa, Homo sapiens
MILSFNKSGGGGDIHQGFQSLLTEVNKTGTQYLLRMANRLFGEKSCDFLSSFRDSCQKFYQAEMEELDFISAVEKSRKHINTWVAEKTEGKIAELLSPGSVDPLTRLVLVNAVYFRGNWDEQFDKENTEERLFKVSKNEEKPVQMMFKQSTFKKTYIGEIFTQILVLPYVG

SEQ ID NO: 57485 - protein, 44 aa, Homo sapiens
MASSAASSEHFEKLHEIFRGLHEDLQGVPERLLGTAGTGEISNF

SEQ ID NO: 57486 - protein, 105 aa, Homo sapiens
MPEVERKPKITASRKLLLKSLMLAKAKECWEQEHEEREAEKVRYLAERIPTLQTRGLSLSALQDLCRELHAKVEVVDEERYDIEAMSGMEGRKKMFDAAKSPTSQ

SEQ ID NO: 57487 - protein, 71 aa, Homo sapiens
KKRRKDRIQDLIDMGYGYDESDSFIDNSEALRHSCLTRGCFSMLLEVAEEHSHISLETHFAPSDCRSRTWS

SEQ ID NO: 57488 - protein, 246 aa, Homo sapiens
  MOD_RES (1)..(1): Any amino acid
XSSFTNSTWAQTQGSGWLDDLQIHGWDSDSGTAIFLKPWSKGNFSDKEVAELEEIFRVYIFGFAREVQDFAGDFQMKYPFEIQGIAGCELHSGGAIVSFLRGALGGLDFLSVKNASCVPSPEGGSRAQKFCALIIQYQGIMETVRILLYETCPRYLLGVLNAGKADLQRQVKPEAWLSSGPSPGPGRLQLVCHVSGFYPKPVWVMWMRGNPTSIGSIVLAIIVPSLLLLLCLALWYMRRRSYQNIP

SEQ ID NO: 57489 - protein, 130 aa, Homo sapiens
MGLLTFRDVAIEFSREEWEHLDSDQKLLYGDVMLENYGNLVSLGLAVSKPDLITFLEQRKEPWNVKSAETVAIQPDIFSHDTQGLLRKKLIEASFQKVILDGYGSCGPQNLNLRKEWESEEKNQYNKSDT

SEQ ID NO: 57490 - protein, 163 aa, Homo sapiens
MGGILHSPTSPEPPDTTSPESPDTTSPESPDTTSQEPPDTTSPEPPDKTSPEPAPQQGSTHTPRSPGSTRTRRPEISQAGPTQGEVIPTGSSKPAGDQLPAALWTSSAVLGLLLLALPTYHLWKRCRHLAEDDTHPPASLRLLPQVSAWAGLRGTGQVGISPS

SEQ ID NO: 57491 - protein, 340 aa, Homo sapiens
MESLGLHTVTLSDGTTAYVQQAVKGEKLLEGQVIQLEDGTTAYIHQVTVQKEALSFEDGQPVQLEDGSMAYIHRTPREGYDPSTLEAVQLEDGSTAYIHHPVAVPSESTILAVQTEVGLEDLAAEDDEGFSADAVVALEQYASKVLHDSQIPRNGKGQQVGDRAFRCGYKGCGRLYTTAHHLKVHERAHTGDRPYRCDFPSCGKAFATGYGLKSHVRTHTGEKPYKCPEELCSKAFKTSGDLQKHVRTHTGERPFQCPFEGCGRSFTTSNIRKVHVRTHTGERPYTCPEPHCGRGFTSATNYKNHVRIHTGEKPYVCTVPGCGKRFTEYSSLYKHHVVHT

SEQ ID NO: 57492 - protein, 154 aa, Homo sapiens
  MOD_RES (1)..(1): Any amino acid
XLTASEAKKLPIQEFHLSRILQELGLNQEQFVDLCILLGSDYCESIRGIGPKRAVDLIQKHKSIEEIVRRLDPNKYPVPENWLHKEAHQLFLEPEVLDPESVELKWSEPNEEELIKFMCGEKQFSEERIRSGVKRLSKSRQGSTQGRLDDFFKP

SEQ ID NO: 57493 - protein, 50 aa, Homo sapiens
MHHQQRMAALGTDKELSDLLDFSAMFSPPVSSGKNGPTSLASGHFTGSNY

SEQ ID NO: 57494 - protein, 203 aa, Homo sapiens
MSRGSSAGFDRHITIFSPEGRLYQVEYAFKAINQGGLTSVAVRGKDCAVIVTQKKVPDKLLDSSTVTHLFKITENIGCVMTGMTADSRSQVQRARYEAANWKYKYGYEIPVDMLCKRIADISQVYTQNAEMRPLGCCMILIGIDEEQGPQVYKCDPAGYYCGFKATAAGVKQTESTSFLEKKVKKKFDWTFEQTVEDSYRSRD

SEQ ID NO: 57495 - protein, 78 aa, Homo sapiens
MATWDEKAVTRRAKVAPAERMSKFLRHFTVVGDDYHAWNINYKKWENEEEEEEEEQPPPTPVSGEEGRAAAPDVAPAP

SEQ ID NO: 57496 - protein, 639 aa, Homo sapiens
MRTGVIGLILPPTFSFLEMMWRICPALAVGCTVVALVPPASPAPLLLAQLAGELGPFPGILNVLSGPASLVPILASQPGIRKVAFCGAPEEGRALRRSLAGECAELGLALGTESLLLLTDTADVDSAVEGVVDAAWSDRGPGGLRLLIQESVWDEAMRRLQERMGRLRSGRGLDGAVDMGARGAAACDLVQRFVREAQSQGAQVFQAGDVPSERPFYPPTLVSNLPPASPCAQVEVPWPVVVASPFRTAKEALLVANGTPRGGSASVWSERLGQALELGYGLQVGTVWINAHGLRDPSVPTGGCKESGCSWHGGPDGLYEYLRPSGTPARLSCLSKNLNYDTFGLAVPSTLPAGPEIGPSPAPPYGLFVGGRFQAPGARSSRPIRDSSGNLHGYVAEGGAKDIRGAVEAAHQAFPGWAGQSPGARAALLWALAAALERRKSTLASRLERQGAELKAAEAEVELSARRLRAWGARVQAQGHTLQVAGLRGPVLRLREPLGVLAVVCPDEWPLLAFVSLLAPALAYGNTVVMVPSAACPLLALEVCQDMATVFPAGLANVVTGDRDHLTRCLALHQDVQAMWYFGSAQGSQFVEWASAGNLKPVWASRGCPRAWDQEAEGAGPELGLRVARTKALWLPMGD

SEQ ID NO: 57497 - protein, 198 aa, Homo sapiens
MEYEEITLERGNSGLGFSIAGGTDNPHIGDDPSIFITKIIPGGAAAQDGRLRVNDSILFVNEVDVREVTHSAAVEALKEAGSIVRLYVMRRKPPAEKVMEIKLIKGPKGLGFSIAGGVGNQHIPGDNSIYVTKIIEGGAAHKDGRLQIGDKILAVNSVGLEDVMHEDAVAALKNTYDVVYLKVAKPSNAYLSDSYAPP

SEQ ID NO: 57498 - protein, 159 aa, Homo sapiens
  MOD_RES (1)..(1): Any amino acid
XAVAATLNNLAVLYGKRGKYKEAEPLCQRALEIREKVLGTNHPDVAKQLNNLALLCQNQGKYEAVERYYQRALAIYEGQLGPDNPNVARTKNNLASCYLKQGKYAEAETLYKEILTRAHVQEFGSVDDDHKPIWMHAEEREEMSKPHSEHYSEKPGSSV

SEQ ID NO: 57499 - protein, 39 aa, Homo sapiens
MSVPGPYQAATGPSSAPSAPPSYEETVAVNSYYPTPPAP

SEQ ID NO: 57500 - protein, 73 aa, Homo sapiens
AVCWDDDGQHHGRLYPPAPDEIPSCPKARRSSPSLAPSCMTPTSSSTQKSSTQTVSWMQMDGSGSMRRSCPSP

SEQ ID NO: 57501 - protein, 229 aa, Homo sapiens
MSQSRHRAEAPPLEREDSGTFSFAVPDPLMPDPSKQPKNQLNPIGSLQELAIHHGWRLPEYTLSQEGGPAHKREYTTICRLESFMETGKGASKKQAKRNAAEKFLAKFSNISPENHISLTNVVGHSLGCTWHSLRNSPGEKINLLKRSLLSIPNTDYIQLLSEIAKEQGFNITYLDIDELSANGQYQCLAELSTSPITVCHGSGISCGNAQSDAAHNALQYLKIIAERK

SEQ ID NO: 57502 - protein, 126 aa, Homo sapiens
MLDTEKELLKEKIKEALIQQSQEQKEILEKCLEEERQRNKEALVSAAKLEKEAVKDAVLKVVEEERKNLEKAHAEERELWKTEHAKDQEKVSQEIQKAIQEQRKISQETVKAAIIEEQKRSEKAVE

SEQ ID NO: 57503 - protein, 1360 aa, Homo sapiens
  MOD_RES (1)..(1): Any amino acid
XHIEILDENNQSPYFTMPSYQGYILESAPVGATISDSLNLTSPLRIVALDKDIEDTKDPELHLFLNDYTSVFTVTQTGITRYLTLLQPVDREEQQTYTFSITAFDGVQESEPVIVNIQVMDANDNTPTFPEISYDVYVYTDMRPGDSVIQLTAVDADEGSNGEITYEILVGAQGDFIINKTTGLITIAPGVEMIVGRTYALTVQAADNAPPAERRNSICTVYIEVLPPNNQSPPRFPQLMYSLEISEAMRVGAVLLNLQATDREGDSITYAIENGDPQRVFNLSETTGILTLGKALDRESTDRYILIITASDGRPDGTSTATVNIVVTDVNDNAPVFDPYLPRNLSVVEEEANAFVGQVKATDPDAGINGQVHYSLGNFNNLFRITSNGSIYTAVKLNREVRDYYELVVVATDGAVHPRHSTLTLAIKVLDIDDNSPVFTNSTYTVLVEENLPAGTTILQIEAKDVDLGANVSYRIRSPEVKHFFALHPFTGELSLLRSLDYEAFPDQEASITFLVEAFDIYGTMPPGIATVTVIVKDMNDYPPVFSKRIYKGMVAPDAVKGTPITTVYAEDADPPGLPASRVRYRVDDVQFPYPASIFEVEEDSGRVITRVNLNEEPTTIFKLVVVAFDDGEPVMSSSATVKILVLHPGEIPRFTQEEYRPPPVSELATKGTMVGVISAAAINQSIVYSIVSGNEEDTFGINNITGVIYVNGPLDYETRTSYVLRVQADSLEVVLANLRVPSKSNTAKVYIEIQDENNHPPVFQKKFYIGGVSEDARMFTSVLRVKATDKDTGNYSVMAYRLIIPPIKEGKEGFVVETYTGLIKTAMLFHNMRRSYFKFQVIATDDYGKGLSGKADVLVSVVNQLDMQVIVSNVPPTLVEKKIEDLTEILDRYVQEQIPGAKVVVESIGARRHGDAFSLEDYTKCDLTVYAIDPQTNRAIDRNELFKFLDGKLLDINKDFQPYYGEGGRILEIRTPEAVTSIKKRGESLGYTEGALLALAFIIILCCIPAILVVLVSYRQFKVRQAECTKTARIQAALPAAKPAVPAPAPVAAPPPPPPPPPGAHLYEELGDSSIWSFCWQLVICMRTCAIWRTLTRRGYGSEQQQLLRPSLLKPEELSMESGIDPGQEYGQDYYSYEHGYEMPQYGSRRRLLPPAGQEEYGEVVGEAEEEYEEEEWARKRMIKLVVDREYETSSTGEDSAPECQRNRLHHPSIHSNINGNIYIAQNGSVVRTRRACLTDNLKVASPVRLGGPFKKLDKLAVTHEENVPLNTLSKGPFSTEKMNARPTLVTFAPCPVGTDNTAVKPLRNRLKSTVEQESMIDSKNIKEALEFHSDHTQSDDEELWMGPWNNLHIPMTKL

SEQ ID NO: 57504 - protein, 803 aa, Homo sapiens
MEVTDRIASLEQRVQMQEDDIQLLKSALADVVRRLNITEEQQAVLNRKGPTKARPLMQTLPLRTTVNNGTVLPKKPTGSLPSPSGVRKETAVPATKRLNRSVSLLNACKLNRSTPSNIKRTSSSERVSPGGRRESNGDSRGNRNRTGSTSSSSSGKKNSESKPKEPVFSAEEGYVKMFLRGRPVTMYMPKDQVDSYSLEAKVELPTKRLKLEWVYGYRGRDCRNNLYLLPTGETVYFIASVVVLYNVEEQLQRHYAGHNDDVKCLAVHPDRITIATGQVAGTSKDGKQLPPHVRIWDSVTLNTLHVIGIGFFDRAVTCIAFSKSNGGTNLCAVDDSNDHVLSVWDWQKEEKLADVKCSNEAVFAADFHPTDTNIIVTCGKSHLYFWTLEGSSLNKKQGLFEKQEKPKFVLCVTFSENGDTITGDSSGNILVWGKGTNRISYAVQGAHEGGIFALCMLRDGTLVSGGGKDRKLISWSGNYQKLRKTEIPEQFGPIRTVAEGKGDVILIGTTRNFVLQGTLSGDFTPITQGHTDELWGLAIHASKSQFLTCGHDKHATLWDAVGHRPVWDKIIEDPAQSSGFHPSGSVVAVGTLTGRWFVFDTETKDLVTVHTDGNEQLSVMRYSPDGNFLAIGSHDNCIYIYGVSDNGRKYTRVGKCSGHSSFITHLDWSVNSQFLVSNSGDYEILYWVPSACKQVVSVETTRDIEWATYTCTLGFHVFGVWPEGSDGTDINAVCRAHEKKLLSTGDDFGKVHLFSYPCSQFRAPSHIYGGHSSHVTNVDFLCEDSHLISTGGKDTSIMQWRVI

SEQ ID NO: 57505 - protein, 903 aa, Homo sapiens
NMYRLPATQEVVTQLQSQILELQGELKEFKTCNKQLHQKLILAEAVMEGRPTPDKTLLNDSEICPPDDLASLPSCKENPEDVLSPTSVATYLSSKSQPSAKVSVMGTDQSESINTSNETEYLKQKIHDLETELEGYQNFIFQLQKHSQCSEAIITVLCGTEGAQDGLSKPKNGSDGEEMTFSSLHQVRYVKHVKILGPLAPEMIDSRVLENLKQQLEEQEYKLQKEQNLNMQLFSEIHNLQNKFRDLSPPRYDSLVQSQARELSLQRQQIKDGHGICVISRQHMNTMIKAFEELLQASDVDYCVAEGFQEQLNQCAELLEKLEKLFLNGKSVGVEMNTQNELMERIEEDNLTYQHLLPESPEPSASHALSDYETSEKSFFSRDQKQDNETEKTSVMVNSFSQDLLMEHIQEIRTLRKRLEESIKTNEKLRKQLERQGSEFVQGSTSIFASGSELHSSLTSEIHFLRKQNQALNAMLIKGSRDKQKENDKLRESLSRKTVSLEHLQREYASVKEENERLQKEGSEKERHNQQLIQEVRCSGQELSRVQEEVKLRQQLLSQNDKLLQSLRVELKAYEKLDEEHRRLREASGEGWKGQDPFRDLHSLLMEIQALRLQLERSIETSSTLQSRLKEQLARGAEKAQEGALTLAVQAVSIPEVPLQPDKHDGDKYPMESDNSFDLFDSSQAVTPKSVSETPPLSGNDTDSLSCDSGSSATSTPCVSRLVTGHHLWASKNGRHVLGLIEDYEALLKQISQGQRLLAEMDIQTQEAPSSTSQELGTKGPHPAPLSKFVSSVSTAKLTLEEAYRRLKLLWRVSLPEDGQCPLHCEQIGEMKAEVTKLHKKLFEQEKKLQNTMKLLQLSKRQEKVIFDQLVVTHKILRKARGNLELRPGGAHPGTCSPSRPGS

SEQ ID NO: 57506 - protein, 132 aa, Homo sapiens
MNCEARGLESHIKSYLSSWFEDVVCPIQRVVLLFQEKLTFLLHAALSYTPVEVKESDEKTKRDINRFLSVASLQGLIHEGTMTSLCMAMTEEQHKSVVIDCSSSQPQFCNAGSNRFCEDWMQAFLNGAKGGN

SEQ ID NO: 57507 - protein, 140 aa, Homo sapiens
MQNSHMDEYRNSSNGSTGNSSEVVVEHPTDFSTEIMNVTEMEQSPDDSPNVNASTEETEMASAVDLPVTLTETEANFPPEYEKFWKTVENNPQDFTGWNHLMAARKAFDRFFIHYPYCYGYWKKYADLEKRHDNIKPSDE

SEQ ID NO: 57508 - protein, 34 aa, Homo sapiens
MPGEATETVPATEQELPQPQAETVVSHLRVWNRI

SEQ ID NO: 57509 - protein, 283 aa, Homo sapiens
MKSARAKTPRKPTVKKGSQTNLKDPVGVYCRVRPLGFPDQECCIEVINNTTVQLHTPEGYRLNRNGDYKETQYSFKQVFGTHTTQKELFDVVANPLVNDLIHGKNGLLFTYGVTGSGKTHTMTGSPGEGGLLPRCLDMIFNSIGSFQAKRYVFKSNDRNSMDIQCEVDALLERQKREAMPNPKTSSSKRQVDPEFADMITVQEFCKAEEVDEDSVYGVFVSYIEIYNNYIYDLLEEVPFDPIKPKPPQSKLLREDKNHNMYVAGCTEVEVKSTEEAFEVFWRG

SEQ ID NO: 57510 - protein, 176 aa, Homo sapiens
GDHRVELYKVLSSLGYHVVTFDYRGWGDSVGTPSERGMTYDALHVFDWIKARSGDNPVYIWGHSLGTGVATNLVRRLCERETPPDALILESPFTNIREEAKSHPFSVIYRYFPGFDWFFLDPITSSGIKFANDENSIASPHQLEASEISKFSLCPFIQTLATGTNTFTRALSCHGY

SEQ ID NO: 57511 - protein, 280 aa, Homo sapiens
ETLIDWCDEKELNLILTTGGTGFAPRDVTPEATKEVIEREAPGMALAMLMGSLNVTPLGMLSRPVCGIRGKTLIINLPGSKKGSQECFQFILPALPHAIDLLRDAIVKVKEVHDELEDLPSPPPPLSPPPTTSPHKQTEDKGVQCEEEEEEKKDSGVASTEDSSSSHITAAAIAAKIPDSIISRGVQVLPRDTASLSTTPSESPRAQATSRLSTASCPTPKQIRRPDESKGVASRVGSLKVQSRCSSKENILRASHSAVDITKVARRHRMSPFPLTSMDK

SEQ ID NO: 57512 - protein, 1233 aa, Homo sapiens
MANGGGGGGGSSGGGGGGGGSSLRMSSNIHANHLSLDASSSSSSSSSSSSSSSSSSSSSSVHEPKMDALIIPVTMEVPCDSRGQRMWWAFLASSMVTFFGGLFIILLWRTLKYLWTVCCHCGGKTKEAQKINNGSSQADGTLKPVDEKEEAVAAEVGWMTSVKDWAGVMISAQTLTGRVLVVLVFALSIGALVIYFIDSSNPIESCQNFYKDFTLQIDMAFNVFFLLYFGLRFIAANDKLWFWLEVNSVVDFFTVPPVFVSVYLNRSWLGLRFLRALRLIQFSEILQFLNILKTSNSIKLVNLLSIFISTWLTAAGFIHLVENSGDPWENFQNNQALTYWECVYLLMVTMSTVGYGDVYAKTTLGRLFMVFFILGGLAMFASYVPEIIELIGNRKKYGGSYSAVSGRKHIVVCGHITLESVSNFLKDFLHKDRDDVNVEIVFLHNISPNLELEALFKRHFTQVEFYQGSVLNPHDLARVKIESADACLILANKYCADPDAEDASNIMRVISIKNYHPKIRIITQMLQYHNKAHLLNIPSWNWKEGDDAICLAELKLGFIAQSCLAQGLSTMLANLFSMRSFIKIEEDTWQKYYLEGVSNEMYTEYLSSAFVGLSFPTVCELCFVKLKLLMIAIEYKSANRESRILINPGNHLKIQEGTLGFFIASDAKEVKRAFFYCKACHDDITDPKRIKKCGCKRLIYFEDEQPSTLSPKKKQRNGGMRNSPNTSPKLMRHDPLLIPGNDQIDNMDSNVKKYDSTGMFHWCAPKEIEKVILTRSEAAMTVLSGHVVVCIFGDVSSALIGLRNLVMPLRASNFHYHELKHIVFVGSIEYLKREWETLHNFPKVSILPGTPLSRADLRAVNINLCDMCVILSANQNNIDDTSLQDKECILASLNIKSMQFDDSIGVLQANSQGFTPPGMDRSSPDNSPVHGMLRQPSITTGVNIPIITELVNDTNVQFLDQDDDDDPDTELYLTQPFACGTAFAVSVLDSLMSATYFNDNILTLIRTLVTGGATPELEALIAEENALRGGYSTPQTLANRDRCRVAQLALLDGPFADLGDGGCYGDLFCKALKTYNMLCFGIYRLRDAHLSTPSQCTKRYVITNPPYEFELVPTDLIFCLMQFDHNAGQSRASLSHSSHSSQSSSKKSSSVHSIPSTANRQNRPKSRESRDKQNATRMNRMGQEKKWFTDEPDNAYPRNIQIKPMSTHMANQINQYKSTSSLIPPIREVEDEC

SEQ ID NO: 57513 - protein, 57 aa, Homo sapiens
MSKLSFRARALDASKPLPVFRCEDLPDLHEYASINRAVPQMPTGMEKEEESILDSIT

SEQ ID NO: 57514 - protein, 615 aa, Homo sapiens
MNPTETKAVKTEPEKKSQSTKPKSLPKQASDTGSNDAHNKKAVSRSAEQQPSEKSTEPKTKPQDMISAGGESVAGITAISGKPGDKKKEKKSLTPAVPVESKPDKPSGKSGMDAALDDLIDTLGGPEETEEENTTYTGPEVSDPMSSTYIEELGKREVTIPPKYRELLAKKEGITGPPADSSKPIGPDDAIDALSSDFTCGSPTAAGKKTEKEESTEVLKAQSAGTVRSAAPPQEKKRKVEKDTMSDQALEALSASLGTRQAEPELDLRSIKEVDEDKDGKPLLPEPEEKPKPRSESELIDELSEDFDRSECKEKPSKPTEKTEESKAAAPAPVSEAVCRTSMCSIQSAPPEPATLKGTVPDDAVEALADSLGKKEADPEDGKPVMDKVKEKAKEEDREKLGEKEETIPPDYRLEEVKDKDGKPLLPKESKEQLPPMSEDFLLDALSEDFSGPQNASSLKFEDAKLAAAISEVVSQTPASTTQAGAPPRDTSQSDKDLDDALDKLSDSLGQRQPDPDENKPMEDKVKEKAKAEHRDKLGERDDTIPPEYRHLLDDNGQDKPVKPPTKKSEDSKKPADDQDPIDALSGDLDSCPSTTETSQNTAKTTEETSKPKDD

SEQ ID NO: 57515 - protein, 1314 aa, Homo sapiens
MDQKILSLAAEKTADKLQEFLQTLREGDLTNLLQNQAVKGKVAGALLRAIFKGSPCSEEAGTLRRRKIYTCCIQLVESGDLQKEIASEIIGLLMLEAHHFPGPLLVELANEFISAVREGSLVNGKSLELLPIILTALATKKENLAYGKGVLSGEECKKQLINTLCSGRWDQQYVIQLTSMFKDVPLTAEEVEFVVEKALSMFSKMNLQEIPPLVYQLLVLSSKGSRKSVLEGIIAFFSALDKQHNEEQSGDELLDVVTVPSGELRHVEGTIILHIVFAIKLDYELGRELVKHLKVGQQGDSNNNLSPFSIALLLSVTRIQRFQDQVLDLLKTSVVKSFKDLQLLQGSKFLQNLVPHRSYVSTMILEVVKNSVHSWDHVTQGLVELGFILMDSYGPKKVLDGKTIETSPSLSRMPNQHACKLGANILLETFKIHEMIRQEILEQVLNRVVTRASSPISHFLDLLSNIVMYAPLVLQSCSSKVTEAFDYLSFLPLQTVQRLLKAVQPLLKVSMSMRDCLILVLRKAMFANQLDARKSAVAGFLLLLKNFKVLGSLSSSQCSQSLSVSQVHVDVHSHYNSVANETFCLEIMDSLRRCLSQQADVRLMLYEGFYDVLRRNSQLANSVMQTLLSQLKQFYEPKPDLLPPLKLEACILTQGDKISLQEPLDYLLCCIQHCLAWYKNTVIPLQQGEEEEEEEEAFYEDLDDILESITNRMIKSELEDFELDKSADFSQSTSIGIKNNICAFLVMGVCEVLIEYNFSISSFSKNRFEDILSLFMCYKKLSDILNEKAGKAKTKMANKTSDSLLSMKFVSSLLTALFRSSNEFMRYAVNVALQKVQQLKETGHVSGPDGQNPEKIFQNLCDITRVLLWRYTSIPTSVEESGKKEKGKSISLLCLEGLQKIFSAVQQFYQPKIQQFLRALDVTDKEGEEREDADVSVTQRTAFQIRQFQRSLLNLLSSQEEDFNSKEALLLVTVLTSLSKLLEPSSPQFVQMLSWTSKICKENSREDALFCKSLMNLLFSLHVSYKSPVILLRDLSQDIHGHLGDIDQDVEVEKTNHFAIVNLRTAAPTVCLLVLSQAEKVLEEVDWLITKLKGQVSQETLSEEASSQATLPNQPVEKAIIMQLGTLLTFFHELVQTALPSGSCVDTLLKDLCKMYTTLTALVRYYLQVCQSSGGIPKNMEKLVKLSGSHLTPLCYSFISYVQNKSKSLNYTGEKKEKPAAVATAMARVLRETKPIPNLIFAIEQYEKFLIHLSKKSKVNLMQHMKLSTSRDFKIKGNILDMVLREDGEDENEEGTASEHGGQNKEPAKKKRKK

SEQ ID NO: 57516 - protein, 56 aa, Homo sapiens
MSGPTDETAGDLPVKDTGLNLFGMGGLQETSTTRTMKSRQAVSRVSREELEDRFLR

SEQ ID NO: 57517 - protein, 693 aa, Homo sapiens
MGIELLCLFFLFLGRNDHVQGGAQTLQVHVRQTEDYPVDLYYLMDLSASMDDDLNTIKELGSRLSKEMSKLTSNFRLGFGSFVEKPVSPFVKTTPEEIANPCSSIPYFCLPTFGFKHILPLTNDAERFNEIVKNQKISANIDTPEGGFDAIMQAAVCKEKIGWRNDSLHLLVFVSDADSHFGMDSKLAGIVIPNDGLCHLDSKNEYSMSTVLEYPTIGQLIDKLVQNNVLLIFAVTQEQVHLYENYAKLIPGATVGLLQKDSGNILQLIISAYEELRSEVELEVLGDTEGLNLSFTAICNNGTLFQHQKKCSHMKVGDTASFSVTVNIPHCERRSRHIIIKPVGLGDALELLVSPECNCDCQKEVEVNSSKCHHGNGSFQCGVCACHPGHMGPRCECGEDMLSTDSCKEAPDHPSCSGRGDCYCGQCICHLSPYGNIYGPYCQCDNFSCVRHKGLLCGGNGDCDCGECVCRSGWTGEYCNCTTSTDSCVSEDGVLCSGRGDCVCGKCVCTNPGASGPTCERCPTCGDPCNSKRSCIECHLSAAGQAREECVDKCKLAGATISEEEDFSKDGSVSCSLQGENECLITFLITTDNEGKTIIHSINEKDCPKPPNIPMIMLGVSLAILLIGVVLLCIWKLLVSFHDRKEVAKFEAERSKAKWQTGTNPLYRGSTSTFKNVTYKHREKQKVDLSTDC

SEQ ID NO: 57518 - protein, 383 aa, Homo sapiens
MPATLLRAVARSHHILSKAHQCRRIGHLMLKPLKEFENTTCSTLTIRQSLDLFLPDKTASGLNKSQILEMNQKKSDTSMLSPLNAARCQDEKAHLPTMKSFGTHRRVTHKPNLLGSKWFIKILKRHFSSVSTETFVPKQDFPQVKRPLKASRTRQPSRTNLPVLSVNEDLMHCTAFATADEYHLGNLSQDLASHGYVEVTSLPRDAANILVMGVENSAKEGDPGTIFFFREGAAVFWNVKDKTMKHVMKVLEKHEIQPYEIALVHWENEELNYIKIEGQSKLHRGEIKLNSELDLDDAILEKFAFSNALCLSVKLAIWEASLDKFIESIQSIPEVMNEKLQHCMELTDLMRNHLNEKRALRLEWMIVILITIEVMFELGRVFF

SEQ ID NO: 57519 - protein, 132 aa, Homo sapiens
MPAIMTMLADHAARQLLDFSQKLDINLLDNVVNCLYHGEGAQQRMAQEVLTHLKEHPDAWTRVDTILEFSQNMNTKYYGLQILENVIKTRWKILPRNQCEGIKKYVVGLIIKTSSDPTCVEKEKVYIGKLNM

SEQ ID NO: 57520 - protein, 139 aa, Homo sapiens
  MOD_RES (1)..(1): Any amino acid
XRPGAFERETVITMSGDDHPRAFVLDECQNLMFWTNWNEQHPSIMRAALSGANVLTLIEKDIRTPNGLAIDHRAEKLYFSDATLDKIERCEYDGSHRYVNSLHAESTTVAARTCVCSLTRAMSTAHAEGAESSRMTSPA

SEQ ID NO: 57521 - protein, 28 aa, Homo sapiens
MTTSQKHRDFVAEPMGEKPVGSLAGIGE

SEQ ID NO: 57522 - protein, 63 aa, Homo sapiens
VFRPRTPPEAIALCSRLLEYTPTARLTPLEACAHSFFDELRDPNVKLPNGRDTPALFNFTTQG

SEQ ID NO: 57523 - protein, 568 aa, Homo sapiens
MSFVAGVIRRLDETVVNRIAAGEVIQRPANAIKEMIENCLDAKSTSIQVIVKEGGLKLIQIQDNGTGIRKEDLDIVCERFTTSKLQSFEDLASISTYGFRGEALASISHVAHVTITTKTADGKCAYRASYSDGKLKAPPKPCAGNQGTQITVEDLFYNIATRRKALKNPSEEYGKILEVVGRYSVHNAGISFSVKKQGETVADVRTLPNASTVDNIRSIFGNAVSRELIEIGCEDKTLAFKMNGYISNANYSVKKCIFLLFINHRLVESTSLRKAIETVYAAYLPKNTHPFLYLSLEISPQNVDVNVHPTKHEVHFLHEESILERVQQHIESKLLGSNSSRMYFTQTLLPGLAGPSGEMVKSTTSLTSSSTSGSSDKVYAHQMVRTDSREQKLDAFLQPLSKPLSSQPQAIVTEDKTDISSGRARQQDEEMLELPAPAEVAAKNQSLEGDTTKGTSEMSEKRGPTSSNPRKRHREDSDVEMVEDDSRKEMTAACTPRRRIINLTSVLSLQEEINEQGHEVLREMLHNHSFVGCVNPQWALAQHQTKLYLLNTTKLRSQHRSLTLPCLP

SEQ ID NO: 57524 - protein, 1932 aa, Homo sapiens
MAPGALRGGCEQRAPGGGARTAALGPWPWPSPGPAPSPGAAPPRSRKMSGALLWPLLPLLLLLLSARDGVRAAQPQAPGYLIAAPSVFRAGVEEVISVTIFNSPREVTVQAQLVAQGEPVVQSQGAILDKGTIKLKVPTGLRGQALLKVWGRGWQAEEGPLFHNQTSVTVDGRGASVFIQTDKPVYRPQHRVLISIFTVSPNLRPVNEKLEAYILDPRGSRMIEWRHLKPFCCGITNMSFPLSDQPVLGEWFIFVEMQGHAYNKSFEVQKYVLPKFELLIDPPRYIQDLDACETGTVRARYTFGKPVAGALMINMTVNGVGYYSHEVGRPVLRTTKILGSRDFDICVRDMIPADVPEHFRGRVSIWAMVTSVDGSQQVAFDDSTPVQRQLVDIRYSKDTRKQFKPGLAYVGKVELSYPDGSPAEGVTVQIKAELTPKDNIYTSEVVSQRGLVGFEIPSIPTSAQHVWLETKVMALNGKPVGAQYLPSYLSLGSWYSPSQCYLQLQPPSHPLQVGEEAYFSVKSTCPCNFTLYYEVAARGNIVLSGQQPAHTTQQRSKRAAPALEKPIRLTHLSETEPPPAPEAEVDVCVTSLHLAVTPSMVPLGRLLVFYVRENGEGVADSLQFAVETFFENQVSVTYSANETQPGEVVDLRIRAARGSCVCVAAVDKSVYLLRSGFRLTPAQVFQELEDYDVSDSFGVSREDGPFWWAGLTAQRRRRSSVFPWPWGITKDSGFAFTETGLVVMTDRVSLNHRQDGGLYTDEAVPAFQPHTGSLVAVAPSRHPPRTEKRKRTFFPETWIWHCLNISDPSGEGTLSVKVPDSITSWVGEAVALSTSQGLGIAEPSLLKTFKPFFVDFMLPALIIRGEQVKIPLSVYNYMGTCAEVYMKLSVPKGIQFVGHPGKRHVTKKMCVAPGEAEPIWVVLSFSDLGLNNITAKALAYGDTNCCRDGRSSKHPEENHADRRVPIGVDHVRRSVMVEAEGVPRAYTYSAFFCPSERVHISTPNKYEFQYVQRPLRLTRFDVAVRAHNDARVALSSGPQDTAGMIEIVLGGHQNTRSWISTSKMGEPVASAHTAKILSWDEFRTFWISWRGGLIQVGHGPEPSNESVIVAWTLPRPPEVQFIGFSTGWGSMGEFRIWRKMEVDESYSEAFTLGVPHGAIPGSERATASIIGDVMGPTLNHLNNLLRLPFGCGEQNMIHFAPNVFVLKYLQKTQQLSPEVERETTDYLVQGYQRQLTYKRQDGSYSAFGERDASGSMWLTAFVLKSFAQARSFIFVDPRELAAAKSWIIQQQQADGSFLAVGRVLNKDIQGGIHGTVPLTAYVVVALLETGTASEEERGSTDKARHFLESAAPLAMDPYSCALTTYALTLLRSPAAPEALRKLRSLAIMRDGVTHWSLSNSWDVDKGTFLSFSDRVSQSVVSAEVEMTAYALLTYTLLGDVAAALPVVKWLSQQRNALGGFSSTQDTCVALQALAEYAILSYAGGINLTVSLASTNLDYQETFELHRTNQKVLQTAAIPSLPTGLFVSAKGDGCCLMQIDVTYNVPDPVAKPAFQLLVSLQEPEAQGRPPPMPASAAEGSRGDWPPADDDDPAADQHHQEYKVMLEVCTRWLHAGSSNMAVLEVPLLSGFRADIESLEQLLLDKHMGMKRYEVAGRRVLFYFDEIPSRCLTCVRFRALRECVVGRTSALPVSVYDYYEPAFEATRFYNVSTHSPLARELCAGPACNEVERAPARGPGWFPGESGPAVAPEEGAAIARCGCDHDCGAQGNPVCGSDGVVYASACRLREAACRQAAPLEPAPPSCCALEQRLPASSSSTYGDDLASVAPGPLQQDVKLNGAGLEVEDSDPEPEGEAEDRVTAGPRPPVSSGNLESSTQSASPFHRWGQTPAPQRHSGRVVGAHRPGLLSPVFVYSPAFQSGGEEGLWMSNTCTLR

SEQ ID NO: 57525 - protein, 137 aa, Homo sapiens
MNLDSIHRLIEETQIFQMQQSSIKSRGDMVAPASPPRDTCNTCFPLHGLQSHAAHNFCAHSYNTNKWDICEELRLRELEEVKARAAQMEKTMRWWSDCTANWREKWSKVRAERNSAREEGRQLRIKLEMAMKELSTL

SEQ ID NO: 57526 - protein, 819 aa, Homo sapiens
METLTSRHEKRALHSQASAISQDREEKIMSQEPLSFKDVAVVFTEEELELLDSTQRQLYQDVMQENFRNLLSVGDKNGKDTEYIQDEELRFFSHKELSSCKIWEEVAGELPGSQDCRVNLQGKDFQFSEDAAPHQGWEGASTPCFPIENFLDSLQGDGLIGLENQQFPAWRAIRPIPIQGSWAKAFVNQLGDVQERCKNLDTEDTVYKCNWDDDSFCWISCHVDHRFPEIDKPCGCNKCRKDCIKNSVLHRINPGENGLKSNEYRNGFRDDADLPPHPRVPLKEKLCQYDEFSEGLRHSAHLNRHQRVPTGEKSVKSLERGRGVRQNTHIRNHPRAPVGDMPYRCDVCGKGFRYKSVLLIHQGVHTGRRPYKCEECGKAFGRSSNLLVHQRVHTGEKPYKCSECGKGFSYSSVLQVHQRLHTGEKPYTCSECGKGFCAKSALHKHQHIHPGEKPYSCGECGKGFSCSSHLSSHQKTHTGERPYQCDKCGKGFSHNSYLQAHQRVHMGQHLYKCNVCGKSFSYSSGLLMHQRLHTGEKPYKCECGKSFGRSSDLHIHQRVHTGEKPYKCSECGKGFRRNSDLHSHQRVHTGERPYVCDVCGKGFIYSSDLLIHQRVHTGEKPYKCAECGKGFSYSSGLLIHQRVHTGEKPYRCQECGKGFRCTSSLHKHQRVHTGKKPYTCDQCGKGFSYGSNLRTHQRLHTGEKPYTCCECGKGFRYGSGLLSHKRVHTGEKPYRCHVCGKGYSQSSHLQGHQRVHTGEKPYKCEECGKGFGRNSCLHVHQRVHTGEKPYTCGVCGKGFSYTSGLRNHQRVHLGENPYK

SEQ ID NO: 57527 - protein, 126 aa, Homo sapiens
MGHMLLPFRLGLGGPIGSGHQFFPWIHIGDLAGILTHALEANHVHGVLNGVAPSSATNAEFAQTLGAALGRRAFIPLPSAVVQAVFGRQRAIMLLEGQKVIPQRTLATGYQYSFPELGAALKEIVA

SEQ ID NO: 57528 - protein, 196 aa, Homo sapiens
MSSLGGGSQDAGGSSSSSTNGSGGSGSSGPKAGAADKSAVVAAAAPASVADDTPPPERRNKSGIISEPLNKSLRRSRPLSHYSSFGSSGGSGGGSMMGGESADKATAAAAAASLLANGHDLAAAMAVDKSNPTSKHKSGAVASLLSKAERATELAAEGQLTLQQFAQSTEMLKRVVQEHLPLMSEAGAGLPDMEAV

SEQ ID NO: 57529 - protein, 3795 aa, Homo sapiens
MVVSAGPWSSEKAEMNILEINETLRPQLAEKKQQFRSLKEKCFLTQLAGFLANRQKKYKYEECKDLIKFMLRNERQFKEEKLAEQLKQAEELRQYKVLVHSQERELTQLREKLREGRDASRSLYEHLQALLTPDEPDKSQGQDLQEQLAEGCRLAQHLVQKLSPENDEDEDEDVQVEEAEKVLESSAPREVQKAEESKVPEDSLEECAITCSNSHGPCDSNQPHKNIKITFEEDEVNSTLVVDRESSHDECQDALNILPVPGPTSSATNVSMVVSAGPLSSEKAEMNILEINEKLRPQLAEKKQQFRNLKEKCFLTQLSGFLANQQKKYKYEECKDLIKFMLRNERQFKEEKLAEQLKQAEELRQYKVLVHAQERELTQLKEKLREGRDASRSLNEHLQALLTPYEPDKSQGQDLQEQLAEGCRLAQHLVQKLSPENDNDDDEDVQVEVAEKVQKSSAPREMQKAEEKEVPEDSLEECAITYSNSHGSYDSNQPHRKTKITFEEDKVDSTLIGSSSHVEWEDAVHIIPENESDDEEEEEKGPVSPRNLQESEEEEVPQESWDEGYSTLSIPPEMLASYQSYSSTFHSLEEQQVCMAVDIGRHRWDQVKKEDQEATGPRLSRELLDEKGPEVLQDSQDRCYSTPSGCLELTDSCQPYRSAFYILEQQRVGLAIDMDEIEKYQEVEEDQDPSCPRLSRELLDEKEPEVLQDSLDRCYSTPSGYLELPDLGQPYSSAVYSLEEQYLGLALDVDRIKKDQEEEEDQGPPCPRLSRELLEVVEPEVLQDSLDRCYSTPSSCLEQPDSCQPYGSSFYALEEKHVGFSLDVGEIEKKGKGKKRRGRRSKKERRRGRKEGEEDQNPPCPRLSRELLDEKGPEVLQDSLDRCYSTPSGCLELTDSCQPYRSAFYVLEQQRVGFAFDMDEIEKYQEVEEDQDPSCPRLSRELLDEKEPEVLQDSLDRCYSTPSGYLELPDLGQPYSSAVYSLEEQYLGLALDVDRIKKDEEEEEDQDPPCPRLSRELLEVVEPEVLQDSLDRCYSTPSSCLEQPDSCQPYGSSFYALEENHVGFSLDVGEIEKKGKGKKRRGRRSKKERRRGRKEGEEDQNPPCPRLSRELLEEKGPEVLQDSLDRCYSTPSGCLELTDSCQPYRSAFYVLEQQRVGFAVDMDEIEKYQEVEEDQDPSCPRLSRELLDEKEPEVLQDSLDRCYSTPSGYLELPDLGQPYSSAVYSLEEQYLGLALDVDRIKKDEEEEEDQDPPCPRLSRELLEVVEPEVLQDSLDRCYSTPSSCLEQPDSCQPYGSSFYALEEKHVGFSLDVGEIEKKGKGKKRRGRRSKKERRRGRKEGEEDQNPPCPRLSRELLEEKGPEVLQDSLDRCYSTPSGCLELTDSCQPYRSAFYVLEQQRVGFAVDMDEIEKYQEVEEDQDPSCPRLSRELLDEKEPEVLQDSLDRCYSTPSGYLELPDLGQPYSSAVYSLEEQYLGLALDVDRIKKDEEEEEDQDPPCPRLSRELLEVVEPEVLQDSLDRCYSTPSSCLEQPDSCQPYGSSFYALEEKHVGFSLDVGEIEKKGKGKKRRGRRSKKERRRGRKEGEEDQNPPCPRLSRELLDEKGPEVLQDSLDRCYSTPSGCLELTDSCQPYRSAFYVLEQQHVGLAVDMDEIEKYQEVEEDQDPSCPRLSRELLDEKEPEVLQDSLDRCYSTPSGYLELPDLGQPYSSAVYSLEEQYLGLALDVDRIKKDQEEEEDQGPPCPRLSRELLEVVEPEVLQDSLDRCYSTPSSCLEQPDSCQPYGSSFYALEEKHVGFSLDVGEIEKKGKGKKRRGRRSKKERRRGRKEGEEDQNPPCPRLSRELLDEKGPEVLQDSLDRCYSTPSGCLELTDSCQPYRSAFYVLEQQHVGLAVDMDEIEKYQEVEEDQDPSCPRLSRELLDEKEPEVLQDSLDRCYSTPSGYLELPDLGQPYSSAVYSLEEQYLGLALDVDRIKKDQEEEEDQGPPCPRLSRELLEVVEPEVLQDSLDRCYSTPSSCLEQPDSCQPYGSSFYALEEKHVGFSLDVGEIEKKGKGKKRRGRRSKKERRRGRKEGEEDQNPPCPRLSRELLDEKGPEVLQDSLDRCYSTPSGCLELTDSCQPYRSAFYVLEQQHVGLAVDMDEIEKYQEVEEDQDPSCPRLSRELLDEKEPEVLQDSLDRCYSTPSGYLELPDLGQPYSSAVYSLEEQYLGLALDVDRIKKDQEEEEDQGPPCPRLSRELLEVVEPEVLQDSLDRCYSTPSSCLEQPDSCQPYGSSFYALEEKHVGFSLDVGEIEKKGKGKKRRGRRSKKERRRGRKEGEEDQNPPCPRLSRELLDEKGPEVLQDSLDRCYSTPSGCLELTDSCQPYRSAFYVLEQQHVGLAVDMDEIEKYQEVEEDQDPSCPRLSRELLDEKEPEVLQDSLDRCYSTPSGYLELPDLGQPYSSAVYSLEEQYLGLALDVDRIKKDQEEEEDQDPPCPRLSRELLEVVEPEVLQDSLDRCYSTPSSCLEQPDSCQPYGSSFYALEEKHVGFSLDVGEIEKKGKGKKRRGRRSKKERRRGRKEGEEDQNPPCPRLSRELLDEKGPEVLQDSLDRCYSTPSGCLELTDSCQPYRSAFYVLEQQHVGLAVDMDEIEKYQEVEEDQDPSCPRLSRELLDEKEPEVLQDSLDRCYSTPSGYLELPDLGQPYSSAVYSLEEQYLGLALDVDRIKKDQEEEEDQGPPCPRLSRELLEVVEPEVLQDSLDRCYSTPSSCLEQPDSCQPYGSSFYALEEKHVGFSLDVGEIEKKGKGKKRRGRRSKKERRRGRKEGEEDQNPPCPRLSRELLDEKGPEVLQDSLDRCYSTPSGCLELTDSCQPYRSAFYVLEQQHVGLAVDMDEIEKYQEVEEDQDPSCPRLSRELLDEKEPEVLQDSLDRCYSTPSGYLELPDLGQPYSSAVYSLEEQYLGLALDVDRIKKDQEEEEDQGPPCPRLSRELLEVVEPEVLQDSLDRCYSTPSSCLEQPDSCQPYGSSFYALEEKHVGFSLDVGEIEKKGKGKKRRGRRSKKERRRGRKEGEEDQNPPCPRLSRELLDEKGPEVLQDSLDRCYSTPSGCLELTDSCQPYRSAFYVLEQQHVGLAVDMDEIEKYQEVEEDQDPSCPRLSRELLDEKEPEVLQDSLDRCYSTPSGYLELPDLGQPYSSAVYSLEEQYLGLALDVDRIKKDEEEEEDQDPPCPRLSRELLEVVEPEVLQDSLDRCYSTPSSCLEQPDSCQPYGSSFYALEEKHVGFSLDVGEIEKKGKGKKRRGRRSKKERRRGRKEGEEDQNPPCPRLSRELLDEKGPEVLQDSLDRCYSTPSGYLELTDSCQPYRSAFYVLEQQHVGLAVDMDEIEKYQEVEEDQDPSCPRLSRELLDEKEPEVLQDSLDRCYSTPSGYLELPDLGQPYSSAVYSLEEQYLGLALDVDRIKKDQEEEEDQGPPCPRLSRELLEVVEPEVLQDSLDRCYSTPSSCLEQPDSCQPYGSSFYALEEKHVGFSLDVGEIEKKGKGKKRRGRRSKKERRRGRKEGEEDQNPPCPRLSRELLDEKGPEVLQDSLDRCYSTPSGCLELCDSCQPYRSAFYVLEQQRVGLAVDMDEIEKYQEVEEDQDPSCPRLSRELLDEKEPEVLQDSLDRCYSTPSGYLELPDLGQPYSSAVYSLEEQYLGLALDVDKIEKKGKGKKRRGRRSKKERRRGRKEGEEDQNPPCPRLNGVLMEVEEREVLQDSLDRCYSTPSMYFELPDSFQHYRSVFYSFEEQHISFALYVDNRFFTLTVTSLHLVFQMGVIFPQ

SEQ ID NO: 57530 - protein, 256 aa, Homo sapiens
MAASRLELNLVRLLSRCEAMAAEKRDPDEWRLEKYVGALEDMLQALKVHASKPASEVINEYSWKVDFLKGMLQAEKLTSSSEKALANQFLAPGRVPTTARERVPATKTVHLQSRARYTSEMRSELLGTEPEMDVRKRTGVAGSQPVSEKQLAAELDLVLQRHQNLQEKLAEEMLGLARSLKTNTLAAQSVIKKDNQTLSHSLKMADQNLEKLKTESERLEQHTQKSVNWLLWAMLIIVCFIFISMILFIRIMPKLK

SEQ ID NO: 57531 - protein, 188 aa, Homo sapiens
  MOD_RES (1)..(1): Any amino acid
XGKKEKARLGQLRGFMETEAAAQESLGLGKLGTQAEKDRRLKKNTSGHELLEEARRKGLPFAQWDGPTVVAWLELWLGMPAWYVAACRANVKSGAIMSALSDTEIQREIGISNPLHRLKLRLAIQEMVSLTSPSAPPTSRTKESEEGSWAQCPVFLQTLAYGDMNHEWIGNEWLPSLGLPQYRSYFME

SEQ ID NO: 57532 - protein, 184 aa, Homo sapiens
MLPLEKAFASPRSSPAPPDLPTPGSAAGVQQEEPETIPERTPADLEFSRLRFREFVYQEAAGPHQTLARLHELCRQWLMPEARSKEQMLELLVLEQFLGILPDKVRPWVVAQYPESCKKAASLVEGLADVLEEPGMLLGSPAGSSSILSDGVYERHMDPLLLPGELASPSQALGAGEIPAPSET

SEQ ID NO: 57533 - protein, 133 aa, Homo sapiens
AAAERNKDPILHVLRQYLDPAQRGVRVLEVASGSGQHAAHFARAFPLAEWQPSDVDQRCLDRGSSEQQDTCSNPGPCSSPTGEGVPFHSPNPSLQVCPRLSGKYPDLGPVGCVPMPTALCHQWEDLPPEQRGL

SEQ ID NO: 57534 - protein, 168 aa, Homo sapiens
NTVLDSQRQQKHYGITSPISLASPKEIDHIYTQKLIDAMKPFGVFEDEEELNHRLVVLGKLNNLVKEWISDVSESKNLPPSVVATVGGKIFTFGSYRLGVHTKGADIDALCVAPRHVERSDFFQSFFEKLKHQDGIRNLRAVEDAFVPVIKFEFDGIEVVELLMKFCI

SEQ ID NO: 57535 - protein, 354 aa, Homo sapiens
MSGPVPSRARVYTDVNTHRPREYWDYESHVVEWGNQDDYQLVRKLGRGKYSEVFEAINITNNEKVVVKILKPVKKKKIKREIKILENLRGGPNIITLADIVKDPVSRTPALVFEHVNNTDFKQLYQTLTDYDIRFYMYEILKALDYCHSMGIMHRDVKPHNVMIDHEHRKMYDYSLDMWSLGCMLASMIFRKEPFFHGHDNYDQLVRIAKVLGTEDLYDYIDKYNIELDPRFNDILGRHSRKRWERFVHSENQHLVSPEALDFLDKLLRYDHQSRLTAREAMEHPYFYTVVKDQARMGSSSMPGGSTPVSSANMMSGISSVPTPSPLGPLAGSPVIAAANPLGMPVPAAAGAQQ

SEQ ID NO: 57536 - protein, 94 aa, Homo sapiens
MENLPAVTTEEPTPMGRGPVGPSGGGSTRDQVRTVVMRPSVSWEKAGPEEAKAPVRGDEAPPARVAGPAAGTPPCQMGVYPTDLTLQLLAVRRK

SEQ ID NO: 57537 - protein, 88 aa, Homo sapiens
MEEGGNLGGLIKMVHLLVLSGAWGMQMWVTFVSGFLLFRSLPRHTFGLVQSKLFPFYFHISMGCAFINLCILASQHAWAQLTFWEASQ

SEQ ID NO: 57538 - protein, 107 aa, Homo sapiens
VTMSCLTKEDTGWYWCGIQRDFARDDMDFTELIVTDDKGTLANDFWSGKDLSGNKTRSCKAPKVVRKADRSRTSILIICILITGLGIISVISHLTKRRRSQRNRRGK

SEQ ID NO: 57539 - protein, 168 aa, Homo sapiens
MALSKSMHARNRYKDKPPDFAYLASKYPDFKQHVQINLNGRVSLNFKDPEAVRALTCTLLREDFGLSIDIPLERLIPTVPLRLNYIHWVEDLIGHQDSDKSTLRRGIDIGTGASCIYPLLGATLNGWYFLATEVDDMCFNYAKKNVEQNNLSDLIKGSKLTKSSKTSA

SEQ ID NO: 57540 - protein, 224 aa, Homo sapiens
SSTSSYAPSSSSNLSCGGGSSASSTCSKSSFDYTHDMEAAHMAATAILNLSTRCREMPQNLSTKPQDLCATRNPDMEVDENGTLDLSMNKQRPRDSCCPILTPLEPMSPQQQAVMNNRCFQLGEGDCWDLPVDYTKMKPRRIDEDESKDITPEDLDPFQEALEERRYPGEVTIPSPKPKYPQCKESKKDLITLSGCPLADKSIRSMLATSSQELKFQRWTHFLS

SEQ ID NO: 57541 - protein, 663 aa, Homo sapiens
MGNILTCCVHPSVSLEFDQQQGSVCPSESEIYEAGAGDRMAGAPMAAAVQPAEVTVEVGEDLHMHHIRDQEMPEALEFNPSANPEASTIFQRNSQTDVVEIRRSNCTNHVSTERFSQQYSSCSTIFLDDSTASQHYLTMTIISVTLEIPHHITQRDADRSLSIPDEQLHSFAVSTVHITKNRNGGGSLNNYSSSIPSTPSTSQEDPQFSVPPTANTPTPVCKRSMRWSNLFTSEKGSHPDKERKAPENHADTIGSGRAIPIKQGMLLKRSGKWLKTWKKKYVTLCSNGVLTYYSSLGDYMKNIHKKEIDLRTSTIKVPGKWPSLATSACAPISSSKSNGLSKDMDTGLGDSICFSPSISSTTSPKLNPPPSPHANKKKHLKKKSTNNFMIVSATGQTWHFEATTYEERDAWVQAIQSQILASLQSCESSKSKSQLTSQSEAMALQSIQNMRGNAHCVDYETQNPKWASLNLGVLMCIECSGIHRSLGTRLSRVRSLELDDWPVELRKVMSSIGNDLANSIWEGSSQGQTKPSVKSTREEKERWIRSKYEEKLFLAPLPCTELSLGQHLLRATADEDLQTAILLLAHGSREEVNETCGEGDGCTALHLACRKGNVVLAQLLIWYGVDVMARDAHGNTALTYARQASSQECINVLLQYGCPDECV

SEQ ID NO: 57542 - protein, 275 aa, Homo sapiens
MSAHNRGTELDLSWISKIQVNHPAVLRRAEQIQARRTVKKEWQAAWLLKAVTFIDLTTLSGDDTSSNIQRLCYKAKYPIREDLLKALNMHDKGITTAAVCVYPARVCDAVKALKAAGCNIPVASVAAGFPAGQTHLKTRLEEIRLAVEDGATEIDVVINRSLVLTGQWEGSDFIKTSTGKETVNATFPVAIVMLRAIRDFFWKTGNKIGFKPAGGIRSAKDSLAWLSLVKEELGDEWLKPELFRIGASTLLSDIERQIYHHVTGRYAAYHDLPMS

SEQ ID NO: 57543 - protein, 142 aa, Homo sapiens
MYQVSGQRPSGCDAPYGAPSAAPGPGQPQGNPLGCTPLLPNDSGHPSELGGTRRAGNGALGGPKAHRKLQTHPSLASQGSKKSKSSSKSTTSQIPLQAQEDCCVHCILSCLFCEFLTLCNIVLDCATCGSCSSEDSCLCCCC

SEQ ID NO: 57544 - protein, 46 aa, Homo sapiens
MRKEAVQRGRIPHSLPGAVAASSGSPPGSALAAVASGGDLFPGQPV

SEQ ID NO: 57545 - protein, 78 aa, Homo sapiens
MAMGLMCGRRELLRLLQSGRRPRAAVAHTTSSLRLPAPAASVPLLSLLQKSRFRPLLLLLQLPHPQQYLRWLLERLQM

SEQ ID NO: 57546 - protein, 640 aa, Homo sapiens
HGHLLIFGFGCSKPYEKIPDQMFFHTDYRPLIRDSNNYVLDEQTQQAPHLMPPPFLVDVDGNPHPTKYQRLVPGRENSADEHLIPQLGYVATSDGEVIEQIISLQTNDNDERSPESSILDGMIRQLQQQQDQRMGADQDTIPRGLSNGEETPRRGFRRLSLDIQSPPNIGLRRSGQVEGVRQMHQNAPRSQIATERDLQAWKRRVVVPEVPLGIFRKLEDFRLEKGEEERNLYIIGRKRKTLQLSHKSDSVVLVSQSRQRTCRRKYPNYGRRNRSWRELSSGNESSSSVRHETSCDQSEGSGSSEEDEWRSDRKSESYSESSSDSSSRYSDWTADAGINLQPPLRTSCRRRITRFCSSSEDEISTENLSPPKRRRKRKKENKPKKENLRRMTPAELANMEHLYEFHPPVWITDTTLRKSPFVPQMGDEVIYFRQGHEAYIEAVRRNNIYELNPNKEPWRKMDLRDQELVKIVGIRYEVGPPTLCCLKLAFIDPATGKLMDKSFSIRYHDMPDVIDFLVLRQFYDEARQRNWQSCDRFRSIIDDAWWFGTVLSQEPYQPQYPDSHFQCYIVRWDNTEIEKLSPWDMEPIPDNVDPPEELGASISVTTDELEKLLYKPQAGEWGQKSRDEECDRIISGGCLR

SEQ ID NO: 57547 - protein, 43 aa, Homo sapiens
MLLSSLVSLAGSVYLAWILFFVLYDFCIVCITTYAINVSLMWL

SEQ ID NO: 57548 - protein, 364 aa, Homo sapiens
MQLRAARSRCTNLLAASYIENQQHLQHLELRDLRGLGELRNLTIVKSGLRFVAPDAFHFTPRLSRLNLSFNALESLSWKTVQGLSLQELVLSGNPLHCSCALRWLQRWEEEGLGGVPEQKLQCHGQGPLAHMPNASCGVPTLKVQVPNASVDVGDDVLLRCQVEGRGLEQAGWILTELEQSATVMSRPVCSCTRRWRCTTGASPSLWMGSRHRLCAGSSMAPCSMRPASSSLSSWSRQPMRPCGTGVCASTSPPTSTTATTRCWLPTPSARPPPPSWLPSWTTLSSSTPRTPSLTLTAHLETRWRRRTKHLLGSRWLWAWPSLPASSFLRCSLCSTNVDGETSLGSTARLCWLQRMGWPCPCIS

SEQ ID NO: 57549 - protein, 53 aa, Homo sapiens
METKVHLFCQAEENIDLLDDGSNSFATDLSSGTINHKKYIKFSKTIEKEISPE

SEQ ID NO: 57550 - protein, 217 aa, Homo sapiens
MLIGGNIEVHVNPGDGTGLRKALLHAPTGTCSDGQAHSISLVRNRRIITVQLDENNPVEMKLGTLVESRTINVSNLYVGGIPEGEGTSLLTMRRSFHGCIKNLIFNLELLDFNSAVGMSKSTWTPAGCQKGLSWLPMQRTKLLPEPRAFPVGAASFTISQVQSAKEGLGQRELKWGLAVKVPAKAGAGAGAGAVLKIRAGTGRERVPQATQMTRPNP

SEQ ID NO: 57551 - protein, 192 aa, Homo sapiens
MTFLCSCLLFVSVSSPVGPPALLPLYFQWYIFYFVIQRKKWVDLAWMITFYVRFFLTYVPLLGLKAFLGLFFIVRFLESNWFVWVTQMNHIPMHIDHDRNMDWVSTQLQATCNVHKSAFNDWFSGHLNFQIEHHLFPTMPRHNYHKVAPLVQSLCAKHGIEYQSKPLLSAFADIIHSLKESGQLWLDAYLHQ

SEQ ID NO: 57552 - protein, 242 aa, Homo sapiens
  MOD_RES (1)..(1): Any amino acid
XFLANLSYQEALSDTQVAIVNILSSTSGLFTLILAAVFPSNSGDRFTLSKLLAVILRLDKEGNGYKILNFIGGVVLVNLAGSEKPAGRDTVGSIWSLAGAMLYAVYIVMIKRKVDREDKLDIPMFFGFVGLFNLLLLWPGFFLLHYTGFEDFEFPNKVVLMCIIINGLIGTVLSEFLWLWGCFLTSSLIGTLALSLTIPLSIIADMCMQKVQFSWLFFAGAIPVFFSFFIVTLLCHYNNWDP

SEQ ID NO: 57553 - protein, 184 aa, Homo sapiens
  MOD_RES (1)..(1): Any amino acid
XAAVQVVGSWPSVQPREAPREAIPERGNGFRLLSARLCALRPDDSSSARTEIHLLFDQLISENYSEGSGVAPEDVSALLVQACRLVPLNQNHLVSKVSQLIHHLLNRLQYLPELLGNTGLLMKLSDLAQSDPEVRRAAVHCMANLCLSVPGQPYLEEPYQNVCFQAFLTILQSPKSSDMDDITF

SEQ ID NO: 57554 - protein, 202 aa, Homo sapiens
MSRRRKHDDSPSPKKTPHKTVAAEECGSVVEPGRRRLRSARGSWPCGAREGPPGPVRQREQPPTAALCSKSNPEERYETPKRALKMDSLSSSFSSPNDPDGQNDIFWDQNSPLTKQLGKGRKKQIYTTDSDEISHIVNRIAPQDEKPTTNSMLDMWIGETAIPCTPSVAKGKSRAKISCTKVWRKRKVSTHYWRKLLDSNLW

SEQ ID NO: 57555 - protein, 362 aa, Homo sapiens
MISFCPDCGKSIQAAFKFCPYCGNSLPVEEHVGSQTFVNPHVSSFQGSGSRPPTPKSSPQKTRKSPQVTRGSPQKTSCSPQKTRQSPQTLKRSRVTTSLEALPTGTVLTDKSGRQWKLKSFQTRDNQGILYEAAPTSTLTCDSGPQKQKFSLKLDAKDGRLFNEQNFFQRAAKPLQVNKWKKLYSTPLLAIPTCMGFGVHQDKYRFLVLPSLGRSLQSALDVSPKHVLSERSVLQVACRLLDALEFLHENEYVHGNVTAENIFVDPEDQSQVTLAGYGFAFRYCPSGKHVAYVEGSRSPHEGDLEFISMDLHKGCGPSRRSDLQSLGYCMLKWLYGFLPWTNCLPNTEDIMKQKQKLPWDSF

SEQ ID NO: 57556 - protein, 118 aa, Homo sapiens
MERGVKNKQDFMDLSICTREKLAHVRNCKTGSSGIPVKLVTNLFNLDFPQDWQLYQYHVTYIPDLASRRLRIALLYSHSELSNKAKAFDGAILFLSQKLEEKVTELSSETQRGETIKM

SEQ ID NO: 57557 - protein, 50 aa, Homo sapiens
MDGEATVKPGEQKPPIKADNSLETFYLILLLPHCPTEPAFLPEAQRLLHR

SEQ ID NO: 57558 - protein, 400 aa, Homo sapiens
MAALTIATGTGNWFSALALGVTLLKCLLIPTYHSTDFEVHRNWLAITHSLPISQWYYEATSEWTLDYPPFFAWFEYILSHVAKYFDQEMLNVHNLNYSSSRTLLFQRFSVIFMDVLFVYAVRECCKCIDGKKVGKELTEKPKFILSVLLLWNFGLLIVDHIHFQYNGFLFGLMLLSIARLFQKRHMEGAFLFAVLLHFKHIYLYVAPAYGVYLLRSYCFTANKPDGSIRWKSFSFVRVISLGLVVFLVSALSLGPFLALNQLPQVFSRLFPFKRGLCHAYWAPNFWALYNALDKVLSVIGLKLKFLDPNNIPKASMTSGLVQQFQHTVLPSVTPLATLICTLIAILPSIFCLWFKPQGPRGFLRCLTLCALSSFMFGWHVHEKAILLAILPMRIGKNKDV

SEQ ID NO: 57559 - protein, 721 aa, Homo sapiens
MSEFRIHHDVNELLSLLRVHGGDGAEVYIDLLQKNRTPYVTTTVSAHSAKVKIAEFSRTPEDFLKKYDELKSKNTRNLDPLVYLLSKLTEDKETLQYLQQNAKERAELAAAAVGSSTTSINVPAAASKISMQELEELRKQLGSVATGSTLQQSLELKRKMLRDKQNKKNSGQHLPIFPAWVYERPALIGDFLIGAGISTDTALPIGTLPLASQESAVVEDLLYVLVGVDGRYVSAQPLAGRQSRTFLVDPNLDLSIRELVHRILPVAASYSAVTRFIEEKSSFEYGQVNHALAAAMRTLVKEHLILVSQLEQLHRQGLLSLQKLWFYIQPAMRTMDILASLATSVDKGECLGGSTLSLLHDRSFSYTGDSQAQELCLYLTKAASAPYFEVLEKWIYRGIIHDPYSEFMVEEHELRKERIQEDYNDKYWDQRYTIVQQQIPSFLQKMADKILSTGKYLNVVRECGHDVTCPVAKEIIYTLKERAYVEQIEKAFNYASKVLLDFLMEEKELVAHLRSIKRYFLMDQGDFFVHFMDLAEEELRKPVEDITPPRLEALLELALRMSTANTDPFKDDLKIDLMPHDLITQLLRVLAIETKQEKAMAHADPTELALSGLEAFSFDYIVKWPLSLIINRKALTRYQMLFRHMFYCKHVERQLCSVWISNKTAKQHSLHSAQWFAGAFTLRQRMLNFVQNIQYYMMFEVMEPTWHILEKNLKSASWTPA

SEQ ID NO: 57560 - protein, 327 aa, Homo sapiens
MSTAALITLVRSGGNQVRRRVLLSSRLLQDDRRVTPTCHSSTSEPRCSRFDPDGSGSPATWDNFGIWDNRIDEPILLPPSIKYGKPIPKISLENVGCASQIGKRKENEDRFDFAQLTDEVLYFAVYDGHGGPAAADFCHTHMEKCIMDLLPKEKNLETLLTLAFLEIDKAFSSHARLSADATLLTSGTTATVALLRDGIELVVASVGDSRAILCRKGKPMKLTIDHTPERKDEKERIKKCGGFVAWNSLGQPHVNGRLAMTRSIGDLDLKTSGVIAEPETKRIKAIQYGTEDNSTAVVVPFGAWGKYKNSEINFSFSRSFASSGRWA

SEQ ID NO: 57561 - protein, 143 aa, Homo sapiens
MRMEDEDYNTSISYGDEYPDYLDSIVVLEDLSPLEARVTRIFLVVVYSIVCFLGILGNGLVIIIATFKMKKTVNMVWFLNLAVADFLFNVFLPIHITYAAMDYHWVFGTAMCKISNFLLIHNMFTSVFLLTIISSDRCISVLL

SEQ ID NO: 57562 - protein, 1860 aa, Homo sapiens
MTRLSWCFSCVIRWGKYLFSCLLPLRFCLRSQPEDLEAPKTHRFKVKTFKKVKPCGICRQVITQEGCTCKVCSFSCHRKCQAKVAAPCVPPSNHELVPITTENAPKNVVDKGEGASRGGNTRKSLEDNGSTRVTPSVQPHLQPIRNMSVSRTMEDSCELDLVYVTERIIAVSFPSTANEENFRSNLREVAQMLKSKHGGNYLLFNLSERRPDITKLHAKVLEFGWPDLHTPALEKICSICKAMDTWLNADPHNVVVLHNKGNRGRIGVVIAAYMHYSNISASADQALDRFAMKRFYEDKIVPIGQPSQRRYVHYFSGLLSGSIKMNNKPLFLHHVIMHGIPNFESKGGCRPFLRIYQAMQPVYTSGIYNIPGDSQTSVCITIEPGLLLKGDILLKCYHKKFRSPARDVIFRVQFHTCAIHDLGVVFGKEDLDDAFKDDRFPEYGKVEFVFSYGPEKIQGMEHLENGPSVSVDYNTSDPLIRWDSYDNFSGHRDDGMEEVVGHTQGPLDGSLYAKVKKKDSLHGSTGAVNATRPTLSATPNHVEHTLSVSSDSGNSTASTKTDKTDEPVPGASSATAALSPQEKRELDRLLSGFGLEREKQGAMYHTQHLRSRPAGGSAVPSSGRHVVPAQVHVNGGALASERETDILDDELPNQDGHSAGSMGTLSSLDGVTNTSEGGYPEALSPLTNGLDKSYPMEPMVNGGGYPYESASRAGPAHAGHTAPMRPSYSAQEGLAGYQREGPHPAWPQPVTTSHYAHDPSGMFRSQSFSEAEPQLPPAPVRGGSSREAVQRGLNSWQQQQQQQQQPRPPPRQQERAHLESLVASRPSPQPLAETPIPSLPEFPRAASQQEIEQSIETLNMLMLDLEPASAAAPLHKSQSVPGAWPGASPLSSQPLSGSSRQSHPLTQSRSGYIPSGHSLGTPEPAPRASLESVPPGRSYSPYDYQPCLAGPNQDFHSKSPASSSLPAFLPTTHSPPGPQQPPASLPGLTAQPLLSPKEATSDPSRTPEEEPLNLEGLVAHRVAGVQAREKQPAEPPAPLRRRAASDGQYENQSPEATSPRSPGVRSPVQCVSPELALTIALNPGGRPKEPHLHSYKEAFEEMEGTSPSSPPPSGVRSPPGLAKTPLSALGLKPHNPADILLHPTGEPRSYVESVARTAVAGPRAQDSEPKSFSAPATQAYGHEIPLRNGTLGGSFVSPSPLSTSSPILSADSTSVGSFPSGESSDQGPRTPTQPLLESGFRSGSLGQPSPSAQRNYQSSSPLPTVGSSYSSPDYSLQHFSSSPESQARAQFSVAGVHTVPGSPQARHRTVGTNTPPSPGFGWRAINPSMAAPSSPSLSHHQMMGPPGTGFHGSTVSSPQSSAATTPGSPSLCRHPAGVYQVSGLHNKVATTPGSPSLGRHPGAHQGNLASGLHSNAIASPGSPSLGRHLGGSGSVVPGSPCLDRHVAYGGYSTPEDRRPTLSRQSSASGYQAPSTPSFPVSPAYYPGLSSPATSPSPDSAAFRQGSPTPALPEKRRMSVGDRAGSLPNYATINGKVSSPVASGMSSPSGGSTVSFSHTLPDFSKYSMPDNSPETRAKVKFVQDTSKYWYKPEISREQAIALLKDQEPGAFIIRDSHSFRGAYGLAMKVSSPPPTIMQQNKKGDMTHELVRHFLIETGPRGVKLKGCPNEPNFGSLSALVYQHSIIPLALPCKLVIPNRDPTDESKDSSGPANSTADLLKQGAACNVLFVNSVDMESLTGPQAISKATSETLAADPTPAATIVHFKVSAQGITLTDNQRKLFFRRHYPLNTVTFCDLDPQERKWMKTEGGAPAKLFGFVARKQGSTTDNACHLFAELDPNQPASAIVNFVSKVMLNAGQKR

SEQ ID NO: 57563 - protein, 199 aa, Homo sapiens
HVSSNADEEDIRNAIMAIRRNRVALKGLVWLERTLVLGDWVDASSGLFALRCWDSSNIETNHNLPPSHKSRNNILRTSLDLYANVIHCKSLPGVVTRHKDIDILIVRENTEGEYSSLEHESVAGVVESLKIITKAKSLRIAEYAFKLAQESGRKKVTAVHKANIMKLGDGLFLQCCREVAARYPQITFENMIVDNTTMQ

SEQ ID NO: 57564 - protein, 28 aa, Homo sapiens
MVSAAAPSLLILLLLLLGSVPATDARSV

SEQ ID NO: 57565 - protein, 602 aa, Homo sapiens
MGLVCVLGDGKTEQKGGDKKRGVKRPREDHGRGYFEYIEENKYSRAKSPQPPVEEEDEHFDDTVVCLDTYNCDLHFKISRDRLSASSLTMESFAFLWAGGRASYGVSKGKVCFEMKVTEKIPVRHLYTKDIDIHEVRIGWSLTTSGMLLGEEEFSYGYSLKGIKTCNCETEDYGEKFDENDVITCFANFESDEVELSYAKNGQDLGVAFKISKEVLAGRPLFPHVLCHNCAVEFNFGQKEKPYFPIPEEYTFIQNVPLEDRVRGPKGPEEKKDCEVVMMIGLPGAGKTTWVTKHAAENPGKYNILGTNTIMDKMMVAGFKKQMADTGKLNTLLQRAPQCLGKFIEIAARKKRNFILDQTNVSAAAQRRKMCLFAGFQRKAVVVCPKDEDYKQRTQKKAEVEGKDLPEHAVLKMKGNFTLPEVAECFDEITYVELQKEEAQKLLEQYKEESKKALPPEKKQNTGSKKSNKNKSGKNQFNRGGGHRGRGGFNMRGGNFRGGAPGNRGGYNRRGNMPQRGGGGGGSGGIGYPYPRAPVFPGRGSYSNRGNYNRGGMPNRGNYNQNFRGRGNNRGYKNQSQGYNQWQQGQFWGQKPWSQHYHQGYY

SEQ ID NO: 57566 - protein, 65 aa, Homo sapiens
MKPHRIRMTHNLLLNYGLYRKMEIYRPHKATAEEMTKYHSDEYIKFLRSIRPDNMSEYSKQMQRF

SEQ ID NO: 57567 - protein, 207 aa, Homo sapiens
MSKLWRRGSTSGAMEAPEPGFPSTGEALELSLAGAHGHGVHKKKHKKHKKKHKKKHHQEEDAGPTQPSPAKPQLKLKIKLGGQVLGTKSVPTFTVIPEGPRSPSPLMVVDNEEEPMEGVPLEQYRAWLDEDSNLSPSPLRDLSGGLGGQEEEEEQRWLDALEKGELDDNGDLKKEINERLLTARQRALLQKARSQPSPMLPLPVAEG

SEQ ID NO: 57568 - protein, 119 aa, Homo sapiens
  MOD_RES (1)..(1): Any amino acid
XSPGEGGPWVWNTYQACLKDTFERLGRDAEAAHRAGLAFGVKLVRGAYLDKERAVAQLHGMEDPTQPDYEATSQSYSRCLELMLTHVARHGPMCHLMVASHNEESVRQATKRAGRLCSV

SEQ ID NO: 57569 - protein, 242 aa, Homo sapiens
MEEVTEAQKTHQARLGCEVPCCSSLAVSNPTSSQLGGPWWVRHPGPSGVLGCGECVGTHLVSLSPQGIYILIAVGAVMMFVGFLGCYGAIQESQCLLGTFFTCLVILFACEVAAGIWGFVNKDQIAKDVKQFYDQALQQAVVDDDANNAKAVVKTFHETLDCCGSSTLTALTTSVLKNNLCPSGSNIISNLFKEDCHQKIDDLFSGKLYLIGIAAIVVAVIMIFEMILSMVLCCGIRNSSVY

SEQ ID NO: 57570 - protein, 102 aa, Homo sapiens
MEHGSIITQARREDALVLTKQGLVSKSSPKKPRGRNIFKALFCCFRAQHVGQSSSSTELAAYKEEANTIAKSDLLQCLQYQFYQISATWLGFRSQGPACSQR

SEQ ID NO: 57571 - protein, 89 aa, Homo sapiens
FLCAVGLTSYSVLVIRIVQPELKALAIGFHSMIMRSLGGILVPIYFGALIDTTCMKWSTNSCGARGACRIYNSTYLGYETLFLELSIQQ

SEQ ID NO: 57572 - protein, 349 aa, Homo sapiens
MKLKELERPAVQAWSPASQYPLYLATGTSAQQLDSSFSTNGTLEIFEVDFRDPSLDLKHRGVLSALSRFHKLVWGSFGSGLLESSGVIVGGGDNGMLILYNVTHILSSGKEPVIAQKQKHTGAVRALDLNPFQGNLLASGASDSEIFIWDLNNLNVPMTLGSKSQQPPEDIKALSWNRQAQHILSSAHPSGKAVVWDLRKNEPIIKVSDHSNRMHCSGLAWHPDIATQLVLCSEDDRLPVIQLWDLRFASSPLKVLESHSRGILSVSWSQADAELLLTSAKDSQILCRNLGSSEVVYKLPTQSSWCFDVQWCPRDPSVFSAASFNGWISLYSVMGRSWEVQHMRQADKV

SEQ ID NO: 57573 - protein, 3541 aa, Homo sapiens
MEEDIYTNLSKMETVLGQSMSSLPLSYREALERLEQSKALVSNLISTKEELMKLRQILRLLRLRCTENDGICLLKIVSALWEKWLSLLEAAKEWEMWCEELKQEWKFVSEEIEREAIILDNLQEELPEISKTKEAATTEELSELLDCLCQYGENVEKQQLLLTLLLQRIRSIQNVPESSGAVETVPAFQEITSMKERCNKLLQKVQKNKELVQTEIQERHSFTKEIIALKNFFQQTTTSFQNMAFQDHPEKSEQFEELQSILKKGKLTFENIMEKLRIKYSEMYTIVPAEIESQVEECRKALEDIDEKISNEVLKSSPSYAMRRKIEEINNGLHNVEKMLQQKSKNIEKAQEIQKKMWDELDLWHSKLNELDSEVQDIVEQDPGQAQEWMDNLMIPFQQYQQVSQRAECRTSQLNKATVKMEEYSDLLKSTEAWIENTSHLLANPADYDSLRTLSHHASTVQMALEDSEQKHNLLHSIFMDLEDLSIIFETDELTQSIQELSNQVTALQQKIMESLPQIQRMADDVVAIESEVKSMEKRVSKIKTILLSKEIFDFSPEEHLKHGEVILENIRPMKKTIAEIVSYQVELRLPQTGMKPLPVFQRTNQLLQDIKLLENVTQEQNELLKVVIKQTNEWDEEIENLKQILNNYSAQFSLEHMSPDQADKLPQLQGEIERMEKQILSLNQRKEDLLVDLKATVLNLHQHLKQEQEGVERDRLPAVTSEEGGVAERDASERKLNRRGSMSYLAAVEEEVEESSVKSDNGDEKAEPSPQSWSSLWKHDKDMEEDRASSSSGTIVQEAYGKISTSDNSMAQILTPDSLNTEQGPECSLRPNQTEEGTTPPIEADTLDSSDAQGGLEPRVEKTRPEPTEVLHACKTQVAELELWLQQANVAVEPETLNADMQQVLEQQLVGCQAMLTEIEHKVAFLLETCKDQGLGDNGATQHEAEALSLKLKTVKCNLEKVQMMLQEKHSEDQHPTILKKSSEPEHQEALQPVNLSELESIVTERPQFSRQKDFQQQQVLELKPMEQKDFIKFIEFNAKKMWPQYCQHDNDTTQESSASNQASSPENDVPDSILSPQGQNGDKWQYLHHELSSKIKLPLPQLVEPQVSTNMGILPSVTMYNFRYPTTEELKTYTTQLEDLRQEASNLQTQENMTEEAYINLDKKLFELFLTLSQCLSSVEEMLEMPRLYREDGSGQQVHYETLALELKKLYLALSDKKGDLLKAMTWPGENTNLLLECFDNLQVCLEHTQAAAVCRSKSLKAGLDYNRSYQNEIKRLYHQLIKSKTSLQQSLNEISGQSVAEQLQKADAYTVELENAESRVAKLRDEGERLHLPYALLQEVYKLEDVLDSMWGMLRARYTELSSPFVTESQQDALLQGMVELVKIGKEKLAHGHLKQTKSKVALQAQIENHKVFFQKLVADMLLIQAYSAKILPSLLQNRETFWAEQVTEVKILEEKSRQCGMKLQSLLQKWEEFDENYASLEKDLEILISTLPSVSLVEETEERLVERISFYQQIKRNIGGKHARLYQTLNEGKQLVASVSCPELEGQIAKLEEQWLSLNKKIDHELHRLQALLKHLLSYNRDSDQLTKWLESSQHTLNYWKEQSLNVSQDLDTIRSNINNFFEFSKEVDEKSSLKTAVISIGNQLLHLKETDTATLRASLAQFEQKWTMLITQLPDIQEKLHQLQMEKLPSRKAITEMISWMNNVEHQTSDEDSVHSPSSASQVKHLLQKHKEFRMEMDYKQWIVDFVNQSLLQLSTCDVESKRYERTEFAEHLGEMNRQWHRVHGMLNRKIQHLEQLLESITESENKIQILNNWLEAQEERLKTLQKPESVISVQKLLLDCQDIENQLAIKSKALDELKQSYLTLESGAVPLLEDTASRIDELFQKRSSVLTQVNQLKTSMQSVLQEWKIYDQLYDEVNMMTIRFWYCMEHSKPVVLSLETLRCQVENLQSLQDEAESSEGSWEKLQEVIGKLKGLCPSVAEIIEEKCQNTHKRWTQVNQAIADQLQKAQSLLQLWKAYSNAHGEAAARLKQQEAKFQQLANISMSGNNLAEILPPALQDIKELQHDVQKTKEAFLQNSSVLDRLPQPAESSTHMLLPGPLHSLQRAAYLEKMLLVKANEFEFVLSQFKDFGVRLESLKGLIMHEEENLDRLHQQEKENPDSFLNHVLALTAQSPDIEHLNEVSLKLPLSDVAVKTLQNMNRQWIRATATALERCSELQGIGLNEKFLYCCEKWIQLLEKIEEALKVDVANSLPELLEQQKTYKMLEAEVSINQTIADSYVTQSLQLLDTTEIENRPEFITEFSKLTDRWQNAVQGVRQRKGDVDGLVRQWQDFTTSVENLFRFLTDTSHLLSAVKGQERFSLYQTRSLIHELKNKEIHFQRRRTTCALTLEAGEKLLLTTDLKTKESVGRRISQLQDSWKDMEPQLAEMIKQFQSTVETWDQCEKKIKELKSRLQVLKAQSEDPLPELHEDLHNEKELIKELEQSLASWTQNLKELQTMKADLTRHVLVEDVMVLKEQIEHLHRQWEDLCLRVAIRKQEIEDRLNTWVVFNEKNKELCAWLVQMENKVLQTADISIEEMIEKLQKDCMEEINLFSENKLQLKQMGDQLIKASNKSRAAEIDDKLNKINDRWQHLFDVIGSRVKKLKETFAFIQQLDKNMSNLRTWLARIESELSKPVVYDVCDDQEIQKRLAEQQDLQRDIEQHSAGVESVFNICDVLLHDSDACANETECDSIQQTTRSLDRRWRNICAMSMERRMKIEETWRLWQKFLDDYSRFEDWLKSAERTAACPNSSEVLYTSAKEELKRFEAFQRQIHERLTQLELINKQYRRLARENRTDTASRLKQMVHEGNQRWDNLQRRVTAVLRRLRHFTNQREEFEGTRESILVWLTEMDLQLTNVEHFSESDADDKMRQLNGFQQEITLNTNKIDQLIVFGEQLIQKSEPLDAVLIEDELEELHRYCQEVFGRVSRFHRRLTSCTPGLEDEKEASENETDMEDPREIQTDSWRKRGESEEPSSPQSLCHLVAPGHERSGCETPVSVDSIPLEWDHTGDVGGSSSHEEDEEGPYYSALSDVEIPENPEAYLKMTTKTLKASSGKSISDGHSWHVPDSPSCPEHHYKQMEGDRNVPPVPPASSTPYKPPYGKLLLPPGTDGGKEGPRVLNGNPQQEDGGLAGITEQQSGAFDRWEMIQAQELHNKLKIKQNLQQLNSDISAITTWLKKTEAELEMLKMAKPPSDIQEIELRVKRLQEILKAFDTYKALVVSVNVSSKEFLQTESPESTELQSRLRQLSLLWEAAQGAVDSWRGGLRQSLMQCQDFHQLSQNLLLWLASAKNRRQKAHVTDPKADPRALLECRRELMQLEKELVERQPQVDMLQEISNSLLIKGHGEDCIEAEEKVHVIEKKLKQLREQVSQDLMALQGTQNPASPLPSFDEVDSGDQPPATSVPAPRAKFRAVRTTEGEEETESRVPGSTRPQRSFLSRVVRAALPLQLLLLLLLLLACLLPSSEEDYSCTQANNFARSFYPMLRYTNGPPPT

SEQ ID NO: 57574 - protein, 106 aa, Homo sapiens
DWWGLGVVMYEMMCGRLPFYNQDHERLFELILMEEIRFPRTLSPEAKSLLAGLLKKDPKQRLGGGPSDAKEVMEHRFFLSINWQDVVQKKLLPPFKPQVTSEVDTR

SEQ ID NO: 57575 - protein, 151 aa, Homo sapiens
MAAQGESQSLEDLSNTSRPTSEVYKISFIFPNGDKYDGDCTRTSSGIYERNGIGIHTTPNGIVYTGSWKDDKMNGFGRLEHFSGAVYEGQFKDNMFHGLGTYTFPNGAKYTGNFNENRVEGEGEYTDIQGLEWSGNFHFTAAPDLKLKLHM

SEQ ID NO: 57576 - protein, 351 aa, Homo sapiens
MAGSADSYTSRPSDSDVSLEEDREAIRQEREQQAAIQLERAKSKPVAFAVKTNVSYCGALDEDVPVPSTAISFDAKDFLHIKEKYNNDWWIGRLVKEGCEIGFIPSPLRLENIRIQQEQKRGRFHGGKSSGNSSSSLGEMVSGTFRATPTSTAEVQSEIERIFELARSLQLVVLDADTINHPAQLIKTSLAPIIVHVKVSSPKEMFDVILDENQLEDACEHLGEYLEAYWRATHTTSSTPMTPLLGRNLGSTALSPYPTAISGLQSQRMRHSNHSTENSPIERRSLMTSDENYHNERARKSRNRLSSSSQHSRDHYPLVEEDYPDSYQDTYKPHRNRGSPGGYSHDSRHRL

SEQ ID NO: 57577 - protein, 120 aa, Homo sapiens
MAPKVFRQYWDIPDGTDCHRKAYSTTSIASVAGLTAAAYRVTLNPPGTFLEGVAKVGQYTFTAAAVGAVFGLTTCISAHVREKPDDPLNYFLGGCAGGLTLGARSEWPPPHPHPPPSLAE

SEQ ID NO: 57578 - protein, 172 aa, Homo sapiens
MAALSGGGGGGAEPGQALFNGDMEPEAGAGAGAAASSAADPAIPEEVWNIKQMIKLTQEHIEALLDKFGGEHNPPSIYLEAYEEYTSKLDALQQREQQLLESLGNGTDFSVSSSASMDTVTSSSSSSLSVLPSSLSVFQNPTDVARSNPKSPQKPIVRVFLPNKQRTVVSQF

SEQ ID NO: 57579 - protein, 37 aa, Homo sapiens
MWTLVSWVALTAGLVAGTRCPDGQFCPVACCLDPGGA

SEQ ID NO: 57580 - protein, 1069 aa, Homo sapiens
MYLLDGSGEPASPPADAMPRGTPPRKTVYRISVTMVRKEQLAAPGSGGPDPRPVRRPRPARSPDAPGRLEEEAEEAEGAEEPEGPRPRAWDFRTFRTRSTGQLELGRLRPCARGLEPADLAGSAPAEEEGRGSPASGSPDVEGARAAPLRRSLSFRHWSGPEAPQGRTLGGGRRHSSSGSLAWAPCDEAAAGTTLEPATATQPASEKRNTLDVGEVLSKNDALSDLERWERSKSKNRTLDNSDLQRLERARAAAGAGAASEHRLLRFFSGIFARRDGGPGGGPSPRSGASRPRGYFSLRRAPAEAHSSSAESIDGSPRRDAFVNSQEWTLSRSVPELKVGIVGNLASGKSALVHRYLTGTYVQEESPEGGRFKKEIVVDGQSYLLLIRDEGGPPEAQFAMWVDAVIFVFSLEDEISFQTVYHYYSRMANYRNTSEIPLVLVGTQDAISSANPRVIDDARARKLSNDLKRCTYYETCATYGLNVERVFQDVAQKIVATRKKQQLSIGPCKSLPNSPSHSSVCSAQVSAVHISQTSNGGGSLSDYSSSVPSTPSTSQKELRIDVPPTANTPTPVRKQSKRRSNLFTSRKGSDPDKEKKGLESRADSIGSGRAIPIKQGMLLKRSGKSLNKEWKKKYVTLCDNGVLTYHPSLHDYMQNVHGKEIDLLRTTVKVPGKRPPRATSACAPISSPKTNGLSKDMSSLHISPNSDTGLGDSVCSSPSISSTTSPKLDPPPSPHANRKKHRRKKSTSNFKADGLSGTAEEQEENFEFIIVSLTGQTWHFEATTYEERDAWVQAIESQILASLQSCESSKNKSRLTSQSEAMALQSIRNMRGNSHCVDCETQNPNWASLNLGALMCIECSGIHRNLGTHLSRVRSLDLDDWPVELIKVMSSIGNELANSVWEESSQGRTKPSVDSTREEKERWIRAKYEQKLFLAPLPCTELSLGQHLLRATADEDLRTAILLLAHGSRDEVNETCGEGDGRTALHLACRKGNVVLAQLLIWYGVDVTARDAHGNTALAYARQASSQECIDVLLQYGCPDERFVLMATPNLSRRNNNRNNSSGRVPTII

SEQ ID NO: 57581 - protein, 109 aa, Homo sapiens
  MOD_RES (1)..(1): Any amino acid
XAAWGQTVLLLHALANKMGLKFQRSCRYTVLGGCGFSGTTSLTMQWWLSWTVCSSSKKRLRKARHVFVFPTGWMWRKARLKTQEAVAAPIPSKPSLTLRSSGQKLSSSC

SEQ ID NO: 57582 - protein, 190 aa, Homo sapiens
  MOD_RES (1)..(1): Any amino acid
XFQNSDLLFILLVSRFGMSDHNKEPGMQLDDRLLLTTFQWQAYHLDFHLCLNYRANDTVPPTIPYNQSYDQNTGGSYNSSDRGSSTSGSQGHKKGARTPKVPKQGGMNWADLLPPPPAHPPPHSNSEEYNISVDESYDQEMPCPVPPARMYLQQDELEEEEDERGPTPPVRGAASSPAAVSYSHQSTATL

SEQ ID NO: 57583 - protein, 59 aa, Homo sapiens
  MOD_RES (1)..(1): Any amino acid
XENPLVYCDGHGCSVAVHQACYGIVQVPTGPWFCRKCESQERAARVAGVEWRNHCSLQP

SEQ ID NO: 57584 - protein, 527 aa, Homo sapiens
MAVHRVKVTFKDEPGEGSGVARSFYTAIAQAFLSNEKLPNLECIQNANKGTHTSLMQRLRNRGERDREREREREMRRSSGLRAGSRRDRDRDFRRQLSIDTRPFRPASEGNPSDDPEPLPAHRQALGERLYPRVQAMQPAFASKITGMLLELSPAQLLLLLASEDSLRARVDEAMELIIAHGRENGADSILDLGLVDSSEKVQENRKRHGSSRSVVDMDLDDTDDGDDNAPLFYQPGKRGFYTPRPGKNTEARLNCFRNIGRILGLCLLQNELCPITLNRHVIKVLLGRKVNWHDFAFFDPVMYESLRQLILASQSSDADAVFSAMDLAFAIDLCKEEGGGQVELIPNGVNIPVTPQNVYEYVRKYAEHRMLVVAEQPLHAMRKGLLDVLPKNSLEDLTAEDFRLLVNGCGEVNVQMLISFTSFNDESGENAEKLLQFKRWFWSIVEKMSMTERQDLVYFWTSSPSLPASEEGFQPMPSITIRPPDDQHLPTANTCISRLYVPLYSSKQILKQKLLLAIKTKNFGFV

SEQ ID NO: 57585 - protein, 100 aa, Homo sapiens
MADQIPLYPVRSAAAAAANRKRAAYYSAAGPRPGADRHSRNEHPAPLCMYPTMTARLGWMSPLLTWSALTPPGQWGECLPTAGACGSPGFTHSLLFNVGT

SEQ ID NO: 57586 - protein, 1143 aa, Homo sapiens
MEVDTEEKRHRTRSKGVRVPVEPAIQELFSCPTPGCDGSGHVSGKYARHRSVYGCPLAKKRKTQDKQPQEPAPKRKPFAVKADSSSVDECDDSDGTEDMDEKEEDEGEEYSEDNDEPGDEDEEDEEGDREEEEEIEEEDEDDDEDGEDVEDEEEEEEEEEEEEEEEENEDHQMNCHNTRIMQDTEKDDNNNDEYDNYDELVAKSLLNLGKIAEDAAYRARTESEMNSNTSNSLEDDSDKNENLGRKSELSLDLDSDVVRETVDSLKLLAQGHGVVLSENMNDRNYADSMSQQDSRNMNYVMLGKPMNNGLMEKMVEESDEEVCLSSLECLRNQCFDLARKLSETNPQERNPQQNMNIRQHVRPEEDFPGRTPDRNYSDMLNLMRLEEQLSPRSRVFASCAKEDGCHERDDDTTSVNSDRSEEVFDMTKGNLTLLEKAIALETERAKAMREKMAMEAGRRDNMRSYEDQSPRQLPGEDRKPKSSDSHVKKPYYDPSRTEKKESKCPTPGCDGTGHVTGLYPHHRSLSGCPHKDRVPPEILAMHESVLKCPTPGCTGRGHVNSNRNSHRSLSGCPIAAAEKLAKAQEKHQSCDVSKSSQASDRVLRPMCFVKQLEIPQYGYRNNVPTTTPRSNLAKELEKYSKTSFEYNSYDNHTYGKRAIAPKVQTRDISPKGYDDAKRYCKDPSPSSSSTSSYAPSSSSNLSCGGGSSASSTCSKSSFDYTHDMEAAHMAATAILNLSTRCREMPQNLSTKPQDLCATRNPDMEVDENGTLDLSMNKQRPRDSCCPILTPLEPMSPQQQAVMNNRCFQLGEGDCWDLPVDYTKMKPRRIDEDESKDITPEDLDPFQEALEERRYPGEVTIPSPKPKYPQCKESKKDLITLSGCPLADKSIRSMLATSSQELKCPTPGCDGSGHITGNYASHRSLSGCPRAKKSGIRIAQSKEDKEDQEPIRCPVPGCDGQGHITGKYASHRSASGCPLAAKRQKDGYLNGSQFSWKSVKTEGMSCPTPGCDGSGHVSGSFLTHRSLSGCPRATSAMKKAKLSGEQMLTIKQRASNGIENDEEIKQLDEEIKELNESNSQMEADMIKLRTQVTITTMESNLKTIEEENKVIEQQNESLLHELANLSQSLIHSLANIQLPHMVSD

SEQ ID NO: 57587 - protein, 90 aa, Homo sapiens
MAAMDTGQRADPSNPGDKEGDLQGLWQELYQLQAKYLLCCLGDAAMGVYLICLWLSLLSSEMKVQRLLSLWPTDKVAEEAQERSREAQAF

SEQ ID NO: 57588 - protein, 510 aa, Homo sapiens
MCSHFAQDVWPEHSIKDSFQKVILRTYGKYGHENLQLRKDHKSVDACKVYKGGYNGLNQCLTTTDSKIFQCDKYVKVFHKFPNVNRNKIRHTGKKPFKCKNRGKSFCMLSQLTQHKKIHTREYSYKCEECGKAFNWSSTLTKHKIIHTGEKPYKCEECGKAFNRSSNLTKHKIIHTGEKPYKCEECGKAFNRSSTLTKHKRIHTEEKPYKCEECGKAFNQFSILNKHKRIHMEDKPYKCEECGKAFRVFSILKKHKIIHTGEKPYKCEECGKAFNQFSNLTKHKIIHTGEKPYKCDECGKAFNQSSTLTKHKRIHTGEKPYKCEECGKAFKQSSTLTEHKIIHTGEKPYKCEKCGKAFSWSSAFTKHKRNHMEDKPYKCEECGKAFSVFSTLTKHKIIHTREKPYKCEECGKAFNQSSIFTKHKIIHTEGKSYKCEKCGNAFNQSSNLTARKIIYTGEKPYKYEECDKAFNKFSTLITHQIIYTGEKPCKHECGRAFNKSSNYTKEKLQT

SEQ ID NO: 57589 - protein, 505 aa, Homo sapiens
  MOD_RES (1)..(1): Any amino acid
XVVSEKCRIDTEILPSLFMRCTTDLNRKDKFPAITHLKFLARDMSEQVLLCASSQTSSIVECWSLRKEGLPVNNIFQQISPVVGDKQPTILKWRILSATNDLDRVSAVALPKLPISLTNTDLKVASDTQFYPGLGLALAFHDGSVHIVHRLSLQTMAVFYSSAAPRPVDEPAMKRPRTAGPAVHLKAMQLSWTSLALVGIDSHGKLSVLRLSPSMGHPLEVGLALRHLLFLLEYCMVTGYDWWDILLHVQPSMVQSLVEKLHEEYTRQTAALQQVLSTRILAMKASLCKLSPCTVTRVCDYHTKLFLIAISSTLKSLLRPHFLNTPDKSPGDRLTEICTKITDVDIDKVMINLKTEEFVLDMNTLQALQQLLQWVGDFVLYLLASLPNQVAMRAQRASRTRRWWMNAACCPASCLSPAWTGCQPATAWLAACSPSSPFVCSLAGRPRCLAVLPPCSSTASPGPQASPRSTTCGGCTLALAPRRNARPAPGAAVSPCSSRPTEPRR

SEQ ID NO: 57590 - protein, 354 aa, Homo sapiens
MPRSSRSPGDPGALLEDVAHNPRPRRIAQRGRNTSRMAEDTSPNMTWFTCFACSLRTQAQQVLFNTCRCKLLCQKLMEKTGILLLCAFGFWMFSIHLPSKMKVWQDDSINGPLQSLRLYQEKVRHHSGEIQDLRGSMNQLIAKLQEMEAMSDEQKMAQKIMKMIHGDYIEKPDFALKSIGASIDFEHTSVTYNHEKAHSYWNWIQLWNYAQPPDVILEPNVTPGNCWAFEGDRGQVTIQLAQKVYLSNLTLQHIPKTISLSGSLDTAPKDFVIYGMEGSPKEEVFLGAFQFQPENIIQMFPLQNQPARAFSAVKVKISSNWGNPGFTCLYRVRVHGSVAPPREQPHQNPYPKRD

SEQ ID NO: 57591 - protein, 279 aa, Homo sapiens
MEGSKTSNNSTMQVSFVCQRCSQPLKLDTSFKILDRVTIQELTAPLLTTAQAKPGETQEEETNSGEEPFIETPRQDGVSRRFIPPARRCLEILEQMNEDDSEQLQMELKELALEEERLIQELEDVEKNRKIVAENLEKVQAEAERLDQEEAQYQREYSEFKRQQLELDDELKSVENQMRYAQTQLDKLKKTNVFNATFHIWHSGQFGTINNFRLGRLPSVPVEWNEINAAWGQTVLLLHALANKMGLKFQRYRLVPYGNHSYLESLTDKSKDGCGERQD

SEQ ID NO: 57592 - protein, 106 aa, Homo sapiens
MAGPGVPGAPAARWKRHIVRQLRLRDRTQKALFLELVPAYNHLLEKAELLDKFSKKLQPEPNSVTPTTHQGPWEESELDSDQVPSLVALRVKWQEEEEGLRLVCGE

SEQ ID NO: 57593 - protein, 74 aa, Homo sapiens
NNKNSLEILLGSIGRSLPHITDVSWRLEYQIKTNQLHRMYRPAYLVTLSVQNTDSPSYPEISFSCSMEQLQVQY

SEQ ID NO: 57594 - protein, 103 aa, Homo sapiens
  MOD_RES (1)..(1): Any amino acid
XVGLSACLGLTVALSLLSDIIALLTFHIYCFYVYGARLYCLKIHGLSSLWRLFRGKKWNVLRQRVDSCSYDLDQLFIGTLLFTILLFLLPTTALYYLVFTLLA

SEQ ID NO: 57595 - protein, 253 aa, Homo sapiens
  MOD_RES (1)..(1): Any amino acid
XPLVLFCPPEHYEALVSPILGPLFTYLHMRLSQKWQVINQRSLLCGEDEAADENPESQEMLEEQLVRMLTREVMDLITVCCVSKKGADHSSAPPADGDGWSLTFYSLITDEEMMATEVTPSAMAELTDLGKCLMKHEDVCTALLITAFNSLAWKDTLSCQRTTSQLCWPLLKQVLSGTLLADAVTWLFTSVLKGLQMHGQHDGCMASLVHLAFQIYEALRPRYLEIRAVMEQIPEIQKDSLDQFDCKLLNPSL

SEQ ID NO: 57596 - protein, 171 aa, Homo sapiens
MPIAQLLELWKKIEVEPMEIETTEEDLNLDVEPTTEDTAEEGKSDSAACKTKVAGSVEEEGVVKEIDISHHVKEGFEKADPSQFELLKVLGQGSYGKVFLVRKVKGSDAGQLYAMKVLKKATLKVRDRVRSKMERDILAEVNHPFIVKLHYAFQTEGKLYLILDFLRGGDL

SEQ ID NO: 57597 - protein, 196 aa, Homo sapiens
MPFSKEKYILDSSPEKLHKELEEELKLSSTDLRSHAWYHGRIPREVSETLVQRNGDFLIRDSLTSLGDYVLTCRWRNQALHFKINKVVVKAGESYTHIQYLFEQESFDHVPALVRYHVGSRKAVSEQSGAIIYCPVNRTFPLRYLEASYGLGQGSSKPASPVSPSGPKGSHMKRRSVTMTDGLTADKVTRSDGCPT

SEQ ID NO: 57598 - protein, 996 aa, Homo sapiens
DESSLTGESDQVRKSVDKDPMLLSGTHVMEGSGRMLVTAVGVNSQTGIIFTLLGAGGEEEEKKDKKAADGAAASNAADSANASLVNGKMQDGNVDASQSKAKQQDGAAAMEMQPLKSAEGGDADDRKKASMHKKEKSVLQGKLTKLAVQIGKAGLVMSAITVIILVLYFTVDTFVVNKKPWLPECTPVYVQYFVKFFIIGVTVLVVAVPEGLPLAVTISLAYSVKKMMKDNNLVRHLDACETMGNATAICSDKTGTLTTNRMTVVQAYVGDVHYKEIPDPSSINTKTMELLINAIAINSAYTTKILPPEKEGALPRQVGNKTECGLLGFVLDLKQDYEPVRSQMPEEKLYKVYTFNSVRKSMSTVIKLPDESFRMYSKGASEIVLKKCCKILNGAGEPRVFRPRDRDEMVKKVIEPMACDGLRTICVAYRDFPSSPEPDWDNENDILNELTCICVVGIEDPVRPEVPEAIRKCQRAGITVRMVTGDNINTARAIAIKCGIIHPGEDFLCLEGKEFNRRIRNEKGEIEQERIDKIWPKLRVLARSSPTDKHTLVKGIIDSTHTEQRQVVAVTGDGTNDGPALKKADVGFAMGIAGTDVAKEASDIILTDDNFSSIVKAVMWGRNVYDSISKFLQFQLTVNVVAVIVAFTGACITQDSPLKAVQMLWVNLIMDTFASLALATEPPTETLLLRKPYGRNKPLISRTMMKNILGHAVYQLALIFTLLFVGEKMFQIDSGRNAPLHSPPSEHYTIIFNTFVMMQLFNEINARKIHGERNVFDGIFRNPIFCTIVLGTFAIQIVIVQFGGKPFSCSPLQLDQWMWCIFIGLGELVWGQVIATIPTSRLKFLKEAGRLTQKEEIPEEELNEDVEEIDHAERELRRGQILWFRGLNRIQTQIRVVKAFRSSLYEGLEKPESRTSIHNFMAHPEFRIEDSQPHIPLIDDTDLEEDAALKQNSSPPSSLNKNNSAIDSGINLTTDTSKSATSSSPGSPIHSLETSL

SEQ ID NO: 57599 - protein, 35 aa, Homo sapiens
MIAELVSSALGLALYLNTLSADFCYDDRGRTCRFS

SEQ ID NO: 57600 - protein, 363 aa, Homo sapiens
YEGYDSTANPTVSNVFSTAAFRFGHATIHPLVRRLDASFQEHPDLPGLWLHQAFFSPWTLLRGGYNEWREFCGLPRLETPADLSTAIASRSVADKILDLYKHPDNIDVWLGGLAENFLPRARTGPLFACLIGKQMKALRDGDWFWWENSHVFTDAQRRELEKHSLSRVICDNTGLTRVPMDAFQVGKFPEDFESCDSITGMNLEAWRETFPQDDKCGFPESVENGDFVHCEESGRRVLVYSCRHGYELQGREQLTCTQEGWDFQPPLCKDSGRLPRVTWISMSLAALLIGGFAGLTSTVICRWTRTGTKSTLPISETGGGTPELRCGKHQAVGTSPQRAAAQDSEQESAGMEGRDTHRLPRAL

SEQ ID NO: 57601 - protein, 131 aa, Homo sapiens
  MOD_RES (1)..(1): Any amino acid
XQDPTMLQFKSTPDLLRDQQEAAPPGSVDHMKATIYGILREGSSESETSVRRKVSLVLEKMQPLVAVAGQGELTRKVEELQRKLDEEVKKRQKLEPSQVGLERQLEEKTEECSRLQELLERRKGEAQQSNK

SEQ ID NO: 57602 - protein, 59 aa, Homo sapiens
MTNTKGKRRGTRYMFSRPFRKHGNGYCSKRNAPQVLPWQNWKSLQCYPACCWHCCKQTS

SEQ ID NO: 57603 - protein, 76 aa, Homo sapiens
MSDNEDNFDGDDFDDVEEDEGLDDLENAEEVSIQPQAPTSAAQAAKSSDRKARRMSRSSPLGSDRRPTRSESPHHT

SEQ ID NO: 57604 - protein, 86 aa, Homo sapiens
MQAIKCVVVGDGAVGKTCLLISYTTNAFPGEYIPTVPGRPCALLQDAEAGLSSDVEGACWCQTQEGRMTGEAPAPPWPALRGPHHS

SEQ ID NO: 57605 - protein, 101 aa, Homo sapiens
MAQKPKVDPHVGRLGYLQALVTEFQETQSQDAKEQVLANLANFAYDPSNYEYLRQLQVLDLFLDSLSEENETLVEFAIARPPRPKHSSFLSVESLRGTMLQ

SEQ ID NO: 57606 - protein, 505 aa, Homo sapiens
MFNTESSFHMFPYQSQIAVFKEFLLRATKYNKLQMLGDDLRTDKKIILVEDLPNQFYRDSHTLHEVLRKYVRIGRCPLIFIISDSLSGDNNQRLLFPKEIQEECSISNISFNPVAPTIMMKFLNRIVTIEANKNGGKITVPDKTSLELLCQGCSGDIRSAINSLQFSSSKGENNLRPRKKGMSLKSDAVLSKSKRRKKPDRVFENQEVQAIGGKDVSLFLFRALGKILYCKRASLTELDSPRLPSHLSEYERDTLLVEPEEVVEMSHMPGDLFNLYLHQNYIDFFMEIDDIVRASEFLSFADILSGDWNTRSLLREYSTSIATRGVMHSNKARGYAHCQGGGSSFRPLHKPQWFLINKKYRENCLAAKALFPDFCLPALCRQTQLLPYLALLTIPMRNQAQISFIQDIGRLPLKRHFGRLKMEALTDREHGMIDPDSGDEAQLNGGHSAEESLGEPTQATVPETWSLPLSQNSASELPASQPQPFSAQGDMEENIIIEDYESDGT

SEQ ID NO: 57607 - protein, 540 aa, Homo sapiens
MPLRDETLREVWASDSGHEEESLSPEAPRRPKQRPAPAQRLRKKRTEAPESPCPTGSKPRKPGAGRTGRPREEPSPDPAQARAPQTVYARFLRDPEAKKRDPRETFLVARAPDAEDEEEEEEEDEEDEEEEAEEKKEKILLPPKKPLREKSSADLKERRAKAQGPRGDLGSPDPPPKPLRVRNKEAPAGEGTKMRKTKKKGSGEADKDPSGSPASARKSPAAMFLVGEGSPDKKALKKKGTPKGARKEEEEEEEAATVIKKSNQKGKAKGKGKKKEERAPSPPVEVDEPREFVLRPAPQGRTVRCRLTRDKKGMDRGMYPSYFLHLDTEKKVFLLAGRKRKRSKTANYLISIDPTNLSRGGENFIGKLRSNLLGNRFTVFDNGQNPQRGYSTNVASLRQELAAVIYETNVLGFRGPRRMTVIIPGMSAENERVPIRPRNASDGLLVRWQNKTLESLIELHNKPPVWNDDSGSYTLNFQGRVTQASVKNFQIVHADDPDYIVLQFGRVAEDAFTLDYRYPLCALQAFAIALSSFDGKLACE

SEQ ID NO: 57608 - protein, 218 aa, Homo sapiens
MATEVAADALGEEWKGYVVRISGGNDKQGFPMKQGVLTHGRVRLLLSKGHSCYRPRRTGERKRKSVRGCIVDANLSVLNLVIVKKGEKDIPGLTDTTVPRRLGPKRASRIRKLFNLSKEDDVRQYVVRKPLNKEGKKPRTKAPKIQRLVTPRVLQHKRRRIALKKQRTKKNKEEAAEYAKLLAKRMKEAKEKRQEQIAKRRRLSSLRASTSKSESSQK

SEQ ID NO: 57609 - protein, 464 aa, Homo sapiens
MSLHFLYYCSEPTLDVKIAFCQGFDKQVDVSYIAKHYNMSKSKVDNQFYSVEVGDSTFTVLKRYQNLKPIGSGAQGIVCAAYDAVLDRNVAIKKLSRPFQNQTHAKRAYRELVLMKCVNHKNIISLLNVFTPQKTLEEFQDVYLVMELMDANLCQVIQMELDHERMSYLLYQMLCGIKHLHSAGIIHRDLKPSNIVVKSDCTLKILDFGLARTAGTSFMMTPYVVTRYYRAPEVILGMGYKENVDMWSVGCIMGEMIKGAVLFPGTDHIDQWNKVIEQLGTPCPEFMKKLQPTVRNYVENRPKYAGLTFPKLFPDSLFPADSEHNKLKASQARDLLSKMLVIDPAKRISVDDALQHPYINVWYDPAEVEAPPPQIYDKQLDEREHTIEEWKELIYKEVMNSEEKTKNGVVKGQPSPSGAAVNSSESLPPSSSVNDISSMSTDQTLASDTDSSLEASAGPLGCCR

SEQ ID NO: 57610 - protein, 134 aa, Homo sapiens
MTGTPKTQEGAKDLEVDMNKTEVTPRLWTTCRDGEVLLRLSKHGPGHETPMTIPEFFRESVNRFGTYPALASKNGKKWEILNFNQYYEACRKAAKSLIKLGLERFHGVGILGFNSAEWFITAVGAILAGFHRAA

SEQ ID NO: 57611 - protein, 392 aa, Homo sapiens
MVCRLPVSKKTLLCSFQVLDELGRHVLLRKDCGPVDTKVPGAGEPKSAFTQGSAMISSLSQNHPDNRNETFSSVISLLNEDPLSQDLPVKMASIFKNFVITYNRTYESKEEARWRLSVFVNNMVRAQKIQALDRGTAQYGVTKFSDLTEEEFRTIYLNTLLRKEPGNKMKQAKSVGDLAPPEWDWRSKGAVTKVKDQGMCGSCWAFSVTGNVEGQWFLNQGTLLSLSEQELLDCDKMDKACMGGLPSNAYSAIKNLGGLETEDDYSYQGHMQSCNFSAEKAKVYINDSVELSQNEQKLAAWLAKRGPISVAINAFGMQFYRHGISRPLRPLCSPWLIDHAVLLVGYGNRSDVPFWAIKNSWGTDWGEKGYYYLHRGSGACGVNTMASSAVVD

SEQ ID NO: 57612 - protein, 156 aa, Homo sapiens
MVHGSVTFRDVAIDFSQEEWECLQPDQRTLYRDVMLENYSHLISLGSSISKPDVITLLEQEKEPWMVVRKETSRRYPDLELKYGPEKVSPENDTSEVNLPKQVIKQISTTLGIEAFYFRNDSEYRQFEGLQGYQEGNINQKMISYEKLPTHTPHAS

SEQ ID NO: 57613 - protein, 44 aa, Homo sapiens
MKNYKAIGKIGEGTFSEVMKMQSLRDGNYYACKQMKQRFERLGN

SEQ ID NO: 57614 - protein, 209 aa, Homo sapiens
NAPTLHIQEFTNETWQARTGEPLPDHLVLLMWSLIVSLYPLGGLFGALLAGPLAITLGRKKSLLVNNIFVVSAAILFGFSRKAGSFEMIMLGRLLVGVNAGVSMNIQPMYLGESAPKELRGAVAMSSAIFTALGIVMGQVVGLSTSRCTWSRTSSWPSAAPASRARSAACTASARSAARRTAPTASCCAACWPSACASARTGSTSTITT

SEQ ID NO: 57615 - protein, 17 aa, Homo sapiens
MLFPTSAQESSRGLPDA

SEQ ID NO: 57616 - protein, 1128 aa, Homo sapiens
MANGGGGGGGSSGGGGGGGGSSLRMSSNIHANHLSLDASSSSSSSSSSSSSSSSSSSSSSVHEPKMDALIIPVTMEVPCDSRGQRMWWAFLASSMVTFFGGLFIILLWRTLKYLWTVCCHCGGKTKVVLVFALSIGALVIYFIDSSNPIESCQNFYKDFTLQIDMAFNVFFLLYFGLRFIAANDKLWFWLEVNSVVDFFTVPPVFVSVYLNRSWLGLRFLRALRLIQFSEILQFLNILKTSNSIKLVNLLSIFISTWLTAAGFIHLVENSGDPWENFQNNQALTYWECVYLLMVTMSTVGYGDVYAKTTLGRLFMVFFILGGLAMFASYVPEIIELIGNRKKYGGSYSAVSGRKHIVVCGHITLESVSNFLKDFLHKDRDDVNVEIVFLHNISPNLELEALFKRHFTQVEFYQGSVLNPHDLARVKIESADACLILANKYCADPDAEDASNIMRVISIKNYHPKIRIITQMLQYHNKAHLLNIPSWNWKEGDDAICLAELKLGFIAQSCLAQGLSTMLANLFSMRSFIKIEEDTWQKYYLEGVSNEMYTEYLSSAFVGLSFPTVCELCFVKLKLLMIAIEYKSANRESRSRKRILINPGNHLKIQEGTLGFFIASDAKEVKRAFFYCKACHDDITDPKRIKKCGCKRLEDEQPSTLSPKKKQRNGGMRNSPNTSPKLMRHDPLLIPGNDQIDNMDSNVKKYDSTGMFHWCAPKEIEKVILTRSEAAMTVLSGHVVVCIFGDVSSALIGLRNLVMPLRASNFHYHELKHIVFVGSIEYLKREWETLHNFPKVSILPGTPLSRADLRAVNINLCDMCVILSANQNNIDDTSLQDKECILASLNIKSMQFDDSIGVLQANSQGFTPPGMDRSSPDNSPVHGMLRQPSITTGVNIPIITELVNDTNVQFLDQDDDDDPDTELYLTQPFACGTAFAVSVLDSLMSATYFNDNILTLIRTLVTGGATPELEALIAEENALRGGYSTPQTLANRDRCRVAQLALLDGPFADLGDGGCYGDLFCKALKTYNMLCFGIYRLRDAHLSTPSQCTKRYVITNPPYEFELVPTDLIFCLMQFDHNAGQSRASLSHSSHSSQSSSKKSSSVHSIPSTANRQNRPKSRESRDKQNRKEMVYR

SEQ ID NO: 57617 - protein, 55 aa, Homo sapiens
MSAQAQMRALLDQLMGTARDGSVYLCLPTSICKGVAESLMFIEPRRNQTEGQVYR

SEQ ID NO: 57618 - protein, 76 aa, Homo sapiens
MAASDTERDGLAPEKTSPDRDKKKEQSEVSVSPRASKHHYSRSRSRSRERKRKSDNEGRKHRSRSRSKERAYARRD

SEQ ID NO: 57619 - protein, 242 aa, Homo sapiens
MKETPLSNCERRFLLRAIEEKKRLDGRQTYDYRNIRISFGTDYGCCIVELGKTRVLGQVSCELVSPKLNRATEGILFFNLELSQMAAPAFEPGRQSDLLVKLNRLMERCLRNSKCIDTESLCVVAGEKVWQIRVDLHLLNHDGNIIDAASIAAIVALCHFRRPDVSVQGDEVTLYTPEERDPVPLSIHHMPICVSFAFFQQGTYLLVDPNEREERVMDGLLVIAMNKHREICTIQSSGSEMQ

SEQ ID NO: 57620 - protein, 430 aa, Homo sapiens
MERRMKAGYLDQQVPYTFSSKSPGNGSLREALIGPLGKLMDPGSLPPLDSEDLFQDLSHFQETWLAEAQVPDSDEQFVPDFHSENLAFHSPTTRIKKEPQSPRTDPALSCSRKPPLPYHHGEQCLYSSSVFQQPLDICHSFTSQGGGREPLPAPYQHQLSEPCPPYPQQSFKQEYHDPLYEQAGQPAVDQGGVNGHRYPGAGVVIKQEQTDFAYDSDVTGCASMYLHTEGFSGPSPGDGAMGYGYEKPLRPFPDDVCVVPEKFEGDIKQEGVGAFREGPPYQRRGALQLWQFLVALLDDPTNAHFIAWTGRGMEFKLIEPEEVARLWGIQKNRPAMNYDKLSRSLRYYYEKGIMQKVAGERYVYKFVCEPEALFSLAFPDNQRPALKAEFDRPVSEEDTVPLSHLDESPAYLPELAGPAQPFGPKGGYSY

SEQ ID NO: 57621 - protein, 179 aa, Homo sapiens
MATAAQGPLSLLWGWLWSERFWLPENVSWADLEGPADGYGYPRGRHILSVFPLAAGIFFVRLLFERILIRKGWRACQSSWIGMSEKSNAGFAIGGIRTSPQRLLNSVKACGDSHFIYVYSAMELDFSGRHLGSGTSDSAGITIHFSLFQVGFITIISWNWPSIGPLCFLSLQTLKERTS

SEQ ID NO: 57622 - protein, 126 aa, Homo sapiens
MADTIFGSGNDQWVCPNDRQLALRAKLQTGWSVHTYQTEKQRRKQHLSPAEVEAILQVIQRAERLDVLEQQRIGRLVERLETMRRNVMGNGLSQCLLCGEVLGFLGSSSVFCKDCRKKVCTKCGIE

SEQ ID NO: 57623 - protein, 178 aa, Homo sapiens
MADHSFSDGVPSDSVEAAKNASNTEKLTDQVMQNPRVLAALQERLDNVPHTPSSYIETLPKAVKRRINALKQLQVRCAHIEAKFYEEVHDLERKYAALYQPLFDKRREFITGDVEPTDAESEWHSENEEEEKLAGDMKSKVVVTEKAAATAEEPDPKGIPEFWFTIFRNVDMLSELVQ

SEQ ID NO: 57624 - protein, 45 aa, Homo sapiens
MMHVIWAALAFAAIQLLGMLCACIVLCRRSRDPAYELLITGGTYA

SEQ ID NO: 57625 - protein, 607 aa, Homo sapiens
MPQLNGGGGDDLGANDELISFKDEGEQEEKSSENSSAERDLADVKSSLVNESETNQNSSSDSEAERRPPPRSESFRDKSRESLEEAAKRQDGGLFKGPPYPGYPFIMIPDLTSPYLPNGSLSPTARTLHFQSGSTHYSAYKTIEHQIAVQYLQMKWPLLDVQAGSLQSRQALKDARSPSPAHIVSNKVPVVQHPHHVHPLTPLITYSNEHFTPGNPPPHLPADVDPKTGIPRPPHPPDISPYYPLSPGTVGQIPHPLGWLVPQQGQPVYPITTGGFRHPYPTALTVNASMSSFLSSRFPPHMVPPHHTLHTTGIPHPAIVTPTVKQESSQSDVGSLHSSKHQDSKKEEEKKKPHIKKPLNAFMLYMKEMRAKVVAECTLKESAAINQILGRRWHALSREEQAKYYELARKERQLHMQLYPGWSARDNYGKKKKRKRDKQPGETNDANTPKKCRALFGLDRQTLWCKPCRRKKKCVRYIQGEGSCLSPPSSDGSLLDSPPPSPNLLGSPPRDAKSQTEQTQPLSLSLKPDPLAHLSMMPPPPALLLAEATHKASALCPNGALDLPPAALQPAAPSSSIAQPSTSSLHSHSSLAGTQPQPLSLVTKSLE

SEQ ID NO: 57626 - protein, 638 aa, Homo sapiens
MEAEAAGLREQLEEEAAARERAGRELQTAQAQLSEWRRRQEEEAGALEAGEEARRRAAREAEALTQRLAEKTETVDRLERGRRRLQQELDDATMDLEQQRQLVSTLEKKQRKFDQLLAEEKAAVLRAVEERERAEAEGREREARALSLTRALEEEQEAREELERQNRALRAELEALLSSKDDVGKSVHELERACRVAEQAANDLRAQVTELEDELTAAEDAKLRLEVTVQALKTQHERDLQGRDEAGEERRRQLAKQLRDAEVERDEERKQRTLAVAARKKLEGELEELKAQMASAGQGKEEAVKQLRKMQAQMKELWREVEETRTSREEIFSQNRESEKRLKGLEAEVLRLQEELAASDRARRQAQQDRDEMADEVANGNLSKAAILEEKRQLEGRLGQLEEELEEEQSNSELLNDRYRKLLLQVESLTTELSAERSFSAKAESGRQQLERQIQELRGRLGEEDAGARARHKMTIAALESKLAQAEEQLEQETRERILSGKLVRRAEKRLKEVVLQVEEERRVADQLRDQLEKGNLRVKQLKRQLEEAEEEASRAQAGRRRLQRELEDVTESAESMNREVTTLRNRLRRGPLTFTTRTVRQVFRLEEGVASDEEAEEAQPGSGPSPEPEGSPPAHPQ

SEQ ID NO: 57627 - protein, 822 aa, Homo sapiens
MLLLEVISGERLAKPERGKMRVHKISNVNKALDFIASKGVKLVSIGAEEIVDGNVKMTLGMIWTIILRFAIQDISVEETSAKEGLLLWCQRKTAPYKNVNIQNFHISWKDGLGFCALIHRHRPELIDYGKLRKDDPLTNLNTAFDVAEKYLDIPKMLDAEDIVGTARPDEKAIMTYVSSFYHAFSGAQKAETAANRICKVLAVNQENEQLMEDYEKLASDLLEWIRRTIPWLENRVPENTMHAMQQKLEDFRDYRRLHKPPKVQEKCQLEINFNTLQTKLRLSNRPAFMPSEGRMVSDINNAWGCLEQVEKGYEEWLLNEIRRLERLDHLAEKFRQKASIHEAWTDGKEAMLRQKDYETATLSEIKALLKKHEAFESDLAAHQDRVEQIAAIAQELNELDYYDSPSVNARCQKICDQWDNLGALTQKRREALERTEKLLETIDQLYLEYAKRAAPFNNWMEGAMEDLQDTFIVHTIEEIQGLTTAHEQFKATLPDADKERLAILGIHNEVSKIVQTYHVNMAGTNPYTTITPQEINGKWDHVRQLVPRRDQALTEEHARQQHNERLRKQFGAQANVIGPWIQTKMEEIGRISIEMHGTLEDQLSHLRQYEKSIVNYKPKIDQLEGDHQLIQEALIFDNKHTNYTMEHIRVGWEQLLTTIARTINEVENQILTRDAKGISQEQMNEFRASFNHFDRKKTGMMDTDDFRACLISMGYNMGEAEFARIMSIVDPNRLGVVTFQAFIDFMSRETADTDTADQVMASFKILAGDKNYITMDELRRELPPDQAEYCIARMAPYTGPDSVPGALDYMSFSTALYGESDL

SEQ ID NO: 57628 - protein, 219 aa, Homo sapiens
MKEVVYWSPKKVADWLLENAMPEYCEPLEHFTGQDLINLTQEDFKKPPLCRVSSDNGQRLLDMIETLKMEHHLEAHKNGHANGHLNIGVDIPTPDGSFSIKIKPNGMPNGYRKEMIKIPMPELERSQYPMEWGKTFLAFLYALSCFVLTTVMISVVHERVPPKEVQPPLPDTFFDHFNRVQWAFSICEINGMILVGLWLIQWLLLKYNFSETGKPNCEE

SEQ ID NO: 57629 - protein, 38 aa, Homo sapiens
MAAADGDDSLYPIAVLIDELRNEDVQCWELLIIGEASW

SEQ ID NO: 57630 - protein, 380 aa, Homo sapiens
MSAIMDVLAEANGTFALNLLKTLGKDNSKNVFFSPMSMSCALAMVYMGAKGNTAAQMAQILSFNKSGGGGDIHQGFQSLLTEVNKTGTQYLLRMANRLFGEKSCDFLSSFRDSCQKFYQAEMEELDFISAVEKSRKHINTWVAEKTEGKIAELLSPGSVDPLTRLVLVNAVYFRGNWDEQFDKENTEERLFKVSKNEEKPVQMMFKQSTFKKTYIGEIFTQILVLPYVGKELNMIIMLPDETTDLRTVEKELTYEKFVEWTRLDMMDEEEVEVSLPRFKLEESYDMESVLRNLGMTDAFELGKADFSGMSQTDLSLSKVVHKSFVEVNEEGTEAAAATAAIMMMRCARFVPRFCADHPFLFFIQHSKTNGILFCGRFSSP

SEQ ID NO: 57631 - protein, 254 aa, Homo sapiens
MATAGNPWGWFLGYLILGVAGSLVSGSCSQIINGEDCSPHSQPWQAALVMENELFCSGVLVHPQWVLSAAHCFQNSYTIGLGLHSLEADQEPGSQMVEASLSVRHPEYNRPLLANDLMLIKLDESVSESDTIRSISIASQCPTAGNSCLVSGWGLLANGRMPTVLQCVNVSVVSEEVCSKLYDPLYHPSMFCAGGGQDQKDSCNGDSGGPLICNGYLQGLVSFGKAPCGQVGVPGVYTNLCKFTEWIEKTVQAS

SEQ ID NO: 57632 - protein, 41 aa, Homo sapiens
MINKATPYNYPVPVRDDGNMPDVPSHPQDPQGPSLEWLKKL

SEQ ID NO: 57633 - protein, 363 aa, Homo sapiens
MGGCAGSRRRFSDSEGEETVPEPRLPLLDHQGAHWKNAVGFWLLGLCNNFSYVVMLSAAHDILSHKRTSGNQSHVDPGPTPIPHNSSSRFDCNSVSTAAVLLADILPTLVIKLLAPLGLHLLPYSPRVLVSGICAAGSFVLVAFSHSVGTSLCGVVFASISSGLGEVTFLSLTAFYPRAVISWWSSGTGGAGLLGALSYLGLTQAGLSPQQTLLSMLGIPALLLASYFLLLTSPEAQDPGGEEEAESAARQPLIRTEAPESKPGSSSSLSLRERWTVFKGLLWYIVPLVVVYFAEYFINQGLFELLFFWNTSLSHAQQYRWYQMLYQAGVFASRSSLRCCRIRFTWALALLQMESRSVAQAGM

SEQ ID NO: 57634 - protein, 258 aa, Homo sapiens
MVAWKRQLILFGGFHESTRDYIYYNDVYAFNLDTFTWSKLSPSGTGPTPRSGCQMSVTPQGGIVVYGGYSKQRVKKDVDKGTRHSDMFLLKPEDGREDKWVWTRMNPSGVKPTPRSGFSVAMAPNHQTLFFGGVCDEEEEESLSGEFFNDLYFYDATRNRWFEGQLKKLRSGWRRRTRKRTVRRLRAPRVGSTTKTAERRAVRRTESPCQGRLASAVPTSAQDPAVLSEALGASVRPDAQERAEGGWPRPGCELSPMV

SEQ ID NO: 57635 - protein, 425 aa, Homo sapiens
MAENDVDNELLDYEDDEVETAAGGDGAEAPAKKDVKGSYVSIHSSGFRDFLLKPELLRAIVDCGFEHPSEVQHECIPQAILGMDVLCQAKSGMGKTAVFVLATLQQLEPVTGQVSVLVMCHTRELAFQISKEYERFSKYMPNVKVAVFFGGLSIKKDEEVLKKNCPHIVVGTPGRILALARNKSLNLKHIKHFILDECDKMLEQLDMRRDVQEIFRMTPHEKQVMMFSATLSKEIRPVCRKFMQDPMEIFVDDETKLTLHGLQQYYVKLKDNEKNRKLFDLLDVLEFNQVVIFVKSVQRCIALAQLLVEQNFPAIAIHRGMPQEERLSRYQQFKDFQRRILVATNLFGRGMDIERVNIAFNYDMPEDSDTYLHRCYPLSPSRWPEQAGLAPRAWLSHLCPMRMMPRSSMMCRIALRSILVSCLMR

SEQ ID NO: 57636 - protein, 147 aa, Homo sapiens
MSVTKSTEGPQGAVAIKLDLMSPPESAKKLENKDSTFLDESPSESAGLKKTKGITVFQALIHLVKGNMGTGILGLPLAVKNAGILMGPLSLLVMGFIACHCMHILVKCAQRFCKRLNKPFMDYGDTVMHGLEANPNAWLQNHAHWGR

SEQ ID NO: 57637 - protein, 325 aa, Homo sapiens
MPGCPCPGCGMAGPRLLFLTALALELLERAGGSQPALRSRGTATACRLDNKESESWGALLSGERLDTWICSLLGSLMVGLSGVFPLLVIPLEMGTMLRSEAGAWRLKQLLSFALGGLLGNVFLHLLPEAWAYTCSASPGGEGQSLQQQQQLGLWVIAGILTFLALEKMFLDSKEEGTSQAPNKDPTAAAAALNGGHCLAQPAAEPGLGAVVRSIKVSGYLNLLANTIDNFTHGLAVAASFLVSKKIGLLTTMAILLHEIPHEVGDFAILLRAGFDRWSAAKLQLSTALGGLLGAGFAICTQSPKGRRRQPGSCPSPLAAFSTSPW

SEQ ID NO: 57638 - protein, 935 aa, Homo sapiens
MKPPRPVRTCSKVLVLLSLLAIHQTTTAEKNGIDIYSLTVDSRVSSRFAHTVVTSRVVNRANTVQEATFQMELPKKAFITNFSMIIDGMTYPGIIKEKAEAQAQYSAAVAKGKSAGLVKATGRNMEQFQVSVSVAPNAKITFELVYEELLKRRLGVYELLLKVRPQQLVKHLQMDIHIFEPQGISFLETESTFMTNQLVDALTTWQNKTKAHIRFKPTLSQQQKSPEQQETVLDGNLIIRYDVDRAISGGSIQIENGYFVHYFAPEGLTTMPKNVVFVIDKSGSMSGRKIQQTREALIKILDDLSPRDQFNLIVFSTEATQWRPSLVPASAENVNKARSFAAGIQALGGTNINDAMLMAVQLLDSSNQEERLPEGSVSLIILLTDGDPTVGETNPRSIQNNVREAVSGRYSLFCLGFGFDVSYAFLEKLALDNGGLARRIHEDSDSALQLQDFYQEVANPLLTAVTFEYPSNAVEEVTQNNFRLLFKGSEMVVAGKLQDRGPDVLTATVSGKLPTQNITFQTESSVAEQEAEFQSPKYIFHNFMERLWAYLTIQQLLEQTVSASDADQQALRNQALNLSLAYSFVTPLTSMVVTKPDDQEQSQVAEKPMEGESRNRNVHSGSTFFKYYLQGAKIPKPGLDHTEASFSPRRGWNRQAGAAGSRMNFRPGVLSSRQLGLPGPPDVPDHAAYHPFRRLAILPASAPPATSNPDPAVSRVMNMKIEETTMTTQTPAPIQAPSAILPLPGQSVERLCVDPRHRQGPVNLLSDPEQGVEVTGQYEREKAGFSWIEVTFKNPLVWVHASPEHVVVTRNRRSSAYKWKETLFSVMPGLKMTMDKTGLLLLSDPDKVTIGLLFWDGRGEGLRLLLRDTDRFSSHVGGTLGQFYQEVLWGSPAASDDGRRTLRVQGNDHSATRERRLDYQEGPPGVEISCWSVEL

SEQ ID NO: 57639 - protein, 283 aa, Homo sapiens
MFRMLNSSFEDDPFFSESILAHRENMRQMIRSFSEPFGRDLLSISDGRGRAHNRRGHNDGEDSLTATSCSLVPFGDFGGMHTDVSSFQTMDQMVSNMRNYMQKLERNFGQLSVDPNGHSFCSSSVMTYSKIGDEPPKVFQASTQTRRAPGGIKETRKAMRDSDSGLEKMAIGHHIHDRAHVIKKSKNKKTGDEEVNQEFINMNESDAHAFDEEWQSEVLKYKPGRHNLGNTRMRSVGHENPGSRELKRREKPQQSPAIEHGRRSNVLGDKLHIKGSSVKSNKK

SEQ ID NO: 57640 - protein, 71 aa, Homo sapiens
MYELYDPCTVMFFFRNKHIMIDLGTGNNNKINWAMEDKQEMVDIIETVYRGARKGRGLVVSPKDYSTKYRY

SEQ ID NO: 57641 - protein, 115 aa, Homo sapiens
MAQDSVDLSCDYQFWMQKLSVWDQASTLETQQDTCLHVAQFQEFLRKMYEALKEMDSNTVIERFPTIGQLLAKACWNPFILAYDESQKILIWCLCCLINKEPQNSGQSKLNSWIQ

SEQ ID NO: 57642 - protein, 86 aa, Homo sapiens
MSSSMWYIMQSIQSKYSLSERLIRTIAAIRSFPHDNVEDLIRGGADVNCTHGTLKPLHCACMVSDADCVELLLEKGAEVMFLTHSH

SEQ ID NO: 57643 - protein, 420 aa, Homo sapiens
MAAGTAVGAWVLVLSLWGAVVGAQNITARIGEPLVLKCKGAPKKPPQRLEWKLNTGRTEAWKVLSPQGGGPWDSVARVLPNSSLFLPAVGIQDEGIFRCQAMNRNGKETKSNYRVRVYQIPGKPEIVDSASELTAGVPNKVVEESRRSRKRPCEQEVGTCVSEGSYPAGTLSWHLDGKPLVPNEKGVSVKEQTRRHPETGLFTLQSELMVTPARGGDPRPTFSCSFSPGLPRHRALRTAPIQPRVWEPVPLEEVQLVVEPEGGAVAPGGTVTLTCEVPAQPSPQIHWMKDGVPLPLPPSPVLILPEIGPQDQGTYSCVATHSSHGPQESRAVSISIIEPGEEGPTAGSVGGSGLGTLALALGILGGLGTAALLIGVILWQRRQRRGEERKAPENQEEEEERAELNQSEEPEAGESSTGGP

SEQ ID NO: 57644 - protein, 307 aa, Homo sapiens
MLPAGFRQKDQTQKAATGPFDREHLLMYLEKEALEQKDREDFVPFTGEKKGRVFIPKEKPIETRKEEKVTLDPELEEALASASDTELYDLAAVLGVHNLLNNPKFDEETANNKGGKGPVRNVVKGEKVKPVFEEPPNPTNVEISLQQMKANDPSLQEVNLNNIKNIPIPTLREFAKALETNTHVKKFSLAATRSNDPVAIAFADMLKVNKTLTSLNIESNFITGTGILALVEALKENDTLTEIKIDNQRQQLGTAVEMEIAQMLEENSRILKFGYQFTKQGPRTRVAAAITKNNDLVRKKRVEADRR

SEQ ID NO: 57645 - protein, 321 aa, Homo sapiens
MADPEVVVSSCSSHEEENRCNFNQQTSPSEELLLEDQMRRKLKFFFMNPCEKFWARGRKPWKLAIQILKIAMVTIQLVLFGLSNQMVVAFKEENTIAFKHLFLKGYMDRMDDTYAVYTQSDVYDQLIFAVNQYLQLYNVSVGNHAYENKGTKQSAMAICQHFYKRGNIYPGNDTFDIDPEIETECFFVEPDEPFHIGTPAENKLNLTLDFHRLLTVELQFKLKAINLQTVRHQELPDCYDFTLTITFDNKAHSGRIKISLDNDISIRECKDWHVSGSIQKNTHYMMIFDAFVILTCLVSLILCIRSVIRGLQLQQVGNVAF

SEQ ID NO: 57646 - protein, 647 aa, Homo sapiens
MLDCGIHPGLEGMDALPYIDLIDPAEIDLLLISHFHLDHCGALPWFLQKTSFKGRTFMTHATKAIYRWLLSDYVKVSNISADDMLYTETDLEESMDKIETINFHEVKEVAGIKFWCYHAGHVLGAAMFMIEIAGVKLLYTGDFSRQEDRHLMAAEIPNIKPDILIIESTYGTHIHEKREEREARFCNTVHDIVNRGGRGLIPVFALGRAQELLLILDEYWQNHPELHDIPIYYASSLAKKCMAVYQTYVNAMNDKIRKQININNPFVFKHISNLKSMDHFDDIGPSVVMASPGMMQSGLSRELFESWCTDKRNGVIIAGYCVEGTLAKHIMSEPEEITTMSGQKLPLKMSVDYISFSAHTDYQQTSEFIRALKPPHVILVHGEQNEMARLKAALIREYEDNDEVHIEVHNPRNTEAVTLNFRGEKLAKVMGFLADKKPEQGQRVSGILVKRNFNYHILSPCDLSNYTDLAMSTVKQTQAIPYTGPFNLLCYQLQKLTGDVEELEIQEKPALKVFKNITVIQEPGMVVLEWLANPSNDMYADTVTTVILEVQSNPKIRKGAVQKVSKKLEMHVYSKRLEIMLQDIFGEDCVSVKDDSILSVTVDGKTANLNLETRTVECEEGSEDDESLREMVELAAQRLYEALTPVH

SEQ ID NO: 57647 - protein, 287 aa, Homo sapiens
MSGVRAVRISIESACEKQVHEVGLDGTETYLPPLSMSQNLARLAQRIDFSQGSGSEEEEAAGTEGDAQEWPGAGSSADQDDEEGVVKFQPSLWPWDSVRNNLRSALTEMCVLYDVLSIVRDKKFMTLDPVSQDALPPKQNPQTLQLISKKKSLAGAAQILLKGAERLTKSVTENQENKLQRDFNSELLRLRQHWKLRKVGDKILGDLSYRSAGSLFPHHGTFEVIKNTDLDLDKKIPEDYCPLDVQIPSDLEGSAYIKVSIQKQAPDIGDLGTVNLFKRPLPKSKPG

SEQ ID NO: 57648 - protein, 870 aa, Homo sapiens
MWPHSAGARPWASTLTGKDPRVMACWCLDGLPSGLAEPWRELWRWRSRPLHCVPPFSPLARSSRDHRNLRRRGNIDGRQNLEPSNNVEMFPPSGSTGLIPPSHFQARPLSTLPRMAPTWLSDIPLVQPPGHQDVSERRLDTQRPQVTMWERDVSSDRQEPGRRGRSWGLEGSQALSQQAEVIVRQLQELRRLEEEVRLLRETSLQQKMRLEAQAMELEALARAEKAGRAEAEGLRAALAGAEVVRKNLEEGRQRELEEVQRLHQEQLSSLTQAHEEALSSLTSKAEGLEKSLSSLETRRAGEAKELAEAQREAELLRKQLSKTQEDLEAQVTLVENLRKYVGEQVPSEVHSQTWELERQKLLDTMQHLQEDRDSLHATAELLQVRVQSLTHILALQEEELTRKVQPSDSLEPEFTRKCQSLLNRWREKVFALMVQLKAQELEHSDSVKQLKGQVASLQEKVTSQSQEQAILQRSLQDKAAEVEVERMGAKGLQLELSRAQEARRRWQQQTASAEEQLRLVVNAVSSSQIWLETTMAKVEGAAAQLPSLNNRLSYAVRKVHTIRGLIARKLALAQLRQESCPLPPPVTDVSLELQQLREERNRLDAELQLSARLIQQEVGRAREQGEAERQQLSKVAQQLEQELQQTQESLASLGLQLEVARQGQQESTEEAASLRQELTQQQELYGQALQEKVAEVETRLREQLSDTERRLNEARREHAKAVVSLRQIQRRAAQEKERSQELRRLQEEARKEEGQRLARRLQELERDKNLMLATLQQEGLLSRYKQQRLLTVLPSLLDKKKSVVSSPRPPECSASAPVAAAVPTRESIKGSLSVLLDDLQDLSEAISKEEAVCQGDNLDRCSSSNPQMSS

SEQ ID NO: 57649 - protein, 434 aa, Homo sapiens
LEGTAGTITSNEWSSPTSPEGSTASGGSQALDKPIDNDAEGVWSPDIEQSFQEALAIYPPCGRRKIILSDEGKMYGRNELIARYIKLRTGKTRTRKQVSSHIQVLARRKAREIQAKLKDQAAKDKALQSMAAMSSAQIISATAFHSSMALARGPGRPAVSGFWQGALPGQAGTSHDVKPFSQQTYAVQPPLPLPGFESPAGPAPSPSAPPAPPWQGRSVASSKLWMLEFSAFLEQQQDPDTYNKHLFVHIGQSSPSYSDPYLEAVDIRQIYDKFPEKKGGLKDLFERGPSNAFFLVKFWADLNTNIEDEGSSFYGVSSQYESPENMIITCSTKVCSFGKQVVEKVETEYARYENGHYSYRIHRSPLCEYMINFIHKLKHLPEKYMMNSVLENFTILQVVTNRDTQETLLCIAYVFEVSASEHGAQHHIYRLVKE

SEQ ID NO: 57650 - protein, 257 aa, Homo sapiens
MAWSSKSWLCLIASSCPRDTLLPSAHHASPVPASHLTQVSNGCVSKILGRYYRTGVLEPKGIGGSKPRLATPPVVARIAQLKGECPALFAWEIQRQLCAEGLCTQDKTPSVSSINRVLRALQEDQGLPCTRLRSPAVLAPAVLTPHSGSETPRGTHPGTGHRNRTIFSPSQAEALEKEFQRGQYPDSVARGKLATATSLPEDTVRVWFSNRRAKWRRQEKLKWEMQLPGASQGLTVPRVAPGIISAQGPTVFMSRKY

SEQ ID NO: 57651 - protein, 638 aa, Homo sapiens
MVSYSSVLTAISKFDDFSRDLCVQALLDIMDMFCDRLSCHGKAEECIGLCRALLSALHWLLRCTAASAERLREGLEAGTPAAGEKQLAMCLQRLEKTLSSTKNRALLHIAKLEEASSWTAIEHSLLKLGEILANLSNPQLRSQAEQCGTLIRSIPTMLSVHAEQMHKTGFPTVHAVILLEGTMNLTGETQSLVEQLTMVKRMQHIPTPLFVLEIWKACFVGLIESPEGTEELKWTAFTFLKIPQVLVKLKKYSHGDKDFTEDVNCAFEFLLKLTPLLDKADQRCNCDCTNFLLQECGKQGLLSEASVNNLMAKRKADREHAPQQKSGENANIQPNIQLILRAEPTVTNILKCSSGLDFLSCPQTMDADHSKSPEGLLGVLGHMLSGKSLDLLLAAAAATGKLKSFARKFINLNEFTTYGSEESTKPASVRALLFDISFLMLCHVAQTYGSEVILSESRTGAEVPFFETWMQTCMPEEGKILNPDHPCFRPDSTKVESLVALLNNSSEMKLVQMKWHEACLSISAAILEILNAWENGVLAFESIQKITDNIKGKVCSLAVCAVAWLVAHVRMLGLDEREKSLQMIRQLAGPLFSENTLQFYNERVVIMNSILERMCADVLQQTATQIKFPSTGVDTMPY

SEQ ID NO: 57652 - protein, 1105 aa, Homo sapiens
MAAMAPALTDAAAEAHHIRFKLAPPSSTLSPGSAENNGNANILIAANGTKRKAIAAEDPSLDFRNNPTKEDLGKLQPLVASYLCSDVTSVPSKESLKLQGVFSKQTVLKSHPLLSQSYELRAELLGRQPVLEFSLENLRTMNTSGQTALPQAPVNGLAKKLTKSSTHSDHDNSTSLNGGKRALTSSALHGGEMGGSESGDLKGGMTNCTLPHRSLDVEHTTLYSNNSTANKSSVNSMEQPALQGSSRLSPGTDSSSNLGGVKLEGKKSPLSSILFSALDSDTRITALLRRQADIESRARRLQKRLQVVQAKQVERHIQHQLGGFLEKTLSKLPNLESLRPRSQLMLTRKAEAALRKAASETTTSEGLSNFLKSNSISEELERFTASGIANLRCSEQAFDSDVTDSSSGGESDIEEEELTRADPEQRHVPLRRRSEWKWAADRAAIVSRWNWLQAHVSDLEYRIRQQTDIYKQIRANKGLIVLGEVPPPEHTTDLFLPLSSEVKTDHGTDKLIESVSQPLENHGAPIIGHISESLSTKSCGALRPVNGVINTLQPVLADHIPGDSSDAEEQLHKKQRLNLVSSSSDGTCVAARTRPVLSCKKRRLVRPNSIVPLSKKVHRNSTIRPGCDVNPSCALCGSGSINTMPPEIHYEAPLLERLSQLDSCVHPVLAFPDDVPTSLHFQSMLKSQWQNKPFDKIKPPKKLSLKHRAPMPGSLPDPARKDRHKLVSSFLTTAKLSHHQTRPDRTHRQHLDDVGAVPMVERVTAPKAERLLNPPPPVHDPNHSKMRLRDHSSERSEVLKHHTDMSSSSYLAATHHPPHSPLVRQLSTSSDSPAPASSSSQVTASTSQQPVRRRRGESSFDINNIVIPMSVAATTRVEKLQYKEILTPSWREVDLQSLKGSPDEENEEIEDLSDAAFAALHAKCEEMERARWLWTTSVPPQRRGSRSYRSSDGRTTPQLGSANPSTPQPASPDVSSSHSLSEYSHGQSPRSPISPELHSAPLTPVARDTPRHLASEDTRCSTPELGLDEQSVQPWERRTFPLAHSPQAECEDQLDAQERAARCTRRTSGSKTGRETEAAPTSPPTVPLKSRHLVAAATAQRPTHR

SEQ ID NO: 57653 - protein, 69 aa, Homo sapiens
MAEPDLECEQIRLKCIRKEGFFTVPPEHRGLALSPRLECSGVITAQCIVSLLGSSDLPASASQVLELQA

SEQ ID NO: 57654 - protein, 58 aa, Homo sapiens
MAKRTKKVGIVGKYGTRYGASLRKMVKKIEISQHAKYTCSFCGKGEREAFTSLTIRPR

SEQ ID NO: 57655 - protein, 296 aa, Homo sapiens
MDCLCIVTTKKYRYQDEDTPPLEHSPAHLPNQANSPPVIVNTDTLEAPGYVNGTEGEMEYEEITLERGNSGLGFSIAGGTDNPHIGDDPSIFITKIIPGGAAAQDGRLRVNDSILFVNEVDVREVTHSAAVEALKEAGSIVRLYVMRRKPPAEKVMEIKLIKGPKGLGFSIAGGVGNQHIPGDNSIYVTKIIEGGAAHKDGRLQIGDKILAVNSVGLEDVMHEDAVAALKNTYDVVYLKVAKPSNAYLSDSYAPPDITTCESPSNTKVPHDPSRLTHDMQSHDIPVAVPLQIFPMK

SEQ ID NO: 57656 - protein, 87 aa, Homo sapiens
MSGHKCSYPWDLQDRYAQDKSVVNKMQQKYWETKQAFIKATGKKEDEHVVASDADLDAKLELFHSIQRTCLDLSKAIVLYQKRICSF

SEQ ID NO: 57657 - protein, 127 aa, Homo sapiens
MPASAARPRPGPGQPTASPFPLLLLAVLSGPVSGRVPRSVPRTSLPISEADSCLTRFAVPHTYNYSVLLVDPASHTLYVGARDTIFALSLPFSGERPRRIDWMVPEAHRQNCRKKGKKEGGSSMLPL

SEQ ID NO: 57658 - protein, 19 aa, Homo sapiens
MNRFRVSKFRHTEARPPRR

SEQ ID NO: 57659 - protein, 52 aa, Homo sapiens
MKLCVTVLSLLMLVAAFCSPALSAPNSKPKEASKSVLIPVNPGSRSTCMTWN

SEQ ID NO: 57660 - protein, 234 aa, Homo sapiens
MSLTVVSMACVGFFLLQGAWPHEGVHRKPSLLAHPGRLVKSEETVILQCWSDVMFEHFLLHREGMFNDTLRLIGEHHDGVSKANFSISRMKQDLAGTYRCYGSVTHSPYQLSAPSDPLDIVIIGLYEKPSLSAQPGPTVLAGENVTLSCSSRSSYDMYHLSREGEAHERRLPAGTKVNGTFQANFPLGPATHGGTYRCFGSFRDSPYEWSKSSDPLLVSVTATILLSTFMRSTF

SEQ ID NO: 57661 - protein, 324 aa, Homo sapiens
LVTGTHKMLSAFNATSGKAIWTLNPNYLSNGTLAAPVVVLPDLDEDGVRDLVVLAIGELQPDLCFLLVSGRTGNPVGRPVKYNIVGVGNLIGPQVYITTNGAVYILFGFGNIQAVALRDIFVQAQNRDSSPPSLQIEEPEWEKRRSINLSELIDVYSDGVELLQMVKAPDSNCSNLLITTRQSLVLLRGQNLTPYWALRLQGLRSQPTPGYFTDDQTLDFLLQIQDGVGMKKMMVVDGDSGSIVWSYRAPCHMKETPATSAVTSDQKSVFLFWAEGLSAASPNSDIILGTEPPSLHHLYLLHPAFPSILLDLANTTGTVTASEG

SEQ ID NO: 57662 - protein, 134 aa, Homo sapiens
  MOD_RES (1)..(1): Any amino acid
XGHCPNPGISLGAVRTGFRFGHGDKVRYRCSSNLVLTGSSERECQGNGVWSGTEPICRQPYSYDFPEDVAPALGTSFSHMLGATNPTQKTKESLGRKIQIQRSGHLNLYLLLDCSQSVSENDFLIFKESASLMV

SEQ ID NO: 57663 - protein, 454 aa, Homo sapiens
MPQLSLSWLGLGPVAASPWLLLLLVGGSWLLARVLAWTYTFYDNCRRLQCFPQPPKQNWFWGHQGLVTPTEEGMKTLTQLVTTYPQGFKLWLGPTFPLLILCHPDIIRPITSASAAVAPKDMIFYGFLKPWLGDGLLLSGGDKWSRHRRMLTPAFHFNILKPYMKIFNKSVNIMHDKWQRLASEGSARLDMFEHISLMTLDSLQKCVFSFESNCQEKPSEYIAAILELSAFVEKRNQQILLHTDFLYYLTPDGQRFRRACHLVHDFTDAVIQERRCTLPTQGIDDFLKNKAKSKTLDFIDVLLLSKDEDGKELSDEDIRAEADTFMFEGHDTTASGLSWVLYHLAKHPEYQEQCRQEVQELLKDREPIEIEWDDLAQLPFLTMCIKESLRLHPPVPVISRCCTQDFVLPDGRVIPKGLRPLPFRPREHQGEVTSGFYSLLGRAQKLHRAGVRHG

SEQ ID NO: 57664 - protein, 164 aa, Homo sapiens
MSWSPSLTTQTCGAWEMKERLGTGGFGNVIRWHNQETGEQIAIKQCRQELSPRNRERWCLEIQIMRRLTHPNVVAARDVPEGMQNLAPNDLPLLAMEYCQGGDLRKYLNQFENCCGLREGAILTLLSDIGKSQSRNSGRVLQGECGAPPLRLDTFMKTESSIGI

SEQ ID NO: 57665 - protein, 361 aa, Homo sapiens
MGIIQSILATSRDCYSFKKKPIPKKPTMLALAKILLISTLFYSLLSGSHGKENQDINTTQNIAEVFKTMENKPISLESEANLNSDKENITTSNLKASHSPPLNLPNNSHGITDFSSNSSAEHSLGSLKPTSTISTSPPLIHSFVSKVPWNAPIADEDLLPISAHPNATPALSSENFTWSLVNDTVKTPDNSSITVSILSSEPTSPSVTPLIVEPSGWLTTNSDSFTGFTPYQEKTTLQPTLKFTNNSKLFPNTSDPQKENRNTGIVFGAILGAILGVSLLTLVGYLLCGKRKTDSFSHRRLYDDRNEPVLRLDNAPEPYDVSFGNSSYYNPTLNDSAMPESEENARDGIPMDDIPPLRTSV

SEQ ID NO: 57666 - protein, 110 aa, Homo sapiens
MLDKAPVLKVIVNSLKNMINTFVPSGKIMQVVDEKLPGLLGNFPGPFEEEMKGIAAVTDIPLGKVHLEALKKKVIKFFYKFPLRCDIHTAQVLYVLDIQHRCTGLRYTAQ

SEQ ID NO: 57667 - protein, 1417 aa, Homo sapiens
MPEQERQITAREGASRKILSKLSLPTRAWEPAMKKSFAFDNVGYEGGLDGLGPSSQVATSTVRILGMTCQSCVKSIEDRISNLKGIISMKVSLEQGSATVKYVPSVVCLQQVCHQIGDMGFEASIAEGKAASWPSRSLPAQEAVVKLRVEGMTCQSCVSSIEGKVRKLQGVVRVKVSLSNQEAVITYQPYLIQPEDLRDHVNDMGFEAAIKSKVAPLSLGPIDIERLQSTNPKRPLSSANQNFNNSETLGHQGSHVVTLQLRIDGMHCKSCVLNIEENIGQLLGVQSIQVSLENKTAQVKYDPSCTSPVALQRAIEALPPGNFKVSLPDGAEGSGTDHRSSSSHSPGSPPRNQVQGTCSTTLIAIAGMTCASCVHSIEGMISQLEGVQQISVSLAEGTATVLYNPSVISPEELRAAIEDMGFEASVVSESCSTNPLGNHSAGNSMVQTTDGTPTSVQEVAPHTGRLPANHAPDILAKSPQSTRAVAPQKCFLQIKGMTCASCVSNIERNLQKEAGVLSVLVALMAGKAEIKYDPEVIQPLEIAQFIQDLGFEAAVMEDYAGSDGNIELTITGMTCASCVHNIESKLTRTNGITYASVALATSKALVKFDPEIIGPRDIIKIIEEIGFHASLAQRNPNAHHLDHKMEIKQWKKSFLCSLVFGIPVMALMIYMLIPSNEPHQSMVLDHNIIPGLSILNLIFFILCTFVQAERSPVTFFDTPPMLFVFIALGRWLEHLAKSKTSEALAKLMSLQATEATVVTLGEDNLIIREEQVPMELVQRGDIVKVVPGGKFPVDGKVLEGNTMADESLITGEAMPVTKKPGSTVIAGSINAHGSVLIKATHVGNDTTLAQIVKLVEEAQMSKAPIQQLADRFSGYFVPFIIIMSTLTLVVWIVIGFIDFGVVQRYFPNPNKHISQTEVIIRFAFQTSITVLCIACPCSLGLATPTAVMVGTGVAAQNGILIKGGKPLEMAHKIKTVMFDKTGTITHGVPRVMRVLLLGDVATLPLRKVLAVVGTAEASSEHPLGVAVTKYCKEELGTETLGYCTDFQAVPGCGIGCKVSNVEGILAHSERPLSAPASHLNEAGSLPAEKDAVPQTFSVLIGNREWLRRNGLTISSDVSDAMTDHEMKGQTAILVAIDGVLCGMIAIADAVKQEAALAVHTLQSMGVDVVLITGDNRKTARAIATQVGINKVFAEVLPSHKVAKVQELQNKGKKVAMVGDGVNDSPALAQADMGVAIGTGTDVAIEAADVVLIRNDLLDVVASIHLSKRTVRRIRINLVLALIYNLVGIPIAAGVFMPIGIVLQPWMGSAAMAASSVSVVLSSLQLKCYKKPDLERYEAQAHGHMKPLTASQVSVHIGMDDRWRDSPRATPWDQVSYVSQVSLSSLTSDKPSRHSAAADDDGDKWSLLLNGRDEEQYI

SEQ ID NO: 57668 - protein, 229 aa, Homo sapiens
YIRVSYDTKPDSLLHLMVKDWQLELPKLLISVHGGLQNFEMQPKLKQVFGKGLIKAAMTTGAWIFTGGVSTGVISHVGDALKDHSSKSRGRVCAIGIAPWGIVENKEDLVGKDVTRVYQTMSNPLSKLSVLNNSHTHFILADNGTLGKYGAEVKLRRLLEKHISLQKINTRLGQGVPLVGLVVEGGPNVVSIVLEYLQEEPPIPVVICDGSGRASDILSFAHKYCEEGG

SEQ ID NO: 57669 - protein, 75 aa, Homo sapiens
MIFTPFLPPADLNVKGPQKDPEELVAVSDTAEDPSSGTGLPREPALLRGSWRSRFQRALACFIKCFRGGYRALGI

SEQ ID NO: 57670 - protein, 1204 aa, Homo sapiens
MNSPVDPGARQALRKKPPERTPEDLNTIYSYLHGMEILSNLREHQLRLMSARARYERYSGNQVLFCSETIARCWYILLSGSVLVKGSMVLPPCSFGKQFGGKRGCDCLVLEPSEMIVVENAKDNEDSILQREIPARQSRRRFRKINYKGERQTITDDVEVNSYLSLPADLTKMHLTENPHPQVTHVSSSQSGCSIASDSGSSSLSDIYQATESEVGDVDLTRLPEGPVDSEDDEEEDEEIDRTDPLQGRDLVRECLEKEPADKTDDDIEQLLEFMHQLPAFANMTMSVRRELCSVMIFEVVEQAGAIILEDGQELDSWYVILNGTVEISHPDGKVENLFMGNSFGITPTLDKQYMHGIVRTKVDDCQFVCIAQQDYWRILNHVEKNTHKVEEEGEIVMVHEHRELDRSGTRKGHIVIKATPERLIMHLIEEHSIVDPTYIEDFLLTYRTFLESPLDVGIKLLEWFKIDSLRDKVTRIVLLWVNNHFNDFEGDPAMTRFLEEFEKNLEDTKMNGHLRLLNIACAAKAKWRQVVLQKASRESPLQFSLNGGSEKGFGIFVEGVEPGSKAADSGLKRGDQIMEVNGQNFENITFMKAVEILRNNTHLALTVKTNIFVFKELLFRTEQEKSGVPHIPKIAEKKSNRHSIQHVPGDIEQTSQEKGSKKVKANTVSGGRNKIRKILDKTRFSILPPKLFSDGGLSQSQDDSIVGTRHCRHSLAIMPIPGTLSSSSPDLLQPTTSMLDFSNPSDIPDQVIRVFKVDQQSCYIIISKDTTAKEVVFHAVHEFGLTGASDTYSLCEVSVTPEGVIKQRRLPDQFSKLADRIQLNGRYYLKNNMETETLCSDEDAQELVKESQLSMLQLSTIEVATQLSMRDFDLFRNIEPTEYIDDLFKLNSKTGNTHLKRFEDIVNQETFWVASEILTEANQLKRMKIIKHFIKIALHCRECKNFNSMFAIISGLNLASVARLRGTWEKLPSKYEKHLQDLQDIFDPSRNMAKYRNILSSQSMQPPIIPLFPVVKKDMTFLHEGNDSKVDGLVNFEKLRMISKEIRQVVRMTSANMDPAMMFRQRSLSQGSTNSNMLDVQGGAHKKRARRSSLLNAKKLYEDAQMARKVKQYLSSLDVETDEEKFQMMSLQWEPAYGTLTKNLSEKRSAKSSEMSPVPMRSAGQTTKAHLHQPHRVSQVLQVPAVNLHPIRKKGQTKDPALM

SEQ ID NO: 57671 - protein, 535 aa, Homo sapiens
MTEALQWARYHWRRLIRGATRDDDSGPYNYSSLLACGRKSSQTPKLSGRHRIVVPHIQPFKDEYEKFSGAYVNNRIRTTKYTLLNFVPRNLFEQFHRAANLYFLFLVVLNWVPLVEAFQKEITMLPLVVVLTIIAIKDGLEDYRKYKIDKQINNLITKVYSRKEKKYIDRCWKDVTVGDFIRLSCNEVIPADMVLLFSTDPDGICHIETSGLDGESNLKQRQVVRGYAEQDSEVDPEKFSSRIECESPNNDLSRFRGFLEHSNKERVGLSKENLLLRGCTIRNTEAVVGIVVYAGHETKAMLNNSGPRYKRSKLERRANTDVLWCVMLLVIMCLTGAVGHGIWLSRYEKMHFFNVPEPDGHIISPLLAGFYMFWTMIILLQLGQIYFIQSDVDFYNEKMDSIVQCRALNIAEDLGQIQYLFSDKTGTLTENKMVFRRCSVAGFDYCHEENARRLESYQEAVSEDEDFIDTVSGSLSNMAKPRAPSCRTVHNGPLGNKPSNHLAGSSFTLGSGEGASEVPHSRQAAFSSPIVSMNA

SEQ ID NO: 57672 - protein, 211 aa, Homo sapiens
MVAVLGGRGVLRLRLLLSALKPGIHVPRAGPAAAFGTSVTSAKVAVNGVQLHYQQTGEGDHAVLLLPGMLGSGETDFGPQLKNLNKKLFTVVAWDPRGYGHSRPPDRDFPADFFERDAKDAVDLMKALKFKKVSLLGWSDGGITALIAAAKYPSYIHKMVIWGANAYVTDEDSMIYEGIRDVSKWSERTRKPLEALYGWSLTLSPGWNAMA

SEQ ID NO: 57673 - protein, 152 aa, Homo sapiens
MTMTLHTKASGMALLHQIQGNELEPLNRPQLKIPLERPLGEVYLDSSKPAVYNYPEGAAYEFNAAAAANAQVYGQTGLPYGPGSEAAAFGSNGLGGFPPLNSVSPSPLMLLHPPPQLSPFLQPHGQQVPYYLENEPSGYTVREAGPPAFYRT

SEQ ID NO: 57674 - protein, 513 aa, Homo sapiens
MADYLISGGTGYVPEDGLTAQQLFASADGLTYNDFLILPGFIDFIADEVDLTSALTRKITLKTPLISSPMDTVTEADMAIAMALMGGIGFIHHNCTPEFQANEVRKVKFEQGFITDPVVLSPSHTVGDVLEAKMRHGFSGIPITETGTMGSKLVGIVTSRDIDFLAEKDHTTLLSEVMTPRIELVVAPAGVTLKEANEILQRSKKGKLPIVNDCDELVAIIARTDLKKNRDYPLASKDSQKQLLCGAAVGTREDDKYRLDLLTQAGVDVIVLDSSQGNSVYQIAMVHYIKQKYPHLQVIGGNVVTAAQAKNLIDAGVDGLRVGMGCGSICITQEVMACGRPQGTAVYKVAEYARRFGVPIIADGGIQTVGHVVKALALGASTVMMGSLLAATTEAPGEYFFSDGVRLKKYRGMGSLDAMEKSSSSQKRYFSEGDKVKIAQGVSGSIQDKGSIQKFVPYLIAGIQHGCQDIGARSLSVLRSMMYSGELKFEKRTMSAQIEGGVHGLHSYEKRLY

SEQ ID NO: 57675 - protein, 691 aa, Homo sapiens
MALLLTLTSPDLEGTWDTRDKDGFKAQEGPPLAVPEFPVCGLYRIYGVCGSFSSFFIIRCSLCALETLKSPQHDPLEIPEQSLKLIPLVSGKRELTRGQKAGEKPLAAGPGEEELLRGSAPHAQDTQSEELPPSCTISGEKKPPAVSGEATGADAGRLCPPPRSRAPHKDRTLARSRPQTQGEDCSLPVGEVKIGKRSYSPAPGKQKKPNAMGLAPTSSPGAPNSARATHNPVPCGSGRGPCHLANLLSTLAQSNQNRDHKQGPPEVTCQIRKKTRTLYRSDQLEELEKIFQEDHYPDSDKRREIAQTVGVTPQRIMVKGAGSLVAGWSGGGPTIETLELQSERSAVAWVWFQNRRAKWRKMEKLNGKESKDNPAAPGPASSQCSSAAEILPAVPMEPKPDPFPQESPLDTFPEPPMLLTSDQTLAPTQPSEGAQRVVTPPLFSPPPVRRADLPFPLGPVHTPQLMPLLMDVAGSDSSHKDGPCGSWGTSITLPPPCSYLEELEPQDYQQSNQPGPLQFSQAPQPPLFQSPQPKLPYLPTFPFSMPSSLTLPPPEDSLFMFPCGPSGGTSQGYCPGASSGQILMQPPAGNIGTASWSDPCLPELPFPGPFCPQALGHPPGGDGYFPDLFPTPCPQALGRQPSSALSWMPEGARPGTGPLLSKAKEEPPAASLDQPSALEEARGDDKNSHVP

SEQ ID NO: 57676 - protein, 180 aa, Homo sapiens
MARGARKQKRAVVASLAGEPVGPGQRALWQGRALRIPPVGPSILHCRVLHVDYALKVCVDIPGTSKLLLELPLVIGTIPLHPFGSRSSSVGSHASFLLDWRLGALPERPEAPPEYSEVVADTEEAALGQSPFPLPQDPDMSLEGPFFAYIQEFRYRPPPLYSEEDPNPLLGDMRPRCMTC

SEQ ID NO: 57677 - protein, 111 aa, Homo sapiens
  MOD_RES (1)..(1): Any amino acid
XDVGSHFKIRPLWQHFFQNTKGARSPGSTHQGSLASGVLPIKCSHVEFGMWKGGRSHPFLPHSSRCAGSGGQLDSILPHQSPAWGPWGCKDLSSGFPSFLTSSILWKSAVQ

SEQ ID NO: 57678 - protein, 150 aa, Homo sapiens
MAAAAELSLLEKSLGLSKGNKYSAQGERQIPVLQTNNGPSLTGLTTIAAHLVKQANKEYLLGSTAEEKAIVQQWLEYRVTQVDGHSSKNDIHTLLKDLNSYLEDKVYLTGYNFTLADILLYYGLHRFIVSICIVTGFFSVVLRMIFKTLS

SEQ ID NO: 57679 - protein, 157 aa, Homo sapiens
MAAAAGAPPPGPPQPPPPPPPEESSDSEPEAEPGSPQKLIRKVSTSGQIRQKVITPCRKLILCADNRKEMEDWIAALKTVQNREHFEPTQYSMDHFSGMHNWYACSHARPTYCNVCREALSGVTSHGLSCEVCKFKAHKRCAVRATNNCKWTTLASI

SEQ ID NO: 57680 - protein, 87 aa, Homo sapiens
MYNMRRLSLSPTFSMGFHLLVTVSLLFSHVDHVIAETEMEGEGNETGECTGSYYCKKGVILPIWEPQDPSFGDKIARATVYFVAMVY

SEQ ID NO: 57681 - protein, 301 aa, Homo sapiens
MVAEVCSMPAASAVKKPFDLRSKMGKWCHHRFPCCRGSGTSNVGTSGDHDDSFMKTLRSKMGKWCCHCFPCCRGSGKSNVGTWGDYDDSAFMEPRYHVRREDLDKLHRAAWWGKVPRKDLIVMLRDTDMNKRDKQKRTALHLASANGNSEVVQLLLDRRCQLNVLDNKKRTALIKAVQCQEDECVLMLLEHGADGNIQDEYGNTALHYAIYNEDKLMAKALLLYGADIESKNKCGLTPLLLGVHEQKQEVVKFLIKKKANLNALDRYGRICELLSDYKEKQMLKISSENSNPENVSRTRNK

SEQ ID NO: 57682 - protein, 72 aa, Homo sapiens
MKQYQGSGGVAMDVERSRFPYCVVWTPIPVLTWFFPIIGHMGICTSTGVIRDFAGPYFVSDRPGGQCGQKDS

SEQ ID NO: 57683 - protein, 226 aa, Homo sapiens
MDIIVLLPKGHCTKIQELQMTTVLKQNVHVFGVEGNSDELDEPIKTVFADVAFVKKHNLMSLNSINWSRVLVQMAHHFFAYFQCTPSLDTHPLPLVEVVVPTGAAGNLAAGYIAQKIGLPIRLVVAVNRNDIIHRTVQQGDFSLSEAVKSTLASAMDIQVPYNMERVFWLLSGSDSQVTRALMEQFERTQSVNLPKELHSKHSPVLPRPCLCSQVPGSCPGCWPDP

SEQ ID NO: 57684 - protein, 65 aa, Homo sapiens
MTPEFDEEVVFENSPLYQYLQDLGHTDFEICSSLSPKTEKCTTEGQQKPPTRVLPKGSLNAICLH

SEQ ID NO: 57685 - protein, 84 aa, Homo sapiens
MRSGKASCTLETVWEDKHKYEEAERRFYEHEATQAAASAQQLPAEGPAMNGPGQDDPEDADEAEAPDGGSRRDPRKSQDSRKPL

SEQ ID NO: 57686 - protein, 173 aa, Homo sapiens
MSQERPTFYRQELNKTIWEVPERYQNLSPVGSGAYGSVCAAFDTKTGLRVAVKKLSRPFQSIIHAKRTYRELRLLKHMKHENVIGLLDVFTPARSLEEFNDVYLVTHLMGADLNNIVKCQKLTDDHVQFLIYQILRGLKYIHSADIIHRDLKPSNLAVNEDCELKFVCSSSAL

SEQ ID NO: 57687 - protein, 74 aa, Homo sapiens
MEADASVDMFSKVLEHQLLQTTKLVEEHLDSEIQKLDQMDEDELERLKEKRLQALRKAQQQKQVTSLPCFLKLL

SEQ ID NO: 57688 - protein, 57 aa, Homo sapiens
MSLKNEPRVNTSALQKIAADMSNIIENLDTRELHFEGEEVDYDVSPSDPKIQEGTKY

SEQ ID NO: 57689 - protein, 98 aa, Homo sapiens
MRKHSCRKVASLRRTMAELGEADEAELQRLVAAEQQKAQFTAQVHHFMELCWDKCVEKPGNRLDSRTENCLSSCVDRFIDTTLAITSRFAQIVQKGGQ

SEQ ID NO: 57690 - protein, 118 aa, Homo sapiens
MTPQSLLQTTLFLLSLLFLVQASASSGAHGRGHREDFRFCSQRNQTHRSSLHYKPTPDLRISIENSEEALTVHAPFPAAHPASRSFPDPRGLYHFCLYWNRHAGRLHLLYGKRDFLLS

SEQ ID NO: 57691 - protein, 121 aa, Homo sapiens
MTHLEAQNRIKGCHDHLTLSVSRPEGRSWPSAPDDSKAQAHRIHIDPEIQDGSPTTSRRPSGTGTGPEDGRPSLGSPYGQPPRFPVPHNGSSEATLPAQMSTLHVSPPPSADPARGLPRSR

SEQ ID NO: 57692 - protein, 124 aa, Homo sapiens
MATVAELKADDDREPRPSLSHENLLINELIREYLEFNKYKYTASVLIAESGQPVVPLDRQFLIHELNAFEESKDNTIPLLYGILAHFLRGTKDGIQNAFLKGPSLQPSDPSLGRQPSRRKPMGM

SEQ ID NO: 57693 - protein, 238 aa, Homo sapiens
MGRGARVPSEAPGAGVERRWLGAALVALCLLPALVLLARLGAPAVPAWSAAQGDVAALGLSAVPPTRVPGPLAPRRRRYTLTPARLRWDHFNLTYRILSFPRNLLSPRETRRALAAAFRMWSDVSPFSFREVAPEQPSDLRIGFYPINHTDCLVSALHHCFDGPTGELAHAFFPPHGGIHFDDSEYWVLGPTRYSWKKGDRPGWPPGGLSSAAQWAAAVGLWGRRQEGPSGVVAATGV

SEQ ID NO: 57694 - protein, 41 aa, Homo sapiens
MSEVSCKKRDDYLEWPEYFMAVAFLSAQRSKDPNSQCAMRS

SEQ ID NO: 57695 - protein, 420 aa, Homo sapiens
MPCPELACPREEWRLGPGQCCFTCQEPTPSTGCSLDDNGVEFPIGQIWSPGDPCELCICQADGSVSCKRTDCVDSCPHPIRIPGQCCPDCSAGCTYTGRIFYNNETFPSVLDPCLSCICLLGSVACSPVDCPITCTYPFHPDGECCPVCRDCNYEGRKVANGQVFTLDDEPCTRCTCQLGEVSCEKVPCQRACADPALLPGDCCSSCPDSLSPLEEKQGLSPHGNVAFSKAGRSLHGDTEAPVNCSSCPGPPTASPSRPVLHLLQLLLRTNLMKTQTLPTSPAGAHGPHSLALGLTATFPGEPGASPRLSPGPSTPPGAPTLPLASPGAPQPPPVTPERSFSASGAQIVSRWPPLPGTLLTEASALSMMDPSPSKTPITLLGPRVLSPTTSRLSTALAATTHPGPQQPPVGASRGEESTM

SEQ ID NO: 57696 - protein, 37 aa, Homo sapiens
MVACRAIGILSRFSAFRILRSRGEVIYAAILQGLLLC

SEQ ID NO: 57697 - protein, 56 aa, Homo sapiens
MGDKKSPTRPKRQPKPSSDEGYWDCSVCTFRNSAEAFKCMMCDVRKGTSTRTSKLL

SEQ ID NO: 57698 - protein, 99 aa, Homo sapiens
MALWRAYQRALAAHPWKVQVLTAAAGGEAGSAGTPERPDSDHGVPGLWLCGPCGRRLVQGFGSVHPWHHQSGCTEEDVVGSGGLCPVFSRLLSPTGRGT

SEQ ID NO: 57699 - protein, 46 aa, Homo sapiens
  MOD_RES (1)..(1): Any amino acid
XINDIAFKPDGTQLILAAGSRLLASALLLDQLTKALLSGHQNWKAF

SEQ ID NO: 57700 - protein, 69 aa, Homo sapiens
NCEVLCLIDQFRCANGQCIGKHKKCDHNVDCSDKSDELDCYFEPSTIPSHRAITLHYGIWIFFKQSFHS

SEQ ID NO: 57701 - protein, 48 aa, Homo sapiens
MLDMAPLLQENSRLGCQIVLTPELEGAEFTLPKITRNFYVDGHVPKPH

SEQ ID NO: 57702 - protein, 271 aa, Homo sapiens
MWLLVSVILISRISSVGGEATFCDFPKINHGILYDEEKYKPFSQVPTGEVFYYSCEYNFVSPSKSFWTRITCTEEGWSPTPKCLRLCFFPFVENGHSESSGQTHLEGDTVQIICNTGYRLQNNENNISCVERGWSTPPKCRSTDSTGKCGPPPPIDNGDITSFPLSVYAPASSVEYQCQNLYQLEGNKRITCRNGQWSEPPKCLHPCVISREIMENYNIALRWTAKQKLYLRTGESAEFVCKRGYRLSSRSHTLRTTCWDGKLEYPTCAKR

SEQ ID NO: 57703 - protein, 288 aa, Homo sapiens
MAAAAAEEGMEPRALQYEQTLMYGRYTQDLGAFAKEEAARIRLGGPEPWKGPPSSRAAPELLEYGRSRCARCRVCSVRCHKFLVSRVGEDWIFLVLLGLLMALVSWVMDYAIAACLQAQQWMSRGLNTSILLQYLAWVTYPVVLITFSAGFTQILAPQAVGSGIPEMKTILRGVVLKEYLTLKTFIAKVIGLTCALGSGMPLGKEASSSASRSPPPSLQCGTTGGASSLPPSVPSSSGSWQSGTGMKRLLQPSSKPDSGSTSPLTCRSCQPLLSLVLLVASVEPSLST

SEQ ID NO: 57704 - protein, 62 aa, Homo sapiens
MAAATGAVAASAASGQAEGKKITDLRVIDLKSELKRRNLDITGVKTVLISRLKQVKNMKQMS

SEQ ID NO: 57705 - protein, 386 aa, Homo sapiens
GDAVKDLMLRFLGEKAAAKRQVLNADSVEQSFVGLKQLISCRNWRAAVDLCGRLLTAHGQGYGKSGLLTSHTTDSLQLWFVRLALLVKLGLFQNAEMEFEPFGNLDQPDLYYEYYPHVYPGRRGSMVPFSMRILHAELQQYLGNPQESLDRLHKVKTVCSKILANLEQGLAEDGGMSSVTQEGRQASIRLWRSRLGRVMYSMANCLLLMKDYVLAVEAYHSVIKYYPEQEPQLLSGIGRISLQIGDIKTAEKYFQDVEKVTQKLDGLQGKIMVLMNSAFLHLGQNNFAEAHRFFTEILRMDPRNAVANNNAAVCLLYLGKLKDSLRQLEAMVQQDPRHYLHESVLFNLTTMYELESSRSMQKKQALLEAVAGKEGDSFNTQCLKLA

SEQ ID NO: 57706 - protein, 333 aa, Homo sapiens
MCRGGRMFAPTKTWRRWHRRVNTTQKRYAICSALAASALPALVMSKGHRIEEVPELPLVVEDKVEGYKKTKEAVLLLKKLKAWNDIKKVYASQRMRAGKGKMRNRRRIQRRGPCIIYNEDNGIIKAFRNIPGITLLNVSKLNILKLAPGGHVGRFCIWTESAFRKLDELYGTWRKAASLKSNYNLPMHKMINTDLSRILKSPEIQRALRAPRKKIHRRVLKKNPLKNLRIMLKLNPYAKTMRRNTILRQARNHKLRVDKAAAAAAALQAKSDEKAAVAGKKPVVGKKGKKAAVGVKKQKKPLVGKKAAATKKPAPEKKPAEKKPTTEEKKPAA

SEQ ID NO: 57707 - protein, 333 aa, Homo sapiens
MGPLPAPSCTQRITWKGLLLTASLLNFWNPPTTAEVTIEAQPPKVSEGKDVLLLVHNLPQNLPGYFWYKGEMTDLYHYIISYIVDGKIIIYGPAYSGRETVYSNASLLIQNVTRKDAGTYTLHIIKRGDETREEIRHFTFTLYLETPKPYISSSNLNPREAMEAVRLICDPETLDASYLWWMNGQSLPVTHRLQLSKTNRTLYLFGVTKYIAGPYECEIRNPVSASRSDPVTLNLLHGPDLPRIYPSFTYYRSGENLDLSCFTESNPPAEYFWTINGKFQQSGQKLFIPQITRNHSGLYACSVHNSATGKEISKSMTVKVSGPCHGDLTESQS

SEQ ID NO: 57708 - protein, 529 aa, Homo sapiens
  MOD_RES (1)..(1): Any amino acid
XPPPESPHKRNLYYFSYPLFVGFALLRLVAFHLGLLFVWLCQRFSRALMAAKRSSGAAPAPASASAPAPVPGGEAERVRVFHKQAFEYISIALRIDEDEKAGQKEQAVEWYKKGIEELEKGIAVIVTGQGEQCERARRLQAKMMTNLVMAKDRLQLLEKMQPVLPFSKSQTDVYNDSTNLACRNGHLQSESGAVPKRKDPLTHTSNSLPRSKTVMKTGSAGLSGHHRAPSYSGLSMVSGVKQGSGPAPTTHKGTPKTNRTNKPSTPTTATRKKKDLKNFRNVDSNLANLIMNEIVDNGTAVKFDDIAGQDLAKQALQEIVILPSLRPEVGEGEKLVRALFAVARELQPSIIFIDEVDSLLCERREGEHDASRRLKTEFLIEFDGVQSAGDDRVLVMGATNRPQELDEAVLRRFIKRVYVSLPNEETRLLLLKNLLCKQGSPLTQKELAQLARMTDGYSGSDLTALAKDAALGPIRELKPEQVKNMSASEMRNIRLSDFTESLKKIKRSVSPQTLEAYIRWNKDFGDTTV

SEQ ID NO: 57709 - protein, 225 aa, Homo sapiens
MQDAMGYELPWVYFVSLVIFGSFFVLNLVLGVLSGEFSKEREKAKARGDFQKLREKQQLEEDLKGYLDWITQAEDIDPENEDEGMDEEKPRNMSMPTSETESVNTENVAGGDIEGENCGARLAKGSRSAVEPAVLLPWGVTTVNSPWPLEELQTEALSQTSPSHRISKSKFSRYWRRWNRFCRRKCRAAVKSNVFYWLVIFLVFLNTLTIASEHYNQPNWLTEVQ

SEQ ID NO: 57710 - protein, 112 aa, Homo sapiens
MNRKWEAKLKQIEERASHYERKPLSSVYRPRLSKPEEPPSIWRLFHRQAQAFNFVKSCKEDVHVFALECKVGDGQRIYLVTTYAEFWFYYKSSMCVKHFKSYTVLIAQLKMF

SEQ ID NO: 57711 - protein, 295 aa, Homo sapiens
MEDGFLDDGRGDQPLHSGLGSPHCFSHQNGERVERYSRKVFVGGLPPDIDEDEITASFRRFGPLIVDWPHKAESKSYFPPKGYAFLLFQDESSVQALIDACIEEDGKLYLCVSSPTIKDKPVQIRPWNLSDSDFVMDGSQPLDPRKTIFVGGVPRPLRAVELAMIMDRLYGGVCYAGIDTDPELKYPKGAGRVAFSNQQSYIAAISARFVQLQHGEIDKRVEVKPYVLDDQLCDECQGARCGGKFAPFFCANVTCLQYYCEYCWAAIHSRAGREFHKPLVKEGGDRPRHISFRWN

SEQ ID NO: 57712 - protein, 154 aa, Homo sapiens
MGGHPQLRLVKALLLLGLNPVSASLQDQHCESLSLASNISEKKQGALPCRSHHQLPGPLYLPGGPPGGLCPLSAAQEHPVPAKHHPLEPHLRLHPAQRHLVRGPANHEPRGPPEQRGLVQVGDSRLQLLPCDQLLLDVRRGLLPAHSHRAHLLH

SEQ ID NO: 57713 - protein, 574 aa, Homo sapiens
MFPYFIMLIFCGIPLFFMELSFGQFASQGCLGVWRISPMFKGVGYGMMVVSTYIGIYYNVVICIAFYYFFSSMTHVLPWAYCNNPWNTHDCAGVLDASNLTNGSRPAALPSNLSHLLNHSLQRTSPSEEYWRLYVLKLSDDIGNFGEVRLPLLGCLGVSWLVVFLCLIRGVKSSGKVVYFTATFPYVVLTILFVRGVTLEGAFDGIMYYLTPQWDKILEAKVWGDAASQIFYSLGCAWGGLITMASYNKFHNNCYRDSVIISITNCATSVYAGFVIFSILGFMANHLGVDVSRVADHGPGLAFVAYPEALTLLPISPLWSLLFFFMLILLGLGTQFCLLETLVTAIVDEVGNEWILQKKTYVTLGVAVAGFLLGIPLTSQAGIYWLLLMDNYAASFSLVVISCIMCVAIMYIYGHRNYFQDIQMMLGFPPPLFFQICWRFVSPAIIFLQAQVHRRLPQNPLHFASLPERNVLLHQLPQRGGVPEHDPPTPPSPARTYGPQVRVREVPRARRQRSPNPAPLWAPPSPKPHPCSAAGPLGWDCPFRNCQSLALSSARLLADSDAGGPETRQWEPGP

SEQ ID NO: 57714 - protein, 145 aa, Homo sapiens
  MOD_RES (1)..(1): Any amino acid
XGHCPNPGISLGAVRTGFRFGHGDKVRYRCSSNLVLTGSSERECQGNGVWSGTEPICRQPYSYDFPEDVAPALGTSFSHMLGATNPTQKTKDHENGTGTNTYAALNSVYLMMNNQMRLLGMETMAWQEIRHAIILLTDGKSNMGG

SEQ ID NO: 57715 - protein, 438 aa, Homo sapiens
MAPSRDRLLHFGFKATMFSNSDEAVINKKLPKELLLRIFSFLDVVTLCRCAQVSRAWNVLALDGSNWQRIDLFDFQRDIEGRVVENISKRCGGFLRKLSLRGCLGVGDNALRTFAQNCRNIEVLNLNGCTKTTDATCTSLSKFCSKLRHLDLASCTSITNMSLKALSEGCPLLEQLNISWCDQVTKDGIQALVRGCGGLKALFLKGCTQLEDEALKYIGAHCPELVTLNLQTCLQITDEGLITICRGCHKLQSLCASGCSNITDAILNALGQNCPRLRILEVARCSQLTDVGFTTLARNCHELEKMDLEECVQITDSTLIQLSIHCPRLQVLSLSHCELITDDGIRHLGNGACAHDQLEVIELDNCPLITDASLEHLKSCHSLERIELYDCQQITRAGIKRLRTHLPNIKVHAYFAPVTPPPSVGGSRQRFCRCCIIL

SEQ ID NO: 57716 - protein, 88 aa, Homo sapiens
MATRGGAGVAMAVWSLLSARAVTAFLLLFLPRFLQAQTFSFPFQQPEKCDNNQYFDISALSCVPCGANQRQDARERCYRRWLELHFLP

SEQ ID NO: 57717 - protein, 50 aa, Homo sapiens
MAEISDLDRQIEQLRRCELIKESEVKALCAKARCAATSMDNSMTSKSCSE

SEQ ID NO: 57718 - protein, 114 aa, Homo sapiens
MNRFRVSKFRHTEARPPRRESWISDIRAGTAPSCRNHIKSSCSLIAFNSDRPGVLGIVPLQGQGEDKRRVAHLGCHSELAAHGDLVQSAVWSRDGALVGTACKTESQSVSQAGV

SEQ ID NO: 57719 - protein, 22 aa, Homo sapiens
MPKFKQRRRKLKAKAERLFKKK

SEQ ID NO: 57720 - protein, 764 aa, Homo sapiens
MRPADLLQLVLLLDLPRDLGGMGCSSPPCECHQEEDFRVTCKDIQRIPSLPPSTQTLKLIETHLRTIPSHAFSNLPNISRIYVSIDVTLQQLESHSFYNLSKVTHIEIRNTRNLTYIDPDALKELPLLKFLGIFNTGLKMFPDLTKVYSTDIFFILEITDNPYMTSIPVNAFQGLCNETLTLKLYNNGFTSVQGYAFNGTKLDAVYLNKNKYLTVIDKDAFGGVYSGPSLLDVSQTSVTALPSKGLEHLKELIARNTWTLKKLPLSLSFLHLTRADLSYPSHCCAFKNQKKIRGILESLMCNESSMQSLRQRKSVNALNSPLHQEYEENLGDSIVGYKEKSKFQDTHNNAHYYVFFEEQEDEIIGFGQELKNPQEETLQAFDSHYDYTICGDSEDMVCTPKSDEFNPCEDIMGYKFLRIVVWFVSLLALLGNVFVLLILLTSHYKLNVPRFLMCNLAFADFCMGMYLLLIASVDLYTHSEYYNHAIDWQTGPGCNTAGFFTVFASELSVYTLTVITLERWYAITFAMRLDRKIRLRHACAIMVGGWVCCFLLALLPLVGISSYAKVSICLPMDTETPLALAYIVFVLTLNIVAFVIVCCCYVKIYITVRNPQYNPGDKDTKIAKRMAVLIFTDFICMAPISFYALSAILNKPLITVSNSKILLVLFYPLNSCANPFLYAIFTKAFQRDVFILLSKFGICKRQAQAYRGQRVPPKNSTDIQVQKVTHEMRQGLHNMEDVYELIENSHLTPKKQGQISEEYMQTVL

SEQ ID NO: 57721 - protein, 57 aa, Homo sapiens
MPVFHTRTIESILEPVAQQISHLVIMHEEGEVDGKAIPDLTAPVAAVQAAVSNLVRG

SEQ ID NO: 57722 - protein, 397 aa, Homo sapiens
MFKFHQMKHIFEILDKMRCLRKRSTVSFLGVLVIFLLFMNLYIEDSYVLEGDKQLIRETSTHQLNSERYVHTFKDLSNFSGAINVTYRYLAATPLQRKRYLTIGLSSVKRKKGNYLLETIKSIFEQSSYEELKEISVVVHLADFNSSWRDAMVQDITQKFAHHIIAGRLMVIHAPEEYYPILDGLKRNYNDPEDRVKFRSKQNVDYAFLLNFCANTSDYYVMLEDDVRCSKNFLTAIKKVIASLEGTYWVTLEFSKLGYIGKLYHSHDLPRLAHFLLMFYQEMPCDWLLTHFRGLLAQKNVIRFKPSLFQHMGYYSSYKGTENKLKDDDFEEESFDIPDNPPASLYTNMNVFENYEASKAYSSVDEYFWGKPPSTGDVFVIVFENPIIIKKIKVNTG

SEQ ID NO: 57723 - protein, 262 aa, Homo sapiens
MRPGTALQAVLLAVLLVGLRAATGRLLSGQPVCRGGTQRPCYKVIYFHDTSRRLNFEEAKEACRRDGGQLVSIESEDEQKLIEKFIENLLPSDGDFWIGLRRREEKQSNSTACQDLYAWTDGSISQFRNWYVDEPSCGSEVCVVMYHQPSAPAGIGGPYMFQWNDDRCNMKNNFICKYSDEKPAVPSREAEGEETELTTPVLPEETQEEDAKKTFKESREAALNLAYILIPSIPLLLLLVVTTVVCWVWICRKRQKTGAARP

SEQ ID NO: 57724 - protein, 244 aa, Homo sapiens
GRGGFGGGRGRGGGFRGNQSGKNVMVEPHRHEGVFICRGKEDALVTKNLVPGESVYGEKRVSISEGDDKIEYRAWNPFRSKLAAAILGGVDQIHIKPGAKVLYLGAASGTTVSHVSDIVGPDGLVYAVEFSHRSGRDLINLAKKRTNIIPVIEDARHPHKYRMLIAMVDVIFADVAQPDQTRIVALNAHTFLRNGGHFVISIKANCIDSTASAEAVFASEVKKMQQENMKPQEQLTLEPYERDH

SEQ ID NO: 57725 - protein, 93 aa, Homo sapiens
MVHVARLLLLLLTFFLRTDAETPPRFTRTPVDQTGVSGGVASFICQATGDPRPKIVWNKKGKKVSNQRFEVIEFDDGSGSVLRIQPLRTPRDE

SEQ ID NO: 57726 - protein, 175 aa, Homo sapiens
MEERGDSEPTPGCSGLGPGGVRGFGDGGGAPSWAPEDAWMGTHPKYLEMMELDIGDATQVYVAFLVYLDLMESKSWHEVNCVGLPELQLICLVGTEIEGEGLQTVVPTPITASLSHNRIREILKASRKLQGDPDLPMSFTLAIVESDSTIVYYKLTDGFMLPDPQVSFENISLRR

SEQ ID NO: 57727 - protein, 16 aa, Homo sapiens
  MOD_RES (1)..(1): Any amino acid
XQETQYFGPGTRLLVL

SEQ ID NO: 57728 - protein, 52 aa, Homo sapiens
MMRVCWLVRQDSRHQRIRLPHLEAVVIGRGPETKITDKKCSRQQGRSQSHQH

SEQ ID NO: 57729 - protein, 77 aa, Homo sapiens
MQPGLSPGSPGDPRPPTPETDYPESLTSYPEEDYSPVGSFVGEAGGPPREAILLQSRGLLCSMGAAPGPCPCPSKHP

SEQ ID NO: 57730 - protein, 230 aa, Homo sapiens
MGGLWRPGWRCVPFCGWRWIHPGSPTRAAERVEPFLRPEWSGTGGAERGLRWLGTWKRCSLRARHPALQPPRRPKSSNPFTRAQEEERRRQNKTTLTYVAAVAVGMLGASYAAVPLYRLYCQTTGLGGSAVAGHASDKIENMVPVKDRIIKISFNADVHASLQWNFRPQQTEIYVVPGETALAFYRAKNPTDKPVIGISTYNIVPFEAGQYFNKIQVHQSVNFTEYDKDT

SEQ ID NO: 57731 - protein, 50 aa, Homo sapiens
MVSQEGSEVELLVSPGARSEHGRYLQDPIVSIDLSEWLRIIEFLLQGLKV

SEQ ID NO: 57732 - protein, 110 aa, Homo sapiens
MESEDTKKTQEMKTDLNLLLECLKYQMDNAFSQKEALVTIHSICQQNSNASVYFREIGGLMFVKNLAKSSEHSMVKEAALYTLGAIAEKNVYCQQTLCTSELFEDLTWFL

SEQ ID NO: 57733 - protein, 159 aa, Homo sapiens
MPPASGPSVLARLLPLLGLLLGSASRAPGKSPPEPPSPQEILIKVQVYVSGELVPLARASVDVFGNRTLLAAGTTDSEGVATLPLSYRLGTWVLVTAARPGFLTNSVPWRVDKLPLYASVSLYLLPERPATLILYEDLVHILLGSPGCARHCGWCWEPR

SEQ ID NO: 57734 - protein, 534 aa, Homo sapiens
MMEALGFLKLEVNGPMVTVALSVALLALLKWYSTSAFSRLEKLGLRHPKPSPFIGNLTFFRQGFWESQMELRKLYGPLCGYYLGRRMFIVISEPDMIKQVLVENFSNFTNRMASGLEFKSVADSVLFLRDKRWEEVRGALMSAFSPEKLNEMVPLISQACDLLLAHLKRYAESGDAFDIQRCYCNYTTDVVASVAFGTPVDSWQAPEDPFVKHCKRFFEFCIPRPILVLLLSFPSIMVPLARILPNKNRDELNGFFNKLIRNVIALRDQQAAEERRRDFLQMVLDARHSASPMGVQDFDIVRDVFSSTGCKPNPSRQHQPSPMARPLTVDEIVGQAFIFLIAGYEIITNTLSFATYLLATNPDCQEKLLREVDVFKEKHMAPEFCSLEEGLPYLDMVIAETLRMYPPAFRFTREAAQDCEVLGQRIPAGAVLEMAVGALHHDPEHWPSPETFNPERFTAEARQQHRPFTYLPFGAGPRSCLGVRLGLLEVKLTLLHVLHKFRFQACPETQVPLQLESKSALGPKNGVYIKIVSR

SEQ ID NO: 57735 - protein, 574 aa, Homo sapiens
MAPIGLKAVVGEKIMHDVIKKVKKKGEWKVLVVDQLSMRMLSSCCKMTDIMTEGITIVEDINKRREPLPSLEAVYLITPSEKSVHSLISDFKDPPTAKYRAAHVFFTDSCPDALFNELVKSRAAKVIKTLTEINIAFLPYESQVYSLDSADSFQSFYSPHKAQMKNPILERLAEQIATLCATLKEYPAVRYRGEYKDNALLAQLIQDKLDAYKADDPTMGEGPDKARSQLLILDRGFDPSSPVLHELTFQAMSYDLLPIENDVYKYETSGIGEARVKEVLLDEDDDLWIALRHKHIAEVSQEVTRSLKDFSSSKRMNTGEKTTMRDLSQMLKKMPQYQKELSKYSTHLHLAEDCMKHYQGTVDKLCRVEQDLAMGTDAEGEKIKDPMRAIVPILLDANVSTYDKIRIILLYIFLKNGITEENLNKLIQHAQIPPEDSEIITNMAHLGVPIVTDSTLRRRSKPERKERISEQTYQLSRWTPIIKDIMEDTIEDKLDTKHYPYISTRSSASFSTTAVSARYGHWHKNKAPGEYRSGPRLIIFILGGVSLNEMRCAYEVTQANGKWEVLIVPVEAGS

SEQ ID NO: 57736 - protein, 275 aa, Homo sapiens
MASTGSQASDIDEIFGFFNDGEPPTKKPRKLLPSLKTKKPRELVLVIGTGISAAVAPQVPALKSWKGLIQALLDAAIDFDLLEDEESKKFQKCLHEDKNLVHVAHDLIQKLSPVLEWAQEKRKLSVLHIHGVYTNPSGIVLHPAGYQNVLRNTEVMREIQKLYENKSFLFLGCGWTVDDTTFQALFLEAVKHKSDLEHFMLVRRGDVDEFKKLRENMLDKGIKVISYGDDYADLPEYFKRLTCEISTRGTSAGMVREGQLNGSSAAHSEIRGCST

SEQ ID NO: 57737 - protein, 118 aa, Homo sapiens
MYCQDSNICAVFAVQGGKVGRKHGIKRGRRPSIRSPAQRARGPWIHESKHPAFAKQQINLEMPNSRATTELAWVCRSLTLSTAPLSPPPSLVHCEDCSCLPGCHSGDLYNLAPAERTC

SEQ ID NO: 57738 - protein, 76 aa, Homo sapiens
MIEARSSVKLHPMQNRRIHTGEKPHKCDDCGKAFTSHSHLVGHQRIHTGQKSCKCHQCGKVFSPRSLLAEHEKIHF

SEQ ID NO: 57739 - protein, 149 aa, Homo sapiens
GKATMQNLNDRLASYLEKVRALEEANMKLESRILKWHQQRDPGSKKDYSQYEENITHLQEQIVDGKMTNAQIILLIDNARMAVDDFNLKYENEHSFKKDLEIEVEGLRRTLDNLTIVTTDLEQEVEGMRKELILMKKHHEQVQLPRNTC

SEQ ID NO: 57740 - protein, 1393 aa, Homo sapiens
MAQPVHSLCSAFGLQCCLLFLLASWGAGATTFQEYQKTGELSTSDHIFPLTPGLVYSIPFDHIVLHSGQRPPELPKSTEIHEQKRHCNTTRHSKPTDKPTGNSKTIDHKSSTDNHEAPPTSEENSSNQGKDPMIRNQRSVDPADSTTTHKESAGKKHITPAPKSKINCRKSTTGKSTVTRKSDKTGRPLEKSMSTLDKTSTSSHKTTTSFHNSGNSQTKQKSTSFPEKITAASKTTYKTTGTPEESEKTEDSRTTVASDKLLTKTTKNIQETISANELTQSLAEPTEHGGRTANENNTPSPAEPTENRERTANENTTLSPAEPIENRERTANENTAPFPAGPTENREMTANENTTLFPAEPTEHGERTANENTTPSPAEPTEHGERTANENTTPSPAEPTEHGERTPFANDKTTSSSAESTEHGERTPLANENTTPSPAEPTENRERTANENTTPSPAGPTENRETTANEKTTLSPVEPTENRETTANEKTTPSPAEPTENGQRTPFANEKTTSSSAEPTEHGERTPLANENTTPSPAEPTENRERTANEKTTPSPAEPTENGDRTPLANEKTTPSLAEPTENGQRTPFANEKTTSSSAEPTEHEERTPLANENTTPSPAEPTENRERTANENTTPSPAGPTENREMTANEKTTLFPAEPTENRERTANEKTTSSPAEPTENGQRTPFANEKTTSSSAEPTEHGERTPLANENTTLSPAEPTENRERTANEKTTPFPAEPTENRERTANENTTPSPAQPTENGDRTPLANEKTTPSLAEPTENGKRTPFANEKTTSSSAEPTEHAERTPLANENTTSSPAEPTENRERTANEKTTQFPAEPTENRESTANEKTTPFPAEPTENREWTANENTTLSPAEPTEHEEMTPLANEKTTLSPAEPTENGERTPFTNEKTTPSSAEPTEHGERTPLANEITTPSRAEPTEHGERIANEKATPSPAKPTEHGETTVNEDTTPSSAEPTENGERTPLANENTTTSPTESTEHGERTANEKTTPSPAEPTEHGERTPSANEKTIPSPAKPTEHEEMTPSANENTTPSPVKPTEHGEKTTLANEKITLSPEGPTEHGAKTTSANEKITPSLAKPTEHGERTTSPNDKITSSAAESTEHRDRATSANVITPAPAEPIKHAKRTTLAHEKMTQVTEKSTEHPEKTTSTTEKTTRTPEKPTLYSEKTICTKGKNTPVPEKPTENLGNTTLTTETIKAPVKSTENPEKTAAVTKTIKPSVKVTGDKSLTTTSSHLNKTEVTHQVPTGSFTLITSRTKLSSITSEATGNESHPYLNKDGSQKGIHAGQMGENDSFPAWAIVIVVLVAVILLLVFLGLIFLVSYMMRTRRTLTQNTQYNDAEDEGGPNSYPVYLMEQQNLGMGQIPSPR

SEQ ID NO: 57741 - protein, 207 aa, Homo sapiens
MEWGKQWLVWLLLGHMVVSQMATLLARKRRWYKTENEYYLLQFTLTVRCLYYTSFSLELCWQQLPAASTSYSFPWMLAYVFYYPVLHNGPILSFSEFIKQMQQQEHDSLKASLCVLALGLGRLLCWWWLAELMAHLMYMHAIYSSIPLLETVSCWTLGGLALAQVLFFYVKYLVLFGVPALLMRLDGLTPPALPRCVSTMFSFTGMW

SEQ ID NO: 57742 - protein, 108 aa, Homo sapiens
MAATVEGPELEAAAAAGDASEDSDAGSRALPFLGGNRLSLDLYPGGCQQLLHLCVQQPLQLLQVEFLRLSTHEDPQLLEATLAQLPQSLSCLRSLVLKGSIWDLGPWL

SEQ ID NO: 57743 - protein, 346 aa, Homo sapiens
MENFQKVEKIGEGTYGVVYKARNKLTGEVVALKKIRLDTETEGVPSTAIREISLLKELNHPNIVKLLDVIHTENKLYLVFEFLHQDLKKFMDASALTGIPLPLIKSYLFQLLQGLAFCHSHRVLHRDLKPQNLLINTEGAIKLADFGLARAFGVPVRTYTHEVVTLWYRAPEILLGCKYYSTAVDIWSLGCIFAEMHLVGTQHHARCCGEHRRNGRQSLCPLCSYLEVAASQGWGMTAVSTPYPVTRRALFPGDSEIDQLFRIFRTLGTPDEVVWPGVTSMPDYKPSFPKWARQDFSKVVPPLDEDGRSLLSQMLHYDPNKRISAKAALAHPFFQDVTKPVPHLRL

SEQ ID NO: 57744 - protein, 236 aa, Homo sapiens
MRIPALNAYMKSLLSLPVWVLMDEDVRIFFYQSPYDSEQVPQALRRLRPRTRKVKSVSPQGNSVDRMAAPRAEALFDFTGNSKLELNFKAGDVIFLLSRINKDWLEGTVRGATGIFPLSFVKILKDFPEEDDPTNWLRCYYYEDTISTIKDIAVEEDLSSTPLLKDLLELTRREFQREDIALNYRDAEGDLVRLLSDEDVALMVRQARGLPSQKRLFPWKLHITQKDNYRVYNTMP

SEQ ID NO: 57745 - protein, 333 aa, Homo sapiens
MESKRLRLLQEEDRRKKIARMGFNASSMLRKSQLGFLNVTNYCHLAHELRLSCMERKKVQIRSMDPSALASDRFNLILADTNSDRLFTVNDVKVGGSKYGIINLQSLKTPTLKVFMHENLYFTNRKVNSVCWASLNHLDSHILLCLMGLAETPGCATLLPASLFVNSHPGIDRPGMLCSFRIPGAWSCAWSLNIQANNCFSTGLSRRVLLTNVVTGHRQSFGTNSDVLAQQFALMAPLLFNGCRSGEIFAIDLRCGNQGKGWKATRLFHDSAVTSVRILQDEQYLMASDMAGKIKLWDLRTTKCVRQYEGHVNEYAYLPLHVHEEEGILVAGT

SEQ ID NO: 57746 - protein, 258 aa, Homo sapiens
MRQSLLFLTSVVPFVLAPRPPDDPGFGPHQRLEKLDSLLSDYDILSLSNIQQHSVRKRDLQTSTHVETLLTFSALKRHFKLYLTSSTERFSQNFKVVVVDGKNESEYTVKWQDFFTGHVVGEPDSRVLAHIRDDDVIIRINTDGAEYNIEPLWRFVNDTKDKRMLVYKSEDIKNVSRLQSPKVCGYLKVDNEELLPKGLVDREPPEELVHRVKRRADPDPMKNTCKLLVVADHRFYRYMGRGEESTTTNYLIHTDRAN

SEQ ID NO: 57747 - protein, 172 aa, Homo sapiens
MIVFGWAVFLASRSLGQGLLLTLEEHIAHFLGTGGAATTMGNSCICRDDSGTDDSVDTQQQQAENSAVPTADTRSQPRDPVRPPRRGRGPHEPRRKKQNVDGLVLDTLAVIRTLVDKRKLQNEDAYIGPCFHKSSTGIVVSLPGISLSDQEPPYSMITLHEMAETDEGWLDV

SEQ ID NO: 57748 - protein, 126 aa, Homo sapiens
MEEEETQLEEKNSLRVEGDNIYVRHSNLMLEIDGGAGGDSGTLLTAQTITSESVSTTTTTHITKTVKGGISETRIEKRIVITGDGDIDHDQALAQAIREAREQHPDMSVTRVVVHKETELAEEGED

SEQ ID NO: 57749 - protein, 707 aa, Homo sapiens
MAESRGRLYLWMCLAAALASFLMGFMVGWFIKPLKETTTSVRYHQSIRWKLVSEMKAENIKSFLRSFTKLPHLAGTEQNFLLAKKIQTQWKKFGLDSAKLVHYDVLLSYPNETNANYISIVDEHETEIFKTSYLEPPPDGYENVTNIVPPYNAFSAQGMPEGDLVYVNYARTEDFFKLEREMGINCTGKIVIARYGKIFRGNKVKNAMLAGAIGIILYSDPADYFAPEVQPYPKGWNLPGTAAQRGNVLNLNGAGDPLTPGYPAKEYTFRLDVEEGVGIPRIPVHPIGYNDAEILLRKVRMHVYNINKITRIYNVVGTIRGSVEPDRYVILGGHRDSWVFGAIDPTSGVAVLQEIARSFGKLMSKGWRPRRTIIFASWDAEEFGLLGSTEWAEENVKILQERSIAYINSDSSIEGNYTLRVDCTPLLYQLVYKLTKEIPSPDDGFESKSLYESWLEKDPSPENKNLPRINKLGSGSDFEAYFQRLGIASGRARYTKNKKTDKYSSYPVYHTIYETFELVEKFYDPTFKKQLSVAQLRGALVYELVDSKIIPFNIQDYAEALKNYAASIYNLSKKHDQQLTDHGVSFDSLFSAVKNFSEAASDFHKRLIQVDLNNPIAVRMMNDQLMLLERAFIDPLGLPGKLFYRHIIFAPSSHNKYAGESFPGIYDAIFDIENKANSRLAWKEVKKHISIAAFTIQAAAGTLKEVL

SEQ ID NO: 57750 - protein, 93 aa, Homo sapiens
MRCSPGGVWLALAASLLHVSLQGEFQRKLYKELVKNYNPLERPVANDSQPLTVYFSLSLLQIMDVDEKNQVLTTNIWLQMITIYSGMCQNIQG

SEQ ID NO: 57751 - protein, 204 aa, Homo sapiens
MAAVFLVTLYEYSPLFYIAVVFTCFIVTTGLVLGWFGWDVPVILRNSEETQFSTRVFKKQMRQVKNPFGLEITNPSSASITIETVFHHVDQAGLKLLTSDDPPTSASQSAGITAGITLTTDCLEDSLLTCYWGCSVQKLYEALQKHVYCFRISTPQALEDALYSEYLYQEQYFIKKDSKEEIYCQLPRDTKIEDFGTVPRSRYP

SEQ ID NO: 57752 - protein, 52 aa, Homo sapiens
  MOD_RES (1)..(1): Any amino acid
XEIRHMFHVAWVDPEDPYKGYRYLYLTPQDYKRVSALNSVHCEHVEDEGESR

SEQ ID NO: 57753 - protein, 158 aa, Homo sapiens
MNAPPAFESFLLFEGEKITINKDTKVPNACLFTINKEDHTLGNIIKSQLLKDPQVLFAGYKVPHPLEHKIIIRVQTTPDYSPQEAFTNAITDLISELSLLEERFRVRAGPGGADGVGWTLARVPRPGTALACFFGGPQGEAAVMEEQGLPPQAPGHVD

SEQ ID NO: 57754 - protein, 1068 aa, Homo sapiens
MVPLVQNEQEALDLDGEPDLSSLEGFQWEGVSISSSPGLARKRSLSESSVIMDRAPSVYSFFSEEGTGKENEPQQMVSPSNSLRAGQSQKATMHLKQEVTPRAASLRTGERAENVATQRRHSAQLSSDHIIPLMHLAKDLNSQERSIPPSENQNSQESNGEGNCLSSSASSALAISSLADAATDSSCTSGAEQNDGQSIRKKRRATGDGSSPELPSLERKNKRRKIKGKKERSQVDQLLNISLREEELSKSLQCMDNNLLQARAALQTAYVEVQRLLMLKQQITMEMSALRTHRIQILQGLQETYEPSEHPDQVPCSLTRERRNSRSQTSIDAALLPTPFFPLFLEPPSSHVSPSPTGASLQITTSPTFQTHGSVPAPDSSVQIKQEPMSPEQDENVNAVPPSSACNVSKELLEANREISDSCPVYPVITARLSLPESTESFHEPSQELKFSVEQRNTRNRENSPSSQSAGLSSINKEGEEPTKGNSGSEACTSSFLRLSFASETPLEKEPHSPADQPEQQAESTLTSAETRGSKKKKKLRKKKSLRAAHVPENSDTEQDVLTVKPVRKVKAGKLIKGGKVTTSTWEDSRTGREQESVRDEPDSDSSLEVLEIPNPQLEVVAIDSSESGEEKPDSPSKKDIWNSTEQNPLETSRSGCDEVSSTSEIGTRYKDGIPVSVAETQTVISSIKGSKNSSEISSEPGDDDEPTEGSFEGHQAAVNAIQIFGNLLYTCSADKTVRVYNLVSRKCIGVFEGHTSKVNCLLVTQTSGKNAALYTGSSDHTIRCYNVKSRECVEQLQLEDRVLCLHSRWRILYAGLANGTVVTFNIKNNKRLEIFECHGPRAVSCLATAQEGARKLLVVGSYDCTISVRDARNGLLLRTLEGHSKTILCMKVVNDLVFSGSSDQSVHAHNIHTGELVRIYKGHNHAVTVVNILGKVMVTACLDKFVRVYELQSHDRLQVYGGHKDMIMCMTIHKSMIYTGCYDGSIQAVRLNLMQNYRCWWHGCSLIFGVVDHLKQHLLTDHTNPNFQTLKCRWKNCDAFFTARKGSKQDAAGHIERHAEDDSKIDS

SEQ ID NO: 57755 - protein, 237 aa, Homo sapiens
MLHCFGGGILSCLLLAEPPLKFLANHTNILLASSIWYITFFCPHDLVSQGYSYLPVQLLASGMKEVTRTWKIVGGVTHANSYYKNGWIVMIAIGWARGAGGTIITNFERLVKGDWKPEGDEWLKMSYPAKVTLLGSVIFTFQHTQHLAISKHNLMFLYTIFIVATKITMMTTQTSTMTFAPFEDTLSWMLFGWQQPFSSCEKKSEAKSPSNGVGSLASKPVDVASDNVKKKHTKKNE

SEQ ID NO: 57756 - protein, 49 aa, Homo sapiens
MDEDVLTTLKILIIGESGVGKSSLLLRFTDDTFDPELAATIGYCWSREV

SEQ ID NO: 57757 - protein, 719 aa, Homo sapiens
MSVRFRVGREENAQWWLLYLLVPALFCRAGGSIPIPQKLFGEVTSPLFPKPYPNNFETTTVITVPTGYRVKLVFQQFDLEPSEGCFYDYVKISADKKSLGRFCGQLGSPLGNPPGKKEFMSQGNKMLLTFHTDFSNEENGTIMFYKGFLAYYQAVDLDECASRSKSGEEDPQPQCQHLCHNYVGGYFCSCRPGYELQEDRHSCQAECSSELYTEASGYISSLEYPRSYPPDLRCNYSIRVERGLTLHLKFLEPFDIDDHQQVHCPYDQLQIYANGKNIGEFCGKQRPPDLDTSSNAVDLLFFTDESGDSRGWKLRYTTEIIKCPQPKTLDEFTIIQNLQPQYQFRDYFIATCKQGYQLIEGNQVLHSFTAVCQDDGTWHRAMPRCKIKDCGQPRNLPNGDFRYTTTMGVNTYKARIQYYCHEPYYKMQTRAGSRESEQGVYTCTAQGIWKNEQKGEKIPRCLPVCGKPVNPVEQRQRIIGGQKAKMGNFPWQVFTNIHGRGGGALLGDRWILTAAHTLYPKEHEAQSNASLDVFLGHTNVEELMKLGNHPIRRVSVHPDYRQDESYNFEGDIALLELENSVTLGPNLLPICLPDNDTFYDLGLMGYVSGFGVMEEKIAHDLRFVRLPVANPQACENWLRGKNRMDVFSQNMFCAGHPSLKQDACQGDSGGVFAVRDPNTDRWVATGIVSWGIGCSRGYGFYTKVLNYVDWIKKEMEEED

SEQ ID NO: 57758 - protein, 106 aa, Homo sapiens
MEARSMLVPPQASVCFEDVAMAFTQEEWEQLDLAQRTLYREVTLETWEHIVSLGLFLSKSDVISQLEQEEDLCRAEQEAPRGTSGLSQVTGVVADGSFRFPVWDFT

SEQ ID NO: 57759 - protein, 1429 aa, Homo sapiens
MLYINRENWCTIEPCPDAASLLASKQSPECENFLDVGLGRECTSKQGVLKRESGSDSDLFHSPSDDMDSIIFPKPEEEHLACDITGSSSSTDDTASLDRHSSHGSDVSLSQILKPNRSRDRQSLDGFYSHGMGAEGRESESEPADPGDVEEEEMDSITEVPANCSVLRSSMRSLSPFRRHSWGPGKNAASDAEMNHRSSMRVLGDVVRRPPIHRRSFSLEGLTGGAGVGNKPSSSLEVSSANAEELRHPFSGEERVDSLVSLSEEDLESDQREHRMFDQQICHRSKQQGFNYCTSAISSPLTKSISLMTISHPGLDNSRPFHSTFHNTSANLTESITEENYNFLPHSPSKKDSEWKSGTKVSRTFSYIKNKMSSSKKSKEKEKEKDKIKEKEKDSKDKEKDKKTVNGHTFSSIPVVGPISCSQCMKPFTNKDAYTCANCSAFVHKGCRESLASCAKVKMKQPKGSLQAHDTSSLPTVIMRNKPSQPKERPRSAVLLVDETATTPIFANRRSQQSVSLSKSVSIQNITGVGNDENMSNTWKFLSHSTDSLNKISKVNESTESLTDEGVGTDMNEGQLLGDFEIESKQLEAESWSRIIDSKFLKQQKKDVVKRQEVIYELMQTEFHHVRTLKIMSGVYSQGMMADLLFEQQMVEKLFPCLDELISIHSQFFQRILERKKESLVDKSEKNFLIKRIGDVLVNQFSGENAERLKKTYGKFCGQHNQSVNYFKDLYAKDKRFQAFVKKKMSSSVVRRLGIPECILLVTQRITKYPVLFQRILQCTKDNEVEQEDLAQSLSLVKDVIGAVDSKVASYEKKVRLNEIYTKTDSKSIMRMKSGQMFAKEDLKRKKLVRDGSVFLKNAAGRLKEVQAVLLTDILVFLQEKDQKYIFASLDQKSTVISLKKLIVREVAHEEKGLFLISMGMTDPEMVEVHASSKEERNSWIQIIQDTINTLNRDEDEGIPSENEEEKKMLDTRARELKEQLHQKDQKILLLLEEKEMIFRDMAECSTPLPEDCSPTHSPRVLFRSNTEEALKGGPLMKSAINEVEILQGLVSGNLGGTLGPTVSSPIEQDVVGPVSLPRRAETFGGFDSHQMNASKGGEKEEGDDGQDLRRTESDSGLKKGGNANLVFMLKRNSEQVVQSVVHLYELLSALQGVVLQQDSYIEDQKLVLSERALTRSLSRPSSLIEQEKQRSLEKQRQDLANLQKQQAQYLEEKRRREREWEARERELREREALLAQREEEVQQGQQDLEKEREELQQKKGTYQYDLERLRAAQKQLEREQEQLRREAERLSQRQTERDLCQVSHPHTKLMRIPSFFPSPEEPPSPSAPSIAKSGSLDSELSVSPKRNSISRTHKDKGPFHILSSTSQTNKGPEGQSQAPASTSASTRLFGLTKPKEKKEKKKKNKTSRSQPGDGPASEVSAEGEEIFC

SEQ ID NO: 57760 - protein, 387 aa, Homo sapiens
MGHPPVSPSAPAPAGTTAIPGLIPDLVAGTPWPRWALIAGALAAGVLLVSCLLCAACCCCRRHRKKPRDKESVGLGSARGTTTTHLVQPDVDGLESSPGDAQQWGCLQLSLEFDFGSQEIRVGLRQAADLRPGGTVDPYARVSVSTQAGHRHETKVHRGTLCPVFDETCCFHIPQAELPGATLQVQLFNFKRFSGHEPLGELRLPLGTVDLQHVLEHWYLLGPPAATQPEQVGELCFSLRYVPSSGRLTVVVLEARGLRPGLAEPYVKVQLMLNQRKWKKRKTATKKGTAAPYFNEAFTFLVPFSQVQNVDLVLAVWDRSLPLRTEPVGKVHLGARASGQPLQHWADMLAHARRPIAQRHPLRPAREVDRMLALQPRLRLRLPLPHS

SEQ ID NO: 57761 - protein, 481 aa, Homo sapiens
MRPADPLIKAIKDGDEEALKTMIKEGKNLAEPNKEGWLPLHEAAYYGQVGCLKVLQRAYPGTIDQRTLQEETAVYLATCRGHLDCLLSLLQAGAEPDISNKSRETPLYKACERKNAEAVKILVQHNADTNHRCNRGWTALHESVSRNDLEVMQILVSGGAKVESKNAYGITPLFVAAQSGQLEALRFLAKYGADINTQASDNASALYEACKNEHEEVVEFLLSQGADANKTNKDGLLPLHIASKKGNYRIVQMLLPVTSRTRIRRSGVSPLHLAAERNHDEVLEALLSARFDVNTPLAPERARLYEDRRSSALYFAVVNNNVYATELLLQHGADPNRDVISPLLVAIRHGCLRTMQLLLDHGANIDAYIATHPTAFPATIMFAMKCLSLLKFLMDLGCDGEPCFSCLYGNGPHPPAPQPSSRFNDAPAADKEPSVVQFCEFVSAPEVSRWAGPIIDVLLDYVGNVQLCSRLKEHIDSFEDW

SEQ ID NO: 57762 - protein, 103 aa, Homo sapiens
MAYQSLRLEYLQIPPVSRAYTTACVLTTAAVVSSCSATFSLSGLDMTGSSGNWGLGLGEAQRGWSRGWVEAYRDYSGVRVGAKNAYPVTREGSAASWGVSSWN

SEQ ID NO: 57763 - protein, 53 aa, Homo sapiens
MTDRFWDQWYLWYLRLLRLLDRVPSMLLQMTGFPFYRLSLHSVDCFPCCAEAF

SEQ ID NO: 57764 - protein, 94 aa, Homo sapiens
MRSIRSFANDDRHVMVKHSTIYPSPEELEAVQNMVSTVECALKHVSDWLDETNKGTKTEGETEVKKDEAGENYSKWSDIVWCNEDWPGCKRLAD

SEQ ID NO: 57765 - protein, 128 aa, Homo sapiens
MTVLEQDTQGLDGWWLCSLHGRQGIVPGNRLKILVGMYDKKPAGPGPGPPATPAQPQPGLHAPAPPASQYTPMLPNTYQPQPDSVYLVPTPSKAQQGLYQVPGPSPQFQSPPAKQTSTFSKQTPHHPF

SEQ ID NO: 57766 - protein, 142 aa, Homo sapiens
MESAITLWQFLLQLLLDQKHEHLICWTSNDGEFKLLKAEEVAKLWGLRKNKTNMNYDKLSRALRYYYDKTPNGLLLTPSPLLSSIHFWSSLSPVAPLSPARLQGPSTLFQFPTLLNGHMPVPIPSLDRAASPVLLSSNSQKS

SEQ ID NO: 57767 - protein, 253 aa, Homo sapiens
  MOD_RES (1)..(1): Any amino acid
XANEKLLTVFCGMLMNYSNENDSLQAQLINMGVIPTLVKLLGIHCQNAALTEMCLVAFGNLAELDAIKLQLVEAGLVECLLEIVQQKVDSDKEDDITELKTGSDLMVLLLLGDESMQKLFEGGKGSVFQRVLSWIPSNNHQLQLAGALAIANFARNDANCIHMVDNGIVEKLMDLLDRHVEDGNVTVQHAALSALRNLAIPVINKAKMLSAGVTEAVLKFLKSEMPPVQFKLLGTLRMLIDAQAEAAEQLGKN

SEQ ID NO: 57768 - protein, 178 aa, Homo sapiens
MSSGIHVALVTGGNKGIGLAIVRDLCRLFSGDVVLTARDVTRGQAAVQQLQAEGLSPRFHQLDIDDLQSIRALRDFLRKEYGGLDVLVNNAGIAFKVADPTPFHIQAEVTMKTNFFGTRDVCTELLPLIKPQGESDGKQRTFSLGLDLAPACLGFLLQAPASSPCCTCTDLCAFSPAS

SEQ ID NO: 57769 - protein, 99 aa, Homo sapiens
MVFPLPTPQEPIMATPPKRRAVEATGEKVLRYETFISDVLQRDLRKVLDHRDKVYEQLAKYLQLRNVIERLQPRYFTHLCGPGIWFFPGVDTGRSSQVH

SEQ ID NO: 57770 - protein, 1052 aa, Homo sapiens
MKSEDYPHETMAPDIHEERQYRCEDCDQLFESKAELADHQKFPCSTPHSAFSMVEEDFQQKLESENDLQEIHTIQECKECDQVFPDLQSLEKHMLSHTEEREYKCDQCPKAFNWKSNLIRHQMSHDSGKHYECENCAKQVFTDPSNLQRHIRSQHVGARAHACPECGKTFATSSGLKQHKHIHSSVKPFICEVCHKSYTQFSNLCRHKRMHADCRTQIKCKDCGQMFSTTSSLNKHRRFCEGKNHFAAGGFFGQGISLPGTPAMDKTSMVNMSHANPGLADYFGANRHPAGLTFPTAPGFSFSFPGLFPSGLYHRPPLIPASSPVKGLSSTEQTNKSQSPLMTHPQILPATQDILKALSKHPSVGDNKPVELQPERSSEERPFEKISDQSESSDLDDVSTPSGSDLETTSGSDLESDIESDKEKFKENGKMFKDKVSPLQNLASINNKKEYSNHSIFSPSLEEQTAVSGAVNDSIKAIASIAEKYFGSTGLVGLQDKKVGALPYPSMFPLPFFPAFSQSMYPFPDRDLRSLPLKMEPQSPGEVKKLQKGSSESPFDLTTKRKDEKPLTPVPSKPPVTPATSQDQPLDLSMGSRSRASGTKLTEPRKNHVFGGKKGSNVESRPASDGSLQHARPTPFFMDPIYRVEKRKLTDPLEALKEKYLRPSPGFLFHPQFQLPDQRTWMSAIENMAEKLESFSALKPEASELLQSVPSMFNFRAPPNALPENLLRKGKERYTCRYCGKIFPRSANLTRHLRTHTGEQPYRCKYCDRSFSISSNLQRHVRNIHNKEKPFKCHLCDRCFGQQTNLDRHLKKHENGNMSGTATSSPHSELESTGAILDDKEDAYFTEIRNFIGNSNHGSQSPRNVEERMNGSHFKDEKALVTSQNSDLLDDEEVEDEVLLDEEDEDNDITGKTGKEPVTSNLHEGNPEDDYEETSALEMSCKTSPVRYKEEEYKSGLSALDHIRHFTDSLKMRKMEDNQYSEAELSSFSTSHVPEELKQPLHRKSKSQAYAMMLSLSDKESLHSTSHSSSNVWHSMARAAAESSAIQSISHV

SEQ ID NO: 57771 - protein, 355 aa, Homo sapiens
MGKRRCVPPLEPKLAAGCCGVKKPKLSGSGTHSHGNQSTTVPGSSSGPLQNHQHVDSSSGRENVSDLTLGPGNSPITRMNPASGALSPLPRPNGTANTTKNLVVTAEMCCYCFDVLYCHLYGFPQPRLPRFTNDPYPLFVTWKTGRDKRLRGCIGTFSAMNLHSGLREYTLTSALKDSRFPPLTREELPKLFCSVSLLTNFEDASDYLDWEVGVHGIRIEFINEKGVKRTATYLPEVAKEQDNYTGVTSDRKDAGAGSLGTAIMACVGLSSHVSESPRDWQTDWAPDWDQIQTIDSLLRKGGFKAPITSEFRKTIKLTRYRSEKVTISYAEYIASRQHCFQNGTLHAPPLYNHYS

SEQ ID NO: 57772 - protein, 135 aa, Homo sapiens
MESGKTASPKSMPKDAQMMAQILKDMGITEYEPRVINQMLEFAFRYVTTILDDAKIYSSHAKKATVDADDVRLAIQCRADQSFTSPPPRDFLLDIARQRNQTPLPLIKPYSGPRLPPDRYCLTAPNYRLKSLQKK

SEQ ID NO: 57773 - protein, 441 aa, Homo sapiens
MLAPSWEEHATCLANAEEQDMQRVLIDISEKEAVNLQQDAFVVIGRDTRPSSEKLSQSVIDGVTVLGGQFHDYGLLTTPQLHYMVYCRNTGGRYGKATIEGYYQKLSKAFVELTKQASCSGDEYRSLKVDCANGIGALKLREMEHYFSQGLSVQLFNDGSKGKLNHLCGADFVKSHQKPPQGMEIKSNERCCSFDGDADRIVYYYHDADGHFHLIDGDKIATLISSFLKELLVEIGESLNIGVVQTAYANGSSTRYLEEVMKVPVYCTKTGVKHLHHKAQEFDIGVYFEANGHGTALFSTAVEMKIKQSAEQLEDKKRKAAKMLENIIDLFNQAAGDAISDMLVIEAILALKGLTVQQWDALYTDLPNRQLKVQVADRRVISTTDAERQAVTPPGLQEAINDLVKKYKLSRAFVRPSGTEDVVRVYAEADSQVRKCRSPCT

SEQ ID NO: 57774 - protein, 195 aa, Homo sapiens
QSLLHEMVHAEHETEHSYHVEETVSQDCNQDMEEMMSEQENPDSSEPVVEDERLHHDTDDVTYQVYEEQAVYEPLENEGIEITEVTAPPEDNPVEDSQVIVEEVSIFPVEEQQEVPPVKKKKPKLLNKFDKTIKAELDAAEKLRKRGKIEEAVNAFKELVRKYPQSPRARYGKAQCEDDLAEKRRSNEVLRGAIE

SEQ ID NO: 57775 - protein, 169 aa, Homo sapiens
CRMECCDVPAETLYDVLHDIEYRKKWDSNVIETFDIARLTVNADVGYYSWRCPKPLKNRDVITLRSWLPMGADYIIMNYSVKHPKYPPRKDLVRAVSIQTGYLIQSTGPKSCVITYLAQVDPKGSLPKWVVNKSSQFLAPKPWLHPEQSPLPSLALSELSVQHADSLEN

SEQ ID NO: 57776 - protein, 186 aa, Homo sapiens
MLNNLTDCEDGDGGANPGDGNPKESSPFINSTDTEKGKEYDGKNMALFEEEMDTSPMVSSLLSGLANYTNLPQGSREHEEAENNEGGKKKPVQAPRMGTFMGVYLPCLQNIFGVILFLRLTWVVGIAGIMESFCMVFICCSCTMLTAISMSAIATNGVVPAGGSYYMISRSLAMARPMESRPGPCS

SEQ ID NO: 57777 - protein, 131 aa, Homo sapiens
MGGCAGSRRRFSDSEGEETVPEPRLPLLDHQGAHWKNAVGFWLLGLCNNFSYVVMLSAAHDILSHKRTSGNQSHVDPGPTPIPHNSSSRFDCNSVSTAPPGSRQWDLCCWKLRPGCLFSFCGDQPVWCGLR

SEQ ID NO: 57778 - protein, 116 aa, Homo sapiens
MAPIPKTVGRIKLDCSLRPSCPLEVAAAPKLCKEFGPEDYGEEITSWATWMMKGNQLDRVTGARGLRDWAPTVVSASPSCILPKSLSPALKAPLPLPPSPVSQTACFRWPCPRSSW

SEQ ID NO: 57779 - protein, 744 aa, Homo sapiens
MGLGLLLPLLLLWTRGTQGSELDPKGQHVCVASSPSAELQCCAGWRQKDQECTIPICEGPDACQKDEVCVKPGLCRCKPGFFGAHCSSRCPGQYWGPDCRESCPCHPHGQCEPATGACQCQADRWGARCEFPCACGPHGRCDPATGVCHCEPGWWSSTCRRPCQCNTAAARCEQATGACVCKPGWWGRRCSFRCNCHGSPCEQDSGRCACRPGWWGPECQQQCECVRGRCSAASGECTCPPGFRGARCELPCPAGSHGVQCAHSCGRCKHNEPCSPDTGSCESCEPGWNGTQCQQPCLPGTFGESCEQQCPHCRHGEACEPDTGHCQPGSGSRDTALIAGSLVPLLLLFLGLACCACCCWAPRSDLKDRPARDGATVSRMKLQVWGTLTSLGSTLPCRSLSSHKLPWVTVSHHDPEVPFNHSFIEPPSAGWATDDSFSSDPESGEADEVPAYCVPPQEGMVPVAQAGSSEASLAAGAFPPPEDASTPFAIPRTSSLARAKRPSVSFAEGTKFAPQSRRSSGELSSPLRKPKRLSRGAQSGPEGREAEESTGPEEAEAPESFPAAASPGDSATGHRRPPLGGRTVAEHVEAIEGSVQESSGPVTTIYMLAGKPRGSEGPVRSVFRHFGSFQKGQAEAKVKRAIPKPPRQALNRKKGSPGLASGSVGQSPNSAPKAGLPGATGPMAVRPEEAVRGLGAGTESSRRAQEPVSGCGSPEQDPQKQAEEERQEEPEYENVVPISRPPEP

SEQ ID NO: 57780 - protein, 239 aa, Homo sapiens
MSYDHVELTFNDMKNVPEAFKGTKKGTVYLTPYRVIFLSKGKDAMQSFMMPFYLMKDCEIKQPVFGANYIKGTVKAEAGGGWEGSASYKLTFTAGGAIEFGQRMLQVASQASRGEVPSGAYGYSYMPSGAYVYPPPVANGMYPCPPGYPYPPPPPEFYPGPPMMDGAMGYVQPPPPPYPGPMEPPVSGPDVPSTPAAEAKAAEAAASAYYNPGNPHNVYMPTSQPPPPPYYPPEDKKTQ

SEQ ID NO: 57781 - protein, 458 aa, Homo sapiens
MSVDCLGQHAVLSGRRFLYIVNLDAPFEGHRKISRQSKWDIGAVQWNPHDSFAHYFAASSNQRVDLYKWKDGSGEVGTTLQGHTRVISDLDWAVFEPDLLVTSSVDTYIYIWDIKDTRKPTVALSAVAGASQVKWNKKNANCLATSHDGDVRIWDKRKPSTAVEYLAAHLSKIHGLDWHPDSEHILATSSQDNSVKFWDYRQPRKYLNILPCQVPVWKARYTPFSNGLVTVMVPQLRRENSLLLWNVFDLNTPVHTFVGHDDVVLEFQWRKQKEGSKDYQLVTWSRDQTLRMWRVDSQMQRLCANDILDGVDEFIESISLLPEPEKTLHTEDTDHQHTASHGEEEALKEDPPRNLLEERKSDQLGLPQTLQQEFSLINVQIRNVNVEMDAADRSCTVSVHCSNHRVKMLVKFPAQYPNNAAPSFQFINPTTITSTMKAKLLKVGVWVPKFSLLFCIIV

SEQ ID NO: 57782 - protein, 761 aa, Homo sapiens
MDELQLFRGDTVLLKGKKRREAVCIVLSDDTCSDEKIRMNRVVRNNLRVRLGDVISIQPCPDVKYGKRIHVLPIDDTVEGITGNLFEVYLKPYFLEAYRPIRKGDIFLVRGGMRAVEFKVVETDPSPYCIVAPDTVIHCEGEPIKREDEEESLNEVGYDDIGGCRKQLAQIKEMVELPLRHPALFKAIGVKPPRGILLYGPPGTGKTLIARAVANETGAFFFLINGPEIMSKLAGESESNLRKAFEEAEKNAPAIIFIDELDAIAPKREKTHGEVERRIVSQLLTLMDGLKQRAHVIVMAATNRPNSIDPALRRFGRFDREVDIGIPDATGRLEILQIHTKNMKLADDVDLEQVANETHGHVGADLAALCSEAALQAIRKKMDLIDLEDETIDAEVMNSLAVTMDDFRWALSQSNPSALRETVVEVPQVTWEDIGGLEDVKRELQELVQYPVEHPDKFLKFGMTPSKGVLFYGPPGCGKTLLAKAIANECQANFISIKGPELLTMWFGESEANVREIFDKARQAAPCVLFFDELDSIAKARGGNIGDGGGAADRVINQILTEMDGMSTKKNVFIIGATNRPDIIDPAILRPGRLDQLIYIPLPDEKSRVAILKANLRKSPVAKDVDLEFLAKMTNGFSGADLTEICQRACKLAIRESIESEIRRERERQTNPSAMEVEEDDPVPEIRRDHFEEAMRFARRSVSDNDIRKYEMFAQTLQQSRGFGSFRFPSGNQGGAGPSQGSGGGTGGSVYTEDNDDDLYG

SEQ ID NO: 57783 - protein, 61 aa, Homo sapiens
  MOD_RES (1)..(1): Any amino acid
XREAGEQGDIEPRRMVMETWWSCALTVVGNYPILVLLCLMILSLFRKSLATGPSCSEVRSV

SEQ ID NO: 57784 - protein, 131 aa, Homo sapiens
MNDTVTIRTRKFMTNRLLQRKQMVIDVLHPGKATVPKTEIREKLAKMYKTTPDVIFVFGFRTHFGGGKTTGFGMIYDSLDYAKKNEPKHRLARHGLYEKKKTSRKQRKERKNRMKKVRGTAKANVGAGKKK

SEQ ID NO: 57785 - protein, 75 aa, Homo sapiens
MERSFVWLSCLDSDSCNLTFRLGEVESHACSPSLLWNLLTQYLPPGAGHILRTYNFPVLSCVSSCHLIGGKMPEN

SEQ ID NO: 57786 - protein, 90 aa, Homo sapiens
MELVLVFLCSLLAPMVLASAAEKEKEMDPFHYDYQTLRIGGLVFAVVLFSVGILLILSRRCKCSFNQKPRAPGDEEAQVENLITANGNCP

SEQ ID NO: 57787 - protein, 527 aa, Homo sapiens
MSSNSASAANGNDSKKFKGDSRSAGVPSRVIHIRKLPIDVTEGEVISLGLPFGKVTNLLMLKGKNQAFIEMNTEEAANTMVNYYTSVTPVLRGQPIYIQFSNHKELKTDSSPNQARAQAALQAVNSVQSGNLALAASAAAVDAGMAMAGQSPVLRIIVENLFYPVTLDVLHQIFSKFGTVLKIITFTKNNQFQALLQYADPVSAQHAKLSLDGQNIYNACCTLRIDFSKLTSLNVKYNNDKSRDYTRPDLPSGDSQPSLDQTMAAAFGAPGIISASPYAGAGFPPTFAIPQAAGLSVPNVHGALAPLAIPSAAAAAAAAGRIAIPGLAGAGNSVLLVSNLNPERVTPQSLFILFGVYGDVQRVKILFNKKENALVQMADGNQAQLAMSHLNGHKLHGKPIRITLSKHQNVQLPREGQEDQGLTKDYGNSPLHRFKKPGSKNFQNIFPPSATLHLSNIPPSVSEEDLKVLFSSNGGVVKGFKFFQKDRKMALIQMGSVEEAVQALIDLHNHDLGENHHLRVSFSKSTI

SEQ ID NO: 57788 - protein, 84 aa, Homo sapiens
MGRLVAVGLLGIALALLGERLLALRNRLKASREVESVDLPHCHLIKGIEAGSEDIDILPNGLAFFSVVSVFFLPQIQQRRYKGI

SEQ ID NO: 57789 - protein, 44 aa, Homo sapiens
MLGLSPHRALVGVQPHQEKAPRGLTGPFPLLLFPRPPWLPLPPI

SEQ ID NO: 57790 - protein, 265 aa, Homo sapiens
MEIEKFQKGEGKDEEKYIDVVINKNMKLGQKVLIPVKQFPKFNFVGKLLGPRGNSLKRLQEETLTKMSILGKGSMRDKAKEEELRKSGEAKYFHLNDDLHVLIEVFAPPAEAYARMGHALEEIKKFLIPDYNDEIRQAQLQELTYLNGGSENADVPVVRGKPTLRTRGVPAPAITRGRGGVTARPVGVVVPRGTPTPRGVLSTRGPVSRGRGLLTPRARGVPPTGYRPPPPPPTQETYGEYDYDDGYGTAYDEQSYDSYDNSYST

SEQ ID NO: 57791 - protein, 329 aa, Homo sapiens
MHQGLKDVGAKVTGFSEGVVDSVKGGFSSFSQATHSAAGAVVSKPREIASLIRNKFGSADNIPNLKDSLEEGQVDDAGKALGVISNFQSSPKYGSEEDCSSATSGSVGANSTTGGIAVGASSSKTNTLDMQSSGFDALLHEIQEIRETQARLEESFETLKEHYQRDYSLIMQTLQEERYRCERLEEQLNDLTELHQNEILNLKQELASMEEKIAYQSYERARDIQEALEACQTRISKMELQQQQQQVVQLEGLENATARNLLGKLINILLAVMAVLLVFVSTVANCVVPLMKTRNRTFSTLFLVVFIAFLWKHWDALFSYVERFFSSPR

SEQ ID NO: 57792 - protein, 451 aa, Homo sapiens
AAGSQIGMIVNSFTNVTVAMIIAFSFSWKLSLVILCFFPFLALSGATQTRMLTGFASRDKQALEMVGQITNEALSNIRTVAGIGKERRFIEALETELEKPFKTAIQKANIYGFCFAFAQCIMFIANSASYRYGGYLISNEGLHFSYVFRVISAVVLSATALGRAFSYTPSYAKAKISAARFFQLLDRQPPISVYNTAGEKWDNFQGKIDFVDCKFTYPSRPDSQVLNGLSVSISPGQTLAFVGSSGCGKSTSIQLLERFYDPDQGKVMIDGHDSKKVNVQFLRSNIGIVSQEPVLFACSIMDNIKYGDNTKEIPMERVIAAAKQAQLHDFVMSLPEKYETNVGSQGSQLSRGEKQRIAIARAIVRDPKILLLDEATSALDTESEKTVQVALDKAREGRTCIVIAHRLSTIQNADIIAVMAQGVVIEKGTHEELMAQKGAYYKLVTTGSPIS

SEQ ID NO: 57793 - protein, 74 aa, Homo sapiens
MSQRNLNAKTEQGPTGVTMTSNPITWGQIKKTTQEAEKLLERQGQAKTPDSMFLAMLAVVSCASIGSGEPPTGN

SEQ ID NO: 57794 - protein, 765 aa, Homo sapiens
MLADLGLIGTIGEDDEVPVEPESDSGDEEEEGPIVLGRRQKALGKNRSADFNPDFVFTEKEGTYDGSWALADVMSQLKKKRAATTLDEKIEKVRKKRKTEDKEAKSGKLEKEKEAKEGSEPKEQEDLQENDEEGSEDEASETDYSSADENILTKADTLKVKDRKKKKKKGQEAGGFFEDASQYDENLSFQDMNLSRPLLKAITAMGFKQPTPIQKACIPVGLLGKDICACAATGTGKTAAFALPVLERLIYKPRQAPVTRVLVLVPTRELGIQVHSVTRQLAQFCNITTCLAVGGLDVKSQEAALRAAPDILIATPGRLIDHLHNCPSFHLSSIEVLILDEADRMLDEYFEEQMKEIIRMCSHHRQTMLFSATMTDEVKDLASVSLKNPVRIFVNSNTDVAPFLRQEFIRIRPNREGDREAIVAALLTRTFTDHVMLFTQTKKQAHRMHILLGLMGLQVGELHGNLSQTQRLEALRRFKDEQIDILVATDVAARGLDIEGVKTVINFTMPNTIKHYVHRVGRTARAGRAGRSVSLVGEDERKMLKEIVKAAKAPVKARILPQDVILKFRDKIEKMEKDVYAVLQLEAEEKEMQQSEAQINTAKRLLEKGKEAVVQEPERSWFQTKEERKKEKIAKALQEFDLALRGKKKRKKFMKDAKKKGEMTAEERSQFEILKAQMFAERLAKRNRRAKRARAMPEEEPVRGPAKKQKQGKKSVFDEELTNTSKKALKQYRAGPSFEERKQLGLPHQRRGGNFKSKSRYKRRK

SEQ ID NO: 57795 - protein, 295 aa, Homo sapiens
MRVEHARMHAKHRGHEAMHAEMVLILIATLVVAQLLLVQWKQRHPRSYNMVTLFQMWVVPLYFTVKLHWWRFLVIWILFSAVTAFVTFRATRKPLVQTTPRLVYKWFLLIYKISYATGIVGYMAVMFTLFGLNLLFKIKPEDAMDFGISLLFYGLYYGVLERDFAEMCADYMASTIGFYSESGMPTKHLSDSVCAVCGQQIFVDVSEEGIIENTYRLSCNHVFHEFCIRGWCIVGKKQTCPYCKEKVDLKRMFSNPWERPHVMYGQLLDWLRYLVAWQPVIIGVVQGINYILGLE

SEQ ID NO: 57796 - protein, 112 aa, Homo sapiens
MQLYSARQRRRLNRGLRRKQHSLLKRLRKAKKEAPPMEKPEVVKTHLRDMIILPEMVGSMVGVYNGKTFNQVEIKPEMIGHYLGEFSITYKPVKHGRPGIGATHSSRFIPLK

SEQ ID NO: 57797 - protein, 282 aa, Homo sapiens
MKGQQKTAETEEGTVQIQEGAVATGEDPTSVAIASIQSAATFPDPNVKYVFRTENGGQVMYRVIQVSEGQLDGQTEGTGAISGYPATQSMTQAVIQGAFTSDDAVDTEGTAAETHYTYFPSTAVGDGAGGQFFVMMSPQEVLQGGSQRSIAPRTHPYSPKSEAPRTTRDEKRRAQHNEVERRRRDKINNWIVQLSKIIPDCSMESTKSGQSKGGILSKACDYIQELRQSNHRLSEELQGLDQLQLDNDVLRQQVEDLKNKNLLLRAQLRHHGLEVVIKNDSN

SEQ ID NO: 57798 - protein, 209 aa, Homo sapiens
MAAAPALKHWRTTLERVEKFVSPLYFTDCNLRGRLFGASCPVAVLSSFLTPERLPYQEAVQRDFRPAQVGDSFGPTWWTCWFRVELTIPEAWVGQEVHLCWESDGEGLVWRDGEPVQGLTKEGEKTSYVLTDRLGERDPRSLTLYVEVACNGLLGAGKGSMIAAPDPEKMFQLSRAELAVFHRDVHMLLVDLELLLGIAKPGFGPSKRL

SEQ ID NO: 57799 - protein, 189 aa, Homo sapiens
MSLDIQSLDIQCEELSDARWAELLPLLQQCQVVRLDDCGLTEARCKDISSALRVNPALAELNLRSNELGDVGVHCVLQGLQTPSCKIQKLSLQNCCLTGAGCGVLSSTLRTLPTLQELHLSDNLLGDAGLQLLCEGLLDPQCRLEKLQLEYCSLSAASCEPLASVLRAKPDFKELTVSNNDINEAGVRV

SEQ ID NO: 57800 - protein, 242 aa, Homo sapiens
MMGKEEEIARIARRLDKMVTKKSAEGAMDLLRELKAMPITLHLLQSTRVGMSVNALRKQSSDEEVIALAKSLIKSWKKLLDASDAKARERGRGMPLPTSSRDASEAPDPSRKRPELPRAPSTPRITTFPPVPVTCDAVRNKCREMLTAALQTDHDHVAIGADCERLSAQIEEYILWVGAVGLGFWWSQEAAWPGALWWLLDATAQLSRGHLPGWSPAWVVRLSHLRRAPGPAEGLILSACGA

SEQ ID NO: 57801 - protein, 182 aa, Homo sapiens
MDLQRPDSYQGGAGPDFNDHVLHKTILVGDSGVGKTSLLVQFDQGKFIPGSFSATVGIGFTNKVVTVDGVRVKLQIWDTAGQERFRSVTHAYYRDAQALLLLYDITNKSSFDNIRAWLTEIHEYAQRDVVIMLLGNKADMSSERVIRSEDGETLAREYGVPFLETSAKTGMNVELAFLAIAK

SEQ ID NO: 57802 - protein, 83 aa, Homo sapiens
MFESCSGFSGFCASPIEESHGALISSCNSRTMTDGLVTFRDVAIDFSQEEWECLDPAQRDLYVDVMLENYSNLVSLGKVICLK

SEQ ID NO: 57803 - protein, 65 aa, Homo sapiens
MRACAGSTREAGSGVQLRTSAPCCAWRRAWKSRMRSPQSPRRSVHRILSFLKRLSSKSREKTLGL

SEQ ID NO: 57804 - protein, 158 aa, Homo sapiens
MARLVAVCRDGEEEFPFERRQIPLYIDDTLTMVMEFPDNVLNLDGHQNNGAQLKQFIQRHGMLKQQDLSIAMVVTSREVLSALSQLVPCVGCRRSVERLFSQLVESGNPALEPLTVGPKGVLSVTRSCMTDAKKLYTLFYVHGSKLNDMIDAIPKSKK

SEQ ID NO: 57805 - protein, 308 aa, Homo sapiens
MELKKDINAVSIDMLLIVHSEKRRAAQGTLSDQQANPSSLLQRGGGFQGVGNGVRRWQKLEGNDFHENLVEKQHPQQPQVITSYNSQGTQLTVEVHPRDAMPQLLKKFSLAKRLQGDKNGNTRPRQPGGKDAHAYPWDRSSLKSMSLDLQQFEKLDIYASQVTAKSGLDELVSDLLQEAHTDLERVRAIWIWICHHIEYDIAAAQEKDRQAFKPTDILRTQKTNCDGYAGLFERMCRLAGVQCMTVPGYSKGFGYQTGQSFSGEFDHAWNAVYLEGRWHLVDSTWGSGLVDTITSKFTFLEWEGHGHH

SEQ ID NO: 57806 - protein, 1211 aa, Homo sapiens
MLEVSIPTPHRYVRGKSNLMDAISFVLGEKTSNLRVKTLRDLIHGAPVGKPAANRAFVSMVYSEEGAEDRTFARVIVGGSSEYKINNKVVQLHEYSEELEKLGILIKARNFLVFQGAVESIAMKNPKERTALFEEISRSGELAQEYDKRKKEMVKAEEDTQFNYHRKKNIAAERKEAKQEKEEADRYQRLKDEVVRAQVQLQLFKLYHNEVEIEKLNKELASKNKEIEKDKKRMDKVEDELKEKKKELGKMMREQQQIEKEIKEKDSELNQKRPQYIKAKENTSHKIKKLEAAKKSLQNAQKHYKKRKGDMDELEKEMLSVEKARQEFEERMEEESQSQGRDLTLEENQVKKYHRLKEEASKRAATLAQELEKFNRDQKADQDRLDLEERKKVETEAKIKQKLREIEENQKRIEKLEEYITTSKQSLEEQKKLEGELTEEVEMAKRRIDEINKELNQVMEQLGDARIDRQESSRQQRKAEIMESIKRLYPGSVYGRLIDLCQPTQKKYQIAVTKVLGKNMDAIIVDSEKTGRDCIQYIKEQRGEPETFLPLDYLEVKPTDEKLRELKGAKLVIDVIRYEPPHIKKALQYACGNALVCDNVEDARRIAFGGHQRHKTVALDGTLFQKSGVISGGASDLKAKARRWDEKAVDKLKEKKERLTEELKEQMKAKRKEAELRQVQSQAHGLQMRLKYSQSDLEQTKTRHLALNLQEKSKLESELANFGPRINDIKRIIQSREREMKDLKEKMNQVEDEVFEEFCREIGVRNIREFEEEKVKRQNEIAKKRLEFENQKTRLGIQLDFEKNQLKEDQDKVHMWEQTVKKDENEIEKLKKEEQRHMKIIDETMAQLQDLKNQHLAKKSEVNDKNHEMEEIRKKLGGANKEMTHLQKEVTAIETKLEQKRSDRHNLLQACKMQDIKLPLSKGTMDDISQEEGSSQGEDSVSGSQRISSIYAREALIEIDYGDLCEDLKDAQAEEEIKQEMNTLQQKLNEQQSVLQRIAAPNMKAMEKLESVRDKFQETSDEFEAARKRAKKAKQAFEQIKKERFDRFNACFESVATNIDEIYKALSRNSSAQAFLGPENPEEPYLDGINYNCVAPGKRFRPMDNLSGGEKTVAALALLFAIHSYKPAPFFVLDEIDAALDNTNIGKVANYIKEQSTCNFQAIVISLKEEFYTKAESLIGVYPEQGDCVISKVLTFDLTKYPDANPNPNEQ

SEQ ID NO: 57807 - protein, 251 aa, Homo sapiens
MAAVSGLVRRPLREVSGLLKRRFHWTAPAALQVTVRDAINQGMDEELERDEKVFLLGEEVAQYDGAYKVSRGLWKKYGDKRIIDTPISEMGFAGIAVGAAMAGLRPICEFMTFNFSMQAIDQVINSAAKTYYMSGGLQPVPIVFRGPNGASAGVAAQHSQCFAAWYGHCPGLKVVSPWNSEDAKGLIKSAIRDNNPVVVLENELMYGVPFEFPPEAQSKDFLIPIGKAKIERQGRLPHSSAHWNEVELKTL

SEQ ID NO: 57808 - protein, 195 aa, Homo sapiens
MVNSCCGSVCSDQGCGQDLCQETCCCPSCCQTTCCRTTCYRPSYSVSCCCRPQCCQSVCCQPTCCRPRCCISSCCRPSCCVSSCCKPQCCQSVCCQPTCCHPSCCISSCCRPSCCVSSCCKPQCCQSVCCQPTCCHPSCSISSCCRPSCCESSCCRPCCCVRPVCGRVSCHTTCYRPTCVISTCPRPVCCASSCC

SEQ ID NO: 57809 - protein, 176 aa, Homo sapiens
MPAPIRLRELIRTIRTARTQAEEREMIQKECAAIRSSFREEDNTYRCRNVAKLLYMHMLGYPAHFGQLECLKLIASQKFTDKRIGYLGAMLLLDERQDVHLLMTNCIKNDLNHSTQFVQGLALCTLGCMGSSEMCRDLAGEVEKLLKTSNSYLRKKEMIYKQTNVTGYILGGIPNS

SEQ ID NO: 57810 - protein, 44 aa, Homo sapiens
MVAVLGGRGVLRLRLLLSALKPGIHVPRAGPAAAFGNQPEPEYR

SEQ ID NO: 57811 - protein, 42 aa, Homo sapiens
MEDAAAPGRTEGVLERQGAPPAAGQGGTGRCSQRCQPAPCSL

SEQ ID NO: 57812 - protein, 173 aa, Homo sapiens
MGTMKTQRDGHSLGRWSLVLLLLGLVMPLAIIAQVLSYKEAVLRAIDGINQRSSDANLYRLLDLDPRPTMDGDPDTPKPVSFTVKETVCPRTTQQSPEDCDFKKDGLVKRCMGTVTLNQARGSFDISCDKDNKRFALLGDFFRKSKEKIGKEFKRIVQRIKDFLRNLVPRTES

SEQ ID NO: 57813 - protein, 93 aa, Homo sapiens
MTSCLPALRFIATPRLSAMPHIDNDVKLDFKDVLLRPKRSTLKSRSEVDLTRSFSFRNSKQTYSGVPIIAANMDTVGTFEMAKVLFLSLHCCP

SEQ ID NO: 57814 - protein, 254 aa, Homo sapiens
MGLSTVPDLLLPLVLLELLVGIYPSGVIGLVPHLGDREKRDSVCPQGKYIHPQNNSICCTKCHKGTYLYNDCPGPGQDTDCRECESGSFTASENHLRHCLSCSKCRKEMGQVEISSCTVDRDTVCGCRKNQYRHYWSENLFQCFNCSLCLNGTVHLSCERSSPEAKPSPHPRGWPLPHAVALPFLPPPVFCGSDNQLLSGRPHPVPRHFLCPVGWGCRRFSFSCAALLPTGQEKQNTVCTCHAGFFLRENECVS

SEQ ID NO: 57815 - protein, 139 aa, Homo sapiens
  MOD_RES (1)..(1): Any amino acid
XTSNPNSSIMLASASFDSTVRLWDVEQGVCTHTLMKHQEPVYSVAFSPDGKYLASGSFDKYVHIWNTQSGSLVHSYQGTGGIFEVCWNARGDKVGASASDGSDSLAVWISNVLASEPEEEKTKINMTWFKRIQNKRKKM

SEQ ID NO: 57816 - protein, 500 aa, Homo sapiens
LKFLAVLLAAGMLAFLGAVICIIASVPLAASPARALPGGADNASVASGAAASPGPQRSLSALHGAGGSAGPPALPGAPAASAHPLPPGPLFSRFLCTPLAAACPSGAQQGDAAGAAPGEREELLLLQSTAEQLRQTALQQEARIRADQDTIRELTGKLGRCESGLPRGLQGAGPRRDTMADGPWDSPALILELEDAVRALRDRIDRLEQELPARVNLSAAPAPVSAVPTGLHSKMDQLEGQLLAQVLALEKERVALSHSSRRQRQEVEKELDVLQGRVAELEHGSSAYSPPDAFKISIPIRNNYMYARVRKALPELYAFTACMWLRSRSSGTGQGTPFSYSVPGQANEIVLLEAGHEPMELLINDKVAQLPLSLKDNGWHHICIAWTTRDGLWSAYQDGELQGSGENLAAWHPIKPHGILILGQEQDTLGGRFDATQAFVGDIAQFNLWDHALTPAQVLGIANCTAPLLGNVLPWEDKLVEAFGGATKAAFDVCKGRAKA

SEQ ID NO: 57817 - protein, 140 aa, Homo sapiens
  MOD_RES (1)..(1): Any amino acid
XLIYNQKEGHFPRVTTVSDLTKRNNMDFSIRISNITPADAGTYYCVKFRKGSPDHVEFKSGAGTELSVREARTVFSARSTESRASPGQAFRQSKLQVSPQCPSLPPHSTHLCLPYCCICCLNWQSLTVLEARSLKSASLD

SEQ ID NO: 57818 - protein, 261 aa, Homo sapiens
  MOD_RES (1)..(1): Any amino acid
XRVMAPRALLLLLSGGLALTETWACSHSMRYFDTAVSRPGRGEPRFISVGYVDDTQFVRFDSDAASPRGEPRAPWVEQEGPEYWDRETQKYKRQAQADRVSLRNLRGYYNQSEDGSHTLQRMSGCDLGPDGRLLRGYDQSAYDGKDYIALNEDLRSWTAADTAAQITQRKLEAARAAEQLRAYLEGTCVEWLRRYLENGKETLQRAEPPKTHVTHHPLSDHEASRRWNLPEVGSCGGAFWTRAEIHVPYAARGAARAPHPE

SEQ ID NO: 57819 - protein, 47 aa, Homo sapiens
MKIIFPILSNPVFRRTVKLLLCLLWIGYSQGTTHVLRFEMRQLRLRF

SEQ ID NO: 57820 - protein, 425 aa, Homo sapiens
MYILLGKVVTKEKIQEAKDVYKEHFQDDVFNEKGWNYILEKYDGHLPIEIKAVPEGFVIPRGNVLFTVENTDPECYWLTNWIETILVQSWYPITVATNSREQKKILAKYLLETSGNLDGLEYKLHDFGYRGVSSQETAGIGASAHLVNFKGTDTVAGLALIKKYYGTKDPVPGYSVPAAEHSTITAWGKDHEKDAFEHIVTQFSSVPVSVVSDSYDIYNACEKIWGEDLRHLIVSRSTQAPLIIRPDSGNPLDTVLKVLEILGKKFPVTENSKGYKLLPPYLRVIQGDGVDINTLQEIVEGMKQKMWSIENIAFGSGGGLLQKLTRDLLNCSFKCSYVVTNGLGINVFKDPVADPNKRSKKGRLSLHRTPAGNFVTLEEGKGDLEEYGQDLLHTVFKNGKVTKSYSFDEIRKNAQLNIELEAAHH

SEQ ID NO: 57821 - protein, 63 aa, Homo sapiens
MVFPRLNPGFISRDHHLYNRRILKGDQGQDGAAGPPGPPGPPGARGPPGDTGKDGPRGAQGPA

SEQ ID NO: 57822 - protein, 184 aa, Homo sapiens
  MOD_RES (1)..(1): Any amino acid
XAMPSEYTYVKLRSDCSRPSLQWYTRAQSKMRRPSLLLKDILKCTLLVFGVWILYILKLNYTTEECDMKKMHYVDPDHVKTLSPCGWHCVQLIMARWTQPLLHRLLSDSADLHRAFKGSRALPAEAFSEPRHQHLQTESFLSLVLLPAFQAFLGYLRESSEICSASLAEGMSSQVCQDINGAVI

SEQ ID NO: 57823 - protein, 1121 aa, Homo sapiens
MNGRLHLGHTFSLSKCEFAVGYQRLKGKCCLFPFGLHCTGMPIKACADKLKREIELYGCPPDFPDEEEEEEETSVKTEDIIIKDKAKGKKSKAAAKAGSSKYQWGIMKSLGLSDEEIVKFSEAEHWLDYFPPLAIQDLKRMGLKVDWRRSFITTDVNPYYDSFVRWQFLTLRERNKIKFGKRYTIYSPKDGQPCMDHDRQTGEGVGPQEYTLLKLKVLEPYPSKLSGLKGKNIFLVAATLRPETMFGQTNCWVRPDMKYIGFETVNGDIFICTQKAARNMSYQGFTKDNGVVPVVKELMGEEILGASLSAPLTSYKVIYVLPMLTIKEDKGTGVVTSVPSDSPDDIAALRDLKKKQALRAKYGIRDDMVLPFEPVPVIEIPGFGNLSAVTICDELKIQSQNDREKLAEAKEKIYLKGFYEGIMLVDGFKGQKVQDVKKTIQKKMIDAGDALIYMEPEKQVMSRSSDECVVALCDQWYLDYGEENWKKQTSQCLKNLETFCEETRRNFEATLGWLQEHACSRTYGLGTHLPWDEQWLIESLSDSTIYMAFYTVAHLLQGGNLHGQAESPLGIRPQQMTKEVWDYVFFKEAPFPKTQIAKEKLDQLKQEFEFWYPVDLRVSGKDLVPNHLSYYLYNHVAMWPEQSDKWPTAVRANGHLLLNSEKMSKSTGNFLTLTQAIDKFSADGMRLALADAGDTVEDANFVEAMADAGILRLYTWVEWVKEMVANWDSLRSGPASTFNDRVFASELNAGIIKTDQNYEKMMFKEALKTGFFEFQAAKDKYRELAVEGMHRELVFRFIEVQTLLLAPFCPHLCEHIWTLLGKPDSIMNASWPVAGPVNEVLIHSSQYLMEVTHDLRLRLKNYMMPAKGKTDKQPLQKPSHCTIYVAKNYPPWQHTTLSVLRKHFEANNGKLPDNKVIASELGSMPELKKYMKKVMPFVAMIKENLEKMGPRILDLQLEFDEKAVLMENIVYLTNSLELEHIEVKFASEAEDKIREDCCPGKPLNVFRIEPGVSVSLVNPQPSNGHFSTKIEIRQGDNCDSIIRRLMKMNRGIKDLSKVKLMRFDDPLLGPRRVPVLGKEYTEKTPISEHAVFNVDLMSKKIHLTENGIRVDIGDTIIYLVH

SEQ ID NO: 57824 - protein, 103 aa, Homo sapiens
MFSLMASCCGWFKRWREPVRKVTLLMVGLDNAGKTATAKGIQGGLFLVEMGSPYVAQAGLECLASSYSSALASKSAGITGMSHHAQPGQMGPSSCRKTSLGSH

SEQ ID NO: 57825 - protein, 46 aa, Homo sapiens
MAKEEPQSISRDLQELQKKLSLLIDSFQNNSKLPQHSRISLDSDDG

SEQ ID NO: 57826 - protein, 195 aa, Homo sapiens [sequence omitted]

SEQ ID NO: 57827 - protein, 88 aa, Homo sapiens
MEKQCCSHPVICSLSTMYTFLLGAIFIALSSSRILLVKYSANEENKYDYLPTTVNVCSELVKLVFCVLVSFCVIKKDHQSRNLKYASW

SEQ ID NO: 57828 - protein, 1404 aa, Homo sapiens
MAALLRSARWLLRAGAAPRLPLSLRLLPGGPGRLHAASYLPAARAGPVAGGLLSPARLYAIAAKEKDIQEESTFSSRKISNQFDWALMRLDLSVRRTGRIPKKLLQKVFNDTCRSGGLGGSHALLLLRSCGSLLPELKLEERTEFAHRIWDTLQKLGAVYDVSHYNALLKVYLQNEYKFSPTDFLAKMEEANIQPNRVTYQRLIASYCNVGDIEGASKILGFMKTKDLPVTEAVFSALVTGHARAGDMENAENILTVMRDAGIEPGPDTYLALLNAYAEKGDIDHVKQTLEKVEKSELHLMDRDLLQIIFSFSKAGYPQYVSEILEKVTCERRYIPDAMNLILLLVTEKLEDVALQILLACPVSKEDGPSVFGSFFLQHCVTMNTPVEKLTDYCKKLKEVQMHSFPLQFTLHCALLANKTDLAKALMKAVKEEGFPIRPHYFWPLLVGRRKEKNVQGIIEILKGMQELGVHPDQETYTDYVIPCFDSVNSARAILQENGCLSDSDMFSQAGLRSEAANGNLDFVLSFLKSNTLPISLQSIRSSLLLGFRRSMNINLWSEITELLYKDGRYCQEPRGPTVECFLLFFSTEAVGYFLYNLIDSMSDSEVQAKEEHLRQYFHQLEKMNVKIPENIYRGIRNLLESYHVPELIKDAHLLVESKNLDFQKTVQLTSSELESTLETLKAENQPIRDVLKQLILVLCSEENMQKALELKAKYESDMVTGGYAALINLCCRHDKVEDALNLKEEFDRLDSSAVLDTGKYVGLVRVLAKHGKLQDAINILKEMKEKDVLIKDTTALSFFHMLNGAALRGEIETVKQLHEAIVTLGLAEPSTNISFPLVTVHLEKGDLSTALEVAIDCYEKYKVLPRIHDVLCKLVEKGETDLIQKAMDFVSQEQGEMVMLYDLFFAFLQTGNYKEAKKIIETPGIRARSARLQWFCDRCVANNQVETLEKLVELTQKLFECDRDQMYYNLLKLYKINGDWQRADAVWNKIQEENVIPREKTLRLLAEILREGNQEVPFDVPELWYEDEKHSLNSSSASTTEPDFQKDILIACRLNQKKGAYDIFLNAKEQNIVFNAETYSNLIKLLMSEDYFTQAMEVKAFAETHIKGFTLNDAANSRLIITQVRRDYLKEAVTTLKTVLDQQQTPSRLAVTRVIQALAMKGDVENIEVVQKMLNGLEDSIGLSKMVFINNIALAQIKNNNIDAAIENIENMLTSENKVIEPQYFGLAYLFRKVIEEQLEPAVEKISIMAERLANQFAIYKPVTDFFLQLVDAGKVDDARALLQRCGAIAEQTPILLLFLLRNSRKQGKASTVKSVLELIPELNEKEEAYNSLMKSYVSEKDVTSAKALYEHLTAKNTKLDDLFLKRYASLLKYAGEPVPFIEPPESFEFYAQQLRKLRENSS

SEQ ID NO: 57829 - protein, 332 aa, Homo sapiens
MSEETVPEAASPPPPQGQPYFDRFSEDDPEYMRLRNRAADLRQDFNLMEQKKRVTMILQSPSFREELEGLIQEQMKKGNNSSNIWALRQIADFMASTSHAVFPTSSMNVSMMTPINDLHTADSLNLAKGERLMRCKISSVYRLLDLYGWAQLSDTYVTLRVSKEQDHFLISPKGVSCSEVTASSLIKVNILGEVVEKGSSCFPVDTTGFCLHSAIYAARPDVRCIIHLHTPATAAVSAMKWGLLPVSHNALLVGDMAYYDFNGEMEQEADRINLQKCLGPTCKSTESQLMSKGDEDTKDDSEETVPNPFSQLTDQELEEYKKEVERKKLELD

SEQ ID NO: 57830 - protein, 92 aa, Homo sapiens
  MOD_RES (1)..(1): Any amino acid
XFWHPREPSDPNERCVVLNFRKSPKRWGWNDVNCLGPQSDSSKICIMENCKGFFLIYFEMQFRLKLFLVPKVSAHGNPEVDREKLSSGQCIH

SEQ ID NO: 57831 - protein, 305 aa, Homo sapiens
MGCVFQSTEDKCIFKIDWTLSPGEHAKDEYVLYYYSNLSVPIGRFQNRVHLMGDILCNDGSLLLQDVQEADQGTYICEIRLKGESQVFKKAVVLHVLPEEPKELMVHVGGLIQMGCVFQSTEVKHVTKVEWIFSGRRAKEEIVFRYYHKLRMSVEYSQSWGHFQNRVNLVGDIFRNDGSIMLQGVRESDGGNYTCSIHLGNLVFKKTIVLHVSPEEPRTLVTPAALRPLVLGGNQLVIIVGIVCATILLLPVLILIVKKTCGNKSSVNSTVLVKNTKKTNPEIKEKPCHFERCEGEVNTRFSLKH

SEQ ID NO: 57832 - protein, 229 aa, Homo sapiens
MAPVKISHVVSFSSQDPKYPVENLLNPDSPRRPWLGCPQDKSGQLKVELQLERAVPTGYIDVGNCGCAFLQIDVGHSSWPLDRPFITLLPATTLMSLTDSKQGKNRSGVRMFKDVDFLAPASGELWDRLRLTCSRPFTRHQSFGLAFLRVCSSLDSLDDSVVGPSALLSSVLNKRWGFTLLPPPGWSRTPKLTHLKLPKCWDYRHEPLCLASSGRNVLEAREAAKHPTI

SEQ ID NO: 57833 - protein, 411 aa, Homo sapiens
MTQAEIKLCSLLLQEHFGEIVEKIGVHLIRTGSQPLRVIAHDTGTSLDQVKKALCVLVQHNLVSYQVHKRGVVEYEAQCSRVLRMLRYPRYIYTTKTLYSDTGELIVEELLLNGKLTMSAVVKKVADRLTETMEDGKTMDYAEVSNTFVRLADTHFVQRCPSVPTTENSDPGPPPPAPTLVINEKDMYLVPKLSLIGKGKRRRSSDEDAAGEPKAKRPKYTTDNKEPIPDDGIYWQANLDRFHQHFRDQAIVSAVANRMDQTSSEIVRTMLRMSEITTSSSAPFTQPLSSNEIFRSLPVGYNISKQVLDQYLTLLADDPLEFVGKSGDSGGGMYVINLHKALASLATATLESVVQERFGSRCARIFRLVLQKKHIEQKQVEDFAMIPAKEAKDMLYKMLSENFMSLQVGCQ

SEQ ID NO: 57834 - protein, 129 aa, Homo sapiens
MAAMETETAPLTLESLPTDPLLLILSFLDYRDLINCCYVSRRLSQLSSHDPLWRRHCKKYWLISEEEKTQKNQCWKSLFIDTYSDVGRYIDHYAAIKKAWDDLKKYLEPRCPRMVLSLKGVGIKMMLAL

SEQ ID NO: 57835 - protein, 78 aa, Homo sapiens
MAITQFRLFKFCTCLATVFSFLKRLICRSGRGRKLSGDQITLPTTVDYSSVPKQTDVEEWTSWDEDAPTSVKIEGGNG

SEQ ID NO: 57836 - protein, 209 aa, Homo sapiens
MARMMRTRGMMMHNEDNSCLPVPLFNQKKRNRQPLTSNPLKDDSDWAWEAVNPELAPVMKTVDTGQIPHSVSRPLRSQDSVFNSIQSNTGRSQGGWSYRDGNKNTSLKTWNKNDFKPQCKRTNLVANDGKNSCPVSSGAQQQKQLRIPEPPNLSRNKETELLRQTHSSKISGCTMRGLDKNSALQTLKPNFQQNQYKKQMLDDIPEDNT

SEQ ID NO: 57837 - protein, 1481 aa, Homo sapiens
  MOD_RES (1)..(1): Any amino acid
XELFGNSSQVGINLPTGECSIFGYFVDIEQCEFIPWSDLVPNDQTLIQRGTSLLTNLQRSGGNFLKITECGECINYTATRDTTCLSFLMSLLLKNSCPVLLTGESGVGKTAAINQMLEKLEGPGAFDIKHGSILGDTLLYSEIKKSSSLKQNITILIPETHKTATGSSDNPTKKPEVRTNKKLLKNNDHKGVVVSTINFSTNVTAAKTKEMILKKLIRRTKDTLGAPKNNRILIFIDDMNMPVSDMYGAQPPLELIRQLLDLGGVYDTEKNTWKNIQDLSIVAACVPVVNDISPRLLKHFSMLVLPHPSQDILCTIFQLLLGLLQADRTVVNSKEMAALLFVHEATRVFHDRLIDFTDKSLFYRLLSRELENCFQIQWTQENLMNHSTVFLDFLDINKTHRKKIYQNTSDYNKLASVLDEFQMKLGSISLELSHSMVFFKEAIEHIIRATRVLRQPGSHMLLIGIDGCGKKTCATLACYLTDNKLYRVPISHKCAYIEFKEVFKKVFIHAGLKGKPTVLMVPNLNIEQDSFLEDLNYIISSGRIPDLFENVELDSIAMKIRYLTEQSGHMDNRQSLLSFFQKRIYKNLHIFVIMSPEGPSFRQNCRVYPSMISSCTIDWYERWPEEALLIVANSFLKEKVNFENRENLKEKLAPTCVQIHKSMKDLNRKYFEETGRFYYTTPNSYLQFMETFAHILRAREEEMQTKRDRFHMGLSTILEATTLVTEMQEELLILGPQVEQKTKETETLMEKLRKDSQVVEKVQMLVKQDEEIVAEEVRIVEDYAQKTANELKSVLPAFDKAIVALNALDKADVAELRVYTRPPFLVLTVMNAVCILLQKKPNWATAKLLLSETGFLKKLINLDKDSIPDKVFVKLKKIVTLPDFNPHKISLVSVACCSLCQWVIALNNYHEVQKVVGPKQIQVAEAQNVLKIARQRLAEKQRGLQLVEEHLLFLQAAYKDTVAEKQLLANRKTMASRRFQCASVLLTVLEDEKISRWHNQGLPHGQYSVENAILIKNGQQWPLLIDPHRQAHKWIRQMEGSRLQKLSIEDSNYTKKIENAMKTGGSVLLQNLLETLAPGLKAILKKDIYQKKGHYFIRVGDAEFEYNSNFRLYLSTEIDNPHFLPSVYNFVTMINFTVTFQGLQDQLLSTVVTHEVPHLEDQRSKLLESISLDAITLEELEEKTLNLLQKALGSILDDDKIVDTLRKSKMTSNEISKRIEATKKAESEIQAIRKNYLPIATRGALLYFLVADLTQINYMYQFSLDWFHQVFVSSVVSKSKEQEHSFKREKVSPKEVHEFISISKEPNLENEKNLLDKHIKSAIDMLTKSIFKVVSSALFNEDKLCFSFRLCTVIMQNNANGNLIQDDIGFLPEEEWNIFLYSGILINIKSALSQSRLTSTFEIGESQHLQWLSDSRWRQCQYVSTHLEPFSLLCKSLLSNVSQWDTFKNSKAVYSLISTPFSSENASLEENTKPPEESKSS

SEQ ID NO: 57838 - protein, 173 aa, Homo sapiens
MKVLLRLICFIALLISSLEADKCKEREEKIILVSSANEIDVRPCPLNPNEHKGTITWYKDDSKTPVSTEQASRIHQHKEKLWFVPAKVEDSGHYYCVVRNSSYCLRIKISAKFVENEPNLCYNAQAIFKQKLPVAGDGGLVCPYMEFFKNENNELPKLQWYKVAVSRVWATAL

SEQ ID NO: 57839 - protein, 410 aa, Homo sapiens
MAGSADSYTSRPSDSDVSLEEDREAIRQEREQQAAIQLERAKSKPVAFAVKTNVSYCGALDEDVPVPSTAISFDAKDFLHIKEKYNNDWWIGRLVKEGCEIGFIPSPLRLENIRIQQEQKRGRFHGGKSSGNSSSSLGEMVSGTFRATPTSTDGAHSSLRCCTVNASGGVSGAVTERLRAEVQSEIERIFELARSLQLVVLDADTINHPAQLIKTSLAPIIVHVKVSSPKVLQRLIKSRGKSQSKHLNVQLVAADKLAQCPPEMFDVILDENQLEDACEHLGEYLEAYWRATHTTSSTPMTPLLGRNLGSTALSPYPTAISGLQSQRMRHSNHSTENSPIERRSLMTSDENYHNERARKSRNRLSSSSQHSRDHYPLVEEDYPDSYQDTYKPHRNRGSPGGYSHDSRHRL

SEQ ID NO: 57840 - protein, 44 aa, Homo sapiens
MAAAAVSSAKRSLRGELKQRLRAMSAEERLRQSRVLSQKVRGRP

SEQ ID NO: 57841 - protein, 936 aa, Homo sapiens
MKSLKKDSRLRITPTRLLEASENVKEKKRAKGPEQPTPTIQEEPEPVSNVLQGDDILALAIKKEDLKEQHIPRLTEKEDKRVITQKFIIRKLKPMDPRRKVCHLVARPANPDEATKPLDYSGPGDSFDGSDQILPHHILGSLQDFKRIALARGNTQLAERIPTSPCLMTLISAEGESKQKAPKEEKRPPWAPPPQHNFLKNWQRNTALRKKQQEALSEHLKKPVSELLMHTGETYRRIQEERELIDCTLPTRRDRKSWENSGFWSRLEYLGDEMTGLVMTKTKTQRGLMEPITHIRKPHSIRVETGLPAQRDASYRYTWDRSLFLIYRRKELQRIMEELDFSQQDIDGLEVVGKGWPFSAVTVEDYTVFERSQGSSSEDTAYLGTLASSSDVSMPILGPSLLFCGKPACWIRGSNPQDKRQVGIAAHLTFETLEGEKTSSELTVVNNGTVAIWYDWRRQHQPDTFQDLKKNRMQRFYFDNREGVILPGEIKTFTFFFKSLTAGVFREFWEFRTHPTLLGGAILQVNLHAVSLTQDVFEDERKVLESKLTAHEAVTVVREVLQELLMGVLTPERTPSPVDAYLTEEDLFRHRNPPLHYEHQVVQSLHQLWRQYMTLPAKAEEARPGDKEHVSPIATEKASVNAELLPRFRSPISETQVPRPENEALRESGSQKARVGTKSPQRKSIMEEILVEESPDVDSTKSPWEPDGLPLLEWNLCLEDFRKAVMVLPDENHREDALMRLNKAALELCQKPRPLQSNLLHQMCLQLWRDVIDSLVGHSMWLRSVLGLPEKETIYLNVPEEQDQKSPPIMEVKVPVGKAGKEERKGAAQEKKQLGIKDKEDKKGAKLLGKEDRPNSKKHKAKDDKKVIKSASQDRFSLEDPTPDIILSSQEPIDPLVMGKYTQSLHSEVHPGRCVPWENTMQGAFPSTTRCGGSCL

SEQ ID NO: 57842 - protein, 495 aa, Homo sapiens
MEKASIEPPEEEEEERPVVNGNGVVVTPESSEHEDKSAGASGEMPSQPYPAPVYSQPEELKEQMDDTKPTKPEDNEEPDPLPDNWEMAYTEKGEVYFIDHNTKTTSWLDPRLAKKAKPPEECKENELPYGWEKIDDPIYGTYYVDHINRRTQFENPVLEAKRKLQQHNMPHTELGTKPLQAPGFREKPLFTRDASQLKGTFLSTTLKKSNMGFGFTIIGGDEPDEFLQVKSVIPDGPAAQDGKMETGDVIVYINEVCVLGHTHADVVKLFQSVPIGQSVNLVLCRGYPLPFDPEDPANSMVPPLAIMERPPPVMVNGRHNYETYLEYISRTSQSVPDITDRPPHSLHSMPTDGQLDGTYPPPVHDDNVSMASSGATQAELMTLTIVKGAQGFGFTIADSPTGQRVKQILDIQGCPGLCEGDLIVEINQQNVQNLSHTEVVDILKDCPIGSETSLIIHRGGKTNTGSAIKYVGKIVGSFNNIVKMQISLELNEIIL

SEQ ID NO: 57843 - protein, 257 aa, Homo sapiens
MITFLPLLLGLSLGCTGAGGFVAHVESTCLLDDAGTPKDFTYCISFNKDLLTCWDPEENKMAPCEFGVLNSLANVLSQHLNQKDTLMQRLRNGLQNCATHTQPFWGSLTNRTRPPSVQVAKTTPFNTREPVMLACYVWGFYPAEVTITWRKNGKLVMPHSSAHKTAQPNGDWTYQTLSHLALTPSYGDTYTCVVEHIGAPEPILRDWTPGLSPMQTLKVSVSAVTLGLGLIIFSLGVISWRRAGHSSDLIISLLFIL

SEQ ID NO: 57844 - protein, 671 aa, Homo sapiens
MELLRTITYQPAASTKMCEQALGKGCGADSKKKRPPQPPEESQPPQSQAQVPPAISRIIVDPTTGKRYCRGKVLGKGGFAKCYEMTDLTNNKVYAAKIIPHSRVAKPHQREKIDKEIELHRILHHKHVVQFYHYFEDKENIYILLEYCSRRSMAHILKARKVLTEPEVRYYLRQIVSGLKYLHEQEILHRDLKLGNFFINEAMELKVGDFGLAARLEPLEHRRRTICGTPNYLSPEVLNKQGHGCESDIWALGCVMYTMLLGRPPFETTNLKETYRCIREARYTMPSSLLAPAKHLIASMLSKNPEDRPSLDDIIRHDFFLQGFTPDRLSSSCCHTVPDFHLSSPAKNFFKKAAAALFGGKKDKARYIDTHNRVSKEDEDIYKLRHDLKKTSITQQPSKHRTDEELQPPTTTVARSGTPAVENKQQIGDAIRMIVRGTLGSCSSSSECLEDSTMGSVADTVARVLRGCLENMPEADCIPKEQLSTSFQWVTKWVDYSNKYGFGYQLSDHTVGVLFNNGAHMSLLPDKKTVHYYAELGQCSVFPATDAPEQFISQVTVLKYFSHYMEENLMDGGDLPSVTDIRRPRLYLLQWLKSDKALMMLFNDGTFQVNFYHDHTKIIICSQNEEYLLTYINEDRISTTFRLTTLLMSGCSSELKNRMEYALNMLLQRCN

SEQ ID NO: 57845 - protein, 928 aa, Homo sapiens
  MOD_RES (1)..(1): Any amino acid
XPGGPADREGTIKPGDRLLSVDGIRLLGTTHAEAMSILKQCGQEAALLIEYDVSVMDSVATASGPLLVEVAKTPGASLGVALTTSMCCNKQVIVIDKIKSASIADRCGALHVGDHILSIDGTSMEYCTLAEATQFLANTTDQVKLEILPHHQTRLALKGPDHVKIQRSDRQLTWDSWASNHSSLHTNHHYNTYHPDHCRVPALTFPKAPPPNSPPALVSSSFSPTSMSAYSLSSLNMGTLPRSLYSTSPRGTMMRRRLKKKDFKSSLSLASSTVGLAGQVVHTETTEVVLTADPVTGFGIQLQGSVFATETLSSPPLISYIEADSPAERCGVLQIGDRVMAINGIPTEDSTFEEASQLLRDSSITSKVTLEIEFDVAESVIPSSGTFHVKLPKKHNVELGITISSPSSRKPGDPLVISDIKKGSVAHRTGTLELGDKLLAIDNIRLDNCSMEDAVQILQQCEDLVKLKIRKDEDNSDEQESSGAIIYTVELKRYGGPLGITISGTEEPFDPIIISSLTKGGLAERTGAIHIGDRILAINSSSLKGKPLSEAIHLLQMAGETVTLKIKKQTDAQSASSPKKFPISSHLSDLGDVEEDSSPAQKPGKLSDMYPSTVPSVDSAVDSWDGSAIDTSYGTQGTSFQASGYNFNTYDWRSPKQRGSLSPVTKPRSQTYPDVGLSYEDWDRSTASGFAGAADSAETEQEENFWSQALEDLETCGQSGILRELEATIMSGSTMSLNHEAPTPRSQLGRQASFQERSSSRPHYSQTTRSNTLPSDVGRKSVTLRKMKQEIKEIMSPTPVELHKVTLYKDSDMEDFGFSVADGLLEKGVYVKNIRPAGPGDLGGLKPYDRLLQVNHVRTRDFDCCLVVPLIAESGNKLDLVISRNPLASQKSIDQQSLPGDWSEQNSAFFQQPSHGGNLETREPTNTL

SEQ ID NO: 57846 - protein, 200 aa, Homo sapiens
MESHSCSPSWSTMTISAHCNLRLPSASQSVGITGVSHHIWPRIFYMTMAARDATSGSLSEESSALDLPSACDIRDYVLQGPSQEANSEAFSSLEFHSFPYSSDVDPDTSNLNIEQNNSWTAENFWLDPAVKGQSEKEEDDGLRKSLDRFYEMFGHPQPGSANSLSASVCKCLSQKITQLRGQESQKYALRSFQMARVIFN

SEQ ID NO: 57847 - protein, 85 aa, Homo sapiens
MQTSETGSDTGSTVTLQTSVASQAAVPTQVVQQVPVQQQVQQVQTVQQVQHVYPAQVQYVEGSDTVYTNGAMSRAPWSMILESSP

SEQ ID NO: 57848 - protein, 200 aa, Homo sapiens
MHTTESKNEHLEDENFQTSTTPQSLIDPNNTAQEETKTVLSDTEEIKPQTKKETYISCPLRGVLNVIITNGVILFVIWCMTWSILGSEALPGGNLFGLFIIFYSAIIGGKILQLIRIPLVPPLPPLLGMLLAGFTIRNVPFINEHVHVPNTWSSILRSIALTIILIRAGLGLDPQFCSRCCLSCCCCPLHDGAARKWIWC

SEQ ID NO: 57849 - protein, 55 aa, Homo sapiens
MKKKTFFLVTGDNVNSLALCDFDGDGKKELLVGSEDFDIRVFKEDEIVAEMTETE

SEQ ID NO: 57850 - protein, 772 aa, Homo sapiens
METKENRWVPVTVLPGCVGCRTVAALASWTVRDVKERIFAETGFPVSEQRLWRGGRELSDWIKIGDLTSKNCHLFVNLQSKGLKGGGRFGQTTPPLVDFLKDILRRYPEGGQILKELIQNAEDAGATEVKFLYDETQYGTETLWSKDMAPYQGPALYVYNNAVFTPEDWHGIQEIARSRKKDDPLKVGRFGIGFNSVYHITDVPCIFSGDQIGMLDPHQTLFGPHESGQCWNLKDDSKEISELSDQFAPFVGIFGSTKETFINGNFPGTFFRFPLRLQPSQLSSNLYNKQKVLELFESFRADADTVLLFLKSVQDVSLYVREADGTEKLVFRVTSSESKALKHERPNSIKILGTAISNYCKKTPSNNITCVTYHVNIVLEEESTKDAQKTSWLVCNSVGGRGISSKLDSLADELKFVPIIGIAMPLSSRDDEAKGATSDFSGKAFCFLPLPPGEESSTGLPVHISGFFGLTDNRRSIKWRELDQWRDPAALWNEFLVMNVVPKAYATLILDSIKRLEMEKSSDFPLSVDVIYKLWPEASKVKVHWQPVLEPLFSELLQNAVIYSISCDWVRLEQVYFSELDENLEYTKTVLNYLQSSGKQIAKVPGNVDAAVQLTAASGTTPVRKVTPAWVRQVLRKCAHLGCAEEKLHLLEFVLSDQAYSELLGLELLPLQNGNFVPFSSSVSDQDVIYITSAEYPRSLFPSLEGRFILDNLKPHLVAALKEAAQTRAQQQLWGYSGRPCTQLQLLNPERFARLIKEVMNTFWPGRELIVQ

SEQ ID NO: 57851 - protein, 172 aa, Homo sapiens
  MOD_RES (1)..(1): Any amino acid
XLREHHRATIKVIRRMQYFVAKKKFQQARKPYDVRDVIEQYSQGHLNLMVRIKELQRRLDQSIGKPSLFISVSEKSKDRGSNTIGARLNRVEDKVTQLDQRLALITDMLHQLLSLHGGSTPGSGGPPREGGAHITQPCGSGGSVDPELFLPSNTLPTYEQLTVPRRGPDEGS

SEQ ID NO: 57852 - protein, 161 aa, Homo sapiens
AFSKHQGLVSMEDVNIAAELYISNKQYDKALEIITDFSGIVLEKKTSEEGTSEENKAPENVTCTIPDGVPIDITVKLMVCLVHLNILEPLNPLLTTLVEQNPEDMGDLYLDVAEAFLDVGEYNSALPLLSALVCSERYNLAVVWLRHAGNTFLWEEEVLII

SEQ ID NO: 57853 - protein, 134 aa, Homo sapiens
MASAEPLTALSRWYLYAIHGYFCEVMFTAAWEFVVNLNWKFPGVTSVWALFIYGTSILIVERMYLRLRGRCPLLLRCLIYTLWTYLWEFTTGFILRQFNACPWDYSQFDFDFMGLITLEYAVPWFCGALIMEQF

SEQ ID NO: 57854 - protein, 174 aa, Homo sapiens
MAHCVTLVQLSISCDHLIDKDIGSKSDPLCVLLQDVGGGSWAELGRTERVRNCSSPEFSKTLQLEYRFETVQKLRFGIYDIDNKTPELRDDDFLGGAECSLGQIVSSQVLTLPLMLKPGKPAGRGTITVSAQELKDNRVVTMEVEARNLDKKDFLGKSDPFLEFFRQGDGKWHL

SEQ ID NO: 57855 - protein, 109 aa, Homo sapiens
MIPDSQKLLRCELESLKSQLQAQTKAFEFLNHSVTMLEKESCLQQIKIQQLEEVLSPTGRQGEKEEHKWGMEQGRQELYGALTQGLQGLEKTLRDSEEMQRARTTRCLQ

SEQ ID NO: 57856 - protein, 80 aa, Homo sapiens
MSVHQIRKHAVLPPIICRSDKEFLESVQRYIITETERLGCSEEGPADEYYIIYRNVFDKVIEHITAYKSILTSIKKEYDA

SEQ ID NO: 57857 - protein, 142 aa, Homo sapiens
MMAQKSQGSDNLQEGQEKSKREILKCTKSAWAPLDEWLPPDPEEESQSLTIPMLEDSKQESIQQWLDSGFFVSANENFQQVIDRTVSLYEQGMVQMTVKDYMRSLHQFSETPILSRGTSFNSCYSTASVPQSIPEWLEFWEI

SEQ ID NO: 57858 - protein, 111 aa, Homo sapiens
MELVLVFLCSLLAPMVLASAEKEKEMDPFHYDYQTLRIGGLVFAVVLFSVGILLILSRRCKCSFNQKPRAPGDEEAQQQSPRKQRTEVQPSGGSLWNLRRLLEPLDANVDA

SEQ ID NO: 57859 - protein, 195 aa, Homo sapiens
  MOD_RES (1)..(1): Any amino acid
XYSQEQRQAFAPFCAEDYTESLLQLHDAEIVRLKNYYEVHKELFEGVQKWEETWRLFLEFERKASDPNRFTNRGGNLLKEEKQRAKLQKMLPKLEEELKARIELWEQEHSKAFMVNGQKFMEYVAEQWEMHRLEKERAKQERQLKNKKQTETEMLYGSAPRTPSKRRGLAPNTPGKARKPVAASTCSGKKTPRTG

SEQ ID NO: 57860 - protein, 198 aa, Homo sapiens
MQVHKETIDAVPNAIPGRTDIELEIYGMEGIPEKDMDERRRLLEQKTQESQKKKQQDDSDEYDDDDSAASTSFQPQPVQPQQGYIPPMAQPGLPPVPGAPGMPPGIPPLMPGVPPLMPGMPPVMPGMPPGLHHQRKYTQSFCGENIMMPMGGMMPPGPGIPPLMPGMPPGMPPPVPRPGIPPMTQAQAVSAPGILNRP

SEQ ID NO: 57861 - protein, 95 aa, Homo sapiens
MAKSNGENGPRAPAAGESLSGTRESLAQGPDAATTDELSSLGSDSEANGFAERRIDKFGFIVGSQGAEGAFVCGAKRASRLLCGAVLGSTCQEAR

SEQ ID NO: 57862 - protein, 350 aa, Homo sapiens
MAAPTLGRLVLTHLLVALFGMGSWAAVNGIWVELPVVVKDLPEGWSLPSYLSVVVALGNLGLLVVTLWRQLAPGKGEQVPIQVVQVLSVVGTALLAPLWHHVAPVAGQLHSVAFLTLALVLAMACCTSNVTFLPFLSHLPPPFLRSFFLGQGLSALLPCVLALVQGVGRLECPPAPTNGTSGPPLDFPERFPASTFFWALTALLVTSAAAFRGLLLLLPSLPSVTTGGSGPELQLGSPGAEEEEKEEEEALPLQEPPSQAAGTIPGPDPEAHQLFSAHGAFLLGLMAFTSAVTNGVLPSVQSFSCLPYGRLAYHLAVVLGSAANPLACFLAMGVLCRCCRGCCVCVCSHM

SEQ ID NO: 57863 - protein, 79 aa, Homo sapiens
KVPVNELKVKMKPKPWSKRWERPNFNIKGIRFDLCLTEQQMKEAQKWNQPWLEFDMMREYDTSKIEAAIWKEIEASKRS

SEQ ID NO: 57864 - protein, 1179 aa, Homo sapiens
MDNFAEGDFTVADYALLEDCPHVDDCVFAAEFMSNDYVRVTQLYCDGVGVQYKDYIQSERNLEFDICSIWCSKPISVLQDYCDAIKINIFWPLLFQHQNSSVISRLHPCVDANNSRASEINLKKLQHLELMEDIVDLAKKVANDSFLIGGLLRIGCKIENKILAMEEALNWIKYAGDVTILTKLGSIDNCWPMLSIFFTEYKYHITKIVMEDCNLLEELKTQSCMDCIEEGELMKMKGNEEFSKERFDIAIIYYTRAIEYRPENYLLYGNRALCFLRTGQFRNALGDGKRATILKNTWPKGHYRYCDALSMLGEYDWALQANIKAQKLCKNDPEGIKDLIQQHVKLQKQIEDLQGRTANKDPIKAFYENRAYTPRSLSAPIFTTSLNFVEKERDFRKINHEMANGGNQNLKVADEALKVDDCDCHPEFSPPSSQPPKHKGKQKSRNNESEKFSSSSPLTLPADLKNILEKQFSKSSRAAHQDFANIMKMLRSLIQDGYMALLEQRCRSAAQAFTELLNGLDPQKIKQLNLAMINYVLVVYGLAISLLGIGQPEELSEAENQFKRIIEHYPSEGLDCLAYCGIGKVYLKKNRFLEALNHFEKARTLIYRLPGVLTWPTSNVIIEESQPQKIKMLLEKFVEECKFPPVPDAICCYQKCHGYSKIQIYITDPDFKGFIRISCCQYCKIEFHMNCWKKLKTTTFNDKIDKDFLQGICLTPDCEGVISKIIIFSSGGEVKCEFEHKVIKEKVPPRPILKQKCSSLEKLRLKEDKKLKRKIQKKEAKKLAQERMEEDLRESNPPKNEEQKETVDNVQRCQFLDDRILQCIKQYADKIKSGIQNTAMLLKELLSWKVLSTEDYTTCFSSRNFLNEAVDYVIRHLIQENNRVKTRIFLHVLSELKEVEPKLAAWIQKLNSFGLDATGTFFSRYGASLKLLDFSIMTFLWNEKYGHKLDSIEGKQLDYFSEPASLKEARCLIWLLEEHRDKFPALHSALDEFFDIMDSRCTVLRKQDSGEAPFSSTKVKNKSKKKKPKDSKPMLVGSGTTSVTSNNEIITSSEDHSNRNSDSAGPFAVPDHLRQDVEEFEALYDQHSNEYVVRNKKLWDMNPKQKCSTLYDYFSQFLEEHGPLDMSNKMFSAEYEFFPEETRQILEKAGGLKPFLLGCPRFVVIDNCIALKKVASRLK

SEQ ID NO: 57865 - protein, 156 aa, Homo sapiens
MKKVLLEMEDQKNSYEQKAKESLQKVLEEKMNAEQQLQSTQRSLALAEQKCEEWRSQYEALKEDWRTLGTQHRELESQLHVLQSKLQGADSRDLQMNQALRFLENEHQQLQAKIECLQGDRDLCSLDTQDLQEAMWAMAPSADGGDCCSTGSVPGQ

SEQ ID NO: 57866 - protein, 110 aa, Homo sapiens
  MOD_RES (1)..(1): Any amino acid
XSVQKGFQMLADPRSFDSNAFTLLLRAAFQSLLDAQADEAVLDHPDLKHIDPVVLKHCHAAAATYILEAGKHRADKSTLRIFYQAEMHRTTRIKITELNPHLMCVLCGGY

SEQ ID NO: 57867 - protein, 94 aa, Homo sapiens
CTSSCTPSCCQQSSCQPACCTSSPCQQACCVPVCCKTVCCKPSSCQPACCISSPCQQSCCVPVCCKPICCVPPACCTTSCCRPSSSVSLLCRPV

SEQ ID NO: 57868 - protein, 81 aa, Homo sapiens
MRCSPGGVWLALAASLLHVSLQGEFQRKLYKELVKNYNPLERPVANDSQPLTVYFSLSLLQIMDVDEKNQVLTTNIWLQMC

SEQ ID NO: 57869 - protein, 60 aa, Homo sapiens
MLWALWPRWLADKMLPLLGAVLLQKREKRGPLWRHWRCPKPTAMCNCGCPRRPQALPRLG

SEQ ID NO: 57870 - protein, 219 aa, Homo sapiens
MTDSATANGDDRDPEIELFVKAGIDGESIGNCPFSQRLFMILWLKGVVFNVTTVDLKRKPADLHNLAPGTHPPFLTFNGDVKTDVNKIEEFLEETLTPEKYPKLAAKHRESNTAGIDIFSKFSAYIKNTKQQNNAALERGLTKALKKLDDYLNTPLPEEIDANTCGEDKGSRRKFLDGDELTLADCNLLPKLHVVKVRELYPQGPARSSSILGPGHLCG

SEQ ID NO: 57871 - protein, 268 aa, Homo sapiens
MEEEETQLEEKNSLRVEGDNIYVRHSNLMLEELDKAQEDILKHQASISELKRNFMESTPEPRPNEWEKRRITPLSLQTQGSSHETLNIVEEKKRAEVGKDERVITEEMNGKEISPGSGPGEIRKVEPVTQKDSTSLSSESSSSSSESEEEDVGEYRPHHRVTEGTIREEQEYEEEVEEEPRPAAKVVEREEAVPEASPVTQAGASVITVETVIQENVGAQKIPGEKSVHEGALKQDMGEEAEEEPQKVNGEVSHVDIDVLPQIICCSE

SEQ ID NO: 57872 - protein, 364 aa, Homo sapiens
MARRPRHSIYSSDEDDEDFEMCDHDYDGLLPKSGKRHLGKTRWTREEDEKLKKLVEQNGTDDWKVIANYLPNRTDVQCQHRWQKVLNPELIKGPWTKEEDQRVIELVQKYGPKRWSVIAKHLKGRIGKQCRERWHNHLNPEVKKTSWTEEEDRIIYQAHKRLGNRWAEIAKLLPGRTDNAIKNHWNSTMRRKVEQEGYLQESSKASQPAVATSFQKNSHLMGFAQAPPTAQLPATGQPTVNNDYSYYHISEAQNVSSHVPYPVALHVNIVNVPQPAAAAIQRHYNDEDPEKEKRIKELELLLMSTENELKGQQVLPFLNTSSNHENSDLEMPSLTSTPLIGHKLTVTTPFHRDQTVKTQKENTV

SEQ ID NO: 57873 - protein, 179 aa, Homo sapiens
MSEPHRVQFTSLPGSLNPAFLKKSRKEEAGAGEQHQDCEPAAAAVRITLTLFEPDHKRCPEFFYPELVKNIRGKVKGLQPGDKKKDLSDPFNDEEKERHKVEALARKFEEKYGGKKRRKDRIQDLIDMGYGYDESDSFIDNSEAYDELVPASLTTKYGGFYINSGTLQFRQASESEDDF

SEQ ID NO: 57874 - protein, 27 aa, Homo sapiens
  MOD_RES (1)..(1): Any amino acid
XVSLLWAAPGQAMRKVCCYEDSMRRPV

SEQ ID NO: 57875 - protein, 61 aa, Homo sapiens
YNPYKYSDDNPYYNYYDTYERPRPGGRYRPGYGTGYFQYVQHTGQMSEIMITGCCSDFPKE

SEQ ID NO: 57876 - protein, 60 aa, Homo sapiens
MKVNYVFICFRKGREDRAPLLKTFSFLGFEIVRPGHPCVPSRPDVMFMVYPLDQNLSDED

SEQ ID NO: 57877 - protein, 362 aa, Homo sapiens
MEDAVQILLVFMDSGAGESGKSTIVKQMRILHVNGFNGEGGEEDPQAARSNSDGEKATKVQDIKNNLKEAIETIVAAMSNLVPPVELANPENQFRVDYILSVMNVPDFDFPPEFYEHAKALWEDEGVRACYERSNEYQLIDCAQYFLDKIDVIKQADYVPSDQDLLRCRVLTSGIFETKFQVDKVNFHMFDVGGQRDERRKWIQCFNDVTAIIFVVASSSYNMVIREDNQTNRLQEALNLFKSIWNNRWLRTISVILFLNKQDLLAEKVLAGKSKIEDYFPEFARYTTPEDATPEPGEDPRVTRAKYFIRDEFLRISTASGDGRHYCYPHFTCAVDTENIRRVFNDCRDIIQRMHLRQYELL

SEQ ID NO: 57878 - protein, 178 aa, Homo sapiens
NIKLEMYPPLNQTLSQEVVNTQDENGINRPVCSYVKPLRAGRLLDTPRQAARFVNVLGYERAPVIGGGGKQEQWCTLLAFLCRNKGDCEDHANLLCSLLLGYGLEAFVCVGTKAKGVPHAWVMTCGTDGAITFWESLTGHRYIHKPTNPDEPPVAEQPKPLYPYRTIGCVFNHQMFLG

SEQ ID NO: 57879 - protein, 319 aa, Homo sapiens
MGSNSEVARLLASSDPLAQIAEDKPYAELWMGTHPRGDAKILDNRISQKTLSQWIAENQDSLGSKVKDTFNGNLPFLFKVLSVETPLSIQAHPNKELAEKLHLQAPQHYPDANHKPEMAIALTPFQGLCGFRPVEEIVTFLKKVPEFQFLIGDEAATHLKQTMSHDSQAVASSLQSCFSHLMKSEKKVVVEQLNLLVKRISQQAAAGNNMEDIFGELLLQLHQQYPGDIGCFAIYFLNLLTLKPGEAMFLEANVPHAYLKGGEPHFSSEPHCHPCWALFPYLDKGRRRVVKETPKDLAALTSEGSWAQQATAGRDDECI

SEQ ID NO: 57880 - protein, 67 aa, Homo sapiens
MALSAQQIPRWFNSVKLRSLINAAQLTKRFTRPARTLLHGFSAQPQISSDNCFLQWGFKTYRTSSLW

SEQ ID NO: 57881 - protein, 23 aa, Homo sapiens
MRPEDRMFHIRAVILRALSLAFL

SEQ ID NO: 57882 - protein, 178 aa, Homo sapiens
MAADSIPTSSNMEETQQKSNLELLHISLLLIESRLEPVRFLRSTFTNNLVYDTSDSDDYHLLKDLEEGIQMLMGVRVAPGVPNPGSPLASRAGGEKHCCPLFSSQALTQENSPYSSFPLVNPPGLSLHPEGEGGKWINERGREQCPSAWSLLLLLHFAEAGRRQPPDWADPQADLQQV

SEQ ID NO: 57883 - protein, 192 aa, Homo sapiens
MAGGGGDLSTRMFTEDQGVDDRLLYDIVFKHFKRNKVEISNAIKKTFPFLEGLRDRDLITNKMFEDSQDSCRNLVPVQRVVYNVLSELEKTFNLPVLEALFSDVNMQEYPDLIHIYKGFENVIHDKLPLQESEEEEREERSGLQLSLEQGTGENSFRSLTWPPSGSPSHAGCLGGFLPPTPLNHTCCWFLLP

SEQ ID NO: 57884 - protein, 45 aa, Homo sapiens
MGSKSLAPALAAASVFPASVTWHSICEPTARPHSPWKASSSAAQP

SEQ ID NO: 57885 - protein, 72 aa, Homo sapiens
MNSLPAERIQEIQKAIELFSVGQGPAKTMEEASKRSYQFWDTQPVPKLGEVVNTHGPVEPDKDNIRQEPYTL

SEQ ID NO: 57886 - protein, 2968 aa, Homo sapiens
MDGRDFGPQRSVHGPPPPLLSGLAMDSHRVGAATAGRLPASGLPGPLPPGKYMAGLNLHPHPGEAFLGSFVASGMGPSASSHGSPVPLPSDLSFRSPTPSNLPMVQLWAAHAHEGFSHLPSGLYPSYLHLNHLEPPSSGSPLLSQLGQPSIFDTQKGQGPGGDGFYLPTAGAPGSLHSHAPSARTPGGGHSSGAPAKGSSSRDGPAKERAGRGGEPPPLFGKKDPRARGEEASGPRGVVDLTQEARAEGRQDRGPPRLAERLSPFLAESKTKNAALQPSVLTMCNGGAGDVGLPALVAEAGRGGAKEAARQDEGARLLRRTETLLPGPRPCPSPLPPPPAPPKGPPAPPAATPAGVYTVFREQGREHRVVAPTFVPSVEAFDERPGPIQIASQARDARAREREAGRPGVLQAPPGSPRPLDRPEGLREKNSVIRSLKRPPPADAPTVRATRASPDPRAYVPAKELLKPEADPRPCERAPRGPAGPAAQQAAKLFGLEPGRPPPTGPEHKWKPFELGNFAATQMAVLAAQHHHSRAEEEAAVVAASSSKKAYLDPGAVLPRSAATCGRPVADMHSAAHGSGEASAMQSLIKYSGSFARDAVAVRPGGCGKKSPFGGLGTMKPEPAPTSAGASRAQARLPHSGGPAAGGGRQLKRDPERPESAKAFGREGSGAQGEAEVRHPPVGIAVAVARQKDSGGSGRLGPGLVDQERSLSLSNVKGHGRADEDCVDDRARHREERLLGARLDRDQEKLLRESKELADLARLHPTSCAPNGLNPNLMVTGGPALAGSGRWSADPAAHLATHPWLPRSGNASMWLAGHPYGLGPPSLHQGMAPAFPPGLGGSLPSAYQFVRDPQSGQLVVIPSDHLPHFAELMERATVPPLWPALYPPGRSPLHHAQQLQLFSQQHFLRQQEFLYLQQQAAQALELQRSAQLVQERLKAQEHRAEMEEKGSKRGLEAAGKAGLATAGPGLLPRKPPGLAAGPAGTYGKAVSPPPSPRASPVAALKAKVIQKLEDVSKPPAYAYPATPSSHPTSPPPASPPPTPGITRKEEAPENVVEKKDLELEKEAPSPFQALFSDIPPRYPFQALPPHYGRPYPFLLQPTAAADADGLAPDVPLPADGPERLALSPEDKPIRLSPSKITEPLREGPEEEPLAEREVKAEVEDMDEGPTELPPLESPLPLPAAEAMATPSPAGGCGGGLLEAQALSATGQSCAEPSECPDFVEGPEPRVDSPGRTEPCTAALDLGVQLTPETLVEAKEEPVEVPVAVPVVEAVPEEGLAQVAPSESQPTLEMSDCDVPAGEGQCPSLEPQEAVPVLGSTCFLEEASSDQFLPSLEDPLAGMNALAAAAELPQARPLPSPGAAGAQALEKLEAAESLVLEQSFLHGITLLSEIAELELERRSQEMGGAERALVARPSLESLLAAGSHMLREVLDGPVVDPLKNLRLPRELKPNKKYSWMRKKEERMYAMKSSLEDMDALELDFRMRLAEVQRQYKEKQRELVKLQRRRDSEDRREEPHRSLARRGPGRPRKRTHAPSALSPPRKRGKSGHSSGKLSSKSLLTSDDYELGAGIRKRHKGSEEEHDALIGMGKARGRNQTWDEHEASSDFISQLKIKKKKMASDQEQLASKLDKALSLTKQDKLKSPFKFSDSAGGKSKTSGGCGRYLTPYDSLLGKNRKALAKGLGLSLKSSREGKHKRAAKTRKMEVGFKARGQPKSAHSPFASEVSSYSYNTDSEEDEEFLKDEWPAQGPSSSKLTPSLLCSMVAKNSKAAGGPKLTKRGLAAPRTLKPKPATSRKQPFCLLLREAEARSSFSDSSEESFDQDESSEEEDEEEELEEEDEASGGGYRLGARERALSPGLEESGLGLLARFAASALPSPTVGPSLSVVQLEAKQKARKKEERQSLLGTEFEYTDSESEVKVRKRSPAGLLRPKKGLGEPGPSLAAPTPGARGPDPSSPDKAKLAVEKGRKARKLRGPKEPGFEAGPEASDDDLWTRRRSERIFLHDASAAAPAPVSTAPATKTSRCAKGGPLSPRKDAGRAKDRKDPRKKKKGKEAGPGAGLPPPRAPALPSEARAPHASSLTAAKRSKAKAKGKEVKKENRGKGGAVSKLMESMAAEEDFEPNQDSSFSEDEHLPRGGAVERPLTPAPRSCIIDKDELKDGLRVLIPMDDKLLYAGHVQTVHSPDIYRVVVEGERGNRPHIYCLEQLLQEAIIDVRPASTRFLPQGTRIAAYWSQQYRCLYPGTVVRGLLDLEDDGDLITVEFDDGDTGRIPLSHIRLLPPDYKIQCAEPSPALLVPSAKRRSRKTSKDTGEGKDGGTAGSEEPGAKARGRGRKPSAKAKGGRAATLEEGNPTDEVPSTPLALEPSSTPGSKKSPPEPVDKRAKAPKARPAPPQPSPAPPAFTSCPAPEPFAELPAPATSLAPAPLITMPATRPKPKKARAAEESGAKGPRRPGEEAELLVKLDHEGVTSPKSKKAKEALLLREDPGAGGWQEPKSLLSLGSYPPAAGSSEPKAPWPKATDGDLAQEPGPGLTFEDSGNPKSPDKAQAEQDGAEESESSSSSSSGSSSSSSSSSSSGSETEGEEEGDKNGDGGCGTGGRNCSAASSRAASPASSSSSSSSSSSSSSSSSSSSSSSSSSSSSSSSSSSSSSSSSSSSSSSSSSSSSSSSSSTTDEDSSCSSDDEAAPAPTAGPSAQAALPTKATKQAGKARPSAHSPGKKTPAPQPQAPPPQPTQPLQPKAQAGAKSRPKKREGVHLPTTKELAKRQRLPSVENRPKIAAFLPARQLWKWFGKPTQRRGMKGKARKLFYKAIVRGKEMIRIGDCAVFLSAGRPNLPYIGRIQSMWESWGNNMVVRVKWFYHPEETSPGKQFHQGQHWDQKSSRSLPAALRVSSQRKDFMERALYQSSHVDENDVQTVSHKCLVVGLEQYEQMLKTKKYQDSEGLYYLAGTYEPTTGMIFSTDGVPVLC

SEQ ID NO: 57887 - protein, 170 aa, Homo sapiens
MKLYCLSGHPTLPCNVLKFKSTTIMLDCGLDMTSTLNFLPLPLVQSPRLSNLPGWSLKDGNAFLDKELKECSGHVFVDSVPEFCLPETELIDLSTVDVILISNYHCMMALPYITEHTGFTGTVYATEPTVQIGRLLMEELVNFIERVPKAQSASLWKNKDIQRSFLVRSR

SEQ ID NO: 57888 - protein, 61 aa, Homo sapiens
MSYKPIAPAPSSTPGSSTPGPGTPVPTGEDPAPPLLACRAVEVSKRRRPEFCNTGPAAYPR

SEQ ID NO: 57889 - protein, 172 aa, Homo sapiens
MLAPSWEEHATCLANAEEQDMQRVLIDISEKEAVNLQQDAFVVIGRDTRPSSEKLSQSVIDGVTVLGGQFHDYGLLTTPQLHYMVYCRNTGGRYGKATIEGYYQKLSKAFVELTKQASCSGDEYRSLKVDCANGIGALKLREMEHYFSQGLSVQLFNDGSKGKLNHLCGADF

SEQ ID NO: 57890 - protein, 43 aa, Homo sapiens
MARVCRRQQCSVERRGFRQELDSWRHKLIHCVPFPSVRRPAGP

SEQ ID NO: 57891 - protein, 197 aa, Homo sapiens
  MOD_RES (1)..(1): Any amino acid
XALLLKGDVMVTCYHKGGRGTDRTLVFRVQFHTCTIHGPQLTFPKDQLDEAWTDERFPFQASVEFVFSSSPEKIKGSTPRNDPSVSVDYNTTEPAVRWDSYENFNQHHEDSVDGAQAACRVGGSLTHTRGPLDGSPYAQVQRPPRQTPPAPSPEPPPPPMLSVSSDSGHSSTLTTEPAAESPGRPPPTAAERQELDR

SEQ ID NO: 57892 - protein, 64 aa, Homo sapiens
MNPTLILAAFCLGIASATLTFDHSLEAQWTKWKAMHNRLYGMIHLVRMSWVLGRSKEHQLHVCL

SEQ ID NO: 57893 - protein, 843 aa, Homo sapiens
MRLPDLRPWTSLLLVDAALLWLLQGPLGTLLPQGLPGLWLEGTLRLGGLWGLLKLRGLLGFVGTLLLPLCLATPLTVSLRALVAGASRAPPARVASAPWSWLLVGYGAAGLSWSLWAVLSPPGAQEKEQDQVNNKVLMWRLLKLSRPDLPLLVAAFFFLVLAVLGETLIPHYSGRVIDILGGDFDPHAFASAIFFMCLFSFGSSLSAGCRGGCFTYTMSRINLRIREQLFSSLLRQDLGFFQETKTGELNSRLSSDTTLMSNWLPLNANVLLRSLVKVVGLYGFMLSISPRLTLLSLLHMPFTIAAEKVYNTRHQEVLREIQDAVARAGQVVREAVGGLQTVRSFGAEEHEVCRYKEALEQCRQLYWRRDLERALYLLVRRVLHLGVQMLMLSCGLQQMQDGELTQGSLLSFMIYQESVGSYVQTLVYIYGDMLSNVGAAEKVFSYMDRQPNLPSPGTLAPTTLQGVVKFQDVSFAYPNRPDRPVLKGLTFTLRPGEVTALVGPNGSGKSTVAALLQNLYQPTGGQVLLDEKPISQYEHCYLHSQVVSVGQEPVLFSGSVRNNIAYGLQSCEDDKVMAAAQAAHADDFIQEMEHGIYTDVGEKGSQLAAGQKQRLAIARALVRDPRVLILDEATSALDVQCEQANGFWVGPLGGGSASESDPTGFLHDSRHRLSSDVGMFVALTKLGQPDAEQWNSRLDLLERSRQAVDGVCRHNYRLGAPFTVGRKVQPEVTVYPERTPLLHQHNLLHCSVTGFYPGDIKIKWFLNGQEERAGVMSTGPIRNGDWTFQTVVMLEMTPELGHVYTCLVDHSSLLSPVSVEWRAQSEYSWRKMLSGIAAFLLGL

SEQ ID NO: 57894 - protein, 78 aa, Homo sapiens
  MOD_RES (1)..(1): Any amino acid
XKREILPKALKDKGIAMESITVYQTVAHPGIQGNLNSYYSQQGVPASITFFSPSGLTYSLKHIQELSGDNIDQIKKHP

SEQ ID NO: 57895 - protein, 567 aa, Homo sapiens
  MOD_RES (1)..(1): Any amino acid
XITVEEEDGEIRLLVIRAQGLLGRVTAEFRTVSLTAFSPEDYQNVAGTLEFQPGERYKYIFINITDNSIPELEKSFKVELLNLEGGAELFRVDGSGSGDGDMEFFLPTIHKRASLGVASQILVTIAASDHAHGVFEFSPESLFVSGTEPEDGYSTVTLNVIRHHGTLSPVTLHWNIDSDPDGDLAFTSGNITFEIGQTSANITVEILPDEDPELDKAFSVSVLSVSSGSLGAHINATLTVLASDDPYGIFIFSEKNRPVKVEEATQNITLSIIRLKGLMGKVLVSYATLDDMEKPPYFPPNLARATQGRDYIPASGFALFGANQSEATIAISILDDDEPERSESVFIELLNSTLVAKVQSRSIPNSPRLGPKVETIAQLIIIANDDAFGTLQLSAPIVRVAENHVGPIINVTRTGGAFADVSVKFKAVPITAIAGEDYSIASSDVVLLEGETSKAVPIYVINDIYPELEESFLVQLMNETTGGARLGALTEAVIIIEASDDPYGLFGFQITKLIVEEPEFNSVKVNLPIIRNSGTLGNVTVQWVATINGQLATGDLRVVSGYPSATN

SEQ ID NO: 57896 - protein, 840 aa, Homo sapiens
  MOD_RES (1)..(1): Any amino acid
XPPPGPMKKDKDQDSITGVSENGEGIILPSIIAPSSLASEKVDFSSSSDSESEMGPQEATQAESEDGKLTLPLAGIMQHDATKLLPSVTELFPEFRPGKVLRFLRLFGPGKNVPSVWRSARRKRKKKHRELIQEEQIQEVECSVESEVSQKSLWNYDYAPPPPPEQCLSDDEITMMAPVESKFSQSTGDIDKVTDTKPRVAEWRYGPARLWYDMLGVPEDGSGFDYGFKLRKTEHEPVIKSRMIEEFRKLEENNGTDLLADENFLMVTQLHWEDDIIWDGEDVKHKGTKPQRASLAGWLPSSMTRNAMAYNVQQGFAATLDDDKPWYSIFPIDNEDLVYGRWEDNIIWDAQAMPRLLEPPVLTLDPNDENLILEIPDEKEEATSNSPSKESKKESSLKKSRILLGKTGVIKEEPQQNMSQPEVKDPWNLSNDEYYYPKQQGLRGTFGGNIIQHSIPAVELRQPFFPTHMGPIKLRQFHRPPLKKYSFGALSQPGPHSVQPLLKHIKKKAKMREQERQASGGGEMFFMRTPQDLTGKDGDLILAEYSEENGPLMMQVGMATKIKNYYKRKPGKDPGAPDCKYGETVYCHTSPFLGSLHPGQLLQAFENNLFRAPIYLHKMPETDFLIIRTRQGYYIRELVDIFVVGQQCPLFEVPGPNSKRANTHIRDFLQVFIYRLFWKSKDRPRRIRMEDIKKAFPSHSESSIRKRLKLCADFKRTGMDSNWWVLKSDFRLPTEEEIRAMVSPEQCCAYYSMIAAEQRLKDAGYGEKSFFAPEEENEEDFQMKIDDEVRTAPWNTTRAFIAAMKGKCLLEVTGVADPTGCGEGFSYVKIPNKPTQQKVG

SEQ ID NO: 57897 - protein, 62 aa, Homo sapiens
MSIMEMQAMEVNTSASEILYSAPPGDPLSTNYSLAPNTPINQNVSLHQASLGGCSQDFLLFS

SEQ ID NO: 57898 - protein, 257 aa, Homo sapiens
MLKPLWKAAVAPTWPCSMPPRRPWDREAGTVLGALAVLWLGSVALICLLWQVPRPPTWGQVQPKDVPRSWEHGSSPAWEPLEAEARQQRDSCQLVLVESIPQDLPSAAGSPSAQPLGQAWLQLLDTAQESVHVASYYWSLTGPDIGVNDSSSQLGEALLQKLQQLLGRNISLAVATSSPTLARTSTDLQVLAARGAHVRQVPMGRLTRGVLHSKFWVVDGRHIYMGSANMDWRSLTQVKELGAVIYNCSHLAQDLEK

SEQ ID NO: 57899 - protein, 131 aa, Homo sapiens
PKLQLKNSPPYILDILPDTYQHLRLILSKYDDNQKLAQLSENEYFKIYIDSLMKKSKRAIRLFKEGKERMYEEQSQDRRNLTKLSLIFSHMLAEIKAIFPNGQFQGDNFRITKADAAEFWRKFFGDKPPGL

SEQ ID NO: 57900 - protein, 928 aa, Homo sapiens
MVSKSDQLLIVVSILEGRHFPKRPKHMLVVEAKFDGEQLATDPVDHTDQPEFATELAWEIDRKALHQHRLQRTPIKLQCFALDPVTSAKETIGYIVLDLRTAQETKQAPKWYQLLSNKYTKFKSEIQISIALETDTKPPVDSFKAKGAPPRDGKVPAILAGLDPRDIVAVLNEEGGYHQIGPAEYCTDSFIMSVTIAFATQLEQLIPCTMKLPERQPEFFFYYSLLGNDVTNEPFNDLINPNFEPERASVRIRSSVEILRVYLALQSKLQIHLCCGDQSLGSTEIPLTGLLKKGSTEINQHPVTVEGAFTLDPPNRAKQKLAPIPVELAPTVGVSVALQREGIDSQSLIELKTQNEHEPEHSKKKVLTPIKEKTLTGPKSPTVSPVPSHNQSPPTKDDATESEVESLQYDKDTKPNPKASSSVPASLAQLVTTSNASEVASGQKIAVPATSHHFCFSIDLRSIHALEIGFPINCILRYSYPFFGSAAPIMTNPPVEVRKNMEVFLPQSYCAFDFATMPHQLQDTFLRIPLLVELWHKDKMSKDLLLGIARIQLSNILSSEKTRFLGSNGEQCWRQTYSESVPVIAAQGSNNRIADLSYTVTLEDYGLVKMREIFISDSSQGVSAVQQKPSSLPPAPCPSEIQTEPRETLEYKAALELEMWKEMQEDIFENQLKQKELAHMQALAEEWKKRDRERESLVKKKVAEYTILEGKLQKTLIDLEKREQQLASVESELQREKKELQSERQRNLQELQDSIRRAKEDCIHQVELERLKIKQLEEDKHRLQQQLNDAENKYKILEKEFQQFKDQQNNKPEIRLQSEINLLTLEKVELERKLESATKSKLHYKQQWGRALKELARLKQREQESQMARLKKQQEELEQMRLRYLAAEEKDTVKTERQELLDIRNELNSDIKKTNTVATVAFVLDFSG

SEQ ID NO: 57901 - protein, 59 aa, Homo sapiens
  MOD_RES (1)..(1): Any amino acid
XNSYSTPAQSGADYYDYGHGLSEETYDSYGQEEWTNSRHKAPSARTAKGVYRDQPYGRY

SEQ ID NO: 57902 - protein, 149 aa, Homo sapiens
GRGGSMFRLLSWSLGRGFLRAAGRRCRGCSARLLPGLAGGPGPEVQVPPSRVAPHGRGPGLLPLLAALAWFSRPAAAEEEEQQGADGAAAEDGADEAEAEIIQLLKRAKLSIMKDEPEEAELILHDALRLAYQTDNKKAITYTYDLINW

SEQ ID NO: 57903 - protein, 97 aa, Homo sapiens
MDTNDDPDEDHLTSYDIQLSIQESIEASKTALCPERFVPLSAQNRKLVEAIKQGHIPELQEYVKYKYAMDEADEKGWFPLHEAVVQPIQQILEIVLD

SEQ ID NO: 57904 - protein, 1366 aa, Homo sapiens
MKSGSGGGSPTSLWGLLFLSAALSLWPTSGEICGPGIDIRNDYQQLKRLENCTVIEGYLHILLISKAEDYRSYRFPKLTVITEYLLLFRVAGLESLGDLFPNLTVIRGWKLFYNYALVIFEMTNLKDIGLYNLRNITRGAIRIEKNADLCYLSTVDWSLILDAVSNNYIVGNKPPKECGDLCPGTMEEKPMCEKTTINNEYNYRCWTTNRCQKMCPSTCGKRACTENNECCHPECLGSCSAPDNDTACVACRHYYYAGVCVPACPPNTYRFEGWRCVDRDFCANILSAESSDSEGFVIHDGECMQECPSGFIRNGSQSMYCIPCEGPCPKVCEEEKKTKTIDSVTSAQMLQGCTIFKGNLLINIRRGNNIASELENFMGLIEVVTGYVKIRHSHALVSLSFLKNLRLILGEEQLEGNYSFYVLDNQNLQQLWDWDHRNLTIKAGKMYFAFNPKLCVSEIYRMEEVTGTKGRQSKGDINTRNNGERASCESDVLHFTSTTTSKNRIIITWHRYRPPDYRDLISFTVYYKEAPFKNVTEYDGQDACGSNSWNMVDVDLPPNKDVEPGILLHGLKPWTQYAVYVKAVTLTMVENDHIRGAKSEILYIRTNASVPSIPLDVLSASNSSSQLIVKWNPPSLPNGNLSYYIVRWQRQPQDGYLYRHNYCSKDKIPIRKYADGTIDIEEVTENPKTEVCGGEKGPCCACPKTEAEKQAEKEEAEYRKVFENFLHNSIFVPRPERKRRDVMQVANTTMSSRSRNTTAADTYNITDPEELETEYPFFESRVDNKERTVISNLRPFTLYRIDIHSCNHEAEKLGCSASNFVFARTMPAEGADDIPGPVTWEPRPENSIFLKWPEPENPNGLILMYEIKYGSQVEDQRECVSRQEYRKYGGAKLNRLNPGNYTARIQATSLSGNGSWTDPVFFYVQAKRYENFIHLIIALPVAVLLIVGGLVIMLYVFHRKRNNSRLGNGVLYASVNPEYFSAADVYVPDEWEVAREKITMSRELGQGSFGMVYEGVAKGVVKDEPETRVAIKTVNEAASMRERIEFLNEASVMKEFNCHHVVRLLGVVSQGQPTLVIMELMTRGDLKSYLRSLRPEMENNPVLAPPSLSKMIQMAGEIADGMAYLNANKFVHRDLAARNCMVAEDFTVKIGDFGMTRDIYETDYYRKGGKGLLPVRWMSPESLKDGVFTTYSDVWSFGVVLWEIATLAEQPYQGLSNEQVLRFVMEGGLLDKPDNCPDMLFELMRMCWQYNPKMRPSFLEIISSIKEEMEPGFREVSFYYSEENKLPEPEELDLEPENMESVPLDPSASSSSLPLPDRHSGHKAENGPGPGVLVLRASFDERQPYAHMNGGRKNERALPLPQSSTC

SEQ ID NO: 57905 - protein, 1230 aa, Homo sapiens
MANGGGGGGGSSGGGGGGGGSSLRMSSNIHANHLSLDASSSSSSSSSSSSSSSSSSSSSSVHEPKMDALIIPVTMEVPCDSRGQRMWWAFLASSMVTFFGGLFIILLWRTLKYLWTVCCHCGGKTKEAQKINNGSSQADGTLKPVDEKEEAVAAEVGWMTSVKDWAGVMISAQTLTGRVLVVLVFALSIGALVIYFIDSSNPIESCQNFYKDFTLQIDMAFNVFFLLYFGLRFIAANDKLWFWLEVNSVVDFFTVPPVFVSVYLNRSWLGLRFLRALRLIQFSEILQFLNILKTSNSIKLVNLLSIFISTWLTAAGFIHLVENSGDPWENFQNNQALTYWECVYLLMVTMSTVGYGDVYAKTTLGRLFMVFFILGGLAMFASYVPEIIELIGNRKKYGGSYSAVSGRKHIVVCGHITLESVSNFLKDFLHKDRDDVNVEIVFLHNISPNLELEALFKRHFTQVEFYQGSVLNPHDLARVKIESADACLILANKYCADPDAEDASNIMRVISIKNYHPKIRIITQMLQYHNKAHLLNIPSWNWKEGDDAICLAELKLGFIAQSCLAQGLSTMLANLFSMRSFIKIEEDTWQKYYLEGVSNEMYTEYLSSAFVGLSFPTVCELCFVKLKLLMIAIEYKSANRESRILINPGNHLKIQEGTLGFFIASDAKEVKRAFFYCKACHDDITDPKRIKKCGCKRLEDEQPSTLSPKKKQRNGGMRNSPNTSPKLMRHDPLLIPGNDQIDNMDSNVKKYDSTGMFHWCAPKEIEKVILTRSEAAMTVLSGHVVVCIFGDVSSALIGLRNLVMPLRASNFHYHELKHIVFVGSIEYLKREWETLHNFPKVSILPGTPLSRADLRAVNINLCDMCVILSANQNNIDDTSLQDKECILASLNIKSMQFDDSIGVLQANSQGFTPPGMDRSSPDNSPVHGMLRQPSITTGVNIPIITELVNDTNVQFLDQDDDDDPDTELYLTQPFACGTAFAVSVLDSLMSATYFNDNILTLIRTLVTGGATPELEALIAEENALRGGYSTPQTLANRDRCRVAQLALLDGPFADLGDGGCYGDLFCKALKTYNMLCFGIYRLRDAHLSTPSQCTKRYVITNPPYEFELVPTDLIFCLMQFDHNAGQSRASLSHSSHSSQSSSKKSSSVHSIPSTANRQNRPKSRESRDKQNATRMNRMGQEKKWFTDEPDNAYPRNIQIKPMSTHMANQINQYKSTSSLIPPIREVEDEC

SEQ ID NO: 57906 - protein, 1275 aa, Homo sapiens
MDWDDEYSHNSFDLHCLLNSFPGDLEFEQIFSDIDEKIEQNAASIKHCIKEIQSEINKQCPGVQLQTTTDCFEWLTNYNYSTSESSFISHGDLIKFFKTLQDLLKNEQNQEEMTLDLLWDLSCHSSVSFPSTLSGTSFHFLSRTSLHSVEDNSSMDVKSMWDDIRLHLRRFLVSKLQSHNEINNSQQKILLKKQCLQQLLFLYPESEVIIKYQNIQNKLLANLLWNCFPSYNRDSNLDVIAHGYQSTMLKLYSVIKEDFNTLCEILAPSSMVKFIKETYLDTVTEEMAKFLENFCELQFRENAVRVVKTSKSSSKHRGAVHALVTTECPQKGRNFSLPLDKVEFLSQLIKSFMKLEKGVQELFDEILLSLKITRDTSGILEKSDREVVMEKPRANETNIPSEQSLPGKEATLLDFGWRSAFKEVSLPMAHCVVTAIEGFSTKILQQEQNERSSAVSYAMNLVNVQQVWQDSHMFPEEEQPKKIGKFCSDIMEKLDTMLPLALACRDDSFQEIRANLVEACCKVATAVLQRLQERAKEVPSKAPLKNLHTYLSTAVYVFQHFKRYDNLMKEMTKKPIFLVLVQRYQEFINTLQFQVTNYCVRVCATSILQDAESHHWDDYKAFYEGERCSFSIQMWHYFCWSLHYDLWTILPPKLAQEILVEVLEKSLSLLASRYARAHPSRKRTPQLRLDVTTILICTENMLWSVCTSVQKLLNPHQHTDDKIFKIHTHCNNLFTTLVILTSPLTELYKTFQHGLDESASDSLKSFFKQPLYWVSCISHFYPSLLRTPSAGGLKAEGQLKLLLSQPRCNWNLLLETLLHHDGLLLRILLKSSKQVSDTENNLNQGPSLMEAIFKILYHCSFSPQTFANVFVSYMEEEQLWDFLYNIPVSTCVEYELEVIRCLRLALTDAIKDTVQQIVSVMSSRRNCETNLNKHIVPDCLLESMPKEWNYSPKETNRKESCKSFTRLTAQAVSIVISKLPTVIACLPPPVKYFFFLSERKMSKKFVELKKAGLLVWNLIVIICRIFEDGNTVELLTGASLDRWSKEKLGLICMCLKSIMGDQTSIHNQMIQKVIQSIEQQKPNWIERQLLKARKLSTECAFMTIEKSTALQEGDVALELTEQKINTMVLDLCHKPGGREYLRQIYHIMQLNEEYLKEQLFSMNSSEEKPLPIRPLKTTLRSIEDQPSAFNPFHVYKAFSENMLDQVSITKWNWNWAKLLPNYLRLDKMTFSVLLKNRWEMKKDETLEEEEKAILEHLKQICTPQNSSASDNIEEQ

SEQ ID NO: 57907 - protein, 162 aa, Homo sapiens
MFWTFKEWFWLERFWLPPTIKWSDLEDHDGLVFVKPSHLYVTIPYAFLLLIIRRVFEKFVASPLAKSFGIKETVRKVTPNTVLENFFKHSTRQPLQTDIYGLAKKCNLTERQVERWFRSRRNQERPSRLKKFQEACWRFAFYLMITVAGIAFLYDKPWLYDL

SEQ ID NO: 57908 - protein, 291 aa, Homo sapiens
MDSEGGSLLLDEDSEVFKMLQENREGRAAPRQSSSFRLLQEALEAEERDGAGEGLARGCIVPGVTSTYRRIPDAAHGCSSWERGDKFRGVGREALFLKLASRDSGVEMAVGDSPLAALPGLSQDSLDFESSGSSEPPAQVGRLLASQKLGEVLERSRRLPTAPTSLSGQHRSLRLASKPEREVPLGAGQQESMEADTDLEAGLEEEAVGGLGPGAWACLPGQGLRYLEHLCLVLEQMARLQQLYLQLRIQRPPGDPGEEESTRAPLPSPLHTPGNRGQGPWELLSQTEHTG

SEQ ID NO: 57909 - protein, 205 aa, Homo sapiens
  MOD_RES (1)..(1): Any amino acid
XLPQEFPEVVPLNIGGAHFTTRLSTLRCYEDTMLAAMFSGRHYIPTDSEGRYFIDRDGTHFGDVLNFLRSGDLPPRERVRAVYKEAQYYAIGPLLEQLENMQPLKGEKVRQAFLGLMPYYKDHLERIVEIARLRAVQRKARFAKLKSLTPSWLMSVLIKMPPGVTSWINAERRLYLETPIGPERQNNEKKSPVQLPAGVFQHFMG

SEQ ID NO: 57910 - protein, 69 aa, Homo sapiens
  MOD_RES (1)..(1): Any amino acid
XFQIRAGNSQGDFYIRQINNVSAMLVLARPVTGPREYVLDLEMVTMNSLMSYRASSVLRLTVFVGAYTF

SEQ ID NO: 57911 - protein, 172 aa, Homo sapiens
MWSLLLCGLSIALPLSVTADGCKDIFMKNEILSASQPFAFNCTFPPITSGEVSVTWYKNSSKIPVSKIIQSRIHQDETWILFLPMEWGDSGVYQCVIKGRDSCHRIHVNLTVFEKHWCDTSIGGLPNLSDEYKQILHLGKDDSLTCHLHFPKSCVLGPIKWYKDCNEIKGER

SEQ ID NO: 57912 - protein, 795 aa, Homo sapiens
MHCEVAEAHSDKRPKEAPGAPGPDRGPASLGAHMAFRVTVSGGGCGDRGPRDLLARPPAPPPRAHDLLRPRSPRDYGPSKAAAAGKVNGSYGHRTPGSEKSLLDLDLAEGPGPTCCQGLFLPAGSPPPRAHPQACERLLHFPHPDRSPRPQATYVNGSLPTTQHIKQESLPDYQAMAEARTSLSAHCRGPLATGLHPDLDLPGRSLATPAPSCYLLGSEPSSGLGLQPETHLPEGSLKRCCVLGLPPTSPASSSPCASSDVTSIIRSSQTSLVTCVNGLRSPPLTGDLGGPSKRARPGPASTDSHEGSLQLEACRKASFLKQEPADEFSELFGPHQQGLPPPYPLSQLPPGPSLGGLGLGLAGRVVAGRQACRWVDCCAAYEQQEELVRHIEKSHIDQRKGEDFTCFWAGCVRRYKPFNARYKLLIHMRVHSGEKPNKCMFEGCSKAFSRLENLKIHLRSHTGEKPYLCQHPGCQKAFSNSSDRAKHQRTHLDTKPYACQIPGCSKRYTDPSSLRKHVKAHSAKEQQVRKKLHAGPDTEADVLTECLVLQQLHTSTQLAASDGKGGCGLGQELLPGVYPGSITPHNGLASGLLPPAHDVPSRHHPLDATTSSHHHLSPLPMAESTRDGLGPGLLSPIVSPLKGLGPPPLPPSSQSHSPGGQPFPTLPSKPSYPPFQSPPPPPLPSPQGYQGSFHSIQSCFPYGDCYRMAEPAAGGDGLVGETHGFNPLRPNGYHSLSTPLPATGYEALAEASCPTALPQQPSEDVVSSGPEDCGFFPNGAFDHCLGHIPSIYTDT

SEQ ID NO: 57913 - protein, 396 aa, Homo sapiens
MPEGEDFGPGKRALWRSQCQPAAVPGARVMSGPCCHGAHSPGVETDPKVKKNWEVINSKPDERPRLSHCIAESWMNFSIFLQEMSLFKQQSPGKFCLLVCSVCTFFTILGSYIPGVILSYLLLLCAFLCPLFKCNDIGQKIYSKIKSVLLKLDFGIGEYINQKKRERSEADKEKSHKDDSELDFSALCPKISLTVAAKELSVSDTDVSEVSWTDNGTFNLSEGYTPQTDTSDDLDRPSEEVFSRDLSDFPSLENGMGTNDEDELSLGLPTELKRKKEQLDSGHRPSKETQSAAGLTLPLNSDQTFHLMSNLAGDVITAAVTAAIKDQLEGVQQALSQAAPIPEEDTDTEEGDDFELLDQSELDQIESELGLTQDQEAEAQQNKKSSGFLSNLLGGH

SEQ ID NO: 57914 - protein, 90 aa, Homo sapiens
DCLQCFFQQDALTWNNEIHCSFCETKQETAVRASISKAPKIIIFHLKRSMRRFVSNIYRASVVGLLEGKFTKCGPPVTGFFGVFNSQTLH

SEQ ID NO: 57915 - protein, 104 aa, Homo sapiens
MAMRELVEAECGGANPLMKLAGHFTQDKALRQEGLRPGPWPPGAPASEAASKPLGVASEDELVAEFLQDQNAPLVSRAPQTFKMDDLLAEMQQIEQSNFRQAPQ

SEQ ID NO: 57916 - protein, 254 aa, Homo sapiens
MAAGVDCGDGVGARQHVFLVSEYLKDASKKMKNGLMFVKLVNPCSGEGAIYLFNMCLQQLFEVKVFKEKHHSWFINQSVQSGGLLHFATPVDPLFLLLHYLIKADKEGKFQPLDQVVVDNVFPNCILLLKLPGLEKLLHHVTEEKEIDNKKYYKYSKEKTLKWLEKKVNQTVAALKTNNVNVSSRVQSTAFFSGDQASTDKEEDYIRYAHGLISDYIPKELSDDLSKYLKLPEPSASLPNPPSKMAAQRQKRGK

SEQ ID NO: 57917 - protein, 207 aa, Homo sapiens
MGRARKSGLGQRSRPTASRSEAAVQGNKMLNYSAPSAGGCLLDRKAVGTPAGGGFPRRHSVTLPSSKFHQNQLLSSLKGEPAPALSSRDSRFRDRSFSEGGERLLPTQKQPGGGQVNSSRYKTELCRPFEENGACKYGDKCQFAHGIHELRSLTRHPKYKTELCRTFHTIGFCPYGPRCHFIHNAEERRALAGARDLSADRPRLQHS

SEQ ID NO: 57918 - protein, 1001 aa, Homo sapiens
MFHLRTCAAKLRPLTASQTVKTFSQNRPAAARTFQQIRCYSAPVAAEPFLSGTSSNYVEEMYCAWLENPKSVHKSWDIFFRNTNAGAPPGTAYQSPLPLSRGSLAAVAHAQSLVEAQPNVDKLVEDHLAVQSLIRAYQIRGHHVAQLDPLGILDADLDSSVPADIISSTDKLGFYGLDESDLDKVFHLPTTTFIGGQESALPLREIIRRLEMAYCQHIGVEFMFINDLEQCQWIRQKFETPGIMQFTNEEKRTLLARLVRSTRFEEFLQRKWSSEKRFGLEGCEVLIPALKTIIDKSSENGVDYVIMGMPHRGRLNVLANVIRKELEQIFCQFDSKLEAADEGSGDVKYHLGMYHRRINRVTDRNITLSLVANPSHLEAADPVVMGKTKAEQFYCGDTEGKKVMSILLHGDAAFAGQGIVYETFHLSDLPSYTTHGTVHVVVNNQIGFTTDPRMARSSPYPTDVARVVNAPIFHVNSDDPEAVMYVCKVAAEWRSTFHKDVVVDLVCYRRNGHNEMDEPMFTQPLMYKQIRKQKPVLQKYAELLVSQGVVNQPEYEEEISKYDKICEEAFARSKDEKILHIKHWLDSPWPGFFTLDGQPRSMSCPSTGLTEDILTHIGNVASSVPVENFTIHGGLSRILKTRGEMVKNRTVDWALAEYMAFGSLLKEGIHIRLSGQDVERGTFSHRHHVLHDQNVDKRTCIPMNHLWPNQAPYTVCNSSLSEYGVLGLAGLRMASPNALVLWEAQFGDFHNTAQCIIDQFICPGQAKWVRQNGIVLLLPHGMEGMGPEHSSARPERFLQMCNDDPDVLPDLKEANFDINQLYDCNWVVVNCSTPGNFFHVLRRQILLPFRKPLIIFTPKSLLRHPEARSSFDEMLPGTHFQRVIPEDGPAAQNPENVKRLLFCTGKVYYDLTRERKARDMVGQVAITRIEQLSPFPFDLLLKEVQKYPNAELAWCQEEHKNQGYYDYVKPRLRTTISRAKPVWYAGRDPAAAPATGNKKTH

SEQ ID NO: 57919 - protein, 716 aa, Homo sapiens
MASTRSIELEHFEERDKRPRPGSRRGAPSSSGGSSSSGPKGNGLIPSPAHSAHCSFYRTRTLQALSSEKKAKKARFYRNGDRYFKGLVFAISSDRFRSFDALLIELTRSLSDNVNLPQGVRTIYTIDGSRKVTSLDELLEGESYVCASNEPFRKVDYTKNINPNWSVNIKGGTSRALAAASSVKSEVKESKDFIKPKLVTVIRSGVKPRKAVRILLNKKTAHSFEQVLTDITEAIKLDSGVVKRLCTLDGKQVTCLQDFFGDDDVFIACGPEKFRYAQDDFVLDHSECRVLKSSYSRSSAVKYSGSKSPGPSRRSKSPASVKRGGHYSSAYSTAKSPVNGTPSSQLSTPKSTKSSSSSPTSPGSFRGLKISAHGRSSSNVNGGPELDRCISPEGVNGNRCSESSTLLEKYKIGKVIGDGNFAVVKECIDRSTGKEFALKIIDKAKCCGKEHLIENEVSILRRVKHPNIIMLVEEMETATELFLVMELVKGGDLFDAITSSTKYTERDGSAMVYNLANALRYLHGLSIVHRDIKPENLLVCEYPDGTKSLKLGDFGLATVVEGPLYTVCGTPTYVAPEIIAETGYGLKVDIWAAGVITYILLCGFPPFRSENNLQEDLFDQILAGKLEFPAPYWDNITDSAKELISQMLQVNVEARCTAGQILSHPWVSDDASQENNMQAEVTGKLKQHFNNALPKQNSTTTGVSVIMVQGHEHGSR

SEQ ID NO: 57920 - protein, 214 aa, Homo sapiens
MLIKGGNANATVTKVLKDVYALKKPYGVLYKKKNITRPFEDQTSLEFFSKKSDCSLFMFGSHNKKRPNNLVIGRMYDYHVLDMIELGIENFVSLKDIKNSKCPEGTKPMLIFAGDDFDVTEDYRRLKSLLIDFFRGPTVSNIRLAGLEYVLHFTALNGKIYFRSYKLLLKKSGCRTPRIELEEMGPSLDLVLRRTHLASDDLYKLSMKMPKALK

SEQ ID NO: 57921 - protein, 157 aa, Homo sapiens
  MOD_RES (1)..(1): Any amino acid
XLSANLLGDSGLRCLLECLPQVPISGLLDLSHNSISQESALYLLETLPSCPRVREASVNLGSEQSFRIHFSREDQAGKTLRLSECSFRPEHVSRLATGLSKSLQLTELTLTQCCLGQKQLAILLSLVGRPAGLFSLRLHKAHRETVLPHTGGLCFGI

SEQ ID NO: 57922 - protein, 73 aa, Homo sapiens
MQVGQTGKIVAPELYIAVGISGAIQHLAGMKDSKTIVAINKDPEAPIFQVADYGIVADLFKVVPEMTEILKKK

SEQ ID NO: 57923 - protein, 122 aa, Homo sapiens
MDVSLAYRDDAFAEWTEMAHERVPRKLKCTFTSPKTPEHEGRYYECDVLPFMEIGSVAHKFYLLNIRLPVNEKKKINVGIGEIKDIRLVGIHQNGGFTKVWFAMKTFLTPSIFIIMVWYWRR

SEQ ID NO: 57924 - protein, 113 aa, Homo sapiens
MGLETEKADVQLFMDDDSYSHHSGLEYADPEKFADSDQDRDPHRLNSHLKLGFEDVIAEPVTTHSFDKVWICSHALFEISKYVMYKFLTVFLAIPLAFIAGILFATLSCLHIW

SEQ ID NO: 57925 - protein, 206 aa, Homo sapiens
LTVNASMSRFPPHMVPPHHTLHTTGIPHPAIVTPTVKQESSQSDVGSLHSSKHQDSKKEEEKKKPHIKKPLNAFMLYMKEMRAKVVAECTLKESAAINQILGRRWHALSREEQAKYYELARKERQLHMQLYPGWSARDNYGKKKKRKRDKQPGETNDLSAPKKCRARFGLDQQNNWCGPCRRKKKCVRYIQGEGSCLSPPSSDGSL

SEQ ID NO: 57926 - protein, 262 aa, Homo sapiens
MNDWHRIFTQNVLVPPHPQRARQPWKESTAFQCVLKWLDGPVIRQGVLEVLSEVECHLRVSFFDVTYRHFFGRTWKTTVKPTKRPPSRIVFNEPLYFHTSLNHPHIVAVVEVVAEGKKRDGSLQTLSCGFGILRIFSNQPDSPISASQDKRLRLYHGTPRALLHPLLQDPAEQNRHMTLIENCSLQYTLKPHPALEPAFHLLPENLLVSGLQQIPGLLPAHGESGMWPTGRWCPGDPGAAPACGRAQWSGLRAEAAGRCTGA

SEQ ID NO: 57927 - protein, 126 aa, Homo sapiens
MSELSDEASEPELLNRSLSMWHGLGTQVSGEELDVPLDLHTAASIGQYEVVKECVQRRELDLNKKNGGGWTPLMYASYIGHDTIVHLLLEAGVSVNVPTPEGQTPLMLASSCGNESIAYFLLQVQS

SEQ ID NO: 57928 - protein, 249 aa, Homo sapiens
  MOD_RES (1)..(1): Any amino acid
XDSASSASPTVDGTTTGTAMDDADPPGPENLFVNYLSRIHREEDFQFILKGIARLLSNPLLQTYLPNSTKKIQFHQELLVLFWKLCDFNKKFLFFVLKSSDVLDILVPILFFLNDARADQSRVGLMHIGVFILLLLSGERNFGVRLNKPYSIRVPMDIPVFTGTHADLLIVVFHKIITSGHQRLQPLFDCLLTIVVNGRGPELALPALTTRWCQATGQPATCSRFQAPPAHRKNASLCTLHSSHIKKKG

SEQ ID NO: 57929 - protein, 231 aa, Homo sapiens
  MOD_RES (1)..(1): Any amino acid
XIFLQVSDGIIAPGYEEEALTILSKKKNGNYCVLQMDQSYKPDENEVRTLFGLHLSQKRNNGVVDKSLFSNVVTKNKDLPESALRDLIVATIAVKYTQSNSVCYAKNGQVIGIGAGQQSRIHCTRLAGDKANYWWLRHHPQVLSMKFKTGVKRAEISNAIDQYVTGTIGEDEDLIKWKALFEEVPELLTEAEKKEWVEKLTEVSISSDAFFPFRDNVDRAKRVSMELGAFA

SEQ ID NO: 57930 - protein, 3418 aa, Homo sapiens [sequence omitted]

SEQ ID NO: 57931 - protein, 485 aa, Homo sapiens
MRIPVDPSTSRRFSPPSSSLQPGKMSDVSPVVAAQQQQQQQQQQQQQQQQQQQQQQQEAAAAAAAAAAAAAAAAAVPRLRPPHDNRTMVEIIADHPAELVRTDSPNFLCSVLPSHWRCNKTLPVAFKVVALGEVPDGTVVTVMAGNDENYSAELRNASAVMKNQVARFNDLRFVGRSGRGKSFTLTITVFTNPPQVATYHRAIKVTVDGPREPRRHRQKLDDSKPSLFSDRLSDLGRIPHPSMRVGVPPQNPRPSLNSAPSPFNPQGQSQITDPRQAQSSPPWSYDQSYPSYLSQMTSPSIHSTTPLSSTRGTGLPAITDVPRRISGASELGPFSDPRQFPSISSLTESRFSNPRMHYPATFTYTPPVTSGMSLGMSATTHYHTYLPPPYPGSSQSQSGPFQTSSTPYLYYGTSSGSYQFPMVPGGDRSPSRMLPPCTTTSNGSTLLNPNLPNQNDGVDADGSHSSSPTVLNSSGRMDESVWRPY

SEQ ID NO: 57932 - protein, 166 aa, Homo sapiens
MAGAAQHREEKHSALLSYEKPPPGLIKEDETKPEDCIPDVPGNEHAREFLAHAPTKGLWMPLGKEVKVMQCWRCKRYGHRTGDKECPFFIKGNQKLEQFRVAHEDPMYDIIRDNKRHEKDVRIQQLKQLLEDSTSDEDRSSSSSSEGKEKHKKKKKKEKHKKRKKE

SEQ ID NO: 57933 - protein, 68 aa, Homo sapiens
HVIIAFPTSYKVVITLWIVYLWVSLLKTIFWSRNGHDGSTDVQQRAWRSNRRRQEGFSPSPLLTLTKG

SEQ ID NO: 57934 - protein, 132 aa, Homo sapiens
HVEWCKQLIAATISSQISGSVTSENVSRDYKVFRRPDLRNIHKARQRLALRDGNKLAQMEEAPLFPGESIKAIVKDVMYICPFMGAVSGTLTVTDFKLYFKNVERDPHFILDVPLGVISRVEKIGAQSHGDN

SEQ ID NO: 57935 - protein, 46 aa, Homo sapiens
MEEDQELERKAIEELLKEAKRGKTRAETMGPMGCLFNMKMMRMRTL

SEQ ID NO: 57936 - protein, 206 aa, Homo sapiens
MDTQGPVSQPFQQPEKPGRVRRRKTRRERNKALVGSRRPLAHHDPPVAIRDPPVVPTASKLVVITQGRLSREHRGLFNHEVKSLDVARLLSSGTLVPGSPTLPAKPSPSPGRAQEPAPRSRDKENQVPGGSGPGPPSSPELSGVGQLLAELQCQLSLPQAFPRRNLIQDARDAIVHTLQACHGCVPDLALVLRGCQPPLPGAKPGV

SEQ ID NO: 57937 - protein, 126 aa, Homo sapiens
MPLYEGLGSGGEKTAVVIDLGEAFTKCGFAGETGPRCIIPSVIKRAGMPKPVRVVQYNINTEELYSYLKEFIHILYFRHLLVNPRDRRVVIIESVLCPSHFRETLTRVLFKYFERVGNSTIGTMYC

SEQ ID NO: 57938 - protein, 349 aa, Homo sapiens
MASRKEGTGSTATSSSSTAGAAGKGKGKGGSGDSAVKQVQIDGLVIIKHYQEEGQGTEVVQGVLLGLVVEDRLEITNCFPFPQHTEDDADFDEVQYQMEMMRSLRHVNIDHLHVGWYQSTYYGSFVTRALLDSQFSYQHAIEESVVLIYDPIKTAQGSLSLKAYRLTPKLMEVCKEKDFSPEALKKANITFEYMFEEVPIVIKNSHLINVLMWELEKKSAVADKHELLSLASSNHLGKNLQLLMDRVDEMSQDIVKYNTYMRNTSKQQQQKHQYQQRRQQENMQRQSRGEPPLPEEDLSKLFKPPQPPARMDSLLIAGQINTYCQNIKEFTAQNLGKLFMAQALQEYNN

SEQ ID NO: 57939 - protein, 174 aa, Homo sapiens
GSAENEEKSEVQAIIESTPELDMDKDLSGYKGSSTPTKGIENKAFDRNTESLFEELSSAGSGLIGDVDEGADLLGEYSDHNFFGMGREVENLILENTQLLETKNALNIVKNDLIAKVDELTCEKDVLQGELEAVKQAKLKLEEKNRELEEELRKARAEAEDARQKAKDDDDSDI

SEQ ID NO: 57940 - protein, 242 aa, Homo sapiens
  MOD_RES (1)..(1): Any amino acid
XRKIQDHQVVINCAIPKGLKYNQATQTFHQWRDARQVYGLNFGSKEDANVFASAMMHALEVLNSQETGPTLPRQNSQLPAQVQNGPSQEELEIQRRQLQEQQRQKELERERLERERMERERLERERLERERLERERLEQEQLERERQERERQERLERQERLERQERLERQERLDRERQERQERERLERLERERQERERQEQLEREQLEWERERRISSAGKKFTNSSVFLYLSLDDVSCAVMC

SEQ ID NO: 57941 - protein, 156 aa, Homo sapiens
  MOD_RES (1)..(1): Any amino acid
XCDKPLSQDPQDRGPATAEVPYPDDLVGFKLFLPEGPCDHTVVKLQPGDMAAITTKVLRVNGEKILEDFSKRQQPKFKKDPPLAAVTTAVQELLRLAQAHPAGPPTLDPVNDLQLKDMSVVEGGLRARKLEELIQGAQCVHSPRFPAQPLSSVHPC

SEQ ID NO: 57942 - protein, 124 aa, Homo sapiens
MGWLCSGLLFPVSCLVLLQVASSGNMKVLQEPTCVSDYMSISTCEWKMNGPTNCSTELRLLYQLVFLLSEAHTCIPENNGGAGCVCHLLMDDVVSADNYTLDLWAGQQLLWKGSFKPSEHVQNL

SEQ ID NO: 57943 - protein, 58 aa, Homo sapiens
MGNPENIEDAYVAVIRPKNTASLNSREYRAKSYEILLHEVPIEGQKKKRKKVLLETKL

SEQ ID NO: 57944 - protein, 197 aa, Homo sapiens
  MOD_RES (1)..(1): Any amino acid
XYASSNELVQLDVYPVPNYLSYMDVSRNRLENVPEWVCESRKLEVLDIGHNQICELPARLFCNSSLRKLLAGHNQLARLPERLERTSVEVLDVQHNQLLELPPNLLMKADSKMAKLEELEEIDLSGNKLKAIPTTIMNCRRMHTVIAHSNCIEVFPEVMQLPEIKCVDLSCNELSEVTLPENLPPKLQELDLTGNPR

SEQ ID NO: 57945 - protein, 269 aa, Homo sapiens
  MOD_RES (1)..(1): Any amino acid
XDGDNILEKEVLPPIHAYGNRTECRNPQELESIRQDRDALHMEGLIVRERILGADNIDVSHPIIYRGAVYADNMEFEQCIKLWLHALHLRQKVCISTKTQCSEEDQCKINKQIYNLIHLDPRTREGFTLLHLAVNSNTPVDDFHTNDVCSFPNALVTKLLLDCGAEVNAVDNEGNSALHIIVQYNRPISDFLTLHSIIISLVEAGAHTDMTNKQNKTPLDKSTTGVSEILLKTQMKMSLKCLAARAVRANDINYQDQIPRTLEEFVGFH

SEQ ID NO: 57946 - protein, 71 aa, Homo sapiens
MSVTLTSVKRVQSSPNLLAAGRDSQSPDSAWRSYNDGNQETLNGDATYSSLAAKGFRSVRPNLQDKRSPTQ

SEQ ID NO: 57947 - protein, 1478 aa, Homo sapiens
MFVSDTVLKERLDPETLESLGLIKQSQQFNQKSVKIKTKLFYKQQKFNLLREENEGYAKLIAELGQDLSGSITSDLILENIKSLIGCFNLDPNRVLDVILEVFECRPEHDDFFISLLESYMSMCEPQTLCHILGFKFKFYQEPNGETPSSLYRVAAVLLQFNLIDLDDLYVHLLPADNCIMDEHKREIAEAKQIVRKLTMVVLSSEKMDEREKEKEKEEEKVEKPPDNQKLGLLEALLKIGDWQHAQNIMDQMPPYYAASHKLIALAICKLIHITIEPLYRRVGVPKGAKGSPVNALQNKRAPKQAESFEDLRRDVFNMFCYLGPHLSHDPILFAKVVRIGKSFMKEFQSDGSKQEDKEKTEVILSCLLSITDQVLLPSLSLMDCNACMSEELWGMFKTFPYQHRYRLYGQWKNETYNSHPLLVKVKAQTIDRAKYIMKRLTKENVKPSGRQIGKLSHSNPTILFDYILSQIQKYDNLITPVVDSLKYLTSLNYDVLAYCIIEALANPEKERMKHDDTTISSWLQSLASFCGAVFRKYPIDLAGLLQYVANQLKAGKSFDLLILKEVVQKMAGIEITEEMTMEQLEAMTGGEQLKAEGGYFGQIRNTKKSSQRLKDALLDHDLALPLCLLMAQQRNGVIFQEGGEKHLKLVGKLYDQCHDTLVQFGGFLASNLSTEDYIKRVPSIDVLCNEFHTPHDAAFFLSRPMYAHHISSKYDELKKSEKGSKQQHKVHKYITSCEMVMAPVHEAVVSLHVSKVWDDISPQFYATFWSLTMYDLAVPHTSYEREVNKLKVQMKAIDDNQEMPPNKKKKEKERCTALQDKLLEEEKKQMEHVQRVLQRLKLEKDNWLLAKSTKNETITKFLQLCIFPRCIFSAIDAVYCARFVELVHQQKTPNFSTLLCYDRVFSDIIYTVASCTENEASRYGRFLCCMLETVTRWHSDRATYEKECGNYPGFLTILRATGFDGGNKADQLDYENFRHVVHKWHYKLTKASVHCLETGEYTHIRNILIVLTKILPWYPKVLNLGQALERRVHKICQEEKEKRPDLYALAMGYSGQLKSRKSYMIPENEFHHKDPPPRNAVASVQNGPGGGPSSSSIGSASKSDESSTEETDKSRERSQCGVKAVNKASSTTPKGNSSNGNSGSNSNKAVKENDKEKGKEKEKEKKEKTPATTPEARVLGKDGKEKPKEERPNKDEKARETKERTPKSDKEKEKFKKEEKAKDEKFKTTVPNAESKSTQEREREKEPSRERDIAKEMKSKENVKGGEKTPVSGSLKSPVPRSDIPEPEREQKRRKIDTHPSPSHSSTVKDSLIELKESSAKLYINHTPPPLSKSKEREMDKKDLDKSRERSREREKKDEKDRKERKRDHSNNDREVPPDLTKRRKEENGTMGVSKHKSESPCESPYPNEKDKEKNKSKSSGKEKGSDSFKSEKMDKISSGGKKESRHDKEKIEKKEKRDSSGGKEEKKHHKSSDKHR

SEQ ID NO: 57948 - protein, 103 aa, Homo sapiens
MASRSMRLLLLLSCLAKTGVLGDIIMRPSCAPGWFYHKSNCYGYFRKLRNWSDAELECQSYGNGAHLASILSLKEASTIAEYISGYQRSQPIWIGLHDPQKTF

SEQ ID NO: 57949 - protein, 298 aa, Homo sapiens
MDDYMVLRMIGEGSFGRALLVQHESSNQMFAMKEIRLPKSFSNTQNSRKEAVLLAKMKHPNIVAFKESFEAEGHLYIVMEYCDGGDLMQKIKQQKGKLFPEDMILNWFTQMCLGVNHIHKKRVLHRDIKSKNIFLTQNGKVKLGDFGSARLLSNPMAFACTYVGTPYYVPPEIWENLPYNNKSDIWSLGCILYELCTLKHPFQANSWKNLILKVCQGCISPLPSHYSYELQFLVKQMFKRNPSHRPSATTLLSRGIVARLVQKCLPPEIIMEYGEEVLEEIKNSKHNTPRKKTRGRTR

SEQ ID NO: 57950 - protein, 143 aa, Homo sapiens
MAVVIRLLGLPFIAGPVDIRHFFTGLTIPDGGVHIIGGEIGEAFIIFATDEDARRAISRSGGFIKDSSVELFLSSKAEMQKTIEMKRTDRVGRGRPGSGTSGVDSLSNFIESVKEEASNSGYGSSINQDAGFHTNGTGHGNLR

SEQ ID NO: 57951 - protein, 77 aa, Homo sapiens
  MOD_RES (1)..(1): Any amino acid
XIATRNGHASLVNFLLSENVDLHQKVEPKESPLHLVVINNHITVVNSLLSAQHDIDILNQKRLVISKAKLTQTPRNV

SEQ ID NO: 57952 - protein, 207 aa, Homo sapiens
MSERKEGRGKGKGKKKERGSGKKPESAAGSQSPALPPRLKEMKSQESAAGSKLVLRCETSSEYSSLRFKWFKNGNELNRKNKPQNIKIQKKPGKSELRINKASLADSGEYMCKVISKLGNDSASANITIVESNATSTSTTGTSHLVKCAEKEKTFCVNGGECFMVKDLSNPSRYLCKCPNEFTGDRCQNYVMASFYSTSTPFLSLPE

SEQ ID NO: 57953 - protein, 222 aa, Homo sapiens
MESSSSSNSYFSVGPTSPSAVVLLYSLSKESLQSVDVLREEVSEILDEMSHKLRLGAIRFCAFTLSKVFKQIFSKVCVNEEGIQKLQRAIQEHPVVLLPSHRSYIDFLMLSFLLYNYDLPVPVIAAGMDFLGMKMVGELLRMSGAFFMRRTFGGNKLYWAVFSEYVKTMLRNGYAPVEFFLEGTRSRSAKTLTPKFGLLNIVMEPFFKREVFDTYLVPISIS

SEQ ID NO: 57954 - protein, 215 aa, Homo sapiens
MSSEESYRAILRYLTNEREPYAPGTEGNVKRKIRKAAACYVVRGGTLYYQRRQRHRKTFAELEVVLQPERRRDLIEAAHLGPGGTHHTRHQTWHYLSKTYWWRGILKQVKDYIKQCSKCQEKLDRSRPISDVSEMLEELGLDLESGEESNESEDDLSNFTSSPTTASKPAKKKPVSKHELVFVSGTLQSALRFVTSVLVFAALVTYFSQTTKTAY

SEQ ID NO: 57955 - protein, 110 aa, Homo sapiens
MWLKVGGLLRGTGGQLGQTVGWPCGALGPGPHRWGPCGGSWAQKFYQDGPGRGLGEEDIRRAREARPRKTPRPQLSDRSRERKVPASRISRLANFGGLAVGLGLGVLAEM

SEQ ID NO: 57956 - protein, 475 aa, Homo sapiens
ARSHTAPVLALAMEQRRGQLATVSQDRTVRIWDLATLQQLYDFTSSEDAPCAVTFHPTRPTFFCGFSSGAVRSFSLEAAEVLVEHTCHRGAVTGLTATPDGRLLFSSCSQGSLAQYSCADPQWHVLRVAADMVCPDAPASPSALAVSRDGRLLAFVGPSRCTVTVMGSASLDELLRVDIGTLDLASSRLDSAMAVCFGPAALGHLLVSTSSNRVVVLDAVSGRIIRELPGVHPEPCPSLTLSEDARFLLIAAGRTIKVWDYATQASPGPQVYIGHSEPVQAVAFSPDQQQVLSAGDAVFLWDVLAPTESDQSFPGAPPACKTGPGAGPLEDAASRASELPRQQVPKPCQASPPRLGVCARPPEGGDGHLPASRQRWVAASEGCRRLQREWAGQHGLEAGHRLLCLHVRPPGGGGGPALWRPAALVRPLCGDLHAGPQPQCPGPGLCLGPKQHDRPLSDPRLGRVWRPLPASHFPP

SEQ ID NO: 57957 - protein, 126 aa, Homo sapiens
QRQLILTQKAAYVVELAKIKQKIEYSALKGVSTSNLSDGILVIHVSPEDSKQKGDAVLQCGHVFEAVTKLVMLVKKENIVNVVQGSLQFFISPGKEGTIVFDTGLEEQVYKNKNGQLTVVSVRRKS

SEQ ID NO: 57958 - protein, 1565 aa, Homo sapiens
MDSKKRSSTEAEGSKERGLVHIWQAGSFPITPERLPGWGGKTVLQAALGVKHGVLLTEDGEVYSFGTLPWRSGPVEICPSSPILENALVGQYVITVATGSFHSGAVTDNGVAYMWGENSAGQCAVANQQYVPEPNPVSIADSEASPLLAVRILQLACGEEHTLALSISREIWAWGTGCQLGLITTAFPVTKPQKVEHLAGRVVLQVACGAFHSLALVQCLPSQDLKPVPERCNQCSQLLITMTDKEDHVIISDSHCCPLGVTLTESQAENHASTALSPSTETLDRQEEVFENTLVANDQSVATELNAVSAQITSSDAMSSQQNVMGTTEISSARNIPSYPDTQAVNEYLRKLSDHSVREDSEHGEKPVPSQPLLEEAIPNLHSPPTTSTSALNSLVVSCASAVGVRVAATYEAGALSLKKVMNFYSTTPCETGAQAGSSAIGPEGLKDSREEQVKQESMQGKKSSSLVDIREEETEGGSRRLSLPGLLSQVSPRLLRKAARVKTRTVVLTPTYSGEADALLPSLRTEVWTWGKGKEGQLGHGDVLPRLQPLCVKCLDGKEVIHLEAGGYHSLALTAKSQVYSWGSNTFGQLGHSDFPTTVPRLAKISSENGVWSIAAGRDYSLFLVDTEDFQPGLYYSGRQDPTEGDNLPENHSGSKTPVLLSCSKLGYISRVTAGKDSYLALVDKNIMGYIASLHELATTERRFYSKLSDIKSQILRPLLSLENLGTTTTVQLLQEVASRFSKLCYLIGQHGASLSSFLHGVKEARSLVILKHSSLFLDSYTEYCTSITNFLVMGGFQLLAKPAIDFLNKNQELLQDLSEVNDENTQLMEILNTLFFLPIRRLHNYAKVLLKLATCFEVASPEYQKLQDSSSCYECLALHLGRKRKEAEYTLGFWKTFPGKMTDSLRKPERRLLCESSNRALSLQHAGRFSVNWFILFNDALVHAQFSTHHVFPLATLWAEPLSEEAGGVNGLKITTPEEQFTLISSTPQEKTKWLRAISQAVDQALRGMSDLPPYGSGSSVQRQEPPISRSAKYTFYKDPRLKDATYDGRWLSGKPHGRGVLKWPDGKMYSGMFRNGLEDGYGEYRIPNKAMNKEDHYVGHWKEGKMCGQGVYSYASGEVFEGCFQDNMRHGHGLLRSGKLTSSSPSMFIGQWVMDKKAGYGVFDDITRGEKYMGMWQDDVCQGNGVVVTQFGLYYEGNFHLNKMMGNGVLLSEDDTIYEGEFSDDWTLSGKGTLTMPNGDYIEGYFSGEWGSGIKITGTYFKPSLYESDKDRPKVFRKLGNLAVPADEKWKAVFDECWRQLGCEGPGQGEVWKAWDNIAVALTTSRRQHRDSPEILSRSQTQTLESLEFIPQHVGAFSVEKYDDIRKYLIKACDTPLHPLGRLVETLVAVYRMTYVGVGANRRLLQEAVKEIKSYLKRIFQLVRFLFPELPEEGSTIPLSAPLPTERKSFCTGKSDSRSESPEPGYVVTSSGLLLPVLLPRLYPPLFMLYALDNDREEDIYWECVLRLNKQPDIALLGFLGVQRKFWPATLSILGESKKVLPTTKDACFASAVECLQQIRQT

SEQ ID NO: 57959 - protein, 224 aa, Homo sapiens
  MOD_RES (1)..(1): Any amino acid
XNVPEPDGHIISPLLAGFYMFWTMIILLQVLIPISLYVSIEIVKLGQIYFIQSDVDFYNEKMDSIVQCRALNIAEDLGQIQYLFSDKTGTLTENKMVFRRCSVAGFDYCHEENARRLESYQEAVSEDEDFIDTVSGSLSNMAKPRAPSCRTVHNGPLGNKPSNHLAGSSFTLGSGEGASEVPHSRQAAFSSPIETDVVPDTRAGHGGLCCFGTINISTPTHPAL

SEQ ID NO: 57960 - protein, 87 aa, Homo sapiens
MAERQEEQRGSPPLRAEGKADAEVKLILYHWTHSFSSQKVRLVIAEKALKCEEHDVSLPLSEHNEPWFMRLNSTGEVPVLIHGENII

SEQ ID NO: 57961 - protein, 71 aa, Homo sapiens
MWADDAKKLCPDLLLAQVRESRGKANLTKYREASVEVMEIMSRFAVIERASIDEAYVDLTSAVQERLQKLQ

SEQ ID NO: 57962 - protein, 37 aa, Homo sapiens
MTKSNGEEPKMGGRMERFQQGVRKRTLLAKKKVQNIT

SEQ ID NO: 57963 - protein, 1160 aa, Homo sapiens
MKLFGFGSRRGQTAQGSIDHVYTGSGYRIRDSELQKIHRAAVKGDAAEVERCLARRSGDLDALDKQHRTALHLACTSGHVQVVTLLVNRKCQIDVCDKENRTPLIQAVHCQEEACAVILLEHGANPNLKDIYGNTALHYAVYSESTSLAEKLLSHGAHIEALDKDNNTPLLFAIICKKEKMVEFLLKKKASSHAVDRLRRSALMLAVYYDSPGIVNILLKQNIDVFAQDMCGRDAEDYAISHHLTKIQQQILEHKKKILKKEKSDVGSSDESAVSIFHELRVDSLPASDDKDLNVATKQCVPEKVSEPLPGSSHEKGNRIVNGQGEGPPAKHPSLKPSTEVEDPAVKGAVQRKNVQTLRAEQALPVASEEEQERHERSEKKQPQVKEGNNTNKSEKIQLSENICDSTSSAAAGRLTQQRKIGKTYPQQFPKKLKEEHDRCTLKQENEEKTNVNMLYKKNREELERKEKQYKKEVEAKQLEPTVQSLEMKSKTARNTPNWDFHNHEEMKGLMDENCILKADIAILRQEICTMKNDNLEKENKYLKDIKIVKETNAALEKYIKLNEEMITETAFRYQQELNDLKAENTRLNAELLKEKESKKRLEADIESYQSRLAAAISKHSESVKTERNLKLALERTRDVSVQVEMSSAISKVKAENEFLTEQLSETQIKFNALKDKFRKTRDSLRKKSLALETVQNDLSQTQQQTQEMKEMYQNAEAKVNNSTGKWNCVEERICHLQRENAWLVQQLDDVHQKEDHKEIVTNIQRGFIESGKKDLVLEEKSKKLMNECDHLKESLFQYEREKTEGVVVVRQLQQEVADSVKKLTTLESPLEGISRCHINLDETQASNKKLFQVKSQPKKENEELRKLFELISSLKYNVNRIRKKNDELEEEATGYKKLLEMTINMLNVFGNEDFDCHGDLKTDQLKMDILIKKLKQKFDDLTAEKEALSSKCVNLAKDNQVLQQEFLSMKKVQQQCEKLEEDKKMLKEEILNLKTHMENNRVELSKLQEYKLELDEKAMQAVEKLEEIHLQEQAQYEKQLEQLSKDNMASLNKKELTLKDVECKFSEMKTAYEEVTTELEEYKEAFAAALKANNSMSKKLTKSNKKIAVISMKLLMEKEQMKYFLSALPTRRDPESPCVENLTSIGLNRKYIPQTPIRI

SEQ ID NO: 57964 - protein, 48 aa, Homo sapiens
TLNREPAYKKHMPVLKETHDERDSTGQDGVSEKRVSSNRTGLMTCSTA

SEQ ID NO: 57965 - protein, 483 aa, Homo sapiens
MEIYSPDMSEVAAERSSSPSTQLSADPSLDGLPAAEDMPEPQTEDGRTPGLVGLAVPCCACLEAERLRGCLNSEKICIVPILACLVSLCLCIAGLKWVFVDKIFEYDSPTHLDPGGLGQDPIISLDATAASAVWVSSEAYTSPVSRAQSESEVQVTVQGDKAVVSFEPSAAPTPKNRIFAFSFLPSTAPSFPSPTRNPEVRTPKSATQPQTTETNLQTAPKLSTSTSTTGTSHLVKCAEKEKTFCVNGGECFMVKDLSNPSRYLCKCPNEFTGDRCQNYVMASFYKHLGIEFMEAEELYQKRVLTITGICIALLVVGIMCVVAYCKTKKQRKKLHDRLRQSLRSERNNMMNIANGPHHPNPPPENVQLVNQYVSKNVISSEHIVEREAETSFSTSHYTSTAHHSTTVTQTPSHSWSNGHTESILSESHSVIVMSSVENSRHSSPTGGPRGRLNGTGGPRECNSFLRHARETPDSYRDSPHSER

SEQ ID NO: 57966 - protein, 102 aa, Homo sapiens
MNSVVSLLLILEPDKQEALIESLCEKLVKFREGERPSLRLQLLSNLFHGMDKNTPVRYTVYCSLIKVAASCGAIQYIPTELDQVRKWISDWNLTTEKKHTLL

SEQ ID NO: 57967 - protein, 177 aa, Homo sapiens
PSVCPSPPGWRLLRTGTQSLRTRRRGGHPRRGAHAPACDFPLPPPPLAGDGDDAEGALGGAFPPPPPPIEESFPPAPLEEEIFPSPPPPPEEEGGPEAPIPPPPQPREKVSSIDLEIDSLSSLLDDMTKNDPFKARVSSGYVPPPVATPFSSKSSTKPAAGGTAPLPPWKSPSSSQP

SEQ ID NO: 57968 - protein, 129 aa, Homo sapiens
RLWMQEENNDQKISAISEKPLSPHPIRITKTVDRKDPAVNIMLERPCNGNSLDESVGTEEGSEKREAPLLSLAEDSQQKEGRAPLFVPPGMQHSIGDYCSRFEQYLRIISHEAVGSFNPWLIAERQSEM

SEQ ID NO: 57969 - protein, 328 aa, Homo sapiens
MLVGCADRTVKHFSTEDGIFQGQRHCPGGEGMFRGLAQADGTLITCVDSGILRVWHDKDKDTSSDPLLELRVGPGVCRMRQDPAHPHVVATGGKENALKIWDLQGSEEPVFRAKNVRNDWLDLRVPIWDQDIQFLPGSQKLVTCTGYHQVRVYDPASPQRRPVLETTYGEYPLTAMTLTPGGNSVIVGNTHGQLAEIDLRQGRLLGCLKGLAGSVRGLQCHPSKPLLASCGLDRVLRIHRIQNPRGLEHKVYLKSQLNCLLLSGRDNWEDEPQEPQEPNKVPLEDTETDELWASLEAAAKRKLSGLEQPQGALQTRRRKKKRPGSTSP

SEQ ID NO: 57970 - protein, 174 aa, Homo sapiens
MGEVEAPGRLWLESPPGGAPPIFLPSDGQALVLGRGPLTQVTDRKCSRTQVELVADPETRTVAVKQLGVNPSTTGTQELKPGLEGSLGVGDTLYLVNGLHPLTLRWEETRTPESQPDTPPGTPLVSQDEKRDAELPKKRMRKSNPGWENLEKLLVFTAAGVKPQGKDLVPRDSP

SEQ ID NO: 57971 - protein, 114 aa, Homo sapiens
MCIAEIDLIPRDRPFVCAPSSKTGSVTTTYCCNQDHCNKIELPTTGPFSVKSSPGLGPVELAAVIAGPVCFVCISLMLMVYICHNRTVIHHRVPNEEDPSLDRPFISEGTTLKD

SEQ ID NO: 57972 - protein, 25 aa, Homo sapiens
  MOD_RES (1)..(1): Any amino acid
XTADCKTAVNCSSDFDACLITKAES

SEQ ID NO: 57973 - protein, 100 aa, Homo sapiens
MEELSADEIRRRRLARLAGGQTSQPTTPLTSPQRENPPGPPIAASAPGPSQSLGLNVHNMTPATSPIGASGLGIISDDKMIKTEFGSADFMNLVDGFKIK

SEQ ID NO: 57974 - protein, 48 aa, Homo sapiens
MEANQCPLVVEPSYPDLVINVGEVTLGEENRKKLQKIQRDQEKERVMR

SEQ ID NO: 57975 - protein, 1042 aa, Homo sapiens
MSVLKFELDNFSPEGFRHEHASNSCFALPCLTELSGDSSQLELQHSSSVPTGLQKLCFSHRELEKSVWAAKGKYNEGMNISKSEITKETSLKPSRRSLPCLAQSYAYSKSLSQSTSLFQSTESESQAPTSITLISTDKAEQVNTEENKNDSVLRCSFADLSDFCLALGKDKDYTDESEHATYDRSRLINDFVIKDKSEFKTKLSKNDMNYIASSGPLFKDGKKRIDYILVYRKTNIQYDKRNTFEKNLRAEGLMLEKEPAIASPDIMFIKIHIPWDTLCKYAERLNIRMPFRKKCYYTDGRSKSMGRMQTYFRRIKNWMAQNPMVLDKSAFPDLEESDCYTGPFSRARIHHFIINNKDTFFSNATRSRIVYHMLERTKYENGISKVGIRKLINNGSYIAAFPPHEGAYKSSQPIKTHGPQNNRHLLYERWARWGMWYKHQPLDLIRLYFGEKIGLYFAWLGWYTGMLIPAAIVGLCVFFYGLFTMNNSQVSQEICKATEVFMCPLCDKNCSLQRLNDSCIYAKVTYLFDNGGTVFFAIFMAIWATVFLEFWKRRRSILTYTWDLIEWEEEEETLRPQFEAKYYKMEIVNPITGKPEPHQPSSDKVTRLLVSVSGIFFMISLVITAVFGVVVYRLVVMEQFASFKWNFIKQYWQFATSAAAVCINFIIIMLLNLAYEKIAYLLTNLEYPRTESEWENSFALKMFLFQFVNLNSSIFYIAFFLGRFVGHPGKYNKLFDRWRLEECHPSGCLIDLCLQMGVIMFLKQIWNNFMELGYPLIQNWWSRHKIKRGIHDASIPQWENDWNLQPMNLHGLMDEYLEMVLQFGFTTIFVAAFPLAPLLALLNNIIEIRLDAYKFVTQWRRPLPARATDIGIWLGILEGIGILAVITNAFVIAITSDYIPRFVYEYKYGPCANHVEPSENCLKGYVNNSLSFFDLSELGMGKSGYCRYRDYRGPPWSSKPYEFTLQYWHILAARLAFIIVFEHLVFGIKSFIAYLIPDVPKGLHDRIRREKYLVQEMMYEAELEHLQQQRRKSGQPVHHEWP

SEQ ID NO: 57976 - protein, 110 aa, Homo sapiens
MASPGHSDLGEVAPEIKASERRTAVAIADLEWREMEGDDCEFRYGDGTNEAQDNDFPTGAVLEPRAALRLARPAHLPGLRQEPGGPSTRKQGGQAGDLRGGTRAALHRPP

SEQ ID NO: 57977 - protein, 45 aa, Homo sapiens
MRRIVFAGVILFRLLGVILFRLLGVILFGRLGEHAIFQSPSMDVF

SEQ ID NO: 57978 - protein, 309 aa, Homo sapiens
MPKLQGFEFWSRTLRGARHVVAPMVDQSELAWRLLSRRHGAQLCYTPMLHAQVFVRDANYRKENLYCEVCPEDRPLIVQFCANDPEVFVQAALLAQDYCDAIDLNLGCPQMIAKRGHYGAFLQDEWDLLQRMILLAHEKLSVPVTCKIRVFPEIDKTVRYAQMLEKAGCQLLTVHGRTKEQKGPLSGAASWEHIKAVRKAVAIPVFANGNIQCLQDVERCLRDTGVQGVMSAEGNLHNPALFEGRSPAVWELAEEYLDIVREHPCPLSYVRAHLFKLWHHTLQVHQELREELAKVKTLEGIAAVSQELK

SEQ ID NO: 57979 - protein, 65 aa, Homo sapiens
MADKQISLPAKLINGGIAGLIGVTCVFPIDLAKTRLQNQQNGQRVYTSMSDCLIKTVRSEGYFGM

SEQ ID NO: 57980 - protein, 147 aa, Homo sapiens
  MOD_RES (1)..(1): Any amino acid
XCSKQLPPCNLSKEDLLQNPYFSKLLLNLSQHVDESGLSLTLAKEQAQAWKEVRLHKTTWLRSEILHRVIQELLVDYYVKIQDTNVTSEDKKFHETLEQRLLVTELMRLLGPSQEREIPPLLGLEKADLLELMPLSEVGGEILEPNK

SEQ ID NO: 57981 - protein, 100 aa, Homo sapiens
MNTEAEQQLLHHARNGNAEEVRQLLETMARNEVIADINCKGRSKSNLGWTPLHLACYFGHRQVVQDLLKAGAEVNVLNDMGDTPLHRAAFTGRKICSQGS

SEQ ID NO: 57982 - protein, 151 aa, Homo sapiens
MNEVSVIKEGWLHKRGEYIKTWRPRYFLLKSDGSFIGYKERPEAPDQTLPPLNNFSVAECQLMKTERPRPNTFVIRCLQWTTVIERTFHVDSPDEREEWMRAIQMVANSLKQRAPGEDPMDYKCGSPSDSSTTEEMEVAVSKARAKVTMND

SEQ ID NO: 57983 - protein, 86 aa, Homo sapiens
FDTRSERYRHLGSEDDETNDEESSTEIPQFSSCSHRFSKVYSSSEFLAVQPTPTFAERSFSEDREEGWERSEVDYGRRLSADIRGA

SEQ ID NO: 57984 - protein, 188 aa, Homo sapiens
TNGKDWGRSWSDRSIFSGIGSTAEPVSQSTTSDYQWDVSRNQPYIDDEWSGLNGLSSADPNSDWNAPAEEWGNWVDEERASLLKSQEPIPDDQKVSDDDKEKGEGALPTGKSKKKKKKKKKQGEDNSTAQPIKTLPPATSTEPSVILSKSDSDKSSSQVPPILQETDKSKSNTKQNSVPPSQTKSETS

SEQ ID NO: 57985 - protein, 115 aa, Homo sapiens
  MOD_RES (1)..(1): Any amino acid
XLGAAGANPLGLPYYNGVGTVQKGRPRKRKSPGPGADLAAYNAALSCNENDAEHLDRDQPYPSSQKTKRMRTSFKHHQLRTMKSYFAINHNPDAKDLKQLAQKTGLTKRVLQASL

SEQ ID NO: 57986 - protein, 86 aa, Homo sapiens
LFLLATCYYRSGKAYKAYRLLKGHSCTTPQCKYLLAKCCVDLSKLAEGEQILSGGVFNKQKSHDDIVTEFGDSACFTLSLLGHVYW

SEQ ID NO: 57987 - protein, 110 aa, Homo sapiens
MIQSANDKNFDDEDSVDGNRPSSASSTSSKAPPSSRRNVGMGTTRRLGSSTLGSKSSAAKEGAGAVDEEDFIKAFDDVPVVQIYSSRDLEESINKIREILSDDKHDWEQR

SEQ ID NO: 57988 - protein, 525 aa, Homo sapiens
SKQFNILRKARSYIKHRKFDEVVSLCKELIHLALKGLSYYHTYDRFFLGVNVVIGFVGWISYASLLIIKSHSNLIKGVSKEVKKPSHLLPCSFVAIGILVAFFLLIQACPWTYYVYGLLPLPIWYAVLREFQVIQDLVVSVLTYPLSHFVGYLLAFTLGIEVLVLSFFYRYMLTAGLTAFAAWPFLTRLWTRAKMTSLSWTFFSLLLAVFPLMPVVGRKPDISLVMGAGLLVLLLSLCVVTSLMKRKDSFIKEELLVHLLQVLSTVLSMYVVYSTQSSLLRKQGLPLMNQIISWATLASSLVVPLLSSPVLFQRLFSILLSLMSTYLLLSTGYEALFPLVLSCLMFVWINIEQETLQQSGVCCKQKLTSIQFSYNTDITQFRQLYLDDIRRAFFLVFFLVTAFFGTGNIASINSFDLASVYCFLTVFSPFMMGALMMWKILIPFVLVMCAFEAVQLTTQLSSKSLFLIVLVISDIMALHFFFLVKDYGSWLDIGTRDRVSLCCPGWSQIPKLKRSSCLGLPKSWG

SEQ ID NO: 57989 - protein, 175 aa, Homo sapiens
MAPWAEAEHSALNPLRAVWLTLTAAFLLTLLLQLLPPGLLPGCAIFQDLIRYGKTKCGEPSRPAACRAFDVPKRYFSHFYIISVLWNGFLLWCLTQSLFLGAPFPSWLHGLLRILGAAQFQVAKPPRNNPFLYNQINWLQKMTIRRANPGRVWWFMPLIPALQEAEEGSWHCLHS

SEQ ID NO: 57990 - protein, 117 aa, Homo sapiens
MIKFFLMVNKQGQTRLSKYYEHVDINKRTLLETEVIKSCLSRSNEQCSFIEYKDFKLIYRQYAALFIVVGVNDTENEMAIYEFIHNFVEVLDEYFSRVMESRSVTQAGVQWHNLGSL

SEQ ID NO: 57991 - protein, 192 aa, Homo sapiens
MEGVAVVTAGSVGAAKTEGAAALPPPPPVSPPALTPAPAAGEEGPAPLSETGAPGCSGSRPPELEPERSLGRFRGRFEDEDEELEEEEELEEEEEEEEEDMSHFSLRLEGGRQDSEDEEERLINLSELTPYILCSICKGYLIDATTITECLHTFCKSCIVRHFYYSNRCPKCNIVVHQTQPLYNIRRKKANA

SEQ ID NO: 57992 - protein, 117 aa, Homo sapiens
MSGPLEGADGGGDPRPGESFCPGGVPSPGPPQHRPCPGPSLADDTDANSNGSSGNESNGHESRGASQRSSHSSSSGNGKDSALLETTESSKSSEQSARARTQKELMTALRELKLRLP

SEQ ID NO: 57993 - protein, 184 aa, Homo sapiens
MQSGCVLELRNAGLVACLALITVFVAECCYGDSCQTQNVQLNKEMTLASNRSLAEGNLLYQPQLDTLKARLTQKYQELQVLFEAYQIKKTKLDRQSSSASLETLLALLQAEGAKIEEDTENMAEKFLDGELPLDSFIDVYQSKRKLAHMRRVKIEKLQEMVLKGQRLPQALAPLPPRLPELAPT

SEQ ID NO: 57994 - protein, 142 aa, Homo sapiens
MATELQCPDSMPCHNQQVNSASTPSPEQLRPGDLILDHAGGNRASRAKVILLTGYAHSSLPAELDSGACGGSSLNSEGNSGSGDSSSYDAPAGNSFLEDCELSRQIGAQLKLLPMNDQIRELQTIIRDNFFSSRRDYGYDLK

SEQ ID NO: 57995 - protein, 114 aa, Homo sapiens
MGCGLNKLEKRDEKRPGNIYSTLKRPQVETKIDVSYEYRFLEFTTLSAAELPGSSAVRLASLRDLPAQLLELYQQGFSLAALHPFVQPTHEREKTPLEHIFRAILIKKTDRSQK

SEQ ID NO: 57996 - protein, 593 aa, Homo sapiens
MLWFLSYRKEWEELFVNNNYLATIRQKGINGQLRSSRFRSICWKLFLCVLPQDKSQWISRIEELRAWYSNIKEIHITNPRKVVGQQDLMINNPLSQDEGSLWNKFFQDKELRSMIEQDVKRTFPEMQFFQQENVRKILTDVLFCYARENEQLLYKQGMHELLAPIVFVLHCDHQAFLHASESAQPSEEMKTVLNPEYLEHDAYAVFSQLMETAEPWFSTFEHDGQKGKETLMTPIPFARPQDLGPTIAIVTKVNQIQDHLLKKHDIELYMHLNRLEIAPQIYGLRWVRLLFGREFPLQDLLVVWDALFADGLSLGLVDYIFVAMLLYIRDALISSNYQTCLGLLMHYPFIGDVHSLILKALFLRDPKRNPRPVTYQFHPNLDYYKARGADLMNKSRTNAKGAPLNINKVSNSLINFGRKLISPAMAPGSAGGPVPGGNSSSSSSVVIPTRTSAEAPSHHLQQQQQQQRLMKSESMPVQLNKGDVVTGSDAQVSVPVQTLTDLQGLSSKNISSSPSVESLPGGREFTGSPPSSATKKDSFFSNISRSRSHSKTMGRKESEEELEAQISFLQGQLNDLDAMCKYCAKVMDTHLGK

SEQ ID NO: 57997 - protein, 200 aa, Homo sapiens
SGQELLPVDQKAVLVTGGDCGLGHALCKYLDELGFTVFAGVLNENGPGAEELRRTCSPRLSVLQMDITKPVQIKDAYSKVAAMLQDRGLWAVINNAGVLGFPTDGELLLMTDYKQCMAVNFFGTVEVTKTFLPLLRKSKGRLVNVSSMGGESAFSHMVMGCPSQDMAHGILCGRTKMQGMQRQGWVRISQIVYTLLVLSQ

SEQ ID NO: 57998 - protein, 410 aa, Homo sapiens
MMTPQVITPQQMQQILQQQVLSPQQLQVLLQQQQALMLQQQQLQEFYKKQQEQLQLQLLQQQHAGKQPKEQQQVATQQLAFQQQLLQMQQLQQQHLLSLQRQGLLTIQPGQPALPLQPLAQGMIPTELQQLWKEVTSAHTAEETTGNNHSSLDLTTTCVSSSAPSKTSLIMNPHASTNGQLSVHTPKRESLSHEEHPHSHPLYGHGVCKWPGCEAVCEDFQSFLKHLNSEHALDDRSTAQCRVQMQVVQQLELQLAKDKERLQAMMTHLHVKSTEPKAAPQPLNLVSSVTLSKSASEASPQSLPHTPTTPTAPLTPVTQGPSVITTTSMHTVGPIRRRYSDKYNVPISSADIAQNQEFYKNAEVRPPFTYASLIRQAILESPEKQLTLNEIYNWFTRMFAYFRRNAATWK

SEQ ID NO: 57999 - protein, 92 aa, Homo sapiens
MSYILKMPGTCLPGEGTTYELPPSSLHPSSAPVTSGGTCPALLTEAGWEAPIMAFTEAASAVGPSWTHSGASRSSSSRTSRRRRRSHAPTAC

SEQ ID NO: 58000 - protein, 161 aa, Homo sapiens
MADTFLEHLCLLDIDSEPVAARSTSIIATIGPASRSVERLKEMIKAGMNIARLNFSHGSHEYHAESIANVREAVESFAGSPLSYRPVAIALDTKGPEIRTGILQGGPESEVELVKGSQVLVTVDPAFRTRGNANTVWVDYPNIVRVVPVGGRIYIDDGLIS

SEQ ID NO: 58001 - protein, 95 aa, Homo sapiens
MENHKSNNKENITIVDISRKINQLPEAERNLLENGSVYVGLNAALCGLIANSLFRRILNVTKARIAAGLPMAGIPFLTTDLTYRCFVIWIVKPVP

SEQ ID NO: 58002 - protein, 109 aa, Homo sapiens
MTMRSLLRTPFLCGLLWAFCAPGARAEEPAASFSQPGSMGLDKNTVHDQEHIMEHLEGVINKPEAEMSPQELQLHYFKMHDYDGNNLLDGLELSTAITHVHKEGVNRHH

SEQ ID NO: 58003 - protein, 128 aa, Homo sapiens
MNEQIVIGRLDEDIILPSSFERGSEVVIHWKYQDSYKVHSYYKGSDHLESQDPRYANRTSLFYNEIQNGNASLFFRRVSLLDEGIYTCYVGTAIQVITNKVVLKVGVFLTPVMKYEKRNTNSFLICSV

SEQ ID NO: 58004 - protein, 693 aa, Homo sapiens
MALLAMHSWRWAAAAAAFEKRRHSAILIRPLVSVSGSGPQWRPHQLGALGTARAYQIPESLKSITWQRLGKGNSGQFLDAAKALQVWPLIEKRTCWHGHAGGGLHTDPKEGLKDVDTRKIIKAMLSYVWPKDRPDLRARVAISLGFLGGAKAMNIVVPFMFKYAVDSLNQMSGNMLNLSDAPNTVATMATAVLIGYGVSRAGAAFFNEVRNAVFGKVAQNSIRRIAKNVFLHLHNLDLGFHLSRQTGALSKAIDRGTRGISFVLSALVFNLLPIMFEVMLVSGVLYFNNERYEAQRYDGFLKTYETASLKSTSTLAMLNFGQSAIFSVGLTAIMVLASQGIVAGTLTVGDLVMVNGLLFQLSLPLNFLGTVYRETRQALIDMNTLFTLLKVDTQIKDKVMASPLQITPQTATVAFDNVHFEYIEGQKVLSGISFEVPAGKKVAIVGGSGSGKSTIVRLLFRFYEPQKGSIYLAGQNIQDVSLESLRRAVGVVPQDAVLFHNTIYYNLLYGNISASPEEVYAVAKLAGLHDAILRMPHGYDTQVGERGLKLSGGEKQRVAIARAILKDPPVILYDEATSSLDSITEETILGAMKDVVKHRTSIFIAHRLSTVVDADEIIVLDQGKVAERGTHHGLLANPHSIYSEMWHTQSSRVQNHDNPKWEAKKENISKEEERKKLQEEIVNSVKGCGNCSC

SEQ ID NO: 58005 - protein, 59 aa, Homo sapiens
MKARLKGAQTGRNLLKKKSDALTLRFRQILKKIIETKMLMGEVMREAAFSLAEAKFTAG

SEQ ID NO: 58006 - protein, 384 aa, Homo sapiens
MVAEVCSMPAASAVKKPFDLRSKMGKWCHHRFPCCRGSGKSNMGTSGDHDDSFMKTLRSKMGKCCHHCFPCCRGSGTSNVGTSGDHDNSFMKTLRSKMGKWCCHCFPCCRGSGKSNVGTWGDYDDSAFMEPRYHVRREDLDKLHRAAWWGKVPRKDLIVMLRDTDMNKRDKQKRTALHLASANGNSEVVQLLLDRRCQLNVLDNKKRTALIKAVQCQEDECVLMLLEHGADGNIQDEYGNTALHYAIYNEDKLMAKALLLYGADIESKNKCGLTPLLLGVHEQKQQVVKFLIKKKANLNALDRYGRTALILAVCCGSASIVNLLLEQNVDVSSQDLSGQTAREYAVSSHHHVICELLSDYKEKQMLKISSENSNPENVSRTRNK

SEQ ID NO: 58007 - protein, 124 aa, Homo sapiens
MGGQVSASNSFSRLHCRNANEDWMSALCPRLWDVPLHHLSIPGSHDTMTYCLNKKSPISHEESRLLQLLNKALPCITRPVVLKWSVTQALDVTEQLDAGVRYLDLRIAHMLEGSEKNLHFVHMV

SEQ ID NO: 58008 - protein, 140 aa, Homo sapiens
SSEWSAPSDPLDILIAGQISDRPSLSVQPGPTVTSGEKVTLLCQSWDPMFTFLLTKEGAAHPPLRLRSMYGAHKYQAEFPMSPVTSAHAGTYRCYGSRSSNPYLLSHPSEPLELVVSGEGADPVHSELKGVLGNEKGELP

SEQ ID NO: 58009 - protein, 238 aa, Homo sapiens
MWPLWRLVSLLALSQALPFEQRGFWDFTLDDGPFMMNDEEASGADTSGVLDPDSVTPTYSAMCPFGCHCHLRVVQCSDLGLKSVPKEISPDTTLLDLQNNDISELRKDDFKGLQHLYVRSWEEPAGLQQRAGVRALVLVNNKISKIHEKAFSPLRKLQKLYISKNHLVEIPPNLPSSLVELRIHDNRIRKVPKGVFSGLRNMNCIEMGGNPLENSGFEPGAFDGLKLNYLRISEAKLT

SEQ ID NO: 58010 - protein, 270 aa, Homo sapiens
MGSKMNLIEHSHLPTTDEFSFSENLFGVLTEQVAGPLGQNLEVEPYSQYSNVQFPQVQPQISSSSYYSNLGFYPQQPEEWYSPGIYELRRMPAETLYQGETEVAEMPVTKKPRMGASAGRIKGDELCVVCGDRASGYHYNALTCEGCKGFFRRSITKNAVYKCKNGGNCVMDMYMRRKCQECRLRKCKEMGMLAECLLTEIQCKSKRLRKNVKQHADQTVNEDSEGRDLRQVTSTTKSCRCRRKLNSPQINRLFYILLWIHITNRGCLRK

SEQ ID NO: 58011 - protein, 98 aa, Homo sapiens
MGGCTVKPQLLLLALVLHPWNPCLGADSEKPSSIPTDKLLVITVATKESDGFHRFMQSAKYFNYTVKKEGSVSQVFSTNKRRTRRYLGPWSRRRMERW

SEQ ID NO: 58012 - protein, 191 aa, Homo sapiens
  MOD_RES (1)..(1): Any amino acid
XGLPPYDPIRMEFENKEDLSGTQAGLNVIKEAEAQLWWAAKELRRTKKLSDYVGKNEKTKIIAKIQQPLQQQIIRLHQELGRQKSLWADVHGKLRSHIDALREQNMELREKLRALQLQRWKARKKSAASPHAGQESHTLALEPAFGKISPLSADEETIPKYAGHKNQSATLLGQRSSSNNSAPPKTEAPQS

SEQ ID NO: 58013 - protein, 43 aa, Homo sapiens
MRQHRQFMDRTHYLLTFSSSETLLRLLLRNFTCGNLPFGCSCL

SEQ ID NO: 58014 - protein, 248 aa, Homo sapiens
MGLPQPGLWLKRLWVLLEVAVHVVVGKVLLILFPDRVKRNILAMGEKTGMTRNPHFSHDNWIPTFFSTQYFWFVLKVRWQRLEDTTELGGLAPNCPVVRLSGQRCNIWEFMQGNRPLVLNFGSCTPSFMFKFDQFKRLIEDFSSIADFLVIYIEEAHASDGWAFKNNMDIRNHQNLQDRLQAAHLLLARSPQCPVVVDTMQNQSSQLYAALPERLYIIQEGRILYKGKSGPWNYNPEEVRAVLEKLHS

SEQ ID NO: 58015 - protein, 838 aa, Homo sapiens
MERMNWLSRLASRGPGHRIPQGANLQTPVMADPETCLMVFKNHWSQVVRILERQGPRAAPGGADDLSAVRNHTYQMLTLLAEDRAVPSAPTGPGPLLEFALHEDLLTRVLTWQLQWDELGDGVEERRAEQLKLFEMLVSEARQPLLRHGPVREALLTLLDACGRPVPSSPALDEGLVLLLSQLCVCVAQEPSLLEFFLQPPPEPGAAPRLLLFSRLVPFVHREGTLGQQARDALLLLMALSAGSPTVGRYIADHSYFCPVLATGLSALYSSLPRKIEVPGDDWHCLRREDWLGVPALALFMSSLEFCNAVIQVAHPLVQKQLVDYIHNGFLVPVMGPALHKTSVEEMIASTAYLELFLRSISEPALLRTFLRFLLLHRHDTHTILDTLVARIGSNSRLCMVSLSLFRTLLNLSCEDVLLQLVLRYLVPCNHVMLSQKPAVRDVDLYGRAADKFLSLIPRCCRHHAPSPPRPEHASWARGPGSPSVDSSSVTTVPRPSTPSRLALFLRQQSLGGSESPGPAPCSPGLSASPASSPGRRPTPAEEPGELEDNYLEYLREARRGVDRCVRACRTWSAPYDGERPSPEPSPFGSRTKKRSLLPEEDRNNVGEGEEEELGRRGRAGGAGEGPGHLPPPQLNGVPGSWPEGAKKVRLVPKEGAGELLEGISEGMAGLEGFGQELRELEVALSNGGTGSESPLEPPLPLEEEEAYESFTCPPEPPGPFLSSPLRTLNQLPSQPFTGKLLSLGLPFCVLFACSRHVCAGFLDLLAMSFLCTCLAPHPSCLHHFQIRVMSYLCPCVCLYVFHACAGLSIDLHLSLVCMSYVHVPPLSLVWPFPAICN

SEQ ID NO: 58016 - protein, 216 aa, Homo sapiens
FDKPGGPENLYVKEVAKPSPGEGEVLLKVAASALNRADLMQRQGQYDPPPGASNILGLEASGHVAELGPGCQGHWKIGDTAMALLPGGGQAQYVTVPEGLLMPIPEGLTLTQAAAIPEAWLTAFQLLHLVGNVQAGDYVLIHAGLSGVGTAAIQLTRMAGAIPLVTAGSQKKLQMAEKLGAAAGFNYKKEDFSEATLKFTKGKQLLLQFSRNLRDD

SEQ ID NO: 58017 - protein, 56 aa, Homo sapiens
MVVSKMNKDAQMRAAINQKLIETGERERLKELLRAKLIECGWKDQLKAHCKDNDFK

SEQ ID NO: 58018 - protein, 171 aa, Homo sapiens
MYQYLDRKLFKEAYQIACLGVTDTDWRELAMEALEGLDFETAKKERKKRGETNNDLFLADVFSYQGKFHEAAKLYKRSGHENLALEMYTDLCMFEYAKDFLGSGDPKETKMLITKQADWARNIKEPKAAVEMYISAGEHVKAIEICGDHGWVDMLIDIARKLDKAEREPLL

SEQ ID NO: 58019 - protein, 506 aa, Homo sapiens
MPVQAAQWTEFLSCPICYNEFDENVHKPISLGCSHTVCKTCLNKLHRKACPFDQTAINTDIDVLPVNFALLQLVGAQVPDHQSIKLSNLGENKHYEVAKKCVEDLALYLKPLSGGKGVASLNQSALSRPMQRKLVTLVNCQLVEEEGRVRAMRAARSLGERTVTELILQHQNPQQLSANLWAAVRARGCQFLGPAMQEEALKLVLLALEDGSALSRKVLVLFVVQRLEPRFPQASKTSIGHVVQLLYRASCFKVTKRDEDSSLMQLKEEFRSYEALRREHDAQIVHIAMEAGLRISPEQWSSLLYGDLAHKSHMQSIIDKLQSPESFAKSVQELTIVLQRTGDPANLNRLRPHLELLANIDPNPDAVSPTWEQLENAMVAVKTVVHGLVDFIQNYSRKGHETPQPQPNSKYKTSMCRDLRQQGGCPRGTNCTFAHSQEELEKCNPRGLYLHCCLLSSVASLGTVHNELYKQQHCDREKISVCAVKRAETCFSSQFFSPLEVPREED

SEQ ID NO: 58020 - protein, 81 aa, Homo sapiens
MAPQMYEFHLPLSPEELLKSGGVNQYVVQEVLSIKHLPPQLRAFQAAFRAQGPLAMLQHFDTIYSILHGIPPLPGASSYPG

SEQ ID NO: 58021 - protein, 97 aa, Homo sapiens
  MOD_RES (1)..(1): Any amino acid
XCPPAVSLALPFGKPELFVQCLATYSYRHGSGKEKKVLTYSDLANTAQQSETFQFLADILPKKILASKYLKMLKEEKREEDEENDNDNESDHDEADS

SEQ ID NO: 58022 - protein, 103 aa, Homo sapiens
MSKSVPAFLQDESDDRETDTASESSYQLSRHKKSPSSLTNLSSSSGMTSLSSVSGSVMSVYSGDFGNLEVKGNIQFAIEYVESLKELHVFVAQCKDLAAADVK

SEQ ID NO: 58023 - protein, 90 aa, Homo sapiens
WPSSSGTPSLPSTTEGQMWASPAPTLIDSGDSVVAKYINRFRQAQPTSREERQPAGPTPADFWWLQSDSPDPSSQSAAGTSFSAIHYSHP

SEQ ID NO: 58024 - protein, 196 aa, Homo sapiens
  MOD_RES (1)..(1): Any amino acid
XSHIAEDVGRLVKKAKKTYQAYHMESVNAEAKLREAERQEEKRAGRSVPTTTAGATEAGPLRKSSLKKGGRLVEKLWPPQRPVAASSCAPVCWLQAGFLVHPPWWGAMCAPSTHQRQAKFMEHKLKCTKARNEYLLSLASVNAAVSNYYLHDVLDLMDCCDTGFHLALGQVLRSYTAAESRTQASQVQGLGSLEEA

SEQ ID NO: 58025 - protein, 220 aa, Homo sapiens
MTLHATRGAALLSWVNSLHVADPVEAVLQLQDCSIFIKIIDRIHGTEEGQQILKQPVSERLDFVCSFLQKNRKHPSSPECLVSAQKVLEGSELELAKMTMLLLYHSTMSSKSPRDWEQFEYKIQAELAVILKFVLDHEDGLNLNEDLENFLQKAPVPSTCSSTFPEELSPPSHQAKREIRFLELQKVASSSSGNNFLSGSPASPMGDILQTPQFQMRRLK

SEQ ID NO: 58026 - protein, 1017 aa, Homo sapiens
  MOD_RES (1)..(1): Any amino acid
XYDRYLASSKIMAAAYLDPNLNHTPNSSTKTHLGTGMERSPGAMERVLKVFHYFESNSEPTTWASIIRHGDATDVRGIIQKIVDSHKVKHVACYGFRLSHLRSEEVHWLHVDMGVSSVREKYELAHPPEEWKYELRIRYLPKGFLNQFTEDKPTLNFFYQQVKSDYMLEIADQVDQEIALKLGCLEIRRSYWEMRGNALEKKSNYEVLEKDVGLKRFFPKSLLDSVKAKTLRKLIQQTFRQFANLNREESILKFFEILSPVYRFDKECFKCALGSSWIISVELAIGPEEGISYLTDKGCNPTHLADFTQVQTIQYSNSEDKDRKGMLQLKIAGAPEPLTVTAPSLTIAENMADLIDGYCRLVNGTSQSFIIRPQKEGERALPSIPKLANSEKQGMRTHAVSVSETDDYAEIIDEEDTYTMPSTRDYEIQRERIELGRCIGEGQFGDVHQGIYMSPENPALAVAIKTCKNCTSDSVREKFLQEALTMRQFDHPHIVKLIGVITENPVWIIMELCTLGELRSFLQVRKYSLDLASLILYAYQLSTALAYLESKRFVHRDIAARNVLVSSNDCVKLGDFGLSRYMEDSTYYKASKGKLPIKWMAPESINFRRFTSASDVWMFGVCMWEILMHGVKPFQGVKNNDVIGRIENGERLPMPPNCPPTLYSLMTKCWAYDPSRRPRFTELKAQLSTILEEEKAQQEERMRMESRRQATVSWDSGGSDEAPPKPSRPGYPSPRSSEGFYPSPQHMVQTNHYQDSTVLDLRGIGQVLPTHLMEERLIRQQQEMEEDQRWLEKEERFLKPDVRLSRGSIDREDGSLQGPIGNQHIYQPVGKPDPAAPPKKPPRPGAPGHLGSLASLSSPADSYNEGVKLQPQEISPPPTANLDRSNDKVYENVTGLVKAVIEMSSKIQPAPPEEYVPMVKEVGLALRTLLATVDETIPLLPASTHREIEMAQKLLNSDLGELINKMKLAQQYVMTSLQQEYKKQMLTAAHALAVDAKNLLDVIDQARLKMLGQTRPH

SEQ ID NO: 58027 - protein, 120 aa, Homo sapiens
MAGEKVEKPDTKEKKPEAKKVDAGGKVKKGNLKAKKPKKGKPHCSRNPVLVRGIGRYSRSAMYSRKAMYKRKYSAAKSKVEKKKKEKVLATVTKPVGGDKNGGTRVVKLRKMPRYYPTED

SEQ ID NO: 58028 - protein, 139 aa, Homo sapiens
MSDKSELKAELERKKQRLAQIREEKKRKEEERKKKETDQKKEAVAPVQEESDLEKKRREAEALLQSMGLTPESPIVFSEYWVPPPMSPSSKSVSTPSEAGSQDSGDGAVGSRTLHWDTDPSVLQLHSDSDLGRGPIKLG

SEQ ID NO: 58029 - protein, 174 aa, Homo sapiens; identical to SEQ ID NO: 47355

SEQ ID NO: 58030 - protein, 61 aa, Homo sapiens
MRLLAGWLCLSLASVWLARRMWTLRSPLTRSLGMCATERNYANHSRLSLFRVTLIKEHRSS

SEQ ID NO: 58031 - protein, 178 aa, Homo sapiens
MDLKIGKATPKDSKYVEKLEALFPDLPKRNDIFDSLQKAKFDVSGLTTEQMLRKDQKTIYRQGVKVAISAIYMDLEICEVLERSHSPPLKLTPASSTHPNLHAYLQGNTQVSRKKLLPLLQEALSAYFDSMKIPSGQPETADVSREQVDKELDRASNSLISGLSQDEEDPPLPPTPMN

SEQ ID NO: 58032 - protein, 597 aa, Homo sapiens
MEPEPEPAAVEVPAGRVLSARELFAARSRSQKLPQRSHGPKDFLPDGSAAQAERLRRCREELWQLLAEQRVERLGSLVAAEWRPEEGFVELKSPAGKFWQTMGFSEQGRQRLHPEEALYLLECGSIHLFHQDLPLSIQEAYQLLLTDHTVTFLQYQVFSHLKRLGYVVRRFQPSSVLSPYERQLNLDASVQHLEDGDGKRKRSSSSPRSINKKAKALDNSLQPKSLAASSPPPCSQPSQCPEEKPQESSPMKGPGGPFQLLGSLGPSPGPAREGVGCSWESGRAENGVTGAGKRRWNFEQISFPNMASDSRHTLLRAPAPELLPANVAGRETDAESWCQKLNQRKEKLSRREREHHAEAAQFQEDVNADPEVQRCSSWREYKELLQRRQVQRSQRRAPHLWGQPVTPLLSPGQASSPGTPSACHIFEGHWQLRNHRTLERAWMNWDGLRLKEDVGGGSGPTSTVSSPAAAAGPVWEGLEMYLVFCVLVAVVLQHISVLQTTHLPDGGARLLEKSGGLEIIFDVYQADAVATFRKNNPGKPYARMCISGFDEPVPDLCSLKRLSYQSGDVPLIFALVDHGDISFYSFRDFTLPQDVGH

SEQ ID NO: 58033 - protein, 35 aa, Homo sapiens
MSPQLTSAFRNLPKTFVCHLNEMKTFPSTLLQEFP

SEQ ID NO: 58034 - protein, 66 aa, Homo sapiens
MKLLAATVLLLTICSLEGALVRRQAKEPCVESLVSQYFQTVTDYGKDLMEKVKSPELQAEAKSYFE

SEQ ID NO: 58035 - protein, 1141 aa, Homo sapiens
MAEDGSEEIMFIWCEDCSQYHDSECPELGPVVMVKDSFVLSRARSSLPPNLEIRRLEDGAEGVFAITQLVKRTQFGPFESRRVAKWEKESAFPLKVFQKDGHPVCFDTSNEDDCNWMMLVRPAAEAEHQNLTAYQHGSDVYFTTSRDIPPGTELRVWYAAFYAKKMDKPMLKQAGSGVHAAGTPENSAPVESEPSQWACKVCSATFLELQLLNEHLLGHLEQAKSLPPGSQSEAAAPEKEQDTPRGEPPAVPESENVATKEQKKKPRRGRKPKVSKAEQPLVIVEDKEPTEQVAEIITEVPPDEPVSATPDERIMELVLGKLATTTTDTSSVPKFTHHQNNTITLKRSLILSSRHGIRRKLIKQLGEHKRVYQCNICSKIFQNSSNLSRHVRSHGDKLFKCEECAKLFSRKESLKQHVSYKHSRNEVDGEYRYRCGTCEKTFRIESALEFHNCRTDDKTFQCEMCFRFFSTNSNLSKHKKKHGDKKFACEVCSKMFYRKDVMLDHQRRHLEGVRRVKREDLEAGGENLVRYKKEPSGCPVCGKVFSCRSNMNKHLLTHGDKKYTCEICGRKFFRVDVLRDHIHVHFKDIALMDDHQREEFIGKIGISSEENDDNSDESADSEPHKYSCKRCQLTFGRGKEYLKHIMEVHKEKGYGCSICNRRFALKATYHAHMVIHRENLPDPNVQKYIHPCEICGRIFNSIGNLERHKLIHTGVKSHACEQCGKSFARKDMLKEHMRVHDNVREYLCAECGKGMKTKHALRHHMKLHKGIKEYECKECHRRFAQKVNMLKHCKRHTGIKDFMCELCGKTFSERNTMETHKLIHTVGKQWTCSVCDKKYVTEYMLQKHVQLTHDKVEAQSCQLCGTKVSTRASMSRHMRRKHPEVLAVRIDDLDHLPETTTIDASSIGIVQPELTLEQEDLAEGKHGKAAKRSHKRKQKPEEEAGAPVPEDATFSEYSEKETEFTGSVGDETNSAVQSIQQVVVTLGDPNVTTPSSSVGLTNITVTPITTAAATQFTNLQPVAVGHLTTPERQLQLDNSILTVTFDTVSGSAMLHNRQNDVQIHPQPEASNPQSVAHFINLTTLVNSITPLGSQLSDQHPLTWRAVPQTDVLPPSQPQAPPQQAAQPQVQAEQQQQQMYSY

SEQ ID NO: 58036 - protein, 984 aa, Homo sapiens
DFPFTREEALQADKKLNLFIGASVDPAGVTMIDAVKIYGKTKEQFGWPDEPPEEFPSASVSNICPSNLNQSNGTGDSDSAAPTTTSGTVLERLVVSSLEALESCFAVGPIIEKERNKNAAQELATLLLSLPAPASVQQQSKSLLASLHTSRSAYHSHKDQALLSKAVQCLNTSSKEGKDLDPEVFQRLVITARSIAIMRPNNLVHFTESKLPQMETDCFFPRCACWSLGIVGILIGAPLETPSPEGMDEGKEPQKQLEGDCCSFITQLVNHFWKLHASKPKNAFLAPACLPGLTHIEATVNALVDIIHGYCTCELDCINTASKIYMQMLLCPDPAVSFSCKQALIRVLRPRNKRRHVTLPSSPRSNTPMGDKDDDDDDDADEKMQSSGIPNGGHIRQESQEQSEVDHGDFEMVSESMVLETAENVNNGNPSPLEALLAGAEGFPPMLDIPPDADDETMVELAIALSLQQDQQAPASDDEGSTAATDGSTLRTSPADHGGSVGSESGGSAVDSVAGEHSVSGRSSAYGDATAEGHPAGPGSVSSSTGAISTTTGHQEGDGSEGEGEGETEGDVHTSNRLHMVRLMLLERLLQTLPQLRNVGGVRAIPYMQVILMLTTDLDGEDEKDKGALDNLLSQLIAELGMDKKDVSKKNERSALNEVHLVVMRLLSVFMSRTKSGSKSSICESSSLISSATAAALLSSGAVDYCLHVLKSLLEYWKSQQNDEEPVATSQLLKPHTTSSPPDMSPFFLRQYVKGHAADVFEAYTQLLTEMVLRLPYQIKKITDTNSRIPPPVFDHSWFYFLSEYLMIQQTPFVRRQVRKLLLFICGSKEKYRQLRDLHTLDSHVRGIKKLLEEQGIFLRASVVTASSGSALQYDTLISLMEHLKACAEIAAQRTINWQKFCIKDDSVLYFLLQVSFLVDEGVSPVLLQLLSCALCGSKVLAALAASSGSSSASSSSAPVAASSGQATTQSKSSTKKSKKEEKE

SEQ ID NO: 58037 - protein, 79 aa, Homo sapiens
MVAKQRIRMANEKHSKNITQRGNVAKTLRPQEEKYPVGPWLLALFVFVVCGSVSVFSLVYGNKIIVQDPLQIGVVIQEM

SEQ ID NO: 58038 - protein, 913 aa, Homo sapiens
MTMAGGRRGLVAPQNTFLENIVRRSNDTNFVLGNAQIVDWPIVYSNDGFCKLSGYHRAEVMQKSSTCSFMYGELTDKDTIEKVRQTFENYEMNSFEILMYKKNRTPVWFFVKIAPIRNEQDKVVLFLCTFSDITAFKQPIEDDSCKGWGKFARLTRALTSSRGVLQQLAPSVQKGENVHKHSRLAEVLQLGSDILPQYKQEAPKTPPHIILHYCVFKTTWDWIILILTFYTAILVPYNVSFKTRQNNVAWLVVDSIVDVIFLVDIVLNFHTTFVGPAGEVISDPKLIRMNYLKTWFVIDLLSCLPYDVINAFENVDEGISSLFSSLKVVRLLRLGRVARKLDHYIEYGAAVLVLLVCVFGLAAHWMACIWYSIGDYEIFDEDTKTIRNNSWLYQLAMDIGTPYQFNGSGSGKWEGGPSKNSVYISSLYFTMTSLTSVGFGNIAPSTDIEKIFAVAIMMIGSLLYATIFGNVTTIFQQMYANTNRYHEMLNSVRDFLKLYQVPKGLSERVMDYIVSTWSMSRGIDTEKVLQICPKDMRADICVHLNRKVFKEHPAFRLASDGCLRALAMEFQTVHCAPGDLIYHAGESVDSLCFVVSGSLEVIQDDEVVAILGKGDVFGDVFWKEATLAQSCANVRALTYCDLHVIKRDALQKVLEFYTAFSHSFSRNLILTYNLRKRIVFRKISDVKREEEERMKRKNEAPLILPPDHPVRRLFQRFRQQKEARLAAERGGRDLDDLDVEKGNVLTEHASANHSLVKASVVTVRESPATPVSFQAASTSGVPDHAKLQAPGSECLGPKGGGGDCAKRKSWARFKDACGKSEDWNKVSKAESMETLPERTKASGEATLKKTDSCDSGITKSDLRLDNVGEARSPQDRSPILAEVKHSFYPIPEQTLQATVLEGLTLLPRLVSNS

SEQ ID NO: 58039 - protein, 250 aa, Homo sapiens
MNRHLWKSQLCEMVQPSGGPAADQDVLGEESPLGKPAMLHLPSEQGAPETLQRCLEENQELRDAIRQSNQILRERCEELLHFQASQREEKEFLMCKFQEARKLVERLGLEKLDLKRQKEQALREVEHLKRCQQQMAEDKASVKAQVTSLLGELQESQSRLEAATKECQALEGRARAASEQARQLESEREALQQQHSVQVDQLRMQGQSVEAALRMERQAASEEKRKLAQLQVAYHQLFQEYDNHIKSSVV

SEQ ID NO: 58040 - protein, 145 aa, Homo sapiens
MAFVTRQFMRSVSSSSTASASAKKIIVKHVTVIGGGLMGAGIAQVAAATGHTVVLVDQTEDILAKSKKGIEESLRKVAKKKFAENLKAGDEFVEKTLSTIATSTDAASVVHSTDLVVEAIVENLKVKNELFKRLDKFAAESLKHQ

SEQ ID NO: 58041 - protein, 182 aa, Homo sapiens
MNGRVDYLVTEEEINLTRGPSGLGFNIVGGTDQQYVSNDSGIYVSRIKENGAAALDGRLQEGDKILSVNGQDLKNLLHQDAVDLFRNAGYAVSLRVQHRLLIVGGSFGLREFSQIRYDAVKSKMDPELEKKLKENKISLESEYEKIKDSKFDDWKNIRGPRPWEDPDLLQGRNPESLKTKTT

SEQ ID NO: 58042 - protein, 59 aa, Homo sapiens
MAVRASFENNCEIGCFAKLTNTYCLVAIGGSENFYRRQKKFWQMCSRWKSSDRQWPTRC

SEQ ID NO: 58043 - protein, 162 aa, Homo sapiens
  MOD_RES (1)..(1): Any amino acid
XEDSLSSGGSDSDESVYKVLLLGAPGVGKSALARIFGGVEDGPEAEAAGHTYDRSIVVDGEEASLMVYDIWEQDGGRWLPGHCMAMGDAYVIVYSVTDKGSFEKASELRAQTLGPSELPAGHPQPHGHGQIDSAALRSGSQGPVRAGPTEMHAQAHMRPKQP

SEQ ID NO: 58044 - protein, 99 aa, Homo sapiens
MAAGVEAAAEVAATEIKMEEESGAPGVPSGNGAPGPKGEGERPAQNEKRKEKNIKRGGNRFEPYANPTKRYRAFITNIPFDVKWQSLKDLVKEKGMCCC

SEQ ID NO: 58045 - protein, 351 aa, Homo sapiens
MAQPYASAQFAPPQNGIPAEYTAPHPHPAPEYTGQTTVPEHTLNLYPPAQTHSEQSPADTSAQTVSGTATQTDDAAPTDGQPQTQPSENTENKSQPKRLHVSNIPFRFRDPDLRQMFGQFGKILDVEIIFNERGSKGFGFVTFENSADADRAREKLHGTVVEGRKIEVNNATARVMTNKKTVNPYTNGWKLNPVVGAVYSPEFYAGTVLLCQANQEGSSMYSAPSSLVYTSAMPGFPYPAATAAAAYRGAHLRGRGRTVYNTFRAAAPPPPIPAYGGVVYQDGFYGADIYGGYAAYRYAQPTPATAAAYSDSYGRVYAADPYHHALAPAPTYGVGAMASIYRGGYNRFAPY

SEQ ID NO: 58046 - protein, 25 aa, Homo sapiens
  MOD_RES (1)..(1): Any amino acid
XWLCCAAPAHVVQCTEAYWKEWPTS

SEQ ID NO: 58047 - protein, 69 aa, Homo sapiens
MHFSIPETESRSGDSGGSAYVFGKTHCLGAARLSTVSCVGHNRRHSRSPQRKCPWKCCSATGRKFWSTC

SEQ ID NO: 58048 - protein, 166 aa, Homo sapiens
YAECGLRILAFPCNQFGKQEPGSNEEIKEFAAGYNVKFDMFSKICVNGDDAHPLWKWMKIQPKGKGILGNAIKWNFTKFLIDKNGCVVKRYGPMEEPLLHKCVAPPEPLPTPLEPSTGTHDGLPANLLVGQTRKSSVHPAGGRSHGLLGLARRPHPWLPCGNKQTN

SEQ ID NO: 58049 - protein, 149 aa, Homo sapiens
MREEFDKIGMRRTVEGVLIVHEHRLPHVLLLQLGTTFFKLPGGELNPGEDEVEGLKRLMTEILGRQDGVLQDWVIDDCIGNWWRPNFEPPQYPYIPAHITKPKEHKKLFLVQLQEKALFAVPKNYKLVAAPLFELYDNAPGYGPIISSL

SEQ ID NO: 58050 - protein, 102 aa, Homo sapiens
MKEWKSKMEISEEKKSARAASEKLQRQITQECELVETSNSEDRLLKHWVSPLKDAMRHLPSQESGIREMHIIPQKAIVGEIGHGCNEGEKILSAGESSHRYE

SEQ ID NO: 58051 - protein, 263 aa, Homo sapiens
MAPRARRRRPLFALLLLCALLARLQVALQIAPPCTSEKHYEHLGRCCNKCEPGKYMSSKCTTTSDSVCLPCGPDEYLDSWNEEDKCLLHKVCDTGKALVAVVAGNSTTPRRCACTAGYHWSQDCECCRRNTECAPGLGAQHPLQLNKDTVCKPCLAGYFSDAFSSTDKCRPWTNCTFLGKRVEHHGTEKSDAVCSSSLPARKPPNEPHVYLPGLIILLLFASVALVAAIIFGVCYRKKGKALTANLWHWINEACGRLSGDKES

SEQ ID NO: 58052 - protein, 143 aa, Homo sapiens
KIVRSFEVSPDGSFLLINGIAGYLHLLAMKTKELIGSMKINGRVAASTFSSDSKKVYASSGDGEVYVWDVNSRKCLNRFVDEGSLYGLSIATSRNGQYVACGCYFSDLQSYYRNLGNCFRKNERSSQIGSSSFLYSIFKLPSH

SEQ ID NO: 58053 - protein, 65 aa, Homo sapiens
MATNGVVHVITNVLQPPANRPQERGDELADSALEIFKQASAFSRASQRSVRLAPVYQKLLERMKH

SEQ ID NO: 58054 - protein, 224 aa, Homo sapiens
MEEEETQLEEELDKAQEDILKHQASISELKRNFMESTPEPRPNEWEKRRITPLSLQTQGSLEEEITSILFSEKGFSDSMKATFTSATTWTAEGAVVSANAPSEKLSSSPFSHLLETRAPESEGPCTGARDAVKSSHETLNIVEEKKRAEVGKDERVITEEMNGKEISPGSGPGEIRKVEPVTQKDSTSLSSESSSSSSESEEEDVGEYRPHHRVTEGTIREEQE

SEQ ID NO: 58055 - protein, 48 aa, Homo sapiens
MPTPDATTPQAKGFRRAVSELDAKQAEAIMVRGQGHQALGAVPSCEGV

SEQ ID NO: 58056 - protein, 1253 aa, Homo sapiens
MGVDFDVKTFCHNLRATKPPYECPVETCRKVYKSYSGIEYHLYHYDHDNPPPPQQTPLRKHKKKGRQSRPANKQSPSPSEVSQSPGREVMSYAQAQRMVEVDLHGRVHRISIFDNLDVVSEDEEAPEEAPENGSNKENTETPAATPKSGKHKNKEKRKDSNHHHHHNVSASTTPKLPEVVYRELEQDTPDAPPRPTSYYRYIEKSAEELDEEVEYDMDEEDYIWLDIMNERRKTEGVSPIPQEIFEYLMDRLEKESYFESHNKGDPNALVDEDAVCCICNDGECQNSNVILFCDMCNLAVHQECYGVPYIPEGQWLCRRCLQSPSRAVDCALCPNKGGAFKQTDDGRWAHVVCALWIPEVCFANTVFLEPIDSIEHIPPARWKLTCYICKQRGSGACIQCHKANCYTAFHVTCAQQAGLYMKMEPVRETGANGTSFSVRKTAYCDIHTPPGSARRLPALSHSEGEEDEDEEEDEGKGWSSEKVKKAKAKSRIKMKKARKILAEKRAAAPVVSVPCIPPHRLSKITNRLTIQRKSQFMQRLHSYWTLKRQSRNGVPLLRRLQTHLQSQRNCDQVGRDSEDKNWALKEQLKSWQRLRHDLERARLLVELIRKREKLKRETIKVQQIAMEMQLTPFLILLRKTLEQLQEKDTGNIFSEPVPLSEVTELDEVPDYLDHIKKPMDFFTMKQNLEAYRYLNFDDFEEDFNLIVSNCLKYNAKDTIFYRAAVRLREQGGAVLRQARRQAEKMGIDFETGMHIPHSLAGDEATHHTEDAEEERLVLLENQKHLPVEEQLKLLLERLDEVNASKQSVGRSRRAKMIKKEMTALRRKLAHQRETGRDGPERHGPSSRGSLTPHPAACDKDGQTDSAAEESSSQETSKGLGPNMSSTPAHEVGRRTSVLFSKKNPKTAGPPKRPGRPPKNRESQMTPSHGGSPVGPPQLPIMSSLRQRKRGRSPRPSSSSDSDSDKSTEDPPMDLPANGFSGGNQPVKKSFLVYRNDCSLPRSSSDSESSSSSSSSAASDRTSTTPSKQGRGKPSFSRGTFPEDSSEDTSGTENEAYSVGTGRGVGHSSKFPCPRPGMLGTQCQGLASPPAADPPPLPHSCEVVRKSLGRGAGWLSEDEDSPLDALDLVWAKCRGYPSYPALIIDPKMPREGMFHHGVPIPVPPLEVLKLGEQMTQEAREHLYLVLFFDNKRTWQWLPRTKLVPLGVNQDLDKEKMLEGRKSNIRKSVQIAYHRALQHRSKVQGEQSSETSDSD

SEQ ID NO: 58057 - protein, 235 aa, Homo sapiens
MASGSNWLSGVNVVLVMAYGSLVFVLLFIFVKRQIMRFAMKSRRGPHVPVGHNAPKDLKEEIDIRLSRVQDIKYEPQLLADDDARLLQLETQGNQKIPFHSEGRHPRSLMGKNFRSYLLDLRNTSTPFKGVRKALIDTLLDGYETARYGTGVFGQNEYLRYQEALSELATAVKARIGSSQRHHQSAAKDLTQSPEVSPTTIQVTYLPSSQKSKRAKHFLELKSFKDNYNTLESTL

SEQ ID NO: 58058 - protein, 289 aa, Homo sapiens
DEEDDFMCKKAASKSKENGRSTNSHLGTSNMKKNEENTKTKNKPLSPIKLTPTSVLDYFGTGSVQRSNKKMVASKRKELSQNTDESGLNDEAIAKQLQLDEDAELERQLHEDEEFARTLAMLDEEPKTKKARKDTEAGETFSSVQANLSKAEKHKYPHKAQVSDERKSYSPRKQSKYESSKESQQHSKSSADKIGEVSSPKASSKLAIMKRKEESSYKEIEPVASKRKENAIKLKGETKTPKKTKSSPAKKESVSPEDSEKKRTNYQLSKLLKSRRSQGSGLQRNTKGK

SEQ ID NO: 58059 - protein, 59 aa, Homo sapiens
MLALLVLVTVALASAHHGGEHFEGEKVFRVNVEDENHINIIRELASTTQIDFWKPDSVT

SEQ ID NO: 58060 - protein, 41 aa, Homo sapiens
  MOD_RES (1)..(1): Any amino acid
XRPTINLLQEQEAETCETIAFNFYMLRNRFTCTRTRKTGTE

SEQ ID NO: 58061 - protein, 115 aa, Homo sapiens
MNKLRQSLRRRKPAYVPEASRPHQWQADEDAVRKGTCSFPVRYLGHVEVEESRGMHVCEDAVKKLKAMGRKSVKSVLWVSADGLRVVDDKTKDLLVDQTIEKVSFCAPDRNLDKA

SEQ ID NO: 58062 - protein, 281 aa, Homo sapiens
ERVATRTQFPVSTESQKPRQKKAPEFPILEKQNWLIHLHYIRKDYEACKAVIKEQLQETQGLCEYAIYVQALIFRLEGNIQESLELFQTCAVLSPQSADNLKQVARSLFLLGKHKAAIEVYNEAAKLNQKDWEISHNLGVCYIYLKQFNKAQDQLHNALNLNRHDLTYIMLGKIHLLEGDLDKAIEVYKKAVEFSPENTELLTTLGLLYLQAILAAGSMMQTHGDFDVALTKYRVVACAVPESPPLWNNIGMCFFGKKKYVAAISCLKRANYLAPFDWKIL

SEQ ID NO: 58063 - protein, 837 aa, Homo sapiens
MEAEVWEAEGYNLVLDSDLYDADGYDVPDPGLLTEKNELTFTEPSQVLPFLTSSQQWQSLTPRARARRLWLLLRTSLHEVVEKEKRAELRAARLTHGLEPLRRLEVAAGLRSVAQDPVGGRFVVLDGAGRLHLHKEDGWAQETLLAPVRLTGLVTVLGPLGAVGRFVGWGPAGLAILRPNLSLLWLSEQGVGRAPGWAPTCCLPVPDLRLLLVAEMNSSLALWQFRSGGRRLVLRGSALHPPPSPTGRLMRLAVAPVPPHHVLRCFAAYGSAVLTFDLHAWTLVDVRRDLHKTTISDLAYCEEVEAMVTASRDSTVKVWEADWQIRMVFVGHTGPVTAMTVLPNTTLVLSASQDGTLRTWDLQAAAQVGEVALGFWGQDKLSRRVGRLLAPVRPGWPVLSLCASSMQLWRVRELYSPLAQLPAKVLHVQVAPALPAPAHQSLPTRLVCACADGSVYLLSAATGRIVSSLLLEPEDCAAAVAYCLPREALWLLTRAGHLVRANAARCPMSVLHRVCPPPPPAPQPCCLHLYSHLTDLEGAFSSWEIVRQHWGELRCSSVACAWKNKNRYLPVVGHTDGTLSVLEWLSSKTVFQTEAHSPGPVVAIASTWNSIVSSGGDLTVKMWRVFPYAEESLSLLRTFSCCYPAVALCALGRRVTAGFEDPDSATYGLVQFGLGDSPRLDHRPQDDPTDHITGLCCCPTLKLYACSSLDCTVRIWTAENRLLRLLQLNGAPQALAFCSNSGDLVLALGSRLCLVSHRLYLPTSYLVKKMCRKAPDVVDDPPLPLMSQESLTSAQLQRLTNLHGAASLRSHAGLLSPPGGPPFPLWVGAWRCGALWS

SEQ ID NO: 58064 - protein, 75 aa, Homo sapiens
MFYFRGCGRWVAVSFTKQQFPLARLSSDSAAPRTPHFDVIVIGGGHAGTEAATAAARCGSRTLLLTHRVDTIDVM

SEQ ID NO: 58065 - protein, 143 aa, Homo sapiens
MSGGGEQLDILSVGILVKERWKVLRKIGGGGFGEIYDALDMLTRENVALKVESAQQPKQVLKMEVAVLKKLQGKDHVCRFIGCGRNDRFNYVVMQLQGRNLADLRRSQSRGTFTISTTLRLGRQILESIESIHSVGFLHRDIK

SEQ ID NO: 58066 - protein, 136 aa, Homo sapiens
MVKLLVAKILCMVGVFFFMLLGSLLPVKIIETDFEKAHRSKKILSLCNTFGGGVFLATCFNALLPAVREKLQKVLSLGHISTDYPLAETILLLGFFMTVFLEQLILTFRKEKPSFIDLETFNAGSDVGSDSEYESP

SEQ ID NO: 58067 - protein, 1070 aa, Homo sapiens
MADEEAGGTERMEISAELPQTPQRLASWWDQQVDFYTAFLHHLAQLVPEIYFAEMDPDLEKQEESVQMSIFTPLEWYLFGEDPDICLEKLKHSGAFQLCGRVFKSGETTYSCRDCAIDPTCVLCMDCFQDSVHKNHRYKMHTSTGGGFCDCGDTEAWKTGPFCVNHEPGRAGTIKENSRCPLNEEVIVQARKIFPSVIKYVVEMTIWEEEKELPPELQIREKNERYYCVLFNDEHHSYDHVIYSLQRALDCELAEAQLHTTAIDKEGRRAVKAGAYAACQEAKEDIKSHSENVSQHPLHVEVLHSEIMAHQKFALRLGSWMNKIMSYSSDFRQIFCQACLREEPDSENPCLISRLMLWDAKLYKGARKILHELIFSSFFMEMEYKKLFAMEFVKYYKQLQKEYISDDHDRSISITALSVQMFTVPTLARHLIEEQNVISVITETLLEVLPEYLDRNNKFNFQGYSQDKLGRVYAVICDLKYILISKPTIWTERLRMQFLEGFRSFLKILTCMQGMEEIRRQVGQHIEVDPDWEAAIAIQMQLKNILLMFQEWCACDEELLLVAYKECHKAVMRCSTSFISSSKTVVQSCGHSLETKSYRVSEDLVSIHLPLSRTLAGLHVRLSRLGAVSRLHEFVSFEDFQVEVLVEYPLRCLVLVAQVVAEMWRRNGLSLISQVFYYQDVKCREEMYDKDIIMLQIGASLMDPNKFLLLVLQRYELAEAFNKTISTKDQDLIKQYNTLIEEMLQVLIYIVGERYVPGVGNVTKEEVTMREIIHLLCIEPMPHSAIAKNLPENENNETGLENVINKVATFKKPGVSGHGVYELKDESLKDFNMYFYHYSKTQHSKAEHMQKKRRKQENKDEALPPPPPPEFCPAFSKVINLLNCDIMMYILRTVFERAIDTDSNLWTEGMLQMAFHILALGLLEEKQQLQKAPEEEVTFDFYHKASRLGSSAMNIQMLLEKLKGIPQLEGQKDMITWILQMFDTVKRLREKSCLIVATTSGSESIKNDEITHDKEKAERKRKAEAARLHRQKIMAQMSALQKNFIETHKLMYDNTSEMPGKEDSIMEEER

SEQ ID NO: 58068 - protein, 195 aa, Homo sapiens
KGLNVLDLGLNMEILEEQMLHEILCREYPELETRWQDLKIRALDTCKAVEAAENPKRQKPAKFLRNIVRAQGKLCQLRAHCEELEGQKLQEMVLWAPYRPVVWHGMAMVKALSQLQNLLPLFCMSPENWLAVTKQALDSMKPREINHGEDLASHLLQLRAHLTRQLLGSTVTALGLTQVPLVGALGALALLQATG

SEQ ID NO: 58069 - protein, 160 aa, Homo sapiens
MTTNAGPLHPYWPQHLRLDNFVPNDRPTWHILAGLFSVTGVLVVTTWLLSGRAAVVPLGTWRRLSLCWFAVCGFIHLVIEGWFVLYYEDLLGDQAFLSQLWKEYAKGDSRYILGDNFTVCMETITACLWGPLSLWVVIAFLRQHPLRFILQLVVSVGQIY

SEQ ID NO: 58070 - protein, 136 aa, Homo sapiens
MSTEKVDQKEEAGEKEVCGDQIKGPDKEEEPPAAASHGQGWRPGGRAARNARPEPGARHPALPAMVNDPPVPALLWAQEVGQVLAGRARRLLLQFGVLFCTILLLLWVSVFLYGSFYYSYMPTVSHLSPVHFYYRC

SEQ ID NO: 58071 - protein, 125 aa, Homo sapiens
MSGAEEGRETSSGIEVEASDLSLSLTGDDGGPNRTSTESRGTDTESSGEDKDSDSMEDTGHYSINDENRVHDRSEEEEEEEEEEEEEQPRRRVQRKRANRDQDSSDDERALEDWVSSETSALPRP

SEQ ID NO: 58072 - protein, 277 aa, Homo sapiens
MASNQEMLQHKDARVKLVTELLSGIRVIKFCGWEQALGARVEACRARELGRLRVIKYLDAACVYLWAALPVVISIVIFITYVLMGHQLTATKVFTALALVRMLILPLNNFPWVINGLLEAKVSLDRIQLFLDLPNHNPQAYYSPDPPAEPSTVLELHGALFSWDPVGTSLETFISHLEVKKGMLVGIVGKVGCGKSSLLAAIAGELHRLRGHVAVRGLSKGFGLATQEPWIQFATIRDNILFGKTFDAQLYKEVLEACALNDDLSILPAGDQTEVGE

SEQ ID NO: 58073 - protein, 129 aa, Homo sapiens
MAKPAQGAKYRGSIHDFPGFDPNQDAEALYTAMKGFGSDKEAILDIITSRSNRQRQEVCQSYKSLYGKDLIADLKYELTGKFERLIVGLMRPPAYCDAKEIKDAISGIGTDEKCLIEILASRTYTRQGN

SEQ ID NO: 58074 - protein, 63 aa, Homo sapiens
MWAMESGHLLWALLFMQSLWPQLTDGATRVYYLGIRDVQWNYAPKGRNVITNQPLDSDIYVKM

SEQ ID NO: 58075 - protein, 82 aa, Homo sapiens
MMPSCNRSCSCSRGPSVEDGKWYGVRSYLHLFYEDCAGTALSDDPEGPPVLCPRRPWPSLCWKEMELNFSPLECGLDSATCF

SEQ ID NO: 58076 - protein, 312 aa, Homo sapiens
MEEPEEPADSGQSLVPVYIYSPEYVSMCDSLAKIPKRASMVHSLIEAYALHKQMRDEASGFCYLNDAVLGILRLRRKFERILYVDLDLHHGDGVEDAFSFTSKVMTVSLHKFSPGFFPGTGDVSDVGLGKGRYYSVNVPIQDGIQDEKYYQICESVLKEVYQAFNPKAVVLQLGADTIAGDPMCSFNMTPVGIGKCLKYILQWQLATLILGGGGYNLANTARCWTYLTGVILGKTLSSEIPDHEFFTAYGPDYVLEITPSCRPDRNEPHRIQQILNYIKEKWPVGFGAQCFYLGKCGKAKTTEGQRNLKHVV

SEQ ID NO: 58077 - protein, 356 aa, Homo sapiens
MTSSQVKTKPFDSWSYSEMEKEFPELIRSVGLLTVAADSISTNGSEAVTEEVSQVSLSVDDKGGCEEDNASAVEEQPGLTLGVSSSSGEALTNAAQPSSETVQQESSSSSHHDAKNQQPVPCENATPKRTIRDCFNYNEDSPTQPTLPKRGLFLKEETFKNDLKGNGGKRQMVDLKPEMSRSTPSLVDPPDRSKLCLVLQSSYPNSPSAASQSYECLHKVGNGNLENTVKFHIKEISSSLGRLNDCYKEKSRLKKPHKTSEEVPPCRTPKRGTGSGKQAKNTKSSAVPNGELSYTSKAIEGPQTNSASTSSLEPCNQRSWNAKLQLQSETSSSPAFTQSSESSVGSDNIMSPVPLL

SEQ ID NO: 58078 - protein, 125 aa, Homo sapiens
VLSLPRRYPHTSATFLTSSKKNMNLPILFQVPDVLSKARRNQCDSMLLRNQQLCSTCQEMKMVQPRTMKIPDDPKASFENCMSYRMSLHQPKFQTTPEPFHDDIPTGSVHNIWLKTFHGDGVQTK

SEQ ID NO: 58079 - protein, 152 aa, Homo sapiens
MSVNMDELKHQVMINQFVLTAGCAADQAKQLLQAAHWQFETALSAFFQETNIPYSHHHHQMASESFHSGGSGSPMAATATSPPPHFPHAATSSSAASSWPTAASPPGGPQHHQPQPPLWTPTPPSPASDWPPLAPQQATSEPRAHPAMEAER

SEQ ID NO: 58080 - protein, 109 aa, Homo sapiens
MARYMLLLLLAVWVLTGELWPGAEARAAPYGVRLCGREFIRAVIFTCGGSRWRRSDILAHEAMEKNIEAPRSKFTCSRLEKLDSCSVSPAPKCTRSSINKERYLPGCRC

SEQ ID NO: 58081 - protein, 63 aa, Homo sapiens
MDSRKLSPRGKKLESHLSQEHRRPPLGLIAAWGQPSIQSSVQQGLQTQDWTTSTLRTPPATHT

SEQ ID NO: 58082 - protein, 216 aa, Homo sapiens
MLRLSERNMKVLLAAALIAGSVFFLLLPGPSAADEKKKGPKVTVKVYFDLRIGDEDVGRVIFGLFGKTVPKTVDNFVALATGEVRFGYKNSKFHRVIKDFMIQGGDFTRGDGTGGKSIYGERFPDENFKLKHYGPGWVSMANAGKDTNGSQFFITTVKTAWLDGKHVVFGKVLEGMEVVRKVESTKTDSRDKPLKDVIIADCGKIEVEKPFAIAKE

SEQ ID NO: 58083 - protein, 166 aa, Homo sapiens
MMCEVMPTISEAEGPPGGGGGHGSGSPSQPDADSHFEQLMVSMLEERDRLLDTLRETQETLALTQGKLHEVGHERDSLQRQLNTALPQEGKQTWWEDMDRRPVYLAASPYPPPARCPAQEPASECCVRSLKRFQHLQILTRSSQHLLKNSMYAGNSSLKGKKKLLN

SEQ ID NO: 58084 - protein, 136 aa, Homo sapiens
MGPLTIRDVTVEFSLEEWHCLDTAQQNLYRDVMLENYRNLVFLGIAVSKPDLITCLEQGKEPCNMKRHEMVAKPPDGGSLFLPRLKCNGAVSAHRKLLLPGSSDSLASAFQVAGITGTRHHAWLIFVFLVDMGFHH

SEQ ID NO: 58085 - protein, 80 aa, Homo sapiens
MSAAWIPALGLGVCLLLLPGPAGSEGAAPIAITCFTRGLDIRKEKADVLCPGGCPLEEFSVYGNIVYASVSSICGAAVHR

SEQ ID NO: 58086 - protein, 148 aa, Homo sapiens
MDGGDDGNLIIKKRFVSEAELDERRKRRQEEWEKVRKPEDPEECPEEVYDPRSLYERLQEQKDRKQQEYEEQFKFKNMVRGLDEDETNFLDEVSRQQELIEKQRREEELKELKEYRNNLKKVGISQENKKEVEKKLTVKPIETKNKFS

SEQ ID NO: 58087 - protein, 36 aa, Homo sapiens
MGSCCSCPDKDTVPDNHRNKFKVINVDDDGNELGSG

SEQ ID NO: 58088 - protein, 578 aa, Homo sapiens
  MOD_RES (1)..(1): Any amino acid
XASALRVLSSIRVPIIVPIMMLAIKEAASDMSPYVRKTAAHAIPKLYSLDSDQKDQLIEVIEKLLADKTTLVAGSVVMAFEEVCPERIDLIHKNYRKLCNLLIDVEEWGQVVIISMLTRYARTQFLSPTQNESLLEENAEKAFYGSEEDEAKGAGSEETAAAAAPSRKPYVMDPDHRLLLRNTKPLLQSRSAAVVMAVAQLYFHLAPKAEVGVIAKALVRLLRSHSEVQYVVLQNVATMSIKRRGMFEPYLKSFYIRSTDPTQIKILKLEVLTNLANETNIPTVLREFQTYIRSMDKDFVAATIQAIGRCATNIGRVRDTCLNGLVQLLSNRDELVVAESVVVIKKLLQMQPAQHGEIIKHLAKLTDNIQVPMARASILWLIGEYCEHVPRIAPDVLRKMAKSFTAEEDIVKLQVINLAAKLYLTNSKQTKLLTQYVLSLAKYDQNYDIRDRARFTRQLIVPSEQGGALSRHAKKLFLAPKPAPVLESSFKDRDHFQLGSLSHLLNAKATGYQELPDWPEEAPDPSVRNVEVPEWTKCSNREKRKEKEKPFYSDSEGESGPTESADSGVCSRPKEACI

SEQ ID NO: 58089 - protein, 667 aa, Homo sapiens
  MOD_RES (1)..(1): Any amino acid
XFRVSLIFHEDCSVVTEVGALFCLLLFDEVSRMDMWSVNPSNKPSLPSVFSLPVSVFRRYHLPVHVIGHHAVSPYSIVLPLSADCLALKPVSDMLRIAWNLSWYHGSDNLLKQMNSETKTQEILDALKLSTEDILTLKITHMASGLQDCLHSIVQAATHREVRAAVTRMSFYLLNDRLSLKGCPGPCGVTLKSLAWHTALNRFLQVLPACTEDEKLLIDIIHFLNKLIKEQRKNSSLELLNWILELLLRHSANPLLDLLVLTESQAREETDDIRTAVRQQLQKELIALFDTLLLNFMEVTDRKCSELLYVFQTQLALKLLQCLKVTDAPHFYGLPSLERTLRGMANLTAFPGWSSHSPLTKPLDICVKYLSGLLEVITSFYVERGGNAMSFMGKGVTKSTILCLLHLSHEMMAQAGSLEWMSLWFLPLGSHSEEHIPTQQGLAWLIPLWVDRDPEVRFTSLGLGSALTTLETGCVALANSCQNISGGLWGTVVNILLDQSECSMVRREAAFILQNLLVIPMPTEIIKDYTWQGPCVHDEDSGLSLIGKPALQALLYHCHFYEHLNQMVKHCYLGRCMFDLNFSAFDRNSESNDLNGLDDSFKFWRAPSRTSQDRDPSSLSTSETTVAPSLGSTEFQPLVQSTTLLPEASHDQFVAQGNRHFGTNIQF

SEQ ID NO: 58090 - protein, 46 aa, Homo sapiens
MDEEYDVIVLGTGLTMPLGVLVLEGHPVSAGCPASLKASVISLSAL

SEQ ID NO: 58091 - protein, 491 aa, Homo sapiens
VIIHRVLEKQEVEVFYPDFGNIGIVQKSSLRFLKCCYTKLPAQAIPCSLAWVRPVEEHWTSKAILQFQKLCGLKPLVGVVDEYVDGILNIFLCDTSSNEDVYFHHVLRTEGHAIVCRENISSKGFSELNPLALYTTSSGGPEDIVLTELGYPSQQHYFNEDRKISPQSKESELRILQDINDEKSLSHLKSESKEPLKDSEFESLKTCNKSFEEDPKWSNPEPNDLKEENEDEIPTGMPCLESVTIGDDIWDENWLPLQAKMGKGGDAASHLFTASLGGKNQYSSCKEMPQKDWCFSTPKDTWDDSWQPSGLVNGTKVEVHKPEVLGAQEKNTGTNRTQKQLDINGSSDSSTLPKLEEFCTSLTQSEQSADGSQSEPNNSQTQPKQIQLSTAAPCSTTAVDDSAEKPSGSVESSPEILKNEDFSSSRAITLYKDKRQESVDQLSLILSYECQISQKLYIPRSTATAALGAAARLATSRSLLHWYPSVKRMEA

SEQ ID NO: 58092 - protein, 83 aa, Homo sapiens
  MOD_RES (1)..(1): Any amino acid
XLPNCCVIHQDDFFKPQDQIAVGEDGFKQWDVLESLDMEAMLDTVQAWLSSPQKPRTPTSSSWKASCSTATSPWWTCTAAGTS

SEQ ID NO: 58093 - protein, 149 aa, Homo sapiens
MPACCSCSDVFQYETNKVTRIQSMNYGTIKWFFHVIIFSYVCFALVSDKLYQRKEPVISSVHTKVKGIAEVKEEIVENGVKKLVHSVFDTADYTFPLQGNSFFVMTNFLKTEGQEQRLCPEYPTRRTLCSSDRGCKKGWMDPQSKGLLS

SEQ ID NO: 58094 - protein, 807 aa, Homo sapiens
  MOD_RES (1)..(1): Any amino acid
XVYRNPLCYGLSTCLGEGAVKRPLDVDWTLATGPLLPSADPPCSLAPAPSKGQTLDGTFLRGVPAEGSSKDSSGSFSPCQPFLEKYQTIHSTGFLASRYTGPYPRNSKQAMSEGPSSPWTQLAQPLGPPCQDTGPTHYPPPHHPPPHPPQALPCPPACRHPEKQGSYSPALPLQPLGGHKGTGYQAGGLGSPYLRQQAAQAPYIPPLGLDAYPYPSAPLPAPSPGLKLEPPLTPRCPLDFAPQTLSFPYARDDLSLYGASPGLGGTPPSQNNVRAVPQPGAFQRACQPLPASQPCSEPVRPAQEAEEKTWLPSCRKEKLQPRLSEHSGPPIVIRDSPVPCTPPALPPCARECQSLPQKEGARPPSSPPMPVIDNVFSLAPYRDYLDVPAPEATTEPDSATAEPDSAPATSEGQDKGCRGTLPAQEGPSGSKPLRGSLKEEVALDLSVRKPTAEASPVKASRSVEHAKPTAAMDVPDVGNMVSDLPGLKKIDTEAPGLPGVPVTTDAMPRTNFHSSVAFMFRKFKILRPAPLPAAVVPSTPTSAPAPTQPAPTPTSGPIGLRILAQQPLSVTCFSLALPSPPAVAVASPAPAPAPSPAPARAQAPASARDPAPAPAPVAGPAPASTSAPGDSLEQHFTGLHASLCDAISGSVAHSPPEKLREWLETAGPWGQAAWQDCQGVQGLLAKLLSQLQRFDRTHRCPFPHVVRAGAIFVPIHLVKERLFPRLPPASVDHVLQEHRVELRPTTLSEERALRELALPGCTSRMLKLLALRQLPDIYPDLLGLQWRDCVRRQLGEHGAAPVATGAV

SEQ ID NO: 58095 - protein, 121 aa, Homo sapiens
MEARDKQVLRSLRLELGAEVLVEGLVLQYLYQEGILTENHIQEINAQTTGLRKTMLLLDILPSRGPKAFDTFLDSLQEFPWVREKLKKAREEAMTDLPAEMRKLRPKDSVTCLASQLTWRF

SEQ ID NO: 58096 - protein, 143 aa, Homo sapiens
MNVTPEVKSRGMKFAEEQLLKHGWTQGKGLGRKENGITQALRVTLKQDTHGVGHDPAKEFTNHWWNELFNKTAANLVVETGQDGVQIRSLSKETTRYNHPKPNLLYQKFVKWDPVTSLAVAYLDCPDPQQELRSSGSVDPAIC

SEQ ID NO: 58097 - protein, 201 aa, Homo sapiens
MADMQNLVERLERAVGRLEAVSHTSDMHRGYADSPSKAGAAPYVQAFDSLLAGPVAEYLKISKEIGGDVQKHAEMVHTGLKLERALLVTASQCQQPAENKLSDLLAPISEQIKEVITFREKNRGSKLFNHLSAVSESIQALGWVAMAPKPGPYVKEMNDAAMFYTNRVLKEYKDVDKKHVDWVKAYLSIWTELQAYIKEFH

SEQ ID NO: 58098 - protein, 197 aa, Homo sapiens
  MOD_RES (1)..(1): Any amino acid
XVKPSPTTEETSTQLPDLGLAIIPEPTTETGHSTALEKTTAPRPDRVQTLHRSLTEVTGPPTELEPAQDSLVQSESYTQNKALTAPEEHKASTSTNICELCTCGDEMLSCIDLNPEQRLRQVPVPEPNTHNGTFTILNFQGNYISYIDGNVWKAYSWTEKLILNHNPLTTVEDPYLFKLPALKYLDMGTTLVPLTTL

SEQ ID NO: 58099 - protein, 661 aa, Homo sapiens
MEKLGVEPEEEGGGDDDEEDAEAWAMELADVGAAASSQGVHDQVLPTPNASSRVIVHVDLDCFYAQVEMISNPELKDKPLGVQQKYLVVTCNYEARKLGVKKLMNVRDAKEKCPQLVLVNGEDLTRYREMSYKVTELLEEFSPVVERLGFDENFVDLTEMVEKRLQQLQSDELSAVTVSGHVYNNQCIGYKTAKCLEALGINSVRDLQTFSPKILEKELGISVAQRIQKLSFGEDNSPVILSGPPQSFSEEDSFKKCSSEVEAKNKIEELLASLLNRVCQDGRKPHTVRLIIRRYSSEKHYGRESRQCPIPSHVIQKLGTGNYDVMTPMVDILMKLFRNMVNVKMPFHLTLLSVCFCNLKALNTAKKGLIDYYLMPSLSTTSRSGKHSFKMKDTHMEDFPKDKETNRDFLPSGRIESTRTRESPLDTTNFSKEKDINEFPLCSLPEGVDQEVFKQLPVDIQEEILSGKSREKFQGKGSVSCPLHASRGVLSFFSKKQMQDIPINPRDHLSSSKQVSSVSPCEPGTSGFNSSSSSYMSSQKDYSYYLDNRLKDERISQGPKEPQGFHFTNSNPAVSAFHSFPNLQSEQLFSRNHTTDSHKQTVATDSHEGLTENREPDSVDEKITFPSDIDPQVFYELPEAVQKELLAEWKRAGSDFHIGHK

SEQ ID NO: 58100 - protein, 32 aa, Homo sapiens
MATDSWALAVDEQEAAAESPTELNCPISVWYW

SEQ ID NO: 58101 - protein, 170 aa, Homo sapiens
MADTQYILPNDIGVSSLDCREAFRLLSPTERLYAYHLSRAAWYGGLAVLLQTSPEAPYIYALLSRLFRAQDPDQLRQHALAEGLTEEEYQEKLERVILGSEAAQQHPEEVRGLWQTCGELMFSLEPRLRHLGLGKEGITTYFSGNCTMEDAKLAQDFLDSQNLSAYNTRL

SEQ ID NO: 58102 - protein, 115 aa, Homo sapiens
MMEGSRQTRVSRPYKISESSKVYRWADHSSTVLQRLNEQRLRGLFCDVVLVADEQRVPAHRNLLAVCSDYFNSMFTIGMREAFQKEVELIGASYIGLKAVVDFLYGGELVLDGGN

SEQ ID NO: 58103 - protein, 139 aa, Homo sapiens
MDSPCQPQPLSQALPQLPGSSSEPLEPEPGRARMGVESYLPCPLLPSYHCPGVPSEASAGSGTPRATATSTTASPLRDGFGGQDGGELRPLQSEGAAALVTKGCQRLAAQGARPEAPKRKWAEDGGDAPSPSKRPWARQ

SEQ ID NO: 58104 - protein, 283 aa, Homo sapiens
  MOD_RES (1)..(1): Any amino acid
XYTGEPNDALRHFNKARKDRDWGQNALYNMIEICLNPDNETVGGEVFENLDGDLGNSTEKQESVQLAVRTAEKLLKELKPQTVQGHVQLRIMENYCLMATKQKSNVEQALNTFTEIAASEKEHIPALLGMATAYMILKQTPRARNQLKRIAKMNWNAIDAEEFEKSWLLLADIYIQSAKYDMAEDLLKRCLRHNRSCCKAYEYMGYIMEKEQAYTDAALNYEMAWKYSNRTNPAVGYKLAFNYLKAKRYVDSIDICHQVLEAHPTYPKIRKDILDKARASLRP

SEQ ID NO: 58105 - protein, 103 aa, Homo sapiens
DHQHVPIDIQTSKLLDWLVDRRHCSLKWQSLVLTIREKINAAIQDMPESEEIAQLLSGSYIHYFHCLRILDLLKGTEASTKNIFGRYSSQRMKARLAGDYSSV

SEQ ID NO: 58106 - protein, 426 aa, Homo sapiens
IEPSSWSGSESPAENMERMSDSADKPIDNDAEGVWSPDIEQSFQEALAIYPPCGRRKIILSDEGKMYGRNELIARYIKLRTGKTRTRKQVSSHIQVLARRKSRDFHSKLKDQTAKDKALQHMAAMSSAQIVSATAIHNKLGLPGIPRPTFPGAPGFWPGMIQTGQPGSSQDVKPFVQQAYPIQPAVTAPIPGFEPASAPAPSVPAWQGRSIGTTKLRLVEFSAFLEQQRDPDSYNKHLFVHIGHANHSYSDPLLESVDIRQIYDKFPEKKGGLKELFGKGPQNAFFLVKFWADLNCNIQDDAGAFYGVTSQYESSENMTVTCSTKVCSFGKQVVEKVETEYARFENGRFVYRINRSPMCEYMINFIHKLKHLPEKYMMNSVLENFTILLVVTNRDTQETLLCMACVFEVSNSEHGAQHHIYRLVKD

SEQ ID NO: 58107 - protein, 165 aa, Homo sapiens
MWPPDPDPDPDPEPAGGSRPGPAVPGLRALLPARAFLCSLKGRLLLAESGLSFITFICYVASSASAFLTAPLLEFLLALYFLFADAMQLNDKWQGLCWPMMDFLRCVTAALIYFAISITAIAKYSDGASKAAGGSVPDTRAVCPSRSEMGREAGAAASRSRESAL

SEQ ID NO: 58108 - protein, 134 aa, Homo sapiens
MFSKRLEKIPQVPLLFPFIFIILTNYSKMEGAVESQPSFFKTSQDIVTCTWVENCYSSFSRRPLEQMFCKHQSKNIISWTGMVAHTCNPSTLGGQDGVSFCHPDRSAVAPSQLTATSTSQVQAILLPQPPEYPG

SEQ ID NO: 58109 - protein, 131 aa, Homo sapiens; identical to SEQ ID NO: 43351

SEQ ID NO: 58110 - protein, 69 aa, Homo sapiens
MLTCNKAGSRMVVDAANSNGPFQPVVLLHIRDCKCTRFETYVYRGPTFHTHGFCGPTVGLEYAWIWLRL

SEQ ID NO: 58111 - protein, 17 aa, Homo sapiens
MRILILGLDGAGKTTIL

SEQ ID NO: 58112 - protein, 334 aa, Homo sapiens
MRIPVDPSTSRRFSPPSSSLQPGKMSDVSPVVAAQQQQQQQQQQQQQQQQQQQQQQQEAAAAAAAAAAAAAAAAAVPRLRPPHDNRTMVEIIADHPAELVRTDSPNFLCSVLPSHWRCNKTLPVAFKVVALGEVPDGTVVTVMAGNDENYSAELRNASAVMKNQVARFNDLRFVGRSGRGKSFTLTITVFTNPPQVATYHRAIKVTVDGPREPRRHRQKLDDSKPSLFSDRLSDLGRIPHPSMRVGVPPQNPRPSLNSAPSPFNPQGQSQITDPRQAQSSPPWSYDQSYPSYLSQMTSPSIHSTTPLSSTRGTGLPAITDVPRRISARSRYSLR

SEQ ID NO: 58113 - protein, 180 aa, Homo sapiens
  MOD_RES (1)..(1): Any amino acid
XGPRPPRVMAAPAPVTRQHFLCYICKEYVEDLAKIPRSFLQEANVTLIVIGQSSYHHIEPFCKLTGYSHEIYVDPEREIYKRLGMKRGEEIASSGQSPHIKSNLLSGSLQSLWRAVTGPLFDFQGDPAQQGGTLILGPGNNIHFIHRDRNRLDHKPINSVLQLVGVQHVNFTNRPSVIHV

SEQ ID NO: 58114 - protein, 335 aa, Homo sapiens
MSVKWTSVILLIQLSFCFSSGNCGKVLVWAAEYSHWMNIKTILDELIQRGHEVTVLASSASILFDPNNSSALKIEIYPTSLTKTELENFIMQQIKRWSDLPKDTFWLYFSQVQEIMSIFGDITRKFCKDVVSNKKFMKKVQESRFDVIFADAIFPCSELLAELFNIPFVYSLSFSPGYTFEKHSGGFIFPPSYVPVVMSELTDQMTFMERVKNMIYVLYFDFWFEIFDMKKWDQFYSEVLGRPTTLSETMGKADVWLIRNSWNFQFPYPLLPNVDFVGGLHCKPAKPLPKEMEDFVQSSGENGVVVFSLGSMVSNMTEERANVIASALAQIPQKI

SEQ ID NO: 58115 - protein, 39 aa, Homo sapiens
  MOD_RES (1)..(1): Any amino acid
XYADARLEVGSTQLRTAGSCSHSFKRSFLAWLPQPPRFL

SEQ ID NO: 58116 - protein, 59 aa, Homo sapiens
  MOD_RES (1)..(1): Any amino acid
XAFELLGKNTFEFLKENNFQPYPLPHVRHMAYQLCHALRWPCKLCSWCREEGTTSRLLL

SEQ ID NO: 58117 - protein, 96 aa, Homo sapiens
  MOD_RES (1)..(1): Any amino acid
XPKRCFLVRPGDQQPRPLEALNGGFNLSRILRTALPAWHKSIVSFRQLREEVLGELSNVEQAAGLRWSRFPDLNRILKGHRKGELTVFTGGEHTVG

SEQ ID NO: 58118 - protein, 146 aa, Homo sapiens
  MOD_RES (1)..(1): Any amino acid
XGKSSKEGQDTVESEQISVRKNSLVAVPSTVSAKIKVPVSQPIVKKDKRQNSSRFSASNNRELQKLPSLKVEAVKLGRVSAELRLEVPDLQLWPPTEQQGEQTHGEPRGPQSMDGAASLLPCPSSSTPDLPAFSPALLPLLPTCQP

SEQ ID NO: 58119 - protein, 88 aa, Homo sapiens
MAEGDNRSTNLLAAETASLEEQLQGWGEVMLMADKVLRWERAWFPPAIMVTSLLLLPGLNQHGIILKYIGMAKREINKLLKQKEKKNE

SEQ ID NO: 58120 - protein, 135 aa, Homo sapiens
  MOD_RES (1)..(1): Any amino acid
XRAAADTLQGPMQAAYREAFQSVVLPAFEKSCQAMFQQINDSFRLGTQEYLQQLESHMKSRKAREQEAREPVLAQLRGLVSTLQSATEQMAATVAGSVRAEVQHQLHVAEPHNSLGKAARRLSLMLHGLVTPSLP

SEQ ID NO: 58121 - protein, 30 aa, Homo sapiens
  MOD_RES (1)..(1): Any amino acid
XYGLVVPGCSWMPDITLIHAGGLAQPAAML

SEQ ID NO: 58122 - protein, 99 aa, Homo sapiens
RTFTTNDSDTTIPMDESLQFNSSLQKVHNGMDDLILDGHNILDGLRTQRLTLKGLLLPPRLECSGVILAYCSLELLGSSGSVTLASQVARTTGDSEEDP

SEQ ID NO: 58123 - protein, 86 aa, Homo sapiens
  MOD_RES (1)..(1): Any amino acid
XLIIYCKDFRIVRFRFDESGPESAKKQTKLMEFPQEMEEEEEEEVMELVVAAARKLHSLKLTRIGTEKSRGQVLPGGEFVLLTRVT

SEQ ID NO: 58124 - protein, 160 aa, Homo sapiens
SVEQNALSDMAPHNPHTLLFEILSLLVEMLALPEAVLEEITNYYQKKLKEGTCKAQEMEAAVGRLRLQKLPYNPQQEESSEVPERKVLSILSRLKQQNYAPNLQSPYAQVPCILLCPQLDKKMVRRQPSNHYALDQCTPPGLDPDIRSPFFQSGSQGNRV

SEQ ID NO: 58125 - protein, 318 aa, Homo sapiens
MCRTALGVTTLQDLGVCWRKEHDPAEMLRVGRAELGGWKPSWEAIVKEVAAATGHTVVLVDQTEDILAKSKKGIEESLRKVAKKKFAENLKAGDEFVEKTLSTIATSTDAASVVHSTDLVVEAIVENLKVKNELFKRLDKFAAEHTIFASNTSSLQITSIANATTRQDRFAGLHFFNPVPVMKLVEVIKTPMTSQKTFESLVDFSKALGKHPVSCKDTPGFIVNRLLVPYLMEAIRLYERGDASKEDIDTAMKLGAGYPMGPFELLDYVGLDTTKFIVDGWHEMDAENPLHQPSPSLNKLVAENKFGKKTGEGFYKYK

SEQ ID NO: 58126 - protein, 165 aa, Homo sapiens
MEVENEASCSPGSASGGSREYKVVMLGAGGVGKSAMTMQFISHQFPDYHDPTIEDAYKTQVRIDNEPAYLDILDTAGQLCDWLKHRWEVELWEIRRTEKQNSQPCGSSTCEVGKASSSATPSLTVNHFRRLPSLKSSFFRSATPMKFPWCWWVTKLIWNSSARMP

SEQ ID NO: 58127 - protein, 174 aa, Homo sapiens
MGRCCFYTAGTLSLLLLVTSVTLLVARVFQKAVDQSIEKKIVLRNGTEAFDSWEKPPLPVYTQFYFFNVTNPEEILRGETPRVEEVGPYTYSETGDIRTMVFPVMYLNESVHIDKETASRLKSMINTTLIITNIPYIIMALGVFFGLVFTWLACKGQGSMDEGTADERAPLIRT

SEQ ID NO: 58128 - protein, 838 aa, Homo sapiens
MACAEFSFHVPSLEELAGGICGKTRIAEVGGVPYLLPLVNQKKVYDLNKIAKEIKLPGAFILGAGAGPFQTLGFNSEFMPVIQTESEHKPPVNGSYFAHVNPADGGCLLEKYSEKCHDFQCALLANLFASEGQPGKVIEVKAKRRTGPLNFVTCMRETLEKHYGNKPIGMGGTFIIQKGKVKSHIMPAEFSSCPLNSDEEVNKWLHFYEMKAPLVCLPVFVSRDPNLARLAQRIDFSQGSGSEEEEAAGTEGDAQEWPGAGSSADQDDEEGVVKFQPSLWPWDSVRNNLRSALTEMCVLYDVLSIVRDKKFMTLDPVSQDALPPKQNPQTLQLISKKKSLAGAAQILLKGAERLTKSVTENQENKLQRDFNSELLRLRQHWKLRKVGDKILGDLSYRSAGSLFPHHGTFEVIKNTDLDLDKKIPEDYCPLDVQIPSDLEGSAYIKVSIQKQAPDIGDLGTVNLFKRPLPKSKPGSPHWQTKLEAAQNVLLCKEIFAQLSREAVQIKSQVPHIVVKNQIISQPFPSLQLSISLCHSSNDKKSQKFATEKQCPEDHLYVLEHNLHLLIREFHKQTLSSIMMPHPASAPFGHKRMRLSGPQAFDKNEINSLQSSEGLLEKIIKQAKHIFLRSRAAATIDSLASRIEDPQIQAHWSNINDVYESSVKVLITSQGYEQICKSIQLQLNIGVEQIRVVHRDGRVITLSYQEQELQDFLLSQMSQHQVHAVQQLAKVMGWQVLSFSNHVGLGPIESIGNASAITVASPSGDYAISVRNGPESGSKIMVQFPRNQCKDLPKSDVLQDNKWSHLRGPFKEVQWNKMEGRNFVYKMELLMSALSPCLL

SEQ ID NO: 58129 - protein, 91 aa, Homo sapiens
MGNSMKSTPAPAERPLPNPEGLDSDFLAVLSDYPSPDISPPIFRRGEKLRVISDEGGWWKAISLSTGRESYIPGICVARVYHGWLFEGLGR

SEQ ID NO: 58130 - protein, 62 aa, Homo sapiens
MSKSKVDNQFYSVEVGDSTFTVLKRYQNLKPIGSGAQGIVCAAYDAVLDRNVAIKKLSRPFQ

SEQ ID NO: 58131 - protein, 288 aa, Homo sapiens
MHRKKVDNRIRILIENGVAERQRSLFVVVGDRGKDQVVILHHMLSKATVKARPSVLWCYKKELGFSSHRKKRMRQLQKKIKNGTLNIKQDDPFELFIAATNIRYCYYNETHKILGNTFGMCVLQDFEALTPNLLARTVETVEGGGLVVILLRTMNSLKQLYTVTMDVHSRYRTEAHQDVVGRFNERFILSLASCKKCLVIDDQLNILPISSHVATMEALPPQTPDESLGPSDLELRELKESLQDTQPVGVLVDCCKTLDQAKQEPKQSKKLKNRETKNKKDMKLKRKK

SEQ ID NO: 58132 - protein, 216 aa, Homo sapiens
MSEVPVARVWLVLLLLTVQVGVTAGAPWQCAPCSAEKLALCPPVSASCSEVTRSAGCGCCPMCALPLGAACGVATARCARGLSCRALPGEQQPLHALTRGQGACVQESDASAPHAAEAGSPESPESTEITEEELLDNFHLMAPSEEDHSILWDAISTYDGSKALHVTNIKKWKCETSMDGEAGLCWCVYPWNGKRIPGSPEIRGDPNCQIYFNVQN

SEQ ID NO: 58133 - protein, 151 aa, Homo sapiens
MVLNRSGMWQEEVTVPSVQTFLIPEAMTFEEAAALLVNYITAYMVLFDFGNLQPGHSVLVHMAAGGVGMAAVQLCRTVENVTVFGTASASKHEALKENGVTHPIDYHTTDYVDEIKKISPKGVDIVMDPLGGSDTAKGYNLLKPMGKVVTY

SEQ ID NO: 58134 - protein, 30 aa, Homo sapiens
SEHLFDSFEPETYWDRMHLFQEAIAHRRPP

SEQ ID NO: 58135 - protein, 146 aa, Homo sapiens
MTMYKSKRRHQRYINMAGEPKPYRPKPGNKRPLSALYRLESKEPFLSVGLFDYHGRVPPPPRAVIPLKRPRVAVTTTRRGKGVFSMKGGSRSTASGSTGSKLKSDELQTIKKELTQIKTKIDSLLGRLEKIEKQQKAEAVSTDKVI

SEQ ID NO: 58136 - protein, 416 aa, Homo sapiens
MAEYDLTTRIAHFLDRHLVFPLLEFLSVKEIYNEKELLQALREKRTTVVAQLKQLQAETEPIVKMFEDPETTRQMQSTRDGRMLFDYLADKHGFRQEYLDTLYRYAKFQYECGNYSGAAEYLYFFRVLVPATDRNALSSLWGKLASEILMQNWDAAMEDLTRLKETIDNNSVSSPLQSLQQRTWLIHWSLFVFFNHPKGRDNIIDLFLYQPQYLNAIQTMCPHILRYLTTAVITNKDVRKRRQVLKDLVKVIQQESYTYKDPITEFVECLYVNFDFDGAQKKLRECESVLVNDFFLVACLEDFIENARLFIFETFCRIHQCISINMLADKLNMTPEEAERWIVNLIRNARLDAKIDSKLGHVVMGNNAVSPYQQVIEKTKSLSFRSQMLAMNIEKKLNQNSRSEAPNWATQDSGFY

SEQ ID NO: 58137 - protein, 99 aa, Homo sapiens
  MOD_RES (1)..(1): Any amino acid
XRSFGQLTLCPRNGTVTGKWRGSHVVGLLTTLNFGDGPDRNKTRTFQATVLGSQMGLKGGAGSVWLQAAGLGLLPASLLWPSLLCHCYVLPPAPGVPLV

SEQ ID NO: 58138 - protein, 251 aa, Homo sapiens
DMLLQVNDVNFENMSNDDAVRVLREIVSQTGPISLTVAKCWDPTPRSYFTVPRADPVRPIDPAAWLSHTAALTGALPRYELEEAPLTVKSDMSAVVRVMQLPDSGLEIRDRMWLKITIANAVIGADVVDWLYTHVEGFKERREARKYASSLLKHGFLRHTVNKITFSEQCYYVFGDLCSNLATLNLNSGSSGTSDQDTLAPLPHPAAPWPLGQGYPYQYPGPPPCFPPAYQDPGFSYGSGSTGSQQSEALD

SEQ ID NO: 58139 - protein, 380 aa, Homo sapiens
MNLQPIFWIGLISSVCCVFAQTDENRCLKANAKSCGECIQAGPNCGWCTNSTFLQEGMPTSARCDDLEALKKKGCPPDDIENPRGSKDIKKNKNVTNRSKGTAEKLKPEDITQIQPQQLVLRLRSGEPQTFTLKFKRAEDYPIDLYYLMDLSYSMKDDLENVKSLGTDLMNEMRRITSDFRIGFGSFVEKTVMPYISTTPAKLRNPCTSEQNCTSPFSYKNVLSLTNKGEVFNELVGKQRISGNLDSPEGGFDAIMQVAVCGSLIGWRNVTRLLVFSTDAGFHFAGDGKLGGIVLPNDGQCHLENNMYTMSHYYDYPSIAHLVQKLSENNIQTIFAVTEEFQPVYKELKNLIPKSAVGTLSANSSNVIQLIIDAYNMGGS

SEQ ID NO: 58140 - protein, 16 aa, Homo sapiens
MSMERRMKIEETWRLW

SEQ ID NO: 58141 - protein, 147 aa, Homo sapiens
MLRCLYHWHRPVLNRRWSRLCLPKQYLFTMKLQSPEFQSLFTEGLKSLTELFVKENHELRIAGGAVRDLLNGVKPQDIDFATTATPTQMKEMFQSAGIRMINNRGEKHGTITARFFYHTCMYKPCCFFKAWHRRHPNMKLLSFPSWR

SEQ ID NO: 58142 - protein, 54 aa, Homo sapiens
IGGGHAGTEAATAAARCGSRTLLLTHRVDTIGEERGCCGTWRRTQAASFPPPPV

SEQ ID NO: 58143 - protein, 139 aa, Homo sapiens
  MOD_RES (1)..(1): Any amino acid
XSGLGRAGATAAASEIKREEKEDEENTSAADHSEEEKKELKAPRARTSPDEDEDDLLPPEQKAEREKERRVANNARERLRVRDINEAFKELGRMCQLHLNSEKPQTKLLILHQAVSVILNLEQQVRAVRTRCCPWRRKT

SEQ ID NO: 58144 - protein, 182 aa, Homo sapiens
MAIQFRSLFPLALPGMLALLGWWWFFSRKKGHVSSHDEQQVEAGAVQLRADPAIKEPLPVEDVCPKVVSTPPSVTEPPEKELSTVSKLPAEPPALLQTHPPCRRSESSGILPNTTDMRLRPGTRRDDSTKLELALTGGEAKSIPLECPLSSPKGVLFSSKSAEVCKQDSPFSRVPRKVQPGY

SEQ ID NO: 58145 - protein, 163 aa, Homo sapiens
  MOD_RES (1)..(1): Any amino acid
XLAAFIITSDWIPLGVNSQRGDDVTQATPETFTEDPNLVNDPATDETVLAVLADIAPSTDDLASLSEKNTTAECWDEKFTCTRLYSVHRPVKQCIHQLCFTSLRRMYIVNKEICSRLVCKEHEAMKDELCRQMAGLPPRRLRRSNYFRLPPCENVDLQRPNGL

SEQ ID NO: 58146 - protein, 448 aa, Homo sapiens
  MOD_RES (1)..(1): Any amino acid
XLRRTAPREHSYVLSAAKKSTGSPTQETQAPFIAKRVEVVEEDGPSEKSQDPPALARSTPGSNRSSPGNKDKEAPCSRELQRDLAGEEAFRAPNTDAARSSAQLSDGNVGSGATGSRPEGLAAVDIGSERGSSSATSVSAVPADRKSNSTAAQEDAKADPKGALADYEGKDVATRVGEAWQERPGAPRGGQGDPAVPAQQPADPSTPERQSSPSGSEQLVRRESCGSSVLTDFEGKDVATKVGEAWQDRPGAPRGGQGDPAVPTQQPADPSTPEQQNSPSGSEQFVRRESCTSRVRSPSSCMVTVTVTATSEQPHIYIPAPASELDSSSTTKGILFVKEYVNASEVSSGKPVSARYSNVSSIEDSFAMEKKPPCGSTPYSERTTGGICTYCNREIRDCPKITLEHLGICCHEYCFKCGICSKPMGDLLDQIFIHRDTIHCGKCYEKLF

SEQ ID NO: 58147 - protein, 538 aa, Homo sapiens
MKVLLRLICFIALLISSLEADKCKEREEKIILVSSANEIDVRPCPLNPNEHKGTITWYKDDSKTPVSTEQASRIHQHKEKLWFVPAKVEDSGHYYCVVRNSSYCLRIKISAKFVENEPNLCYNAQAIFKQKLPVAGDGGLVCPYMEFFKNENNELPKLQWYKDCKPLLLDNIHFSGVKDRLIVMNVAEKHRGNYTCHASYTYLGKQYPITRVIEFITLEENKPTRPVIVSPANETMEVDLGSQIQLICNVTGQLSDIAYWKWNGSVIDEDDPVLGEDYYSVENPANKRRSTLITVLNISEIESRFYKHPFTCFAKNTHGIDAAYIQLIYPVTNFQKHMIGICVTLTVIIVCSVFIYKIFKIDIVLWYRDSCYDFLPIKVLPEVLEKQCGYKLFIYGRDDYVGEDIVEVINENVKKSRRLIIILVRETSGFSWLGGSSEEQIAMYNALVQDGIKVVLLELEKIQDYEKMPESIKFIKQKHGAIRWSGDFTQGPQSAKTRFWKNVRYHMPVQRRSPSSKHQLLSPATKEKLQREAHVPLG

SEQ ID NO: 58148 - protein, 170 aa, Homo sapiens
MPPSRLGVGRVSSGLSFPAARRLHAGQIPSLQPPPGPRPFPAPRSRARTLPGSSRPLRGRAWPGPPRRVPARRRSSPQPRQGGGQSDRLLIKGGKIVNDDQSFYADIYMEDGLIKQIGENLIVPGGVKTIEAHSRMVIPGGIDVHTRFQMPDQGMTSADDFFQGTKAALA

SEQ ID NO: 58149 - protein, 40 aa, Homo sapiens
MAASGVEKSSKKKTEKKLAAREEAKLLAGFMGVMNNMRKQ

SEQ ID NO: 58150 - protein, 3870 aa, Homo sapiens
MTTMLQKSDSNASFLRAARAGNLDKVVEYLKGGIDINTCNQNGLNALHLAAKEGHVGLVQELLGRGSSVDSATKKGNTALHIASLAGQAEVVKVLVKEGANINAQSQNGFTPLYMAAQENHIDVVKYLLENGANQSTATEDGFTPLAVALQQGHNQAVAILLENDTKGKVRLPALHIAARKDDTKSAALLLQNDHNADVQSKMMVNRTTESGFTPLHIAAHYGNVNVATLLLNRGAAVDFTARNGITPLHVASKRGNTNMVKLLLDRGGQIDAKTRDGLTPLHCAARSGHDQVVELLLERGAPLLARTKNGLSPLHMAAQGDHVECVKHLLQHKAPVDDVTLDYLTALHVAAHCGHYRVTKLLLDKRANPNARALNGFTPLHIACKKNRIKVMELLVKYGASIQAITESGLTPIHVAAFMGHLNIVLLLLQNGASPDVTNIRGETALHMAARAGQVEVVRCLLRNGALVDARAREEQTPLHIASRLGKTEIVQLLLQHMAHPDAATTNGYTPLHISAREGQVDVASVLLEAGAAHSLATKKGFTPLHVAAKYGSLDVAKLLLQRRAAADSAGKNGYTPLHIAAKKNQMQIASTLLNYGAETNIVTKQGVTPLHLASQEGHTDMVTLLLDKGANIHMSTKSGLTSLHLAAQEDKVNVADILTKHGADQDAHTKLGYTPLIVACHYGNVKMVNFLLKQGANVNAKTKNGYTPLHQAAQQGHTHIINVLLQHGAKPNATTANGNTALAIAKRLGYISVVDTLKVVTEEVTTTTTTITEKHKLNVPETMTEVLDVSDEEGDDTMTGDGGEYLRPEDLKELGDDSLPSSQFLDGMNYLRYSLEGGRSDSLRSFSSDRSHTLSHASYLRDSAVMDDSVVIPSHQVSTLAKEAERNSYRLSWGTENLDNVALSSSPIHSGFLVSFMVDARGGAMRGCRHNGLRIIIPPRKCTAPTRVTCRLVKRHRLATMPPMVEGEGLASRLIEVGPSGAQFLGPVIVEIPHFAALRGKERELVVLRSENGDSWKEHFCDYTEDELNEILNGMDEVLDSPEDLEKKRICRIITRDFPQYFAVVSRIKQDSNLIGPEGGVLSSTVVPQVQAVFPEGALTKRIRVGLQAQPMHSELVKKILGNKATFSPIVTLEPRRRKFHKPITMTIPVPKASSDVMLNGFGGDAPTLRLLCSITGGTTPAQWEDITGTTPLTFVNECVSFTTNVSARFWLIDCRQIQESVTFASQVYREIICVPYMAKFVVFAKSHDPIEARLRCFCMTDDKVDKTLEQQENFAEVARSRDVEVLEGKPIYVDCFGNLVPLTKSGQHHIFSFFAFKENRLPLFVKVRDTTQEPCGRLSFMKEPKSTRGLVHQAICNLNITLPIYTKESESDQEQEEEIDMTSEKNDETESTETSVLKSHLVNEVPVLASPDLLSEVSEMKQDLIKMTAILTTDVSDKAGSIKVKELVKAAEEEPGEPFEIVERVKEDLEKVNEILRSGTCTRDESSVQSSRSERGLVEEEWVIVSDEEIEEARQKAPLEITEYPCVEVRIDKEIKGKVEKDSTGLVNYLTDDLNTCVPLPKEQLQTVQDKAGKKCEALAVGRSSEKEGKDIPPDETQSTQKQHKPSLGIKKPVRRKLKEKQKQKEEGLQASAEKAELKKGSSEESLGEDPGLAPEPLPTVKATSPLIEETPIGSIKDKVKALQKRVEDEQKGRSKLPIRVKGKEDVPKKTTHRPHPAASPSLKSERHAPGSPSPKTERHSTLSSSAKTERHPPVSPSSKTEKHSPVSPSAKTERHSPASSSSKTEKHSPVSPSTKTERHSPVSSTKTERHPPVSPSGKTDKRPPVSPSGRTEKHPPVSPGRTEKRLPVSPSGRTDKHQPVSTAGKTEKHLPVSPSGKTEKQPPVSPTSKTERIEETMSVRELMKAFQSGQDPSKHKTGLFEHKSAKQKQPQEKGKVRVEKEKGPILTQREAQKTENQTIKRGQRLPVTGTAESKRGVRVSSIGVKKEDAAGGKEKVLSHKIPEPVQSVPEEESHRESEVPKEKMADEQGDMDLQISPDRKTSTDFSEVIKQELEDNDKYQQFRLSEETEKAQLHLDQVLTSPFNTTFPLDYMKDEFLPALSLQSGALDGSSESLKNEGVAGSPCGSLMEGTPQISSEESYKHEGLAETPETSPESLSFSPKKSEEQTGETKESTKTETTTEIRSEKEHPTTKDITGGSEERGATVTEDSETSTESFQKEATLGSPKDTSPKRQDDCTGSCSVALAKETPTGLTEEAACDEGQRTFGSSAHKTQTDSEVQESTATSDETKALPLPEASVKTDTGTESKPQGVIRSPQGLELALPSRDSEVLSAVADDSLAVSHKDSLEASPVLEDNSSHKTPDSLEPSPLKESPCRDSLESSPVEPKMKAGIFPSHFPLPAAVAKTELLTEVASVRSRLLRDPDGSAEDDSLEQTSLMESSGKSPLSPDTPSSEEVSYEVTPKTTDVSTPKPAVIHECAEEDDSENGEKKRFTPEEEMFKMVTKIKMFDELEQEAKQKRDYKKEPKQEESSSSSDPDADCSVDVDEPKHTGSGEDESGVPVLVTSESRKVSSSSESEPELAQLKKGADSGLLPEPVIRVQPPSPLPSSMDSNSSPEEVQFQPVVSKQYTFKMNEDTQEEPGKSEEEKDSESHLAEDRHAVSTEAEDRSYDKLNRDTDQPKICDGHGCEAMSPSSSAAPVSSGLQSPTGDDVDEQPVIYKESLALQGTHEKDTEGEELDVSRAESPQADCPSESFSSSSSLPHCLVSEGKELDEDISATSSIQKTEVTKTDETFENLPKDCPSQDSSITTQTDRFSMDVPVSDLAENDEIYDPQITSPYENVPSQSFFSSEESKTQTDANHTTSFHSSEVYSVTITSPVEDVVVASSSSGTVLSKESNFEGQDIKMESQQESTLWEMQSDSVSSSFEPTMSATTTVVGEQISKVIITKTDVDSDSWSEIREDDEAFEARVKEEEQKIFGLMVDRQSQGTTPDTTPARTPTEEGTPTSEQNPFLFQEGKLFEMTRSGAIDMTKRSYADESFHFFQIGQESREETLSEDVKEGATGADPLPLETSAESLALSESKETVDDEADLLPDDVSEEVEEIPASDAQLNSQMGISASTETPTKEAVSVGTKDLPTVQTGDIPPLSGVKQISCPDSSEPAVQVQLDFSTLTRSVYSDRGDDSPDSSPEEQKSVIEIPTAPMENVPFTESKSKIPVRTMPTSTPAPPSAEYESSVSEDFLSSVDEENKADEAKPKSKLPVKVPLQRVEQQLSDLDTSVQKTVAPQGQDMASIAPDNRSKSESDASSLDSKTKCPVKTRSYTETETESRERAEELELESEEGATRPKILTSRLPVKSRSTTSSCRGGTSPTKESKEHFFDLYRNSIEFFEEISDEASKLVDRLTQSEREQEIVSDDESSSALEVSVIENLPPVETEHSVPEDIFDTRPIWDESIETLIERIPDENGHDHAEDPQDEQERIEERLAYIADHLGFSWTELARELDFTEEQIHQIRIENPNSLQDQSHALLKYWLERDGKHATDTNLVECLTKINRMDIVHLMETNTEPLQERISHSYAEIEQTITLDHSEGFSVLQEELCTAQHKQKEEQAVSKESETCDHPPIVSEEDISVGYSTFQDGVPKTEGDSSATALFPQTHKEQVQQDFSGKMQDLPEESSLEYQQEYFVTTPGTETSETQKAMIVPSSPSKTPEEVSTPAEEEKLYLQTPTSSERGGSPIIQEPEEPSEHREESSPRKTSLVIVESADNQPETCERLDEDAAFEKGDDMPEIPPETVTEEEYIDEHGHTVVKKVTRKIIRRYVSSEGTEKEEIMVQGMPQEPVNIEEGDGYSKVIKRVVLKSDTEQSEDNNE

SEQ ID NO: 58151 - protein, 81 aa, Homo sapiens
RKHGIPFALATSSGSASFDMKTSRHKEFFSLFSHIVLGDDPEVQHGKPDPDIFLACAKRFSPPPAMEKKEHYMAFPTEDGT

SEQ ID NO: 58152 - protein, 123 aa, Homo sapiens
  MOD_RES (1)..(1): Any amino acid
XSRKVGLMNRAVQLLILAYVIGWVFVWEKGYQETDSVVSSVTTKVKGVAVTNTSKLGFRIWDVADYVIPAQEENSLFVMTNVILTMNQTQGLCPEIPDATTVCKSDASCTAGSAGTHSNDLLF

SEQ ID NO: 58153 - protein, 204 aa, Homo sapiens
RRGARRCEVTARPAEPLEAILTDDEPDHGPLGAPEGDHDLLTCGQCQMNFPLGDILIFIEHKRKQCNGSLCLEKAVDKPPSPSPIEMKKASNPVEVGIQVTPEDDDCLSTSSRGICPKQEHIAGKDEPSSYTCTTCKQPFTSAWFLLQHAQNTHGLRIYLESEHGSPLTPRVLHTPPFGVVPRELKMCGSFRMEAREPLSSEKI

SEQ ID NO: 58154 - protein, 130 aa, Homo sapiens
MSLPLTEEQRKKIEENRQKALARRAEKLLAEQHQRTSSGTSIAGNPFQAKQGPSQNFPRESCKPVSHGVIFKQQNLSSSSNADQRPHDSHSFQAKGIWKKPEEMPTACPGHSPRSQMALTGISPPLAQSP

SEQ ID NO: 58155 - protein, 166 aa, Homo sapiens
MSTRESFNPESYELDKSFRLTRFTELKGTGCKVPQDVLQKLLESLQENHFQEDEQFLGAVMPRLGIGMDTCVIPLRHGGLSLVQTTDYIYPIVDDPYMMGRIACANVLSDLYAMGVTECDNMLMLLGVSNKMTDRERDKVMPLIIQGFKDAAEEAGTSVTGGQTVL

SEQ ID NO: 58156 - protein, 542 aa, Homo sapiens
SLKQMVHEGNQRWDNLQKRVTSILRRLKHFIGQREEFETARDSILVWLTEMDLQLTNIEHFSECDVQAKIKQLKAFQQEISLNHNKIEQIIAQGEQLIEKSEPLDAAIIEEELDELRRYCQEVFGRVERYHKKLIRLPLPDDEHDLSDRELELEDSAALSDLHWHDRSADSLLSPQPSSNLSLSLAQPLRSERSGRDTPASVDSIPLEWDHDYDLSRDLESAMSRALPSEDEEGQDDKDFYLRGAVGLSGDHSALESQIRQLGKALDDSRFQIQQTENIIRSKTPTGPELDTSYKGYMKLLGECSSSIDSVKRLEHKLKEEEESLPGFVNLHSTETQTAGVIDRWELLQAQALSKELRMKQNLQKWQQFNSDLNSIWAWLGDTEEELEQLQRLELSTDIQTIELQIKKLKELQKAVDHRKAIILSINLCSPEFTQADSKESRDLQDRLSQMNGRWDRVCSLLEEWRGLLQDALMQCQGFHEMSHGLLLMLENIDRRKNEIVPIDSNLDAEILQDHHKQLMVRCVNSGSLQLFLAGLHFIYRK

SEQ ID NO: 58157 - protein, 684 aa, Homo sapiens
MSLHQFLLEPITCHAWNRDRTQIALSPNNHEVHIYKKNGSQWVKAHELKEHNGHITGIDWAPKSDRIVTCGADRNAYVWSQKDGVWKPTLVILRINRAATFVKWSPLENKFAVGSGARLISVCYFESENDWWVSKHIKKPIRSTVLSLDWHPNNVLLAAGSCDFKCRVFSAYIKEVDEKPASTPWGSKMPFGQLMSEFGGSGTGGWVHGVSFSASGSRLAWVSHDSTVSVADASKSVQVSTLKTEFLPLLSVSFVSENSVVAAGHDCCPMLFNYDDRGCLTFVSKLDIPKQSIQRNMSAMERFRNMDKRATTEDRNTALETLHQNSITSQAAMAYHSFLVEPISCHAWNKDRTQIAICPNNHEVHIYEKSGAKWTKVHELKEHNGQVTGIDWAPESNRIVTCGTDRNAYVWTLKGRTWKPTLVILRINRAARCVRWAPNENKFAVGSGSRVISICYFEQENDWWVCKHIKKPIRSTVLSLDWHPNNVLLAAGSCDFKCRIFSAYIKEVEERPAPTPWGSKMPFGELMFESSSSCGWVHGVCFSASGSRVAWVSHDSTVCLADADKKMAVATLASETLPLLALTFITDNSLVAAGHDCFPVLFTYDAAAGMLSFGGRLDVPKQSSQRGLTARERFQNLDKKASSEGGTAAGAGLDSLHKNSVRSRCSAAARPSARSSAPLAWMAA

SEQ ID NO: 58158 - protein, 277 aa, Homo sapiens
MGCDGGTIPKRHELVKGPKKVEKIWHLKNGKEWCSLHSEGKNKNGKEWDMEYDVDKDAELVAQWNYCTLSQEILRRPIVACELGRLYNKDAVIEFLLDKSAEKALGKAASHIKSIKNVTELKLSDNPAWEGDKGNTKGDKHDDLQRARFICPVVGLEMNGRHRFCFLRCCGCVFSERALKEIKAEVCHTCGAAFQEDDVIMLNGTKEDVDVLKTRMEERRLRAKLEKKTKKPKAAESVSKPDVSEEAPGPSKVKTGKPEEASLDSREKKTNLAPKST

SEQ ID NO: 58159 - protein, 944 aa, Homo sapiens
MGIGLCVPPARCWKRLTRSSRGQPLERPAATIIIGLSIVERSKQTQRGPVDFSRSHSAPAAEQECKPRISAARSTPAPPSPAVPGFRTTPCQTFTAWCNSHLRKAGTQIENIEEDFRNGLKLMLLLEVISGERLPRPDKGKMRFHKIANVNKALDFIASKGVKLVSIGAEEIVDGNLKMTLGMIWTIILRFAIQDISVEETSAKEGLLLWCQRKTAPYRNVNVQNFHTSWKDGLALCALIHRHRPDLIDYAKLRKDDPIGNLNTAFEVAEKYLDIPKMLDAEDIVNTPKPDEKAIMTYVSCFYHAFAGAEQAETAANRICKVLAVNQENEKLMEEYEKLASELLEWIRRTVPWLENRVGEPSMSAMQRKLEDFRDYRRLHKPPRIQEKCQLEINFNTLQTKLRLSHRPAFMPSEGKLVSDIANAWRGLEQVEKGYEDWLLSEIRRLQRLQHLAEKFRQKASLHEAWTRGKEEMLSQRDYDSALLQEVRALLRRHEAFESDLAAHQDRVEHIAALAQELNELDYHEAASVNSRCQAICDQWDNLGTLTQKRRDALERMEKLLETIDRLQLEFARRAAPFNNWLDGAVEDLQDVWLVHSVEETQSLLTAHDQFKATLPEADRERGAIMGIQGEIQKICQTYGLRPCSTNPYITLSPQDINTKWDMVRKLVPSCDQTLQEELARQQVNERLRRQFAAQANAIGPWIQAKVEEVGRLAAGLAGSLEEQMAGLRQQEQNIINYKTNIDRLEGDHQLLQESLVFDNKHTVYSMEHIRVGWEQLLTSIARTINEVENQVLTRDAKGLSQEQLNEFRASFNHFDRKQNGMMEPDDFRACLISMGYDLGEVEFARIMTMVDPNAAGVVTFQAFIDFMTRETAETDTTEQVVASFKILAGDKNYITPEELRRELPAKQAEYCIRRMVPYKGSGAPAGALDYVAFSSALYGESDL

SEQ ID NO: 58160 - protein, 143 aa, Homo sapiens
DPPEDMKQDRDIQKPTYACFNVPRTTLSLLWTGSLPAPPATTSGGAACPSGRRYPGAGNAGSATSQCQLTRCGAWLSSTARSVGTTSAPTLTPAQLPTATTGESPTCLGHPVLTPRAGSRTTCPKCSTPATLTLAVAPLWPPA

SEQ ID NO: 58161 - protein, 21 aa, Homo sapiens
  MOD_RES (1)..(1): Any amino acid
XSNFGNEKLTFGTGTRLTIIP

SEQ ID NO: 58162 - protein, 605 aa, Homo sapiens
MSDNQSWNSSGSEEDPETESGPPVERCGVLSKWTNYIHGWQDRWVVLKNNALSYYKSEDETEYGCRGSICLSKAVITPHDFDECRFDISVNDSVWYLRAQDPDHRQQWIDAIEQHKTESGYGSESSLRRHGSMVSLVSGASGYSATSTSSFKKGHSLREKLAEMETFRDILCRQVDTLQKYFDACADAVSKDELQRDKVVEDDEDDFPTTRSDGDFLHSTNGNKEKLFPHVTPKGINGIDFKGEAITFKATTAGILATLSHCIELMVKREDSWQKRLDKETEKKRRTEEAYKNAMTELKKKSHFGGPDYEEGPNSLINEEEFFDAVEAALDRQDKIEEQSQSEKVRLHWPTSLPSGDAFSSVGTHRFVQKVEEMVQNHMTYSLQDVGGDANWQLVVEEGEMKVYRREVEENGIVLDPLKATHAVKGVTGHEVCNYFWNVDVRNDWETTIENFHVVETLADNAIIIYQTHKRVWPASQRDVLYLSVIRKIPALTENDPETWIVCNFSVDHDSAPLNNRCVRAKINVAMICQTLVSPPEGNQEISRDNILCKITYVANVTEARLCDIPCWRKKEKKKLNALSWNVGSIALSVAQDLGLVYKNDKILQ

SEQ ID NO: 58163 - protein, 428 aa, Homo sapiens
MAYLYLELLKDSLNEYAYAAELAGLSYDLQNTIYGMYLSVKGYNDKQPILLKKIIEKMATFEIDEKRFEIIKEAYMRSLNNFRAEQPHQHAMYYLRLLMTEVAWTKDELKEALDDVTLPRLKAFIPQLLSRLHIEALLHGNITKQAALGIMQMVEDTLIEHAHTKPLLPSQLVRYREVQLPDRGWFVYQQRNEVHNNCGIEIYYQTDMQSTSENMFLELFCQIISEPCFNTLRTKEQLGYIVFSGPRRANGIQGLRFIIQSEKPPHYLESRVEAFLITMEKSIEDMTEEAFQKHIQALAIRRLDKPKKLSAECAKYWGEIISQQYNFDRDNTEVAYLKTLTKEDIIKFYKEMLAVDAPRRHKVSVHVLAREMDSCPVVGEFPCQNDINLSQAPALPQPEVIQNMTEFKRGLPLFPLVKPHINFMAAKL

SEQ ID NO: 58164 - protein, 73 aa, Homo sapiens
MNGRADFREPNAEVPRPIPHIGPDYIPTEEERRVFAECNDESFWFRSVPLAATSMLITQGLISKGILSSHPKY

SEQ ID NO: 58165 - protein, 92 aa, Homo sapiens
  MOD_RES (1)..(1): Any amino acid
XTPGPLPVLLLLLAGAPAARPTPPTCYSRMRALSQEITRDFNLLQVSEPSEPCVRYLPRLYLDIHDLVFLLDDCNALEYPIPVTTVLPDRQR

SEQ ID NO: 58166 - protein, 77 aa, Homo sapiens
MATAAQGPLSLLWGWLWSERFWLPENVSWADLEGPADGYGYPRGRHILSVFPLAAGIFFVRLLFERVCFVAQTGVQW

SEQ ID NO: 58167 - protein, 65 aa, Homo sapiens
MRSMKALQKALSRAGSHCGRGGWGHPSRSPLLGGGVRHHLSEAAAQGRETPHSHQPQHQDHCTLR

SEQ ID NO: 58168 - protein, 137 aa, Homo sapiens
  MOD_RES (1)..(1): Any amino acid
XMEHRDPYLRELGEPTYLVIDPRAEEEDEKGTAGGLLSSLEGLKMRPSLLMTRYLESWGAAKPFAHLSHGDSPVSTSTPLPEKTLASFSTQWSLDRSRTPRGLDDELDTGDAKFFQTVEAVEGLQPTDTVLQREGDG

SEQ ID NO: 58169 - protein, 142 aa, Homo sapiens
MESGERLPSSAASSTTPTSSSTPSVASVVSKGGLSTGVASLSSTINPCGHLFRTAGDQPFNLSTVSSAFPMVSHPVFGLHSASSGHSEFGGLGTLGTPTALAAHPQLASFPGAEWWRTTDAHTRTGATFFPPLLGIPPLFAP

SEQ ID NO: 58170 - protein, 128 aa, Homo sapiens
MNEVSVIKEGWLHKRGEYIKTWRPRYFLLKSDGSFIGYKERPEAPDQTLPPLNNFSVAECQLMKTERPRPNTFVIRCLQWTTVIERTFHVDSPDEREEWMRAIQMVANSLKQRAPGEDPMDYKCGSPS

SEQ ID NO: 58171 - protein, 150 aa, Homo sapiens
MALHSPQYIFGDFSPDEFNQFFVTPRSSVEGRQEDAEEYLGFILNGLHEEMLNLKKLLSPSNEKLTISNGPKNHSVNEEEQEEQGEGSEDEWEQVGPRNKTSVTRQADFVQTPITGIFGGHIRSVVYQQSSKESATLQPFFTLQLDIQSD

SEQ ID NO: 58172 - protein, 494 aa, Homo sapiens
  MOD_RES (1)..(1): Any amino acid
XEDDSTCQCQACGPHQAAGPDLGSSNDGCPQLFQERSVIVENSSGSTSASELLKPMKKRKRREYQSPSEEESEPEAMEKQEEGKDPEGQPTASTPESEEWSSSQPATGEKKECWSWESYLEEQKAITAPVSLFQDSQAVTHNKNGFKLGMKLEGIDPQHPSMYFILTVAEVCGYRLRLHFDGYSECHDFWVNANSPDIHPAGWFEKTGHKLQPPKGYKEEEFSWSQYLRSTRAQAAPKHLFVSQSHSPPPLGFQVGMKLEAVDRMNPSLVCVASVTDVVDSRFLVHFDNWDDTYDYWCDPSSPYIHPVGWCQKQGKPLTPPQDYPDPDNFCWEKYLEETGASAVPTWAFKVRPPHSFLVNMKLEAVDRRNPALIRVASVEDVEDHRIKIHFDGWSHGYDFWIDADHPDIHPAGWCSKTGHPLQPPLGPREPSSASPGGCPPLSYRSLPHTRTSKYSFHHRAPLLVATALAMSQASSQLTIASQAAHWLRGTRAG

SEQ ID NO: 58173 - protein, 90 aa, Homo sapiens
PPYSYYLYYMYANIMVLNNLRRERGLSTFLFRPHCGEAGSITHLVSAFLTADNISHGLLLKKQQQFVPRIFQEPSEGIPTQGTACFSFHR

SEQ ID NO: 58174 - protein, 163 aa, Homo sapiens
  MOD_RES (1)..(1): Any amino acid
XDKFRASPDCITILCKPNGQAIAWYTPIHWKQAWEKLDADVEFNRCSVVSPTFRKRVFQWTASTATITKEKQDQPKKDISNYQVEQAQVLLKREKEIPPTVFPNRSPWCQNPYVSAHPYCPLIEPHNTSTAGGRLDRQPRTRSTRPNRASGSKKKKTSESQKQ

SEQ ID NO: 58175 - protein, 42 aa, Homo sapiens
MAGRVPSLLVLLVFPSSCLAFRSPLSVFKRFKETTRPFSNEC

SEQ ID NO: 58176 - protein, 194 aa, Homo sapiens
MADKRKLQGEIDRCLKKVSEGVEQFEDIWQKLHNAANANQKEKYEADLKKEIKKLQRLRDQIKTWVASNEIKDKRQLIDNRKLIETQMERFKVVERETKTKAYSKEGLGLAQKVDPAQKEKEEVGQWLTNTIDTLNMQVDQFESEVESLSVQTRKKKGDKDKQDRIEGLKRHIEKHRYHVRMLETILRMLDNDS

SEQ ID NO: 58177 - protein, 70 aa, Homo sapiens
  MOD_RES (1)..(1): Any amino acid
XGFGGSRGGGGYGGSGDGYNGFGNDGNYNDFGNYNNQSSNFGPMKGGNFGGRSSGPYGGGGQYFAKPRNQ

SEQ ID NO: 58178 - protein, 147 aa, Homo sapiens
GVPGHPAAIPHPAIVPPSGKQELQPFDRNLKTQAESKAEKEAKKPTIKKPLNAFMLYMKEMRAKVIAECTLKESAAINQILGRRWHALSREEQAKYYELARKERQLHMQLYPGWSARDNYGKKKRRSREKHQESTTDGIPACTILSP

SEQ ID NO: 58179 - protein, 63 aa, Homo sapiens
MPNSEPASLLELFNSIATQGELVRSLKAGNASKDEIDSAVKMLVSLKMSYKAAAGEDYKADCP

SEQ ID NO: 58180 - protein, 261 aa, Homo sapiens
MGIKTALPAAELGLYSLVLSGALAYAGRGLLEASQDGAHRKAFRESVRPGWEYIGRKMDVADFEWVMWFTSFRNVIIFALSGHVLFAKLCTMVAPKSGFVTGTFDLQEVLFHGGSSFTVLRCTSFALESCAHPDRHYSLADLLKYNFYLPFFFFGPIMTFDRFHAQVSQVEPVRREGELWHIRAQAGLSVVAIMAVDIFFHFFYILTIPSDLKFANRLPDSALAGLAYSNLVYDWVKAAVLFGVVNTVACLDHLDPPQPPK

SEQ ID NO: 58181 - protein, 72 aa, Homo sapiens
AFACRGCQLAPERGAERRDTAPSGPPQAFVQVLSRPIPNSPAAPRLPHQRPQSDGTEGAAATTPGTVDSQNL

SEQ ID NO: 58182 - protein, 49 aa, Homo sapiens
MYPNPLIYCTCWDPWNLGPRKLIKTPQLPRKNSTGSSKLTPLVPAPKNH

SEQ ID NO: 58183 - protein, 46 aa, Homo sapiens
MPAPEQASLVEEGQPQTRQEAASTGPGMEPETTATTILASVKEQLN

SEQ ID NO: 58184 - protein, 104 aa, Homo sapiens
MASKPEKRVASSVFITLAPPRRDVAVAEEVRQAVCEARRGRPWEAPAPMKTPEAGLAGRPSPWTTPGRAAATVPAAPMQLFNGGCPPPPPVLDGEDVLPDLDLL

SEQ ID NO: 58185 - protein, 115 aa, Homo sapiens
MGKKGKVGKSRRDKFYHLAKETGYRSRSAFKLIQLNRRFQFLQKARALLDLCAAPGGWLQVAAKFMPVSSLIVGVDLVPIKPLPNVVTLQQDITTERCRQALRKELKTWKVDVVL

SEQ ID NO: 58186 - protein, 641 aa, Homo sapiens
MVETLYNNGANSIWEHSLLDPASIMSGRRKANPQDKVHPNKAEFIRAKYQMLAFVHRLPCRDDDSVTAKDLSKQLHSSVRTGNLETCLRLLSLGAQANFFHPEKGNTPLHVASKAGQILQAELLAVYGADPGTQDSSGKTPVDYARQGGHHELAERLVEIQYELTDRLAFYLCGRKPDHKNGQHFIIPQMADSSLDLSELAKAAKKKLQSLSNHLFEELAMDVYDEVDRRETDAVWLATQNHSALVTETTVVPFLPVNPEYSSTRNQGRQKLARFNAHEFATLVIDILSDAKRRQQGSSLSGSKDNVELILKTINNQHSVESQDNDQPDYDSVASDEDTDLETTASKTNRQKSLDSDLSDGPVTVQEFMEVKNALVASEAKIQQLMKVNNNLSDELRIMQKKLQTLQSENSNLRKQATTNVYQVQTGSEYTDTSNHSSLKRRPSARGSRPMSMYETGSGQKPYLPMGEASRPEESRMRLQPFPAHASRLEKQNSTPESDYDNTPNDMEPDGMGSSRKGRQRSMVWPGDGLVPDTAEPHVAPSPTLPSTEDVIRKTEQITKNIQELLRAAQENKHDSYIPCSERIHVAVTEMAALFPKKPKSDMVRTSLRLLTSSAYRLQSECKKTLPGDPGSPTDVQLVTQ

SEQ ID NO: 58187 - protein, 175 aa, Homo sapiens
VCEEQRCEEEVFPLAMNYLDRYLSCVPTRKAQLQLLGAVCMLLASKLRETTPLTIEKLCIYTDHAVSPRQLRDWEVLVLGKLKWDLAAVIAHDFLAFILHRLSLPRDRQALVKKHAQTFLALCATDYTFAMYPPSMIATGSIGAAVQGLGACSMSGDELTELLAGITGTEVVSAG

SEQ ID NO: 58188 - protein, 181 aa, Homo sapiens
  MOD_RES (1)..(1): Any amino acid
XPVPITSPIMNPLGDPQSQMLQQQPSAPVPLSSQSSFPQPHLPGGQPFHGVQQPLGQTGMPPSFSKPNIEGAPGAPIGNTFQHVQSLPTKKITKKPIPDEHLILKTTFEDLIQRCLSSATDPLSPTITSGLHNIARSIETRNYSEGLTMHTHIVSTSNFSETSAFMPVLKVVLTQANKLGV

SEQ ID NO: 58189 - protein, 144 aa, Homo sapiens
MASKPEKRVASSVFITLAPPRRDVAVAEEVRQAVCEARRGRPWEAPAPMKTPEAGLAGRPSPWTTPGRAAATVPAAPMQLFNGDICAFCHKTVSPRELAVEAMKRQYHAQCFTCRTCRRQLAGQSFYQKDGRPLCEPCYQDTLE

SEQ ID NO: 58190 - protein, 1112 aa, Homo sapiens
MAERKGTAKVDFLKKIEKEIQQKWDTERVFEVNASNLEKQTSKGKYFVTFPYPYMNGRLHLGHTFSLSKCEFAVGYQRLKGKCCLFPFGLHCTGMPIKACADKLKREIELYGCPPDFPDEEEEEEETSVKTEDIIIKDKAKGKKSKAAAKAGSSKYQWGIMKSLGLSDEEIVKFSEAEHWLDYFPPLAIQDLKRMGLKVDWRRSFITTDVNPYYDSFVRWQFLTLRERNKIKFGKRYTIYSPKDGQPCMDHDRQTGEGVGPQEYTLLKLKVLEPYPSKLSGLKGKNIFLVAATLRPETMFGQTNCWVRPDMKYIGFETVNGDIFICTQKAARNMSYQGFTKDNGVVPVVKELMGEEILGASLSAPLTSYKVIYVLPMLTIKEDKGTGVVTSVPSDSPDDIAALRDLKKKQALRAKYGIRDDMVLPFEPVPVIEIPGFGNLSAVTICDELKIQSQNDREKLAEAKEKIYLKGFYEGIMLVDGFKGQKVQDVKKTIQKKMIDAGDALIYMEPEKQVMSRSSDECVVALCDQWYLDYGEENWKKQTSQCLKNLETFCEETRRNFEATLGWLQEHACSRTYGLGTHLPWDEQWLIESLSDSTIYMAFYTVAHLLQGGNLHGQAESPLGIRPQQMTKEVWDYVFFKEAPFPKTQIAKEKLDQLKQEFEFWYPVDLRVSGKDLVPNHLSYYLYNHVAMWPEQSDKWPTAVRANGHLLLNSEKMSKSTGNFLTLTQAIDKFSADGMRLALADAGDTVEDANFVEAMADAGILRLYTWVEWVKEMVANWDSLRSGPASTFNDRVFASELNAGIIKTDQNYEKMMFKEALKTGFFEFQAAKDKYRELAVEGMHRELVFRFIEVQTLLLAPFCPHLCEHIWTLLGKPDSIMNASWPVAGPVNEVLIHSSQYLMEVTHDLRLRLKNYMMPAKGKKTDKQPLQKPSHCTIYVAKNYPPWQHTTLSVLRKHFEANNGKLPDNKVIASELGSMPELKKYMKKVMPFVAMIKENLEKMGPRILDLQLEFDEKAVLMENIVYLTNSLELEHIEVKFASEAEDKIREDCCPGKPLNVFRIEPGVSVSLVNPQPSNGHFSTKIEIRQGDNCDSIIRRLMKMNRGIKGIRD

SEQ ID NO: 58191 - protein, 844 aa, Homo sapiens
MLVVEAKFDGEQLATDPVDHTDQPEFATELAWEIDRKALHQHRLQRTPIKLQCFALDPVTSAKETIGYIVLDLRTAQETKQAPKWYQLLSNKYTKFKSEIQISIALETDTKPPVDSFKAKGAPPRDGKVPAILAGLDPRDIVAVLNEEGGYHQIGPAEYCTDSFIMSVTIAFATQLEQLIPCTMKLPERQPEFFFYYSLLGNDVTNEPFNDLINPNFEPERASVRIRSSVEILRVYLALQSKLQIHLCCGDQSLGSTEIPLTGLLKKGSTEINQHPVTVEGAFTLDPPNRAKQKLAPIPVELAPTVGVSVALQREGIDSQSLIELKTQNEHEPEHSKKKVLTPIKEKTLTGPKSPTVSPVPSHNQSPPTKDDATESEVESLQYDKDTKPNPKASSSVPASLAQLVTTSNASEVASGQKIAVPATSHHFCFSIDLRSIHALEIGFPINCILRYSYPFFGSAAPIMTNPPVEVRKNMEVFLPQSYCAFDFATMPHQLQDTFLRIPLLVELWHKDKMSKDLLLGIARIQLSNILSSEKTRFLGSNGEQCWRQTYSESVPVIAAQGSNNRIADLSYTVTLEDYGLVKMREIFISDSSQGVSAVQQKPSSLPPAPCPSEIQTEPRETLEYKAALELEMWKEMQEDIFENQLKQKELAHMQALAEEWKKRDRERESLVKKKVAEYTILEGKLQKTLIDLEKREQQLASVESELQREKKELQSERQRNLQELQDSIRRAKEDCIHQVELERLKIKQLEEDKHRLQQQLNDAENKYKILEKEFQQFKDQQNNKPEIRLQSEINLLTLEKVELERKLESATKSKLHYKQQWGRALKELARLKQREQESQMARL

SEQ ID NO: 58192 - protein, 60 aa, Homo sapiens
MVPSSPAVEKQVPVEPGPDPELRSWRHLVCYLCFYGFMAQIRPGESFITPYLLGPDKNFT

SEQ ID NO: 58193 - protein, 269 aa, Homo sapiens
MVGRRALIVLAHSERTSFNYAMKEAAAAALKKKGWEVVESDLYAMNFNPIISRKDITGKLKDPANFQYPAESVLAYKEGHLSPDIVAEQKKLEAADLVIFQSKKAVLSITTGGSGSMYSLQGIHGDMNVILWPIQSGILHFCGFQVLEPQLTYSIGHTPADARIQILEGWKKRLENIWDETPLYFAPSSLFDLNFQAGFLMKKEFHSVTQVGVHAQPPCRDSLQHLGILGSPHQQEGSHQTQPLHLDFSASMAVRNSFSLYIAQLQVFC

SEQ ID NO: 58194 - protein, 99 aa, Homo sapiens
MNQPESANDPEPLCAVCGQAHSLEENHFYSYPEEVDDDLICHICLQALLDPLDTPCGHTYCTLCLTNFLVEKDFCPMDRKPLVLQHCKKSSILVNKLLN

SEQ ID NO: 58195 - protein, 102 aa, Homo sapiens
MNAEPERKFGVVVVGVGRAGSVRMRDLRNPHPSSAFLNLIGFVSRRELGSIDGVQQISLEDALSSQEVEVAYICSESSSHEDYIRQFLNAGKHVLVEYPMTL

SEQ ID NO: 58196 - protein, 398 aa, Homo sapiens
MASPDRSKRKILKAKKTMPLSCRKQVEMLNKSRNVEALKTAIGSNVPSGNQSFSPSVITRTTEITKCSPSENGASSLDSNKNSISEKSKVFSQNCIKPVEEIVHSETKLEQVVCSYQKPSRTTESPSRVFTEEAKDSLNTSENDSEHQTNVTRSLFEHEGACSLKSSCCPPSVLSGVVQMPESTVTSTVGDKKTDQMVFHLETNSNSESHDKRQSDNILCSEDSGFVPVEKTPNLVNSVTSNNCADDILKTDECSRTSISNCESADSTWQSSLDTNNNSHYQKKRMFSENEENVKRMKTSEQINENICVSLERQTAFLEQVRHLIQQEIYSINYELFDKKLKELNQRIGKTECRNKHEGIADKLLAKIAKLQRRIKTVLLFQRNCLKPNMLSSNGASK

SEQ ID NO: 58197 - protein, 222 aa, Homo sapiens
MTTHVTLEDALSNVDLLEELPLPDQQPCIEPPPSSIMYQANFDTNFEDRNAFVTGIARYIEQATVHSSMNEMLEEGHEYAVMLYTWRSCSRAIPQVKCNEQPNRVEIYEKTVEVLEPEVTKLMKFMYFQRKAIERFCSEVKRLCHAERRKDFVSEAYLLTLGKFINMFAVLDELKNMKCSVKNDHSAYKRAAQFLRKMADPQSIQESQNLSMFLANHNRITQ

SEQ ID NO: 58198 - protein, 47 aa, Homo sapiens
LHAEFLRVQEERILHQQVKCIITEEKVCMVCKKKIGNREGEHGCWLS

SEQ ID NO: 58199 - protein, 193 aa, Homo sapiens
MLDTNKDSLKLEAMKRIVAMIARGKNASDLFPAVVKNVACKNIEVKKLVYVYLVRYAEEQQDLALLSISTFQRGLKDPNQLIRASALRVLSSIRVPIIVPIMMLAIKEAASDMSPYVRKTAAHAIPKLYSLDSDQKDQLIEVIEKLLADKTTLVAGSVVMAFEEVCPERIDLIHKNYRKLCNLLIDVEEWGQV

SEQ ID NO: 58200 - protein, 68 aa, Homo sapiens
MADTTPNGPQGAGAVQFMMTNKLDTAMWLSRLFTVYCSALFVLPLLGEYLPSLVILFASCCHIYEKGP

SEQ ID NO: 58201 - protein, 1275 aa, Homo sapiens
MAGVGAAALSLLLHLGALALAAGAEGGAVPREPPGQQTTAHSSVLAGNSQEQWHPLREWLGRLEAAVMELREQNKDLQTRVRQLESCECHPASPQCWGLGRAWPEGARWEPDACTACVCQDGAAHCGPQAHLPHCRGCSQNGQTYGNGETFSPDACTTCRCLTGAVQCQGPSCSELNCLESCTPPGECCPICRPGCDYEGQLYEEGVTFLSSSNPCLQCTCLRSRVRCMALKCPPSPCPEPVLRPGHCCPTCQGCTEGGSHWEHGQEWTTPGDPCRICRCLEGHIQCRQRECASLCPYPARPLPGTCCPVCDGCFLNGREHRSGEPVGSGDPCSHCRCANGSVQCEPLPCPPVPCRHPGKIPGQCCPVCDGCEYQGHQYQSQETFRLQERGLCVRCSCQAGEVSCEEQECPVTPCALPASGRQLCPACELDGEEFAEGVQWEPDGRPCTACVCQDGVPKCGAVLCPPAPCQHPTQPPGACCPSCDSCTYHSQVYANGQNFTDADSPCHACHCQDGTVTCSLVDCPPTTCARPQSGPGQCCPRCPDCILEEEVFVDGESFSHPRDPCQECRCQEGHAHCQPRPCPRAPCAHPLPGTCCPNDCSGCAFGGKEYPSGADFPHPSDPCRLCRCLSGNVQCLARRCVPLPCPEPVLLPGECCPQCPAAPAPAGCPRPGAAHARHQEYFSPPGDPCRRCLCLDGSVSCQRLPCPPAPCAHPRQGPCCPSCDGCLYQGKEFASGERFPSPTAACHLCLCWEGSVSCEPKACAPALCPFPARGDCCPDCDGCEYLGESYLSNQEFPDPREPCNLCTCLGGFVTCGRRPCEPPGCSHPLIPSGHCCPTCQGCRYHGVTTASGETLPDPLDPTCSLCTCQEGSMRCQKKPCPPALCPHPSPGPCFCPVCHSCLSQGREHQDGEEFEGPAGSCEWCRCQAGQVSCVRLQCPPLPCKLQVTERGSCCPRCRGCLAHGEEHPEGSRWVPPDSACSSCVCHEGVVTCARIQCISSCAQPRQGPHDCCPQCSDCEHEGRKYEPGESFQPGADPCEVCICEPQPEGPPSLRCHRRQCPSLVGCPPSQLLPPGPQHCCPTCAEALSNCSEGLLGSELAPPDPCYTCQCQDLTWLCIHQACPELSCPLSERHTPPGSCCPVCRAPTQSCVHQGREVASGERWTVDTCTSCSCMAGTVRCQSQRCSPLSCGPDKAPALSPGSCCPRCLPRPASCMAFGDPHYRTFDGRLLHFQGSCSYVLAKDCHSGDFRWMGTRWPCPSCRSRCCMWSCEDTL

SEQ ID NO: 58202 - protein, 77 aa, Homo sapiens
MAELQEVQITEEKPLLPGQTPEAAKINLASSHCFSSRTCRKSFRTLCGFMWMPLEWKREPLCSLWDISTHLWTSLQT

SEQ ID NO: 58203 - protein, 154 aa, Homo sapiens
MLIKEYHILLPMSLDEYQVAQLYMIQKKSREESSGEGSGVEILANRPYTDGPGGSGQYTHKVYHVGSHIPGWFRALLPKAALQVEEESWNAYPYTRTRYTCPFVEKFSIEIETYYLPDGGQQPNVFNLSGAERRQRILDTIDIVRDAVAPGEYK

SEQ ID NO: 58204 - protein, 2028 aa, Homo sapiens
MGNSLGCFKEPKESIAIPEKAPISPKKRVRFKRRWRGKKIPTPEASHQEETSEGTGVIEETETLTKLTESLQKEDGVGGVEHTPPDILLPGDSAPNSRVVDRGMIVQVKERFQGEVQTAHLLLENESSVAGGVWDSLEEGMTVIAHLLDNPAERNCEKSVSQLVEFPRTASCSSRAVLLPLQGETAVEKGNIQRGFRSCALPRTDYPTDKGNQEQFSEGWSVEEGTKSVSGAPQTASWIIECSVSSLLLDQPGGQRRTEPSHVGQVPPQDSRLPTSQSDLSISGVTVSILPSSSGYGSDGPHIHGIQPKDTEPEKSSTSFSEEDGTLSLEISDIYISGESGDMSAKEKLLLWTQKVTAGYTGIKCTNFSSCWSDGKMFNALIHRYRPDLVDMERVQIQSNRENLEQAFEVAERLGVTRLLDAEDVDVPSPDEKSVITYVSSIYDAFPKVPEGGEGISATEVDSRWQEYQSRVDSLIPWIKQHTILMSDKTFPQNPVELKALYNQYIHFKETEILAKEREKGRIEELYKLLEVWIEFGRIKLPQGYHPNDVEEEWGKLIIEMLEREKSLRPAVERLELLLQIANKIQNGALNCEEKLTLAKNTLQADAAHLESGQPVQCESDVIMYIQECEGLIRQLQVDLQILRDENYYQLEELAFRVMRLQDELVTLRLECTNLYRKGHFTSLELVPPSTLTTTHLKAEPLTKATHSSSTSWFRKPMTRAELVAISSSEDEGNLRFVYELLSWVEEMQMKLERAEWGNDLPSVELQLETQQHIHTSVEELGSSVKEARLYEGKMSQNFHTSYAETLGKLETQYCKLKETSSFRMRHLQSLHKFVSRATAELIWLNEKEEEELAYDWSDNNSNISAKRNYFSELTMELEEKQDVFRSLQDTAELLSLENHPAKQTVEAYSAAVQSQLQWMKQLCLCVEQHVKENTAYFQFFSDARELESFLRNLQDSIKRKYSCDHNTSLSRLEDLLQDSMDEKEQLIQSKSSVASLVGRSKTIVQLKPRSPDHVLKNTISVKAVCDYRQIEITICKNDECVLEDNSQRTKWKVISPTGNEAMVPSVCFLIPPPNKDAIEMASRVEQSYQKVMALWHQLHVNTKSLISWNYLRKDLDLVQTWNLEKLRSSAPGECHQIMKNLQAHYEDFLQDSRDSVLFSVADRLRLEEEVEACKARFQHLMKSMENEDKEETVAKMYISELKNIRLRLEEYEQRVVKRIQSLASSRTDRDAWQDNALRIAEQEHTQEDLQQLRSDLDAVSMKCDSFLHQSPSSSSVPTLRSELNLLVEKMDHVYGLSTVYLNKLKTVDVIVRSIQDAELLVKGYEIKLSQEEVVLADLSALEAHWSTLRHWLSDVKDKNSVFSVLDEEIAKAKVVAEQMSRLTPERNLDLERYQEKGSQLQERWHRVIAQLEIRQSELESIQEVLGDYRACHGTLIKWIEETTAQQEMMKPGQAEDSRVLSEQLSQQTALFAEIERNQTKLDQCQKFSQQYSTIVKDYELQLMTYKAFVESQQKSPGKRRRMLSSSDAITQEFMDLRTRYTALVTLTTQHVKYISDALRRLEEEEKVVEEEKQEHVEKVKELLGWVSTLARNTQGKATSSETKESTDIEKAILEQQVLSEELTTKKEQVSEAIKTSQIFLAKHGHKLSEKEKKQISEQLNALNKAYHDLCDGSANQLQQLQSQLAHQTEQKTLQKQQNTCHQQLEDLCSWVGQAERALAGHQGRTTQQDLSALQKNQSDLKDLQDDIQNRATSFATVVKDIEGFMEENQTKLSPRELTALREKLHQAKEQYEALQEETRVAQKELEEAVTSALQQETEKSKAAKELAENKKKIDALLDWVTSVGSSGGQLLTNLPGMEQLSGASLEKGALDTTDGYMGVNQAPEKLDKQCEMMKARHQELLSQQQNFILATQSAQAFLDQHGHNLTPEEQQMLQQKLGELKEQYSTSLAQSEAELKQVQTLQDELQKFLQDHKEFESWLERSEKELENMHKGGSSPETLPSLLKRQGSFSEDVISHKGDLRFVTISG

SEQ ID NO: 58205 - protein, 91 aa, Homo sapiens
NGTTEEVTSEEEEEEEEMAEDIEDLDHYEMKEEEPISGKKSEDEGIEKENLAILEKIRKTQRQDHLNDNFPFDPPFVRVVLPVLSGGINII

SEQ ID NO: 58206 - protein, 314 aa, Homo sapiens
VNGQQGGGSEPAAAAAVVAAGDKWKPPQGTDSIKMENGQSTAAKLGLPPLTPEQQEALQKAKKYAMEQSIKSVLVKQTIAHQQQQLTNLQMAAQRQRALAIMCRVYVGSIYYELGEDTIRQAFAPFGPIKSIDMSWDSVTMKHKGFAFVEYEVPEAAQLALEQMNSVMLGGRNIKVGRPSNIGQAQPIIDQLAEEARAFNRIYVASVHQDLSDDDIKSVFEAFGKIKSCTLARDPTTGKHKGYGFIEYEKAQSSQDAVSSMNLFDLGGQYLRVGKAVTPPMPLLTPATPGGLPPAAAVAAAAATAKITAQVRAH

SEQ ID NO: 58207 - protein, 165 aa, Homo sapiens
  MOD_RES (1)..(1): Any amino acid
XTTVLLWSLLRSSPGVERVCFRARIQPWHGGLLQPLPCSFEMGLPRRRFSSEAAESGSPETKKPTFMDEEVQSILTKMTGLNLQKTFKPAIQELKPPTYKLMTQAQLEEATRQAVEAAKVRLKMPPVLEERVPINDVLAEDKILEGTETTKYVFTDISYSIPHRC

SEQ ID NO: 58208 - protein, 1154 aa, Homo sapiens
MSKLRMVLLEDSGSADFRRHFVNLSPFTITVVLLLSACFVTSSLGGTDKELRLVDGENKCSGRVEVKVQEEWGTVCNNGWSMEAVSVICNQLGCPTAIKAPGWANSSAGSGRIWMDHVSCRGNESALWDCKHDGWGKHSNCTHQQDAGVTCSDGSNLEMRLTRGGNMCSGRIEIKFQGRWGTVCDDNFNIDHASVICRQLECGSAVSFSGSSNFGEGSGPIWFDDLICNGNESALWNCKHQGWGKHNCDHAEDAGVICSKGADLSLRLVDGVTECSGRLEVRFQGEWGTICDDGWDSYDAAVACKQLGCPTAVTAIGRVNASKGFGHIWLDSVSCQGHEPAIWQCKHHEWGKHYCNHNEDAGVTCSDGSDLELRLRGGGSRCAGTVEVEIQRLLGKVCDRGWGLKEADVVCRQLGCGSALKTSYQVYSKIQATNTWLFLSSCNGNETSLWDCKNWQWGGLTCDHYEEAKITCSAHREPRLVGGDIPCSGRVEVKHGDTWGSICDSDFSLEAASVLCRELQCGTVVSILGGAHFGEGNGQIWAEEFQCEGHESHLSLCPVAPRPEGTCSHSRDVGVVCSSKTQKTSLIGSHTVKGTGLGSHSCLFLKPCLLPGYTEIRLVNGKTPCEGRVELKTLGAWGSLCNSHWDIEDAHVLCQQLKCGVALSTPGGARFGKGNGQIWRHMFHCTGTEQHMGDCPVTALGASLCPSEQVASVICSGNQSQTLSSCNSSSLGPTRPTIPEESAVACIESGQLRLVNGGGRCAGRVEIYHEGSWGTICDDSWDLSDAHVVCRQLGCGEAINATGSAHFGEGTGPIWLDEMKCNGKESRIWQCHSHGWGQQNCRHKEDAGVICSEFMSLRLTSEASREACAGRLEVFYNGAWGTVGKSSMSETTVGVVCRQLGCADKGKINPASLDKAMSIPMWVDNVQCPKGPDTLWQCPSSPWEKRLASPSEETWITCDNKIRLQEGPTSCSGRVEIWHGGSWGTVCDDSWDLDDAQVVCQQLGCGPALKAFKEAEFGQGTGPIWLNEVKCKGNESSLWDCPARRWGHSECGHKEDAAVNCTDISVQKTPQKATTGRSSRQSSFIAVGILGVVLLAIFVALFFLTKKRRQRQRLAVSSRGENLVHQIQYREMNSCLNADDLDLMNSSGGHSEPH

SEQ ID NO: 58209 - protein, 1210 aa, Homo sapiens
MAAEEGVASAASAGGSWGTAAMGRVLPMLLVPVPAEAMGQLGSRAQLRTQPEALGSLTAAGSLQVLSLTPGSRGGGRCCLEGPFWHFLWEDSRNSSTPTEKPKLLALGENYELLIYEFNLKDGRCDATILYSCSREALQKLIDDQDISISLLSLRILSFHNNTSLLFINKCVILHIIFPERDAAIRVLNCFTLPLPAQAVDMIIDTQLCRGILFVLSSLGWIYIFDVVDGTYVAHVDLALHKEDMCNEQQQEPAKISSFTSLKVSQDLDVAVIVSSSNSAVALNLNLYFRQHPGHLLCERILEDLPIQGPKGVDEDDPVNSAYNMKLAKFSFQIDRSWKAQLSSLNETIKNSKLEVSCCAPWFQDILHLESPESGNHSTSVQSWAFIPQDIMHGQYNVLQKDHAKTSDPGRSWKIMHISEQEEPIELKCVSVTGFTALFTWEVERMGYTITLWDLETQGMQCFSLGTKCIPVDSSGDQQLCFVLTENGLSLILFGLTQEEFLNRLMIHGSASTVDTLCHLNGWGRCSIPIHALEAGIENRQLDTVNFFLKSKENLFNPSSKSSVSDQFDHLSSHLYLRNVEELIPALDLLCSAIRESYSEPQSKHFSEQLLNLTLSFLNNQIKELFIHTEELDEHLQKGVNILTSYINELRTFMIKFPWKLTDAIDEYDVHENVPKVKESNIWKKLSFEEVIASAILNNKIPEAQTFFRIDSHSAQKLEELIGIGLNLVFDNLKKNNIKEASELLKNMGFDVKGQLLKICFYTTNKNIRDFLVEILKEKNYFSEKEKRTIDFVHQVEKLYLGHFQENMQIQSFPRYWIKEQDFFKHKSVLDSFLKYDCKDEFNKQDHRIVLNWALWWDQLTQESILLPRISPEEYKSYSPEALWRYLTARHDWLNIILWIGEFQTQHSYASLQQNKWPLLTVDVINQNTSCNNYMRNEILDKLARNGVFLASELEDFECFLLRLSRIGGVIQDTLPVQNYKTKEGWDFHSQFILYCLEHSLQHLLYVYLDCYKLSPENCPFLEKKELHEAHPWFEFLVQCRQVASNLTDPKLIFQASLANAQILIPTNQASVSSMLLEGHTLLALATTMYSPGGVSQVVQNEENENCLKKVDPQLLKMALTPYPKLKTALFPQCTPPSVLPSDITIYHLIQSLSPFDPSRLFGWQSANTLAIGDGVLFRPGWSAVARSRSRLAASCASRVHAILLPQPPE

SEQ ID NO: 58210 - protein, 1923 aa, Homo sapiens [sequence omitted]

SEQ ID NO: 58211 - protein, 119 aa, Homo sapiens
MNEVSVIKEGWLHKRGEYIKTWRPRYFLLKSDGSFIGYKERPEAPDQTLPPLNNFSVAECQLMKTERPRPNTFVIRCLQWTTVIERTFHVDSPDEREEWMRAIQMVANSLKQRAPGEDP

SEQ ID NO: 58212 - protein, 301 aa, Homo sapiens
  MOD_RES (1)..(1): Any amino acid
XSKAPENEHFLGAASNPEEPWRNSLRCISEMNRLFSGKADITKPGYDPCNLLVDLDDIRDLSSGFSKYRDFIRYLPIHLSKYILSMLGCMRGFPRHLPSWPSSGVSGSIFFFFPGMLDRHTLNKCASVSQHWAAMAQQVKMDLSAHGFIQNQITFLQGSYTRGIDPNYANKVSIPVPKMVDDGKSMRVKHPKWKLRTKNEYNLWTAYQNEETQQVLMEERNVFCGTYNVRILSDTWDQNRVIHYSGGDLIAVSSNRKIHLLDIIQVKAIPVEFRGHAGSVRALFLCEEENFLLSGSYDLSI

SEQ ID NO: 58213 - protein, 870 aa, Homo sapiens
MANSMNGRNPGGRGGNPRKGRILGIIDAIQDAVGPPKQAAADRRTVEKTWKLMDKVVRLCQNPKLQLKNSPPYILDILPDTYQHLRLILSKYDDNQKLAQLSENEYFKIYIDSLMKKSKRAIRLFKEGKERMYEEQSQDRRNLTKLSLIFSHMLAEIKAIFPNGQFQGDNFRITKADAAEFWRKFFGDKTIVPWKVFRQCLHEVHQISSGLEAMALKSTIDLTCNDYISVFEFDIFTRLFQPWGSILRNWNFLAVTHPGYMAFLTYDEVKARLQKYSTKPGSYIFRLSCTRLGQWAIGYVTGDGNILQTIPHNKPLFQALIDGSREGFYLYPDGRSYNPDLTGLCEPTPHDHIKVTQEQYELYCEMGSTFQLCKICAENDKDVKIEPCGHLMCTSCLTAWQESDGQGCPFCRCEIKGTEPIIVDPFDPRDEGSRCCSIIDPFGMPMLDLDDDDDREESLMMNRLANVRKCTDRQNSPVTSPGSSPLAQRRKPQPDPLQIPHLSLPPVPPRLDLIQKGIVRSPCGSPTGSPKSSPCMVRKQDKPLPAPPPPLRDPPPPPPERPPPIPPDNRLSRHIHHVESVPSRDPPMPLEAWCPRDVFGTNQLVGCRLLGEGSPKPGITASSNVNGRHSRVGSDPVLMRKHRRHDLPLEGAKVFSNGHLGSEEYDVPPRLSPPPPVTTLLPSIKCTGPLANSLSEKTRDPVEEDDDEYKIPSSHPVSLNSQPSHCHNVKPPVRSCDNGHCMLNGTHGPSSEKKSNIPDLSIYLKGDVFDSASDPVPLPPARPPTRDNPKHGSSLNRTPSDYDLLIPPLGEDAFDALPPSLPPPPPPARHSLIEHSKPPGSSSRPSSGQDLFLLPSDAPSLTAKVIPLLI

SEQ ID NO: 58214 - protein, 70 aa, Homo sapiens
MDKDGYISNGELFQVLKMMVGNNLTDWQLQQLVDKTIIILDKDGDGKISFEEFSAVVRDLEIHKKLVLIV

SEQ ID NO: 58215 - protein, 148 aa, Homo sapiens
MTMTANKNSSITHGAGGTKAPRGTLSRKSFEFEDASSLQSLYPSSPTENGTENQPKFGSKSTLEENAYEDIVGDLPKENPYEDVDLKSRRAGRKSQQLSENSLDSLHRMWSPQDRKYNSPPTQLSLKPNSQSLRSGNWSERKSHRLPR

SEQ ID NO: 58216 - protein, 345 aa, Homo sapiens
MRVKDPTKALPEKAKRSKRPTVPHDEDSSDDIAVGLTCQHVSHAISVNHVKRAIAENLWSVCSECLKERRFYDGQLVLTSDIWLCLKCGFQGCGKNSESQHSLKHFKSSRTEPHCIIINLSTWIIWCYECDEKLSTHCNKKVLAQIVDFLQKHASKTQTSAFSRIMKLCEEKCETDEIQKGGKCRNLSVRGITNLGNTCFFNAVMQNLAQTYTLTDLMNEIKESSTKLKIFPSSDSQLDPLVVELSRPGPLTSALFLFLHSMKETEKGPLSPKVLFNQLCQKAPRFKDFQQQDSQELLHYLLDAVRTEETKRIQASILKAFNNPTTKTADDETRKKVKDVTRQNV

SEQ ID NO: 58217 - protein, 11 aa, Homo sapiens
MGNPENIEDAY
